United States Patent Application Publication US 2024/0084332 A1 - sequence listing, part 11

SEQ ID NO: 46745 - protein, 380 aa, unknown
  TnpB Polypeptide
MSIRIIALTLRPDAAQADALARLQERFNAARDYISSVAWDTQEFNKVRLQRLVYGTVRADYGLMAQHAIRAIAVVADSYKADKTRRHTFRRDGAVVLDNPRLYRVEHNRASITTLDGRLKVELGIGGHQRQMLKDATALAEADLICDEKGRWRLKVCAHFPDVPVTTPSDVLGVDLGIIAIASDSDRVLYSGAKVLGLRARYSHMRRKLQKKGTSSARKLRRKRSKREHRFQSDVNHVISKAIVQRAAHTGRAVAIEDLTHLRTRVRLNKSQRRTHSSWAYTDLRAKIAYKAAMRGVVVVAVDPRYTSQTCSRCGHCERANRHSQSSFLCRQCGFAAHADWNAAENIRVRGRADVRLPHIPTAGVSNGAGTSPRSLAVGI

SEQ ID NO: 46746 - protein, 403 aa, Microcoleus sp.
MYQAYKFRIYPTAEQQTYFAGAFGCCRWFWNYSLNLCQQTYKDTGKGLSRSAIQGLLPNLKKEYPWLTNAYSQSLQVVALNLSTAYKNFFDRRGGFPSFKSKHGRQSISYPQNVKVGDSCIKLPIIGEVHCVIHRQLDGTVKTVTISKNTDGKYYASILVDDGLETPEANAEGKAIGLDVGLIDFVVTSDGSKYANPKHLKKHSRNLKRKQKKLSRKQKGSNTRHKAKKIVARVHSKIKRTREDFLHKLSRKIVDKNQVIAVENLNVKGMVRNHCLAKAISDAGWGMFGTMLKYKAEKLSKIYIEIDRFFPSSKTCNNCLHKVSSMSLNVRHWDCPKCHSRNDRDINAAKNIRDEALRIIALGTSASANGRNVSQPGKTSVLLDAVPVEVGSPRHSGTPLDGG

SEQ ID NO: 46747 - protein, 402 aa, unknown
  TnpB Polypeptide
MARVVKRAYKYRFYPTVQQAEELSRTFGCVRKVYNLALAARTEAWYQRAERVSYVQSSAMLTEWKRSDDLAYLGEVSSVPLQQALRHLQGAFAAFWENRARYPRFKSRKRSRSSAEYTRSAFRWRDGQLTLAKMTEPLDIRWSRPLPGGAQPSTVTVSRDSAGRWFVSLLCECPMEPLPPCRAVVGIDAGLTSLVTLSTGEKVPNPRHERADRKRLALAQRRLARKAKGSANRAKARVKLARVHTRITDRRRDFLHKLTTRLVRENQAVVIEDLNVRNMLRNHSLARAISGAAWADLRDMLEYKCDWYGRDLVVIDRWYPSSKTCAVCGHVAASLPLNIREWDCPSCRTRHDRDVNAARNILAAGLAVSACGGGVRPKPVSRGGRSPANQETQRVTAGIPRL

SEQ ID NO: 46748 - protein, 191 aa, Nocardia sp.
VSGESVGVDLGIKDFAVLSTGEKIANPRHMARHERGLRRQQRRLSRMKKDSENRARQRVKVARKHSRVRDARRDFPHKTSSELVRRFDTIAVEDLAPKNMVGNRRLAKAISESSWSEFRAMLEYKAERAGRQVVVVDRWYPSSKTCSACGHLLATLSLGTRHWTCPGCGTRHDRDLNAAKNILVAAGLVET

SEQ ID NO: 46749 - protein, 385 aa, Pyrinomonas sp.
MNMQRTIRLRLGPTSEQASALLQTLRQHTACFNAVAAYGWENREKNGVRLHHATYHGLRERFPSLPAQLVIAARVRATEAIKSVLARKKKGRKASCPNAVLTPIRYDARTYSIKFPQGIVSLSSVAGRLKVPFAADPHAQHTLGRAVGFDSADLIYRKGRFWLHVVVTIPDVEFQPSGDVVGVDMGLSRPAVCSHNRFFGKRRWKEIERRYFRLRRSLQRKGTRSAKRHLRKLAGKVNRFRRDCDHVLSRRIVDSVQPGTVIVVENLVDIRTRTKQRGRESRRRLHSWSFARLRSFLAYKAAAKGCKVVGVDPRHTSQMCSRCGHVHRRNRRSQSRFLCRACGFELNADLNAARNIARKYLASGGMPAAGGPPSTGLACQPAQAG

SEQ ID NO: 46750 - protein, 459 aa, Cupriavidus sp.
MLAKMLRMSSRISLVNTSRRYFVTKTKWTCIRKTQCRPCRMSWFVLIDQEYNTPMQRLQAFKFELMSTGAQQRDMRRFAGACRFVFNKALALQKENYEAGGKFIGYVAMAKRLTEWRNGSETPWLKDSPVHPLQHALKDLERAYKNFFAKRAAFPKFKKRGQRDSFRYPDPKQIKLDQANSRVFLPKLGWLRYRNSREVLGAVRNATVSLSAGKWFVSIQTEREVEQPVPQATSAVGIDMGIARFATMSDGSFLAPLNCFKRHEARLRRAQRAMSRKVKFGNNWKKAKSRIQRIHARIGNARRDYLHKATTAISQNHAMVCIEDLQVRNMSKSAAGSTDAPGKSIRAKSGLNKSILDQGWFEFRRQLDYKVAWNGGWLVAVPPQNTSRTCPACDCVSEDNRKTQANFACVGCGFEENADIVGAINILARGHRVAACGEPVRSGRSAKQEPAEAAVQLTA

SEQ ID NO: 46751 - protein, 407 aa, Burkholderiales sp.
MDYRTVTFNWLPRAKTQWQTYTDTRKEAAHLWNDLVMRHARIRRLNWTWPTKGRWEQWGKRRYPNLHSQSVQQIIGEFCEAVNATRQLRKNGHTEASYPFRLSRYHDVVYTNQAAHMVEGDGHRLLVLPNGKAGRLKVRVPDHVKLPGRLMEIRLSYGKLSLVCELPDKPTFAQTTIGVDLGVNTLLCATDGQVAVVISGREAKASVQWRNKRLASLVSKQSQHERGSRRYKRLQKRKYKLLDKASNRIHDLIHKSTRKVKDAFPQAQVYVGKPFNEAARKIGRVWAQQVSSASNAKLIAQLDYKTAGAIQVSEAYSSQTCPVCGERRKCRRTYVCKHCGYTAPRDVVGAVNILRMGQQGSLQNSAVVPTRIVYIHPTKVSRSYPSSSGGHPASSSDGVSPTRIPHL

SEQ ID NO: 46752 - protein, 184 aa, Lyngbya sp.
MAWVSCRNLDEIKSAVGIDVGLEKFLATSDGQAVKIPQFYRKSQQQLARQQRQLARMEKGSKNYQRQSNKVARLHLHVARQRKEFHYQVAHRLCDQYDLIAFENLNIKGLARTRLAKSILDAAWGSFLNILQAVVVKRGKWAIGDDPRGTSIECSGCGGRVEKTLKELASQREAPHLTLRFSVG

SEQ ID NO: 46753 - protein, 364 aa, unknown
  TnpB Polypeptide
MKRTLKFSLNLANTGKISALNKLTNEYKKAVNFYLQILSSTNKYILSEKEVKSFNSPLSYRYKQCAKRQAVKIWKSWRRNKKKGELPEFDGALILDNRFIKIEKAKASTFNYWVRMATLNKGHPALIPIKSYDYANDYFNNWKLTNGGRLRQENNNWFLLLTFEKETPPKKQKGKIIGIDIGIKKLMATSEKEFYGKEIELLMDKIQKKKQGSKAFKRAIKERDYYVNKTAKELPLDSVKVIVMENIKNIKRNTKKEKRLRKEFRSKFQRWTYPKLFSRINQLCELNGVHFLVIDPAWTSQTCSDCGFVHKLSRNGEIFKCRNCGYTQDADYNASLNILNLGITQQSMVAGSAKVSQMDICPLN

SEQ ID NO: 46754 - protein, 405 aa, unknown
  TnpB Polypeptide
MYKNMKVKKSYKYRLYLNREAKQKIQNTLEICRQTYNELLSIRQATYEVTHEGLTKFDMNNCIRYGVDADISQVHSQVLQNINDRIAKAYANFFRRLKEKRIGKKIKVGYPRFKKKYKSFTYPQSGFTLEGNKLFLSKIGVVNVRIGRTQNRVSGKIKTLTIKREPTGKWFAIFSCIDVPVQRLKPNKRKIGIDVGLEYFATLSNDKRIDNPRFMVHGERRLKKLQRRLSRKKLHGKNWQKAQHDVVLIHEHTANQRYDFHHQLTHNLIAEYGTICYEDLNITGMIRHPYLAKHISDASWGQFTRMLECKAESAGRTARAVDPRGTSQVCSQCGNKVPKTLAQRWHRCPYCGASMHRDLNSAKEILTRGTLGNYACGDGSPVLASQKRLEHSLSAKQEAPQLVGG

SEQ ID NO: 46755 - protein, 132 aa, Anabaena sp.
LHKKTARFLVDNFDVILLPTFETSIMSKKAKRRMRSKSVRQMLTLSHYKFKKFIKHKANEFNKIVIDVNEAYTSKTVSWTGEIISNLGGSKIIKFRMDHRTMNRDLNGARGIYLTALVDTPWLRDNLNLCIC

SEQ ID NO: 46756 - protein, 396 aa, Scytonema sp.
MLVFEFKTYGKAKQFQAIDEAIRTTQFIRNKAIRLWMDGQAKSWVELSRHCALLAKEFPFADKLNSMARQAAAERAWASISRFYDNCKKKISGKKGYPSFQSCCRSVEYKTSGWKLSENRKSIVFSDKNGIGKLKMKGTRDLNFYQPDQIKRVRLIKRADGYYVQFCISADRRETIKPTHQTIGLDVGLESFYTDSLGNKVENPRFYRTGEQKMKRSQRLVSRKVKGSSNRRKARTRLGRVHLKISRQRKDHAVKLARCVITSNDVVVYEDLRVKNIVKNHCLAKSINDAGWYQFRVWLEYFGKVFKRITIAVNPSYTSQECSSCGVIVKKSLSTRTHVCQCGCKLDRDHNAGINILNLGLGTVGHTGTFALDASNASGETTSTLIGAILLEQAVS

SEQ ID NO: 46757 - protein, 310 aa, unknown
  TnpB Polypeptide
MLLSKKTSIKVSREYANLIGHMCYAASKLWNVCNYERQHYKETGMEQYPDWYYQKKAHKEDLWYKQLPSQTAQEVCKLLDKAWKSFYALKRTGGIETPRPPRFKQESIPITYMQMGIVHERDTGRVRLSLPKALKKYMEETYQIHENFLYLENKIFRGMDQIKQLRIYPPEKGNCKIIVVYEVPDQEELPQNGHELSIDLGLHNLMTCYDSGNGKTFILGRKYLALERYFHKEIARVQAQWYGQQSGKGVKHPVTSKHIRKLYKRKHDSVTDYLHEVVQKKAHPNPQQQSCHCSVHPPNPARLPSLPDRY

SEQ ID NO: 46758 - protein, 256 aa, Bacillus sp.
MPIGYYKKQNKSPRFKSKTNPIQSYTTKHTNGNIGMIGNKIKLPKLGLVRFAKSREVEGRIINATIRRNHSGKYFISVLAESNIQVLPKTNRLCGVYLGLKNFAILSDGTVYQNPKFFRTVEKKLAKAQRILSRRQEIALNQNKPLNEAKNYQKQKRKVAIQHEKILNAQMDYLHKVSTEIIKNHDVIGMEDLQVSNMIKDHKLAKAISEVSWYQFQKMLEYKAKWYGKQIVTVSKTFASSQLCSGCGYQIKTLNI

SEQ ID NO: 46759 - protein, 290 aa, Haladaptatus sp.
VKQWFVRQFCPSRSHAWPTREPVEAIAVTVFGVGIVFVLTREIEKQSESSSAETPIGVDIGEASLVTVCHRNERGTPTAPSLWNDEGRKVRQLRETYFTATRRLQQRGSERIAESYGDKLWKQIDDIIHTVTSEAVAYADQFENPVLVLENLTYLRESMDYGAFMNQRLHGWGFAKMHTQLCYKGAEKGIRVEMVNPRNTSKECHVCHEVGYRPRQAMFKCSSDGCWVGEYQADVNAAPTIAYRYLGRESRSREYTDGNDSAEDGEHLTAPQDSQVDADTQQLTLGTYAS

SEQ ID NO: 46760 - protein, 384 aa, Thermoprotei sp.
MSSGDVPDDLVPSAEEPANEAPQEGEAQPAPEAGGGDELTRERLGMVVREILPMVDRAAIMSAPLVQVREPMFVAAGDSYVVDEVNHVIRINIGKRKRPLEIPFAGRLRWYGKQGRMEIHYDGARRAWHAQISVEVGAERTRDGNPARRIVRGERRSIRIAEPRGDEVAGVDLGINILASAVTSSGAWLLYRGSRAKEDFFYLNKEIAEAQSKADIARNAGDSEGFRRQNRRKRRLSRKLVRRIVHLYWNLANHLVRGLWELGVSKIYLGYPHDIAQERGNKLTSNMWRYRELMDAIELKAQEYGIRVYEVLEYDTSNHCAVHGTKVARGPRGVVTCPLGHRLHSDLNGSLNILRRGAGSMPATLRRPLSFLVDHGGVAPVKGA

SEQ ID NO: 46761 - protein, 402 aa, Salmonella sp.
MKRLQAFKFQLRPGGQQEREMRRFAGACRFVFNRALALQNENHEAGNKYIPYPRMASWLVEWKNATETQWLKDAPSQPLQQSLKDLERAYKNFFQKRAAFPRFKKRGQNDAFRYPQGVKLDQENSRIFLPKLGWMRYRNSRQVTGVVKNVTVSQSCGKWYISIQTESEVSTPVHPSASMVGLDAGVAKLATLSDGTVFEPVNSFQKNQKTLARLQRQLSRKVKFSNNWQKQKRKIQRLHSRIAYIRRDYLHKVTTTVSKNHAMIVIEDLKVSNMSKSAAGTVSQPGRNVRAKSGLNRSILDQGWYEMRRQLAYKQLWRGGQVLAVPPAYTSQRCACCGHTAKENRLSQSKFRCQVCGYTANADVNGARNILAAGHAVLACGGMVQSGRPLKQEPTEMIQATA

SEQ ID NO: 46762 - protein, 597 aa, unknown
  TnpB Polypeptide
MASMNDKVCLNSIKLAMLQKHLESHKASCDSGLMKKQSTPSEPLAGNGSLTSHQSPVLKLRKANQVDKPSCTPECLLQNKKMILQGNNSSSKINIQLTNIPDESLKSKISDQGSISRGQDFYEFWDSSKQDLYQHLLWLPKTGSPDLVSSSLNGFVPSTTAKSSFSIIKMEPQKMNSEKTSWPLCKYIVVDGTEKEGTKTKPVSKLVTMKLKLNPNKEQKEKLSKMAGCCRYTYNKAVAIALTKGSTHKSLYRIRNRIVTNMANKKANNFFNDKKWLLECPKSARQNAIAVALANIKACFSNLKANNITHFTAPFKKKKNEVLSGWTLNLDQNDVFKKSDSLYVYKEFLGEMKYYGTKQLHKLLPDKNPAHDPKIQKNQFGEYFLVLSVDTPKRTRNPKIYKGYAAATLDPGVRKSLVSYSPENQESFMMGKGHANVLIELLIKYDNLLSKSYKEHLTAKEKMRMINVRKRVFYLKKEFRDQVASFLAQRYDILLVPKLETTKMARKAERKLRTKVVRSMLTLGHSMIYNRIKEKCSEYGTVFMEVKEHYTSQTCPHCGCLNKCNEVYTCKDCNFTCDRDVVGAANIFLKAVRRISP

SEQ ID NO: 46763 - protein, 415 aa, Lentzea sp.
MVCRRKPGRSRPGEVDAPTSTEHTFDRIVCVKLAVRVKLLPTPVQATALAATLHACNEAAEYASSVAFERNVKSRNELQKLCYHDVKDRFGLSAQPAVRVVKKVVDAYATLRAAIRAGNLGGEKCQRRVKAQSKPISFRRWAAQPFDDRCLSWQLDARTVSIWTTVGRVKDLRFVCSPDQLTTLRAHRQGESDLLFCDGMWFLVATCEVPEPEVFEPVDWIGVDRGITNLATTSDLDNFQGRRLRRYRRWHVRKRAELQARRTKSATRRVKRRARREARHATHINHKIAKDIVAVAERTGRGIALEELHGIRDRVRLHRHQRATQSSWPFHQLEQHITYKARRAGVPVLLVDARYTSQMCPRCKHTSRSNRPTRDRFSCRRCGLAGPADVVAAVNIRDRARRAWVLVNVPLPMPA

SEQ ID NO: 46764 - protein, 646 aa, unknown
  TnpB Polypeptide
MEKEVNPQIDFFKGIKLSLKNVLKHPAINLPKITNAVIKCNKIVIQTLMFMKLFLLDHYEKHSSLPTINGEFINSCMKILCNEKPQGRPPKPEIKALKEKLTAFYQTDFQPLIQNEILDYTHMNTILDYLTIDILTMYGNNIKLHYVEYVERYVNVVWKKSFLVGKIRKMNITKKDKDARINKLCNQLRKIKNDLLNVETVKYKSHTAYHTWIDTQKQVIIPVKTFKKNLYYDIQCSPFDYFQCMIRMMKQVETENQTISNVFPMRSEVIPKHIRLDTTTLVHLLMTKKQGIKSDYLTKGNLKRNEDKIWDFFFRTELKSFHKKYYEFHHMIETDGISCTLLLLRKDLIGKRLPMMKKGANQETYIDEIKDYMPLQNKKIVAIDPGLCDLIYCVDDDNKEANTFRYSQDQRRKETKKKKYSKIQLKLKREQIEGHGTIIELETELSKLNKKSLNLTKFKEYIQKKSEINGLLFSFYEKYIFRKLRLQSYRNTKKSEQKMLNRFKHIFGNENEVIVCFGDFEQKKHMKFKEPTKGKGMRTLFRKAGFQTYLVDEFRTSCRCSKCEVGICSKTMVRENPKPFRDGRILVHGLICCKNGCGYWNRDTNGATNIYKIASNAIHNKERPSYLSRSKSNSTGLDEPVKSKFT

SEQ ID NO: 46765 - protein, 414 aa, Ventosimonas sp.
MQRLQAYQYELIPDGQQKRDMNRFAGSCRFVYNKALALQKERYEADKQTRFSYTMLANRLPAWKRELAWLKCSPAQTLQQSLKDLERAYANFFAKRAEFPRFKRKGVRDSFRYPQPQQIKLDEANSRIFLPKLGWLRYRNSRNIQGVLRNVTVSRRAGKWFVSIQTQREVEQPLRETTSAIGIDLGIARFATLSDGRYLAPLNSFKRHETALRKAQQSLSRKEKFSNNWWKAARKVQRLNARIRNTRHDYLHKATSTISKNHAVVCIEDLQVRNMSKSAAGTSEALGRNVRAKSGLNKAILDQGWFEFRRQLQYKLDWNGGILVAVPPQNTSRTCPVCGHVSKDNRQCQAHFACIECGYENNADMVGAINILRAGHARFACEVNPEVGDQQQEPAEVIQQSDNASLDAVGIPLL

SEQ ID NO: 46766 - protein, 570 aa, unknown
  TnpB Polypeptide
MKTDRLAKAVSRFHRGNLGPASDGISGVFRHVQYVAETAALVSRQTGITDTFEMTSLMYEYVVSSRVSAAVTQAAIKTGVAAMKARPDAEPEFKTPTIKLNNQCWRLNPVAGGYVATGNIGSRERPIRVVVGVPKDVGARVSEHRPGELTITPEKYAISYTKEVEVMPDRDPERGSKHDIIEIISGVDRVAGSPQNVLGIDINATNVTITDNTTTVQIDTSGDVERVLGAKTRQVGALKRDDAKWEEKRGRSITRDREHAKEDTRRVMCGGPKKYNKLKRDSKAAERRRDEKKVDIARQEKESLTAPRKEWRDKIRESKDDPERQNKVKVERDTVTKAAKAETRRLKREADDKCKQKQARLRGEMERCVVPQNAKTGASPLQKTAANHSKMREVVRASRRLENTMHVVSLFVVSWAIATNGIIALENLRNMPRGWMRSNKRFGRGMRRKLYSACMLKMSDMIGYKARWNGAGALYMNPYHTSKLCSICRDMLEGGDYHLRYCRRCNVCVNRDVNASDNVRRTTAAALYGAMVLASPGEAMRSAVKKLCYADLRTDGMTIMADGKVVWVGR

SEQ ID NO: 46767 - protein, 501 aa, unknown
  TnpB Polypeptide
MSSSLQSGVRFQALPVPDMQRVIAQWIGCQRVVYNGKVSEEKVFASQRRLLLAAGELDVKTPLDRCYAQFKDDALTPWLSEVPSQILRNGADRWMDAKQRQLKKLGRAPRIRNRSNFNSVLISSELFRFIDDVDADGVVTKRLQLGTEKNPVGFLDFNAHRDYGLPKQITVRRSGRHWWLSFSYEHAAPKGFVPRDDAELAYELNALDDHDLKVATVGIDRNVKDNCVATSDGRFFALSPTQGERLKRKEIGAKRLQKRMARQVKGSKNRAKTRNRLASKHEYRSNVARDFSHQTSHAVVTDQANDSRAPLMLVLEALKIANMVRRPKAKQDPVTGKWLKNRSAQKAGLNKAILQSCWGKIETQIKYKGHRNSALVLSVPAAYSSQECYSCGHIHPDNRHEQRFVCQHCGHEAHADTNAGNVIAARGIKAVRDQTVIAKSVKRTAYKKRKPKIDSGQELSGVPVDARISHGEAQAMSMQQQTKQEYLIAKSDAPTTAPKGV

SEQ ID NO: 46768 - protein, 446 aa, unknown
  TnpB Polypeptide
LKSFKTFSTVLEENNAEEIIEYFEKTAGNYGFLKRCTLHILRNCPEIDRNNLNKILQERFSVATRTANSAIYEVEEVISSALALIPLNIKKLESRIEGKEKVIEKKKKEMAKIHASQKTNTKRLGKLKLHIYNIHNSINRIKQKIENFERQLNKKKPNICMGTKKLAENDMKAFKLHRDSQINYIGRAREKQGNLNFQLQYVKKGNFFVMKVRRDFGKWKNDRSPERFVYGKCYFKYGSRQLRNAMRDNVSPVTVSVIRRNGRYYLFVTVTVSYENSAIVTRKEHGAIGIDFNKGFVNICETDEKGNIVSIEKMKYPFGKAGTTNAGLADVISKVCSKAIKTGKLIVAEALSFEKKKTKTKKAVTLTEKERMRILHSLPYSRYSQILENITFNRKIELIKINPAYTSGIAEQKFCNRMKLNIHNGAAYVIARKGMGIRDKYLKKTG

SEQ ID NO: 46769 - protein, 563 aa, unknown
  TnpB Polypeptide
MSKPKCKTDKFCITICGEFFPEIYPAVRSPKWSRGNEDPVQTEMRLFCACERWAFTRLFEGASRDTVKKDGQELFGLNSRYVDDARLKAQAVLDSQREVLGSDIEDTQTKRGRARKRLGQTVKKLARAAKRGAPSDVLEKLGLAVKGRNARVASLETKLAELKAHRENGTIPKVVFGGKKLWKRVCKGRASAEEWRVARRSRLCSRGDETKGGNPNVKVFSREGECRLAVTISHLSEQAGEDALGRPKMRRAPRVEGRLWLPEKHRDLVRIWLAMKLPYTVELVRTLEGRCLVHLTFDVGEAPEPDFAKGCLAVDTNPDGVALCNVGASGQPEPWPEGVSIPSPGNVGKYEGEFQIIAYPNGFLHIRVPDLTCASGFRRDYLVGVLAKLVVDAASFLGKPVVLEDLDFGKDRLDTDRQFNRMAGNFPFARMVEAVCRRAGKEGVPSKLVPARHTSTIGSWKYRERHGVPVHCAAALVTGRRAMGFRERVTGELTQVIVRITQDLTCKVNPGTLREGGGMTREVRACLRRLERKLPVHNGLARWQQEAYSSVWHDLKKLALALR

SEQ ID NO: 46770 - protein, 411 aa, unknown
  TnpB Polypeptide
MQNKLYITIEGKIHQPNKRKTDILNKLLINYMKVIREYAREIITHKQLSKEVDKQIRLKYNITMYNSLITTARDKAWIYTKLNRPRKKLPKRCSIRFDDKYKLNKTGNTLTPYWLTLNINEYINNVNLPIIFGDKQKQLIEEYLAGQWQLISVELVKKQQCWYAQFVLKKFVKTTDNPQTIVGINIGIRNLAVAVAIDYNNPYKPLKGQFWSGAEIKQIRGKRAHIRRNLIKKHKYNKIYTIVHKERNQVNHQLHIIANQIIAYVKQFPNPVMVLENLDKLIHRLDNIYLPPLAYNQYREFPYAQLQHMIAYKALMNGIGVKYLTQEDTMYTSMTCHRCGYVTPIDDERMFKCSNCGMIYNKDLNASINIARKIMGFTGWRSCETRKPTNDDKYAKACQHVGSSDNNCFKT

SEQ ID NO: 46771 - protein, 407 aa, Okeania sp.
MQLVEKHIINRQHKFWFECDYLAWQSKNLYNSANYVQRQYFFVTQKYYNSIDIYHQTKNLEAYRYLPTKVSKQIVRRVSEAWKGWLAALKDWSQNPEKYLGKPKIPGYKHKERGRNVVIYPIDAISKPLLAQGIVKLSQTNIKLTTQAKNINQVRIVPKLDHYVIEIVYKVNEPEKFDGKYVAGIDLGLNNLMAITSNHPGIRPLLINGRPLKSLNQYFNKRLAKASSIEAIRQVKQLNSKRDRRIDNYLHTVSRRVIDWCQLNEIGQLIIGNNQGWKQNINIGKKNNQDFTKIPHAKLISLLKYKAQLAGIEVVLTEESYTSIASALSGDDLPVYQGTTEVKAVFSGKRVKRGLYKTSTGRIINADINGSMNIVRKVIPNAFEGIEGLPFIPVVLDLWTKITNVYV

SEQ ID NO: 46772 - protein, 215 aa, Okeania sp.
KYFLSFVVEIQPEVLPKTDNSVGIDLGIKTFATFSDGTKVDAPKPLKKRIKKLRKLSKSLSKKTKGSKRYEKARVRVAKFHAKLKDTRTDFLHKLSTEIIRENQTVVLEDLNVSGMVKNRKLSRAISDLGWRQFRTFLEGKTEKYGRDFRVINRWEPTSQICSNCGFKGGKLDLKVREWECLNCGAKHVLRRECSNKYISRGRAVRDIKRTWRQA

SEQ ID NO: 46773 - protein, 369 aa, Oscillochloris sp.
MRKSFKYRVYLTNGQRRILAQQLEECRWVYNETLAERKRAYEERGESLRLYDTQAMLPVWKLTRPALKLVHSQVLQNISVRVDLAFQAFFRRLKAGDPDPGYPRFKGFGRYDSLTYPQYGNGVRLEGERLILSKIGAVHVVRHRPVEGTPKTVTLTRSRTGTWYACFSCETEAEPLPPTGNVVGVDVGLASFATLSTGDEIANPRFYRRDEADLKRVQQLKDAAKNAQRWNENRRHKNALAHIHERIANRRSDFAHQRSRALVDAYQVMVFEDLAPMEMGRTRGMRKSILDVAWTQFIEMTVAKAEEAGRRVILVNPRNTTKMCASCGEIVPKALSVRVHTCPHCGLVVGRDHNAALNILHRGLQSLRL

SEQ ID NO: 46774 - protein, 362 aa, Clostridium sp.
LLKAYKYRVYPNEEQKIYLAKTFGCTRFIYNQMLSDRIKSYEENKDLDIKKVKYPTPAQYKKEFTWLKEVDSLALANAQMNLDKAYKNFFRDKSVGFPKFKSKKSNRFSYTTNNQKGTVYIENGYIKIPKLKSMIKVKLHRQFNGLIKSCTISKTPSNKYYISILIDTENIKLPKVENKIGVDVGLKEFAVCSNGDRYENPKWLRKTTKRLAKLQKDLSRKKKGSNNRYKARLKVAKLHEKIANQRKDFLHKLSIKLIRENQSIVIEDLKVKNMLQNHNLAKAISEVSWYEFRTMLEYKAEWYGRNIIIAPSNYASSQLCSNCGYKNKEVKNLGLREWICPQCGTHHDRDVNAGINLLKLAI

SEQ ID NO: 46775 - protein, 377 aa, unknown
  TnpB Polypeptide
MKYVKMKGFSFSSSYPLISSLSALRERVKDEVDLLFEGLGDIPTSYLYSTSLVHEAVKACPGCLSFSLSTFLVEAKYVAKLYSRKNMDLKKARELAVQNGVVHPGRLAYFHGRLSADKKKRVLTVSHCERAGSFSFTLPLASYVRKYLRTGYVLPDEVHFNSEHQLILSFPEKAISVPIQPPRMRKVMRMLALDLNSDSMMLLYMGGGTERIVKVAYPPELPDLIGDVLSEDTAKRRRARKGAYLTMKALARTARALNAMVLTEVVDNYPYNRYYYYLRKAVRGEGLPFIEVPSHMNSSICPVHSAYLHGDGKVKVCPAGEKWDRDVVAVFNIASAVGYRASGRKRWPDAEVRMKSAFAVKENASAILSHLMSVPPR

SEQ ID NO: 46776 - protein, 397 aa, Rhodococcus sp.
VQLRYAYRLDPTPAQRRVLARVFGCARVVFNDAIAARRAAHEAGAPFPTDAALSKALTAAKRTPERAWLAEVSAVVLQQALADACAAYRNFFASLDGTRKGRKLGAPRFRSRTDRAQSIRFTKAARFRVLPNGRLRLPGVGDVPVRWSRDLPSAPSSVTVTMDAAGRYHASFVVDVPDQPLPLVPHEVGIDLGLTHFAVLSDGTKVDAPRLARKAQAKLRTAQKELARRQKGSARRERARRKVARCHARVGNTRRDWLHKLSSTIVRENQAVYVEDLAVSGLARTKLARSVHDAGWSTFTAMLEYKARRHGRTFARVDRWFPSTRACSVCGAIGEAKPLHVRSWTCPCGAVHDRDVNAAKNILAAGRADSPTLVEPVSAGTPVPHPAVKREPAGSTA

SEQ ID NO: 46777 - protein, 381 aa, unknown
  TnpB Polypeptide
VNTVQKGVRTRLYPTEEQKVLINKTIGCCRFVHNQTLTDCIQSYEQTRHFPSKNERSANLVPLKEENEFLKEVDARALQQSVRDLNSAADNFFKNRTHFGFPKFKSKHNLKQSYRTTCSGGGASVLDNKHIKLPKLGKVKTKRFDMPNEYKIFSITIERTNTGKYYASICIETEVQPLPKTGKQVGFDLGLKDLLIGSDGTRYERPKFTYAFKDKLAKEQRKLSKMRTKLERAKLDLDKCKNYQKQRHKVAKLHEHISNCAKDFNHKLSIELVRNYDFIAMEDLNVSGLIKNHKLAYSIADVRWSQLVNFIQYKCRWYEKKFVQIDRFYPSSKICSCCGTYHKDIVNSLSVREWTCPDCGTHHDRDVNAAINILNQALSVA

SEQ ID NO: 46778 - protein, 716 aa, unknown
  TnpB Polypeptide
LDGGRLSPHGRDRPPGRGRPGRAARWRGGRDEPDRQRPCGSGRAGRRPAAAPVRRKGPGAHPKSDPHRKAQRARARHRSRQAARRLLHRRPPRAGRRAAADRDQRQLGRDRSCRQGAALRRGRRARGVAGRSARRRGRGASRSGGWLAGATGRGDRAAGAAGPAHRGRRTAAMSDDAPLPAGMVLQAVVLRIYPTKAQAAQMERIFGARRKVWNELLDLQNRRTDRGEKLLGQVALDQEITKLKARPDLHWLNEAPSDALQRVSKNLCAAFKRYFDVRAKIKAGQLPRPKPKKPRKDGRPDFWPTFKPRRADGGYYVSNTRFDVFDSRSRPEPPPADGRPRWVDLTKIGKMPFRSGRAAPMGEQKKGEDGKFHGSFFLPHGGTVRNGTVRLRGGKWYFVMQFTGPPPRRLGQPSVDVIGLDVGTGEDTFVVRSDTRDGETATIRHKARKPFKNAERRLARLQRKHRKRSVRERAEREAAGPDAPKPRRSNRGRHLDRQIARLHARIANVRRDCQHVASARVIAKAEQPAYQDMSVKAMMRSRRRGKAKSTADAGMGELHRQVEYKAEWYRGVEPHKVDRWHRTSGVCPSSGWVTPVKLDEKIRRWFCEPCGVWHDRDEAAAKVIAKAAASSREVGPVRSDPTKRVEILNRGLGDQERGGVGEARSPRAVPEGIGGEPPHPFVPVGARRRRRRGGPAAQPEADLASGLSPPPGPGLP

SEQ ID NO: 46779 - protein, 410 aa, unknown
  TnpB Polypeptide
MKIVLMPTPDQAEALWETLRQSSECFNAVCDYGWQNGEKNGVELHKATYYPLKAEYPQMPCQLLCAARVKATEALKSAFALRKKGGKVSCPKGEQVPIRYDARSYRLLVDKSIASLASVNGRQEVAYRLYNHAAKAFAEATGFDSADLVYRKGQWHLHVVLTMPTPEFVDNAQAVGVDLGLNRPAVTSNRKFLGQRRWREISNRYFRLRRELQSKGTKSAKRRLKALSGKTARFRKDCDHVLSKQVVRSVSPGTTIVVENLTDIRTGTKQKGRQSRRRLHSWSFAQMRSFLTYKAEARGCQVVGVDPRYTSQKCSRCGYTHRGNRKSQSVFLCKECGYELNADLNGSINIARKYLDALGIPECVGLPSESPLSQTTVPSSFVTWPKNHTDGVSGAEYGLETSPQPLGGGI

SEQ ID NO: 46780 - protein, 411 aa, Planktothrix sp.
MIVREAKLLHGTKEQYKALDEAIRTAQFIRNKCVRYWMDNQGVGKAGLYALCKDLAALFPFAKKLNSAARQASAERAYASISSFYSHCRKKEKKKGYPKFKKYCRSVEYKVSGWKLSNDCMNIAFTDGFEIGTLSVYCNNETREDLFRLKINRVRVVKRADGYYAQFCFDTDRKEQVEYTGNVVGLDLGLKYFFKDQNDNAVVYPQFLRKSERKLKKAQKQLSKKFVKGAKPQSNNYHKARKRLGKTHLKIQRQRKDWAIKQARCVVHSNDVIVYEDLKVSNMVKNHHLAKSISDASWYQFTQWLDYYGKIWDKAVVAVSPNYTSQDCSSCGYRVKKSLSTRTHSCANCGIEICRDTNAAINILKKGMGILGIRCQNSTFGQKGSAEQSGKHGEKTASTIDGKPEIASGFL

SEQ ID NO: 46781 - protein, 210 aa, unknown
  TnpB Polypeptide
MSTKTVKRAYRFRFYPTTEQENMLRRTLGCCRKVYNMALDARSTAWTLHREKVGYADTSRMLTAWKKTEEHSYLKEVSSVPLQQSLRHLQAAFKRFFDKTGSYPRFKAKHEGGSATYTVSAFTWDWERRALTLAKMHDPLPVRWSRTLPRKSRPSSVTVSLDAAGRWHVSILVEDEIRQHTKNGTWSASTWDWNTSPSSAMVRKSTIHDT

SEQ ID NO: 46782 - protein, 356 aa, Frankia sp.
MMGGMSTVRYRYRAYPEPGQVQALTRAFGCARVVFNDALRARDEAYAAGERISDTDVQRRVVTLAKQTPERAWLGEVSSVVLVQACQDARRAFRNWFDSLSGRRKGRNVGHPRFRSRKDNRQSIRLTRNGFGVTPRGVRVAKVGDLRLAWSRPLPSVPSSATVIWEADGRYYVSFVVDVDDVPYPAVDAEVGIDLGFDRLVTLSTGEIVANPRHLRSRQRTLARAQRALARKQKGSANRRKAVRRVAVLHRTVRETRRDHHHKLAARLVRDNQAVHVEDLAISGLARTRLARSVHDAGWSMLVGLVEEKAVQAGPDGRPGRPVLPVVAALLGLRAEGRAETAEGPGVDLPGLQHRT

SEQ ID NO: 46783 - protein, 209 aa, unknown
  TnpB Polypeptide
LSDGTVYRLDVNEIKKLEDRIAVYQKQLERNKTSRQKLAKLGKAADFGKKVPSRKRRRLKEKIANLYRRIHNIRKDFMFKTARAIAQKYGWVAIEDLQVRNMTKSARGTIEEPGSNVKAKSGLNRSLQRVAPGAFRRILEWQVFKAGGYVDAVAPQYTSQTCPHCGHIASENRPTQALFCCVKCGHTSNADVVAAGNILRKSRAGSDRL

SEQ ID NO: 46784 - protein, 451 aa, unknown
  TnpB Polypeptide
MEQKKAGSATTAYKLRLYDRHLDWIKNTADLYNQIVEFYYKLLLEQQELLELDNYKLLRQLEILTIGTRQMKAEGKEIEYSLNQFLKNKTTKPPIYFRRAAINQAISLIRSYKTRYSIWEEKVQAGQENFNTNMPKETEIFRTHPVFYKGMYRDFTATSIQLKLFNGKKWIWITYPYTGRDFPKEGKILSPFLKVYRKTAYLHVPVETVVQDIRTVNERMETEKRICAVSFPDHDNLAVCAIMTKEGILVDSLFIHGGNTRESQRREILLKLQKSRKSRKGSGREIKNLKGEVSKENAVLLKKLEQINEYYAHQISRKILNYCIEKEIKVIIVPNYGKSIDFQGKQYLNTNRYRWQGRAIIHNLKYKAFKEGIIVTTIPPYHISDCCSICEEKIRRYNEGHRASKDYYGGRLFICPNGHQGNTALNTAKNIGKYFLRRFQKVSLEEENRND

SEQ ID NO: 46785 - protein, 465 aa, Gammaproteobacteria sp.
MQGIRLQAHPNIKQKKILSQWMGCARLIWNAKCDDEAYMTSYARRYCSIGTYAPIDQTFSQYKSPELTPWLSDCPSQILRNSAVNWYQTYCKFMRGECGKPNRKPFKDGRGSIHLTRELFSFETCEDGNIRLWIGSKRNNLGYLSIKRHRDFIIPNSIYITKKNGQYWVSFSYGEDNVSCIAFNRDNLKYLSTLDEAYLNQYTVGIDRGVVVPVQAGLESFDFSPNQIKNKQKHERYIKRLERQKAKKKKGSSRYQKCKRRIAKRHERIKNIRKDFCHQTSRKIINDKNHKVIILESLNIQNMTKRPEPKPNDKGNWGKNCARAKAGLNKSILDKGWHQFEIFLAYKSQNAGKALFKVDAKYTSQACAACEHRHPNNRRTQSLFICERCGHTDNADRNAALVIKKRAIELIKNTETVLSKKGVLVPFKDKGRGVTSQTQGNDLLSASDDESSKKKRTAVKLSLTA

SEQ ID NO: 46786 - protein, 463 aa, Lechevalieria sp.
VQLRYNFRVYPEPSQRDALAQTFGCARVVFNDALRARRTAHEHGEPYPSDGELSKRVITLAKATPERAWLGEVSAVVLQQSLADLNTAYRNFFASVTGTRKGRKVAPPRLRSRKDNRQAIRFTRNARFTVLGNGRLRLPKIGDLPVRWSRQLPAEPSSVTIIKDAAGRYFASFVVTTKEDETLPAAGSEVGIDLGLTHFAVLSDGTKVTAPKFLRQAARRLARLQKAVSRKVKGSNNRKKAVVKVARAHARVADTRRDWQHKLSTAIIRDNQAVYVEDLCVAGLGRTRLAKSVHDAGWSGFTGMLEYKAARYGRVFARIDRFTPTSQTCSQCGRIDGPKPLSVRSWTCPCGATHDRDINAAKNVLAAGQADNSNDRGAQIRPASMSAPRHEAVTHPHAARSTRSVEGISALQSGEDVKPTKTSTESRPPPPAPRATPPAPSSPRTGQPRSGPPRRTAPPQRAP

SEQ ID NO: 46787 - protein, 402 aa, Escherichia sp.
VKRLQAFKFQLRLGGQQECEMRRFAGACRFVFNRALARQNENHEAGNKYIPYGKMASWLVEWKNATETQWLKDSPSQPLQQSLKDLERAYKNFFRKRAAFPRFKKRGQNDAFRYPQGVKLDQENSRIFLPKLGWMRYRNSRQVTGVVKNVTVSQSCGKWYISIQTESEVSTPVHPSASMVGLDAGVAKLATLSDGTVFEPVNSFQKNQKTLARLQRQLSRKVKFSNNWQKQKRKIQRLHSRIANIRRDYLHKVTTTVSKNHAMIVIEDLKVSNMSKSAAGTVSQPGRNVRAKSGLNRSILDQGWYEMRRQLEYKQLWSGGQVLAVPPAYTSQRCACCGHTAKENRLSQSQFRCQVCGYTANADVNGARNILAAGHAVLACGEMVQSGRSLKQEPTEMIQATA

SEQ ID NO: 46788 - protein, 308 aa, Natrialbaceae sp.
VNFRITAQKRTFGRGTLQASRDQIELLQTALTDNEWRVGTAEVVSRYGRHELHINVTHKTATVRSKDTSTTFVGVDVNEDNVALAAITEAGMEDSIVIEYSEIKQERHEFFTIRKRMQSVGQTAFANTIQDREKRFVHDRFHQVSRRVVEWADRFEDPVFVFEDLKDMRDSIDYGTRMNRRLHSLPFAQLQDFVTYKAAWNSIPSVKIDPEYTSQECIACGHTDRSNREKKRFKCVSCGVQDHADRKAAVLISAKGLQKLDRNVPALNNLPVVRVRSQCNGASEPPVHDPVSTVRGNQTDGDSGSVSS

SEQ ID NO: 46789 - protein, 448 aa, unknown
  TnpB Polypeptide
MKRTNTFAMRPLTETRESLLRDLLDASAALWNEVTYQRLMRYNDEDGFEDEDVWDADTGRFEGRYKGVLGASTAQQVIRKNTEAWRGFFGLKEQYHDESNTSVTDHPEPPGFRGNEDEGRVLKTVIRNDAYTIGWSERSRLEILVGRQLKDRYDHTGRLRLELAGEPNWPDYETQGRLDLWYDETESTFRASQPVSVSDARATPLASEKAALDIGANNLVACTTTTGEQYLYEGRDLFQRFRETTREIARLQSKLEDGRYSSERIRRLYRKRTRRRDHAQEALCRDLLDRLYEGGVGRVYVGGLTDVLETHWSVETNAKTHNFWSFRKFTERLVCTAAEYGIAVEVRSESWTSQECPECGSTDRTTRHQDTLTCPCGFEGHADLTAAETFLERQTSETVRPMARPVRFEWNDHDWSESPRSHRPKEQRTDPSTVHRSGNVASGDSQPA

SEQ ID NO: 46790 - protein, 191 aa, unknown
  TnpB Polypeptide
VRAKEDYFYLEKKISQLQSLADKTKNIGEYEAYEELLKEKKRLFKKLMRRLLHLYRNLASHLMKKLHELGVSTIYLGYPFNISQEKGNKFTVNMWSYRKLIDTIELKAQEYSIKVYEVIEYNTSRYCAYHNVEVKREPRGVINCPLKHKLHSDLNGALNILKKATGKVLSTIKKPLSFIVDHNRVAPVKGV

SEQ ID NO: 46791 - protein, 394 aa, Chlamydiae sp.
MTIVNRTHKIRLDPTCKQETYFRRACGVARFSWNWALARWEEKYKSGEKPNALALKKEFNALKKEKFPWVYEVTKYASQQPFIHLQRGFQGFFAKRTKYPKYKKKGIHDSFYIGGDQVQIVEKHVKIPNLGQVRLMEFLRFEGKITGITISRSASYWFISVSVETSLLPASCENQARVGVDLGIKTLATLSNGQTFPSNNPLKKKLKRLRRLQRRLSRGSKGSKNRNKVKSSIAKLHYKVACSRNDTIHKLTTTLTKNYRHIVIEDLDISTMVNNKRLARSILDGGFYEFRRQIAYKAELRGNKIYIADRWCASSKKCSSCGHYKETLSLSEREYQCTRCGLKIDRDLNAAKCLVQLLNTVSFTEIDACGQDGSVIMLKTLIQPAWLKQELSPV

SEQ ID NO: 46792 - protein, 408 aa, unknown
  TnpB Polypeptide
VFNLTKTIKLRIHVTPEQEILFSRMTEQYRQACNFISQYIFDNGFELNSNAIQKALYKDVRSLFGLKSQLTTSSFKTVTAKYKAVKTQISQNPYRYKDENGDWQCIARTLEWLWKPVFFSRPQADLVRNRDYSFVDDGQILSINTLGKRTKCTFEGEHFAEYLDGTYDLGTAKLVELKGLWYLHIPVTKVVEDFRKENVRHVVGIDRGLRFLTVSYDEQGKTEFISGRKIATKRHKFQEVCRQLQSKGTKSAKRKLKAISGRENRWMSDVNHQISKTLVQKYGNDTLFVLEDLTGVSFEESNLSRTAKQNYDLRSWAFYQLEQFLTYKAHENRSEVLKVSARYTSQRCPKCGTIHKENRNHHKHLYRCQCGYRSNDDRIGAMNIQLLGTMWISGDNHPRYKRITTASE

SEQ ID NO: 46793 - protein, 473 aa, unknown
  TnpB Polypeptide
MFGNSEDNMQHKAYKFRMFPTEEQAEIMWKTIGCARFMYNQILADRSLYHELYEDGVLSKAERNSLQKASTPAFYKGIDEDDAENYYGRQPFDFLKSVDSLALANAQRNAETAYKNFFSHGAGYPNFKSKDTAKWSYKTNAVYHRDKRGNLRSNVFIKDSYLNLPKVGLVKINKHRGVYGKLKNATIVKERSGKWYVSLLFEDSHDKHLPHTSSIVGVDMNLNDIVLSDGTTYEVPNFTKNNSDDLTYRQRIFSRSQKALQARRDNGETLDKYHIKNYQEKREKVAHVHARTAAQRLDFLNKVTTDIVKNHDIICVETLKVKNLMKNRKLAKNIANASWGTFVQLLEQKCQSYGKMLVKIDQFFASTQLCSHCGMKGGPKGYRGLKVREWACSCCNTRHNRDVNAALNIRDEGCRVLVDEVKNNSREEPLVLALGLLDCSSNSQDYDTSEPASVKECCSVSIRDKRTKNYQLV

SEQ ID NO: 46794 - protein, 389 aa, Alteromonas sp.
MKIAFKTQLLANNKQGTHLNMACGVARFAWNWGLDAWNRQYKIYVEAGKPKELKPSGMSLKKQLNAVKKADFPWMYEVTKYASQQPFIFLQRAWNDFLKGKIANGKRAGKPRFKKKGKSFDSFYVGGDQVKVSGRFVKVPNLGWVKMSEPIKYGGHINSMTISRTADKWFVSFSMDVEVSMLPSKSQARCGVDLGISALATLSNGEIRYWDTPKPLQQKLRQLARYQRRLVKKVKRSKGYYRLKTKVARLHKRIADIRRNCLHQLSAYLVKHFSHITIEDLNVKGMMANTRLARHIADVGFFELRRQLTYKSQWYCAELTVADRWFASSKLCSKCGRKRENLTLSDRMFVCECGNKMCRDHNASVNLENYTARSAGIYAAGDNGSVIAA

SEQ ID NO: 46795 - protein, 445 aa, Alteromonas sp.
MKLIRSDRLKINTSAEQRKALSDTLSLYRKYVRDLMVLMNARWRIFQHSTGNDMVKLVEDLIHPTLKRPVVKHTHFHKNYYKFPSYLRRVAIMDAAGQVRSFHTRYNDWLDSGMKHMPPKLTVSTATFPSLYKGQCIKFSQDSKTAFIKVWHSNDWMWQAFRLSGKSRFLGKGKAMSPLLTLKGKQWALSTPVKLNIPLKDNADFSGYVLAVDIGINTSAVCAVVDKFGTVVHRVFLDRADKDRAYHIMQHIRTKARKATRHGNKLDSGFCGKSHRILRNLSHNQAHQISRQIVDLAMQFHCDAIILENLKYWRPKAGQKRSTMKMRFHTWFKSALAERIASKSVQQGIRTLNVYARGTSSYAYDGSGKVRRDKGNYANATFTTGKRYNADLNASYNIATRGIIKLYYPSLHKQQWSRGKPNACPTTGNPLVLSSLWLLQQSKAG

SEQ ID NO: 46796 - protein, 446 aa, unknown
  TnpB Polypeptide
MNKKKKGKITGKKKKGKSKYNKLQEKIIKYSKYITIPQKYTHTKIDLDTDIDVKKSISDLKIIKKNFNLENDILKNDPIKTVRYKLYPNKDQITVLQQWFNGYIDMYNYVINLIKNRFREELKENSKIKLIDLEIDLNISKIKKKATFTKERLREMYSINMHILDYAITDAIAMFKSKVSNLKNGHIRKSKLKYLKKTKNNKIIKIEKYLCRDNSFCVTELGSFMKTKPFINFKETVTTVAIVQYNVKKDKYYLLVRQQIINDLNNDTDHDAKMKSYNEIVQTSNEYLSFIKKNKLNTDTTIVKNLNKKMDLNKRRVNKERTYQNKIKFKNNKLLNKDILSIDPGIRTFLTCLSNNHLLEIGTKLAVSLKRKLKAIDKINDNNSIPKKEKDKLINRTEEKIKNKVNDYHWKIVNYLSSNYSHILIGNFSTKRMGEGDVNKMLKRIG

SEQ ID NO: 46797 - protein, 372 aa, Clostridioides sp.
VAVVEKAYKFRMYPNKKQQELINKTFGCCRFVYNKYLAKRIDVYKNDKETFTYKQCSSDLTNLKKELKWLKEPDKFSLQNALKDLDNAYKKFFKEKAGFPKFKSKKINRFSYKTNFTNGNIMYCGQYIKLPKLGMVKVRDKQVPQGRILNATISKEPSGRYYVSLCCINVDIEVFENTNNQIGLDLGIKEFCISSCGDFIENPKYLKKSLNKLAKLQRELSRKTIGSLNRNKARLKVARLQEHIANQRNDFLQKLSTKLIKENDIICIEDLQVKNMIRNRKLSRSISDVSWSEFVRQLKYKANWHGRQIVKVGKFFASSQICNKCGYKNEEMKDLNIREWICPSCNETHDRDINASINILKEGLRLITIQNK

SEQ ID NO: 46798 - protein, 493 aa, unknown
  TnpB Polypeptide
MKVLMVDDEELTREGLRMSIPWESLGISQIFMAEDGEEGLRMALELKPDIILADVRMPRMDGITMAFEIRKTLRQCRFIFISGYCDKEYLKSAIQLSAVNYIEKPIEPSEVVDALKKSILQLEEEKRRQAMEEEYRAHFSGVLEEIPEEDLVPVSWQSSMHMADKIEHYKKEKKMLRNTPASYKKEYPWLKEVDSLALANVQMHLESAFHKFFREPSAGFPRFKSKKSSRKSYTTNVVNGNIFLEGKYLKLPKMTAVRMKLHRPISEKWKLKSVTVSREPSGKYFASLLFCCENQTAEKRPAEKFIGIDFAMQGMCVFSTGKRAEYPMFYRNTEKKLAREQRKLSRCQKGSQNYKKQKKRVALCHEKIRNQRKDFQHKLSASLAESFDAVCVEDLNLKGMAGGLHLGKGVHDNGYGLFLSMLEYKLEERGKYLIKVDRYFASSKICSVCGKKKEELSLSDRIYYCECGNRMDRDVNAAVNIMNEGKRIFAECA

SEQ ID NO: 46799 - protein, 337 aa, Thermoanaerobacter sp.
MALFLRINVGERKYVYAKIQAGWKKNKNREEILQEIAKSNMPYSVELKLKNGNIYAYFAIEEEYPEIKITKEKGAIGIDINAYPDNISWAETNEKGNLISYGNMSMPELASGDKDKREYFRWQYAHEIVKIAKEKGKAIVIEELEIKDKGKRGDFSGRKSRRIRHNFSYKSLLSKIKTLARRERIEVTEVNPSYTSIIGMLKYAPQYMITKDIAAAYVIARRGLGLQEKIPDNYIKFLNTLTEKELEELKEHIKNTVKNRHLKKKHLREIDKAIEFLQSLESESERVLKPLDGTSFSTYDFWQVLKVAVVTPFSPEKVPRDFSTLKGLLIQGKWGDP

SEQ ID NO: 46800 - protein, 440 aa, unknown
  TnpB Polypeptide
MKITRTEKWTLRPDTADRQTLHDTVALYQRYVRALSTVCMAHWPTIGVLAGNDVIKAVEGLIHPTAKRPSVRYRYFQNRFYKFPSYLRRSAIMDAVGQVRSFLSRYDHWQTANDRRHKNERPPEFGVSSTFPSLYKGQCIKYTEDLSSAEIKVYKDSDWVWIRIPIKKTGKRATDLDQKRVSPQLVVTAKKVLLAVPHEQQVTLGPKNAEVVCAVDLGVNTSITASIVRSDGTVLGRRFIRRPSDIDRLHKRLSMIRTAATKTKRMSRGFAAKRYRKGFNIAKDSAHQMTRELVEFARSHGATTMVFEHLKGWRPKGPCRGLRRKFHTWLHRRIVEFTEWKWREYAGRMAFVVARGTSKYAFDGSGEVTRSVNGNYSVCRFKNGKVYNCDLNATYNIAAKFFLRGREADQLEPGRSPGSKPRIPATLSLLWTAPAIQSAA

SEQ ID NO: 46801 - protein, 419 aa, Natronorubrum sp.
MEVRRTAPVKLVVPDERRDDLHESARQFLHCANRAAEFCWSDDSYTECVTANTTARDALYDKLRDETDLTANLVQEAIRRAVQAVKGCAERWKQGNRVSQPEFTSWSMLYDKRSATFYRNKVSLSTVNGRLECEFELPSDSPTPYEQYVLSDEFEFRASTLQYDPVDDEFYFHITTRRYDSEGDGGENGEVSEDSEHQTVLGIDLGVNSLAVSSTGRFWHGDDYDHWCREFEKRRGEMQQCGTQAAHNALLRLGKREEAWRKQYIHTVANEIVSEAVEHECDVIVFEDLTDIRKRLPHAKWHHFWAFRRLVEYVEYKAPEQGVSVEQVEPNYTSQRCSRTDCGFTHEDNRHGEHFECQKCGYKVNADYNAAKNVGLRCARKQKHRLRSSPTSGSGDALVDVRLNGGTVNGESHQPIGGD

SEQ ID NO: 46802 - protein, 425 aa, Natronorubrum sp.
MKYSPRYRLFPNEEQQEAMDWQRNTARQLYNHALREFNKIPEDAGRLRQRVWMVRDTIPELKDWWTDLKQVYSTVLQKAVERIRDNINNLGKLKANGYTVGSLNWKAPREYRSFTYRQSGFELDKKSGPDGHALLTLKKLKGETREILVRFHRDLPDHDAIKEVTLKKDATGAWFASFTIDTDAPAKPEPEDIDPEDTVGLDLGVLNFIHDSDGRSVNRLNLSRDRDRLEREQRSLSRKQEGSNNWEKQRCRVAAIHARMSNKKRDFKHKLAHFYTTEYDAVFVEDLDVKGMLESRQNARNKAEVGWRDFLTILEHHGDKNGCHVVEVEARGTTKECAECGVETAKPLWVREHSCPACGFEIDRDWNAAFNVQQRGWTRLGVVHSESTPAETATAVDTLEVSASRVVETGSPCLKEAAQATDRQG

SEQ ID NO: 46803 - protein, 430 aa, unknown
  TnpB Polypeptide
MSKEKNAQIKATLLATKERRKTQKCFVFSTKIDYRKLNKSQKEQLQKLFVEAKWVYNDIINHLESDKLSSWSDKKKSVMVKQKDGSFVEKTLFCFKSSMMQGMKSLVGDSLNSLAEKKKKGYKVGKLKFKFSCNSIPLKQFGVTHRVKSLNKVGIQGIKGDMRVHGLDQFADNPNAEIANAKLLKKPDGYYIHWTVYIAKNKLPVIKRNDEVIGIDFGCGTSFTFSDGHKEDFKLKEPECLKKLQKSLARKKRCEKDRKHSNQYKSVQKKLDRAYQHLANIKNDKANKLCHKLLSYKQVVIQDENLHGWHKGGHGKAVQYSILGRVKKKLKTMDNVTVLSRYAPTTKLCFHCGEVHNEIKVWDRVFRCDCGVCCDRDIHAAQCMVWMYLNDFSIPTEHRNTMRTENKTSGKYSSKKNTKSCLLKFEAHRI

SEQ ID NO: 46804 - protein, 396 aa, Microbispora sp.
LEFHANKHAILNRSGGMMCGMAQTVKRAYKYRFYPTPEQACELARTFGCVRLVYNKALEERTRAYALEGRRVSYTDSSAMLTAWKRSEEPAFLAEVSCVPLQQALRHLQAAFANFFAKRARYPVFKSRKRSRASAEYTRSAFRWRDGRLTLAKMDGPLDIVWSRPLPQGAEPSTVTVSRDPAGRWFVSLLVEETISPLAPTGDVVGVDAGITSLVTLSRPIGDLTDENGKVANPGHERAGRRRLVKAQRSLARKAAGSANRARARLKVARAHARISDRRRDFLHKLSTRLVRDNQVVVIEDLAVRAMVKNHSLARAISDAGWWQLRSMLEYKAGWYGRELVVIDRWFPSSKLCSACGALQKSMPLNVRVWECACGAVHDRDVNAARNILAAGLAER

SEQ ID NO: 46805 - protein, 549 aa, unknown
  TnpB Polypeptide
MIFIFSKISHIYSERKPTERRKFYMPKARRRKDSEFQTSVTKSVFLYGTPNVQKRSALKEMQRLFIKLVNHNIRLLDQETSIFFQIVKNDKKDSQIRRLEKTNRPKGINSAFCQNAFDVAVTHLSNRLDNIRLDMIADGFGIFAKSKVLFAMYIMGRSRTDMIQTMNKIGQKFHKECAKKLSAMTDAEFYDIRVRFLDAYAARSIEYKVPELRNVSIPLDSRLMRLEKSTDTVMPYVITISDPTGGKRIAVPIDTSRHSLHKIEANRLGGTVMLQMRGPVLRIGWSYTVKREKPAVDTYIGVDTGITDALYASDGRHVGSMKRVIDFYHEEVETAFAELSDLRNKKRKICHYLHSHDLSEDVRRSLIQKVDQLEHMMQTMEVPYRKKRHYYQMLDQEIKKAVSSYLNDLAKNTMTVLEKLDIREFNKSKKANGKLSMFARGKLQQKLMITLNWKGYDFMEVVPDFTSQVCPVCGNLDADNRKDKAFKCTCCGHEDDADHNASVNIKERANDKEILAVSKKYEYQHKKLQEALRQIYADRCSAYKKAASI

SEQ ID NO: 46806 - protein, 377 aa, unknown
  TnpB Polypeptide
MNKTFEYKLKPNKEQTKYLDNLLWETKCLYNNALQELIEHYKTTGKYLNRFTQDKNYNKQTYPNIPAQIVDTTLDRLHRSFANFFRGLKQGKKIGFPRFQSYKRWSSFAFRDYNQGKIKDGKWYISKTNGIKVILHRDFSGTPKLTRLVKRADGYYVQIVCETEIIKVKKIDKQIGLDLGLKYFVADSEGNKVEAPKFFRKEQYKLARNQRRLSKKQKGGKNRNKARQVVAKNHLKIQRQRKDWLHKLSYKYANENDVVVVENLNVAGMVKNHHLALSISDASWNTFINMLEYKLQTLSRVLVRVNPAYTSQKCSNCGAIVKKSLSQRTHYCPECLFTDCRDVNAAKNIKKLASVRGFGEDTAIADLMTQEATRSLA

SEQ ID NO: 46807 - protein, 367 aa, unknown
  TnpB Polypeptide
MKIIEYKLFPNKNCLAKLEETLEQARLLYNQALEERISSWKDKKKSINYYDQAKTFKGKYPISAMLTQCVLRRLDISYKRFFNKNSSFPRFKAKGRFRSIDIRQWGLNASLKDGKLRYDKMLIRTSNHRELEGKPKTGRLVKRADGWYLQVACEIENKPLRGEIKSVIGLDMGLKYLVADSEGNTIQAPKFFRKTEAKLAKQQKILSKRKKGSYGRRKARELIAKTHLKIERQRKDFLHKISRKYADYDLIAVEKLNIKGMLKNHHLAKSITDASWNTLLQMIRYKAENAGSYFVEVNPHYTSQKCSGCGAIVQKSLSIRTHICPECGLVMDRDKNASINILRAGIALGGEMGLPISLKPEATGSLA

SEQ ID NO: 46808 - protein, 381 aa, unknown
  TnpB Polypeptide
MGDMVIRAYKTELDPTNAQRTTMERFAWVRMAVFNTGLREWQRLHDAGEKTKANDIKTRFVADKNAGLFVWAQGAPSALVEAAFRDLDAAFQNFFRRDKAGEKPGYPKLKRWPQGFSLRNTRVERDRVRLTHIGWVRLKEAGYIPETATGKAFGTYATLSKRAGRWFISVLVKEEGPQLADPHPTVIGVDFGVKALATCSNGKVFDNPSPLRDAQRKLGRLGRELARRRKGGKNWNKTKASLQKQHKRVADLRSKTLHEVSHYLTYETQPAVLVIEDLNVRGMLSNHSLAQAITDVGFGELRRQIEYKAKWLGIEVVLADRWFPSSKTCHRCGAVRADLTLGDRLFVCNDCGSTLDRDLNAALNLAALGRNRQAGGDCLGS

SEQ ID NO: 46809 - protein, 387 aa, Nocardia sp.
VQLRYNFRVYPTPGQRVSLARAFGCARVVYNDALAARREAHRNRSSYLPDSELSTRLTEAKKTPERAWLAEVSSVVLQQALADLNTAYRNFFSSITGKRKGAKVAAPRLRSRKDNRQAIRFTKNARFAVTSGGKLRLPKIGDIPVRWSRELPSEPSSVTIVKDAAGRYFASFVVRTEDDPLPPSDCEVGIDLGLTTFAVLSDGKTIASPRFLRQVERKLRKAQKALSRKEKGSANRVKARVKVARAHAKVADTRKDWAHKHSTQIIRDNQAVFVEDLSVKGLARTRLAKSVHDAGWGTFTRILEEKAQRYGRVFAEVDRFFPSTRMCSVCGAIGENKPLHVREWTCRCGTTHDRDLNAAKNILAAGRADSRNDCGAEVSPELVPALG

SEQ ID NO: 46810 - protein, 398 aa, Erysipelotrichaceae sp.
MLYKEDVNNPVKITKGFRYRIYPTDLQKQMMEQTFGNVRFVYNHFLNMRSEEWKNDHKSIGYNNTSSLLTGLKKEERYSWLCLSDSMALQESLRDLDRAFQNFFRKNNDYPKFHSKHDIQSYRTRNQSNNIRIEDNKLVLPKLGKVKIKLSRKIKGRILNATVSRTKTSKYFVSLCCEYEEDIKPNGGGAIGIDVGIKELYTDSNGTVVENPKYLAKYSRKLLKEQRKLSRMIEMNIDHYTPNRVPVYKKPLSECRNIQKQRIKLARIHEKICNSRLDFLHKVSTTLVKENQIIAVEDLNVKGMVRNHKLAKSINDVSWSDFYRLLEYKAFEYGSAFIRVPRFYASSQICHVCGYTNIFVKDLKIRKWTCPVCGSHHDRDHNAAINILNEALKMLASA

SEQ ID NO: 46811 - protein, 311 aa, Actinopolymorpha sp.
MARFEIPDGWTAQAYRFALDPTPAQERALWSHAGAARFAHNHMLGLVKAVLAQRAAERTYGITEADLTPALGWSLPALRRAWNARKATVAPWWAENSKEAYNTGLDSLARSLEAWSKSRNGQRAGQVVGFPRFHSRRDRASVRFTTGTIRVENDRHHVTLPRLGTVRVHESTRKLARRVEAGTARILSATVTRDSGGRWHVAFQTLVKRSVVRPAHAPVRHPVVGVDVGVKADSLLVVATPEGTEVERVPAPKSLTAAQARLRVLQRKAARQQGPYDTTAKRKQQPSNRWQRTQTRIGRTHARAAKPGGTY

SEQ ID NO: 46812 - protein, 405 aa, unknown
  TnpB Polypeptide
MITYKYRLYPNRDQIDLMWSHSSKLNWVYNYFLDQRIQEYKTNHKSISRKKQQSELVDLKNKYPDLKEIHSQVLQQVPLRLYKSYKVFFKRCKLGQGPPKFRSCKKFFTLVYPQSGFSIQDNILHTKVYGDIKFYKSRPIEGNIQQIQITTYKNKWYLCVLTDHIRPSSDTDLNKMIGIDLGITNLVATNEGEIIKNKNHAKYFDKQINKLKSRRDKNCKKYSRKSKELTKTINRLYDMKNNKTRDFLHKVSKNLSSRFGTIFIEDLNLKTMSESDITGLNRELRNSQLSRFAGMVIYKTKRTLKLNPFNTSKTCSQCGHEYNMPLHIRVFRCLNCGLVIDRDVNSSKNIYCLGRAVLSSNKELEMIECTGFSTMTIREYWSNQPALQTKDDRRDPKESPVFRQE

SEQ ID NO: 46813 - protein, 369 aa, unknown
  TnpB Polypeptide
MEILKAFKFRIYPTNSQHAELAKQFGAARFVYNHYRAVREGFYIDCGSGLNYNDCANDLTQQLKVEFPWLKEADSQALQQALKDLDRAYVNFFEGRADYPNFHSKHDKQSIRYPQRFKVNDKRVYLPKVGWVKCVSGAPRARTIEGVMKNCTVTKTKSGRYFVSIQVEMEIEDPTPKMEAVGIDLGLTTFAALSTGEKIEKPKHLYRSQRRLQIRQRRLSRKVKGSKHRNHARLPVAVLHERVANQRKDFQHKLSRHLVDNYGSISFESLNVAGMVKNHNLAKAISDASWSQFVGFCEYKQAWANGQVLRVDRSGTLWVPSSKLCSDCGEKHKNLTLNIRQWVCINCGVIHDRDTNAAVNILRFGKTSA

SEQ ID NO: 46814 - protein, 400 aa, Pasteurellaceae sp.
MQIKKAFKFELMPTGGHIRKMRQFCGCSRFVFNKALAYQNEQYEADKSFKFGYTKIANLLPEWKAELPWLKDCHSQVLQQSLKDLEAAFRHFFAKRADFPKFKKKGIKDSFRFPQGFKLEQGNNRIFLPKIGWVRYRNSQQVIGAVKNVTVSQKCGKWYVSIQTEFEQEVLPPSGGEVGIDMGIARFATLSNGRYFEAKNSLRAAQQKLAKLQRQMSHKTKFSNNWKKVKTKVSKLHSHIANARRNYLHKISTEISKNHTIVYVEDLKVSNMSKSAKGNNEQYGRMVKQKSGLNRSILDQSWFEFRRQLDYKLLWHGGYLIAVDPRNTSRTCPICGHISKENRQSQTQFECMECGFAANADEVGAINILRAGRARLACEVSGAVRPPAAGTHRSELAEHR

SEQ ID NO: 46815 - protein, 421 aa, Nostoc sp.
MRLVERHIIKQNNKWFREIDQMSFLSKNLFNCAVYLCRQAFFKNQPIPTLNQIYHSLKNSDDYKALPSKVAQLVFKQVDKCFKSYQKTKKEYDLNPGKFLGEPKLPKYKHSSKGRNILAFNNQAFSKKALKKGLISPSGLSVFIKTKLAEIEEIRIIPKNNVYIIEAVYEQEEPPVVTNNRIAAIDIGLNNLATVSSNCLDFKTFIVCGKAIKSCNQFYNKVKASLQSQLPKNQKAQSQSAGRQRSELCKRTSRKIEALTLKRNNKVDYYLHTASRFIVNHLASQNITHLIIGKNENWKQSINLGSKNNQNFTSIPHARFIQQIEYKAQLVGIKVQISEESYTSKCSFLDLEPIKKHEQYLGRRIKRGLFRSNSGKIYSADLNGSLNILRKVVGDSIFDRNSIERLVVSPVRLTPYQARNI

SEQ ID NO: 46816 - protein, 547 aa, unknown
  TnpB Polypeptide
VSGQVEQKSDDKKKRRNKNHLFTKTYDTKQTLAPKQIQCLDAIAHFYNHHKRKYNKVGVYNEKTRKQYVQNARFEDSNGIHQSMSYRFFRGIMQDVVGLHQSIQSNRENYLIDKLDRLESVNEEIIKLKQKYENLIKNQAKVFNHEFKNDKDKLLKVIRAKYKKRQYLLNAIENLRDVTNYNLCFGTKKLMKQRHRIKTKKALTLWKKEWHLKRNGQFLMVGSWDETNGNSNCQVIYHNKTKQFSLRLRIPYELESSYGEYLTFENIAIPNYLKAPLIHELNKHQAKSSNKNALSFRFIKLNDSQYRIIFTLNQDNVDIVTHSNKGVIGVDVNADHFAVVEINKIGAIQNSFSIPYHLEGKTKHQRKAIIEDGLKQIRDYALKRKKDVVIEKLNFKQKRQQLYKNVNKKYARMLSAFAYQQIQQGLMQLQYEYGIKVHPVPAAYTSLLGQTVAADKSLTIHQAAAWFIAKRFYKIKELIKQKFKIYHRSKPFMVYIPREIYREHNLSKLGRFLSDVRNYIGGSLSLKKRQSLKDFVVPFNDTTAISS

SEQ ID NO: 46817 - protein, 410 aa, unknown
  TnpB Polypeptide
MAELEYHYGVKMRIYPSNKQKEIIKVNSNIGRTIYNKLVGIDREIYRLKQIGVSLKIVQDRISELTKRKNIRELSNHYQYMEDKNVDSLAKANAKMSYLKAWKMFREVHKAGTPKFHKKNYSEKYQTTCQYSKKSKMNVYSGSVRILDDKHIKVPKLGTLRVKGYNKEIFHDKKDMRIGTATISKDPCNRYFISLQLGSDIPFVAQKIKTDSDVGIDLNTDNFLTTSDNIVIDNPRFYRKMKKRLSKEQRTLSRRMNRAKKEHRKLRESKNYQKQRLLVSRLNSRIRNQRNNFLNVLSTKLINNHDLIVAEELRSSNMLKNHALAMSISDVGWRTFLNMLAYKAELYDRKFLTVDPKNTTQACSNCGHIMSGADKLTLADRQWTCPVCHKYHIRDHNAAINILNKGLERQ

SEQ ID NO: 46818 - protein, 346 aa, Nitrososphaera sp.
LSARKKSLKRGVRTKSPYTLKPQLISCYGFKVSNNTLGVPVAKRECFEIPLNKYTQHVLSSDPDLNIRSFTLTPTTVSISYSKAVGETNCTSAAGIDRNLRNVTYGNFKEIVQYDLSQAAEIAESTNDVVKSFRRNDNRIRRKLVSKYGKRRKNRINHILHNVSKNIMDRSLVKEQAIVFENITNIRRMYRRGNGQGRDYRRRLNAWPFGEIKRQIEYKAKWLGIPVIQLSVKDTQHTSTLCPQCGERLQGAKRDDKLHRRQLWCLSCKRWLDRDVVAAMNQSLKGWMMFAHSKGVAHEAMRGNLEEYLPVILRVDATKPSQLTVKAVANCPNGLDRTKIKSGLFP

SEQ ID NO: 46819 - protein, 375 aa, Nitrososphaera sp.
METFRQMVNDCVRIALQNNASTMKKLSKLCYPLLANYDVVSYYKLCAISHAAGILANRKKSIKRGLQPRQPYATRPLLISCYGFKIENDVLKVPLGDRQYFDIPLNAYVKNILTDPSLQVRSFTLTTSNTVSICYSKEVAEIECTGVEGVDRNLRNLTVGNNKNVMQYDLSKAVGIAENTRSIVKSFKRNDVRIRKKITSKYGRRRKSRIGQLLHHVSKAVVQEAKQNKVAIAFEDIRHIRRLYQRGNGQGKNYRSKMNGWSLAEIKRLITYKAEWEGVRIFQLSIKETRGTSQLCPRCRKKITQVDRRQLYCAECKKWMDRDLVAAMNLSIRGLARFASSQGLAGEAMRGNVEKEPLILRVDASKLTFRRKPTS

SEQ ID NO: 46820 - protein, 402 aa, Nitrososphaera sp.
LQLDLRSFKFRLYPNKDQEKRFANVLEVNRIIYNYFVLNSFRSRNDMNYALTELKEQQPILCNYHSKMLQMVSTKVEGAWKALAKLKKRGHQSGKGKLLLLKQCNSFTYNQTGYSIDGNKLYLSKIGRIRIVLHRQPINVKQVTVCRQNGRWYAVVACENSKPIFKFIDPRRSVGIDVGITKFAHDSDNYATENPLFLTNMLKPLRRAQRRVSRRKKGSHNREKAKSWIARLHERIANKRLNFLHKVSTRYATRYDLIFLERLRTRNMVKNHRLARRILDSGWGTFTKMLQYKSKMVMEVEPHNTSVNCSGCGNPVPKTLMMRTHRCEMCCLVIDRDYNASLNILQRGLALLNLPVGRREVTPVEIAPLLVNGDGHARSMKQEASSLCVGSSRTKCSFSMSV

SEQ ID NO: 46821 - protein, 386 aa, Nitrososphaera sp.
MLAMMETFRQMVNDCLRIGLENNASTLKRLSKLCYPALAKYDIISYYKLNAISKAAGILSNRKQSIKRGYPTRTPYMKRALLISSYGFKVENGVLQVPLGDRRYFDILLNSYVKCILSDAAVIVRSFTLAANNTVSIAYSKEVTEIGCNTTAGVDRNLANVAYGNHDRVVMFDVSQAVRVAENTCSITRSFRRNDVRIRKMVTDKYGRRRRNRVSQLLHKVSKAIVQDAKERKAAIVFEDITFIRKLYQKGNYQGREYRGRMNSWSFFELKRQVEYKAAWEGVKVITLTKSKTRGTSQLCPRCGKRVQEAERDNPFYRRQLWCQDCRKWMDRDVVAAMNIARRGADVFQRPEGLAGEAMVQELGSVTPVILKVDASKLTLSREPIS

SEQ ID NO: 46822 - protein, 421 aa, unknown
  TnpB Polypeptide
MGRRLTETQCKVQIIRLSLNKTQIKQCYELLEESGKCYSEMILAHVESRKDKWLSEGELKAKFKGAFKLHSQTIQSVAEKINSNLETARTNRDKEFKSTGIIKTEYASETKRLFSVTWKKLGIKIQNGKIHLSNGLKNTPLIVSLPLKYSNYNVNIAELVLDAEVFYLHLTIDTGVVPKNPLERLKTAGVDMGEIHIAYCTSDDGNTIGISGRQLRSVKQLRNKRFASLDEQLSKCKNGSKRHKKLSRLKKKSSSKLKRQQRDILHKASRQLVNFCEKNKVANIAIGDVRDISDGVDLGKKTNQKISQWTHGQFSNYVKQKAKTIGINTKLIDESYSSKTCSVCGHVKKNSVQGRNYSCKECQSKIHRDANGSANICSKARYGEYSKVQVNQIKYLKPVKIGFSRPSEARQVADKMLTLVN

SEQ ID NO: 46823 - protein, 385 aa, unknown
  TnpB Polypeptide
MVYHSHLPEQIKIDLFTINKYGWWFRKELRKIDIDTLKLARKIFKHVLSKHRKPNFKNISMHLDQKVSLISGKVQDKATSFDYWVRLSTLYRNHPIYIPVKTNHYFENIEGKLKHFCQIGLKGDRDIALSFIKDVPDEKDSYTPAINKVSLDTGLKMLFATDKGDLIGKCFYGTLQKFDTQITKIVSMRQRQGLKVRCARYDKAVNRLRAYLKNEINRCLNRLIRLYQPAEIVIERLDFRKPNLSKRLNRLVTNFGKSIIKAKLQSLSEAYGIQITEINPAYTSQECSVCGYVDKNNRQEQEAIKCRFCNTSRHADVNGARNHLVRSSDEVINIYKNKKAVLRVLVDRFLYKLSDTERKYAMPHSKAITLLSKNPYYWVGLSGTG

SEQ ID NO: 46824 - protein, 365 aa, Mycobacterium sp.
MNLAVWAERNGVAWVIAYRWFRAGLLPVPAQRVGRLILVNDPAVEESGRGRTLVYARVSSADQRSDLDRRVARVTAWATSQHLSVDKVVAEGGWALNGHRRKFFALLGDPVVTRIVVEHRDRFCWFGSEYVEAALVAQGRELVVVDLAEVDDDLVGDMTEILTSMCARLYGEQPGSRVGVDVGVRRLATVANEAGAVLEEVPNPRPLDAALKELRYASRARSRCTKGSRRYRERTTEISRLHRRVNDVRTHHLHVLTTRLAQTHGHIVVEGLDAAGMLRQKGLPGARARRRGLSDSALGTPRRHLSYKTGWYGSALVVADRWFPSLSVEPTVRPGLARLVAVKRGREAAAWLPNNPETGCKSRDH

SEQ ID NO: 46825 - protein, 382 aa, Escherichia sp.
MRRFAGACRFVFNRALARQNENHEAGNKYIPYGKMASWLVEWKNATETQWLKDSPSQPLQQSLKDLERAYKNFFRKRAAFPRFKKRGQNDAFRYPQGVKLDQENSRIFLPKLGWMRYRNSRQVTGVVKNVTVSQSCGKWYISIQTESEVSTPVHPSASMIGLDAGVAKLATLSDGTVFEPVNSFQKNQKTLARLQRQLSRKVKFSNNWQKQKRKIQRLHSCIANIRRDYLHKVTTTVSKNHAMIVIEDLKVSNMSKSAAGTVSLPGRNVRAKSGLNRSILDQGWYEIRRQLAYKQLWRGGQVLAVPPAYTSQRCVCCGHTAKENRLSQSKFRCQVCGYTANADVNGARNILAAGHAVLACGEMVQSGRSLKQEPTEMIQATA

SEQ ID NO: 46826 - protein, 449 aa, unknown
  TnpB Polypeptide
MQVCENFHLITLRVARMPTSFMSWMNCDHNLFKLIKQAIERFRDMKRAILLQTLATKSKDNRLKDFMDKAIVEYNRMLSEKWNFDTSDWCDSFMEFHNKHLSVSKENTSFNVQIRCSLMRDAWKKKSDKVNGLTVKFNVPRNCKTFNTKSNFFVRLGMYPKDRIAIPIKQNRNYQRFQSLINDNWTCKTFGLTKDLQIVAYLSKEKEIHQRKNVLGIDVNAKHFAISVISPEGKVLYQTYFGKQIWVKRKKIMERRAKLQSLNVVKKLERIKTCERDFVNTNLGQVIGEIIKIANRFDADISIENLNKFKPKGRRFNRTVMRIPFYKFKHILEQRCFDNDITLNIVDSWHTSKWCSHCGALANGHSSNYSLFKCKCGQIVNSDRKASLAIAVKSLLERNSHIPKPNISIQISKRRVPVNALMRSNDVVNLCSVNHNYQSLGMPTRFSGG

SEQ ID NO: 46827 - protein, 393 aa, unknown
  TnpB Polypeptide
MPIRSYKTELHPNNKQITMFNKHAGCARFTYNWALGMLNADYLKRKQDEEFHLSHRKLNGEPDYTAKDIKEYRKSMSCNYIQISAITLHKILNSKKSSEFPWMRECSKWAAQNALYNIESAFKNFFRGQKNYPKFKKKNDKDSFTLDNPVVVGDSWIQLPKIGKVKLYEKNYLPIGRPKSATVSKRGGRWFVSVRYETQTINPIWSDEIIGVDLGIKSLITCSDGTIVKNSSKLKELEDSLKRLQRKFTKQIKGSKSSDKTKLKIQKLHFRISNSRKDVLHKTTSMLAKTKQHGTIVIEDLNVKGMMKNHKLAKAISNCGFYEFRRQLEYKCLWYGKKLIIANRFFPSSKTDHKTGEYIENLKLSDRIIYHIDGTHTDRDLNAAINLKNYSEL

SEQ ID NO: 46828 - protein, 387 aa, unknown
  TnpB Polypeptide
VADPNFITKTFEYRLRTNKKFVAGCEQALDSARFVYNCALEHRISTYKQTGKGVNFYEQSRQLTEARREIPEVKACLRTIQSDALQRLDLAFQAFFKRPGAGFPRFKGQERYHTFSQKYEAVRGCPLKGDKLTVPGVGTCRVRLSRPVEGTIKQLRMTRRADGWYALLVCRIDKPAPLPPTGRTVGVDVGVKSFATLSTGEAIPNPRHLATAEKKLARDQRSLSRKKKGGANRKKARRQVALAHLKVGRARKDFHHKEATKLVARFDRISVEDLNVKGLVRNRHLAKAISDVGWSQFFTITQSKAESAGRVFERRDPRFTSQTCSECGHRQKMPLAIRTFICEACEFVCDRDHNAAKNLDRGGQPRIKRSRSCDGATQKRERTRCGK

SEQ ID NO: 46829 - protein, 509 aa, Sulfobacillus sp.
MAMVTKTIKLGVHKEVHAIKRKAIVETHVLYNRVIAFYMDFFVAHRGVFEEHVPYTKKNGEPAERHLTNQELLTFAERHTLSTPAHPHPLMPLEAIPQAKGMPTGLRRAAINHAAGKVKGWCVLLHQWEQHGKTGREPRLGEPNEPVTFYADMVDYPDWDLLPQATVQQTFIAVKLWYAGQWQKVPLPIVLPRYAAEVFRSAQAESQRIRTETALIKARKAPNEPWTDEERAAVRPKVWVARSLSLYARQDTRYPGHLRFALHVPLEKYVQTPKKAQEQLQKNPDLSVVTADLGANRLAVMGAFQCGRLLATQFISGSALNHQRHRLLNAISRKRAQSGRLQKNVPDNVFLWNKVRHLDENAARQVARRIVDFSQQHGAKVIVLEYLRGYKAPKEKMSRAGRKNHKRAYWLRGQIVRWVRDLAFREGILTVERNPAYTSQMCPHCSADYRQVGVRQRHTFTCSNPDHAYQADADFVGMMNLYRKWNGTFTYPSKKKKTKDELKPTQATA

SEQ ID NO: 46830 - protein, 390 aa, Glycomyces sp.
MHLRYRFRAYPTAPQRISLARLFGCVRVVYNDAVAARKSARAAGLPYPTTAMLDRRLITEAKQTPEREWLTEVSTVPLQQALRDCHAAYRAFFDSRRGRRRGPNVGPPRFRRRSHRQTARFTRNGFSLRPNGRVYLAKVGELAVRWSRELPAVPSSATVERTATGNFFVSFVVVVEPGAELLDPLPVPEADTGIDLGLHEFAVLRGGKVIENPRFFKRMERRLAKAQRMLSRKTAGSANREKARLNVARIHEKAGYRRSDWIHKHVKTIVAENQGIFVEDLHVGALSRGLHAKSFREAAFGIFLRRLEVKAVRAGRSFRRVDRYFPSTRLCSACAAVTGPRGLGELKVCNWICECGAVHDRDANAELNLRREGRRLENECRMVAAGHAET

SEQ ID NO: 46831 - protein, 324 aa, unknown
  TnpB Polypeptide
MSIKTGIITKLPDWAVTAPYQVRSMSVKEACKAVSNAKLKYAKTHKTSDVRFRSKKAVRQSCYIPKSAINKEGFFIRTLGTMKYAEDIPAIEYDCRLVYEYGKWFVSIPFKRTISCPKNKEPIVALDPGVRTFQTYFSLSAAGSIGQNAWETILGYCYELDKLATKLSGAHGAKRQNLKRAIARLRYRVQCLKNELHTKTAVWLCKNYELIVLPEFSANEMSGRHKRRLTRKTIRAMLNLGHSQFRNKLIQTAELYGSHIVLVNEAYTSKTCTHCGHIHKALGGAKVFKCPECGIEVSRDINGARNIMLRAMLDQTAGADRHNH

SEQ ID NO: 46832 - protein, 544 aa, Holophagaceae sp.
MPRAKTPSFVCEFEVSATSKDLRVLRSRKEAGRQIYHAIEGEGLRRLARMRHDPGFEHAKAMPKGPEKKAAFEALRKHHGFTEASLHQHPSLAKDCWLRGHLDVHTQQKVATRAFRAVERWSFGGSGKPRFKRYGELESLEGKSNAAGIRFREGHILWAGAHGSLNLPLIVKPGNEVQAHALQVAGTTFTRTTKDGKAVTETGVKYCRLLSRTIRGRERAFVQLVLRGMPLQKARHYVRDGLVGLDLGPSQVAVVGEGFVKTIPFCPDLDRVEATRRRYLRKLDRQRRANNPDNYRPNGTVKPRSQRKPWQASASQKATQGVLAELLRGMAAHRKSLQGKLVNDLLALAGNQVITEQVNVRSWAKLYGRSVGHKAPGLFQSAYGRKAEASGGSMEMVSTYKTYLSSRCLCGKRKKKLRDERKHTCGCEFIPEGMHADRDEFSAFLAFHCQGGTLDEGSARQSWLSWGADCLLRLSSGNTETANGAALPTLRVREPRRSSSTDHEAGQRREAVPVLRTDTDGERRDRKVPKHRKPDLKKEVPHVA

SEQ ID NO: 46833 - protein, 396 aa, unknown
  TnpB Polypeptide
LYNSAVSNRFTQYQKFGHKVDYFQQQNSLPAFKEVWTEYKECNCMTLQATLKRVDYAFQRWFKGLGKRPKYKSIRHYSGWTYPSKTGWKAHTIGDSGYLELAKIGSIQMRGKARIWGMPTTCTIVYRNGKWYASITVELTELQVAARQTDFGSVGIDFGCKAALAITDGETHTGVESPNFLRKAERQIKHLSKGKRRKVAPNRRKKQKASSRWKKAQAKVSKVTRKVACSRQNWVHQVASDIVRCNSFVATEKLEVSKMTRKAKKGKRKKQKAGLNKSILDVGMGRLRAAIEYKVVEACGVFVEVPTKTVKPSQTCPNCGNQQKKTLDERVHQCGVCGFTMDRDLAAALVMLLWAQGKLPGFETSLVDADAASSTSDTCKRKQAGSQKQLGQLKRV

SEQ ID NO: 46834 - protein, 206 aa, Clostridioides sp.
  misc_feature (188)..(197): Xaa can be any naturally occurring amino acid
MYPNKKQQELINKTFGCCRFVYNKYLAKRIDVYKNNKETFTYKQCSSDLTNLKKELKWLKEPDKFSLQNALKDLDNAYKKFFKEKAGFPKFKSKKINRFSYKTNFTNGNIMYCGQHIKLPKLGMVKIRDKQVPKGRILNATISKEPSGRYYVSLCCTDVDIEAFENTNNHIGLDLGIKEFCISSCGEXXXXXXXXXXRLIGMVEKL

SEQ ID NO: 46835 - protein, 450 aa, unknown
  TnpB Polypeptide
MKIYKKVLTFSTTLETKHNENVINNFEDTVPKYSTMKRHALHVIRNNPEIKENVLNRYLQDKYGVTTRTANSCIKEVKGIVNSAIVSLSSKIEKIENRIKEKRKNLEAKRKQLAKIHNGRKTNTKKLRKLKFQIYNICNSINRLEQKKEVFQERIDRKKPNICLGTKKLLKQNRNKFIKQRDSQISYIGRKEEKSGNQMFQFSYNKKNNYYTFKIRKDFGKWKSDRSSERYVEGRCHFKYMSKELRKVLVDKSSPVTVSIIRKNNRYYLHVSITLQYTTETIYTRKEYGTVGIDFNKGMLAIAETDQAGNLKNVFQRKFAFGRGGKTKAQLSAILSDVCSYAIEKGKDIVIEDLKSFKKRKSKTNKAKTEQGKEYNDMLHKLPYSTYSQLIEDMCFKRKISLVKINPYNTSKIAKQKFCKRMSLSIHSGAAYVIARRGMEIKDVYVKKVS

SEQ ID NO: 46836 - protein, 450 aa, unknown
  TnpB Polypeptide
MKTYKKVSTFSTVLETEHNENVIDYFEGTVFRYSAMKRHALHVIRNNPEMKENVLNRYLQDKYGVTTRTANSCIKEVSGIVSSALALLSLNIEKIENRIKNKRKNLEIKRRQLAKIHNGHKTDTKKLRKLKFQIYNICNSINRLEQKKKVFQERINKKKPNICLGTKKLLKQSRNKFIAQRDSQISYVGRKEEKSGNQMFQFSYNKKNNYYIFKIRKDFGKWKTDRSSERYVEGRCYFKYMSKELRKVLKDKSSHVTVSMIRKNNKYYLHVSITLQYTSETIRTRKEYGTIGIDFNKGMLAIAETDQAGNLKNVFQRNFAFGRGGKTKVQLSTILTDICNYAINNGKDIVIEDLKKFKKKKAKTDKTKTEQGKEYNDMLHKLPYSMYSKLIEDMCFKRKISLIKINPYNTSKIARQKFCKRMNLSIHNGAAYVIARRGMEIKDVYVKKVS

SEQ ID NO: 46837 - protein, 548 aa, unknown
  TnpB Polypeptide
MTGIQKLDMHDPPFWKANLCEEYSKWWMPTTLNNKVTLSSYPTGSWFSHVQYHYPSGSKDKLLSPTVSTAPPCLNKPASKKRKRKKRRKESDSDTDSTKRQKSRPTKPKKSVLFASQKVVPENKVLRTFTMRIFPTKEQTRAFKTWFAAARHTYNWALGVLKNHHRRGLRVLTPSNRVHLKSNFVTAKPSRFPRRLRWMRNIPYSVREEATKELSMAYSAAFRRLEDGLVEVFDNIQFRSARSRQPAAITIPTQNFSKAAGCRWDMYTRSLPGKGKLRFHKRDVSRILEKYPEGPQNAVKITMTRTGRFFLHAPLLVEKQQVSDNSIGHLVSLDPGSNPFMTYYSPTKMITGSFGTTEDLNNLRMFQQRYDATCSLLSADSSPWLPPKDRKRVVTKKLRLHEKVRNRVNECVNKVTKFLVDGFQFIHGSIFEVAQIVERPTFINPEGEQRKGKGRLRSQTRRDILTWRHAPFKKALLNKMELYGGSLVVELSDEAYTTKTCGRCGHQNDVGGSKSYCCKNCGYRVHRDVQGARNHSLKNCVGKYVWVT

SEQ ID NO: 46838 - protein, 408 aa, unknown
  TnpB Polypeptide
MKVKRTERHIITKFHKHFKEIDELCFKSKNLYNYANYLIRQEFIFNKKYLNYNKIEKLLKNHETYRSLPIQTSQQILRLLDKNWISFFRSIKEWKKDKSKYQGKPNLPKYKRKDGRNILIYSNQTISKKFLKNNIIKPLKSNIQIKTKQENIKQIRFVPQTNCYVCEIVYEKETKEYKNLKIENFLSIDLGVNNFATCFNNQGLRPFIVNGGIPKSINQFYNKELARLMNFVKGQSKTSNRIRKLIFKRNKKMNDFIHKSSRRVVDYCLKNNIKNIVIGYNEKWKQNVNRGRQNNQNFVCIPFLKFVNQIKYKCEDVGINVFLTEESYTSKCDHLAFEKMEYQEEYLGDRAKRGLFISSTGKFLNADVNGSIGIFRKVIGDEVLKETLINRGAVFVPVKMNNLNESFC

SEQ ID NO: 46839 - protein, 412 aa, unknown
  TnpB Polypeptide
MLRAYKYRIYPTNEQKALFAKTFGCCRFVYNWALNLKITAYKERKETLGNVYLTNLMKSELKAEHDWLKEVNSQSLQSALRNLDTAYANFFRNTKAVGFPKFKSRKSGQSFLCPQHCSIDFAKGTITIPKAKDIPAVLHRKFKGTVKTVTVSMTPSGRYFASVLVDTVIQEQKTSEPVHDTAIGIDLGIKSLAVCSDGRTFDNPKNLQRSLEHLALLQKRMSRKRKGSANRNKARIRVARLQEHIANCRRDNLHKIAHALTHDSQVRTICMEDLNVKGMQRNYHLAQAVGDASFGTFLTMLEYKCRWYGVNLIKIDRFAPSSKTCGKCGYVYKGLKLSERSWTCPECGTHHDRDFNAACNIKESGLKALPSERGKVKLVDCPTVDDRPPCPKKPWQEEAGKRRTNCVRCSCL

SEQ ID NO: 46840 - protein, 418 aa, unknown
  TnpB Polypeptide
MLLSHKTSVKICPEYSNIIGHMCYAASKLWNVCNYERRHYKELGMEKYPDWYDQKKAHKGDLWYRQLPAQTAQETCKQLDKAWKSFYVLKKTGGIKEPNPPRFKQENIPVTYMQMGIRHEKGSDQLRLSLPKELKSYMEETYGIHEKFLYLENKIFRNMDHIKQLRIYPPENGKCDLIVIYEIEEPEQISQNGHYLSIDLGLHNLMTCYDSENGRTFILGRKYLEISWKYDKEIARLGHQWNSCQSAGGIKYPKPSKHMLKVYKKKRNCIHDYLHKVTRAVVNYCKANDIHTVIIGDITNIRRNKNLGKVTNQKLHALPYAKIYGMLEYKLAMHGITLAKQTEEYSSQCSPHAPQVTKEYAKKCNRTNRGLYKDQLSVYNADAVGAYNIMRKYFAGCGKEKKISVTGLSSPLIIKVAV

SEQ ID NO: 46841 - protein, 393 aa, Oceanobacillus sp.
VKSHESKKTFRFRIYPNTSQITFIHKTIGCARFVYNYFTGKQKEKDSYWYTVNEMVQNGQLLQNNWKGGFFQKNAAIKAIPELKGHYPFLKEVDSIALQKAVENVHDSYTRYYRKQNDEPRFKSKNNPVQSYTTKYVNGNIAVLDKHIKLPKLGLVRFAKSREVEGRLINVTVRRNPSGKYFVSIVVETEAGYHEKTGSFVGIDVGLTDFVTLSDGTVYENPRFFRTLEKKLAKAQVILSRRQIGSANWHKQKRKVARLHEKIANARKDMLDKISTEIVKNHDIIGIEDLSVKNMLKNHHLAKAISEVSWSAFRTMLEYKADWYGKQVVAVAKNYPSSQLCSHCGHQNKDVKHLALREWTCDICKYHHQRDLNASINLRKEALRLTAGTAGIA

SEQ ID NO: 46842 - protein, 291 aa, Okeania sp.
MLVFEMKLQGTQSQYRKLDEAIRTGRFVRNSVIRAWLDGQVKTRNDAYKLCKVLSDNPVFPWVARLNSMARQAHVERAWASIERFYRNCRQKIPGKKGFPKLKKYQLRASVEYKTSGWKLSDDRRYLTFSDKFQAGRFKLWGSRNLHFYQLQQIKRVRVIRRHNGYYAQFLLDHQREEKKELTGKQTGLDVGLNYFYTDCSGNQIENPRFWRKDERKIKRLQRRLSKTKKGGQNCKKARNKLGRANLKVSRRRNDWVCKLAQHVIQSNDLVAVENLRIRNMVKNHPDRQIN

SEQ ID NO: 46843 - protein, 332 aa, Proteus sp.
LKEAPSQLLQQSLKDLERAYKNFFQKRTAFPRFKKRGKNDAFRYPQGVKLDQSNSRISLPKLGWMRYRNSREVVGEVRNVTVSQSCGKWYVSIQTEYEATEPQHGSTSIVGLDAGVTKLATLSDGTVYPPVSSFKVNQRKLARLQRKLSRKIKFSANWQKQKRKIQRLHTHIANIRKDYLHKVTSEISKNHAMIVIEDLKVSNMSKSAKGTTERHGRNVKAKSGLNRSILEQGWYEMRRQLEYKQLWRDGQVLAIPPAYTSQKCACCGHTAKENRQSQSQFECLECGYTANADINGARNILAAGHAELACGGRVQSDRPSKQEPAEVIQTSV

SEQ ID NO: 46844 - protein, 224 aa, unknown
  TnpB Polypeptide
MVHMTKKNTARFDFDLRFPKMPSYLRRSAIQHALGSVSSYETRLGQWKETGVLSGRPKLTCRNHAMPVFYRDVMYREGAEGKDEAYLKLYDGHDWKWFRVYLKRTDMEYLPRNWKGKKTSAPALEKRHRRYFLRFSCTEEVTLTKTPVKEQIICSVDLGINTDAVCTIMRSDGTVLGRRFIDHPSEKDRMYRTLGTDPQIPEGTWLCADTGKMGIYETSEHRTG

SEQ ID NO: 46845 - protein, 222 aa, unknown
  TnpB Polypeptide
LPSSLTSFTLVKECSGRYCASFVVEVEEIRLPWTAREVGLDLGLESLAVGSDGEKIAPPKFLRSALRTIGRLQGSLNRKAKGSSNRPKARLLMARVQEKVANQRLDLFHKLSTTYIRENQTVVLEDLNVAGLSRNRRLAKSIADAGWRMFRTLLEYKAERYGREVVVVSRWEPTSQRCSSCGHRDGKKPLSIRRWTCSACGAAHDRDINAAKISSPSDRRRG

SEQ ID NO: 46846 - protein, 368 aa, Paenibacillus sp.
VANKAYKFRLYPTKEQEQLLAKTFGCVRFVYNQMLAERKETYELYKDNKAALKKQKLPTPAKYKNEFPWLKEVDSLALANAQLNLQKAYQNFFAGRTEFPKFKSRKARQSYTTNVVNGNIKLLDGYIQLPKLKLVKIKQHRVIPSHHIIKSCTVSRTKTGKYDISILTEYEHQPAPKEVQTVVGLDFSMKGLFVDSEEGKTANYPRFYHQTLEKVAKEQRILSRRKKGSSRWQKQRLKVAKLHERIANQRKDFLHKKSHQLAKRYDCVVIEDLNMKGMSQTLHFGKSVADNAWGMFTAFLRYKLDEQGKKLIQIDRWFPSSKTCSRCGQVKESLSLSERTFCCPCGFVADRDWNASINIKNEGLRMLA

SEQ ID NO: 46847 - protein, 392 aa, unknown
  TnpB Polypeptide
MYALKRELKLNKVETSLMRGCSGFKRFVYNFGLDMLTASWQFQDVKVSDSKRIDAIKKVFTSVTMQKPEYAWMKSYPSTVYQSAFIDLKDALTRWRKGLAKFPRKKSKNKGDSFTVYKTAGVYLEKGKPALPFTNRVVIDAGKEVKLPGLKQLRLKERINFICSSQTFTVSRAADKWFVSFVLDAQKIPPIIHPITKIGVDLGVKCLATCSDGSIYEMPVTTKTAKTKLSKTQWRNRNKVLGNRKLGIKASFNAREFYVKSARLSARISNIRKDTTQKMTTDLSRKAYIIRIEDLKVSGMIANHKLAAAVSNNCFYEIRRQLTYKQPHFGTKVELVDRWFPSSKTCSKCGHVQDMKLSDRVFNCGGCGHSQDRDENASINLENAPVDKVRLA

SEQ ID NO: 46848 - protein, 421 aa, unknown
  TnpB Polypeptide
LKKHGYEMRIAKLEKRKTTFQTHLKNGTLPKVVFGGRKHIGSEKWRMKRRGQLVSVGDGWNKGNLHTRIRKIDGGFMLDIRSWGANHESFMVPLHVPETYLRIFDAIADQTLPPVHPIKAKNPTRPYTIRLVKRLDGNYDCYVSFEVSDEPIKPWSGKRLASMDVNPTHIDLAIVNSDGNLVAAKSFKEPALVYAHREKRLWLASNLLEKAFKWASFFKVDVLVIEDLNGFKGIEHGGANRVIANFMRKKLITLAATKALRREWILARIPAAYTSRVAKTKYKPNFPRMSVHQLAALVLGRRALGLQEHLNPDQLKAVAGRIRKRQAWVKKILLQDHGHPCLKPSISTDGRMNMQDAKGVEPLIERLTVHTRYAAKERMQRVSWLMPVKHTPWRVEATRYDGWARAHRGTAPSPLYVEMSI

SEQ ID NO: 46849 - protein, 351 aa, Nostoc sp.
MWGKHLSCAKLQAHIAKLRKRNLFWQSVGSQAVQDICQRIEKAYQLFFKHNKRGVRPPGFKKVKKYKSFTLKQAGYKFLGGNKVKIGSRVYKFWKSREIEGTVKTLTIKRTPLGELFMVVVVDEGNKPEIEVKTGKIAGFDFGLKTFLTCSNGTCLEKSLLLGEPQDHVFRKIESPEFFKQSLNAIKIASRQHSKKLKGSSNRERARKNLVRKYEDISHRRRDWFWKLAHELTDKFDVLCFETLNLKGMQRLWGRKISDLAFGEFLQILEWVAKKKNKLVVFIDQWYPSTKTCSCCGHVLEELDLSIREWRCPSCQSVNGRDENASRNICAVGASTVGLSDVSRVIPAIAV

SEQ ID NO: 46850 - protein, 424 aa, unknown
  TnpB Polypeptide
MNQKTVKSYKFRLYPSKKEETKLMETLDLCRQTYNFLLQELNEQKVIDKSQIQGIIPDLKICEPKFNKLYSKTMQYECYRLFSNLRSLSKSKEKRNKVGSLRFKGKNWFKTFTYNQSGFKLIETGKRFQTLKLSKIGEIKIRAHRNIKGKIKQVTIKKEQSGKWFATITTEEPNKLENKLNLNKAVGIDLGLTNITHDSDNKIIQNPKHLNKHEQKLKCLQRLLSRKKKGSKNNEKARTRLAKHHEKILNIRNDFLHQISSRYVKNYDVIAIEDLQIKNMVKNKYLSKSISDASWNKLRRFLTYKAENAGKLLITVNPHGTTQRCSSCKNRVKKNLGNRIHKCDNCGLKIPRDYNSALEIKDIALKSIRQELSEYKHSKSLLILDVCIKPVEMPLAAELKIRSTSQALMKQETQERLTTDAQWL

SEQ ID NO: 46851 - protein, 289 aa, unknown
  TnpB Polypeptide
VGGESLAHRSGVGAGGAGRAGRRGLCVGWGIHPRRHADGEHMAGAVPLPEHAGRWTRRHIARGGVPGERLRPCCHLRSVRCHRNKAKATLSARIDRMQRGSKARILRRLDNQLEDILHKQTTHLVSTLHRRSVQTVMIGDVRDIRRDLGYGAKANQKLHRWAHGKVRWMLTYKAERRGMCAVLVDERYTTRTCTACGTRHKPKGRDYRCTCGFAYQRNGVGAWNIRQKYTGAIPVVGAMIPPIGVRYATPRNTLRRETPGFSRGEYQMALGLPIAPFLSQSDHNRCLVR

SEQ ID NO: 46852 - protein, 594 aa, unknown
  TnpB Polypeptide
MDEIGRPAYVSGEAACNTVDIATALGGGFHVSFPPGRGTMTLAKYFPDGSDVSIEVGDDRAAASNSRFETVEWDIEDGIPPFCREGAPAFRRGEESRHYYSHIICKCGRISLMSQKVVLERVTLDGAKPFTGYADRHDPESERLYARSGGQAMDWLCDAWRYRFNQLRSNRCKYGKDKTLVPIGGEPDTRSVSRSRNECSWLSAVPSLILESPTRIERVEWFTAVQRRKTLLSKRLKPGRMPRFKSYKRDGQCFVCWHNGGRNAVYRRVNRNHGIITITGQNPKGMSLPGEPLRYRILLHVRVSQPIREYTAIQVDWTNRTVVFNNTPTPVKHEPTGRAVGIDRGCVHAAADSDGRFMDLPKDRLKAIDREIRKRQKAQARRAGSAGYSSEREYAKSGKTSRAYRRTRLEIGRLHAKSKRILDDVYQKYTTRLVHENDLIVLENLRLANMSRRNKPVPDPLHEDRYLPNGQAAKRGLNRSLRQASMGRLASMLAYKTKLAEGVGMILVNPAYTSQTCSRCGHVDKKNRESQAVFVCKKCSYTANADVNAARNILKRGLDTLAVTSENLWGADGTPVEQGHKTNGNAARESVAVS

SEQ ID NO: 46853 - protein, 384 aa, Leptolyngbyaceae sp.
MLILEFKVYGKATQFSAMDEPLRTAQFIQNKCLRYWMDNPDVSKYDLNKYCAVLAKEFPFANELNSMARQASAERAWAAISRFYENCKKQIPGKKGFPQFKQNVRSVEYKTTGWRLAEDRKSITFTDGKQIGRLELKGTRDLHFYPVDQIKRVRLVKRADGYYAQFAVAVERSQSVEPSGKAIGLDVGLNDFYVTHDDHRAENPRFLCTGERRIKQAQKRVSRKVKGSSNRRKARVILGKRHLKISRQRKDHAVKLARCVITSNDVVAYEDLRIKHMVRNHWLAKSINDASWYQFRVWLEYFGKVFGKITVAVPPHYTSQECSSCGAIVKKGLSIRTHICQCGTALNRDHNATRNILSRGLATVGHTGSYGLEPGNAWGEDTAT

SEQ ID NO: 46854 - protein, 417 aa, unknown
  TnpB Polypeptide
VRAYRFRAYASKTTARALEAQLEAACKLYNTLLHAEKEEYEKNKHTMNRNELRQLALDLRKQNPEFQSLHSQVAQQVAERLYQARQRFFEGLANKPRKKKPHRYLSLVYPQSGWRLSNIREVGQGGNKKKRARLYLSKIGFFTLVIHREFPLNRVSQVCVKLNASGRIFVVFLVDEPVSELPEQPTQEAGKAVSVDVGITRLVTLSDGRFLENPRPLERSLDRIRLLQRSLSKKKKRSKNWLKVKRRLAKEYEYVKDFRRDLFFKLGALLAAEYDLLVLEDLNVEGLIGKGETKMRRFRLHDSAFSELRGILEWQFQKRGKTVLAVPAYNSSRECFLCGGINQSLTLKDRVFRCPHYGFTLDRGLNACLVLLKRAGWEPPAVPVELRPIPPPPSLGLVGRGRQGGAMIQEAPPFKAG

SEQ ID NO: 46855 - protein, 152 aa, Cyanobacteria sp.
TDFLHKLTTRLVRENQTIAVEDLAVKNLMKNHKLAGAIADASWSQLVRQLEYKCLWAGRTLVKIDRWFPSSKRCGYCGHIVDKLPLDVREWDCPECGTHHDRDINAAQNILAAGLAVIVCGANVRPDRHEPEGQLRNSPERSRRGKKQKPKL

SEQ ID NO: 46856 - protein, 368 aa, unknown
  TnpB Polypeptide
MLVMRGHRLRIYPTLKQEELLKKYFGCARWVYNYALHDVITNNFYFDCNIYSKEISDFRDASKYKIYKPWLKEVPRVILEQSLRDLDRAFINCKEGRSKFPKYKKKSHTQSIRFTLDQRVINSYFISGKLLRVTKLGVLEVRWHENRLPTSNPKMITITKEATGRYYVSFTCEERITIKSRKEFKVGVDLGINDVFVVSNGYKSGAPKYFRKHSRKLKLNQRKLKRKKLGSNRRERIRQKVAKIYSRIKYARRNFIYKEVNLIVKSSTHIALEDLNVKGMLKNSKLSKSIADSNFSRIKTIFEYKALWYGSKIVTINRFIPTSKLCHVCKSKNSNLKLHHRSWTCSNCGTVHDRDINAARNIYFAAGF

SEQ ID NO: 46857 - protein, 404 aa, unknown
  TnpB Polypeptide
MLVKGVAFYLASELPFEAKSLLEDFRLAVNNAVRAGLQARVTSRNALCRIAYKDFREQHPRMYAQHLVSAFEVAGGVLKNHRRRVRKGVTSRIPFVKRLMMKAENQAFKLDRKTGIIDLPIRAGYHVELRLVVSQYHRKYLDDMSLSLGSLTVLPGRVIVAFRKDAPKPYTPDSVISLDTNERSLDGVFVTDDAGMAVKAEFPDIATIQQRHHDRRKRLQKKKAHDRRTSKNLCRREGLREHRRVDYRLHQVANSVLKFAEERKSAIVLEDLKGMRRKRSKELNRRLSMWPRRKLHQIIEYKAQWKGIPVFKVDPRNSSRTCPTCGRMQHSRMGTEFACECGWHLDGHVNASINLLQTAISKGMAGGLRFNPGAFQHDVMMILYEPAMAARSEPNGTSSIVGVS

SEQ ID NO: 46858 - protein, 309 aa, unknown
  TnpB Polypeptide
MKSILFPQFKTHPITGWQISIPKLGKVQINLHRPIPDGFTVKQVRVIKKAMGWFATISISSDVEVPQPMPYGHVIGVDVGLLNYLATSDSFVEPGRKFFKGMHRRLKVLQRRLSKKIKRSKNHEKARVRVEKQHNHIHFKRKDYQFKLAHKLCAMADSIFVEDIDFRVMAKGFLGKHTIDGAFGQFRSILKYVGRRQGKFVAEVNHKGSSQTCPNCRIEVRKGLGDRTHSCPECLYETDRDIASAQELCNRGIETYPGTLEEQEIGSQEVVGASRTRPFINRVVLSGVMSLDKWRRGAMPSSDTRKPTP

SEQ ID NO: 46859 - protein, 368 aa, Methanosarcinales sp.
VLRRTFKYRLYPTKDQVQILIYCLTTCRYLYNEMLEDRKNAYDRCDVGLNYNEQAGQLKYLNLSIYSQVAQDVLRRLDKAFQNFFRRVKNGEKKAGYPRFQGKNRYDSFTYPQTGFKIEDGKLHLSKIGAIRIFQHREIVGKIKTCTIKQEGDQWYVCFSVELPDVEKKEIKTSVGVDVGILTLATLSDGIEIGNPKTLNKYDSKLRKAQRDLSRKKKGSSNRNKQKIVLAGIYRKVRNARKDYLHKASRILADTYDQIVFEDLQIKNMVKNHHLARSIHDASWGMLISLTTYKAEEAGGIVELVNPRNTSKQCSVCGCIQSMPLSQRIYRCPDCGAVMGRDHNAAINIKNRYVPADCGELTPVEIVA

SEQ ID NO: 46860 - protein, 419 aa, unknown
  TnpB Polypeptide
MKSMKEFAYHSGIKLRIYPSRKQKTLIFRNANAARYIYNKMVALGNERYLLRRTAALCPADAARLDYIESVFGSATGISNIAPFLNEPGIDAQAKANAIQNYKKAWKNFRDTPGAGVPTFHRRKTEFSYQTNPHYNKTGADDMNNANARFEDMYHMVLPVLGRIRVKGSPVRMHRLFAMSQYVRIGTITVSCDASGRYFVSLQLASDVPFFGPLPKTGSSRGYDLNLDNFYTDSDGNVVDNPRFLKDKLAKLQKAQRKLSRMTERAKKEKRDLKECKNYQKQKTKVAKLHMQVRLTRLEFQQVLSKREVESQDLLCFENLPVRNLIKNHKLARAISDVSWSQFVSLCEAKAHAYGKQFVKVDPKHTTQMCSTCGYILNGEDKLTLNDRFWTCPACGTFHVRDENAAKNILAKGALSLLA

SEQ ID NO: 46861 - protein, 285 aa, Cyanobacteria sp.
MEQTLTIVCKLQPNPEQATKMDDLLKAFADSCNYANEQVKSGITSKTTIQSLVYQDIRAKFGLSANQAVRVCARVGANRKAAKVKGETVKEFCPTSADYDARIFDFREKDRTISLTLLGCREHIPVVLANYQIGKLKGRKPTSAQLCKHKDGLFYIHIQLTDEAPEPIKSDKVIGVDFGRRDIAVTSQGDKWDGKQITETRDRFSRVRASLQRKASKGTRSTRRRARQILKRLSGRERRYQTWLNHNISKLIVLSALSSHAIIAIEDLTGIRERTNQQPRNMVQI

SEQ ID NO: 46862 - protein, 374 aa, unknown
  TnpB Polypeptide
MIRRKAYKFQLKPNPEQIASMKSFAGACRFVYNRALTMQSDIWRNGDRYIPYNKMAPWLVEWKSQEEMSWLSNAPSQILQQSLKDLDKAFNNLFARRATFPSPKKKGRNDAFRYPTQRVKLDEGNERIQLPKLGWMRYRKSRSITGVIKNVTVSMKLDKWYVSLQTEAEVDDPSPKQSSIIGLDTSNIKCITTSDSIDFLSQASLPKMEKSLEKSLKLLRKKKRFSSNWAKQKHKVNRLLHRISNMRKDHFHKISTALSKNHAIVVIENLEDATSLSNHRKRTSGFTLNDIYELKRQLDYKLKWNGGELVTVCERDDNLKPIIDDASSNHYGRLRAEKILAAGHAVIACGGADLLGHPMKQEPSEDGKSTVILL

SEQ ID NO: 46863 - protein, 373 aa, unknown
  TnpB Polypeptide
MLKAYKYRIYPNGIQKEQLAKTFGCTRFVYNYYLDKKIKLYEDKQESISKIDCNNHLNRELKKELVWLKEVDKFALTNSIYNLDTAYQNFFRRVKQGSDKSGFPKFKSRHSNRFSYTTNFTNNNIEVDFVENRIKLPKLKWIEAKVHREFDGKIKSATISQNPSGRYFVSILVDTEIMDLPKTEKNLGFDLGISDFLIDSDGKKISNPKNLYKYERKLAKLQRQLAKKQKGSKNRNKMRVKVARLHEKIFDTRKNFLHELSSKIINENQVIVSEDLNVSGMVRNHKLAKAISDVSWSEFTRQLEYKANWYCRTYVKIDRFFPSSQLCSDCGFKNTETKNLSVREWTCENCGSHHDRDINASRNILQEGLRILA

SEQ ID NO: 46864 - protein, 360 aa, unknown
  TnpB Polypeptide
MKLTAQIKLLPSDEQADSLLRALERANEACQYISDYAYESGEHSKYKLQDAVYHDVRERFDLSAQMTVRALGKVADAYKTNPDSHNQFDIRGGFPYDSRILSFYTDRQEVSIWTLDGREKINYEVGENHRALLEQDKGEADLIYRDGMFFLLVSCQMPTANMSDEDVEAIDGYLGVDRGVNNIATTSDGDNWTSDQIDDRRRWYQDRRDTLQSVGTRSAKRELQRLSGKQARFQRDTNHTISKRLVNKAKARSSAIVLEDLSGIQERTTVRHSQRARHNNWSFSQLRQFIEYKALIAGVPVKYVDPAYTSQTCSDCGHCDSKNRNGSSFQCRECGHSMDADKNAARNIALRAKHAQGCSQ

SEQ ID NO: 46865 - protein, 543 aa, unknown
  TnpB Polypeptide
VGRAARLWDVSGRGSRRRALTRYQTHRSGTGGAAGQMWGHMTTHRHHGYRHDRAGHGVCRCRVRRWSVMARHTTFRFRLDPTVEQREVLARHAGAARFAFNQCLAMVKTALTHRKTDPDIKVPWTGFDLINTFNAWKKTQDAGRVFTVDVHGDAEVVVTGLAWRGQVCQQVFEEAAVDLGKGLKAWSDSRSGTRKGRRVGFPRFKKKTGDIASFRLRNKHPKGKPAAIRVGDNDRARSVTLPGIGAVAVHDDTRRLRRMLAKHRAKILFATISYRGGRWWISLNVEAADLHPAHQHPACTDDAGGWVGVDSGLSAFLVAATTDGTEVARISDAPKALAAGMKQQRRLSKSLSRKKKGSRNRTDAAARLGRHHHRVAAVRRHFLHQVSGELVKTHDRIVIENLNVTGMLANHRLARAISDAGWSEFARMLRYKQAWRAGLLVEADRWYPSTRLCPQCGAVDTAMTLADRVFSCSCGHTADRDTNAATNLARWGQAHHDLDRSPDPQAGGRATNARRRDGADQHPRVGETSPDDAGTDVHTAPAA

SEQ ID NO: 46866 - protein, 217 aa, Chloroflexi sp.
MKQDGTIQDRRFLRLKRETDSLWHHIGLIKKEQQHGSRNPKKYWAFANNINTDIARKTAKFIVDTAVRLGCSTIVMEHLDLQGKKRGSKKQRLHLWKFREVQKLVTGKAHRNGIQISTVNAMNTSKLAFDGTGEVERDEKNYSLCTFSTGKHYHTDLNASYNIAARYFIRAICKSVSEDVRLSISANVPKCDKRSTCTLSDLRDLYKYVHGVSLIGA

SEQ ID NO: 46867 - protein, 432 aa, unknown
  TnpB Polypeptide
LESSSKEVKRTVVVECYANKRARKALREIEDAYKEMLEEMVEYALKHGASQSTLHKVFYERFRERFPWLPTRVVKGAYRDAVRRAKSFRELKKRGRAYTERPEVRRVTITYSDSQDWRLENGVVKLRTHEGWVQLHYKSYKLLRKYVYGGWRLASELGLRTAGRRIIAYLTFTKVFEVAYEPQNIVAVDVNENNATIAVFNYGVLSEVYRVETGLGRIVVAYAERRKRITRGNSTKTREVRKKLKKLREGERKLDVLRKTAKLVERLAIENRAVVVVGNINRKAKERMEENANNKLRHRIHQWSVSTLIKLLDEKPIRVEKVSESGTSSRDPFTGTLIKDYEPLVIRNAVRGLKRVRVVKTTLRVARVCGRVVERDVAGAINIGLRYLSSDGRPVALASTGAHDVRVMLVTPHGGATPLTVLQVFTDTVKYR

SEQ ID NO: 46868 - protein, 396 aa, unknown
  TnpB Polypeptide
MKNTTYVRSSKLSTKFLNKDKKKELFLILEESENLCKKFVEYFWFCSNLQNLPKYVGKDIYSKFDSKLGSYVKQCVAKQALGIVKGTFEKQRRRLFVYNQLLKEQKFKKAKKLKQIIDSVNLSYPKIKNFELQLQSCSTVSKFEFAKSTKEYDCWLYTSLSSTNLNRSYLPLKRTKHFNKWLNSGGKLSSGVRLSKNFVTVSFTIEKQEKRVGLTKGVDIGIKNVISVSDGEQSSGLENIMLKLARKKKGSKAFERAQIERRNFINYCINKTLDLSNTKVVKREDIKNLRKYKRSSRFMQSWTYTDIFDKVDRYCEEQNVSVIAISPTYTSQRCYKCGFVLKSNRNGKEFKCKSCGYTADADLNASMNIALNLQGIGNKERLLHKNKTGFYWKVEG

SEQ ID NO: 46869 - protein, 371 aa, Peptostreptococcaceae sp.
MILAKKVRLYPSQLQEQKLWQSVGTARFIYNWTIARQEENYKNGGKFISNNDLRKEITQLKKSELIWLNKVSNNVAKQSVKDACESYMRFFKGLSDRPKFKSRRKSKKSFYNDNLKLKVKEGNLVNIEKVGWIKTNEQIPPNVKYSNPRISYDNKYWYISVGIEQEEIKEELTDVSLGIDLGLKDLAICSDSNIYKNINKTYIVRKIEKKLRRLQRQVSRKYENNKKGKEYVKTSNIIKLEKQIQQMHRRLANIRNNYLHQTTTNIVKAKPYRVVIEDLAVSNMMKNKHISKAIAKQGFYEFRRQLEYKCKFRGIELVVADRFYPSSKTCSQCGEIKKDLKLKDRLYNCKCGLSIDRDLNASINLSNYKLA

SEQ ID NO: 46870 - protein, 420 aa, Lachnoclostridium sp.
VEKLIQRGYKFKILPTDEQKEFFLQSFGCARKIYNLYVNELYTKLESNGYENGFINTKSLKLSKYTDFKKQYDYMKDVDSQALCSAKQHFKKAISKFNKEYDKKTYTKRSRKREETLGIKPTFKDLKGMPKFKSRKNNNFSYTTYNQSQKGAWNLITLYNTMLKIPKLETLIKVKQHRALPKDGIIKNCTISMNNKGIFYVSLCVEYAINIEQKKIDKDKILGLDYSQNDFYYSSDNKKANYPHYYRKSEEKLQRLERSLSRKQLKSNNWLKVKQKISTLNCHIANQRRDFLHKESRKLADTYDVIVVEDIDLRNMAQCLKLGKNVHDNGFGMFRLFLQYKLEEQGKQFIKIDKWFPSSKTCSCCGNVKKSLKLSDRVYKCDKCGLIIDRDYNASINNELPRRKQRGIKKLLLSLHIIEQ

SEQ ID NO: 46871 - protein, 277 aa, unknown
  TnpB Polypeptide
VKPHEEYLVFDISRAWFLKRAKGELGELILSEKYLTVTFRFKREEEVKGKIAWDCNEKSLDGFSPSMGWIRIDLTKLFHIHRVYEVKRKRLQRRASKKPSLRRVLARYSKREKNRAGDFVHKLTTFMSRKFKGYIHGFEDLRKERMLNGSKMHNRNISKINWKTIITLMSYKSKVMLLNPKNSTRRCSRCGMVNAPKGASYICKKCGLRVDRQLNAAVNLYLQMEGLPPTPRLFNELVKGWSGFTLTGEEADEGSNELKRSPKLLNPESYVSLFKTT

SEQ ID NO: 46872 - protein, 390 aa, unknown
  TnpB Polypeptide
MIHKAYKFRLLPTKEQEEFLCKSFGASRWVYNYFLNYRDSKFKNEGVRVNYFEMKRMFPELKKQEETSWLKEINSQSLQCALMNLDSAYIKFFKGLSKFPKFKKKNGKQSFEIPQHWKLNDNTVKIPKLKTPLKFIKHREIKGEICSITISKSKTNKYFISFCCELENYHQQTKGSEVGIDLGIKDLLICSDGTKYTNHKFYKKNLKKLKNLQKHLSRKKKGSKRREKVRLKVAKTYEKITNSREDLYHKVSNDLTNKYSLICLESLNVKGMMRNHKLACSIQDAAWYSLISKIEYKAKWKGVNVVKIDQFYPSSKTCSVCNWKKNDLTLKDREWVCPKCGTHHDRDLNAAKNILAWGKQLITLSDGTSNYEHGDEVKLKSSKKTRTYHL

SEQ ID NO: 46873 - protein, 452 aa, Lactobacillus sp.
MAEPWVKEKRSRTATFAFTEKLKVTLSSEQILQHLHALIIQDQLFNYSLNYMYKTYGRKHIDRKIPTGRDRNTLINYIINLFLNEKYQLKRWSYKALSLSSHNAQLFLQTLIINFNEYQKKLRAGFKWSDKIKFQFKQNIIKDKRGKHRNPQHNSWYKHGHLRFNLKSKTRAVEIQKNTPIQILSAHVIKVPNFGILHLHKRASEYDFSDVKVIKLKRKDDGTYQFQIVHVRPKAPANVQAKPAIGIDWNMTNNVAYHDSNDKQYQLPAEVIAKADWYEHQINKLKRKRSLTHGSTKKLDKKIQKFSAKRAQLLTEAYRHLAIEIVDPVEVVVMEKIGAKDMRKSTGKAKNRKLALLKPYEAKKVIQNRAFKQGVTVVEVDAYKTSQVEYGTESIDKHPLSQREWVSSVTGKVVNRDHNAALNILDWGLHPIHHIKVKTFAKVTATMVSSII

SEQ ID NO: 46874 - protein, 393 aa, unknown
  TnpB Polypeptide
MPKLAYKTKLIVADEDKPRLLAVLQEEQKAWNAVSKIIFRKRYRQIVPVHRDFYANYIKHRDIPSQILCEAERQCLAAYRSAYKNKHKITKPFVRKKLTVQFDVRSCSIRNQKVYLCSLEKRKQIECDFVRFPKLQHLLDNYKFAPPKVSFDGTDFWCSLSFSVPEPPPTETAATGYDMGFTNIVASSGGVLYKDKKYLKEKRRLRYLKRWLKAKGTKSARKHHRRIRHKEHNHTRNFVHHLTNRVLADCKTDTLIFENLNVKPLKAKNRKGKRKTKSVKHTGNNTQGKQNLASQIPMSLFLFVITYKALMLGKHVKTVSPAYTSKTDHRTGKRDGTRKGSRYYCKDGKVMHADVNAACNIALRSQLPCSIGNYYTGQAVIQPANRLSVNLGH

SEQ ID NO: 46875 - protein, 226 aa, Cyanobacterium sp.
MPTNYYKSFTLKDAGYKFLGGNRVKIGNRVYQFWKSREIEGTVKTLTIKRTPLGELFMVIVVDSGGNPEVKIKTGKIAGFDFGLKTFLTCSDGTKIESPQFFKQSLNAITKASRQHSKKLKGSANRERARFNLVRKYEDISNRRRDWFWKLAHELTDKFDVLCFETLNLKGMQRLWGRKISDLAFGEFLKILEWVAKRKDKLVVCIDRWYPSTLDLFSLRSCLRKH

SEQ ID NO: 46876 - protein, 301 aa, unknown
  TnpB Polypeptide
MLIQRGYKYKILPTKEQEESLLQSGGNTRFLWNYVLKINQDYYKETGKFKFYHELAVSLPKLKEEYPFLKESFSQSLQMVLRQFDKALKDSFKKEKGFPSFKKKMLLNDSFSCPQKWRLGRGFVFIPKIGEVKWIKHRAMKGKPKSITISQDGGKWYCSVLCEYTVPDKEKECDNVVGCDVGLKEFVVLSDRTVVSNPRHTKKYENKLAKEQRKLSKKQKGSKNRFKQRLKVRNIQNKIRDTRKDFLHKTSNSIAKNYDGIAVEDLNIKGMMRNHCLAKSISDVSWSEFNRQLKYKCKLGF

SEQ ID NO: 46877 - protein, 304 aa, unknown
  TnpB Polypeptide
LIPEVLHLLVERHHPAHRADGNGVVGQQAPDAKLAGIRMPLLQVIHLDHQGQPDLARWGFGGAAFVLKTRQGFRFKPANPQRDGGTGDLQKTTDTALIPALIVEGDHLETGIVAVGRAVIVRKREGALHGHGLRQSLRALRKANRVLARTQLGSRHRRHARRRLAQAHADIAHQRQDWHWKLAHDLCATYDTIYLEDLELRGMASLWGRKVADLGFGRFVQILHQAAAKHGTHVHHIDRFFPSTKLCHVCGNLNAFITLRDRAWTCACGTTHQRDRNAARNIYREGASSHLQGGCKTCVQAATA

SEQ ID NO: 46878 - protein, 118 aa, Enterococcus sp.
DFLHKLSSRLTDENQIICVEELNVKGLVKNHKLAKSISDVSWNEFVRQLDYKCQWKGRTLVKVDRFFPSSQLCSSCGHNDGKKELNIREWICSNCGTLHDRDINASINIKTEGLSGIA

SEQ ID NO: 46879 - protein, 425 aa, Ktedonobacter sp.
MIKAYKYRIYPNKETIEKLQWTLDRCRELYNAALDERASAYRVTRKVPIEFCGDVAVLDYSRATGMSIGYNQQQNDLPDIKEMRPEYKEIGSHVLQNVLRRVDLAMAGFFNRVKKGQTPGYPRFHGKGRYDSFTYPDIAGWKFVPGEGQHAKLNLSKIGTINVKMHRPVEGNIKTTTIKREGEHWYVVFTSEVKTKVLEVSYEDVGIDLGITHLAALSNGEMIDNPRHYRKAEKKLKKLQESLSRKKPKNAKTGCKGNRRRKASKAVAKAHRKIKNQRKDFQHKESRKLVNRYQILVFEDLQAANLVKKPKPKQDESGKYLPNGAAAKGGRNKSIQDAGWYAFTEMVKSKAECAGRTVLFVDPHNTSQICSACHKKGPHKDLSVRTHICIHCGVVLDRDTNAAINILWLGYKQLQVGALPTQAIA

SEQ ID NO: 46880 - protein, 404 aa, Nostoc sp.
VFHLTYEFKLKPTQNQIAIFEDWLEQCRRVYNYALCERKDWIKSRSCRINACSLHSQYIIPADTPRPTYFNQSERLTQAKNKYPELKKVSAQVLQQTLKRLEKAFVAMWEQKHGFPRFKKPGKMRSFVFPQLGANSIQKRRINLPKIGWVKFHQSREIPDGSTVKQAHIVKRASGWYVLLIVQWDVDVPQPTPQGKALGIDVGLTSFIATSNGLTVKRPRFFIDAECKLKLLQKRVSRKRIGSNNWHKAQKKVAKLHEYVARCRKDWHSKLAHQICNDAGMVFVEDLHLVGLSRSILGKHCLDAGFGQFFNILEQTCFKRGVYFQKVDSRKTSQICPSCGVETGKKELSQRTHACSNCGYTTDRDVAAAQVVLQRGLAAVGHTVKMLAEGKFIGVPMRQESSCL

SEQ ID NO: 46881 - protein, 372 aa, unknown
  TnpB Polypeptide
MKTVKTVKCKLQVNIEQATILLETLGRFAAACNDILQVSLDNKTTNKVKLQHLCYHTIKDKYGLHANLVIRAIARVAEATKKKRKQSKPRRFKATSMSLDARTFSFIEKREEVSIATINGRLKLKLDIGNFQRGLLAGQKPTAATLCYNRRTKEFYIHIVVNREVPFPPKDGNVIGVDRGIYNLATTSNGLKFSGRQAMHVRKHYSKLRQSLQRKGTKGAKRLLKRLSGKEQRWMRDLNHRISKAIVQSCQPGDIIVMEDLKHIRDRIKVAKKQRQIQHSWAFGQLGNFIEYKAIERGIAVVYVDPRHTSQRCLVCGHISRSNRHKHLFKCASCGYTANADINACRNIRQVYLDTLPDGPLSTDPEASTTCG

SEQ ID NO: 46882 - protein, 480 aa, unknown
  TnpB Polypeptide
MGARRRFEIPDGWIARGFLFEVEPTTPEQWSRIAQQFGGRRYAHNWALAQVKANLDARAADPAVVPLAWSFYDLRRAWNHTKQEVAPWWRECSKESFASGIEDLVTALRNWSASKHGHRAGQRVGFPRFKARHRDRGRVRFTTGAMRLEPDRRHLVLPVIGRLRSKENTRRLERLVAQGRARILSMTLAEHGGRLHVSVATIVAHTPRTPSEPEARCGIDLGIGREWAVIAHDDDTIQRVAHPAPWAEAHKHRRRVARQMSRRIVGSRAHRHANAKLAALDRRAANLRTHQVHTLTTTLARRYGTVVVEDLDVAAMGRGMGRRAFRRSVIQAGIGKVRPTLAYKCVWQGGRLEVAGRWFASSKTHHGCGGYMADLKLGDRRWVCPECGQIVDRNANAARNLRDWTGPVTDRDVQRGGVAAPVPSVGDHDGQAHAQRGACETPQDHREVAGADDTRTKPRMGEEPRTGVPVGEHSQMLTDR

SEQ ID NO: 46883 - protein, 459 aa, unknown
  TnpB Polypeptide
LKVYKTELNPNNKQITLLRKSVGTARFAYNWGLERKQTVHLLNQLPIERVKYPTAIDLRKELNELKKTKFPWMYETSKCVPQEALRDLDASFKNFFEGRTNYPKFKSKKSKKTFRVYGAIKLFDKSIQIPRIGKIRLKEIGYVPKDKRVISATISERAKRWFVSVLVEEEVQQKSFIKNKENIIGVDLGINSYIHTSENKVYENIRVYNKFEKKLRQVNKKVSRRVKSSKRWYRAVDELCKLHFRISNIRLDYIHKITTELTRTKSIIVVENLNVKGMKKSNIAKSVSDVAFGMTLRFLEYKGKLYNCKILKADRFYPSSKTCSNCNWYNTNLQKSDRTFTCNICNLKIDRDLNAAINLKKLAASSAESINAHGVGTSGSNELSSGNEVRIERQKRYLGKFQGTGLEVRWYKHLGRSAKANKNVRKDEMFNIFMDCLESIKDIKSVYCGKHLRWSCDND

SEQ ID NO: 46884 - protein, 421 aa, unknown
  TnpB Polypeptide
LYPTPEQKDVLVSHCSHARFVWNLALEQANFYRTWQGPTPGSAARSRQLTEARAQFAWLGEGSSVVQQGALRDFDQAMKNWFTGLTNRRAGLPGKVNGRPTWRRAGTHEGFMVRDLEVHQLGGKWATVLIPKVGQVRFRLTRGWADVAKATSARVTKDASGHWHVSLTCLPPAFARVTTGGSTGVDRGVANSIATSQGVMDHAPTLSKSEQVRFLALARRMSRQRKSSNRRNRTRTSLAKLHATLANRRTDWSQKTASQLVQDFDLIAFEDLRTANMVRKPKRKPDPDQPGVFLPNGARAKAGLNKAILGSCWGQVAAMVTYKAAATPESSRTVLVRVNPHNTSRRCHACGHIAPGNRQSQAVFECVGCGHQAHADTNAARNILRLGLQQVLPGEVCGRSDRERTREPRAKTRAASTPKAA

SEQ ID NO: 46885 - protein, 487 aa, unknown
  TnpB Polypeptide
MATRRQTFRLYPNKKQENKLFEARRNHAYLYNACVAHRRYEWKANKKSITYFDQQNCLPAFKKEWIEFAYMHSQSLQATVKRVDLAYGSFFQGLRGKPQFKRSVGGGSFPRRTSLSIRDYSGWAYPALSGWKVSSSGKHGAVTLNDLGIKLRMRGQAKKWGSPTTLTIVYKPSKNQWFASITVDATTAENSLFRKKNSDLPVREKRIEAKFGSESELSYESIVAFDLGTETALTLYDGENFTELENPRFTKKSESKVKQKSKALRRKRAPNRRKKIKASRRWKKTRKLISNLQSKVANQRKDWQHKVTSDIASRHDIGVTEQLSTKNMVRKARAGSKRKKQKAGLNKSILSVGFGILNKMIAYKIEQKGGLMLVLPTKKIKPSQRCPKCGKIHKTWAELSNRYHICDGCGFETPRDRGSVMVMYNVAMNQQPGLGMSLVDCGCSSSTDSTKKRKHTGSMKQLGQMKRQKPNRNSDEGLETPSACAVG

SEQ ID NO: 46886 - protein, 431 aa, Streptomyces sp.
MQLRYNYRVYPDASQRRALAQAFGCARVVWNDCLRARKEAHRDGLPYASSAQLSRELITQAKQTPERSWLGNAPAVALQQSLRDLESAFRNFFASAAGRRKGPKVGPPRYKSKRDSRQSVRLTRTAFRLKENGHVYVARIGNLKVSWSRPLPAAPSSLTIVKDSAERYFASFVVDAGLTPLPAVETEVGIDLGLSTFAVLSDGTKISSPRFLRRAEKKLKRMQRELSRKRKGSKNHTKARAKVARQHARVADRRRDWHHKQSTLVIRDNQAVYVEDLAVRAMARTRLAKSVYDAGWATFVHMLEYKAAKHGRHFGKIGRFEPTSQVCSACGHRDGPKPLRIREWTCQRCGAVHDRDENAAINTLAAGRADRLNASWSAGRTGTRVLAPRNEAGSPPNGVSAVAGPPGRMPGGARQLSLPPLSLSPPAPMDS

SEQ ID NO: 46887 - protein, 426 aa, unknown
  TnpB Polypeptide
VVQRSVWGYKADRAQHDKKRAILARIQNFRHDSLIMKIICGFQYELYTTDEQRSALSRNAGCRRFVFNKALELQNERKKNSLSLLRYKELCLELVKWKNEEKTVFLREAMSQPLQQALKDLDRAIADSFRPKSDSARKEWPKFKSKDIGDGFRIPQFKPEHIDDVNGRVKLPKIGWMRYRKSRPLAFKCADGSMKSGTVRQIHIRKDCGHWFVVFTTEFDIEMPDPKELDVGIDLGVVHAVATSDGQFFDLNTGRIKELEKEIARYQRKVALNRSSRLKLAKEGRAEAFDKTKPSRKRRRLLEKLQKLHRRVRNIRRDFQMKTAHTLAQEYGCVYVEDLKTRNMTKSAKGTLDNPGKKVKQKSGLLHDSIKYPPIDNRNDPPQLSKEVLSHAKKKEDHGLRCVQQWRIKNHDQTRRKSEDPAPDTR

SEQ ID NO: 46888 - protein, 462 aa, unknown
  TnpB Polypeptide
MGQATRTTKLFLDLGKRDQGGANTDKRAALDATARLLNQARAFYIDFFLAHADKLAERVPYYSEKHLEMRERAISANELLTWAEACTVATVAHPRPWEGWNFSARFPDLPFAYRRSVIKDAIGKVRAYLSSLANWEKSGKRKGKPGLPGATDHPTLYQGTCELILEEAKGGDRFVRLKVYDGHAWQWVNYPVVCSRYFQQRQREPAWEQQSPTLVLSKQAAALHFPQTKEIAAKKVKESKLDPDLVTVAIDLNVKNLAVITVRQHGTILETVFITDHGLDQQRYRHLRRIAKKQWLSGKPVKGERSNQQLWRHVRRMNEDAAHKVARSIANVCARYPGCVLLFERLRKIRAKGASKSRRMNRKQANHLRGKINQQAREKAFVAGVVTVEVNPHGTSQQCSRCGLKGERFSYRGGKRIKAPWGKLFWCPHCRYEANADWNGSVNVHHSFFNELHWQPRLNKKA

SEQ ID NO: 46889 - protein, 354 aa, Burkholderia sp.
MRLKDRHAAFLRAQAHEVNFCWNFSNELGLKILERESRFCTASDLHKYTAGATKAGLSLHSQTVQAVNEELVRRRIQFKKRRLAWRKSNGTRRSLGWIPFKASALRYRGGQVWYCGRPLSLWDSYGLHQYELGTGCFSEDSRGRWYLNVTVKVARRGRSSATAVVALDLGLKDFAATSDGRKIAGHRFYRDVEPALAGAQRANKKRRVKALHAKIANRRKDALHKLSTELVNNYGAIFIGNVKASGLAKTRMAKSVLDAGWSAFRTMLQYKSEHASVWFEEVDEAFSTQTCSCCGMRTGPKGVAGLGIRGWTCSACGTVHDRDVNAARNILARGRAGLAAGIPVLPAPSAAAVG

SEQ ID NO: 46890 - protein, 448 aa, Richelia sp.
LVDGQGEFLANQPTRNSFQIIDQLANFHVWSMLLTYQYRLQPTPDQMAILSHWGELLRRHWNYALGQRLDWLRHTRTQIDCCSLMSEPIGEIPERVDYYSQAADLKETKRLFPEYKDIYADCQQQNLMRLDRAWKRWLIPDKTGKRGGKPRFKKQGDICSFTFPRVNSPKAGAHLIDTTLKLSKIGEIPVILHRRIPEGFEVKQATIVSKADGWYVSFSLEDSTVPSSVPVEEIQSACGIDVGLEKFLTTSSSEAVAVPQFYRKAQAVLARQQRKLARKEPRSKNYQKQVNKIAKLHLRIARQRKDFHYLVAHWLCASYDLIGFEKLNIKGLARTRLAKSILDVAWGAFLNILQAVAVRRGKHTQEVDARGTSIECCNCGERVVKDLSVRIHNCPNCGVSLDRDLNASLNILKRTVGQPFAACRGLVDAQPVKQELLFVSLRSPRQTA

SEQ ID NO: 46891 - protein, 377 aa, unknown
  TnpB Polypeptide
MNLTIKLPVICDKQTTAVLSETVYRYTESFNRVSVVGWQQKRINGVELHKLTYYNEKEASKLPSQLVCSARVKATEALKSAKSNLKNGRKVSIPKSIRCPIRYDTRSYRIDFTKNIASLATIEGRKIVNIFIPEFYKNKLSWKVCSADLCMTKNQKFFLHVSMETEEQLIKPSGKVIGVDLGINRPAVTSDNNFFGEKRWKEVEARNFRLKRQLQAKGTKSAKRHLKTLSGKVNRFRKDCDHVLSKKIVTSANEGDTVVLEILKNIRKRVKARKKERRKIHAWSFERLRTFLSYKSKLYGVFVDYVEPRYTSQRCSDCGHVEKSNRKQSWFKCKVCGFQHNADLNAARNIRFVYLDSKGISVTIGPHVNRPIVPAPC

SEQ ID NO: 46892 - protein, 545 aa, unknown
  TnpB Polypeptide
MSKNNNKKKERHNKDDCFSQTFKTLQKNIDLDDQLILDEMILLFNKEKRHWFNYNDKSSVGRKKFIHNQAKYYDNEQYSYRFFQGIRQEILGMEKSIISNTKNYIIDKKSKLKSQQTNVKNASISYKTRKKNGDLKENELFFLQQKYKKQYYLENNIKNLEDTLKRDKLSICFGGKKLLNERNSLTKVDDIEEWKNRWFNARNNQMLFIGSHDESRGNANCQLSYNLNSNMFSLKIRIPDPLENKFNKKYITINNISIPSYAYEQVKMEVLKHQTKDVDKEALSFRLIKNDKGYALNITINAKKEKIITSNYNGLIGVDINPDNLAITEIDSKGNLLNSFVLPMDLKSKSQGQRQNIINDCIIELKNYALLKQKDIVIEKLDFKKKRADLHKNKSPKYAQMLSSFAYQQIINGIKVNGYKFGINIKEVDPSYTSVIGKNKYAIPLGLSVHQSAAFVIARRGYAYKEKIKQIFQTNKKSEVFTLLVPEGKQKLEDLKSSRAFTSWLNGKFGKAFCITESTNGAERYVPHNRLRVGSECDSDRMKVA

SEQ ID NO: 46893 - protein, 467 aa, Nostoc sp.
MLLSYVYKLNPSLKQAETMERWLHLLRLQYNFRVRERTEAYEQAKAPVMGNYCILQTQAECCPLTCSVSKGALYGNPWSTKGKKRSPLAQQDANLVDLKKERPWYGEICYHVLQQMLKQVDTAFVRFFKGLGKYPKTKRRGKLRSFTYPTGDVGFKGNKVRLPGLGWMRFFQSRPFPLGFKIRSTTVRKKANGFYISVLLQDDTVPQASASQQIQTALGVDLGIKKLISLSTGETIANPRFYKQMERKRSRLNWAANRKVLGSRRRQKAYQQIAQLEQKVTNQREDYQWKIAHNLVKRFDLIVFENLNVQGMMARCKPKQDESGKYLRNGQSAKSGLNKAIADAAWGSLKLKVKILSERAGVLVHEVKPNFSSQECSECGYISPTNRDKEKFLCEHCGHHADADIDAAKVILKRGLSELGINLDAVSGVPRKQDKSTSKEPVARQGISTALAVEPGNPHQVEERLSN

SEQ ID NO: 46894 - protein, 389 aa, unknown
  TnpB Polypeptide
MALSHKVYRFRLEPTVTQARGLVQQAGARRWVWNWALARRRTHYQATQTSLSFKELSTELTAVKHQPATAWLQTVDSQLLQQSLRDLQAAFSRFFAKDARFPRFKSRKRDRLRFRIPQRVQLKGSRVYVPKVGWVRIRQSQPVVEPTRSATFAQDAVGQWFVTLTVEHEIPEGPTGPPATVVGIDLGLTTAAVLSDGTSIPAPRCFRTAERTLAKAQRAVSRKHLGSMRRRKATQQVARVYQRTTRQRQDFLHKLTTQLVTTYDAFCLEDLSVTGLARTKLAKSVLDAAPGEFRRQLAYKAQWAGKPLLVVDRFFPSSKRCSACGTLKADLTLKDRVWTCAACGTHHERDHNAALNLRDEGLRLLAVGHPDSHNAQGDCVSPGTPGNGR

SEQ ID NO: 46895 - protein, 387 aa, unknown
  TnpB Polypeptide
MSVRTIALTLKPTDAEKAALERLQGAFNEACNYASEVAWREREFNSVRLHRLVYVDLRARFGLLAQHAVRAIGVVAASYKAERGVPHTFKLTAAVVLDTPRLYRLVGNRARVTTLNGRRNVELHIGGIQRRQLAAAEKLAEADLVRDHEGRWRLLVSAHYADPPTLDTAGVLGVDLGRTDIAVTSDGATFSGAHVTAIRDRYARNRARRQRKASKGTRSTRRRVRAAQTRLSGREHRFQANVNHTISRRIVDSAVASHQAIACEDLTGLRERANTHRRSKMERRRSNSWAFQQLRVFLAYKCHAAGVPFVLVNPRYTSQMCHRCLHMGERSGKRFACVNSMCRWRGDADYNGALTIALLGAAVTSPGGPWLCCSYQPGRRASESPRL

SEQ ID NO: 46896 - protein, 396 aa, Microcoleus sp.
MLVFEFKTYGKASQFTAVDEAIRTAQFVRNSCLRYWMDNRKIDRYDLNKYCAVLAKNFPFAGELNSQARQASAERAWSAISRFYDNCKKGLAGKKGYPQFQKDCRSVEYKSTGWKLALDRKSIEFTDKKGIGKLKLKGTRDLHFYQISQIKRVRLVKRADGVYVQFCIDVDRKENTEPNGNVIGLDVGLKEYYTDSNGVMVENPRFLRKSEKVLKRSGRRVSRKVKGSKNRGKARQILGKRHLKISRQRKDHAMKLARCVVGSNDLIAYEDLRIKNMAKNHCLAKSINDASWYQFRIWIEYFGKVFKKVTVAVNPQYTSQECSSCGAIVKKTLSTRTHVCQCGCSLDRDENAARNILSRGLSTVGHTGTFALNASNTSGESTSTLAGEILSQQVGS

SEQ ID NO: 46897 - protein, 382 aa, Escherichia sp.
MRRFAGACRFVFNRALARQNENHEAGNKYIPYGKMASWLVEWKNATETQWLKDSPSQPLQQSLKDLERAYKNFCRKRAAFPRFKKRGQNDAFRYPQGVKLDQGNSRIFLPKLGWMRYRNSRQVTGVVKNVTVSQSCGKWYISIQTESEVSTPVHPSASMIGLDAGVAKLATLSDGTVFGPVNSFQKNQKTLARLQRQLSRKVKFSNNWQKQKRKIQRLHSRIANIRRDYLHKVTTTVSKNHAMIVIEDLKVSNMSKSAAGTVSQPGRNVRAKSGLNRSILDQGWYEMRRQLEYKQLWSGGQVLAVPPAYTSQRCACCGHTAKENRLSQSQFRCQVCGYTANADVNGARNILAAGHAVLACGEMVQSGRPLKQEPTEMIQATA

SEQ ID NO: 46898 - protein, 498 aa, unknown
  TnpB Polypeptide
MNGELLEVVLVMGQLVSEVRDISAYATYVARNDTILGAELAQVTTTAPAEAGRQAGVAMPDFLASGRGRSRKERLFRHRVVSEYRSWQERINAVTGENSKYVSQGWRRTVDGSVPSYGEDYINLGAVDKQYAVIENNPFIDGEIVLKMVIRGEWYRLIFSFDNARFREGKVTLPLVKVENNQPVFIFTVVTDNPIVQFSGDYVIGVDVGIRNYATVVVRNSSTGRVVHESALSQRAHSLWNSVRASERQVCALKKKADLLLYRRQARMAALDEAQLHREAASRKKRELAILAAQEIAHLSHIYDNATVAVEDLSWVRNTMQNGRWNRGELVKWLTHYVSQNGGWVVAVNSANTSQLCHLCDSKVSHPVHEVSFCTEHAALDRDINAAANIAARAVPKVEKARRTRAKNRKLQRQTALKTPIARGSLKHPGRDRTKGVPTPKRKNHHRTVREVILPSSPARVIMTSVLADCGAYGATGTSQAAIKQGNTTYKCRVYSLN

SEQ ID NO: 46899 - protein, 375 aa, unknown
  TnpB Polypeptide
LYNEANYVIRQKFIEEGKYVSYKEMNVKFKTRDNYKLTFSQPANCTLRLLDKNWKSYFRSIRDWKEHPEKYLGMPKLPKYLKKDGRFPWMIPNNQLVYDYEKGTVYIRNRLLNDYKWKCRCLGRIIQVRFIPRGSCYVMEIVYEVEIPNAKIETNRIASVDLGVDNLVTMTNNIGLNPIIINGKGVKSTNQYYNKRLAKEKSLLKIRHNKDWSNKLDTITFKRHRRIKNYMHNTSSYIVKWCVENEIDTLVVGKNKEWKQNVFMGKENNQKFMAIPYQMLLQQLKYKCENVGIKYIETEESYSSGTSFLDGENPIKQNYDKSRRIERGLFKSNTGLLINSDVNGSLQIMMKVFPNAFKERYGIEAVLTPIVINAA

SEQ ID NO: 46900 - protein, 421 aa, unknown
  TnpB Polypeptide
MELVTWKCKLKNLTAQEYQYLREMCYLSKNVYNEAVYNIRQHYFAEGTYLRYEANFGQMKFSENYINLGSNVSQATMRKADQSFKSFFGLLKKSKQGIYENWKIRLPHYLKKDPFYPVEFIHAGEADLSKGKFKIPKSKYLRDKYPGLKLYITIPEYIRDKKVHTISIVPKYNGRYFETRIVFEKEDTSLELDSKNALAVDLGVNNFATCVTSSGNSFIIDGKEVKSINQWYNKENARLQSVKDKQKIKGYTKKQYLISGKRDRRIQDFIYSSTKYIVKYCIDNDIGNLVVGYNDGFQDKVNLGKVNNQQFVLLPYGKFKTRLEYLCNLYGINYVEQEESYTSKASFWDQDEMPKWNPLNPKQGEFSGKRIKRGLYQTKSGKLLNADVNGALNILRKSKVVSLETLYRRGEVLTPTRIRLA

SEQ ID NO: 46901 - protein, 434 aa, unknown
  TnpB Polypeptide
MILKTWKQNIKHISSAEYEILRKMCRLSKNVYNTSLYNIRQHYFAEKSYLRFEANYPLMKCDDNYRLLGANVAQQTMRSADQSFKAFFGLLKLAKSGRYESWRIKLPKYLDKDAYYPIKFAQAAITDGKLLVPMSPEMKRVTDTRIRIQIPKYLADKKIHQVHIIPKHNAKFFEIRYMFEDIEEGINYDLDRTKALAIDFGINNFCTCVTNDGNSFIVDGKKLKSINQWYNKELARLSSIKDKQKIKHCTNLQYSKINKRNNQINDYIYKSAKFIINYCVEHKIGNLVVGYNDGFQDKVNLGKVNNQKFVMIPYGRLKDRLEYLCKLHNINYILQEESYTSKASFFDYDDVPVWNPQNPKQGNFSGKRISRGQYLTQDKTVINADVNGALNILRKSNVVSCKALYSSGDVITPLRIRLVRSNSGGNLNSKLLNN

SEQ ID NO: 46902 - protein, 377 aa, unknown
  TnpB Polypeptide
MANKAIKYRLYPTAEQAVMFSKTFGCCRKVYNLMLEDKIASYQNSKTFGKQTPAMYKTAYPFLKEVDSLSLANVQLNLQGAMRNCFDKKRKKKNGFPKFKSAKHSRKSYTTNNQNGTVAIIDNRYIKLPKIGEVKAVIHKDPELDWVIKSATISQDSDGKFYVSVLFEFDKVIEQIPVSDNAIGLDYASDGLYVDDKGNVGSNHKFYRESHKKLVKEQRRLSRKVGSKKNSAKSHNYQKQLLKVNKIHKHITNQRLDDLHKKSTAIAKQYDVVCVESLNMQSMSNRGFGNGKATMDNGYGMFLTMLEYKLADRGKYFVKVDKWFPSSQLCHCCGTIHKEMKNLTIRTLQCDCGMTISRDQNAAINIRNEGLRILSSA

SEQ ID NO: 46903 - protein, 446 aa, Marinobacter sp.
MRNVIIRTDKWPLQTTQQQLDYVRLTQVAYRSYCRALSIVVLNNWPALCQAQSFSAAVERLIHPTAKNPSPRHTYFSKRFYKFPSYLRRAAIEFVKGQVSSYLTRYGQWLDGDRRRADARPPMFTPDSGCYPSLYRGQMVRFDEDCKSVDIKLWDGREWLWHKMSVKSVRQRHLQGKTKSPALILARGHCHLSVPVEIRRVRLPDEKRVCSVDVGINTLATASIITSNGTVVARRFLHPAADIDRRDKRSRLISKKARKTGNLSKGFCKGVYRKIGNINKQIAQITSKELVTFALAHGADVIVFEDLKGWRPKAGRKRSPLRQRFHGWLHRSLATLTEEKFVEAGGRVAHVYARGTSSWAFDGSGKLRRDKSNATQATFSTGKRYNADLNASYNIGARYWAWKHTLTRCKDGQLLGDRSSSGKPRMPVTLSTLWPRESEAPYQCPA

SEQ ID NO: 46904 - protein, 400 aa, unknown
  TnpB Polypeptide
MRASKSLYNEALYNVRQHFFETGDYLSYNENYKLMSKQSEHYRILSTSQGQNIIRKVDEAMKAFFGSLKSKTKQKVRLPRYLDKLGYYPLVDRMVYKPKSAYYVMPRGHFIKKVSKYLQETSHKVSKYSTDLQEISNLHIKIDTPKCISNKEIKEITIKPKYDGQYIEVIHVYIDDEENKTQTKKTETMAIDFGYNNLATCAVTNYKHLLLDGLKLKSMNQRYSKKISRLASLRPSQNVLTKRMIHLIEKRNNQMNYGINKAARLIITHALENNVGEIVIGYNDSFKDMKISKKINQWFKSIPIARLRDRIVYLAKQYEIKTTIVNESYTSIASYIDQDPFKKSIFSGKRIKRGLYKSKEGIMINADLNAALNILRKSKPDAKRIGSKGWNTPKRTFVFS

SEQ ID NO: 46905 - protein, 375 aa, unknown
  TnpB Polypeptide
MKYLCERVCAHKGSQGVQCAENSLKHERGEELLPLLLAYRDAVNRVLEELWNNIEWEKEKVKGKKQWRLIPKYKVDIKSKEYKKKLRESLLQEWPYAAHWVDSAIKTAYSILKSWRKNYVKGDRRRRRPTARRLFVRAKQTLVKLEDERLRVTVKPDEYVYIDLTHRYFPLPSEVSSAGLGEPVITPEKVHLPVHYEDDAQGGNPSVAWDFNLLSFDGYSPETAWVRIDTKKLASVHISSFEKRRSVQRKASRSKKARRVLSKYSNRERNRARKHQLEIARVIQSMCGSVGLEELKKQGMYTRSRLWNRMISRSDWRSITRILVGRLGEARVEELDPYGSSSYCSRCGWHNKDLNGADVFVCKECGLRIGSSMRR

SEQ ID NO: 46906 - protein, 648 aa, unknown
  TnpB Polypeptide
MNEGNKQFISTAEAARITGLHPHTIRKIADNNQVQCYKTPSGQRKFNKAGLEKFCNPVSSVIEIPTNPRINLYTHVSHLKNNWMTLLDKLSSSNIENLNMLPMFLLQMLLRESISKEKDFMFFWTPAYKELSEKLLLPTEIDSVASDLNFCNNLSKKAEGKLPCLTMNPIKVQNKNSLKTCFQLSTSTVVNKWVNEVTPTELIKALKIKLKPSCAQKTILDEWINTSNYVYNQTVETIYNKKHPANFQSLRDLLVTANTKKHNSEYILISNQIKQFSADKMVLKKELIKLSKTPSQNTIRIQELTQQIHNIETNVKTENARLRAASKMMDAEKNDGLHDWELNTPKEVRAGAVNDVCKAIKSGISNLKAGNIKHFRLGFRKRTENYKCAVVPKNFLKNKHGVIQLAPEFFKENCKFKMGKKTIKKHKLLEIKYDSRIVKQMNEYWLIIPTSVKIQEKHIPVNYCGVDPGVRTFMTTFGNHGCTEYDFNYRKIQNLDERIQRLKYGALNHRHRVPKNKIIRCERRKENIINELHWKTINNLLKTNDFIFYGDIKSHGIVKHGKNRTLNTRMNNMKFYKFKQRLLYKATEKNKKVYFVHEAYTSQTCCICGSNNKPGNSKIYSCMTCKKQIGRDVNAAKNILMKGVIKNL

SEQ ID NO: 46907 - protein, 425 aa, unknown
  TnpB Polypeptide
MIVHRGFRYRLRPTADQEARFRQVAGVVRLVYNLALEQRRTWWRHYRRETGRALNGDTQCLELTKLRAVYDWVAAVSLTCQQQALRDLDGAFAKFFKGLTSFPTPRKKGVHDAFRFQGRECRICRLNRSWGAVTIPKIGAVRFRWTRGIQGKIKNVTVSRDDLGWHVSFACAVEIDDIPIPVTPGAAIGIDRGVTHTFAFSDSAFGENGFSDLPMERLRLLERRARKHGRALARCKRGSRRRDIAKRRLARTMATAARIRHHWLHCQTTALARHYSLIVIEDLKVRNMTASAAGTIKEPGRNVRQKAGLNRVILEQGWRQGETLFAYKLQARGGELIKVNAAYTSQACSRCGSISKSHRKSQAVFECSDCGVSINADTNAAINILKAGTGPAARAPVAAPLNRESRKEPQVLSGKIPGIYASGRC

SEQ ID NO: 46908 - protein, 387 aa, unknown
  TnpB Polypeptide
MELRMYRYRLYPSKKQKQHLFKSFDICKEIYNELLETSIKIYKETGKTLSKFDFDKLLTGLYPEVYAQVKQNISDRVSKAFQNFFRRVKDPSCKKKGFPRFKSRIHSITYPQHGFKFLSQRRLHVSKIGSIPIVLHRIPKGKVKTLTIKQNKVGQWFAIFVCEVGVKPVKNTSKKEIGIDVGLTSFATTSDGVFVNNPRYLVKAEKRLKLLSRRLSRKKKGSKNRKKSKHILAKQHLKVSNQRFDFLHKLSYELTKNNKTIVVEKLNIKGMLHDHHLAKYIGDASWNAFINMLEYKAVTSGSALIKVNPKNTSKTCSNCGAIVDMPLNQREYRCGVCGFVCHRDLNASINILKIGLDKPESNACGHDVRPSSLKANVVEAGTILDNS

SEQ ID NO: 46909 - protein, 486 aa, unknown
  TnpB Polypeptide
MTTDQITSTVTRTWTGAVRLRNAREHRALEHLWWWANTVRNALCEQALSIREHNRRTFLRHGTDWTPDDFASVLESPDERVIAHPRRNQLCRQWTKVTREARENSTTDGFDATRFGRRVVTGIFEDFARRYAQPGAPAPKFRPGWKLRSVCVYEARLAWRGNRREAVLRVQGLPALRVRLHRPVPEGATTRGTIRLVRRQRPCRSRVPARYEIRLMVDLPARERCADAQRVRGWDPGGRRSLTSDAGDVVQVRTRTKTDVRRLARRVSRCKRGSRGWRKAKAAVRLHLERETRARDQHRHKQIHHAARKADVHVVELNNHAAMRRRGGKSKSRMNRSLAEAGPARTVQLLRHQCERHGKRLVEAPAPYNSRTCAACGSCETKLTRARIACTACGHTADRDVNAAANALRWARTNGAVPAPGGFNREVSARRGSSRAPQCPVPPESLGPETALARREPGKLPGQRNRQDFCPCPNPQEFCPNGQNSC

SEQ ID NO: 46910 - protein, 424 aa, unknown
  TnpB Polypeptide
MNLLTHDKPCTKHSKGGYRMKLNYRVRLYPNKTMKRVLDSLCDYRRYCWNQAIACWNEQYEARSIGLTEDLRNKLRNKNETLTSEEQGLVNQYPNPSHYSVRNELVANKEDWQYTFSSRVLQLAVKDVATAWGAFFDSRDTAGRPTFKTRKEPKQGFKTDCARIRNGRLLLDKPVGHQGEWQTIRFKGLDIPDGNITLCSVTRVDGRYTATFTIEVEPVQSPRTGRKTAVDVNVDHFDTTEGQTTLKPDALNPLYDRVRHYQRILARKRHKNPKATHSKGYQATRTKLQRTYERIANIQKDLLHKFTTELYRRFDTIVIEDLDVKRMQMSKKAKNLHRSMFGQFRRLMEYKSLKFGKALIIADRYYPSTQRCSACGFVKTGDDKITLRGNQKHGTRHNQYICYQCGYEDNRDHNAVLNLLALAK

SEQ ID NO: 46911 - protein, 370 aa, unknown
  TnpB Polypeptide
MTVRQKSYKFRAYPNQEQKQMFTKTFGCSRAVWNMMLADKIKHYEDTKETLYNTPAQYKKEFPWLKEVDSLALCNVQLNLQAAYKNFFRSGFGFPKFKKKSHRQSYKTNNNNNGRIVLENGFVKLPKVGWVRVKVHRQINGVIKSATISMTPTGKYHISILCETEIAPLPKTNSSVGVDLGISDFAILSTGEKIGNKRFLNQLSKKLAKEQKRLSRRALIAKKEGRKLSDSKNYQKQRMKVAKIHEKIANMRRDFLHKLSAHLVKNHDIICIEDLSSKNLMKNHKLAKSIRDVSWSEFVRMLEYKANWYEKQVSKINRWYPSSQICSDCGFSSGNKPLSVREWTCTNCGCHHDRDVNASINILNEGLRLL

SEQ ID NO: 46912 - protein, 408 aa, unknown
  TnpB Polypeptide
MEINLTSKLRIVFQSEDDRKSAFDTLIAYRDACNYVSQYIFNHDFVLKQSELQSALYHELRKQFDLKSQMAQSVFKTVIARYKTVQTQLRKQRVWDGYKKDNHGKEIPNYINKDLTFLWKPIEFKRPQLDLVRNRDYSFKNNVLSMNTVNGRILVNVYGLSDNHYFDGSWALGTGRVVRRGKHWFFHVAVSKEVPEFAMEDLKHVVGVDRGLRQILTTYDEKGQTRFVNGAFISKKRNHYARLRARLQAKGTKSAKRRLRSLSGRESRWMSDVNHQLSKTLVDTYGKQTLFVLEDLTGVTFNTVNSRKKEHRYEHRSWSFYDLEQKLRYKAHLNESEVVLVDAHYTSQRCPKCGSIDKSNRDKNIHQYACSNCGYLSDDDRVGAMNIYELGKWFVSGIEKPSFVISNE

SEQ ID NO: 46913 - protein, 436 aa, unknown
  TnpB Polypeptide
MAGWAGMEKDILNIESVFKMRLVYKFNIGKNEELSRLCKISNNLYNQALYIFRETLSKEDKWLSYYELNNILIKTKNLDGEVNYKLLKAQCSQQILRVLDKNIKSYYRSIHDFKKNPCKYRGKPELPKYKKRGSEFSLFYTNQSCSIRQGRIILSKDLFIDIPQYDKYCCRISNFKQVRIIPLFVGYKVEIVYDIENKIIEDIRDEKVASIDLGIDNLVTLISEDCNFIFSGRFVKSYNQFFNKTLSRLISIKDLQRIRKTTNRINKLYYDRDRYLEDVFHKISRRIVDILIDSRVTKLIVGYNKGWKTGVNMGKKNNQKFTQIPFARLISYLEYKCRLSGIEFVVNEESYTSKCDALALEPISKHDSYLGKRIKRGLFQSSVGKLINADVNGALNIMRKVVGDSNGVIQRIIDSGLLFNPVRVRSVFPRECLLLN

SEQ ID NO: 46914 - protein, 405 aa, unknown
  TnpB Polypeptide
LSFIVLAFKSVWQYYVPVDDVLRLLDVFRRMVNDSIRIGLLNDASSLRRLSLLSYNQLAQYDSPSYYKLCAISRAAGILAARKKSVRRGVPTRTPYAVGQQLVSCYGFKIENGYLRIPVSRGKRFSIPLTKHVLEVISQPGVDVRSFTLTRNRLSLCIARDTPRIECTSTLGVDRNLRNLTVGNDQETSRYDLSKCVRIANTTVRIVASFTRDDARIRTTIASKYGQRRTARTGHILHNATKTIAAAAVERRTAIVLENIEGIRSLYRKGNGQGRKYRGRMNGWSFGEVQRQIEYKARWAGLPVIRLSRRETRGSSVTCPRCGERLQSDKRLERKLWCGNCRIVMDRDMVAAVNLARRGRVRFARSRPPILLEAQGGAVEAVKGNPTPTVIPGVDAPKLTQQTKS

SEQ ID NO: 46915 - protein, 315 aa, unknown
  TnpB Polypeptide
MEYSYKFRLYPNREQENLIVRTFGCCRFVFNHYLALRKDTYEQTGETLNYYACAKDMTGLKQQEDTLWLKGVDATALQSSLRDPDDAYQHFFRRVQKGEKPGYPQFKSKHHKQSYKSKCVGSNIKVLEGAVQLPKLGRVKCRISRSVQGRILSATVSRSASGKYYVSLCCRLDQELPKLPSTGAVVGLDVGIKSFAVSSDGVEYPNPKYLRQSEKKLARLQRQLSRKTKGSGNWSKARIQVARLHEHIANQRRDIQHKLSMEIVRQNDIICIEDLAPKNMVRNHKLAKSISDAGWGGSAGSSPTRLHGTGSSSSP

SEQ ID NO: 46916 - protein, 370 aa, Rhodococcus sp.
VQLRYQYRVYPTPGQQDMLARSFGCARVVFNDALRARQDAYVSGVKLSDTDVQKQVVTEAKKTPQRAWLAEVASVALVQSVRDSAVAYRNWFDSMSGKRKGRKVGPPRFKSRKDNRQAIRLTRNGFSLRPNRKLYIAKVGELEVAWSRELPSTPSSVSIIKDPAGRYFASFVVETTDDPLPECDAEVGIDLGLTTFAVLSDGKVIESPKFFRRAERTLRKAQQSLSRKQKGSKNRVKARIRVAKAHAKVADARNDWAHKQSMAIIRENQAVFVEDLCVTGLARTRLAKSVHDAGWAMFTRLLEEKATRYGRTFVKVDRFYRRVSCARRAGRRTARNRSRFGSGSARRAGWSTTAISTPPRTSTRPDGPSG

SEQ ID NO: 46917 - protein, 237 aa, Rhodococcus sp.
VVAGVAVDAVERVHHQGPGGSVLRQFCGRDDRRSVAGVRCGGGDRPGFDDVRGALGREGHRVPEVFPPRRTHTPQGAAESVPQAEGIEEQGQGAHPCRQGPRQGGRRPQRLGTQAVHGDHPREPSGVRRGLVCHRAGADAVGEVGARRRVGDVHPAARGEGHPVRAHLRQGGPLLPSSQLCSACGKKDGPKPLSIREWQCTACGVVHDRDLNAAKNIHAAGRAEWLNACGGTVNPAA

SEQ ID NO: 46918 - protein, 388 aa, Bacillus sp.
MFKEVKSMLANKAYKFRIYPTKDQEILISKTIGCSRFVFNHFLAKQKETYDSDKRYIEYNECAKQLTQLKKYFSWLKEADATALQQSLKFLDNAYKRFFKKLNKFPRFKTKNNPVQSYKTVGKIKVQGNQLTLPKLGKIRFSKSREIEGRILNATVRRNPSGKYFVSILAEVEIQELPKTNSTVGVDVGLKDFAILSTGQSFRNLKWFRTLEKKLADAQRVLSRRQELALKRKCRLDEAKNFQKQKRVVARIHERITNARTDYLQKISTHIIKNHDIVGIEDLQVSNMLKNRKLSKAISEVSWSQFRTMLEYKAKWYGKQVIAVSKTYASSQLCSNCGYKNKVVKNLKLREWDCPSCGAHHDRDINASINLKNEAIRLLTVGTTGIAY

SEQ ID NO: 46919 - protein, 396 aa, Bacillus sp.
LEIFHKGYKFRLYPTKEQAALINKTIGCCRYVFNWALGQQYDKNAYWYIVEEMVQNGQLNQNLWKSEFYHAAKQQKELTGLKKEIQWLNEVDSTALQNSLQHLGSAFKSYYEKTKAKPKFKSKRNEIQSYKSKCNYGKSGATIRIEKEGYLRLPKLGLVKFSKSKEVKGKILSATVRRAPSGKYFVSLLTEQEVQSVQRSMFEVGIDVGLKVFATLSDGTKIKNPKWFQKTEEKLAKAQRILSRRKKGGSNWYKQKKKVARIHEKIVNQRNDFLHKVSTSLVNENQVICMENLRVKNMLKNGKLAKAISEVSWSEFRRMLEYKCEWYGKQLSVVGAHFPSSQICSSCGAKNKKVKDLSVRIWTCSCGATHDRDENAAKNIFQEGKRLLTVGQTGLA

SEQ ID NO: 46920 - protein, 409 aa, unknown
  TnpB Polypeptide
MIKAHKIRLNPLPEQELYFRKAAGTARFVYNWGLAEWQRQKAAHPGQEHRVMAIKKDFNALKAQQYPWVYEVAKDVAEGAFQNLGQALENYYASQSGKRQGAKMGFPHFKSKKNNRQSFRLNNDKFKVSDHSLYVPKLGWVNMAEALRFEGKIMGAVVSKSAGHWYVAIAVEMEVPAPLEFPKESTGVDIGIKELLVLSDGTRYENQAPLRSELRHLKFLNRQLARRKKGSQRWYKARQQLEVFHGRIANRRADQVNKMTTAVAKTYRIVGMEDLNAKGMVRNHHLALSLSDAAFGEIKRQMQYKKEWFGGKVVLVNRFFPSSRMCSVCKHLNTDLELSDREWTCANCGTHHLRDDNASYNIEQEALRLLGSTPVVATSGILARGRDVRPHYAAIPVEASISKRSLLNT

SEQ ID NO: 46921 - protein, 409 aa, unknown; identical to SEQ ID NO: 46920
  TnpB Polypeptide

SEQ ID NO: 46922 - protein, 363 aa, Scytonema sp.
MYAIKRELKLNNKEISQMRGMAGFKRLVYNFGLDLLVGIGQFTEVKASDSKRIDAIKKVFTQVTMQKPENSWMKKYPSTIYQSAFIDLKNAVSRWREGLAEFPKKKSKKRGDSFTVYKTAGVYPEKGKPPLPFTNRVTILAGKHIKLPGLKTFRLKERINFICSSQTFTVSRTADKWFVSFVLGAEKIPPIIHPTQRVGVDLGVKCLATVSDGSKYDMPITTIRAKTKLGKLQWRNRNKVLGNKKLQIFASNKAKKYYVRLSRQHLRISNIRQDVTQKMTTDLSRKAYNIRIEELNVSGMIANSKLAAAVSNNCFYEIRRQLVYKQAHYGTKVELVDRWYPSSKTCSCCGHIQDMKLSDRVFH

SEQ ID NO: 46923 - protein, 383 aa, unknown
  TnpB Polypeptide
MKETIVRGVKTRIYPTKSQQILIEKTLGCVRLVWNYSLMERKEIYDMYKDYPTLLTSHKYKTPAKWKIEFPFLKEVDSQALATTYQELQQSFKNYYKKTHEFPRFKSKRNFRNSFTSHTTNKNIRIEGNYVRLPKLGLIKMKSKRQALPEGATIKAATISKSATGKYAVSLRVEYIKETIELCSETTNSIGLDFSMNGFYIDQTGKKANYPMYLKQSLEKLKKEQRKLSKKVKGSNSYNKQRLKIALIHEKVRNQRLDFHHKLANKIIKDYDIITVEKLSLQDMQVNKYFSRKIRDMGYHNFLRILKYKSRDNGKIFHQVDKYFPSSKKCSSCGSIKKELPLSQRTYACECGNIIDRDINAAYNLCIEGVKSYFKEDRIASLA

SEQ ID NO: 46924 - protein, 445 aa, unknown
  TnpB Polypeptide
MDYKVLKPFWTPQLTEISSELWLPTKTDWQGSDMISSNGLLSGAVGSSWFLSKLACHQNKSSLRIYSPSYTCSPAGCMASEVTKTKLLRISPTADQKKLFKTWTDCSRYVFNQTISYIRSCVNFSPSWMDIKKDMLKHLPAWCDPVPFQIKGIAIKEAHGAFWKAKGQPQFRSKKNSEQSCYIPKSAIKQTGIYPRISGPGLHYQESLPQNIKDSRLIWRFEKYWIAIPHKAYCLKAENQSQTVALDPGIRSFMSFYSPDYSGNIGKGDFSRIQRLCAHLDNLISRRDKCTNKQRRCSLTKASRRARGKIKYLISELHFKTAKFLLDNFDIILLPTFETKQMACKAKRKIRKKSVRAMLTFSHYKFKQILKWKASLAGKTVVDCSEAYTSKTHPQTGEIKNIGGAKWIKLLDGSRADRDVIGARNILLRSLVDTPDLFQVAVNES

SEQ ID NO: 46925 - protein, 384 aa, unknown
  TnpB Polypeptide
MNMKLVRTIKLKLNIPVESIKPTLDAYTKAFNFVCQVGWNDSDSNGVSLHNKTYLKTREYLPSQLAVSARMKATEAIKAVKAKLKKKQKATCPQSKQCSVRYDARSFNVWFERNELSLLTIEGRIKIPVSVPECFRQYLTWKRCSADLFIRKNKVFLNIVFSKEVSDSELSGDVVGVDRGIKKIAVTSENQFFGGGQIKRVSRRYEKIRSVLQSCGSKSAKRHLQKISKKENRFRTDTNHAITKQIVESLDNGTVIALENLSGIRQTVRLRKKQRKELHKWNFFQFEQFLAYKAEARGMKVKYVDARYTSQKCSACGYISRSNRQSQTIFKCKHCGFFLNADLNASRNIRQNYLDATCYPGRVLVNKPIAGSRLQPTYLQTIGL

SEQ ID NO: 46926 - protein, 285 aa, Streptomyces sp.
VEWADRIEGNRAVAYRIHLDTARGRWYLTASWQRPLVQTIPWDTARAGGVIGVDTNADHFAAYRLDAHGNPVGEPHRFAYDLSGTAHHRDAQIRHTLTRLLHWAQQTGVTGIGIEDLDFSTEKTREKHGRRKGFRQLISGIPTGKLKARLVSMAAEQGLAIIAVDPAYTSMWGGQHWQKPLTTPRRKMSRHDAAGIAIGRRALGHPIRRRTAPPPHDRRDRVRHRTAQTAPGAREREGTRPPATEHAPRDVPPNGTRKRQPSAPKTVRDAPRTHEWAQDPLMCSG

SEQ ID NO: 46927 - protein, 485 aa, Kamptonema sp.
MTLTYCKAIPTPIDELNAIGKTQLEMFLGAYAPIFHKAVCETVNFMLLGEGFNKSQWNTHLQKTYGISKRHANGVISSAKGAVDSAALCRISHIKTLEGKAQSCESWLKKAEKKLRLARKFYAKKNWQNSKTGCGFPLSSSLKHRQTNWQNLRFQIHNKKRKLTKYLQILTTLKSIPIKVRVPKNQAFVVGSKDESYGNQVCQWDGDNLRFRVPVCLESKFGKNVDSKIGNFPRNINRLPATGAKTWHFYYKEDKWCVAVSFTPSEIKQVSHSVNYGCIGIDLNPGSIGWVHIDAEGNLKSHGQIPLQTGLPNGKQQDKLVKACLELSALAIKFQCPIVSEELDFATKKEQLRERGNKYARMLSSWAYSEFFKLLNSILSNRGVELSTVNPAYSSVIGLVKYLRMYGLASDESAALVIARRGMRLSEKIPGSLTAFVEVKSTKHVWSLWNQLNKKIKQSGIITNRHSYYSNSNWDFLGNLNIEEA

SEQ ID NO: 46928 - protein, 520 aa, Scytonema sp.
MGKKKQQKTEYTYTQILPVVSCSDETQVNKIMHLCGIPRALTYNKLGSLQGWSVHWTQAAPIIRKILTPSDIGLPAKIWEWSVNDTMKNVSAQQEAAKTILIRDIWRKYPMQSNQRKRLEWIETNKDKKKGKELKQLKEKALELFPPGSIEIERNRLIELLSTAPTKDNWLHRKFRSQYQRGHTFVRNQIVYQPNGYTCKRLNRHSVELQIQGLERGKRITLKLRSRQIIKGQIRVIHNEYGRLEVHCLRTGTLVLPQGKPNTKLGIDKGYTEGFYTSENQTIASGLGQLMTEKTERIAKTNRNRYRIRCFGETIKKHDPKKAARILENNLGYKKKSRKLQREKETIKNFIRKDLRKVIISPIDIICEDLTTPIKGKRQAKQINRKLNQWMKGELQASLVQLSMKTGSTISVVNPAYTSQLDSQTGTLLGHRNGDRFIRYTKDVVQADWNAAINIRIREQDNQITRYMQSGEVETILIGRTVQYLHSIGCSVADALNSGWLLPKFSAKALKYESEYYPQG

SEQ ID NO: 46929 - protein, 489 aa, unknown
  TnpB Polypeptide
VKKTIKNYCLNATQSKLDELYEIAKRYVSVKNNIFQRYGSLSGLQYLSYPRQIRDEWVKTRHADKFNMQARYWKQALEEAFSNIQSNWSNGFNKIRHSLHRNQSFSKDEKHYAFYLLKATDLLYKAVALESFTIPDKFQNMKIIRRDKIHKYLKNRLRKYTGNKPYQFKNRSFQIDHNMYNIYKDVKGRLWIGIMGLTPRKRIMLQMSSSVEPVGNLRIVLKDKNIEIHNAVKVAVKETMMGELKAVDKGFTTVITSSSGKKYGEGFSEILKTESNRFSEKNKNRNKLRSLSDKYEKRGDIVKAEVIKKNNLGRKKYFYQKQINLNEIKRIINLSLNQFIKEERPAVLVTEDLTFTNWNRKLSKKVKRYFSSWLKGYLQEQIDYKTLLNGIQQVVVNPAYGSQVCHLCRRFGVRRGDKFYCEIHGVLDADHNAALNYLARMSDTEINIYTPYRKVKDILRERLRLSNQDSRYSVINITGQSESERAEYV

SEQ ID NO: 46930 - protein, 375 aa, unknown
  TnpB Polypeptide
MILAKKVRIYPTKEQEQKLWQSVGTARFIYNYTLAKQEENYKNGGKFISDGIIRKELTQLKKSELIWLNEVSNNVTKQAVKDACNAYKRFFKGLAKKPKFKIRKKSKPSFYNDPIKLKVKEKKVLIEKIGWIKINEQIPINVKYTNPRITYDNKYWYLSVGIEVDKKQEELTNISLGIDLGLKDLAVCSDGKVFKNINKTKEVKILEKRLKQKQRQISRKYEINKIKKGGSCQFIKTKNIEKLENTTKLMHRKLTNIRDNYIHQVTTSIVKTKPYRIVIEDLNVSGMIKNKHLSDSVKKQCFHKFRQYITYKSELNGIELVVADRFYPSSKTCNKCGFIKKDLKLKDRVYRCPHCGAVIDRDLNAALNLSMYKLA

SEQ ID NO: 46931 - protein, 145 aa, unknown
  TnpB Polypeptide
MCKRKPQLCAAEKEVASCHEKIRNQRKDYLHKLSRRITDQYDIVAVEDIDMKAMGQCLHFGKSVQDNGYGMFRNMLDYKLAWKGKKLVKTDRFFPSSKKCSKCGKIKKELGLSERVYRCTCGNEMDRDRNAAINIREEARRMLAV

SEQ ID NO: 46932 - protein, 447 aa, unknown
  TnpB Polypeptide
MQKRKFTVVIQLHEKNNQDIITYVESSRSEYAKAVRETFYTIKNSDSFNESSFNTYLQSSYGITRRTAKSIISDAQGRFNSLKELKQYEAKQLERKISHLEERVIPKLVKKMDDNSKLLQARISVSLIKQRNLRLKIVAKKNKLNRLKQKLVNLNYQLESGRLKLCFGTKKLLEQDYDKFVEQRDSQMTFIGAKEETCCNHNFQLRYNRKDNQFSIKMRRDFGGYKSVNIKDKFIYGKVYFNHHKNKIISILKDKNSPLSYKIIKKNDRYYICCTFEIQIDTNSFITCSDYGTIGLDFNKGFVTLSETNQYGHLVQTRFLPYRFRAGNKTKTDLQEIANHVMTLASQTGKSICIENLDFKVAKSKTETKQGKQYNDMTHSLAYHQFVETMESIAYRNKVTLIKVNPAWTSWLAKKLFCPTMKLNVHVGASYVIARRGQGYKDTVKSL

SEQ ID NO: 46933 - protein, 412 aa, unknown
  TnpB Polypeptide
MQVIVKNEMLFKGVVFYLESDLPSEAKFLLEDFRLAVNNAVRAGLQARVTSRNALVKIAYKDFRREHPRMYSQHLVSAFEVAGGILKNYRKRIRKGVTGRIPFVKRLMMKAENQAYKLDRKSGVIDLPIRAGCHVDLRLIVSQYHRKYLDDMALSLGSLTILPNRVIVAFRKNAPKPFVPETVLSLDTNERSLDGVFIEGDVAKAIKAEFPDIAIIQQRHHDRRKRLQKEKAHDRRTSRNLCRREGAREHHRIDYRLHQVANSVLRFAEERKSAIVLENLKGMRPRMSKELNRRLSMWPRRKLHQIIEYKAQWRGIPVFKVDPRNSSRTCPTCGRIQDSRMGAEFACECGWHLDRHINASINLLQTAVSKGMAGGLRFNPGAFQHDVMMILYEPAMAARSEPNGTSSIFEVT

SEQ ID NO: 46934 - protein, 510 aa, unknown
  TnpB Polypeptide
MYTVRLKLELSKSEERFMSKCFFFMNTIHNRIVSHAQNRINALFHDSDYMSARMEYGQSGFAKKKSAQLSSAQKKRKKQLSQLMKDKQIEYSLRQTDLERYAKILHAKYVKFISSQQVQAEAKAVYSGVAKVLFGDGMHLHFKPVNQFDCIKQKCATNGVNVIDWNTAKFMNHLYQMTGLPDTPYMKAVRSQTVLYADVVYTYLKRIEFSAVFHYYVIITLRGEAPKNFHKCNHKNRTGVDFGTSSIATSSNNVLHLEELAPLSDRYERQIRHLQNLADRSMRLHNPENYNSNGTVKKGKHHWELTKRCRKLKRMIRVLYRKQSAYVRDSHRAFINTLLQESSEFILEPMEFAGLQKKAKTTERSDKLSTVTAKDGTVKKIHKFKRKKRYGRSIKNRSPGLMQSELKRKAEQYDIPYFEINRTAYKASQLHHDTGEYIKPKLSERFKVIDGHKVQRDLYSAFLICSTSSSLTIPDFEICNSSFPRFVEMHNILINNMKKRGFSMKQCFGF

SEQ ID NO: 46935 - protein, 402 aa, Escherichia sp.
VKRLQAFKFQLRPGGQQECEMRRFAGACRFVFNRALARQNENHEAGNKYIPYGKMASWLVEWKNATETQWLKDSPSQPLQQSLKDLERAYKNFFRKRAAFPRFKKRGQNDAFRYPQGVKLDQENSRIFLPKLGWMRYRNSRQVTGVVKNVTVSQSCGKWYISIQTESEVSTPVHPSASMVGLDAGVAKLATLSDGTVFEPVNSFQKNQKTLARLQRQLSRKVKFSNNWQKQKRKIQRLHSCIANIRRDYLHKVTTTVSKNHAMIVIEDLKVSNMSKSAAGTVSQPGRNVRAKSGLNRSILDQGWYEMRRQLEYKQLWRGGQVLAVPPAYTSQRCACCGHTAKENRLSQSQFRCQVCGYTANADVNGARNILAAGHAVLACGEMVQSGRPLKQEPTEMIQATA

SEQ ID NO: 46936 - protein, 234 aa, Staphylococcus sp.
MTTEDIKNIDISQSTLYKAKHNPDYILRMRFENIIKLSEYIIKKRLEKKRVSYVGIDIGTSNILTASDKDMKRTLIIENKRIYNAIKTYNRWLNGKNPTKESSENSKETLLRTIETNVAKLINELTNHYIEPVTFVVGKVYQESEKIRPHYTLYRIFVEKMREEMHYRNIGIEIEDESYTSIICPECNHRDSGNRTNSNQFRCKSCGFSHENDDVVASVNIVKRYLENREDNAF

SEQ ID NO: 46937 - protein, 257 aa, unknown
  TnpB Polypeptide
MSQIKTVTIQYRHGKWECSITQEVECKTALRVLNSITGFDINSKQTVVGSNGFTADNPKFLKRSKEKLTHLQRQLARRNKGSNRWQKTKQRINKLHGKISRQRLDFAHQISRQITNETDILVFEDLNIKAMQQFNGSMVADNVMGLITQLSRYKAELEGKLYHEIDRFEKSTGICSECDQQHALSLNERYFTCTACNTYQSRDLSAAKSIAKTGELDLVATGIVARVMPTSQQKSIIKMKVFELSKLVEGSEKKEAA

SEQ ID NO: 46938 - protein, 448 aa, unknown
  TnpB Polypeptide
MEARRSCIILLEHPSSDQHSRFQHTQTKYQYCQNQASDHAWPDTPKHPDDLETDKQTVEDALYNTLRDDTNGLHANLVQKAIKDVTSAMATLATNWQQGFRISKPEWNADTDAWTMTYDKRAATFHKYKVSLATVDGRVELRYKLPEELDGTPYEKYVLNPDWSTTTSKLVYRNGRYWLHLGVKRDFSEVLWASRSDDEVSHTPDEDTIRVLGVDLNVAGATAVTSTAGFYGNADYLNHRRQAYEALRAELQQTATRSAYQRFHEHATHHSNWLEEYEWQVINGIVDDALEVRATHVVFEKLDGIRDRISNLPKFQQWMFKRIQNEVEAQLEPYGVTVERVNPRNTSKGCSHSECGHVSDSNRSDNEFECVECGLALNADYNAARNIGLRYLFNDVPASQTCSSGRVESQLALVSGVLAVRDNAGNSVRFTSMDWMSTDKPTTSVVGS

SEQ ID NO: 46939 - protein, 274 aa, unknown
  TnpB Polypeptide
VVYDQRILSWKGFEAISILTLEGHQKIPIRIGDYQKARMDRGKGQADLILVKGTFYLCVVVDASEESPFDPKGVLGADLSIKYLAVDSDGEIHSGEQVNQTRDRLDSLKSRLQSKGTKSAKRHLKNRSGRMARFSKDVNHCTSKKLVAKAKDTKRAMALEDRSGIRNRVTVRKAQRSNLYTWGFYQLRTFVEYKAKVVGVPVIFVDPRNTSRTCPSCGHISKANRPTRDEFRCVQCGFAGSADHIAAINIASRAAVNQPIVSEHNLFPGTSPVL

SEQ ID NO: 46940 - protein, 408 aa, unknown
  TnpB Polypeptide
MQLVERHVIKQADPRFAAIDAAAFASKNLYNAANYVVRQSFIHTGVYLNYHEMQRRMKDHEAYQALPAKVAQWVLRLLDKNWQSFFAALATWQEDPSPFLGRPKLPGYKDKQQGRNLLVYTIQALSVPALRQGLICPSMLGLVVQTKTRPQSVQQVRIIPRTRGGFYVVEVIYEQEPQPAALDPALHAGVDIGLNNLATITADKAGFVPRIVNGRPVKSINQFYNKRRAELQSLLGLVGTSKRLERITTKRTRRIDHQLHTASRRIIDLLVTEGIGTLCIGKNPNWKQEVRMGKRNNQNFVAVPHARFIEMLTYKAELVGIQVLVTEESYTSKASFLDADPLPVFGTAAAETTVFSGKRVQRGLYRAANGRHINADVNGAYNIIRKVAPEAFAQGSRGCVVHPVRLAA

SEQ ID NO: 46941 - protein, 363 aa, unknown
  TnpB Polypeptide
MNKGVKFRAYPNKEQQNLINQTFGCCRLVYNKGLAMRNNGYSNGEKIGFNQTCAMLTDLKKQADFTFLKNVDSIALQQSLRDLDSGFTYFFKKRARHPQFKSKHNNRQSYRTINQGNTIRIVGKYIKLPKLGYVKIKQSMEIGHINYATVEKTPTGKYFVVLNVDFEPEPRSNAGCMIGIDVGIKEFYSDSNGNIVSNPKYLEKSMRKLAREQHRLSRKQKGSNNRNKQRIKVAKVHEKVTNQRNDFLQKQSTMLISENQTICIEDLNVKGMMRNHKLAQHITSCSWSKFFTMLEYKATWYGNDLIKVPTMYPSSQICSCCGYKNTLVKNLSVREWECPNCHTKHNRDTNASINILNKGLSIA

SEQ ID NO: 46942 - protein, 441 aa, Paraburkholderia sp.
VPKRKATFRLYPNATEKAALEETLSLHCRVYNALLEEHRRRYEAGETTFSFQAMCKALTLWRECAKSLATLNAQGLQVTAKRAALAFEAFFRRVKKGETPGYPRFKSWKRFSGFGFKTHGDGWKLMQAHCALKRGGRCAGYEYGAVRLSGIGTVSMRGRAGFDGVPKTAEVMRRGDKWYLSVTFDVTENEIRRQGGRVSTAFDWGVTTLLTQVTGDALTGEIEKVENPRWLKKQLGKIVELQQGTSRLETAAKLASGKDRGFPVNARLERLYRRLRAVHGKIARQRHDFYHKLTAAMVARFGLIVTEELSVANMSRAPKPKKNEDGTYAPNGAAAKAGLNRSIQDAAPAGLIAKLRYKAADAGSKFNPIPTRKVKPSQRCCLCGATEKHELSVRRWTCKCGAEHDRDENAARTMLRYAYEGDWWNRKDGAGTVPAAAARAA

SEQ ID NO: 46943 - protein, 401 aa, unknown
  TnpB Polypeptide
MLIQKAFKYRLRTDADIEQRLRMIAGCCRFVWNKALALQKERFAAGEKKLGYAGLCKELTAWKQQPETNFLCEAPIHVLQQTLKDLDRAYANFFARRADLPVFKKRGQHDAFRNPDCFIIDADNGRVKLPKLGWLRYRNSRKVEGVPRNVTVSQHGGHWYVSIQIEQIVPDPTHESTTSIGIDRGITALAAFSDGSLIQPLNAFARAKRKLARLQRQLSRKVKFSENWKKQKQRITKLHSKIANMRKDYLHKLTTEISKNHAVVVIEDLQIKNMSASAKGSVEAPGRNVKQKAGLNRSILDQGWGELSRQLEYKLNWLGGTLVKVPPQYTSQACNECGHVSKENRKGTKFLCLACGHEAHADVNAAKNILAAGLAVIACGEHLDVTGSMKQEPTGGDYAFA

SEQ ID NO: 46944 - protein, 161 aa, unknown
  TnpB Polypeptide
MRRIMSLIGRGGGFSRNSKRLLHLYRNFASHLLKALHERGVSIIYLGYPLNIAQQRGNKFTVNLWSYRKLMEVIELKAQEYGMRVFEVIEYNTSKYCAYHGVEVTRDPRGVVSCPKGHRLHSDLNGALNILKKATGIAISAIKRPLSFIVDHNRVAPVKGA

SEQ ID NO: 46945 - protein, 457 aa, Micromonospora sp.
VKTIQAYRFALDLTPGQERAVRAHVGAARVAHNWALARVKVVMDQRAAERSYGVPDELLTPSLPWSLAGLRKAWNAAKADAAPWWGEVSKEAFNTGLDALARGLKNWADSRQGGRAGRPVGFPRFKSRRRGTPAVRFTTGAIRVEPDRRHVVLPRLGRLKLHESARKLARRIEGGTARIMSATVRRDGGRWHVSFTVEVQRTERQPARPASVVGVDVGIKHLAVLSTGERVDNPRHLVAAQARLRALGRASSRKSGPHRRTGCRPSNRWQRASDRLGRAHARVANLRRDGLHKLTTRLTREHGTIVVEDLNVAGMLRNRRLARHIADAGFAEIRRQLAYKTGWNGGRLLVADRWYPSSKTCSGCGAVKAKLALHEREYDCEACGLVIDRDRNAALNLAALAAELSTTAGSGSVAARGADQKTHTQGQVAVKREPGTASAGKTGTAPTARRGNQSRAH

SEQ ID NO: 46946 - protein, 667 aa, Streptomyces sp.
MSRRLLLAKGETSRVACARGVLRTGRDEKSGGLLSAAVLAERVGWAADLVAGLVSDVLAAHWNITDVNALASGQVPGGRKLPSNAWMALRRLGWAAAAPEGVQVNDRLVRIAQEQAGRTLRSAKWRADLTSGVLATWPADPSRRTPEEWDAIRAAVPGGQHLPGSVIKSRTRQIAAFERKHGRLPGDVFEAEAAPRAARMLLSACDGQQATIERGDDPARALLRLQLPTRPDPRSYRDWTWVSCPIALPPTIPAHAVLHLPTLRFCQGEVRADLAYTHSVPKAQRSGHRIALGVDWGLNTLLSAGAARLHDDGRITALGTGAEFRAAGVLAKQHRLRHLSEHLHAKAGHYQRLMGEDTGHSLAARHTVLTGEIRAVSERRQNLNNALARAAARWAVDQAITADATIIYLEDLRSLEARGMGRTMNVRLSQQVRGQIAHHMRHLAAEVGIAVVTVPARNTSKHCPRCLAPLRHRKAPDRPTTPGWKWAICPDRDGCSWQGDRDTGAWQRIAARGLTHQTKTVADRATGQMVIRAVVDKLEAHAVITPTAPQTSRTDRSKTGPTRRRSTRPAPRRRRAPSPTGPSGPAGQRPEGHAPPGRMRLPRAARRHQGVTTISTPTSGPRPGRPPYGQHRPRGAALGAGFHLHAHASPPRWETIPDTTSATGSFS

SEQ ID NO: 46947 - protein, 383 aa, unknown
  TnpB Polypeptide
MIRMKIYRFRLYPSKAQEKKMHQHLWLAKDLWNDLLEHSKELYGNYDKFPTRNSLQLMVKNSGLFSQTAQEIAHRIEDSIWRYVKLRKAGDNAGFPRFKSIDRMKSLHYPQFGFSLGKKLRVTPFGEIQIVQHREIKGEIKTLTVKREPSGKWFACFAVEETPTIKPSNGKTRIGIDLGLTTLATLSNGSVIKNPRFVRKHEEKIAFLQRHLARKKKYSKNRWNAKRDVASELEKLKNTRRDFLHKLSHSLVNSYSFIALEDLASQKLAEQNFGKQINDAGWGELANMLRYKAESAGCEIVFVNPKDTTRMCCVCGNKMDMPLSTREYDCDNCGNSMDRDLNAAYNILKRATAGLVGSNACGDVSRKTSVKQETVVVLLDESR

SEQ ID NO: 46948 - protein, 388 aa, Geobacillus sp.
MPTITLRLELHKPTKVKQEMYERMTEVNTAFANWLLDHPKLNQATSKMFKEFSSQRFPSAVVNQTIREVKSQKKNQKTKKFRTLWCCFNNQNVKVEKKGEFYTVSFPTLEKRIGVPVVTRPYQEAWLNRLLDGTAKQGVAKLYKKKKKWYFAIAITFEVQQREETKAMGVDLGLRYIAVASVGTKSLFFKGNQCAFVRRRYAALRRRLGKAKKLHMIRKIGRKESRWMKEMNHKISRQIVRFAHANGVGVIRMEELTGIRKRATSAKEAGRSLHSWAFHQLQTMIAYKAEMAGIRVEWVKPTYTSQTCRCGHREKANRNGIRFRCQKCGYAIHADLNGAINIAKAISGLSAEPSALVTGAPPIGVHPNPMGRGDDTPLNLGVVRTRNG

SEQ ID NO: 46949 - protein, 250 aa, Mycobacterium sp.
  misc_feature (78)..(81): Xaa can be any naturally occurring amino acid
MIHMRRRWCVPLVWTSTRGWWIGRSSSRGIPSSIRSEWPRGWPAAPGSSISSSLMPPTVASASSSSWRPGWTPGLTAXXXXRTHHLHVLTTRLAKTHGRIVVEGLDAAGMLRQKGLPGARARRRALSDAALATPRRHLSYKTGWYGSSLVVADRWFPSSKTCHACRHVQDIGWDEKWQCDGCSITHQRDDNAAINLARYEEPPSVVGPVGAAVKRGADRKTGPGPAGGREARKATGHPAGEQPRDGVQVK

SEQ ID NO: 46950 - protein, 404 aa, Acidithiobacillus sp.
MLRKAVRYRLETTPEQEHLLARAAGCVRFVWNRALAIQKSYLEHGCGILSYVDMANCLTTWRNGESFGFLSESPVHPQQWALKYLDRALQEAFDKSNPKRFPAFKKKGLHDSIRYPGYPDPEQIKIDLKPQDADGRRLLPKIFLPRIGWVKFRKSCTIGREIRNVTVSRSGGHWTVAIQIEKEVLDPVHPSTTAVGGDRGVANLLTLSDGTLFLPVTAYRDLQKRLTREQRKLAHKVKFSANWKKQKAKITRFHQRIAEIRKNVLHQVSTAISKNHAVVVLENLKVRNMTGAARGTVEQPGPNIRQKAGLNKSILDQGWGMLKAMLEYKLRWSGGMLLLVDPAYTSQSCPVCGVVDAGNRPSQEVFHCLHCGHEAHTDLNAARNILARGLQSTAGRAGVACFAA

SEQ ID NO: 46951 - protein, 403 aa, unknown
  TnpB Polypeptide
MELVERHIIKRTDARFGAIDAAGFASKNLYNAANYVIRQSFISEGIYLDYYEMHRRMKDHEVYQALPAKVAQWVLRILDKNWQSFFAAKAAWQADPSKFLGRPKLPRYKDKQRGRNLLVYTAQALSIPALRQGLIAPSMLDITVRTKQQNVQQARIVPRHGYYVVEVVYEREPVQAAVDPALYAGVDIGIDNLATLTSTKVGFAPRVVNGRPVKSINQFYNKRRAELQSQLGESYTSQRLERISTKRTRRIDHELHTASRRIIDLLVAEGIGTLVIGKNPLWKQEVRLGRRTNQNFVSIPHARFIAMLTYKAELVGIQVIVTEESYTSKASFLDGDMLPVYDTAKPVPTFSGRRVKRGLYRAADGTPINADVNGAYNIIRKVTPEAFTQRSRGCVVHPMRLAA

SEQ ID NO: 46952 - protein, 183 aa, Halobacteriales sp.
VDLGVENIAVTSTGTFWSGDELDHWRREYENRRATLQRCGSSDAHEVMQSIGRKETGRFTILLHEIANGIVAEADARGCSHIAFENLTDIRERMVGVKRLHAWAFRKLHAFVAYKAEAQGIQVEQVDPAKTSQRCSTCGHTDPENRPTREQFHCQACDYKNHADYNAAKNIAFELLRNQNGAE

SEQ ID NO: 46953 - protein, 251 aa, Acinetobacter sp.
  misc_feature (41)..(43): Xaa can be any naturally occurring amino acid
MKTLKLRIKDKHCKVLNQMASEVNFVWNYVNDLCFKHLQRXXXEDSRGRWYVCLVVDSIKTEKTSAKTSIGIDLGLKDLATCSDGIKLKAPKIYRQYEQKLGIAQRARNKKRVKAIHAKIKNIRQNMLHQFSHKLVNEHAAIFVGNVNAKALAQTKLAKSVLDASWTTLRTMLKYKCENAGAWYEEVNEAYTTQTCSCCGSRCSSPKGRTGLGIREWQCMECGTLHNRDINSALNILALGHERLAVGIPVL

SEQ ID NO: 46954 - protein, 410 aa, Azospirillum sp.
MKALKAYRYRVYPTQEQEMLFRQTVGCCRFVYNLCLEQRRLEWHRSDPRRLSSYDQIKDLPALKMEAPFLRDVPNHPLQQAIIDLDKAFKNFFAGRTAYPRFRKRGDRDSFRYPDPKQVKIEPNRIFLPKAGWVAWVRHRPLDGVPKTATVSREANWWFVSIQCEIDVADARPNLAPAVGIDMGIAKPMMLSTGEAVLLPRTTDQERRRLAALQQRVARRGTGSRNQQKARLAVARFQARLARRRKDAAHKATTRIAKNHGVIVVEDLKVRTMTASAAGTLDEPGRNVRAKAGLNRSLLDVAPAQLRSMLDYKAAWHGSRVVAIPAAYTSQRCCRCGHVDADNRVSQSVFLCQACGHVENADLNAAKNILRLGLATGGPPELACGSNRATGRKQERRVARRGSSALQSRK

SEQ ID NO: 46955 - protein, 401 aa, Competibacteraceae sp.
MRTILTHRIELKPNPIQEALFRQCVGAARFAYNWALAEWQRQFEAGEKPNEAALRRQFNAIKPIEFPWILDLPKAVPQQAIKNVGRAWQRFFQKKSKFPRFKRRGVHDSARLDNGPGTFAFSGNRIRLPKIGGVRLREALRFDGKPLSATLSREADRWLIAIPVAIDRPDPVRERHATVGVDLGVSTALTLSTGEKIDSPKPLKKYLQRMKRRARQHSRKQKGSANRRQSARKLAKLHARIAHVRQDFLHQTTTALTRRFSLIGIEDLNVKGMMANDRLARAISDIGFYEFRRQLEYKAALSGGTIVVVDRWFPSSKTCSACGAYCQAMPLPVRQWTCAHCGVEHDRDINAAQNIQRVALATGSWPGSHACGEEGAGRSRKTPVKPASMKQEITHGIKSHD

SEQ ID NO: 46956 - protein, 420 aa, Thaumarchaeota sp.
MQATKCVIQSHANESLAGLLAECLIITYNGIRYAQENGIDNRKRMKRFYQTLRDTKLPSCYKVTAITRACAVIKSRNKSLRRQIEVRHPKPLRPVACIISGFFITMKGRLFIPVSRDKYADIQLNDHVVNSIQGRKVRSLTITQSLLSLCYSDDIRLAPVRAVYGVDRNEKNITFGDIDKVVRIEMKEIVRINETTREILSSFKRNDVRIGKKLTRKYWKRANNRTNQILHTATNFIVEMASKNRAALTVEDLTGIRKMYQRNNLHGPSYRFRLNSWPHWKAKRMLEYKAAWKGVTVIGLSKSETYGSSSLCSKCGEKLRSPKRGDLEHGRMQWCGNCKEWIDRDVHATLNLSTRGLARFASSLPRSKGSSQRAELQSEEKGLAIEAVKGNPVRTVILRVDASKLTRDSMSNPSVEQIKS

SEQ ID NO: 46957 - protein, 371 aa, unknown
  TnpB Polypeptide
MILAIKTRLYPTNVQEQKMRQSVGTARYIYNWTLAKQQENYKNGGKFIRDGDLRKEITQLKKTDITWLNDVSNNVAKQAVKDACDSYKRFFKGLTDKPKFKSKKRSKLSFYNDNIKLKVKDNAVLIEKVGWVNIKRNSITMNSKYSNPRISFDGKYWYLSVGIEREIKSAELTNESIGIDVGIKDLAICSNGMTFKNINKTKEVKKLKKSLKRKQRQCSNKYKKNKKGKEYVKTKNIAKLEKQVRLLHRRLANIRVNHLHQATNKIVKTKPSRVVMETLNIKGMMKNKHLSKAIAEQKLHEFKRQMQYKCEFTGIEFIEADKWYPSSKTCSGCGNVKARLSLSERSYICENCGCVIDRDYNASINLSRYSA

SEQ ID NO: 46958 - protein, 365 aa, unknown
  TnpB Polypeptide
MDRLTREKEIHIFVRSDRYYLEPINEGEGYLVLVDFGLRIRYAGRIRWEGKQGRLEIIYVNGRWFALVPKEVGVEPPKSNKRGYVKPNYKDKKDRIVNSKSIKQRDPIGDKQAFIDMGLNNLFAVVISDGSALLIKGGTIKSEYYWWKREIATYQAIIDLLRNAGIPTWKEYHEKYLKAMYKRDERLRHLYITAIRFLADELHRRGVRKLYIGYPIMLTQNNGNEYNTNIWWFRKIVLWIVDIFMEYGIDVEIVPEDNTSRECSICGNKHKNGRKHRGLYICKKTGKKINADINAALNIARKLGHRIRIARKIESYHVTRNGIKPLILHQRANTRDPSIKTPPLKGGEGVIMSYFTPPNPCRTSF

SEQ ID NO: 46959 - protein, 399 aa, Halomonas sp.
MLKATKVRLYPTTEQAAWLNRQFGATRFVYNTGLRIMSHRYRVHGQSLSARYDIKKLLPVAKRSRRYGWLREADSMALQQACLNLDHAFQRFFDPSQKAGYPRFKRKRGKQSSYHCVGVKVGDDWIKVPKLRPINAKVHRQVEGRLKSITLTRTVTGKHYASLLLDTEQVAPEPIQRVEGDKVIGLDMGLSHLAIDSTGRKIPNPRFLKQAQKNLKRKQQALSRKTKGSARRAKARLLVAKAHERVANARNDFQHKLARQIVDDNQVVIVETLKVRNMMQNARLAKHIGDASWHALTAKLDYKAKEQGKHLIRIDPWFASSRTCHVCQHKMDTMPLSARSWDCPACHTHHDRDINAALNIKHQGIVKLKAEGLSVSAHGGLRKSGMSPVAACEVGSPAR

SEQ ID NO: 46960 - protein, 362 aa, Clostridium sp.
MLKAYKYRIYPNKEQKLYLAKTFGCTRFIYNKMLADRIKSYEENKDLDIKQIKYPTPAQYKKEFPWLKEVDSLALANAQLNLDKAYKNFFRDKSIGFPKFKSKKSNYHSYTTNNQNGTVSLENGYIKVPKLKSKIKVKQHRQFTGLIKSCTISQVSSGKYYISILVDTENIQLPKIDKKIGVDMGLKEFAICSDGYREPNPKHLRKSERRLIKLQKDLSRKQKGSNNRKKARLKIAKLHEKIANQRADFLHKLSIKLIRENQSIVIEDLKVKDMQQNHKLAKAISEASWSEFRRMLEYKSKWHGREIIVAPSNYASSQLCSECGYKNKEVKNLALREWICPNCGTHHDRDINASKNLLKLAI

SEQ ID NO: 46961 - protein, 372 aa, unknown
  TnpB Polypeptide
MCYSILVYKRTYKFRAYPTAAQTRLLDWQLTRCRELYNSALQERRDAYKMCGKSVSYYDQANQLPAIKEVRPEYSDIYSQVLQDVLRRADKAFQNFFRRVKQGKTPGYPRFQGRGRYDSITYPQSGWSLQNDRLTLSKIGTLKVRLHREMLGKVKTVSIVREGQRWFVCFSVEVEAEPLPMSDEAVGVDMGLNYFASLSNGERFTNPRYLRKSLTKLATKQQALARCQRGSHRRNQAKQAVATIHRKVANQRADFAHKLSRQLVNRYGMIVFEDLKPANMVKNHSLAFSISDVSWSQFQEFTSYKAESAGRVVIFVNPAHTSQTCYGCGAVKKKELDQRWHSCPCGEERDRDEEAAKVILRLGSSQRDNLRI

SEQ ID NO: 46962 - protein, 433 aa, Natrialbaceae sp.
MEHVIRTVKVKLDVPTQRCNDLHQTKDQFLHCANTTAEWAWRNPNNYCVTSKQKAENALYEQLRSETELTANLVQKGIRRAIEATKSGVSRLKKGDNTSQPHFDAWSVVYDKRSATFHRDHVSLSTVNGRVECDYVIPDNPEGTPIGKYLLNEDYEFRMSTLQYDRSTESFYLHARMRRTESDQEQSTAIFSDTKHRTVLGVDLNVDGSLAVTSTGAFVGNADEMNHRRREFEKTRGSMQQAGTRSAHLSIQSMKDREHRWMQDELHRVANRILEEARDHDCTHIAFENLTDIRKRMAGAKRFHAWAFRRLYHYVEYKAEMFSIEVEQVSPAYTSQRCSSCGFTHESNRQSKHQFVCQKCEYELNADYNASKNIARKLLKKLHSGQKSSGGGAPCQCALTSGTLNLNGEFHASDNSTVEGESTDKPTTSVVGD

SEQ ID NO: 46963 - protein, 435 aa, Deinococcus sp.
MRVTISAKLKLRHTPEQKAMLDAVSLAYRDALNFASKEAFKLDKTSSAPKIHKAAYETLRERFGLGAQLACTVERQVAATYKAQWTKLKQNLSAREKGFTKRRYKGLDSAPKFVSRTLEYQYGRDYSWKKDGRVSISTLRGRTVLEFDGYQKHLDAIAAGCEMGAAKLYYQKSKKQYYLIVALNLELPDPRPTDHKNVVGVDVGQRYHFVATDQDGRSLFEKGAATRQRKDQFTRTRKSLQRKGTRSATRRLVALSSRERRFVADRNHVLSQMLLTRFPGSIFGLEDLTNIRERTEGRRSPKASKKAKRAKRHRSQWSFAELQTMLAYKAPLHVALAVRVDANYTSQCCPRCGHCSKANRPNAGLEFVCEVCGDQGHADRVASVNIGLRTMLVRQDWMSTGALSMRPDVSDNEAKAARLSRYTELRWSPDANPRL

SEQ ID NO: 46964 - protein, 293 aa, unknown
  TnpB Polypeptide
VVQEGMNRAIETYRAWLKTKGQKPTFTADVVSFKNVDVKIDRHFINVPLINNKRVWLPMYIPKKLRKFLKMKHGRVQISKIGNEYYAQISFEVPEPEPYEPKGWLGVDIGINHIVVISDVEGKINKFYDSAIAWKKSVEYRRGKLQFLKDKGIKKGAWRILKRLSHKERNKMSHINHKIAKEIIELAKHYRYGIAIENLKGIRHHYNVKRYRKRLHKWAYRDLIDKIVYKAKLNGVPVVFIDPRNTSRTCSKCGYLVEKGVKGRWFKCPKCGFQLDRDLNAARNIAKRAFLPP

SEQ ID NO: 46965 - protein, 445 aa, Halobacteriales sp.
VQSSELTHTLSFGLDIHTGSDDDLQNGCLEARRIRNETNRLDRHGWDWNDIKSTVVDNADHVKNTSQLIVDKALGEIETYHDNKDDGWGRPYPYIDEPYPIVMNHGEGYRLFPEDDGRIRFRITATRGTHVKGELRGSPDHFDRLRSAFNDDEWRVGIAEVVSKHDEWRLHITVTHENHRVASKHNADTIVGVDVNEDCIALAAMGRSGSVKDSVVFEYPSVKEQRHEFFTKRKRMQQAKQTTYETVVKTEERDYVHDCLHKVSRRVVEWVSQFSAPVVVFEDLKDMRDAIDYGTRMNRRLHSLPFAALQDMISYKAAWKGVPSDDVDPGYTSQRCPRTECQHTERANRHKKRFKCQQCAFQDHADRKAAVCVVQEWFDRETGNVPSLETLPGVKKVRRAASGAGGGPDSHGHSSCSGVTSAGEARGSQSQAREDLKSVALAVQD

SEQ ID NO: 46966 - protein, 404 aa, unknown
  TnpB Polypeptide
MQRSIKVSLKFATAKKRRRLDHLLRRLRKLTNCYIDLIWERGGALDAATLNAVTCPHLSYRQRSDCLKYALEIIAGTKASAAALGKVASKPRLKHSFKFSSLTATVERGRGCFDYVLKISSVFPGKRLVLPFRSHVRLNYWLGKPGAKLLGGCIIKGGEAILWIRVADEPVKAEGGQLGIDIGYNKLLADSDGGNYGARIKELCEKVRRRQPGRQGKRRARKERDDYIRWAVKQLPWGRLRVLAVEDLKHLKRGKKANRSKQFRKRLAPWSYRQALMRIEHLAQENRVHLAFVNPRNTSRQCPICGSVAKENRVREVPVPLLCFHRRRRRSGRTERSRSYHQKLPAVYGRRGVLKSKCHTFRQPSSPYRAGLLRRLRAQRAFLRHAVHRRSVAGRLCPPFASRR

SEQ ID NO: 46967 - protein, 400 aa, Gloeocapsopsis sp.
MLDVLKVRIYPNSLQEVALAKSFGCSRFVWNYYLNKTNTQYQKTGKGLSYCDIAKDLTQLKKLSDYEWLPEVTAATLQQTLKNLESAFKNFFSKRARFPKFKSKHRKQSIRYPESCSIKNSGLKLPKLGIVKASISKSINGKIKSVTVSRTSTNKYFAAILFESADLTINKEKKISGIDLGLNSLVTVFDGETCYKVDPIKPTRKYAKRLRRRQKALSRKVKGSNNRRKAVKIVARVHEKISNTRQDFLHKLSRKLVDENQVIVVENLCVKGLARTKLAKSIHDAGWSMLLNFIGYKLEREGGKLIQVDRFFPSTKLCNCCKFKNNSLNLSIRQWVCPSCLSSHNRDENAAKNIREEGLRILSTNTAGHAGIQACGENVRLVNTCVKKQSSMKQESPVTA

SEQ ID NO: 46968 - protein, 395 aa, Massilia sp.
MFIAHRIRLDPSNAQATHLARAAGTARFAYNWALAEWRRQYEACKVDPSLPKPNKAALQRQLNAVKRQQFPWMLEVTKNAPQIAIMQLGQAFQNFFTGRARYPRFHRKGQHDRFTLSNDQFQVEGRQLRIPKLGWVRMREALRFTGRIVSSTISRIADHWYASITVDTPDPSLPPAENQGAVGIDLGVSSLATLSTGETIAGPKALHALLQRLRRLSRALSRKARGSRNRGKAKLKLARLHERIAHMRRDGLHQLTTSLSRRFHTIGIEDLNVKGMLANGRLARAIADMGFYEFRRQLEYKAAWRGAQVVVADRWFPSSKLCSGCGHVLNKLELNIRHWTCPNCGAHHDRDVNAAVNLSNMAVSSTASACGGEGAGLAQARGETGPGEAGIQRQS

SEQ ID NO: 46969 - protein, 367 aa, unknown
  TnpB Polypeptide
MLKTLMVKLDPTDEQYQMILETMHRFNEACNYIAGVAFAIGKANKVEVHKAVYYDVRERFGLSAQLTVRAISKVVEAYKRNKSIKPEFRSDGAIVYDQRILTWKGLEAVSLTTLQGRQLIPTKIGDYQKARMDRVRGQVDLIIVKGVFYLCPVVEVAEESPYDPTGSLGVDLGIKYLAVDSDGEIHSGEQINQTRDQLDSLKSRLQSKGTKSAKRHLKKLSGRMARFSRDVNHCISKKIVAKAKDTCRSVALEDLEGIRSRVTVRKAQRRSLHSWSFYQLRQFVEYKALEAGVTVVLVDPRNTSRTCPSCGHVSKSNRPTRDEFRCKSCGFAGPADHIAAINIASRAAVNQPIVAGKHLTSVTSSGL

SEQ ID NO: 46970 - protein, 236 aa, unknown
  TnpB Polypeptide
VAARSGCDCPAILFARPGRSLPEFLSASEAGGETRLPRFKSKHDHRQSYKSKCVGTNIKVLDKAVQLPKLGLVKCRVSKEVKGRILSATVSRNPSGKYFVALCCTDVEIEPLLSTGVAVGLDMGLKSFAVSSDGVEYPNHKFLTKSQEKLARLQRQLSRKTKGSKRREKARLQVARLHERISNQRQDMLHKLSSQLVRDYDFIAIEDLAPKNMVRNHRLARSISDASWGEFRRQLE

SEQ ID NO: 46971 - protein, 213 aa, unknown
  TnpB Polypeptide
LATYVTIPALTSISTIKTGSNTVLYCFCHTTSAILTSTYAINAYLNPKYYRQEQLKLAREQRKFSKMEKGSKNREKQRIKLAIVHEKVANQRKDFLHKLSKKLIEKIDCVCIEDLNMKALSQVLNFGKSVMDNGWGMFVNFLDYKSKEVGKKLVKVGKYFASSQICSNCGYKNKEVKDLSIRQWKCPNCKVVHDRDINAAINIRNEGMRIVLG

SEQ ID NO: 46972 - protein, 551 aa, Nocardiopsis sp.
MLGTGMRRLRSIADPFLAPAPTGVSVRDRLKGLTPWDEAVLRAVGAHLGSLASTDLAARCADGTGHDKDSWAARKRELTPESSSRWAGAITRASNEQWALARRSQLAHLHRLQAGIDTLRHRLSQPLKTPGTRGAPGGYACRQEWHAKSRRLAALEDRHAAQVADWEAGRVPVVRGGKRLLNTRHHLDRAGLSQAQWRARWEAARFLLQADGESGKRHGNETIRITPEGQVSIRLPAPLAHLANAPRGRYVLSGRVAFAHRGAEWADRVEADGAVAYRLHLDTGRGRWYVTASWTPQAVPALPMQAALAHGVVGVDANADHLAAWRLDVHGNPIGNPHRFEFDLSGSASHRDAQVRHALSRLLRWATAHGVRVIAVEDLDFAREKTREKHGRRKKFRQLISGFPTARLRSRLVSMAHALGVSVIAVDPAYTSRWGAQHWQQPLTTTTRKVSRHDAASIAVGRRAQGHPVRRRTAPPPHHRSDGVGHRIIQAALGSSGREELRRPVKERARDARRRAGTARTRRTSASNTVGDVPVAQVWVQDPLLDTVEER

SEQ ID NO: 46973 - protein, 275 aa, unknown
  TnpB Polypeptide
LQNRLKLPKLGWIRFHKSQEIPGKLVNVTVTRTSADKYVASILCETDIEKYPQAVQNIGLDLGIKSYLVTNTGEVIDNPKYYRTQKRKLRKANKKLSRAQKGSNNRVKAKVKLARTYERITNLRDEFLHKLSTRLIKENSIICIEDLRVANMVKDHKLALSIADASWSKFVAMLEYKADWHDRIVQKVGTSYPSSQTCNSCKVINPLVKDLKLRKWSCPACNSYNLRDKNAALNILSEGLRLLTAVGAPEVVKNARAELVSPGVVQAEIVEARIA

SEQ ID NO: 46974 - protein, 412 aa, Symploca sp.
VIKVLTAIKVRLYPTTAQQIALAKSFGCARWYWNFALNACIQHYQETGKSLKLVAYKGMLPNLKKEYPWLKEDCYSAVLQSVALNLNKAYKNFFEGRAKLPKFKSKHYKQSIQYPQNVSILGDMLNVPKIGKIKTVFHREIIGKIKTVTISKTPTDKYFASILCVSEASVQEKHEVQAQGDKVLGIDLGLKDFAIVHDGEQVTKYPNPKHIKHHEKNLAKKQQKLDRKTKGSKTREKSKKIVAKVHERVSNTRQDFLHKLSRKLVDESQVIVIENLNVKGLVRNRKLSKAISDAGWGTFVNFLAYKLERQESQLVEIDRFFPSSKKCSCCGHVVDELPLNLREWNCPFCGTHHDRDSNAALNIRTEGVRILSMSGGNPVPASGGCVRPPACQGKGQRSSKLEADTYSLERCG

SEQ ID NO: 46975 - protein, 379 aa, unknown
  TnpB Polypeptide
MLRAIKIRLYPNKTQEQTLNRVLGCYRFVYNQMLVLKQSAYKTDKTNLNLNDLSKWFHGTLLKDEQYTWLKEQNTKVMKQAIRQMDGAYQKFFKQHNGFPKFKTKKDRQSALFPYDAISRKNTFETKHISLITSLKNIKFRCSDLYFRRLQKYNKDIRSATLSKTKSGNFFLSILIEMEDTELKKFQCTNKHVGIDLGIKDFVITSDGEVFENKHFFKKKENQVKKLQRQLSKKVKGSNNRRKVQIRIARLFEKLTNQKNAYIHSVVNELLTYYDTIFMEDLNVEGMVKNHHLAKAIHEVGFYKFKEILVNKALVNDKKIVIIDRFYPSSKTCSCCGYKKRDLKLSDRFWVCPECGEYHDRDLNAAMNILLEGQRMLAA

SEQ ID NO: 46976 - protein, 409 aa, unknown
  TnpB Polypeptide
MTTVMRSYRIRAYPNGAQRRLLARWFGASRWLWNTALEIRSEAYRVCGLTLTGNDISRWLTQWKRTPGHEWLTEAPATCLTECLRDQDAAFRNFFAGRARYPRFKRKNTSVSLRFQNAGVAWARGVVSLPKLGSLKLAEPLPAVARPDLVTLSRDAAGCYHVSFGVQVPTSLLPITHRVVGVDVGLTHLATLSTGEKIPNPKHFHARLRYLRQQQRCLARRQKGSRRREKQRLRVARAHDRVRQVRLCTLHALTTRLVREFDLIFIEDLNVKAMARGLHARAIHDVAFSEVRRQLTYKSNWYGKILEAVDRWYPSSKTCSACQYRLDVLRLDERRWTCPRCGVNHDRDVNAARNLLAEGLRQLAGRDDRDLRVDAGDACPEEDILVQVLAEEARSGQRNRACQEQASFG

SEQ ID NO: 46977 - protein, 418 aa, Scytonema sp.
MGMKYALGIHSPSKYLCYNYVNKFDVKMLVFEAKLEGTGEQYGKLNEAIRTARFVRNSCVRYWMDNKDIGRYELSAYCAVLAQQFEWAKNLNSMARQASSERAWSAISRFYDNCKKKKPGKKGYPCFKKEQTHGSVEYKTSGWKLSEDRRYITFSDGFEAGTFKMWGTRDLHFYQLKQIKRVRVVRRADGYYVQFCLNQERLDKKEPTLKTVGIDVGLNHFYTDSDGRTVHNPRHLRKSEKSLKRLQRRMSKTEKGSKNRAKFRNKLARAHLKVSRQRKDFAVKTARCVVMSNDLVAYEDLQVRNMVRQRVGRVPRLEATGEPVRVRNRHLAKSISDAAWTHFRTWIEYFGKVFGVITVAVPPHHTSQNCSNCGKVVKKTLSTRTHTCLHCGHIQDRDWNAARNILEKALRTAGSRRN

SEQ ID NO: 46978 - protein, 414 aa, unknown
  TnpB Polypeptide
MKIHRAYKTELKLNNKQRTACLQHAGASRFAYNWGLQRKQEVFMMNTLPVPHIVDPSAIDLHKELVILKKTDYPWMYEVSKCAPQEALRNLDKAYKNFFKGNAKFPKFKSKKNSINSFHLMGVINVFDNTIQLPRLGKLRLKEKEYIPTDEHILSATVSEKAGRWFVSVLVEEDIEVPENSSSIVGVDLGIKTMAYISDGTKFENPKALKKFERKLAREQRRLSKKKKGSMNRKKQKLIVAKVHRRIANIRKDAIHKATTWLAKNKSVICIEDLNVSGMLKNRHLSKSLSDVGMGMFRSHLLYKTDWYGSRVTIADRFFPSTKRCSQCGHINTALPLSQRTFVCENCRFTLDRDLNASLNLEQLAVSSTESEKTPVGEGSSDFPKVKLPSMNQELNTGLINSPYKFQRNGDSRS

SEQ ID NO: 46979 - protein, 380 aa, Clostridium sp.
VKGVDIIEITLTSKIQIYPTNQQIEILNNTMFQIRKALNYISKYVFYNNCLNQSKINSDTYYYLRETYGLKSQMAQSCMKTVIAKYKTNKSNGYDFNLVQFKKLEYDLVWNRDYSLNKDVFSINSLQERLKIPYQTKGMENYFDDKYSFGTAKLVYKFNKYFLHIPITKDYPQTTPFEINKIVGIDLGINFLATTYDSYGKTTFYNGRHIKAKRGHYKILRKDLQECGSKSAKHRIKSIGSRENRWISDINHSITKALVDKYGANTLFVLEDLTHIRTVTEKVNINNRYVSVSWAFYQFRQLLEYKSQMNNSMVIVVNPKYTSQTCPKCGHIEKANRDKKKHIFKCKNCNYQSNDDRIGAINLWNKGINYIETNSKEHSE

SEQ ID NO: 46980 - protein, 248 aa, Ruminococcus sp.
  misc_feature (235)..(237): Xaa can be any naturally occurring amino acid
VWEKLAEIPDAKRRFNAAEHLVHTTKKNPARFDFDLRFPKMPSYLRRAAIQHALGSVSSYETRMDLWEKSGEKVGKPRLAYENHAMPVFYRDVMYREEKEGKDEAYLKLYDGHDWKWFCVRLNHTDMEYLRRNWSGKKASAPTLEKRHHKYFLRFSYTEEVTLTKTPVKEQIICSVDLGINTDAVCTIMRADGTVLGRKFINHPSEKDRMYRTLGRIRRFQREHGSAQSRGRWAXXXNISCVFLIRKK

SEQ ID NO: 46981 - protein, 812 aa, unknown
  TnpB Polypeptide
MLKKKERRKERTKEKRKERRKEKRKRKREERRNGRENEKESKILPNNITSLYNKPPTTTVKTSLKNILKPTKYVGGFDINRIIQNHVRYINNITTHTYFFLKLMLIYYIEMNLEFPKIDDDFIVCIMKSITEKVKGGGVRPSIETINTNNKIIDFYDKCYRQLIPDGEIRIESTNLSQFFKYESTTITTCIKNNIISQFSNRLSQYINLKLDIENKLNNIKNNKEYNQEHKDVLKKSIIKTCRDVKNDIFNKDKLMVCDEEYRDFVFDIRSTLLPTRVYTKNLQYDVTSHPMDYLRSLIILNKKLEEYGKSFHAVPTRKSYYPKYVRFDTCSIIYLMISSENRKKMLGNVKLCKDEVWNQIFNMENKSIKSKLKHYRISGSLVTDGVGASITFIRRDLEDIVDTDNVLSIDNPNEYLNIKSSQWGEYECQRNMYKENLRANDIKVKSSVDQVDKEKVMYYNGLKEDKYISECKNIPGDTKVIAIDPNKGNLIYAIDENNKVFKYTNARRRVESKTVKYTNLRLQFKRENAQFGVSIEGWETLLSALDSKSCNFEKCRQYVNAKLYSFLHLRDLYSKLPNGSSSNISDLSIRKLNLNRYMNVKRSEDLMLNKFQEFYSDGDNMLNPKNTIIAIGDYSPGNYHIKYKNPAMSVRTRKLFKNRGYNVFLVDEYKTSKTCSKCGECLHKFVRRPVRKKKRRLKKNENIIKINNIQLNEVKKDIKLVEINENVKLNEVEKDIKLNEVKKDVKLVLAHGVLSCNDINGCRTIWNRDMNASLNILKIVKSEILGCGRPEAFKRSKSGSNENMPTHIIST

SEQ ID NO: 46982 - protein, 484 aa, unknown
  TnpB Polypeptide
MSSGGNPRGVSVRDPDPLQSFRELVEKRKKSSKRTVRLRLLPEEHEEEILFDISLTSVRLWNELNYEKRQLFFKNDLTPEKREEINRRYYHKYKNFLGVNAGQIINKNEEAWDSFFELLKMKKQGRLPPHIKKISPPGYWKDKITGKKKIHILIRNDRYYLEPVNKGEGRLVLKDFKLNIRYVGRIRWEGKQGRLEIIYEADRWFAYIPIEVGVEPSKSNPRGYIKPSYKDKKNRIFNPRSIKQRVPVGDKKAFIDIGLNNLFAVVVSDGSALLIKGGSIKSEYYWWKKEISTYQTVRDLLKNAGIHRWKDYHEKYLYAIYKRDERLRHLYRTAIRFLAETLWSREVEKIYIGYPIMLSQYNGNEYNTNIWWYRKIILWMIDVFIEYGIDVEIVSEDYTSMKCSICGEIHKNGRIYRGLYICRKTNKKINADINASLNIARKIGYKITITKKIESYLITHNGIKPLIPHQRANTRDPEIRNLAL

SEQ ID NO: 46983 - protein, 356 aa, Acidovorax sp.
MDCTKTLRLRIKDKHARVLSAMAREVNQVWNYCNETSHRAIRERSRWLSGYDLQKLTNGFSKCDGVQIGSPTVQQVCEDYAKARKQFKRTKLRWRVSNPKSSKYSLGWVPFKARALQYKAGQIAFAGQKFSLWDSYGLGDYELRAGSFSEDSRGRWYLNVVVKVQAKASSGTASIGIDLGLKEAAVASDGQRIVGRFYRQLEGDLGLAQRAGKKQRTKAIHAKIANQRKDMLHKFSTALVKDNAAIFVGDVASTKLVKTKMAKSTLDAGWASLKTMLEYKSQQAGIVFEVVNESYTTQTCSCCGSIPASSPKGRAGLRIREWVCGDCGAVHDRDVNAAKNILAAGHRRLAEGISGV

SEQ ID NO: 46984 - protein, 546 aa, Brasilonema sp.
VVRSSTLSFITEVPLIVDSKQESELLARFQAGRQLYNACLNEAMKRLELVRNSELYQLARQSPKTKKKERSDTFKKAREQYRYSEYDLHSFASLTSKNAKWIAQKVDSNTQQKLATRAFKASERVMLGLARDVRYKVPSRFRSVEGKTNKQGLRWKDDCLVWGSLKLQPIIDPTNPVIRHGLESPVKYVRLLWRVLNGKRRWYAQLVNEGSPYQKAQNYVSDGLVGLDLNVSNIAYVGDDYAGLLPFAEKVPSFQKEITKLQRQMQRRMRANNPDNFEPNFEARKGRKTVVKKGKVKKSKAQWKKSSNYLKAANKKRELERRKAAYAKTQNRRVVNEILRHGKHIKTENVSVKGWQKRYGKAISAKSPGFVQSELRAKAEIAGDALGQKNGASPNNNTINRDASRSTQEGLPHFSSHSPGRSVIKFSTQTTALSQAHLDGTRIKKSLNQRVHRDVTGLPEHHRDLFSAFLSRHVNQNKLVLQNAQNEYLGLEPILLEAYQQKKTTRELVGKSESTQSGSPSERVSNEPLTTDQAASKGEKSDGDVA

SEQ ID NO: 46985 - protein, 257 aa, unknown
  TnpB Polypeptide
VSKDCGHWFVVFTTEFEIEPPQMKSAEIGIDIGVVHAVALSDGRFFDLDTDKLKKIEERIAVLQRKLSLNLSARKKLAENGLAKPFDKYKPGRKRRRLKERIQKLHRRMRCIRQDFQRKTAHALAQEYGCVYAEDLKTKNMTKSAKGTVENPGTKVKQKSGLNRAILRTGFYGLTQAVAWQLVKTGGILEKVNPAHTSCLCPTCGCCDKRNRPKQAVFHCIVCGHHQNADTVGAQNVLRKGRTGPSAHVKKSASPVQ

SEQ ID NO: 46986 - protein, 396 aa, Mycobacterium sp.
  misc_feature (325)..(366): Xaa can be any naturally occurring amino acid
MARFEIPDGWCVQAFRFTLDPTEDQARSLARHFGARRKAYNWTVATLKADIEAWHTTGVETAKPSLQALRKRWNTVKDEVCVNAGTGAVWWRECSKEAYTDGITGAVNAYCNWQSARAGRRAGRRVGFPRFKRKGRDHDRVCFSTGAMRVEPDRRHLTLPVIGTVRTQENTRRLERLIRGGRARVLAISVRRNGTRVDASVRVLVGRPQRPNVAQPGSRVGVDVGVRRLATVATAEGTVIETVPNPRPLESALRELRHVSRARSRCVTGSRRYRERTTELSRVYRRVNDVRTHHLHVLTTRLAKTHGRIVVEGLDAPGMLRQKGXXXXXXXXXXXXXXXXXXXXXXXXXXXXXXXXXXXXXXXXXXWGASRVITKDHSLATEDAVPYRRRRRSVEW

SEQ ID NO: 46987 - protein, 407 aa, Streptomyces sp.
MQLRYAFRLSPDAGQRTALARAFGCARVVFNDAVRAREDARMAGQPFPTAGELSRKLITEAKRTAGRSWLSEVSAVVLQQSLRDAETAYRNFFASLKGTRKGPKLGPPRFKSRKDPRQSVRFTTNARWSITGSGRLSLPKIGAVKVKWSRSLPSTPTSVTVVKDAAGRYFASFVIDTDPAADQARMPDTDQIVGIDLGLAHFAVLSDGTKISSPRFLRRAEKKLKMAQRELSRKRKGSKNRAKARLKVARAHARVADARREFHHQLSTRLISENQGIAVEDLSVAGLARTRLAKSVHDAGWASFISMLEYKAERYGRTLVRIGRFEPTSQTCSTCGTVDGPKPLNVREWTCSACGTLHDRDHNAAINVKTAAGLAVSACGASVRPGAIPAQREETGSHGFPTGNRAA

SEQ ID NO: 46988 - protein, 429 aa, Streptomyces sp.
MSRFRMYPRREQEQQMLLRCAHARYVWNLAVEQHSHWRRGRKPAPSFAEQCRQLTEARAENEWLRQGNADVQQQALKDFTKAKSARFTSGFGKPTWRKKYVHEGFRVIGTDRLPEFDDDGSPKLNAKTGEQVMGRSVVVQKLNRKRAQVKVPGCGWVRFRLTRAVLPVAKTFRVNYRNGQWHIAFAVIPEPIPAPGTSEAIGIDRGVTITAALSDGRKLNCPQLTVKERAQIRKYQRRAARATKGSPEKTAEYAKVARLKAREANRRKDWCEKTSTMLAQSYDVIRFEKLNVKNMTRSAKGTVEQPGKNVRAKAGLNRGILAQGWGLLRQRTEHKAPGRVQDVPAPYTSLRCSACGWIDKNSRKSQAEFICSSCGFTCNADENAATNVAAGQGGILRPRRQACAGGTTPPTQRSSVREPQPTWVGIPLF

SEQ ID NO: 46989 - protein, 391 aa, Pleurocapsa sp.
MLKAVKVRLYPNSEQKRHLAQSFGCARWYWNYSLALTQKTYQETGKGLSRGAIQSLLPGLKKEFEWLSEPYSQCLQVVALNLSNAFINFFEGRGRFPRFKAKGNKQSISYPQNVKVLDGYIKFPKLKLVEAKISQPIEGIVKTVTISQVPSGKYYASILVDHEIEIPQASDQGKVVGLDVGISDICVTSDGSKYNNPRWFKKHQQNLKRKQQKLTRKQQDSHRRYKAKKLAAKVYEKVSNCRLDFLHKLSRRIVDENQVIAVENLNVKGMVKNPKLALAISNVGWGMLNTMLKYKAEWSGKIYMQVDRFFPSSKLHNKCLYHIDKLPLDVRYWDCPNCGIKHIDRDVNAAQNIRDEALRLLALGRKATAHGGIVRLGSGREKSTTEQILRK

SEQ ID NO: 46990 - protein, 368 aa, unknown
  TnpB Polypeptide
LKIIKAYKFRLYPDDKQKQFFEQNFGNVRFIYNKMLSDKVEYYKKNKEMLYNTPAQYKKEFEFLKLSDSLSLSNAQLDLERAYKNFFRNPSFGFPKFKSKHKSKNSYKTNNQNGSIHIDDKYIKLPKIGFVEIRMERQLPKGSTIKNATISKTKSNKYFVAIQFEYEKEVEQVQPESYLGLDFAMSDFYVDSEGVKGNYPKFFRKSQDKLAKEQRELSRMVKGSNNYNKQKIKVAKVYEKIANQRKDFLHKTSRKIANSYDVVCVEDLNMKAMSQTFKFGKSVHDNGWGMFVQMLKYKLEESGKYLITADKFFPSTKQCSACLNKKDEMLLSERTYKCSSCELEIDRDLNAALNLKQYAIESLQVNKV

SEQ ID NO: 46991 - protein, 408 aa, unknown
  TnpB Polypeptide
LLHKAIQVRLYPTQNQQIQVALTFGGARWWSNYALNKSIEVYKKTGKGRGYSSLNTLLPALKKSDGSVCLGEFYGKFLQFTTLNSTTAYNFFLDGFAGFDKFPSQDKKQSFQQHKNVKFVCTLILDNRQITKPKTNRYRLSEGKIPTSIISKKYSGKYLASILTEIKKAENQTKKEGRIAGSDLVLKYFAIVPDDKKVSKYDNAKHFAKHEKNLKGKQQKFTGQQKRSNSEYKYRKAVAKVGERFRNSWQYFLHKLSYKLVSDRLAVIVENFHFWNRIRNSNLAKARSDEVLESFTNFLAYKLERKGGNLVEIDRGVSSSKLGSNCFHQMTEMRLDMREGTCPHCATDRDREGDAAIKIKAEGIKILKAEGSVVSALRCEVRPKVGRKSQLRHSPMSTEAPTIFGTTI

SEQ ID NO: 46992 - protein, 420 aa, unknown
  TnpB Polypeptide
MLKAIKIRLYPDSDQQIEINKLLGASRFAYNYCLDKKINAYKQDKSSLSTSDLNKEIIILKNTEGYSWLKDAHSKVIQQSLLNLDSAYKNFFKNKKGFPKFKSRHNKNSCRFPVDAIGGINGNQVNLIIKLKNLHYKCSVRDEKYLNKNQDHIKSASLSRSKSGKYFLSILINNFVPRQMNISDKTIGIDLGIKDFVVASDGTRFENLKIKRNNHEKLIFLNRDLSKKKNGSNNKNKSRIKLAKYHEKLNNKKENYLHHVANILLNENQVIAMENLNISGMMKNHNLARSIQELSLSEFKRILSYKSAWHNKELIQVDMFFPSSKLCNKCDNKNQDLKLSDRTWVCKTCGAIHDRDQNAAINIWKEGLRLKNKIGTSGPELTLVENGSVDDLTRNGPLKSTCSRKQEGKIVRFADVFENK

SEQ ID NO: 46993 - protein, 400 aa, unknown
  TnpB Polypeptide
MLKSYKYKLRPNKEQIILLNKHFGSIRFVYNYFLNERKIEYETNKNSLNYYDNARSLTELKKIEEYSWLKEINSQSLQDSLKNLETAYKNFFRFKKGFPKFKSKHNKNSFCIPQSVKLENGKLNVPKFNDPIDLILHRTFNGIIKQCSISKTSTNEYFVSILVESEHNKLEKTGKTIGIDLGLKDFVITSEGYKYKNNRYTKTYTKKLKEDQQHLSRKIRGSNRYNKQKLKVATIHKKITNSRIDNLHKVSIDLIRKYDTIILEDLNIKGMIKNHKLAKHIADASWSKLITMLNYKAEWNDKTIVKIDRFFPSSKTCNCCGYINQNLKLDMREWTCPSCSIKLDRDFNASKNILKEGLKIISSGTDDYRCGDEIRPTLVGAIGETSKISCNDKEASIPLG

SEQ ID NO: 46994 - protein, 391 aa, Micromonospora sp.
MADITASRESAKAVVRRAVGRHTADPAARRRLLGLLKTNKWSGDAYLARQMRKHWRRGHNHTHNQIVVRADKHHTHVDGNGLLWLAVPGLVRRQLVRIPLNTTVAPRGTLRLILRGDRVEVHYQIDAATMKTSQRPCGGATIGVDKGYTEVLTDSDGNHHGARLGRLLTTESDRIKERNRRRAKLRSIANNAARRGDRAKADRISQNNLGTVKRDRQAARHRAQVRTEIFTAVHRVVDKAIVVVAEDLTKTFAGRKPLGRDTNRRLAAWTKGVTAEALASVSERRGSALVHVNAAYTSQVCHRCGCLGRRAGDRLHCTVCGVVWQADVNAAINVLQRHGDPDITLRTPHNLVKQIVQTRADRHRSRLPLPDSSPALLSGERIIPKSHPDQV

SEQ ID NO: 46995 - protein, 483 aa, Caldanaerovirga sp.
MLTIQAKLGFDSKEDKQEVLDLMRRWSSCMRFAYNRLLESKGRNELKRELQGIFNLNSRYVDDAIIKAKSVLESCKERCENPSRVIFGSRSLFEKLKKRHINGNAYKKLKKEWQERRKGNLYSRGDKSKKGNLNTRIKIDENGAVLRINVSERKYAYARIQAGCKKGKSREELLEAISTCGEAYSVELKLKNGKVYAYFTIEENFPEVTVTKENGVIGIDVNAYPDHIAWSETDENGNLVSYSKILMPELASGSSDKREYYRWQHAHEVVRLAEEKEKAIAIERLDIRDKGKRGDFSGRKSRRIRHSFSYRSLLEKIKVLAKRKGIQVIEVNPAYTSMIGMLKYVPQYMISKDVAAAYVIARRGLRIKERIPDNYMKLLENLDVDSLEDLKDYVSKAIKNRRLKKKQLKEIDYAIKVLQSLGSEPGEALIPLDGTSISAYSESYKLWRVLKVAVVTPLSPGKVLRDISVLKGVLHSGQVGRPG

SEQ ID NO: 46996 - protein, 393 aa, unknown
  TnpB Polypeptide
MRDHIAVKFRAYPTGEQARLINRTIGCARLVYNLMLETRIAHWQTTWESCHPTPAIFKDAYPFLREVDSYALCNAQCDLEQAYKRYFKDKNAGYPKYKSKHHGRKTYTTNLSHDNIRLDDKARRLRLPKLGWLAIRQHKRIPESWRLKSVTVEHCPSGRYTATVLFEHDTQTPERTKPANIVGLDYASHGLYVSSDGERADYPGFYRNMEARLSREQRKLSHMVKGSANWRKQCERVARIYEKISNQRHDYQHKKANALADTYDAVAVESLNLKGMARKPKPKPNPDNPGAYLRNGRKAKSGLAKSLMDNGYGMFCTLLEYKLARQGKPLVRVDGWFPSSQLCHECGYRNPQVKNLSVREWACPSCGVRHDRDVNAALNIRDEGRRLIERHDS

SEQ ID NO: 46997 - protein, 398 aa, unknown
  TnpB Polypeptide
VKRLQAFKFQLRPGGQQECEMRRFAGACRFVFNRALARQNENHEAGNKYIPYGKMASWLVEWKNATETQWLKDSPSQPLQQSLKDLERAYKNFFQKRAAFPRFKKRGQNDAFRYPQGVKLDQENSRIFLPKLGWMRYRNSRQVTGVVKNVTVSQSCGKWYISIQTENEVSTPVHPSASMVGLDAGVAKLATLSDGTVFEPVNSFQKNQKKLARLQRQLSRKVKFSNNWQKQKRKIQRLHSCIANIRRDYLHKVTTTVSKNHAMIVIEDLKVSNMSKSAAGTVSQPGRNVRAKSGLNRSILDQGWYEMRRQLEYKQLWSGGQLLAVPPAYTSQRCACCGHTAKENRLSQSKFRCQACGYTANADVNGARNILAAGHAVLACGEMVQSGRSLKQEPPEMI

SEQ ID NO: 46998 - protein, 208 aa, unknown
  TnpB Polypeptide
VRIASTTTRIVASFTRDDNRIKTRIASKYGGRRISRTAHLLHNATKTIAALAVQRRTAVVLENIEGIRSLYRRGNGQGRKYRGRMNEWSFGDAQRQIEYKARWVGLPAIRLSRRETRGSSVTCPRCGERLQSDKRLERKLWCGKCRIVMDRDRVAGINLAWRGRVRFARSRPPITEAQGGADEAMKGNPTPMVIPGVDAPKLTQPTKS

SEQ ID NO: 46999 - protein, 403 aa, unknown
  TnpB Polypeptide
LTEVRNVLQRAHRIKLKPNNKQVTYFKKACGVRRLAFNWGLAEWKRQYEVGEKPSAFGLNKQFNAVKKSEFPFVSEVTKCAPQRAFADLEKAFKKFFKKTSRYPKFKKKGQRDSFYVDNLKFKLNGKSIKIPKLGWVRMQESQRLPGRRLSATVSKEAAGWFVSITVEIPDGSECSDSQVYSAVGVDLGIDKLAVLSNGITFENPKTTKKYEKRLRRLNKSLARKKKGSSNREKAKKKLGLLHSRIRNVRKDFLHKLTSYLADNYSDICIEDLNTSGMVKNRRLAKSVQDASFSEIRRQLVYKSIRVHVVGRFFPSTKLCMACGQLHDMPLNKRTFQCSCNGVSIDRDLHAAQNILRAGCPNVKPVEREALVLGQLPENETTFWEAGNVHKFNGFEGAPCNFL

SEQ ID NO: 47000 - protein, 390 aa, unknown
  TnpB Polypeptide
VRRAHKIKLKPNNKQATFFKKACGVRRLAFNWGLAEWKRQYEAGEKPSTSGIRKQFNALKRSDFLFAYETPAGVTAQAFSDLDTAFKNFFRKTSRYPRFKKKDQRDAFRLDNQKFKLDGKSIRIPKLGWVRMQESLRLSGKLLSATVSKEATGWFVSILVEIPDGSECSDSQVYSAVGVDLGIDKLAVLSNGRIFENPKTTKKYEKRLRRLNKSLARKKKGSNNREKAKKKLGLLHSRIRNVRKDVLHKLTSYLADNYSDICIEDLNTSGMAKNRRLAKSVQDASFSEIRRQLVYKSIRVHVVGRFFPSTKLCMSCGQLHDMPLNKRTFQCSCNGVSIDRDLHAAQNILRAGCPNVKPVEREALVLRQLPGNETIFWEAGNQPESLTLGV

SEQ ID NO: 47001 - protein, 438 aa, Helicobacter sp.
MIIQDKNKGVVLLNAIKFRIYPNAQQKELISKHFGCSRVVYNYFLDYRQKQYAKGIKETYFTMQKVLTQIKRQEKYHYLNECNSQSLQMALRQLVSAYDNFFSKRARYPKFKSKKNAKQSFAIPQNIEIKTETQTIALPKFKEGIKAKLHRDLPKDSVIKQAFISCIADQYFCSLSYETKEPIPKPTIIKKAVGLDMGLRTLIVTSDKIEYPHIRFYQKLEKKLTKAQRRLSKKVKGSNNRKKQAKKVARLHLACSNTRDDYLHKISNEITNQYDLIGVETLNVKGLMKIYHSKSLANASWGKFLTMLEYKAQRKGKTLLGIDRFFPSSQLCSYCGFNTGKKHESITKFTCPHCNITHHRDYNASVNIRNYALGMLDERHKVKTDKARVGIIRSDYTHHTNECVKACGASSNGVSSKYGSILDLASYGAMKQEKAQSL

SEQ ID NO: 47002 - protein, 415 aa, unknown
  TnpB Polypeptide
VNIAAHKIALAPNKRQATALRRHCGAARVAYNHARNEFEAALGKGDWRNDMDLRRSFNAVKRELYPWISELSANASKNAIIHLGNACKRWNADRKARKTGKKTGGDRVGFPKPRSIKRGGYRYQADNGAGTVKTDGKRVKLPRVGWVRMREHPRFDGAIRNSFVSERGGRWFVTLTYNIPDNSPERGGETLGIDMGLKTLATLSDGTRIESPKALKAAQSELRRLNKKLARQKRGSNRRARTKLALSKCHARIANIRGDLAHKTTSAISKREGLGVVKVETLNIRGMMRNRRLSRAFADAGIADWLRTLGYKCAREGIRIVKIDRWHPSSRLCNHCGAKNDTLTLATRDWHCGGCGAKNDRDLNAARNIKDAPSCGVKARGERVRPVANFAGAMLDEARTRQLSLNLATATPIAD

SEQ ID NO: 47003 - protein, 340 aa, unknown
  TnpB Polypeptide
MKVNRVYQIQINKSHPMWGMCDKLCFKSKNIYNYANYVQRQLFIKGKPILKYKDLTFQLKHSDPFKDLGSNSSQHTLKMLDKVWKSFFIAIKDYTKHPNKYLGKPKIPKYKKKKGKYICILTNWQSQIKDDYLYFAFRPLKPFNNMFKIHFQGKHLQTRIIPKGSIYVLEIVYEKEVQEIDKNFKSKRICGIDLGLDNFATLSNNIGIKSMIISGRSIKSYNQYWNKQIAKIKSDLKKRHKKDWSNKLEKLTQKRNNKMEYFMHCASKQVIEYCISNNIDTIVVGKNDKWKQKSNLNKTVNQSFVQLPYESFISKLQYKSEDTTIRFIENEEKFTSGTSF

SEQ ID NO: 47004 - protein, 334 aa, Sulfobacillus sp.
VIYTSKKLVQASLHTLTYHPLRKEFGLRSQMAQSVTKTVIARYKSTMENSHDWTKVEFKKPELDWVWNRDYSLAQGVFSVNTLEERIQVPFESQGMKHFFDGTWKFGTAKVVYKHGKFFLHIPMTQCIEETEWEQLKEIVGVDRGLNFLIVYDSHGQTWFIKGRPIKDRRGHYKQLRRHLQQRQTPSARRRLKKIGQRETRWMTDVNHQVSKALVERYGKNTVFVLEDLTGIRTATEKVRKRNRYESVSWAYYQLRQMIEYKAAKAQLKVIAVDPHYTSQTCPKCGHTEKGNRNKKHHRFACQNCHYRSHDDRIGAMNLHRKGIEYRVAVAAQA

SEQ ID NO: 47005 - protein, 439 aa, Sulfobacillus sp.
MPTLAHKIRLDPTPDQIRYFKQASGTARFVWNWALAEWNRQYAAGQKPKASALKKQFNALKYQQYPWLHDIHRDAHAQPFADLADAWHRFFTQQNDRPVFKKKGKTPDSFYVANDKFQIAKRRVKLPKIGWIRLRETLRFPGKILGARVLREADEWFLAIHVSVPDAIYYRTRTGHGVEGVDVGIKTFATLSTGEKIGGPQAHRRALRRLKMRQRSITRKMQAAKVQIGLAPHEPLPKGTRLPRSRNWDKAKNSMARTHLRVANLRNDFLHKTSTRLCRENQAMGIETLSVRRMMANRHLARAIADQGFGRFFSLLQCKAQRYGTRLVEADRWFPSSKLCATPGCGSVKQDLTLTDRRWTCPSCGITHDRDVNAARNLKRLATETALPVATMGATLSTVPEDPGIGGKVTPVRNEARSVGLPTASGQEEIDAHNGAPIL

SEQ ID NO: 47006 - protein, 502 aa, Sulfobacillus sp.
MAMVTKTIKLGVHKEVHAIKRNAIVETQVLYNRVIAFYMDFFVAHRGVFKEHVSYTKKNGEPAERHWTNQELLTLAERHTLSTPAHPHPLMPLEAIPQAKGMPTGLRRAAINHAAGKVKGWFVLLNQWEQNGKKGREPRLGEPNEPVTFYADMVDYPDFDLLPQATVQQTFIAVKLWYEGEWQKVPLPITLPLRDSEALRAAQAESQRIRTETAQIKARKAPNEPWTDEERAALRPKVWVARSLSLYAQRDKRYPGNLRFALHVPLEKYVQTPKKAKEQLQKNPGLPVVTVDLGVNRLAVMGAFRLDQLLATQFIHGSALNHKRHLLLNAISKKRAQSGRLPKNVHDNVHLWQKVRHLDENAARQVARRIVDFACQHGAQVIVFEYLRKYRAPQEKMSRSGRKNHKRAYWLRGQIVQWVRDLAFREGILTVERNPAYTSQMCPHCPANYRQVGSRQRHTFTCSNPDHVYRADADFVGIINLYRKWSGTFTYPSRKKDEPKPA

SEQ ID NO: 47007 - protein, 721 aa, Sulfobacillus sp.
MDEQFVSIGKAAKMLGMSIDGLRKWEREGRLIPVRTVTNHRRYRVADLRALMHEDAPDVARDTRCLLYARVSTKKQQDAGNLDRQLGRLTAFAAEQRWTVVAALTDVASGLNEKRRGLHRLLDLAQQHQAGIVAVEYKDRLARFGFTYLESYLHAFGVRVVVIESPVKDDPQELVEDLIAITTSFSARIYGKRRDKDGLDRASSDGDLSAGRSPRMKTTIFGVLLEVTPDQDTVLRRLMRKYGFMLRFAFQRLVGGLQNIGGLERHCASETELPLRYAKDAVQEAQDLIRARHQAMKDGATLWTQRVKKTRERLTALRASPHPNARRIAGQERKLTHQEAQQAFYQQHVEAGTFPPVVFGTKKRWWDRFKTLDDPIAEQARQQAWREEWDESRNGRLSARGDRTKRGNPLLRVCAGADHWILEISLDCRKPGKPDAKVPRYEKLAIPLYIARKVSKKTGQVNGRDYEGLLRRVLASDDPYQVEILRRQGRYQVRITVEEVPAPIQTDPRHGWVGVDTNSTFLALCHVLPNGNPHAFATIGDPRLFDVRSTQRDALVGGLAVETVQWAQARGAGLVVEDLQFIHDRDVSAKFNRVTHQFNYRALLMAVERQAAREGVGLRKVTPAYTSIIGRFKYQPQYGISVHHAAALVIGRRGGLKVRRENVPKALRLWMQDRDQWNDPTYRKNDWSAWARIKRIMTKTLASHHQYLSAWLGYRKTLFSK

SEQ ID NO: 47008 - protein, 388 aa, Sulfobacillus sp.
MRRSHQIALDPNNKHATYFAKACGVARFAYNWGLAQWKRQYEAGEKPTQASLRRQLNAIKREQFPWMLEVTKNAPQMALIHLGNAFQRFFRGDAKSPTFKQKGVHDRFTLTNDQVAVSDKRIRIPHLGWVRMRETLRFSGKIMSATISRKADKWYVSITVDTEETPAMCENQAIVGVDLGVNRLATLSDGTFVTGAKPHQALLNRLRRLSRSLSRKHKGSKNRAKAQLKFAKLHAKIANIRHDALHKLTTRLANQYGVIVVEDLNVKGMMANHRLARAVGDRGFHELRRQLAYKTSMRGGQLIIVDRWFASSKICSECGTKQKNMPLSIREWTCPECGTHHDRDVNAARNLMKWAVSSTVTACGEDVRPAIAEAASTKQEFNVKATYA

SEQ ID NO: 47009 - protein, 436 aa, Sulfobacillus sp.
VQETTVFTYRVALSPTEWDKASAARRAAGDLWTRLVKIHRFCRRRHWPWPTESQLKAHFKQRFPLHSQIVQALIEKFCATIDGVRTKRQNGDQQARYPWRFRRYFNPIFKGQALKRQGPHLLLPRGRGREPIRVHLPEAMPPGRVVQAELGFGELYITITREIPDPVPMASGKAGGLDIGVIHLGMVTDGQEALAISGRGLRSVKQGRAKAQAKLRKKRARTQPGSRRRQRLNRAQYRTSQKAERVARNALHHAANQIVAFCLAYGITLLYVGDLGTLNHHQRHRRSRRTNQEVGALEFGRLEQYLEYKLRRHGIQLVKIREAYTSQTCPHCGHLTKVAGRTYRCRACGYRAHRDGVGAVNILNKGMHGAIRPGEFLVPQRITYRRPVLLKRALRRSPAEPREIAGGISGGESGGSLRGSHDPRRSHGGSPRISVL

SEQ ID NO: 47010 - protein, 443 aa, unknown
  TnpB Polypeptide
VQEGEAQAQRTTTEKGVKKMQLVEQHIINKHDPRYALIDEAAFQSKNLYNAGNYEVRQAFFTDGTYLNYNEVQRRMQSHEAYKALPAKVSQQILMVLDRNWKSFFEAIEAYQEDPSTFLGRPKLPKYKHKTEGRNILVYTIQAMSKRGLKRGLVQPSMLPISVHTKQKDIHQVRIVPRKGFYVVEVVYKKDVKQASVNSAYYAGIDIGMNNLVALTSNKPAFQAVVVNGRPVKSVNQFYNKRKAELQKQLGHTGTTKRMERITNKRNRRIDQYMHTVSHRIIDVLVQEGIGVLCIGKNDAWKQEANMGKRTNQNFVQIPHARFIAMLTYKAELVGITVKVTEESYTSKASLLDLDPLPVRKSGDETKHTFSGKRVKRGLYRASNGRSINADINGAGNIIRKVAPDAFQQAEGVEGGKGVLASLVVHPVRIVIPLTKPKKASDQ

SEQ ID NO: 47011 - protein, 282 aa, Streptomyces sp.
VGPPRYKSKKDTRQSIRLNTNAFSLQGDGTVYVAKVGSLKVTWSRRLPAQPTSLTVTKDSCGRYFLSFVVDTEPDILPELETDAGIDLGLSAFAVLSDGRKIDSPRFLRRAEKKLRRLQRDLSRKAKGSRNRATARIKVARQHAKVANRRRDWRHKASTQIIRDNQAVYVEDLAVSGLSRTRLAKSVHDAGWSAFVGMLEYKAALHGRTFAKVDRAFPSSQVCSACGFRDGPKPLHVRQGTCGASAAPCTTATTTQPATSSSKDAASSPPDGRRRQTPVERR

SEQ ID NO: 47012 - protein, 425 aa, unknown
  TnpB Polypeptide
MYEERNRKIKENGKATRERRANMDCRVFSVKIQENRLSKAKLEKLKRCFLEAKWLYNAILAAETLTLEDTSMVQVKVKDSFEEREIKCLSSHMKQSVVDSVKTNISNLSKTKKKGLKIGRLQFKKECNEINLKQFNNTYKIKAHNKISIQNIGVLVVNGLEQVNIDEVEFANAKLIQKSSGFYIHLTVYSQKQPQLTTEKEVLGVDMGIKDQLIFSNGVKVNFYLEESEQLKGLMRKLNRQTKGSNQYKQTLHRIKKIFEYQNNKKNDVVNKLNLVLKQNYIICFQDEMLSRWQRKKAKRRFSFGRKIQHGILGRVKDKLKNNPSNVMLKSSVPTTQTCPKCGCLTKHSLDKRLYHCNHCGFENSDRDVHSAKNMILLSGYGTYRSLNTDTVSTERMTGFLDSLSNLGVVVSTTNSMEAWQFIAE

SEQ ID NO: 47013 - protein, 415 aa, unknown
  TnpB Polypeptide
VIEATRTVVVPSVRLTGKKFEVFRELEELYRQVLVELVDYGFRSNIDSFTRLKRDKYRELRRRYPHLPSHYVHTACQDASTRIKSFNKLKKKGLAKSERPEVNRVSIWLDDHLWRRIGYTTILIYTHKGWTPVELILHKLYWRYVNGGWALRTQPKIKIDYRCRRLLVYFVFAKAVNVDENSVKHVISADINEDNVTVKVLDRVFILETGVKRITIGYARYREVVQSVKGNGYVDRAIHGRERKRKKNIRLKIANIVSNTARNLNAVIVLENLPKQCPRNMIKDVRDPALRHRIYQAGFRGVVRAIEEKCLERGVPVVKVDPRNTSSKCPFCNSKLMRGDAPRQLKCPRCGFRSGRDVIAVLNLERKYLTLKGLVPLAPMPYDPALEVAVLPMREWARRKSLDAINKHELIRMSI

SEQ ID NO: 47014 - protein, 414 aa, unknown
  TnpB Polypeptide
MLSLTYSYRIYPDLTQSARMLAWMDLCRGVYNYALAERRDWINSRKCAVNACSINREYIIPADTPYPDYYKQQDALTAVKEGIVELQDVQSQVLQDALKRLDKAFKFMKERGFGFPRRKKFGQYRSFVFPQFKSNPVTGCQIKLPKIGAVPITLHRPIPDGFVVKQVRVVKKASGWYAQLILQADISVPDIQPHGEPIGIDVGLSKFLAVSTGKLVDRPKFFVELQSKLKWLQRQLKDKVKGSNNYRKAQHEIRKLHEYIHNVRREFHFLTAHRLCDEVGMIFAEDLNLVALGRGMLAKHCLDAAWGSFLDILKWVAWKRGVYFARVDARGTSQTCPNCGADTGKKELSERVHKCSVCSYETDRDVAAAQVVMQRGCTAVGQTAVLAVEDGCLGAPVKQQTPTARKGSPRYTRL

SEQ ID NO: 47015 - protein, 465 aa, unknown
  TnpB Polypeptide
MTILSGIKLKLYPNKTQKQTIEQTFGNSRFVWNQFKNMQENRYIAMIDDYNHYKEQAKENGEKIINPVYIDAYGMQKMLTPLKKDHPWLYSSDATVLQKTLSTLDKAYRNFFKKPDQFKKPKFKSRKHRSQSFTGRSQKQKSGKTDIRVTGNHYVHVTKLGFIKVSKTTRINGQIKEYTITRESFGDYYISFQIEEPDRELLVKTKQLMGGDLGLTDLLTLSNGLKFPKFSPGQTLALSLKAQSKASKSMNRNSKILTTNELIYLIEKGIFDEDKYDASDLFEFKNHEKRMKKSAKAQRKVANKRHDYLHKLTTALVKTYDVIVLEDLTIKNMLKNHKLAKAISNASWATFVRFLRYKCEWYGKLFILVPPHYTSRICHQCSWDSGKKPLDIREWTCQHCHKSHNRDINAAINILYRGLETYLQSQLMLLNEQAKNGYFSTVFFQVASQWLKQTITYFNQALKIA

SEQ ID NO: 47016 - protein, 404 aa, unknown
  TnpB Polypeptide
MLVKGVAFRLESDLPSDAKLLLEDFRLAVNNSIRAGLQARVTSRNALVRIAYKDFREQHPRMYAQHLVSAFEVAGNVLKNHRRSVRKGVTCRIPYVKRLLMKAENQAYKLDRRSGVIDLPIRAGYHVELRLVVSQYHRKYLDDMTLSLGSLTVLPNRIIVAFRRDAPKPFVPESVLSLDTNERSLDGVFVEGDAARAVKADFPEVAIIQQLHHDRRKRLQKKKAYDRRISRNLCRREGTRERHRIDYRLHEVANSVLRFAEERRSVIVLEDLKGMKPKRSKELNRRLSMWPRRKLHQIIEYKAQWRGIPVLKVDPRNSSRTCPICGRIQYSRMGAEFKCECGWHMDRHINASINLLQTAISRGMAGGLRFDPGAFQHDVMMILYEPAMAARSEPNGTSGIVGVT

SEQ ID NO: 47017 - protein, 240 aa, Streptomyces sp.
VQDLGVERPPVGVGLGGQLGMEFFGDAQRDLDHAVIVPLLWGHEAQVSVQAVPERPAEDRAGEGVRVCPCRLERRAERKLKRAQRKLSRARKGSNNRRKAKLAVAKVHARIADQRRDFIDQETTRITRESQAVYLEDLAVKGMAKAFGKSVHDQSLGMFARTLEAKCARYGRTFVKVDRFFPSTQLCSHCGGLEGPKGMAGLRIRTWTCACGTTHDRDENAEYNLRLEGRSIVAEGRPDT

SEQ ID NO: 47018 - protein, 187 aa, unknown
  TnpB Polypeptide
MDMELNNLFAVVTRDGSAMLAKGGSIKSEHYWWKKEIATYQAVRDLLRNAGFPNWVKYHGKYLEAMYRRDERLRHLYITATRFLVDELYRRGVRKLYIGYPIMLSQNNGNEYDTNIWWYRKIVLWIVDIFREYGIEIELVPENYTSKECSICEAKHKNRRIYRGLYMYNKDREEDKRRHRCNTRHSS

SEQ ID NO: 47019 - protein, 379 aa, unknown
  TnpB Polypeptide
MKILKYSFRIYPNQKQTNKLEQFCGAQRWLWNHFLDKEISEYKESKKFNFSHKNITSLPKLKKEFDWLKEIPSTSLQQTLLYMDKSLKQSFKRKESGFPKFKKKRFYQGSFTLAMVSDKLLTDTHFKIPKLGLVKIKLHRKLPSDFKTCQIKQKANKWFVVFTVKKETKNKIKTINKVTGYDLNSKQIVVDSDNISVNNPKFFAKSKQKLKRLNQLLSSKVKYSNNWKKQLLLVQRQHDKIRNQRKDFLHKLSTDIINYNDLICLETLDIKSMQQFNGHMVQDAGWSELISMLEYKCDLYGKYIVKIDKYFPSTKTCSNCNNIVEKNLNERNHKCKKCGLEISRDFNAAINIKQEGLKTFNFRQELPKALPDLKNLISL

SEQ ID NO: 47020 - protein, 438 aa, Methanosaeta sp.
  misc_feature (318)..(391): Xaa can be any naturally occurring amino acid
MLKSYRYRLFPTKSQVSVLERQLELCRQVYNDTLAYRKNAWEKEQRHVNRFETQNRLPQLKVDHPEYKEVHSLTLQNVVLRVELAFKAFFRRIKSDENPGYPRFKSRGRYDSITYPQSGFGLDSGKLHLSKIGDIKINLHRPIEGKIKTCTIRRMPTGKWFACFSVDMGEVPLPPWKDGSVVGIDVGLESFATFSNGEKIANPRFFREEEKELARVQRKLSKAPKGTLERKKAIKVVELVHERISDRRNDFANQVSRKLVDRFGVIVFEDLDIRNMLQNHCLAKSISDVAWNMLVKSTESKAAYAGSKVVLVDPRNTXXXXXXXXXXXXXXXXXXXXXXXXXXXXXXXXXXXXXXXXXXXXXXXXXXXXXXXXXXXXXXXXXXXXXXXXXXIVKKDLSERVHSCSECGLSMDRDLNAAINILRLGMQSLRKSDRSPVL

SEQ ID NO: 47021 - protein, 384 aa, unknown
  TnpB Polypeptide
MRRWCSLLRHSDVVGLSGTKCWTRNCKLTRKNNVSRKLHPPSTKKFPFLKEVDCFALVAVQNHIKNAFRNHFKNRKQFKLPKFKKKKDKQSYTTYNVHNLIRVDFETSLLYLPKLREGVKIELHRRFDGKSKSVTISKTADGKYYASILVETENRRNKVVESKSKACGIDVGLEHFATITNDFGSGKVEHPKYLQRGEERFRRLQRSFSRKQKGSKNSEKARLRLARQHAYIANARNDFLHKLSKAIIDENQVVVVENIDAKGLLRTRLAKSISDSGCSKFLTYLKYKAEWYGRTFIPADRFFPSSKLCHRCGYKNDDLVLNDRTWCCPACGEIHDRDVNASINLYFVGLGRHEGMQALVDDRSPHGLPKKPPCDETGISTEKG

SEQ ID NO: 47022 - protein, 394 aa, unknown
  TnpB Polypeptide
MLKAIKIRLYPNKDQIIYMNKLLGCSRFVYNQCLTYKSQEYGLWSNPTGLSDTNKFVIELKGKYDWLKETHSKVIQQSLINLETAYKNFFKKKSDYPTYKKKSYQQSCRFPVDAIMGVKGNKINIIRPLKDIHYKCSKNDERYLNQNKNKVKSGTLTKTKSGDYYFSILIDRTNKTLNKAKNDLIGLDLGIKDFIITSEGQTYENLKSKRNNQIKLSRQHRNLSRKQKGSNHQKQARVRLAKTYEKLNNIKEYYLHHVTNQLLSENQTIVIEDLNVAGMLKNHCLARSIQELSLSRFKTMLMYKAEWYGREVIQVSRWFPSSKLCNCCGYKNVELTLKDREWVCPECGVIHDRDINAAINIRNEGYKIKIGLSSPELTHQEMEPVGHRGMMKKL

SEQ ID NO: 47023 - protein, 434 aa, unknown
  TnpB Polypeptide
MIVKRIVKFNIKKNHVDYNYIKQQLIESKEIYNYANYIIRQLFFKKSKNHRYSLDFITEYPELKDLFTQYIEEDKQFTSLFNNIICKFARLKDFSVNTKIVQSITRRLNSDWNSYWALLNLVKNNQYDKDINIPKYKKQYNLVEYNNQVLSKKKLKLGFIGTDKMKQGIKISNSHKELHCKCFRIFYKNNNFVCELIYEKEINDQTDSTGKAASVDLGLENLFTVAFNYNKKGISFKGTKLKSINQYFNKEKSKLQSLLPKNQYSSKRINHLFYKRNEQLRNIIGFYANKLIKILLEEEISTLIIGHNKGWKDKINIGKVNNQNFVSIPFNKVIDIIKYKAEDFGIECIEQEESYTSKASFLDNDNIPDFNEVENQKYTFSGKRITRNLYQTKNNQIIDADLNGALNIMKKANVKTLTPLNCLKFNNIFTNKLV

SEQ ID NO: 47024 - protein, 396 aa, unknown
  TnpB Polypeptide
MDIQRTITIIIEPDADLLQTLTAFREVQQALSGPCFNEGRPLGALALQRLMYHQVKGSLSAQMTISAIRTVCATYQSAKSNKKPAQRPFLFKKSRALFLIGKRGRDADFREDGTLSIWTVGGRKHLRYTIPEDFQATLYRAKEIDSLNVILCDGKLIGRVTFTLEVPDPQGILPVGIDLNETNTLVAVDPDGRELFISGKSIKVKNRRTAKTRTRLQSKHATRKAEKKDTRSVRRLLKRLGRKQRNRTRTFAQQTAKHLVQWAPKHAILVFEALHIPQPQKGQMRGRALRRRMSLWQRALIRTCVENKAQECGMSVAEVNPAYTSKNCSRCGLRGVRRRHTFTCPHCGFSDHADKNAAKNIRNKFTQLRLSGDPSMSPEAQTAPVVGKPRLQQWGN

SEQ ID NO: 47025 - protein, 271 aa, Nocardia sp.
LSRSSTDDPVHEERQVPDHSGPETAVAEDRGCEGCVVAGTAGGAVVGDDRQGRRGPVFRVVRGASRCRAVARGRHRGRYRSRIVDVRCPVERQDDHLTTLLAAGRTTVEKSSAGCVSQTEGPGQPGQGPVRIAKAHARVADMRRDWAHKHSTAIIRENQAVFVEDLCVKGLARGRLAKSVHDAGWGMFIRMPEEKATRYGRAFGTVDRWFPSNRTCSVCGAVGDKKPLHVRTWTCTCGILHDRDLNAAINILAAGRAESSNACGGAVGLSA

SEQ ID NO: 47026 - protein, 388 aa, unknown
  TnpB Polypeptide
MNGAFPKWRKEFSEIADVHSQVLQNISLRVELAFSAFFHRVKAGEKPGFPRVKGDGYDSFCFPGASVGYAVEGGGLRLSKITEPNSRIKMRLHRPLVGKVKTCCVRRIGCKWFACFSVEQEDDFLPKSDEAIGLDAGLNSFMALSDGTFIENPRFFRKDEKALAKAGRKQAKTKKGSKERRKANKVLSRIHERVRNRRHNFVHQTARRLVNEYGMIAVEKLVVKNMRGTHCLAKSISDASWSMFRTVLTHKAESANREVIAVNPAYTSQDCSACGYRPDGVAGRTKKKLSDRWHFCPKCSASLDRDTNAAINILNLAVNTKPQNRKQNHKQNHNGITLCQVTPVEAPAFRQESNHYFFGSSACWASSSPWCFSPVGWGICWKACLTGS

SEQ ID NO: 47027 - protein, 416 aa, Paenarthrobacter sp.
VLRYRYRVYPTIDQQAAISRLFGCVRVAYNDALAARKAHYAATGQYLPTKMVSAALTAAKQTPEREWLTEVSSVPLQQAIADLDSAYRNFFDCVTRKRKGKKVGPPQFRRKSAAGSARFTSNARFKLRQVNTSRALLNLPKIGDLPVVYSRPLPAAPTSVTLIREADGRYYASFVVNPAQELTVVAHDPTQMASARSAGVDLGLTDFAAITYSDGSREKIDAPRFYRKAQRKLARAQRELARRMKGSKNRAKARVKVAKVHRKIRDQRLEFTRKLAVRLARENQTVAVETLNIGGLAKTRLGKSIHDAGWARFITELHHAGDKYGCAVLGIDQWMPTSQVCSCCGVKDGKKVLTVRVWECSGCGARLDRDYNAAVNIMLAAGLAESLNDCGGNVRRALASAVPGEAVTALWPQPNR

SEQ ID NO: 47028 - protein, 441 aa, unknown
  TnpB Polypeptide
MQITSSYGAEIKNKNLPLHHTLVLYRQAVSYLTGVYEKAWDGLAQIPQAKSRFNAAEHLVHETKKNHARFDFDMLFPKMPSYLRRAAIQHALGSVSSYHSRLELWNNGNLSGKPKLVCESHAMPVFYRDVMYKQGGEGEDAAYLKLYDGCDWKWFRVGLLHTDMEYLRRHWTGKNSSAPVLEKRNRKYFLRFSYTEEFTLSKTPVKDQIICSVDLGINTDAVCTIMRSDGTVLGRKFIRFPSEKDRLHHVLGRIRRFQKEHGSGQTGSRWSYAKRLNTELARKTAGAITEYANENHADVIVFEYLEMKGKISGKQRQKLHLWKKRDIQNMCEHKAHRHGMRIARVCAWNTSRLAYDGSGPVSRDPKNHSLCVFQTGKQYNCDLSAAYNIGSRYLMREIIKTLPETERSFLEAKVPSVKRRTSCVYADLLLFQKEYGQMRSA

SEQ ID NO: 47029 - protein, 200 aa, unknown
  TnpB Polypeptide
LGIDLGLKTFAIVSNGAVYSNVNRSENVRKTRRRLKREQRRFSRKIKNRKKVKTAAVTTSNLDKQRIKVQRAYHRLECIRKDFINKTVNDLVKAKPGYVTVEDLNIRGMVKNRHLSKAISESLFYYFRVTLIRKCQEYGIEVRLADRFFPSSKQCSSCGALKKDLKLKDRVYHCPSCGLEIDRDLNASLNLKHCEQYHVA

SEQ ID NO: 47030 - protein, 356 aa, Cyanobacteria sp.
LLKQWFGVSRFVYNKTIKYLQKPETKANWMAIKTGILNDLPEWAKSVPFQIKSIAIKDACLAVRAAKKGFKKDGQIRKCKFRSRKDTKQSVFIPKSAIKDCGIYHSILGKSKLKESLPTSFSDGRLILAYGEYYLIVSEKVQPLKTENQGRVVALDPGVRTFMTFFSETSFAWLGNDSNLYIQKLCFRLDKLISKLSKVPSRQKRRLKKAASRLSCKIKNLVKELHHKTAKFLTDNFDVILLPTLETSNMVSKSRRKLRNKSVRQILTLSHYEFKTFLKWKAWEQSKVVIDCNEAYTSKTVSWTGEIVKNLGGARTIKSPSTDLRMNRDLNGARGIFLRALVDTPWLREYLNLCIC

SEQ ID NO: 47031 - protein, 384 aa, unknown
  TnpB Polypeptide
MKGVHMEQITVTAKIQIVPSDDDKTLLNTTMSAYTDACNHVSNYVFQTHNLKQFALNKVLYSDLRNRFGLKSQMAQSVLKTVIARYKTILGNQNEWIKPNFTKPQYDLVWNRDYSLTNHCFSVNTLDGRVKLPYFDKGMSKYFDHSIYSFGTAKLVNKHGKYFLHIPVTYEVEECEDAEICNVVGIDRGINFVVATYDSKHKSGFFSGKTIKQKRAHYSKLRKELQMRRTPSARRRIKAIGSRENRWMQDVNHQVSKALVESNPKYTLFVLEDLSGVRSVTERVRTKERYVSVSWSFYDLEQKLIYKAKQSQSLVLKVDPRYTSQCCPVCGHIEKANRNKKIHLFACKNCGYKSNDDRIGAMNLYRMGINYLTDSQVPSIVTAE

SEQ ID NO: 47032 - protein, 320 aa, unknown
  TnpB Polypeptide
LLLQTKTQKTFWPCQLQKAFRSLSHRQKETGRCHQKRRHNQHLDGWRAKRLAFSVPEYFLGYFFNALSFDSLTVKERNGQLVGYLCVTLSKPVVKGSVLVGVDRNETNLIVAVKETGEVFFESGLKLRIWRKKHRKKVARLQRKLVERKDTRSVRRVLKRLSPRQRNFTKTYCQTVAKRLVVWAGTDAVLALENLKLQQGKKGNKALNRRLHQFPHGLLLRCIRNKAEMLGVPVLLVNPAFTSQTCSRCGNLGNRQRHRFCCPHCGFTLHADLNAAFNILHRAKETLLSEPKGLGSGALSAAPEAQPVAGFGQAVGFSRR

SEQ ID NO: 47033 - protein, 263 aa, unknown
  TnpB Polypeptide
MQELVPDAPVVGIDVGIANFVTTSTGKQCGSFHKHLRARHKRDRAKRRRKAKLRACLQKKGGKKLPSTSSRSGQRLLRHVKQEINRAVKACFTDPAHEGVQFAYEQLSVASMRFKVKAQNAYLRASNLGRIPQQIVWNSQKRGVKATPVMSAYSSQECSVCHYTDRNNRPNQQTFCCQVCGFEAHADYNASINISRRLGDNALPACRDRKAIKAMLMQRHEAWKQQQGMETASPVKRRRRGKSSAPSFISVMRVSSSPVRGCP

SEQ ID NO: 47034 - protein, 385 aa, Sporolactobacillus sp.
MTLKGLNVRIYPNKKQKLLIQCNFGYNRFVWNQMLHMLIERYDHNPKATFLNAYALNLLLPALKREYAWLKEAESTSLQITNHDLVEAYKNFFKQKHGFPKFKSKKSFKQSYQCKCVNQNVKQTAAHAIQLPKLGRIRFKAGKTIPKVIKSVTIRQSFTGKYYAILLVEDESQAFRKTNARIGLDLGISDLVIGSDGQKIPSIRFDKQQETKLHKWEKRLARRRLHAQKAMAWDKHNKVLQPRQLADFKNVQKARLMVAKLHEKIVHQRQNYLHQITTQLVKSYDLIAIEELKTKNLMHNHKLARAIASQAWGEIRRMLTYKCAWYGKELVIVHPYKTSQICSHCGHDDGKHELGVREWTCPSCGTLHDRDINAAKNILNKAIAY

SEQ ID NO: 47035 - protein, 201 aa, Okeania sp.
MVEKGYKFRFYPTPEQENLLRRTLGCVRLVYNKALAARTQAWHENKQRVSYKQTSAMLTSWKKQEDLDFLAQVSCVPLQQGLRHLQQAFTNFFSGRANYPKFKKKRNGGSAEFTKSAFVWKDGKVYLAKCSSPLPIRWSRQLPPGCVPSTITVRLSPSGRWSVSLRVNDTRDLRLKPIKKQIGIDARNYQFINYQQWKKSS

SEQ ID NO: 47036 - protein, 425 aa, unknown
  TnpB Polypeptide
MVNKCIDVGLKHGVSSRFRLIKLVYRELTCLGLHSWYVLSAIEVATTILKNYRKAKRRGKNVRKPRAKKLMAKIGNQAIAIVGDRLRVPLRPRQYICIPLHKRAMEFVRGGYRLRSVVLTPKMAFITFSKQVEVKEPKGYLAIDVNEDNITVATTDGKVMVFDLSDLKRASYGYFARRRAIQKRYHGDRRVLRKATSKMRRNYRNKVSIRLHQVSAYIVRLCREKGYGIICEDLRGLRDSVNAKVKRYNPISKKVQPISRRSKEMKRRLNSWWFRRFLHMIEYKATWEGVRVVKVNPRRTSSTCPRCRFRLGIYPNGQVECPRCGYKGDRHVTACLNMLRTSDVGLWFGPERPSHVAMTPALTNPSGECGQAGGAKEGKLNSGIPPPFNTSRSTPRYSTEPADVKGPSWLDMFSAPTSSLRNLLL

SEQ ID NO: 47037 - protein, 392 aa, unknown
  TnpB Polypeptide
MNMQTRTYKFRIYPSRAQEKQMHQHLWMAKNLWNELLEHCKTTYNNFDYFPTKDALQLMAKNSGLFSQTQQEVSHRVFNSIMRVFKLRKQGIECGFPRFKSTDRMKSLHYPQYDFGFSLDKKLKVTPFGEISIKKHREIKGKIKTLTLKRESSGKWFATFSVEQDKPIPKQNTGNRVGIDLGLKDFAVFSDETIIKNPRHLKKHEEKLARLQKRLSRNKKKSKNRKKAKLKVARLHEKVSNTRADFLHKLSTRLINDYSLIALEKLAAKGMSNKDFGLGKSINDAGWNMFANMIAYKAEEAGCKVVFVNPKDTTQECSKCHEIVKKDLTERMHNCPFCGISINRDLNAARNILIKATVGTTGSNASGDGTIVSSMKEDATRFIGGSSHSFGV

SEQ ID NO: 47038 - protein, 319 aa, unknown
  TnpB Polypeptide
MSRHVISKYTLVSDNVVFFRYCVRMSRYEGFRIVALRPGQVCRLSRHWGQVFVPKAGWVRFRWSRAVPPAKSFRVTLDRAGRWHIALTAVPAPIDGPGTGEAVGVDRGVVVSAALSTGEMLVCPRLSAARQRRLKRLQRKLARARRGSNRRTQVRSAVARLRAREADARRDWAEKLSTDLARRFDVICVEDLRVRSMTRSAKGTVAEAGRSVRAKAGLNREILASGWGILVERLEQKAPGRVKKNSPAFTSQRCSACGIVRSENRKSQAVFACTACGFTCNADVNAARNIAAGHAVTARGGPPLGGPVNREPQLAVLPV

SEQ ID NO: 47039 - protein, 331 aa, unknown
  TnpB Polypeptide
VEQLEAQDGQEWDGHPEKFKGRPKIPGYKHKEQGRYLLMYDIQAIGKRAYKKTGMIVPSGLPIQIKTKVAWEAIDQVRIVPRRDVYVVEVVYQKAEQQAPVDPKLVAALAPGVNILAALTSNKPGFIPRLVSGKPIKSRNQYYNKQRAHHQKQLAKQQRFTSRKLDHLTTKRNRRINAYLHTASRRIIALLVEEGIGTLCIGKNPLWKQAVEMGKKNNQQFVQIPHARFLEMVQYKGALVGIEVITHEESYTSKAAFLDLDDMPTYDPKRTETHQFSGKRIARRWYRVGNGQVIHADVNGSYNIGRKVAPTTFGLRSSGRSSSSQAACRLK

SEQ ID NO: 47040 - protein, 268 aa, Moorella sp.
LEIKQVQLVWHRNEYWLHIAVDKPALEKVRGEAVAVVDPGEVHALTLTDGREALVISGRHLRSLRRLRNKTLKKFQKAISRTKKGSNRRKKLLAAKYRFLNWIGAQISHTEHAVTKMAVNWSLQRRVKKVFIGDPQGVREQDCGRHHIQRMSQWSFGRLRDLLEYKLQRHGINLEKMEEQGTSGTCPICGKYTKQTGRVYRCGDRDCGFGGVHRDVIGATGILDLAVNGRFTLGRKLPETVSYARPAVITPMPGHKKKKVAKRRIYVE

SEQ ID NO: 47041 - protein, 557 aa, Lactobacillus sp.
  misc_feature (289)..(289): Xaa can be any naturally occurring amino acid
VLKGIKLRLYPNRTQQNQLEQMFGNDRFVWNQMLAMMNERYQNNKALPFLGKFKLNYLLKPLKKEYPFLKNSDSSSLQVVNEFLTQSWKNFFQDKTGQIGKPRFHSRKYLKKSYTGKSIIKTAGKRYMKIPKLGYVKTSKTGVLQNTKIKRFLKNSDSSSLQVVNEFLTQSWKNFFQDKTGQIGKPRFHSRKYLKKSYTGKSIIKTAGKRYLKIPKLGYVKTSKTGVLQNTKIKRYTVLLEPTGKYYLSLQVEISEPEKYSLTGKRVGIDVGVADLAILSNGLKYPSFXKIPKLGYVKTSKTGVLQNTKIKRYTVLLEPTGKYYLSLQVEISEPEKYSLTGKRVGIDVGVADLAILSNGLKYPSFDSSYFEKKAKIWQKKYSRRRHLAKLLVLQDRNKKVLCPRSLESFTNWQKAQKSKAKYQAKAANQRRDYLHKLTTHLVKQYDVIAIEDLKTKNLQKNHHLAKSIANASWRIFRQMLEYKCEWYGKKLIAVDPKNTSRICSKCGYNSGAKPLEIREWTCPKCQTKHDRDINAAINILHKGSTKLNGQGLAMVTS

SEQ ID NO: 47042 - protein, 425 aa, Klebsiella sp.
MNTQCLPRRISISFFIVQSIIDRMKRLQAFKFQLRPNGQQERDIRRFAGACRFVFNRALAFQNENHEAGNKYIPYTKMASWLIEWKSDTETQWLKEAPAQPLQQSLKDLERAYKNFFQNRAAFPRFKKRGVSDAFRYPQGVKLDQENSRIFLPKLGWIRYRKSREVIGVVKNVTVSQSCGKWYASIQTESEISGPHHESSSMIGLDVGVAKLATLSDGTVYHPVKSFKASQRKLAVLQRQLSRKEKFSANWQKQKRKIQRLHSHIANIRRDYLHKVTSEISKNHAMIVIEDLKVSNMSKSAKGTAEKHGRNVRAKSGLNRSILDQGWYEMRRQLEYKQLWRGGQVLAIPPAYTSQRCACCGHTAKENRQSQSKFECLECGYTENADINGARNILAAGHAVLACGGMVQSGRPLKQEPAEVIQTSI

SEQ ID NO: 47043 - protein, 370 aa, unknown
  TnpB Polypeptide
MKTEKYEFYHQSNIIQIGNLIDDLHSGHVHLLLLQKRYYRIYGKYASLSRILKHITKLKRTTKPHWNQLPSQMIQDVAIRIDLGYQAFFDNIEDRRLGKTKRKVGKPKIKPNHKYKSVTFTQAGFKIDGNRLTINYLKKSFTFWKHREWTGTIKKITIKRDNVGDYYLYLICEDCESSEKLRLTGNVAGADFGSKTFLTLSDGTQIESPEFYKQGLNAIRSANKALSRKQYLSSGFFRAKRHLARVHKDIANRRRDWFFKLALRLVRKYDKIAIEALNLEGMKKLWGRKVSDVAFGEFSLILQWTCAKYGKVFAKAGKWQPTTKACHVCEHKNDTLTLSDREWTCPNCSTSHDRDINAAINILRAGVPWT

SEQ ID NO: 47044 - protein, 144 aa, unknown
  TnpB Polypeptide
MSELYVDSNGAHADYPHFFRKSQEKLAREQRRLSHCEKGSSRYMKQKKKIARLHAHIARQRKDYLHKESRKITNFYDLVCIESLNIKEMSQDSRFGKSVHDNGWGMFTDFLSYKLERAGKKLVRIDKWYPSSKICSCCGKLKKI

SEQ ID NO: 47045 - protein, 315 aa, Lachnospiraceae sp.
MAAMKKTEEYGFLKEVDSIALQQSLRHLDMAFQNFFKQLKTGFPRFKSKKRNKNSYSTVCINGNITISNGYLKLPKIGQVRLKQHRIIPEEYRLKSVTVSQTPSGKYYASILFEYEDQVQEREMQKFLGMDFSMHELYRDSNGKEPAYPKYYRNAEKKLAREQRRLSKMQKGSSNRNKQRIKVAKLHEKVSNQRKDFLHKQSRQIANAYDCVCIEDLDMKAMSQSLNFGKSVSDNGWGMFTTFLKYKLEKQGKKLVKVDRFFASSQTCSVCGYKNAKTKNLALREWDCPQCGTHHDRDVNAAINIRNEGMRLVIG

SEQ ID NO: 47046 - protein, 465 aa, unknown
  TnpB Polypeptide
MKLGYELSQVTATQPAVAGRRAGVTIPDFLVTGKSGRSRKEALIQYNAVAEYRSWQERVKAANGESNKYVSRGWKRTVKASAPTYGEDTINLGAVDKQYALIENNPFIDGEIVLKMVIHGKWYRLIFNFDNTRFHEGKITLPLVKIENGTPVFIFTVVTDNPVIQFSGDYTIGVDVGINNYATVVVRNSKTGEKVQESTLSQRVHSLWNSVRASEKQMKQLRKKAKSLLYDRHQSRMAALDEAQFHREAASRKKRELAILTAQEIAYLSYFYDNAVVAVEDLGWVANTMQNGRWNRGELTQWLTHYVSQNGGWVVSVNAANTSQVCHICGSKVTHPVHEISCCSKHGEMDRDVNAAANIAARAVPKVEKARKTRAKNRKLQPQAPLKTPVARAYLKYPGRDRTKNYPTPKRKKRVVREVTPPSCPARVNMDTVLADQDASGILGTNMAALKQGYTTCRCRLYNPN

SEQ ID NO: 47047 - protein, 431 aa, unknown
  TnpB Polypeptide
MKTVKLTICNEVDVLDDMRIFSSIVRIAFNRFQDGMDEKEVRAYCNSRFNHNSWFIQCAIKEGAALYKLNGSKHILFGGKNNLRQYMRGIIDKASFKYRRMLPIGIQGEKQRKGNRLFSFDFETQRIVYKPNKETHVEIKFLPMRKNIAEELSKVQELAQQNNITVSVKLSDKYVWLTYDETLIKDERYIKLRSKRVLGIDMNPNYIGLSIIEFDKNDEFNVLHKQVFDLRQLTVSSSKSSTDSKSKYLTNKLKHETIAIVHKINKLVNVWKCKTVAIEDLSIKPSDMKKGKTLNKLCNNKWERNLFVIKLKMLANLHKFNLVEVNPAYSSQVGNIAYGDENTPDMVAASIEIARRAYKKFDKGWFYPKFNIQFRDEQWKQTLGTVENWKDLFRKIKESKLKYRFQLLDYVQNAVFSKNYIQKCYSVYSFA

SEQ ID NO: 47048 - protein, 396 aa, Leptolyngbyaceae sp.
MLVLEFKAYGKAIQLNAIDEAIRTTQFIRNKSIRLWMDGEAKSCFDLNKYCAVLAKEFDFANNLNSMARQSAAERAWSAITRFYDNCKKQIPGKKGFPQFQKDCRSVEYKTSGWKLADDRKSITFTDKCGIGRLKLKGTRDLHFYQPDQIKRVRLVKRADGYYVQFCVSVDRIETIEPSGRAIGLDVGLNDFSTDSNNQTIDNPRFLRKGERRVKMAQKRVSKRVKGSNNRRKARQILGKRHLKISRQRKDHAVKLARCVITSNDVVAYEDLRIKNMVRSHCLAKSINDASWYQFRVWMESFGKVFGKITIAVIPNGTSQECSSCGTVVKKGLSTRTHVCQCGCVLARDHNAARNILSRGLSTVGHTGTFGLEPSNAWGEDTSTHVGLRLHEQVSS

SEQ ID NO: 47049 - protein, 338 aa, unknown
  TnpB Polypeptide
MDKRLSKSQPLHSQSIQEVRSRYFKNWEGLRVLRRNGDKTARPPHKEKHFQTTTWKKSAIRFKETIFGKQVILSNGRGSKSLKVELPKKFDIEKAPSIINLVYNNDQYELHFVYNTEKSEKSEAEGVVGVDIGEIHPIVSHDGAITNIFNGRYIRSLYRLRNKVIASFGRKIDRCERHSPRWWYLVRRKRKRIRKVDNQVRDCLHKHTTKFVKLCEESDVGTIVVGDLTGIRDNIDYGKHANQKLHQWAFGKVTQMIEYKAKALGIKVELIDEAYTSQTCPKCGTRKKPNNRNYACKCSFQYHRDGVGAINIRQKYLGRLGDPVVADMAPPVGFRLEV

SEQ ID NO: 47050 - protein, 401 aa, Escherichia sp.
MLRATKVRIYPTPEQAEFLNAQFGAVRFAYNKALRIKKQAYQRHGVSLSPRKDLKPLLAVAKKSRKYTWLKEYDSIALQQAVINLDVAFSNFFIPKLRACFPSFKSKHGKQSSYHCVGAKVLEGAIKIPKIAPIEASLHREITGTLKSITLSRSATGKYYASILCDDGAETPAKPTLISVVTGLDMGLSHYAIKSNGVKIPNPRYLINASRNLRRKQKSLSRKKKGSANRRKALIQLAGIHERVTNTRADFQHKLSRTIVDENQAVIVETLKAANMMKNHYLARAIGDAGWAGFITKLEYKAAEEGVHLVKLDQWFASSKTCHCCGHKMPEMPLNKRIWQCPECGVEHDRDINAAINIERKGILELQAAGLVVSAHGGQRKSVTQTVAAQEVGSLARQGGE

SEQ ID NO: 47051 - protein, 258 aa, Microcystis sp.
LIDVERQEYHKPTGQITGIDLGLKEFYTDAQGNIVENPRYLRKSEKRLKKAQRRLSKKFRKGKKQSKNYHKQRGKVAKLHLKVSRQRKDKAIKDALALVQSNDLVVYEALKVRNLVKNRKLAKSISDASWYQFTEWLNYFAKIYRIVCVAVPPHFTSQDCSVCGTRVQKTLSTRTHQCPNCQTVIDRDHNAAINILKKGLKYLGNHLNGTVGQTETDPNALGESDLWILNGDIENLSCLVEQGISDSDMGRIPRHSVA

SEQ ID NO: 47052 - protein, 381 aa, unknown
  TnpB Polypeptide
MLRQAYQFKVFRSKRLRHLHRTIDVSAEIWNHSVALHRRYYRLFKKTLPKARLQVHLARLRNGRRAHWKAVGSQSVQAITDRLYLGWEAFFAGDIKRPPTFRKRRKYRSFTLKQTGYKIVGHGRIKILGRNYRFNQSRPVSGVIKTVTVRRDALRDIHITFSCDQVPQPEQAPKTGLSAGADFGLKDFLTLSTGERIAAPQPLKAQLRRLRKAQRTLSRKQRGSKARNRARLDLARVHRKVANVRSDWQWKQARMLLLTFELLVFETLNLKAMQQLWGRKVGDLGFADFLVKAQWMAKKLGRDLLKIDQWEPTTKSCHLCGHRQDMPLITRTFECRSCGNIEDRDLNAAYNIWEAGRRLRSGASSKTAYGRQDALVTAESH

SEQ ID NO: 47053 - protein, 240 aa, Rhodococcus sp.
LLRCAATELVPAADLMASTVAVGVDWSPSTLGAAAITADGPAGLSSDYRGWTYDDRGLGIKLARLQTEGQMLHRKAARLTRLAVAAEPEVRAQLEGKIAVLNEHRTAVGVKRGKINRELGFHFARQVTDYAATAGAQVIAVEDLTTLETRGHGRVNNNRAAQSARRKATAALTHTAAGVGVAVVTVPARGSSAQCPGCDEPLTRPGGCHTAWCPRCLVGGNRDQIAGVNLANARCSVRTK

SEQ ID NO: 47054 - protein, 559 aa, unknown
  TnpB Polypeptide
MWRNRDMKGRPKSKKKVQKIKKKTINGDEQYKSIVLTTPKKVINKVKLDALYEIDRLHAQAVNAWVEKWYSRLDMVEKVLSGRATTAMQKDSIDVDLPSAYIQIAGNRMLDILREHYLAVQDKLAADIWKDTGLSTDYKFAYATIVRNHVLFARFVNGRFTADDIISEWAKGKNKYLKKAAEAYEKLTHAERMDIPVRIFNAFREIRKKWKKPHFKGGSILLDYRVFSVSRAEETTEFNLWVQVTSAQPHKRVKVPFYVTGKKLDVLESLFPGWQDSNQRKGLLVIRDRHIHLSIPVEKNKAEPVEPHVHIGCDVGMSSPINLHDGSRFGRNLNELVKKDYDEYLRLQAIRNKIRVLKDNAEKRYEITKDPAVREKLKRKIAEYERHLLGHRWSELRRKIKANVKTEIGRAVNLLLKELPLLNHVVIILEDLSEMDISGVRRSSRGRFDLSVWARGELQEHIKRDLEWLGGRAVYVIPDYTSQKCSKCGYVDKENRHGEVFRCKRCGYIDHADVNAAKNIKERFFDEELNQLANQYKWNKNLRREKIKGLLLQRANQAA

SEQ ID NO: 47055 - protein, 369 aa, unknown
  TnpB Polypeptide
MTYKAYRYRIYPTPEQEENLAKTFGCVRYVYNRSLKYRQDAWYGRQENVSYFQNSALLTAWKKEPECAWLNDVSSVPLQQVLRHLQTGFKNFFQGQTKYPNFKKKNNQQSATYVSSAFKWDGESLKLAKQSEPLNIRWSRKFDGNPSTVTVTKVPSGKYFVSLLVDEKIQALPVVNSTIGIDVGIKDVVVTSDGWKSGNPQYTNKYAIKLARLQRRLSKNQKGSLNKAKAIKKVARIHEKIRDCRRDFTHKMTTALINENQVISVENLAVKNMVKNPKLAKSISNANWGELVGQLEYKAEWYGRKVIAIDRFFPSSKRCSCCGYTLSHLDLSVRKWICPSCKKIHDRDINAACNIKAAGLAMDCNSSAI

SEQ ID NO: 47056 - protein, 368 aa, unknown
  TnpB Polypeptide
VRIIKAYKIRCYPTDEQKQLILKTFGCCRWYWNQALHDNIEYYEKHQKGKINTPAFYKQKYEWLKEVDSMALCFTQKDLQSAFSKFFKEKNIGYPKYKSKKYSKNSYRTMQTVGYSVTENDIKITKLGKLKIVNHQYKTGIAKSCTISMTPTGEFYIAILWKDEEVLEKSKPVDKEVGIDLGLKDLAICSDGEKFPVLQSLRKELPKLKREQRKLSKMEYGSNNYNRQKIKVAKLHQHIANQRKDYLHKISYKLTNENQVIALEDLNVKGMMKNHHLALSISNAGWSEFVNMLEYKALDKGRTVQKIDRWFPSSQICSCCGCITGKKPLWIREWTCPDCGETHDRDINAAKNILTEGKRILGGGKLMS

SEQ ID NO: 47057 - protein, 393 aa, Klebsiella sp.
MLYAVRVRLYPNAAQREFFARTFGCCRWVYNDALAYCQALYEASMPRPSAYALQKRLTSLKVEYPWLGEADSQALKQACVDLDSAYKSFFRRVKNGESPGFPCFKSKNRGDATYTATKASGIALERRRLKLPKAGWVRCRGGREWEGLIKRATVRQTPTGKYYATVLIDSGRALPAQPTVNLNPLGIDVGCRTVGFTHQFAALSTGEIVIAPAEYKRQMKRLRRAQRRLARKKKGSVNRMKQKRRVAQLHELISAVRRDFLHKLTHRLTCENQALAVEDLNVRGMMVSPKPIQDPDKPAAFLPNGASRKRGLHRSLASVSLGEFFRQLEYKCAWRGVALLKVGRWEPSSKRCSSCGEINKKLTLADRQWQCPACGVKHHRDTNAAVNIAARAV

SEQ ID NO: 47058 - protein, 411 aa, Bacterium sp.
MERVRLYPTRRQVEALERMLDVCCELYNALLEERREAYRRRGVRISAKQQYAEITALRSPIHRLDGRLAAVYRECEDAVLHRLELAFQAFFRRVKHGEVPGYPRYKSRRRWDTLEFPHGDRALVFDAEQCEVRVPGVGSVRLRKGRRVLPYGRAMVVRGAGRWYALFECEREAQPLPPTGKVVGLDRGIAAFVASSDGALYDHARIERRQASAVRRKQRAIARCKRRSVRQRRRYRDLARAKDRQRWSRRDWHHQLSRAFVNAYDGIALERLAVKNLLRSARGTVEQPGRNVAAKSGLNRSIADAGWSQFANMLVSKAEEAARTVVFVDPKYSSQECSCCGHVASENRRSQPAFLCVVCEHAENADVNAAKVILKRAELRPAARGLAVADSDDPRSALAPGRTRLTQQVVA

SEQ ID NO: 47059 - protein, 218 aa, unknown
  TnpB Polypeptide
LGYNYRKKSIQRRNGSGSKETKKAMEKLREGKRKRDYRWKIANLIVREAMRIRGVIVIERISREDIRVMIARYRDRQLRHRIYQSALKGELNAIIDKAREYGVPVLMVDPRNTSKICPIHKAVIEYGEDRTGVCSKGGEKWHREVVALINIYLKALEALYEGSAQKGFWVSILDGSPVLLGSTATGEPIEIPRSLWGRWRSLDDHRVQNPVKEKIWQF

SEQ ID NO: 47060 - protein, 372 aa, Bacillus sp.
MILVKKVRLKPNREQEMQLWKSTGIARWAYNWALSRQEENYKQGGKFISDGTLRKELTQLKQTEEYAWLYDVSNNVTKQAVKDLCEAYKRFFKGVVDKPRFKSRRHSKPSFYNDNVKLKVMKNMVLIGKVGWVKTSECIPVVNKYSNPRISFDGKYWYLAVGIEQEIIHQELTNASIGIDVGIKELAFCSNGMKFKNINKTKVVKQVEKRLRRLQRQVSRKYEINKEGSCFVKTSNIIKLEKKIQHLHRRLTNIRDNHIHQVTCAIVKTKPCRVVMETLNIKGMMKNKHLSKAIAQQKLYDFKMKMKYKCEKYGIEFVEADKWFPSSKQCSNCGEVNKHLTLSDRTYHCKCGHHIDRDLNASINLSRYQLVN

SEQ ID NO: 47061 - protein, 362 aa, unknown
  TnpB Polypeptide
MKLTLKIKLIPAEDQYQALIETINEANNACNLISKIAWGNKTFNQFKLHHLCYNNVREKFNLSSQMVIRCISKVVDAYKLDKKKQRIFRDYGSISYDSRILSYSDDFVSIWTVSKRKKIAFVCHNPNYFPYIKGEADLVFKKDKFYIFQTIELPEQDMDNVEEFIGCDFGITDIVCTSEGKTYSSQSLNQYRKKRRKIRSSIQSKGTRSSRRLLKRLNKRERTTAMIINHTISNQIITDAKTKGVGVAIEDLSNIRSTSKRRNKSFRTELNSWSFYQLRTFLEYKAKRVGVPLIAVQPAYTSQTCCNCHHIGTRNNKSFKCGYCGNNMDADINAAKNIALIGAVVNQPEKSSMWSCSLHITA

SEQ ID NO: 47062 - protein, 375 aa, Paraburkholderia sp.
MNSTRTETTRTLRVRLKDRHAVFLRAQSREVNFVWNYVNELGLKILQREGRFCTAYDLHRYTAGATKEGLSLHSQTVQAVNEQYVSRRWQSKKRRLAWRKSSGVRRSLGWIPVKASALRYKGGQVWYCGQPLSLWDSYGLHQYALGAGSISEDSRGRWYLNVTVKVRTAEKSSTTRAVGIDLGLKDFLATSDGDKAEAGRFYRDLAQGIAVAQRANKPKRVKALHAKVANRRKDALHKLSTTLVREYGAIFVGNVNAPGLAQTRAAKSVLDAGWSTFRTMLQYKCADAGVWFDEVNEAFSTQTCSCCASRTGPKGIAGLGIREWQCFGCGAVHDRDVNAARNILATGLDGLNRGGATLGVPDGPALPEPRPDVAV

SEQ ID NO: 47063 - protein, 475 aa, Caldilineaceae sp.
MAEKVTRVLHSQGLNAAKYDRLSDMAARCGRVRSDAWQRCSGVATVLQSPYEIRDAWMAEGCDWHGLPARLGKATLADALGDIDAAREAAKVPVKKAIRHRTRGDKAERERLYRLLKQNRWTEDPFLHRQMRKQWRGGRSHVTNQIVADAGSYTTKVWHDRAWVYLQGLERGQRIAIPLKGTHLPSGTLRILLRDNEQVEVHYAVDETRVCSTRPCGEATVGVDKGYTEAYTDSDGTRHGEGLGDLLSAESDRRKVKGTRRNHLRDTEQKHRAKGNHRKADTIRKNNLGNQKRNRRRTLHHRQVRDHLCQAAHTVVDKAGTIACEDLSAHMKSAPYRHRDTNRRLSGWVKGVMADTLTSISRRRGSAPALVNPAYTSQIDSRTGLLQGRRRWDRFYCCDGVVLDADVNAACNILARLYDEEITLYMPYRDVRALLAERTRTAVGTAPPGLELRGLATPSPSTESELPTPVQECIG

SEQ ID NO: 47064 - protein, 402 aa, Alcaligenaceae sp.
MQRLQAFKYELMPNGQQERQMCRFSGSCRFIFNKALALQKQRHEQGHKKLGYAGLCMELTAWKRQTETDWLSETPSQSLQQTLKDLERAYVNFFEKRADFPRFKKKGQSDSFRYPQGFKLDQANSRIFLPKLGWLRFRKSREILGTVKNVTVSQSGGKWFVSIQTEREVVQPLPQSTTAVGIDLGIIRFATLSDGTHLVPLNSFKRHESALRRAQQAMSRKARFSSNWKKARARVLRIHSRIGNTRRDYLHKATTTISQSHAFVCIEDLQVRNMSKSAAGTIEAPGRNVRAKSGLNKAILDQGWFEFRRQLDYKLAWNGGYLIAVPPQNTSRTCPCCGHASKDNRQTQAQFECVECGFEENADVVGAINILRAGHARFACEVSDAVRSPAAGTHRGESAPVG

SEQ ID NO: 47065 - protein, 395 aa, unknown
  TnpB Polypeptide
MYLTEKHNIKRTHPFYNECDKLCFQSKNIYNQALYNVRQYYFTNKKYLNYYGNYNLTKTQECYDYLPKKVFCQTLKHVDMIFKSFFALVKNKTVKNRLPKYLDKVSGRYVATFPKQAISLREFKKTGKLRLSQTDIYITTKITVFNSIKEVRVVPRANSYLIEVVYEVQEKQIKKNNNVASIDLGLNNLSTLTFNTNDTPLVINGRPLKSINQYYNKKKAQYQSRLKGGRHASKRISKLTDKRNNKVTDYLHKASRLLVNQLVSKDIGTLVIGKNPNMKQDINIGKVNNQNFVQLPIMRFSEMVKYKCELEGINVIYKEESYTSKCSFLDLETICKHDNYMGRRIKRGLFVSSTGREINADVNGSYNIMLKAVPNAFANGIEGVGVHPMVLTIKR

SEQ ID NO: 47066 - protein, 402 aa, unknown
  TnpB Polypeptide
MRKINRTYRFRLYPNREQTELLAKHFGCSRFVYNYFLSQRKEQYRLTGKSDNYYAQAKTLTALKKQEETAWLKEVNAQTLQFAIKSLESAYTNFFKKSAKFPKFKSKHSKNSFTVPQSASVAGGRLFIPKFTEGIKCSVHREIKGKIGKVTITKSPSGKYFVSVFTEEEYITQLEKTGKSIGLDMGLKDLLITSEGEIFNNNRYTRRYECKLAKAQRHLSRKKKGSRGFENQRLKVARLHEKIVNSRTDYLHKCSISLVRRYDIICIEDLNVKGMTKNHHLAKSITDASWGKFVSMLTYKAEWNNKKVVDVDRYFPSSQTCNVCGYVNKQIKDLSVREWECPHCHTHHDRDKNAAINILRIGLNNNISAGTVDYTGGEEVRTDLLESHSSVKPEANEPLVHG

SEQ ID NO: 47067 - protein, 546 aa, unknown
  TnpB Polypeptide
MIIQSKYTKVFHSKDMTRQKYDELYDFAVLIQKHKNVVSRYVNNNLLHFLEYNKFQFLKEMRTKFKNVIPSSFDAQVYTQVFTSYQNKFKAIQRKLVFETRTLKGFELYKHDTKNHKKDDLKRVIIERNQTPLTNCLTYLARYGSENIISYIKVNIDKCDDKKRKLYDNILRCCSKFGFERLYNLALSKRRRAVKYYSEHPIEFKSLTFSGRCRKKKIIDYNSRFGSKINSFVSLSGIGRKSLDIPTTFHKWWHGNMRDYRKNNPDYEYTLTFDEKNHQVNIHLCKDGERYITQVHGDTIGIDVNCKHNLFSLSNKTTYDYDRKLVNDFCKLSLEIDKLKVNNSYTLGKRKQRKLDVMKSKMIKSEQQVIANMCKTLQTQGVGHIVMEDLDNSFGKCYVKDKDNEDINYNRKVKFLGLSSLKQEVEHIARKYDIAVSTVQASYTSKMCPICGCIEDENRPNQETFECIECGYKDNADFNAAKNIRNRVLVTVLRESLLKQLDNGAFEPRSLSREKVKELLLSFRRNLQETARSECRESGLTTFDYV

SEQ ID NO: 47068 - protein, 536 aa, unknown
  TnpB Polypeptide
MFYSKDLTRQKYAELNNFAVLIRNHKDIVSRYVNENLLHYLDCTRFQFVKEMRTKFKGSVTSSFDAQLYTQVFTCYQNKFDAIQRKLAFEVSVFKGFEFYKRDTKKYKKGDLKQVLIEKKHTPLSNCLTYLARYGNEGTIAYIKYNIDKCDDDKRDFYNNIIRCCEKFGFERLYVLALSKRIRIVSKYANKPIEFRSLTFSGRCRKKKIIDYNHRFGSVINSFISLSGLSRKSFDIPVTFNKCWHGNMKDYRKNTNDYEYTLTFDEKNHQVNVNLCKDGERYIPEPNGKTIGIDVNCKHNLFSLSNETTYDYDRKLVNDFCKLSIEIDRLKKDRTYVIGKRKQWKLNKLKEKIIKNEQQTIATMCKSEKAKGVGHIVMENLNNGFGKCYIKDSDNEDINYNRKVKFLGLSSLKQEVEHIARKYGIAVSTVQASYTSKMCPMCGCIEDGNRPNQETFACVECGHKDNADFNAAKNIRNRVLVTVLRDKLLKQLDNGAFEAKKLKRDKVKEVLLSFRRSLHKVGSECIESHMMTSEYV

SEQ ID NO: 47069 - protein, 449 aa, unknown
  TnpB Polypeptide
MTAQEECKTFYDNLCKDISSHLLSHSDIDNAMSECDKSSCALTVKSWFSTKQVTVHNKNSQNIYNQVFFPSLAECIVSDAIVTKTRRIRIYPTQQQKHLFKQWFGVGRKVYNTCINHFKEKDIVFKGWMKMSTLVLHSFTENYIKSVPYQIKNKAVKDSYTSWQTNCKKTKKSGKPFKLHYKSRKNPVQSCYIPKQAISEYGIYYTISGKLKFSEREFFKNDICDCRLIYDHGRWYLSVPQKIKTIPTENQGGIVGLDPGVRNFLTYFSEDGRFGWLGMHAFDRILRLNIKRDHLLSRLALTKDKREKCKLKRTLNRTYHRIQDLVDELHWQCINYLVHNFSVIVFPPFEIKGMTKKGRKLRKSVVRSMLSLRFFEFKERLKQKCKECGVIYIEQNESYTSKTNSFTGELMSNLGGKEWFMYDGIKVHRDLNGARNILIRAMRDSSAAG

SEQ ID NO: 47070 - protein, 530 aa, unknown
  TnpB Polypeptide
MQIKESLKQQDCHPEEDGCMTPSHLTSTKRVKKQMRVNSSVTAECPAVNKKMTLLGKSHICDNSSQMQKSYKMSEVDLTTKEKDCKTFYDDLCKDISSHLLSHTEIDCAVSDLNCSNTSSSVMAVKSWFSTKQVTAHNKNSQKTYWQSFMSSRAECMVSDAIVTKSRRIRIYPTPQQKQLFKQWIGVGRKVYNTCVNHFNEKNIVFKGWMQMSTVVLAELTEDYIKSVPYQIKKIAVKDSYTARKTNCKKTKQSGKPFKLRYKSRKNPVQSCYIPKSAVSESGIYHTISGKLKFSEKEWLKNDICDCRLINDHGRWYLSVPQKITTVATENQGGIVALDPGVRNFLTYFSENGRFGWLGIHAFDRILKLNLKRDHLLSRLALTKDKRKKGKLKRTLNRTYHRIQDLVDELHWQCINYLVHNFSVIVFPPFEVKGMTQKGRKLRKSVVRSMLSLRFFEFKERLKQKCKECGVMYIEQNESYTSKTNSFTGELMSNLGGKEWFEYDGIKVHRDLNGARNILIRAMRDSSAAG

SEQ ID NO: 47071 - protein, 402 aa, unknown
  TnpB Polypeptide
MRKINRTYRFRLYPNKEQTELLAKHFGCSRFVYNYFLNQRKEQYRLTGKSDNFYAQCKTLTALKKQEETAWLKEVNAQTLQFAIRSLEAAYDNFFKKHAKFPKFKSKHSKNSFTVPQAASVAGCRLFIYKFKEGIKCRVHREIKGKIGKVTVTKTPSGKYFVSVFTEEEYISSLKKTGKSVGVDMGLKDLLVTSEGETFKNNRYTRRYECKLAKAQRHLSRKKKGSRGFENQRLKVARLHEKIANSRADYLNKCSISLVRKYDTICIEDLNVKGMVKNHRLAKSVTDASWGKFVTMLTYKAEWNGKNVVKVDRFFPSSQTCNVCGYVNKDIKDLSVREWECPECHTHHDRDVNAAINILHIGLNNNISAGTADYTGGEEVRTDQSGSHSSVKPEAHERLVQG

SEQ ID NO: 47072 - protein, 546 aa, unknown
  TnpB Polypeptide
MIIQSKYAKTFHSKDLTRLKYDELYDFAVLIRNHKNVVSQYVNNNLLHFLEYNKFQFITEMIGHFKNAIPSSFNAQLYTQVFTCYQNKFNAIQRQLVFETKTFNGFEYYKRDTRNHEKGDLKKVINDKKQTPPSNCLTYLTRYGNENIIDYINANIDKCDEKKHYFYNNILRCCNKFGFERLYNLALSKRERTVKRYSEYPIEFKSLTFSGRCRKKKIIDYNSRFGSKINSFISLSGLSRKSFDIPVTFNKGWHGNMKDYRKNNPDYIYTLTFDEKKHQVNVNLCKDGERYIPEPNGKTVGIDVNCKHNLFSLSDETTYDYNRKLVNDYCKLSLEIDKLKSDKSYTVGKRKQRKLDVMKFKIIKFEQQLIANMCKTLQSQGVGHVVMEDLDNSFGKCYAKDSNNEDINYNRKVSFLGLSSLKQEVEHIARKYDIAVSTVQASYTSKMCPVCGCIEDGNRPNQETFECVECGHKDNADFNAAKNIRDRVLVTVLRDKLLKRLDNGAFEPKKLKREKVKEVLLSFRRNLQKTARSECIESGLSTFEYV

SEQ ID NO: 47073 - protein, 326 aa, Mycobacterium sp.
  misc_feature (326)..(326): Xaa can be any naturally occurring amino acid
VSCPAVVGVVAYGAWCVAKPGVKPGYPRFKGKARFDSVEWPKDGDGARWLPDTKRVYLQGIGQVKVELHRKVVGRVKTIQIKRQGRRWMLVLSCDDVPSNALPASDRQVGIDVGIVGFATTGDGEHVDNPCWGRQSAQQLAAAQQRLERAQRGSKNRQRRREKVAAWHRKIANQRKDFHHKQARKLVEAYDLLVVEDLKIANVMRRAKPVADEDNPGQYLPNGARAKSGLSPSIGDAGWGGFVSILRAKAEDAGRIWIEVDPRHTPPKREVPPRMAARNVAMQPPKTVSPKRCSSASDARIAPKQTRWPHATSSGPDWPFTLKRRX

SEQ ID NO: 47074 - protein, 423 aa, Actinobacteria sp.
LRWDVDTDSNGVVSGRRYVERVLVRYRYRAYPTPGQAVLLARTFGCARVVFNDALRARQDVYAAGERISDTQVQRRVVTLAKTTPQRQWLAEVASVALVQACQDARRAYQNWFDSLSGTRKGRKVGHPRFRSRKDNRQSIRLTRNGFGITAGGVRVAKVGDVRLVWSRVLPSVPSSVTVIREADGRYYASFVVEVADTPLPQTGNDVGIDLGLTSLAVLSTGEVVENPRYLRRKARALARAQKSLARKTKGSKRRARAVRRVAVQHRKVRDTRLDSHHKLAHRIVRDNQAIYVEDLAVCGLARTRLAKSVHDAGWSILVRLLEEKATRCHRTVVKVSRWFPSSRLCSGCGSNSGKKPLEVRTWTCAECGVTHDRDVNAARNILVEGRKVAAGLAETVNARGGGVRLGLVPAAACEARTHQGAA

SEQ ID NO: 47075 - protein, 469 aa, Duganella sp.
MELAHRIELKPTGTQADYFVRACGTVRFVWNWALDEWNKQYAKGGKPNALRLKKQFNAIKYIQFPWLKEMHRDAHAQPFRNLGRAWERFFNDVKAGKRRAPDDRHARRRLKAQGIALAYPPQPKRKGACSDSFYVANDKFEVAGHRIRLPKLGWVGMTEALRFDGKILGAVVSRTADRWYVAVQVDVPGRQATCRRTADGEIGVDLGIKTAVSLSNGEKIDAPMPLGSALRRLRIRGRRHSRKVEAAKRFKREFIGPLQEPTRMPRGRNQVKSARRLARMCARIARLRRDFTHKLTTRLCRENQAIGIEDLNVAGMLRNECLARPMVDVGMAEFSRQLAYKAQRYGTRLVIASRWYPSSRLCSCCGWKNITLTLKDRAWNCAQCGAQHDRDLNAAINLLPDRIAQWNARQVERFATVAQAKTALPVASSAVTPGTGAGMGPANGGKVTSVSDEFGLQDGSGQKSNRVHF

SEQ ID NO: 47076 - protein, 368 aa, unknown
  TnpB Polypeptide
MLRTVSIKLNATTEQSDALFALQTAYADACNALVPVVVESRCWNRVALHKLSYYDIRSRSPLGSQMVCNAIFSVCKAYKALVALKRIRETVPVISFDRASVHFDKRTYSIKGETLSLYTLHGRTKVPMLFGDFQRRLLDSGTPKEAELINRDGAWFFNLALESETPEIKAGGPVLGVDVGENNLATTSTGKLFGGGDLRDRRDRFLTLRKRLQSNGSASCKQLLRKISGKEARRVKLENHRVSKAIVAEAVRVGASTIALEDLTNIRQNIQGGRRIKTRLHRWAFRQLQTFVAYKAQSLGIDVVFVDPAYSSQTCSLCGEMGLRQKHLFSCSCGFRAHADCNASRNLARIAERSLSARASVNSPDVAA

SEQ ID NO: 47077 - protein, 437 aa, unknown
  TnpB Polypeptide
MTDMHLTATIHIKANDPRFGLLDEYAFKCKNLANTAIYISRQVLFDFNTTPSAVELINNFTATNNPDYKAIPAKVAQQTVMQVHQSFKGFWESIKAYNKDPSKFTGRPRPPNYLDKAKGRANIIFTKQAISSKLIKQGILSLSTYGEPILIELGELAQKVNFDTLQQVKAVKRSNGYDIAITYKQAIPTTLPISNRLLSLDLGVNNLATVTTNLNNLIPLIINGKVVKSINQHFNKQKAKLQSAKDLLPKRSKGLSKFYQDKHTFYQRQLDKLSQSRNHKINDYLHKASRYLINYAVTNHIDTIVIGNNNGWKQGIDIGRANNQKFVSIPFARLIELIEYKAKLVGISVIKNEESYTSKCSFLDNEPIERHASYLGKRVKRGLFKSSTGQLINADVNGSLNILRKVMGDFEFDPIRVCSTPKVINVRHYVAPAQNKS

SEQ ID NO: 47078 - protein, 361 aa, Chloroflexia sp.
MKLIAQIRLNPSPEQHAALLATLTEANAACDAISSIAWQEHEFRRIPLQKLAYHHVKDSFQIGAQVLIRCIAKVADAYKLDRKVQRSFRPHGALAFDDRNLSWYTAKEAVTIWTVAGRQYIPYSLGDHQRALLPYRRGESDLVFHNGVFYLLAVCDVPEPDEQQMNGVLGIDLGIVNLATDSDSEAHLGAQVDRKQQWYVHRRSALQAVGTKSAKRRLRQLSGQQRRFQKDTNHRISKQLVAKAERTKRAIALEELTHIRQRTRVNGPTQRSRHSNWAFAQLRQFISYKAQRIGIAVLAVDPRNTSRTCSVCGHCEKANRCSQAIFCCVVCRHQATADVNAAINIRNRAESQTAYGVQPSG

SEQ ID NO: 47079 - protein, 369 aa, Chloroflexia sp.
MRKAYNYRISPTRGQQHILTTMLEECRFVYNQTLTARREAWEQRQESLGLYDTQSLLPAWKADRPSLKRVHSQVLQNVQVRVDLAFKAFFRRVKAGESDVGYPRFKGFGRYDSLTYPQYGNGVRLQGNTLILSKIGSVNVILHRPVEGPIKTVTIRRAATGKWYASLSVETSPRPLAPDKSAVGVDVGLASFATLSNGEKIANPRFFRVKEKELAKVQRKLSKAEKGTPERTKRRKIVGRVHERIANCRSNFAHQEGRKLVNRFGILAFEDVNTNGMLTNHCLAKSIADAAWNQFVLVTTSKAEEAGRRVVLVDPRNTSKRCSRCGQLVEKDLSVRVHSCPVCGLVLDRDENAAINILALGLQCLGASP

SEQ ID NO: 47080 - protein, 369 aa, Chloroflexia sp.
MRKAFKYRIYLTNGQRRMLERQLEECRWVYNETLATRKNAWEQEQRNVDWYETKRALPFLKDVRPSLKLVHSQVLQNVTERVELAFKAFFRRLKAGEADVGYPRFKGKGRYDSITYPQYGNGVRLDGDRLILSKVGAVRVVVHRLLEGTPKTVTVSRSPTGKWYACFSCEVEAQSLPVSNEVVGVDVGLASFATLSDGAELANPRFYRRDEADVKRVQKLKDAAKNAQRWDEHRRRKKALAHIHERIANRRSDFAHKRSRELVNCYQVIVFEQLAPMEMGRSRGMRKSILDVAWSQFISMTVAKAEEAGRRVVLVNPRNTSKRCSSCGELVQKALRDRTHTCPQCGLVMGRDHNAALNILHRGLQILQL

SEQ ID NO: 47081 - protein, 399 aa, Escherichia sp.
  misc_feature (79)..(79): Xaa can be any naturally occurring amino acid
  misc_feature (205)..(205): Xaa can be any naturally occurring amino acid
  misc_feature (239)..(239): Xaa can be any naturally occurring amino acid
  misc_feature (307)..(307): Xaa can be any naturally occurring amino acid
  misc_feature (322)..(322): Xaa can be any naturally occurring amino acid
  misc_feature (374)..(374): Xaa can be any naturally occurring amino acid
VKRLQAFKFQLRPGGQQECEMRRFAGACRFVFNRALARQNENHEAGNKYIPYGKMASWLVEWKNATETQWLKDSPSQPXDALPICEMRRFAGACRFVFNRALALQNENHEAGNKYIPYGKMASWLVEWKNATETQWLKDSPSQPLQQSLKDLERAYKNFFRKRAAFPRFKKRGQNDAFRYPQGVKLDQENSRIFLPKLGWMRYRXSRQVTGVVKNVTVSQSCGKWYISIQTESEVSTPXHPSASMVGLDAGVAKLATLSDGTVFEPVNSFQKNQKTLARLQRQLSRKVKFSNNWQKQKRKIQRLHSXIANIRRDYLHKVTTXVSKNHAMIVIEDLKVSNMSKSAAGTVSQPGRNVRAKSGLNRSILDQGWYEMXYRKYPQGLPSQSHNGRQQKPRNDSH

SEQ ID NO: 47082 - protein, 389 aa, unknown
  TnpB Polypeptide
MLIRYILLVYIKGGEKSMVVNKAYKFRLYPNKEQQILINKTFGCSRFVFNHFLVKWDNTYKETEKGLTYNSCSAQLTQLKKELTWLKEIDSIALQSSLKNLADAYSRFFKKQNKAPRFKSKKNRVQSYVTKHTNGNIAVVGNKIKLPKLGLVKFAKSREVEGHILNATIRRNPSGKYFVSILVETEIKELPKTNSSIGVDLGLKDFAILSNGKVFSNPKWFRKLEEKLTKEQRILSRHKKGSSNWNKQRIKVARIHEKITNARNDYLHKISTEIVKNHDIIGMENLSVSNMLKNRNLAKAISEVSWSQFKTMIEYKAKWYRKQVITVAKNFPSSQLCSCCDYKNKDVKNLRLREWECPNCHAHHDRDINASLNLRKEALRLTVGTTGIA

SEQ ID NO: 47083 - protein, 377 aa, Gammaproteobacteria sp.
MEVEIANCIRTLRLKVKPEAYASLNAAAVEVNRVWNFANETSAKAARPFAGPPKWLSAYDLDKLTAGATKYFERIGSETIQRVNAEFATRHKQVKKTKLRWRSSRGSRRALGWIPFKAVQLKRKGTSLRFSGKAFRVFEQACLSEVKWKCGCFSQDAVGDWWLSLPVEVRAEPTVAQNEEVGLDLGLKNTVATSDGDKLEASNFYRNIEQKISQAQRRGHKRQAKRLHRRAARRRKDTLHKFSRKIVNRYQRIIVGDVSSAKLVKTRMAKSVLDAGWGMLKAQLQYKANQAGKCVFIVSERNTTRACSNCRALTGPAGLDMLAVRAWVCSGCGGTHDRDVNAARNIRFAARCSPSVSGNEPSPSDTPPSQASRLREA

SEQ ID NO: 47084 - protein, 276 aa, Massilia sp.
MVWNYCNDLSFKVWERERRFMSGYDFAKYTKGAGKAGIPLHSQTIQAISEEFAARRKQSKKLKLRWRVSEDARGRWYINISVKVGRPAASRMERSIGIDLGLKDFASTSDGEVIDAQHIYRDAEARLAAAQRAGKKKIVRNIHAKTANKRRDFNHKLSARLVVGHGAIFVGNVNAGALAKTRMAKSVSDAGWSQFRTMLSYKCDSAGVWFDEVHEAYSTQDCSACFARSGPKGLQDLGVREWTCLECGEHHHRDVNAAKNILRRGRATLVVGIPVL

SEQ ID NO: 47085 - protein, 528 aa, Promicromonospora sp.
VARHTSFRFCLDLSVEQERVLSRHVGAARFAFNQALRLHRDARGAADREQNSASGSGVPWSGFDLINAFNSWKRSAAAGRRFLVDATGTTRVEATGLAWRDQVSSQVFEEAAVDLGRGLKAAIDSRTGTRKGAKVGFPRFKKKSLTGGSFRIRNKTSKGRASIRLGDGERVRSVSLPKIGVLRVQECTRRLRRMIAKDRARILHVTVSRGASRWWISITVEAANLHPAARHASQPVEVEAGMRVPQPTRDREKQWVGVDRGLHALVVAGSSDGTEVLRVTNQRAFLRGLPRLRRLSKAVSRKKRGSKNRKKAVVRLGRQHARIRDRRRHVLHQVSNQLVKNHALLVLEDLNITGMTSNRKLSRAINDAAWGELARQITYKQAWRDGQVVLADRWFPSSKTCSACGILRKDLTLKDRVFECRECGLVMDRDLNAAVNLAAWAENHTHPSMTVRHVVLPGSGTVKQPAPSRTPTDRTPPPITTSDVVVGRDWTTWEPTLRPHPRPEPWTPEKGGASQASRLLKHAVRSHP

SEQ ID NO: 47086 - protein, 375 aa, Okeania sp.
MSCQGKRYACVNVNISNPNTLKESLSKKPESDSINNEKKCLPYWNESCQEMSNLLWSHTKIGSFDLASICSNGCAPYTLAKSWFTAELKNLPNQKWLKTSFPSSTVSGPDCIDSKSIHLKSQRIRVYPEKHLHQIWKKWLAASRYCFNQAIAYQRKHGLISKYDLRKVILNSESLPDWIKESPYHLKVNAIYDANAAFKTSRKSGTKQPSCGKFRSIRDRIQSIKFRVEDFKKGTWLPSVTKGLNILASEVIPTTNVEYQQKQKDGTYKTCVREQSWDAETQLVYDKKRWFAVFPKEFKQDYSQSQSIIALDPGVSLRDMKRSFLTGFDGEKFIDIGKGDITRIFRLAQHIDRLISNKTVLKGRQNKYKRQRLHA

SEQ ID NO: 47087 - protein, 415 aa, unknown
  TnpB Polypeptide
MCMVNVTIIKMYNYRIYPFKNQQRILHHQLDLACDMYNNLLDIKQERWMEINQNLTKTDLNNIIVELKADNPKWREIHSQVLQNVSDRLSNAFENFFRRVKEKKAGKRIKVGYPRFKKPVNYKSITYPQSGFHFVSDKKLYISNIGDVPIVLNRMPKGKVKTMTVKIKNDKWHVCFSCIIEQKNPKHPYKNKEVGIDMGLTKFAHLSDDTIIKNKRFLKQKEKRMKRLQRRLSRKKKGSHNQYKNKLLLAIEHEKVADRRHDFQHKASRYIADTYGQIGVEGLNINGMLKNHHLAKHIADAGWGGFLQKTCYKAVSAGGMFIVGDPFAPSTQQCSSCSAYIKKQLNERIHSCPICGLKLDRDLNASINRKPSNILKNDRAGQVRIYACGDSTSTLCTKYNASGVDEAKNHQRQSH

SEQ ID NO: 47088 - protein, 406 aa, unknown
  TnpB Polypeptide
VFKTFSLKHNLNIKAFLYAYLAILNAMIRDIWSTIEWKEWRIPGKNQKRLFPHYRKDNAFKRALRDKYLKDWGYAAHWVDSALKTAFSIMRSWRKNYNKGKRKRRCPVVRRPFVRVKQTLMKREGERLRITIKPREYVYIDLSKRYFKLKGRIGEPILTLTHIYLPVEVESKKKGLCKIGWDLNKYSLDGFSPLLGWIRVSLKKLFTIHIIYDNKRRRLNRIAAKRLHAGKELKRKYSKRERNRITLIIHHLTNIISELGYKHGFEDLNKTGMYKRGRKRWNRELGYTDWSKIVKFTGYKSTVELVDPYHTSKDCSRCGCVNRDLKGEKFECKRCGLTINKQLNAPVNVYLKMEGLPHDVRWFDEHVVGGFTQTGAEWKAADELVRQLYDTMKPQLFVDLNTLKFT

SEQ ID NO: 47089 - protein, 365 aa, unknown
  TnpB Polypeptide
MLKGRKPSSEFRTQIGDWCRIECEDNDVTFNSNLIQAAYRKACDTRTAVIKKRVKGEKAELSFMSRTAPQQYFVVPRLSPKKQIFPNILKGCTWTEKVPKEAIGQTVIVTYTNGQWFASVKLIQPIKQVVTKELSIVALDPGVRTFQTAFSVEEAISYGDQFVNDKLVPLMSELDRLLSERDKLHNEERSLQWIKDRLRNLNRRINQVRARQQNLVEDLHKRVAYDLVTNHDVILLPTFETQKMVQKSHETRQRFLRRKTVRGMLGLAHYQFKQTLKWMAKKYGKTVIDVNESYTSKTLWDGSILNNLGGKASILFQGKRVNRDIHGARNILIRFLTKVIEVLSPQGAYPLNTTEAEFCGFGVFQ

SEQ ID NO: 47090 - protein, 241 aa, unknown
  TnpB Polypeptide
MVARYKYRFYPTNQQKHSLAKLFGCARYVWNDALAHCQAVGKYVGYNQLSSWLTKLKESAAWLKEVSSVALQQSLRHLDKAYQRFFHKKGGAPRFKKRRTSQSATLMGNAFSLQGKGVHLAKIGVVKPIWSRPLPSQPSSVTVIKDSAERYFLSFVVEVEPVTIEAKSPSIGVDLGIKIFAACSDEAKYYSPDYFPLYKRIARLQKRLARRVKGSNRRERTRLRIAKLHCRIDDMRTESIG

SEQ ID NO: 47091 - protein, 410 aa, unknown
  TnpB Polypeptide
MKLSVKINLNPSTEQHALLLETMRLFNQTCNTISQTALLNQTFGKWPLQKLVYHQIRKETNIPAQLVIRAIAVVCSSYKADKKKMHWFKPTSAIPYDSRLRTFQGSDSVSLRLWNNRIRVPIVLGQYQARKLNGIKLSETGESDLIYDRINDRFYLVITIDESESRVKHSNKVLGLDLGIKNIAADSDGVLYTGATVELTRNSYAALRSSLQSRGSKSSRRHLKRLSGKEHRYCKDVNHCLSKLIVQKAKGTGRSLALEELKGIRERLGRKPVKQDPPVSGDSTTKVEEKPRKHVRKSVRTLINKWSFFQLRYFLAYKAKIAGIRIYVVPAAYSSQTCSACGHMSKSSRISRDDFRCISCGHAEPADINAAKVISQRAPVNEPIASDVWPARKREPHRARCKPTTLVVGS

SEQ ID NO: 47092 - protein, 393 aa, Kribbella sp.
MSRFRLSPTREQEAMLAEHCRHARFVWNLALEQWSMWRQGRRTRPPRYVEQARQLTDARADNGWLRLGSQMVQQQALRDFAQAVSNFFAGTHRRPTWRKEGVNEGFRIVGGAAQRVERLNRRWARVLIPKVGWVRLRLSRPLPERRSYRVTCDRSGRWHIAFAAIPPPIAAPGTGEIVGIDRGIAVSATLSTGEMLKCPDLNDSETSRLRRLQRRLARCQRGSSRRAKVRRSIARLKARGADRRKDWVEKTSTAIARRFDIIRVESLHIRNMTRSASGTVKAPGRRVAQKRGLNRGILANGWGQLVTRLEQKAAGRVERVPAAYTSQTCSRCRYSAPENRKSQAVFECRACGYRANADVNAAVNIAAGRSVTARGADAVLSAQKREPQLTTSA

SEQ ID NO: 47093 - protein, 197 aa, Methanoculleus sp.
MGAMKRGMPHSADTPLPDDWIGVDLNTTGHVAVVAHPASGGVVMLGDLPEHRESGSAGRGGSARKPLDHERANQNQKIAKEIVKMARQLWCGIKLEDLTGAGFAGRKKRGTPLSFSRREGSFYHLQKLIEARAQDAGVRIVYVDPAFTSRCCSRCGEPGIRKGKEFFCPQCGNAVHADVNAAFNIAAAPPGTGAGVS

SEQ ID NO: 47094 - protein, 484 aa, Methanoculleus sp.
MIRPRNLSFSRLAGVVPLNRAACEVYRFPALLNTAKNCIRITRSLILSLRGSSAASSGRTPSTRGEGNRGAPSSLSGRTAHLNAGGELTRCYRMLRRYRLYPTEDQKTLIAQHLGCCRFVYNWALARKNQAYHDEGISLSKYDLINQLPTLKAELPWLKEVNAQSLQQSIHHLFRAFTNFFEGRAEEPTFKKKHAPEQAFTVPQAYAVDFKRGTVKLPKIGSIKVKYHRTFTGTMKSATVIRTSTGRYFLSIAVEDGRTPPKPADPIPDQTVGIDLGLAHYAVLSTGDAVENPKYLRNAQTRLAVLQRRLDRKKKGSKNRNKARLKVARCHQTIADQRQDFQHQLSSRLVRENQALAVESLNVDGMVKNHSLARAISDAGWGTFLSMLAYKCQEAGKTLLTIGVFEPSSKTCSVCGYKNQNLTLKDREWTCPDCGTTHDRDLNAATNIKQFALARRRISAVEPVDSLPVGRGMIAGKPARASGG

SEQ ID NO: 47095 - protein, 474 aa, Methanoculleus sp.
MALRVVSNYLRLPKKTFQIIDTLAYHAKSLYNVGLYNVRQHSATHRENRAILQGIRPDLTSGVEVLVGSYLPYTRKKDSPFKEYSTYVQSKENENYGLLHSDAAQQTLKSVEEAYKSYFELLALYRNGQLEYRPGSPKYLPKDGRFKLAFPRAHLAIRGRFVTLGMSHKFRKQHGLTGKELTFPIPPCIKPHQIREVTILPVNNGMAYKIEFCYRVPTQPHPLDPDQYLAIDLGLNNFATMVDTATGAAVILDGKRIKSINRWYNKENARLQSIKDKQGIGGITKRQARLLKRRDCQIEEAMNRCVTWVVDYALQHRIGTVVLPRWDGIKDKINHGKRGNQNFVQIPYHKFRRKLKSTCEQYGIRFDDSHSEAYTSQVDALNLDPIRKPPYGRKRRVKRGLYQSALGTLINADVNGALNHARKVAGDSVVPRIIGSGRVNRPVRIRTTFEPSPFAQIKVQPCAPQGAPVASPLR

SEQ ID NO: 47096 - protein, 419 aa, Methanoculleus sp.
MHITTKIKIQVTPDQADVLWHLSEKCRLLYNFALAERNQNYQENKDRPDKQYIGYVQQANALPDLKKKYPEYRWVYSKVLQTTLKSLDDNFKSFFALRQNGDEDANPPGFKGKDHFCTLRYNQSGFAIAGGRIRFSHFYNEVPLEFDLPEVQTFLNVKQVDLFYDDLKKAYYVSIVHEVQPDQKYVDNGFYQAWDLGVTKHVAVNTSGKFLEVRNARPDRYWNPKIDAVQARRDHCKKKSRKWQRLNRAKRTMERKRSNQLNDFQHKLSRNLVENTRAATILVGDLSVKQMPKSKQATPGLNRATQNAGHLSRFIGFLTYKAALAGKRVIKVDEQYTTKTCCVCGAVHEMPLWKRVMDCACGNCIDRDHNSAVNIMVRFLSQNALWAGYRQFAGNLRQTGPRIPVVPGHSQEAPCASGG

SEQ ID NO: 47097 - protein, 381 aa, Cyanobacteria sp.
MANLTLTLKLPFYRLNQVKALEFERLTAINTSVANDLLQVDKSERSRVTSADFRHIEIGSMWINQTIRNCNAKTKVKHFKTMWLEVNNQGYEVLKSGDLYTLSFSLYRGRKGRIPLQVHSASHNDVLDQLIAGQAKLGSLKLCKSKKGIWYALICVSMDVPDAENVKGWIGVDRGQNNIAVASLPKSFGKFWKGGRVKELRRQFQRTRQQLQQALQIKEVKRLEQRERRIMTHINHVISKELVHFAKDFEMGLRFEDLSGCRQTMKQRKKTKSDAANNRDSWAFYQLEMLTRYKAIRVGVPVELVPAPYTSKSDHRNGVIGKRNGDWFRGMNSYRCNADWNASQNIGQWIGFSCPLHLQEVMAAMAMTDTEGGVNDSPQIV

SEQ ID NO: 47098 - protein, 388 aa, Psychrobacter sp.
MLGYISIKDDFQAMLKAYKYRIYPNREQQVLIEKHFGCSRFVFNWALALQKRYYAMFGKSLSRTKIQSHLVKKKKKARFAWLSEVNSQSLLNALLNVHTAFTNFFKGQAKFPRFKSKKIPQRSYQCPQHCTVNFEQGMINLPKIKGIKTVFSREFEGRVKTVTISKTATGKYYASVLVDNGEALPTSTTIEPSLTVGIDLGIRHLLNLSDGSKFDNPKHLAKASQRLSAQQKIFARKQKQSKNYQKQKLTVARIHEKVRNQRLDLHHKVTYKLICENQATSYAIEDLGVKNMVKNRKLAKAINDVGWGQFVTLLTYKANWYGKNILKVNRFFASSKICSHCHHKLDSLPLSVRHWTCPSCQTQHDRDINASNNIRQQALADVAGLATV

SEQ ID NO: 47099 - protein, 378 aa, Phormidesmis sp.
MTQKAFKYRFYPTPEQETLLRRTMGCTRLVYNRALAARTQAWYEHQERVGYAETSAMLTTWKKAEDLQFLNEVSCVPLQQGLRHLQKAFSNFFAGRAQYPNFKKKHHGGSAEFTKSAFKFRDAQVFLAKDAEPLNIRWSRQLPQGSEPSTVTVRLSPAGRWTVSLLVDVEIEPLPASPNQIGIDLGITSLVALSTGEKVANPKSFAAKRRKLKRVQKALSRKQKGSNNQHKARIKVARVYAEISDSRHDFLHKLTTRLVRENQTIAVEALAVKNMVKNRKLAKSISDAAWGELVRQLEYKCDWYGRSFVKIDRWFPSSKRCGHCGHIVDKLPLDIREWDCPSCGTHHDRDINAAKNILAAGLAVSVCGANVRPDKHSL

SEQ ID NO: 47100 - protein, 451 aa, Methanoculleus sp.
  misc_feature (260)..(365): Xaa can be any naturally occurring amino acid
MVVCFRPTSIGCILLRSRSRSSCKHIHACRFVYNHSLEQKIRAYEQEGRKLSCFDQNNRLPALKEEHPWLKEVNSQSLQSANKNLDNAFTRFFREKKGFPRFKSKKNPVQSFQVPQHYTVDFEQGRVKLPKIGEITTVFHRLFTGKMKYATVSVTSTGKWFVSILVEDGAKEPEPAPFALDTTLGIDVGLTSFATLSTGEKIENPRYLKNSLQCLKVLQRRVSRKKKGSKNRQKAIQRLARCHEKVANQRNDFLHNLSFXXXXXXXXXXXXXXXXXXXXXXXXXXXXXXXXXXXXXXXXXXXXXXXXXXXXXXXXXXXXXXXXXXXXXXXXXXXXXXXXXXXXXXXXXXXXXXXXXXXXXXXXXXFDPSSKICSKCGYLKQDLALSDREWVCPDCGTTHDRDINAAINIKKFALQEQNLVGVAGAERTVEPVDSLPMGRRMKQEAPPESAG

SEQ ID NO: 47101 - protein, 404 aa, unknown
  TnpB Polypeptide
MLRRQAFKFELRPNGEQQRNLRRFAGACRFVFNKALALQQARWEQGEKKLGYADLCAALVTWKAQPETGWLSETPSQALQQSLKDLERAYRNFFEKRSAFPRFKKKGLSDHFRFPQGVKFDQPNQRLFLPKLGWLRFRNSREVLGTIKNVTVSQTAGKWFVSIQTEREVDVPVHPSASCVGIDVGIARFATFSDGSFIAPADSFRKHEQRLARYQRAMSRKVKFSNNWKKAKVRIQQLHHRIACVRRDFLHQASHQISQNHAMIVIEDLQISNMSKSAKGHAAAPGKNVRAKSGLNKAVLDQGWAEFRRQLVYKAEWTGGEVMAVDPRNTSRTCPACGHVSAENRQTQAQFRCVACGYAANADAVAALNILAAGHAALACQASDATMSPATGTRRSDYAGLALA

SEQ ID NO: 47102 - protein, 423 aa, unknown
  TnpB Polypeptide
MARKQLTEEEKNQIRNSLIETRLRRQNQVIKVFELKVNCHQTNKETFKKLKNYFIQAKWVYNDMLSLSKINEDENTENIFDYNYLEHKTVHRFDKDKNYIEEQISLPVFLHRGIVAQTKTNITNLAKAKRKGIKVGKLKFKSEYNSIPIITGGIRLLDNSHITIPGFKNLKVYGMHQILELKDYEIADGKLLWKPSGFYIKVTVCLNKKEKKDRQPTHKEVGLDFGIKDNITTSDGEKLNCKVQESEYLKYLQKHLDKKKKYSKHYYKLINQIRKEYEHLSNKKQDETNKIIHYLKKNYDVIYFQDEQLSKWKEDSTCSKTIQHSYLGRVKAKLVSMKGTQSFMIDKWKPTTKYCPHCGKLNNISLNERTYNCECGYSMDRDIHAACNVKLFGSTQRAECLEQASDSFLAKTKDVNEKEAITL

SEQ ID NO: 47103 - protein, 430 aa, Natronolimnobius sp.
MEHSYRYHAYPTQKVAAELEHHLNVHRQLYNHVRWDYTNSPEDDKPSEYDQNNKLTEWKRKWPVFSELHSKAAQATVARFHHNLTVLSELKQKGYNVGRLKRQASTDYRSVTYNQSGFDLDEKRGHDKYAYVRFSQIGWVKIRYTRPIPDRATLKEITVKKETTGEWFVSFGLETNDADLPEKPDVDSLDAKNSAGIDLGILNYIHTSDGKTVDWLDLEDEYERLQREQRNLSRKEKGSNNYEKQRREVAKVKRHIKRKVLDYQHKITTWLVREYDAVFVEDLNVKGMLEQSHNARNKQDAAWRQFITLLEYKAELYGTHVEQVPSRGTTKECSSCGVETEKPIWVREHSCPACGFETDRDANAVVRLRLTGSKIACDFATAMNVLQRGFSELGLGWPEETPVETVTATDTAQFESVSASRVIETGSLPS

SEQ ID NO: 47104 - protein, 500 aa, Vulcanisaeta sp.
MLRRAVAVELEAPREVSKLLYDVESVYLGIVREVVEYAVKHNVTSANKLRRLFYHKYRQEYPNLNSQLVIEAIRQASGVAKSFVERRRKGLVNKPCPEVKTVSIRFVETAWNYEEFVGSIAPVRVWISPISTGKRGRGGRRFEVWLRPHKRFWLYWWRVLTGEAELASTLLIKRRANKWYAIFVFELKPRVAKPQSIVAFDINENTVAVGRVDLPSTVSKVAGWNRQYTTPQLYTIRTDFGRLARRYERVRNTIIERLKQSFTLPNGKYINITNTREYRKQVRKLREKDRKLSRVKHVANELTKTLAIIITEDLGDNPQESMIEDVGRNELRHRIKQTPFKALEKAVEDKALERGSKIFRVSSYRNSRVCPIHFVRLERTDDWHTLKCPLGHLVDRDYASILNMMWKTTPEAWTKGVWWDLRKKMNWREHEGSSNPIIPYTTVQYLHAMLKTFTASEQWPAMLARAKPMNPAREANEGRARKPPKKRRRPALFSQEIPRT

SEQ ID NO: 47105 - protein, 292 aa, Acinetobacter sp.
MKTLKIRIKDKHSKMLNELASQVNFVWNYVNDLSFKHLQRKQQFFSAFDMSQYTAGASKAGINLNSNTIQAITEEFVTRRKQFKKAKLKWRVSNRKSARRSLGWIPFKKTCIKYNNGQIQYRKQWFGLWDSYGLSKYQIKTGSLVEDSRGRWYVCLVVDSLKIKQSTATKAIGIDLGLKDVATCSDGTVISNPKFYRKYKKKLGIAQRAKNKKRVRALHAKIANCRKDHLHKASNQLVRENALIVVGDLSAKKLVKTKMAKSVLDTSFSALKTMLKYKCENAGILFEEVSER

SEQ ID NO: 47106 - protein, 164 aa, Acinetobacter sp.
MFRWNSGTVISNPKFYRQYEQKLGIAQRAKNKKRVRALHAKIANCRKDHLHKASTVLVKENALIVVGNLSAKKLVKTKMAKSVLDTRFSALKTMLKYKCENAGVLFEEVNESFTTQICSCCGEITASSPKGRADLRIRVWEYENCLSINDRYRKQCEQHTCAWA

SEQ ID NO: 47107 - protein, 416 aa, unknown
  TnpB Polypeptide
MYLTVKQQVKHLSKEDYKTLKDLCHIAKNLANQAIYNVRQYYFAEGEYLNYQKNYALLKNSNNYKTLNSNMAQQILKEVDGSFKSFFGLLKLAKKGKYAFKDCRLPNYLPKDGYTTLVIGFIRFNGDKLVLPFSQSYKKTHKAIEIKIPPILAGKKIKEIRIIPKANARFFEIQYTYEAECIQRNLNTSNALAIDLGINNLATAVSSMGESFIIDGRRLKSINQWFNKENARLQCVKEKQNFGRKPTKRQKAIARDRNNKVNDYMSKVARKIIDYCIQNDIGTLVVGYNETFQQNTKISKVNNQTFVNIPYGKLREKLEYLCELNGITYVKQEESYTSKASFWDKDDIPMYNEDNPKSYVFSGKRVHRGLYRCSNGKTLNADVNGALNILRKSSVVDLRVLYSRGDMDTPVRIRVA

SEQ ID NO: 47108 - protein, 180 aa, unknown
  TnpB Polypeptide
MALRRHRKMAYTKRLNTELGKKTAGAIVRYAEENHADVIVFEYLEMQGKISGKKKQKLHLWRKRDIQRRCEHQAHRKEMRISRICAWNTSRLAYDGSGAVTRDWENHSLCTFQTGKRYNCDLSASYNIGARYFIRELLKPLPATERSLLEAKVPPVKRRTSCVYADLRKLHSEMELLKAA

SEQ ID NO: 47109 - protein, 331 aa, unknown
  TnpB Polypeptide
MQIISSYGVELRKQNIPIRQTLEIYRSAVSYLIGIYVQVWEELAEIPDAKRRFNAAEHLVHTTKKNHACFDFDIRFPKMPSYLRRSAIQHALGTVSSYKTRLDLWEKTDGKSGKPKLVYENHAMPVFYRDVMYREGAERKDEAYLKIYDGHDWKWFCVRLEHTDMEYLRKYWSGKKASAPTLEKRHRKYFLRFSYKEEVTLTKTPVKEQIICSVDLGINTDAVCTIMRADGTVLGRRFIDHPSEKDRMYRTLGRIRRFQREHGSAQTQEDGIYETSEHRTWQKDCRCDCKICGRKPCRCDRVRVSGDAGEDIGKEKTETAPVEKAGYPKTL

SEQ ID NO: 47110 - protein, 270 aa, unknown
  TnpB Polypeptide
MTVSVECGHWFVSVVTEMDFANDGPRRPGEVGIDLGIAQTVTLSDGTVFQLDVESIKKHEKQIAVLQRQLCRNKEARQKLAKLGKANPFDKREPSRKRRRLKAKIQNHHRCIRNIRRDFMLKMAHTIAQNYGGVAMEDLKLKNMTKSAKGTVEEPGKNVRQKTGLNRSLARVTPYAMRMAIHWAVFKANGRLILVDPKYTSQTCPICTSSSNRPSQAHFGCQKCGYTANADVGGQPMSSRRAGQAQFARVVSLATRQQREPSFSSRLDAK

SEQ ID NO: 47111 - protein, 109 aa, Bacillus sp.
GRYFVSVLCELEEMATKLALNKIGLGIDLGVKDFATRSDGIVHENINKTIKVKKIEKRLKREQRSLARKFENLKKRGEKSVTNRRVNIDKNVLRVQKLHARLANIRIEY

SEQ ID NO: 47112 - protein, 459 aa, Mycobacterium sp.
MAKFEVPDGWTVQAFRFTLNPTEDQACSLARHFGARRKAYNWTVAALKADIESWHATGIETAKPSLQVLRKRWNTVKNDVCVNAETGAVWWTECSKEAYADGITGAVDAYWNWQSSRAGKRAGKRVGFPRFKEKGRDADRVCFTTGAMRVEPDRRHLTLPVVGNVRVHENTRRIERLIRAGRARVLAISVRRNGTRLDASVRVLVQRPQQPSVALPESRVGVDVGVRRLATVATADGTVIERVENPRPLDTALRGLRHVSRARSRCTKGSRRYRERTTELSRLHRRVNDVRTHHLHVLTTRLAKIHGRIVVEGLDAAGMLQQKGLSGARARRRGLSDAALGTPRRHLSYKTGWCGSLLVVADRWFPSSKACHVCGHVQDIGWAEYWQCNRCSAGHQRDDNASINLARYEEPVSVVGPVGAAVKRGADRKTGPRPAGGREARKGPSQPAGEQPRDGVRVA

SEQ ID NO: 47113 - protein, 294 aa, Acinetobacter sp.
MKTLKLRIKDKHCKVLDQLASEVNFVWNYVNDLCFKHLQRKQQFFSAYDIAKYTKGASKECSLHSQTIQAVTEELVTKTGPFVEDSRGRWYVCLVVDSPKQNKPTATKAVGIDLGLKDIATCSDGMIISNPKFYRKYEQKLGIAQRARNKKRVRALHAKIANCRKDHLHKASTQLVKDNALIVVGDLSANKLVKTKMAKSVLDTGFSALKTMLKYKCENAGVMFEEVNERFTTQTCSSCGTITASSPKDRADLRIRVWECECGSVNQRDLNSAKNILALGHKRLAVGISLLSGG

SEQ ID NO: 47114 - protein, 461 aa, Streptomyces sp.
MAERTAGEEARRIKREVLGVGERTKHRSRTAAPLKGFAGEPGAHQRVYRFRFYPTTEQAAQLHRTFGACRWVYNEALALRAKAWGDHRVSIGFAETCRALTGWKRVPETAWLKEASSTVLQQSLRHLDSAFSRFFKGSAKYPQRKSKHRSKDSATYVRTGFRWVEDVQRPGTASVTLAKQTIPLDVRWSRSLPCGQLPVKLTVTRDRAGRFFLSVLVEEVITPLPTMFRPGGPEPEAVGLDLGLIALATLDDGEKLPHPRLLARFGKQLATLQRKLHRKRKGSRNRRKVRVQLAHLYAKIGDVRRDLLNQFTTRLVRENQVLVVEDLSISNLMRRATGTGRRRKAGLNRSISDAAWGALLRQLRYKCAWYGRTLVVVDRFFPSTRRCSACHTKGAKLDVSVREWRCAECGTVHERDTNAAVNLRAEGLRLYRSVVGALPPGRVPPSLIRASELPDLAPAAQ

SEQ ID NO: 47115 - protein, 377 aa, unknown
  TnpB Polypeptide
MLTYKFRLYPTKAQEKKLETCRRLYNLMLDDRLKNHTPFFEQKKKLIELKKEDKYLKEVHSQVLQDVVLRLDKAFESYFSGLSKFPRFKRKGRYNSFTYPQHEVGFRLIGNRIKLGVIGKIKMRIHRVIEGKIKTATIIRDIDQWFVALSVEKQANNTLNQNNKSIGVDLGITNAIALSDGALIEGPRFLRKAEERIKKLQKTLSRKKRGSKRREKSRILLAKAWRKVRRQRDDFAHKVSNNLAGEYGTIVFEDLNIRGIVRNHSLASAIMDSCWYKLRQLTVYKAERRGGRIVFVNPAGTSQKCSGCGEMVQKPLSERTHICPKCGLVLDRDVNAARNVLALGLERALTEAESLLIPKRISKFGQGSEKPTSFRRG

SEQ ID NO: 47116 - protein, 318 aa, unknown
  TnpB Polypeptide
NFFHKNADHPEFRKKGRNDYFAVPQHIKIKGNRIYFPKFKEGIYFRGSEKKLAEIKDVNQIIITRDSRYYYCSIIYEMDKELPEKKSLSSENSIGIDLGIEKFATLSNGTAIENPHFMTKIEKRIKKLQEELSRKEKGSSNYRKHVLKIGKKYMKLRNEREDFQDKVSTAIAKQYDTIIIENLNVQGIQKNHHIAKSIGDVSFYNFKQKLLWKADRFGKNIVEIGSFDPSSKLCSNCGNLKKDLKLSDRIYNCDVCGVTLDRDYNASRNIRKMGLIKVGLVQPESTPVETATSGLRGIYPYRQMSVVEAGSSEASAEE

SEQ ID NO: 47117 - protein, 339 aa, unknown
  TnpB Polypeptide
MLAKKTIKAKILELRERKKQLLEEEYRNYQRYLRGDKDNIKLYSATKQQADRFIMRLRKQNGGLLDAKDYPLILRNDIYDIRSEDTKLTSYWIRIPVAGKRGGINCPIALSSPIPEGAKTKEAKLIREGEEWYVYITIEKEIQERRTESVLAIDMGIRNIATTVNSSNPKPKFYGKELRAVRGHFFNLRRKLQKKKAYGAVKKIGEHERRIVDSILHTISKRIVEEADKTNSVIVLGDLKGIRANDRGRSFNRRLNSFPFYKLAKFIEYKASWLGIPVIKVNEAYTSQRCHNCGKSGLRVGGRFFCSNCKHEYNADYNGAYNIMKRAMGYIISPWQGLL

SEQ ID NO: 47118 - protein, 434 aa, unknown
  TnpB Polypeptide
MIKSMSYGCQQNLINPDKELKGILEFLCTESNNLTNCGIYYSRQLYFKTGKIPTGFDLNKQLGTIQQNKHYQALYSDTAQQILGTVAESFKSFLGLLKGVKKGTVTPHPKLPNYRKSGGFSLVTYTGRSVKLIDSSLRFPLGKKVKAWFGIDSFTLPMPTNLRLKNIKEYRILPRNRKFYIEFIYQTAASSADKDASKVLGIDHGINNWLTCVSNVGTSFLVDGLHLKSVNQWYNKSVATLKENQPQGFWSKRCAAITEKRNRQMRDAVNKAARIVINHCIENKIGTVVFGWNTGQKDSANMGKKTNQKFATLPTAKVKNRIAQLCEQYGINFVETEESYTSKSSFLDNDTLPTFGAKPEGWQPSGKRVKRGLYKTATGFLVNADCQGSANIIRKVAVTLGLNLSEISRGVLSTPSKVRLWTLEKSPYLQVGEA

SEQ ID NO: 47119 - protein, 270 aa, Halorubrum sp.
VEYHASQPFAVNNQNWEIDRTDNGTLVVGFPCISGWWYTPIDVYDDIADDVARLVDGEVDRSRLQVYRRGDDWYCTFTVEYDAEMGDETVIGVDIGHNQLLAADAETGESMLMSGREAKYVRRKYRSLRESLQQAGALRARNRVGDKEERRIRDLNHTASRRLIDWATQFENPVLKIEDLEGIRQGSDWRGVHSWHFHQLQEFVTYKAEQVGIRVEKVDPFETSQRCSACGGEGTRDGYHFSCVECDRGRHADLNAAENIRQREGEPCTA

SEQ ID NO: 47120 - protein, 465 aa, Streptomyces sp.
  misc_feature (465)..(465): Xaa can be any naturally occurring amino acid
VPAPSGVALRDRLKRLSAEDERVLRLVGDHLGSLASSDLKARCTAGLGHASDRWAERKRVLTAESSSRWAGSLTKATHDQWALARRAQLAHVRGLEAGARAVAHRLSLPVGEKGSGRAPGGYRSRREWHAKSRRLRVLEDRLRSARADWEAGVVRVVRGGKRLLNSRHHLDAAGLTEQGWRERWRAARRFLAADGESGKRYGNETIRISPDGEVSIKLPAPLAHLANAPHGRYVLSARVVYAHRGEQWRDRVTANRAVAYRIHEDTVRGRWYLTALWSLPAVTVLPLTAARTRGLIGVDMNADHLAAWRLDAHGNPVGAPRTFGYDLSGTASHRDAQLRHALIRLVHWAEDNGLAIAVEDLDFTAETTREKYGRKKRFRRLVSGMPTSRLRARLVGMAAERGIPLIAVDPAYTSRWGAQHWQKPLTSKNRTPTRHHAAAVAIGRRALGHPIRRRKAPPRHHRSDX

SEQ ID NO: 47121 - protein, 579 aa, Streptomyces sp.
VGGLREVAAPFVVPAPSGVALRDRLKRLSAEDERVLRLVGDHLGSLASSDLKARCTAGLGHASDRWAERKRVLTAESSSRWAGSLTKATHDQWALARRAQLAHVRGLEAGARAVAHRLSLPVGEKGSGRAPGGYRSRREWHAKSRRLRVLEDRLRSARADWEAGVVRVVRGGKRLLNSRHHLDAAGLTEQGWRERWRAARRFLAADGESGKRYGNETIRISPDGEVSIKLPAPLAHLANAPHGRYVLSARVVYAHRGEQWRDRVTANRAVAYRIHEDTVRGRWYLTALWSLPAVTVLPLTAARTRGLIGVDMNADHLAAWRLDAHGNPVGAPRTFGYDLSGTASHRDAQLRHALIRLVHWAEDNGLAIAVEDLDFTAETTREKYGRKKRFRRLVSGMPTSRLRARLVGMAAERGIPLIAVDPAYTSRWGAQHWQKPLTSKNRTPTRHHAAAVAIGRRALGHPIRRRKAPPRHHRSDDGGHRTVQAGPGAPGREEPRPRVPGPRTRSVRAGRGAKAGDQRAQHRSGHAAEHETWQQDLLPLSFQERYRDPHHDNEPPGNGPGRGSSARFGGRPQPRGGHG

SEQ ID NO: 47122 - protein, 494 aa, unknown
  TnpB Polypeptide
MNKPKPTYSESFMERAGMKTGSGAFSYLTLKLPIAVDITNGNKLWSASNAVCFTHNQLTEHQNQVGWSDNYYDIKKLLPEIKGNFPWLKESSSQVLQEVAKSHSGATKSWKTKATKTNKVTGKPTKDSKANPPGFKSRKYFQTHKYPQRGISFEIEGKVLKLAFGSRPADWIVTELPHEVAGASIKAVAITHDDKTGFSVCLETIFELPHRTDNWHVLVVDPGCKTALTCLRSDGTIWEYDIASLRSLNMNIYQKIDDLMSRRDILPCALKLAEYWKAKKKANSFAGPMPAGHIHPIKPKLSREYRRLAAKITKCFASIRNRSKQHLHTVAKKILKDHPMVADIFIGDWAKQETVAETPFKAKNEAINRVVQNNNPVNRLIEYLRYKAAAYKAQQVDKFDERGTTKTCSKCDYVGKKLDPSQRTFTCRKCGFTVPRDINATLNQMKYVAYGMWHALKAIPAFSSVRTSLSGLSCVNFKRQRSLVSLSTGMHGVY

SEQ ID NO: 47123 - protein, 382 aa, unknown
  TnpB Polypeptide
MFKAFKYRLEPNVNQTRELAIAIETHRHLWNQCLEQRKRAYESEKKSITYVNQSAWFTSEKKTNLWFARLNFSSAQATMRRLDKAFSAFFRRIKAKQNTGYPRFKGRDRFSSFTYRSGDGARLIGNKLRLQHIGMVRVNLHRPIEGTPKTITVKREADKWYVVIVCDLGDVAVENTNRDAVGIDVGIESFLTTSDGEHVAPLQPLKWKLRKLRVQQRTMCRRRKGSGRRAVARKAVARTHATVANYRRDQHHKIAKKLVDRYGLIAVESLNIRGMSRNHCLARAVLDAGWYSFLQILAHHAESAGVEIVEVNAAYTSQTCPQCGAVAKKTLAQRHHVCPCGYRAHRDHAAARVILSRGQGGMHPEGRNVDAVSLHGLRSRLL

SEQ ID NO: 47124 - protein, 423 aa, unknown
  TnpB Polypeptide
MKPMTTEATTCIRTLRLKVKTESYPWLNSAAVEVNQVWNWANATSAKAARPFAGPGKWLTGFDLDKLSAGASQCFEHIDSETIQRVNAEFATRRRQFKKLQLRWRVSRGSKRSLGWIPFKAVQLKRKGKSLRFAGKAIRVFEHAQLEAAKWKCGCFAEDSVGDWWLCIPVERSLAPAMPKHQDVGLDLGLKDTVATSDGQKLEAGHFYRDLECKIAQAQRRGHRRQAKRLHRTAARRRQDVLHKFSTQIISRYQNIFVGDVSSAKLVKTRMAKSVLDAGWGMLKTQLQYKGQQAGRSVRIVEERNTTRACSSCGALTGPTGLDMLDVRTWKCRECGDIHDRDVNAARNILSAGRCPPSVSGNEPSPSSAPPSPASRRCEAKDQRADGSGMSTGHRGYRDRHHAIHTVHSMESQDPSDSAPARP

SEQ ID NO: 47125 - protein, 395 aa, Nocardia sp.
MSRHTAFRYCLDPTVEQQTVLARHAGAARFAYNQCLAMVKTALTQRRTDPEHPVPWTRFDLINAFNTWKKSEAAGRLFTVDPSGVTTVEVTGLVWRDQVCQQVFEEAATDCGRGLAGWSDSCSGKRRRPKVGFPRFKEKTTSTASFRLRNKHSRTGRSAIRVGDDDTPRSVTLPGLGQLRVREDTRRLRRMLTAGRAKILSATVSQRAGRWWVSVTVEAADLHPGHHHPARAPDDGGGWVGIDRGLSAFLIAATSEGREVARVDDPPKPLARGLARQRRLAKTLSRKEKGSRNRREAAARLARHHHRVANVRRHFLHQVTNELVKTHDRLVVEDLHVAGMLRNRRPQDPPRSPDLRAGGRVTNARRREGTDRHPMGAGATGPDDAGTKAPIPVGV

SEQ ID NO: 47126 - protein, 478 aa, Bacillus sp.
MEHRTQQILIKNGHRMFGYCQMMCQNSKNMQNTTNFYIRQVYTSLTQDKKLQPLQEEVLGNINQYFEAMNNNQLLAYEKNVVKEMAKEKQKEVKCNLFEKPCKEHPHVDYNFLDSLFKLMNQHDYRSLPVQSSQSAMKQVFDNWKSFFESNKDYKVHPEKYKGKPRIPGYCRAKEKEVKITNQDCVIKEGKYLKFPKTKERLNIGKLGCLDGKLQEVRIIPRYGHYVIELVMKTKNEVEITKKTEKLMSIDMGIDNLAAITTNTGMEPLIIKGTPVKSINQYYNKEKAHYLGILRQGMNPKEGQFTSKRLEKLHEKRFLMIKDYFHKASYHIEVLALQEKVDVIVIGQNKDWKKEMNMGKRNNQSFAHIPHSMFIEMIKYKAEQHGIKVLVVEESYTSKASFVDGDFIPTYEKGSNGKHHFNGKRIKRGLYKTKHGFLVNADVNGSANILKKTYLKLNETDDFNIEAVRVWNPKSIIA

SEQ ID NO: 47127 - protein, 371 aa, Bacillus sp.
MSTITAKIQIYVSDNQAQSLRITTSAYRKACNWLSKQIFETKNLNQTSLNNLYYSDLRNQFGLKSQMAQSVMKTVIARYKSAKSNGHEWSLIEFKFPEYDLVWNRDYSLTKNQFSVNTLDGRLKLNYERKAMKKYFNGTWKFGTAKLVHKYKKWFLHIPMTKEYQVLGLADVNSTVGIDLGINFLATTYDSQGKTTFYNSNIVKHKRGKFKATRKQLQMRQTPSARKKLKQIGSRENGYVNDVNHQITKALVDKYPRGTMFVLEDLTGVRTATEKVRVKNSYVSVSWTFYQFRQMLEYKAELNGQKVIVVDPKYTSQTCPKCGHIEKANRNKKLHTFKCKNCQYQSNDDRIGAMNLHRKGTEHIGVVATGV

SEQ ID NO: 47128 - protein, 390 aa, Bacillus sp.
MYRTMKIPLRASSTTIQSLFDIRRLGGTIWNDCVQLARYYYRLGGGWITKSDLQKELKGLYPLHSQTVQAIAHKFLQARDAAKEARKKGYPTRYPWRHKFVFHPKWVDQAFKIEGKKLILSMGDWNGKRQPKLTLRLPKVPVGKVKELEVVFDRKWFVCLSYDDGMKEESQKQGVTASIDPGEIHTIVGVTENGDGIVITGRYMRSVHRLRNKKVKELQERMSRCKKGSRQWRKYNRAKKFALSKSEAQLQDALHKTTKQFVDWCLEHDVSHVVLGDVEGVQRNNRKKRKKKTNQKVSNWSFGKLYSLLEYKLKAKGIAIEKVNERYTSQTCPVCGNRKKSNTRNYTCTCGYQEHRDLHGARNILTKTLYGEMNYFQIHHPTYLRPVILA

SEQ ID NO: 47129 - protein, 485 aa, Bacillus sp.
MEHTPYKTYQIWIKKGHRLFSYFQMMCEHAKNLYNTSNFYYRQVYTALTSNKPLHPLQEEVLQVIHTHIGRMNDIQLQAYQKRVAKEQMKPVDERKEVKANLFTKPTNEHPYINYAFLDCLFKVSKQSDYLSLPIQSSQHVMKTMFQNWKSFFASLSDYRKNPHKYKGKPRIPNYSSSKVKEVFFTNQDCVIKNDRYLKFPKTKEQLNIGKMARIKGKLKQVRVLPKYGQFVVEVVWECSLPEPTEKEPTHFMGIDLGIDNLATVVANTGMKPVLIKGKRIKSMNQYYNKQKAYYTSILCHGKSSNQGQHTSKKLERLHLNRHKQIKDLFHKASRHIVNLALQEQVDIIVIGQNKQWKQESNIGKRNNQQFCFIPHRLLIQMIEYKAIEHGIQVVITEESYTSKASFLDLDFLPTYEKEKTYSFSGKRIKRGLYKSAKGILMNADVNGAYNMIRKVVPNAFANGIEGLNGSQSVNVSTPLVLSVQ

SEQ ID NO: 47130 - protein, 369 aa, Bacillus sp.
MLNNKKQGGETMSQIITVKVKLLPTKEQATILQEMSREYIFTINILVSEMVKEKKSTKKSSKDISTNLPSAVKNQAIKDAKSVFKKAKKNKFSVVPVLKKPVCIWNNQNYSFDFLHISLPIMINGKAKKTPIRALLIDKENRNFGLLKHKLGTLRITQKSGKWIAQISVTIPTVEGTGLKVMGVDLGLKVPAVAVTDDERVLFFGNGRQNKYMKRKFRSERKALGKKKKLHAIRNSKDKEQRWMKDQDHKISRAIVNFAKDNKISVIRLEQLANIRQTARTSRKNEKNLHTWSFYRLSQFIEYKANLAGIKVEYVKPAYTSQMCPRCSAKNKAQDRKYTCECGFQKHRDVVGAMNIRYAPVVDGKSQSA

SEQ ID NO: 47131 - protein, 443 aa, Bacillus sp.
LFVTHSFQIPYDSSLYEELRTMQREAASVWNDIVREATSYYFACKKWLSKTEIQAIRKQTYNLHSQTVQAIADKYAANRETIRQLRKTDSKAKYPWRRKYYYCIPLKKASMDISTDTITIKKVDYRFSLPNLLTKKKKKNWNEKFPKHNQSVVIPNRSEENLDACNYAEIVWRNGAYWFCYTVQVPEQDLSAYEKKVAGGDLGEIHAVAAVATEDRALVLSGRAMRSISQFRSKALADLSKKMSRCKKGSRQWKKYKCARNRLHQTSKNQLEALEHKTTKEIVAFLEAEKVTRLVIGNVSGIEKGTKKNEQKKRKQNQVRRQQLSLWNQGKIKQKLTYKAKIKGIHVTETEESYTSQDCPFCGGRHRAKGRTFICSVHKTEIHRDVNGAQNIARKQHQMAVQPLVSVVFKQPVWYRRFLSKKQGDSSLKDKPPTGKSIAGRTA

SEQ ID NO: 47132 - protein, 403 aa, Bacillus sp.
VDDIKEKSDTYHKGFKFRLYPTNEQTIQFNKTIGCCRYSFNLALKKQKEKDFLWWITEEMFQNGQLLSNEWKGPRFSANASMKDNTQFKKTTPWLKEVDSTAIQNAIQYLGEAYDSYYKKEKGRPKFKSKKNAIQSYTSKCNYNKGVGTIRIVDENYIILPKVGKVRFAKSKEIDGKIINATVRRTPSGKYFVSVLCEVKKEFTQLSMFETGIDVGLKDFATLSDGTVIHNPKHFYSLEEKLKKEQRILSRRIVGSQNWHKQKRKVAKVHEKIANAREDFLQKLSTMLVHENQVISIEDIRVKNLLKNGNLAKAISDVSWSEFRRMVTYKCKWYGKTLVVVGSNYASSQLCNKCKYKNKAVKDLAVREWECPNCRTTHDRDHNAAKNILAEGLRILSEMDEAV

SEQ ID NO: 47133 - protein, 154 aa, Bacillus sp.
LSATIRRNPSGKYFVSLATETEVVEWPKTNSVVGVDVGLKNFAILSDGTIYSNAKVFRKLEEKLAKAQQIMSRRTIGGSNWSKVKIKVARIHEKIANARKDYLDKISTEIVKNHDIIGMEDLSVSNMLKNRNLAKVISEASWSQFKTMIEYKAK

SEQ ID NO: 47134 - protein, 422 aa, Bacillus sp.
VGSVYLTQSNQIRGLSKEQFQQMREMCYYAKNLYNVGLYNIRQHYFVEKTFLKYESNYHVAKINENYKLLQAGVSQQILKVVDRSFKSFFNLINKAKKGDYRFQDIKMPGYLKKDGLFNLIFSTNAINIKDGFFRVAVSNAYKKLHPEHKDILIPFPSRLEGKKIKEVRIVPRNNGQFFHIQYVYEQPCETVELDFNKSLAIDIGLNNLASCVDTNGASFLMDGKKLKSINRLYNKEKARLQSIAMKQGSKYTKQIDSLTLKRNNQVNDYIKKSARIIINHCLENQIGNLVIGYNANFTRNINIGKKNNQQFTQIPFGNLREQLSNLCEQYGIFYKEQEESYTSKASFFDNDELPKWNPANETEHTFSGKRIKRGLYRTSTGYEFNADINGALNILRKSNLLDCTILQARGSLARPSRIRVK

SEQ ID NO: 47135 - protein, 557 aa, Bacillus sp.
VKATYFSKRLYKNKMSKSLVDEISRFTEVFNQAKRFAFQTLVREKRWKRKLHKESIHQVVKKTFDVSDYVANSIVREANALFTSRTKLTHLYIRQTEEKMKKIKKKLKNERKYLMQLKKIKESCIKGDLRFPKNLKFSYHSSGIFSLEQKKQSLIWFNAYLFEHQYVDKELTFRKAQIGRLEHRLFRLEQKKEKQKTSIPSVVFGSKKLFKQQFTKEEYVQDHACWRKLFLAARNKECLISGRKDAGSGNFVFHYHTENNELHMTALGGQVVTIPGVTFPYGQEMVNQATDNQKKCKNKKEFGKPISWSIENHGDYYMIKNIVDVDLNPCVNFSTSDGVMGVDCNVDHFAWADVSKDGNYLDSGKLLFSIHKKTSGQITKIIEAEAIALVDLAFRKNKPIVIEDIDTTLSKTGDIYGNKKANHLKSIFAYRKMSQAIINRANKIGLDVIQVNPAYTSISGKMKYMRKFGTSIHQAAAYTIGRRGLRYKEKVPKVLTAYIVQKEKHHWSQWSVLHKKFSIHLHSFYHIFNVNKPHQGINVYYSSLQEEETRKLLRVFT

SEQ ID NO: 47136 - protein, 415 aa, Bacillus sp.
MFVTHSFRIPYEQYLYEELRMMQREAASVWNDIVREATSYYVSRKKWLSKTEIQSVRKTDKKAKYPWRRKYYYCIPLKKASMDITKDTISIKKASYGFSLPELLTKKKKKNWNEKFPKKNEAILLPNLSEEPLDECNYAEIVWRDGAYWFCYTVQVPERDLSSFDKKVAGADLGEIHAVAVATENKALLVSGRAMRSISQFRAKVLAELSKKMSRCKKGSNQWKKYKQAKHRIRQTSKNQLKELEHKTTKEVVSFLVEEQVTHFVIGNVSGIEKWTKKNEKKKQKTSKVRRQQLSLWNQGKMKQKLTYKAAWMGIKVEETEESYTSQDCPFCNGRHQAKGRHFICSVHKTEIHRDVNGAQNIARKKHTMAVQSLYSVLFKQPIWYKRFLSEEIRQKTKHPKDKPKKEPSIASRMA

SEQ ID NO: 47137 - protein, 387 aa, unknown
  TnpB Polypeptide
MNTVHIYPLKDLSPTLFRRLRDAQMEAAQVWNLCMHMHKDARMHHEKWPERDELQKATKGRFALHSQSVQMVAHAFLANVDTARQLRQMHPQMRMRYPYKDKRFYPVMWPAQAISREQGHVVLPMGRGRKSIVLPIDLLENSGACTLVWNKGFELHVCVEREQVRHAPGDNHATVDLGEIHLAAVTTNTGKAMIVTGRGIRTLKRQRTMQLRSITKKQSKCKKYSRRWKKLQRAKNKQSKRAENRIRNQRHQATRKVIDFCIEQNVGTLFIGNPHGVCTRDSGRHQNQRMSLWEYGKDIDYLTHKSKQAHIMCFTGSERGTSSQCPVCGHKHRSNNRRWNCKQCGFKGHRDLVGSVNMHALAFHEQVKFPRSFTYLRPSVLGKVVVG

SEQ ID NO: 47138 - protein, 443 aa, unknown
  TnpB Polypeptide
MQSVELTHTLSFDLTITTGEPSDLHTGCLEARRIRNETNRLDKHGWDWKEIKSTVVDNADHIKNTSQLIVDKALGELETYHDYKHDDWGRPYPYIDRTYPLVMNHGEGYRLFTDDDSDTVPFRITATRGTHVKGELHGSADHLNRVQTALEDDTWRVGTAEVIHKHGEWRLHITVTHEHAKVGEKHDAETIIGVDINEDCIALAAMSRGGELYDSVVLDYTDVKTQRHEFFTKRKRMQTAKQTAFETTVQTEERDYVHDRLHTVSRRVVEWVSQFERPVLVFEDLKDMRDDIDYGTRMNRRLHSLPFSKLREMVSYKAAWRGVPSDDVDPEYTSQRCPRTECQHTERANRHKNRFKCCECGFQDHADRKAAVCVMQEWVDEQTGNVPSLDRLSGGVEVRRTASGAGGGPDSHGPSGSGVDRYGTSARPETGMREELKSVAPNG

SEQ ID NO: 47139 - protein, 417 aa, Halorientalis sp.
MADQVTRTYVASIRNHQQVRADLDSLGFAASKLWNVARWTCDRIWDETGTIPDDGVLKAYLKNHERYADLNAQSSQEILEELAEAFDSWYTLRGNGDEKANPPGYRKHGDEHPRSTVTFKEDGFEHDLEHNQIRLSKGRNLKDGRQDFILCEYAADPDVAIKNVQQVRAVWTDTEWELHIVCNVEIGDPDPPGDRVAGIDLGICNFAAVAVGDDALLYPGGALKEDEYYFLKERAKCDDSDSQKARRLDRKRDERRTHFFHAVSKDIVAECAARNVGKIAAGDLTGIREDADWGDHGNLDLHGWAFDRFTEMLEYKAAEHGISVERVDERDTSKSCASCGTTEDSQRVERGLYVCEECGLVANADVNGAENIRQKVLPTLACDGGDRDNGWMAQPAVRLFEKSTGRVAPQEQVCREP

SEQ ID NO: 47140 - protein, 391 aa, unknown
  TnpB Polypeptide
MQLTYKFRLYPTKQQEKKLLWTLDKCRFVYSHLLQEKSKYNLKRNELQALLPELKKEFPDLENVYSKVLQYENYRLHSNIVALHQLKRNAKKIGKLRFKGKGWFKTFTYNQSGFKIIKTDKRLDILHLSKIGDIPFVMHRKIEGKIKQVTIKHQSSGKWFASVSVICEQKNTGKKQENQRKVGIDLGLDNFVYDSDGNHFDHPKCLDKSLRKFARKQRELARKKKKSKNRAKQRTKVARVYEKVTNQRDDFLHKLSRYYINNYGFIAYEGLNVQGMVRNRYLARSITDASWSRFIWMLHYKAERAGSEVAKVDPRGTTQICSNCGKIVHKELWERKHICSCGFIVDRDYNSAINILKKGLLGQELSKSTPVEIEPLPARASLVVEAGIPSR

SEQ ID NO: 47141 - protein, 413 aa, Moorea sp.
MIILEFKAYGKKGQYQSIDEAIRTVKFVRNSCLRLWMDNQGLNKYDLNKYCKTLAKNFSFANELNSTARQAAAERAWSSIARFFDNCKKKVPGKKGFPKFQKHCRSVEYKQSGWKISPDKKSITFTDKKGIGRLRLKGTWDLWRFEKKQIKRVRIVKRADGYYVQFGVSVDCTETLRPTGNTVGLDVGLKEFYTDSNSYAEPNPRFYRKGEKNLKFYQRRVSRKKKGSANRKKAINRLGRAHLKISRQRQEHAKRLARCVVQSNDLVAYEDLRVRNLVKNHCLAKSINDAGWYQFRKWLEHFGQKFGRVTVAVNPAYTSQNCSQCGEVVKKSLSTRTHACKCGCQLDRDHNAAINILERALGTVGHTGTWIIDPNSSGDLSSTFPDSGLVEQDGSLNEESPRMRDRGVSIIFR

SEQ ID NO: 47142 - protein, 443 aa, Moorea sp.
MYGCQQHLITTNTETRAVIDFICSEANKLTNCGIYYCRQILFKTGRYLTNADLDKMLKTNIHFKAMRSACAQQALHGVIESFKSYKALNKLYKKGQLTNKPRVPKYRKKGGMAIVSYPARWVKLVGGQLKFTLGKQIKAWFGIDHFLLPMPSNLDFKSIKEFRFVPRNNCFYLEFVYKQPGVDPVPSTNNALGIDPGLNNWLTCVSTTGKSFIVDGRKVKSQNQWYNKKVGKIKKGKPQDYWDEQFAFLTEKRNRQMRDNINKVARFVVNWCLRHGIDTVVFGWNKGNKDGIKIGKKNNQEFVQIPTARLKGRIEQLCVQYCIKFIETEESYTSKASFLDDDFLPTFGEKPVRVACAKAQGWKQSGKRVRRGLYRSANNELINADCNGAGNILRKVATQLGFPLAEVGRAALNLPQRYKLDSLSRSYREASHSAVLTREVTSA

SEQ ID NO: 47143 - protein, 378 aa, unknown
  TnpB Polypeptide
LPKLRLTIKAKVTDDSKIKLELLNSEYDRYQAYLHGNNKQVNLYSATRQQADRLLNRIRIVKHGGKSNPKKQYPLILRRDLIDVEKDSKFPSVYWMKVPVYPKSINLRIQTDCRHDLTQYDLRESKVIQKAGEWYVFLCIEKDTEQPQPALNVLAIDLGVRNIAVTTNTVNINTKPTFYGKKLRQIRGFLFNLRRKLGKKKAFYKIMELKNREFLQVNHELHKISKEIVEEARRTNAVIVVGKLRGIRQRIKAGRRVRRLINNFPYYRLVQYIKYKAEWIGIKVIEVSEAYTSQTCHNCHVTDKTARKTQGLFQCKNCRLDTNADYNGSMNNMQRALGILSRAGGTLTIPNPELSVIAGRSKMITKESHIPHMLQRWE

SEQ ID NO: 47144 - protein, 454 aa, unknown
  TnpB Polypeptide
MNFKVDLQRLRKISEVEKFTRSKTGFWNQNCSIIKDNLTNVDYLNHDKSVSTIVSRRVKFKPNYLQRRLLKQCFDAYRYVYNQAISYILRVINMSKKMNTPISPKMIEFNVYKNVKITDDLVPDFILPLPSDSRKEALREAVKNYKTCLKHKKLGLCKTFLLKHKRRDAATFRIKTNAIKLTGNKLVMFEKRISKLIKQENLSKDYRYATMAKSNVKKLSKFIDTKGNPMSWPLITYTHGNYYIIVSGERKAEIKEGKKEICAVDPGVVNFHTIYDGDISVEGARLYETKLQKINQRIDKITAAKPYFNGVRRKHMIKRELKLRAKVSNIVYDFRHKLASKLCSKYKVILLPKLGIKQVAKNLRRQVNRKLYTLSHYKFNELIKHIAKRTGTTVIHCLESYTSKTCGNCGNLQNVDDDRIFRCKACNWTKDRDENACKNILIRTLNNYLLSSVA

SEQ ID NO: 47145 - protein, 463 aa, unknown
  TnpB Polypeptide
MKCNIHKYYQLILNGDIESIFTKRDDEVKVPVCDYKFNNSAKLFSLITPDGVNDVRRNDLVGDSIIYEPRIKHSPTISAIGKLDIEITDFVPGDVQCARKLRIYPTETEKLKINKLFSISNAFYNLAIEGIENKTININNKSDIRLKCKVSDDLCETVHIDAKMAYFDTRSLATMYAVSNYKAMLTNHKNGNIKHFKLSNMHSTQIVHFSDKNAKLRDDHLCIRNMKLRIRPRDLPWLVAVGINQQVSIKKYNHKYYLVVPFKRRSLDNGKKGICAIDPGNRTFATYYSPDEIGKLGVNMIEKVRKINAKIDYLRSVKDTAKLVSRTRYGLKRRIEKLSNSITRVVDYAQWKFANYLTKNFRLVFVPRLAGVVGKANHTVNRETRNLRHSEFIAKLLHLGNVYGCKIVETKEYYTTKTCSRCGIRNDNVGSSKVFSCVNDNCKFIMDRDINGAKNIWLRSLTN

SEQ ID NO: 47146 - protein, 210 aa, Bacillus sp.
  misc_feature (3)..(36): Xaa can be any naturally occurring amino acid
VHXXXXXXXXXXXXXXXXXXXXXXXXXXXXXXXXXXEYIAIVGKKIKLLKAQRVLSRRMKGSSRWNKQQVKIARIHEYILNARKDYLDKNSTEIIKNHDVIGIEDLQVSNMLKNYKLAKAISEVSWSQFRLMLEYKAKWYGKQVIVVSKTFASSQLCSCCGYQNKDVKNSNLRKWDCPSCRTHHDRDINASINLKNEAIRLLTARTVEIA

SEQ ID NO: 47147 - protein, 566 aa, Chloroflexi sp.
MGKAQTTYQVRAKVSKSGHILLNERLDEARFEYNATLEDRRRAYKLLGLSIKKQSAGVVKNREPLNRTLSELHRLEHELTKLEAADADKRKIEEARRAVSRWWRDWRDDRMKERWPSVAEIESDDGNHYYGKRSDTRRLINSGRILTETRNGKTLLPRRARVGIIERADFAYDGFFQRLTRGSTPGFPRFKGKDRFRTISTNSGAENYLSYNPQSRKGMVRIKGFPTLRFMSKRELSLDEQGKVVQPSQISITRKRTGVYLSLTYPVDVEPQREGMPHAPIGIDRGIHALMAFSDGRLSIPGLNENAKARRKRKRKAQRKVNRAGVAKDGKGGKQVTCGKEVRRKRNRGNGEYIHFTNGRRKAVEALGRVSERDTLGHRQRLHRYTSEIVKSSDFIAVENLNIANMTKSAAGDADNPGKGVSAKSGLNRSILEQGWGYIAQMLEYKAGRAGIPFVKVEPAYTSQTCAVCGVIDAASRRKRRFDCVACDYENDADINGAINVLSRALVERYGRGEAQPLIERLIPWESGKNALRGNDDSARLKSKTEGLPECRRHAKGLPRGQLRLL

SEQ ID NO: 47148 - protein, 459 aa, Okeania sp.
MTNRRLTFRLYPTKVQKEKLFLARKLHQLLYNACVAHRRFEWRKTRRSVDYFTQQNALPGFRQQWPDYQQLNLTTLQATVKRVDLAYNAFLKGIRKRPKFKSIRNYSGWTYPDGRQGFKVQIECSQKYAVNCGWVTLNDLGVRLRMRGRFKYWGKPTTCTIVYRPHKDEWYASFSIKTSEPEPLFGSKSPLDYESIVAFDLGCETALTCYDGYGFDSISNPRFDREFAPKIKQASRQLKRKQRPIKGKQKASSRWKKANRKISKLKAKQSARRKDWQHKITTEIASCYDIVVTEKLNVRGMTRKAKKGKRKKQKAGLNRALLDVGFGALNQMALYKILAKGGLHITIDTKKVKPSQRCPRCGTVHKEWAKLSNRYHICDDCGFEIPRDQGSAMVMWNVAADRQPGLGTGLVNRRCSSSTDSTCKHTGSMRQLGQMKRSKSQSVDFVDGDLETPSVYTAG

SEQ ID NO: 47149 - protein, 469 aa, Nitriliruptoria sp.
MSSSGAGALVVQAYRFALDPTARQRRMLASHEGAARFAFNRLLAEVKADIDRYHAGEPTVLDGWSLAALRRHWNRRKHQWAVNPVSGEPWWPVNSKEAYSSGLDGLARALKSWRSGRGRFPRFRKRRHRMGVRFTTGAIRVESDRRHVTLPRIGRVRTHESTRKLARRVEAGTARILAATVRQDAAGRWHVAFTVEVQRAVGKEARPAHARRLAPEWQPVGVDVGARDLIVAATADGREVLRVPAPRSLGHAQARLRRLQRRRARQQRGSNRQQRTTRRIGRVHARAANMRRDTIAKVTTALAHGCDHLVIEDLNVAGMGARKPGAGNGGRASNRALADAALAEVHRQLAYKTRWYGADLTVADRWHPSSKTCSGCGRQKPRLSLAERTYHCDGCGLTLDRDRNAAVNLARLTRDPKMRPAGSGPVAGRGADHETDPAHAGDAGGREASTLHQPELGKTGTASPQGEAA

SEQ ID NO: 47150 - protein, 366 aa, unknown
  TnpB Polypeptide
MQNLTREAKLYPSKRQEQVLVQLFGDCRILYNDILETKIETYQKGGKNLSRYDLYKMFKTYEANIPASLKQCIASRVVTAFDRFFGEQNGFPRFKSKNRFRSIGLRQYQTDYRIIGNVLSVWKSYGLGYIKTRGLQPLENPKGARIVKRASGWYLQVIDEVEEKQTKKNNKEVGVDLGLRYFVADSNGGTIKAPQLFKKTQRKLRVQQRGLKNKTKFSNRWKKQTRQIARTYEHITNQRKDFLHKVARKYADNNDVVYAEDLNVSGMVRNHHLAKSISDASWTMFLNILDYKLKMLGRELVLVPPQYTSQKCSNCGAIVPKSLSVRTHICPECGYIADRDTNAAKNILRLGQSRQALTYGNSQSVA

SEQ ID NO: 47151 - protein, 471 aa, unknown
  TnpB Polypeptide
VSFADDSFRRLSESFPVIARLDRWLHSWNTASGASTRYAGTYTQTNVAHTGRFTQPSKVVGAFPEMTVTPTMTSAAGTVSASVYSGLSRRNRCGAETIFPRGENPAVYGGSESDNPKRFANDAMDGYSTLFRTIKSICLHRLYMAIQVTRTYIGSIQNQRQVQSGLDSLGDSASKIWNVARWTADRIWDETGKIPDVSVLKAYMKNQACWKDLNAQSSQKVIEELSDAFQSWFDLRQKDDTANPPGYRKHGDERPRSTVTFKEDGFKHDPDNNRVRLSKGSNLKGYWSDFLLCEYQTRPDVDLSEVNSVQNVRAVWNGDEWELHFVCKVKLKTNDSTGNEVAGIDLGITNIATVAFPDEYVLYPGNSIKQDKHYFKRSEYDTEGKTAHLTSRRGHVENLLTARHTFSTFSQTHHIITECVERGVGTLAVSWPEDVRDSDWGRPATRNSTRGRSTASTSTSNTRAKNVESKY

SEQ ID NO: 47152 - protein, 560 aa, unknown
  TnpB Polypeptide
MKKTLLSRHILFASLSQKEVDTIRNDIALFNQIKRTVTRRKSVSCASEKEAEKTADKPDLRRKENAELRKKQPKSVHLQLKEAFGTEDHFTNSALRSANAAIRSVKELKQMNLDRAESDVDDITAKIKDKKKRLKALNNMQASLVKRSKAKKAGRRIPAPCSNPIEVYRDGKWYITYFGKTVSVYENDYLFEIRYLRPKIRQLSGAIKALVLCKNRLEHKISLMKEDKDAHICYGRKDFFRKQSTVYENQHDVWLSGFRKRRNKALTISGRQDADGGNFLFHYDPLSHTLSYRSQTGKRTIAIPNVVFPYGQPDVDHAVTVKKPERNAVTWSIEIHGQSFIVKCMIEAVSNKRINDDYSNGCVGVDSNYDCLAVTETDGSGNLLRHLVIPIDVTGKSGSNEQSVSKALDQVFAICRESHKPFAMESLSMKSKPHLYGGKKQNRHISLFSADTITWLAEGKALRNGVACAFVNPAYTSQIGKMKYMRRFGLTIHEAASFVIARRAMGIRTERLPAWMRRDPVVQKKRTAKNAGRNAWRDAYTLTKKITPAERMQGPRPSFA

SEQ ID NO: 47153 - protein, 413 aa, Actinomadura sp.
MARQVKRACKYRFYPTSEQAAELSRTFGCVRLVYNKALEERTRAWYDEQRRISYAQSSAALTQWKKTAELAFLSEVSCVPLQQALRHLQMAFANFFAKRAAYPRFKSRKRSRASAEYTRSAFTWREGCLTLAKMTAPLDIRWSRPLPQGAEPSTVTVSRDGAGRWFVSLLCQDTIPAAPATENAVGVDAGITRLMALSTGEKIANPGHERRDRARLAKAQRELARKAPGSANRDKARRKVARVHARIADRRRDFLHKVSTRLVRENQTVVIEDLAVGNMLKNRSLARAISDAAWRELRSMLEYKCAWYGRELIVIDRWFPSTKLCGTCGTVRETLPLDVREWTCECGAVHDRDVNAARNLLAAGLAVSACGDGVRPQRGSSRTGRSSAKQETRRATAGVLRLQAEEEVKPGTE

SEQ ID NO: 47154 - protein, 423 aa, Actinomadura sp.
MARQVRRAFKYRFYPTGEQAAELSRTFGCVRLVYNKALEERTRAWHCERRRISYAQSSALLTQWKKTEELAFLSEVSCVPLQQALRHLQTAFTNFFVKRAAYPRFKSRKRSRCSAEYTRSAFTWRDGHITLAKMTAPLDIRWSRPLPEGAEPSTVTVSRDSAGRWFVSILCQDTIPAAPATDAAVGIDTGITSLAVLSTGEKIVNPRHERRDRARLAKAQRNLARKVPGSANREKARRKVARVHARIADRRRDFLHKLSTRLVRENQTVVIEDLAVANLLNNRTLARAISDAAWAELRSMVEYKCAWYGRDLVVVDRWFPSTKLCGTCGTVREGLPLDVREWTCGCGSVHDRDVNAARNILAAGLAVTACGDGVGPQRGTSRMGRSSVKQETQRATAGTPCLQAGEVVKSTPGRGAGPAGSVA

SEQ ID NO: 47155 - protein, 433 aa, Actinomadura sp.
VRLRYQFRLHPTPGQQELLARAFGCARVVYNDALRAREEAHAAGLAHPSDGELSRRVITEAKKTPERAWLGEVSAVVLQQALADLSTAYRNFFASVSGKRNGRRVAAPRFRSRKDGRQAIRFTRNARFTVTAGGRLRLPKIGDVRVRWSRPLPSEPSSVTVIRDAAGRYFASFVVETADEPLPDVAAEVGIDLGLTHFAVTSDGRKITSPRFLPSREAGPGETGSHRSAAHAAQAESPAFKPGSASIQQGPGNRGRHAPELAAVGGPARVHQEEHHHGREQQRHPDEEVDGQRQQPEDDPDGDARDAHVEALRGVPAHERRAGLAEVDHGRGDRAEEELAHVRHQRPRLLVVGDGAEAPGDLGGVAPALRLLLPAHARLRLLRLLPGVSGLLPGGLLLLLPLGLLSLAGRRGRPVGHGGRPLRGRYASYWRSV

SEQ ID NO: 47156 - protein, 390 aa, Exiguobacterium sp.
MLKHKAYKFRIYPTKEQEILIAKTMGCSRFVFNYFLSKWDETYKATGKGLSYGSCSKEIPMLKQEFDWLKEVDSHSLQSSVKHLTDAYDRFFKKQNKRPRFKSKRNPVQSYKTNIEKKNQLPEVSIVGSKLKLPKLKWVRFANSRQVAGRILNATIRRNASGKYFVSLLVEQEIHELPKTGSSVGVDVGLKNFAILSDGAVYKNDRYFRSLEKKLAREQRKLSRRKRMALDKKVKLSESKNYQKQKRKVARIHEKIANKRTDFLHKVSTEIVKNHDVIGIETLQVKNMQKNRKLSKSISEVSWSEFFRMLEYKADWYGKIVVKVGKTFASSQLCSSCGHQHKDVKHLGLREWTCPNCGIHHDRDVNAGLNLKREAERILASSTVGTTGLA

SEQ ID NO: 47157 - protein, 369 aa, Exiguobacterium sp.
MSSNKKQGGDTLNQTLTVNIKLRPTKVQQSILKRMMETYIHTANQLVSDMVEAGTMLKLTSKNVQSHLPSAVKNQVIKDAQSLFKKVKKSKFKIIPILKKPYCTWNNQNYSFDFESIALPIMMDGQAKKMPIKAEMVDTHNRNFSLLNNKLGTLRITKKSNKWIAQIAVTLLTTEKTGSKVLGVDLGLKVPAVASTDDDKARFFGNGRENKYMKRKFRARRKELGQKKKLNAIKKLNNQEQRWMKDKDHKVSRAIVSFAKENHVSVIRLERLANIRQTARTSRKNNKNLHTWSFYRLATFIEYKANLEGIKVEYVNPAYTSQTCPSCGKRNKAKDRTYFCPCGFKKHRDLVGAMNIRYAPVVDGNSQSA

SEQ ID NO: 47158 - protein, 405 aa, unknown
  TnpB Polypeptide
MLKAIKIRLYPNITQQSYINQLLGCYRLVYNKCLDRKKNAYITDKSNLGLKEMGNYFHQNLTKDNDYSFLTQHNTKVLKQSIMNLMEAYKRFFINGTGFPKFKSKHDNKQSCRFPVEAISRKNDYLTGKLMLTNELKNLHFRCSDKYKNYLTKNKEGIKSASLTKTKSGNYFLSILVDGNIDKILPKAKNDIIGIDLGIKKFIVCSEGTSYDNLKIQRNNEQKLIKLNRQLSKKVNGSHNKNKARIRLAKFHEKLNNIKTEYLHQVSNQLLNENQIIAMEDLNVSGMMKNHKLARSIQELSLNQFKNILIYKSNWYGRYLVEIDRFYPSSKLCNVCGYKNADLTLSDREWTCPDCKTHHDRDLNAALNIEKEGLKIIGSRSAEFTLEDSHNIDWSRQEEKLTNFL

SEQ ID NO: 47159 - protein, 214 aa, unknown
  TnpB Polypeptide
MGTIKAYKLQHSANLGKRGKIIEVVKAYRILAKPAELVVERLSFRSPDLSWRMNHLLSMFRKSLVRRKLDSLKSSLGITIAETNAAYSSQECSVCGYVAKDNRPPQSQFKCKCCHTVMHADVNAARNHHARSSAMAIDVYQGTQTVLQILTERFLSGMERSTRHYRMAPGLLSSDSYFAGPSAQPKGFLYQGIFCHKNSDIGCEVHTGINIRGF

SEQ ID NO: 47160 - protein, 364 aa, unknown
  TnpB Polypeptide
LNKAYKFRIYPNKEQQILLAKTFGCVRFIYNRMLADKIKYYEETRQKLKNTPAQYKKEFEWLKEVDSLALANAQMNLQTAYNNFFRSPKMGFPKFKSKKSNHKSYTTNCVNGNIKLSDGFLTLPKIGKIKVKQHRVIPSDYQLKSVTVSKTPSGKYYASILFEYENQIQQIEPKTFLGLDFSIPELYIDSNGNEPSYPRYYRLAEKKLSREQRKLSKMQKGSNNRNKQRIKVAKLHEKVANQRRDFLHKQSRQITNAYDCICIENLNIKAISQSLNFGKSVSDNSWGMFTTFLQYKLAEQGKQLVKIDKFFASSQICSICGYKNSDTKNLRVRVWDCPSCGTHHNRDINAAINIMNEGIRLSLV

SEQ ID NO: 47161 - protein, 286 aa, Meiothermus sp.
LRCAASCTTRPCRSGERPTRKRAKRWASTSKNGGCPRYAPNCRNTRASTPRSCRTSSSGWIKPSRAFFRRVRAGQKAGYPRFKGRERYDSFTFPQAGQTGVKLQEGGKRVLIYGIGSVKVKLHRPLEGRLKAATVKREGEHGYLVFTCEVEPRPLPSNDQAIGIDLGTNPHFLVTSEGEMVEAPRYYQKTQAKLARAQHSLSRRKRGSSRRKQAQRQVAKLHRKIANQRKDFHHKIARRLVNEYGTIVHEDLNILGLARGRMAKGVLDAGWGRFLQILAYKAEGGW

SEQ ID NO: 47162 - protein, 472 aa, Polaromonas sp.
MLQRQAIRVRLLPDAQQCQLMERIAGSCRVIYNIALDQRRWFARPGRRINYASQASEIGQLKDEFPWFGEVPYHCLQQALVDLDAAYKNFWSGNASAPKPRKRGIGDSFRFPDPAHVMLLGNLRVTDKRRTRSIKQATLKLPKLGAVHCVLHRAIPADARVMSVTVCRDASQWFASVLVEREVATPADRSDQRLVGIDLGVAQPVVLSTGKSFKLVRVTAADQEHLAQLQRRVASKKKGSKNRRKAVLRLASFKTRQARVRRDAMEKATTEIAKNHGAVAMEDLRVCNMTASARGTLEEPGRNVAAKAGLNRSMLDVAPGAFRVRLGQKLAASGGVLMLVPPAYTSQRCSVCGDIRAENRVSRDSFVCRACCHSEDADLNAAQNIRDRALGLWGDAKKVQVAAGLQMLLAQQAKPKRRFKKTKPKTTGGLPAQACLGRGLCHGHQGRKRDAATRPGDPISRVARSSVLQVRE

SEQ ID NO: 47163 - protein, 365 aa, unknown
  TnpB Polypeptide
MLPVGLQPSAPDAERGIRAGQEDPIHQFLYHADTHLEEGRGPLACRSGLHGPAAIPARSRQGVQELLQKPWKGRVPRFKSKSGARQSYRTNSISIVDARHVKLPKLGSVRARITRPVRGRILSATVKKVPSGEYFVAVCCTDCPEPDMPQGDVEVMGIDAGIRCLMARSDGEVVASPKSLTKSEKRLAREQRRLSRKKKGSKRRSRQRVRVARIHEKIANQRKDAIHKATTEAVRESQAIAVEDLNVKGMEKNRRLARAVADASMSEIIRQLQYKCAWYGRAFVKVGRFYPSSKTCSCCGYVNKNVVLGVEEWTCPACGARHDRDLNAAKNIAAEGARLLAEGNGTAGLAGTGGAQAPRTLVEQA

SEQ ID NO: 47164 - protein, 198 aa, Mycolicibacterium sp.
LAKSLARKQKGSKNYQEAIAKLRRHHARVANVRRHFLHQVSTLLVKTHDQLVIEDLNVRGMLANRRLARAISDAGWAEFARLLQYKQAWRGGELVIADRWYPSSRLCPACGSIRGDLRLADRVFKCACGYSADRDCNAAANLARWGADHRGASGSPDPRAAGRATNARGRTCGHRYLTGDGENSSDDAGTEIHTEFPA

SEQ ID NO: 47165 - protein, 388 aa, unknown
  TnpB Polypeptide
VDTTRCYKFRIDPTHEQEQSFVHFAGCRRYVWNWALSRKREVYKATGKGIGYNALAAELVKLKKTDAPFLKECHSQVLQQTLMDMDKAFKAFFEKRARFPRLKSRKRSPHAFRIPQNVSVIDGMVSVPKVGLVKARVHRPMNGTIKSATIKQETDGHWYVVFVSHVELSNVPPSCDQPCGIDVGLSSFLTLDNGAKVEPPQFYRKGQRKLKRLQRKLSRCQKGSKNRAKAKARVARQHHKTASRRNDFLHKLSHGLVARYDALCLEDLNLSALVRTKLRGHSKSWTDAALGNFGRMLDYKSLWSGGQVVKVGRWFPSSKTCHACLSIQHLDLSDRQWTCIKCGVVHDRDHNAAINILSEGLRLLAAGRADNSTASGEGVRLTTVSSPR

SEQ ID NO: 47166 - protein, 442 aa, unknown
  TnpB Polypeptide
MQIISSYGVELRKQNIPIRQTLEIYRSAVSYLIGIYVQVWEELAEIPDAKRRFNAAEHLVHTTKKNHACFDFDIRFPKMPSYLRRSAIQHALGTVSSYKTRLDLWEKTDGKSGKPKLVYENHAMPVFYRDVMYREGAEGKDEAYLKLYDGHDWKWSCVRLDHTDMEYLRKCWSGKKASAPTLEKRHQKYFLRFSYKEEVTLTKTPVKEQIICSVDLGINTDAVCTIMRADGTVLGRRFIDHPSEKDRMYRTLGRIRRFQREHGSAQTQGRWAYTKRLNTELGKKIAGAIVRYAEENHADVIVFEYLEMQGKISGKKKQKLHLWRKRDIQKCCEHQAHRKGMRVSRICAWNTSRLAYDGSGAVTRDWENHSLCTFQTGKRYNCDLSASYNIGARYFIRELLKPLPATERSLLEAKVPPVKRRTSCVYADLRKLHSEMERLKAA

SEQ ID NO: 47167 - protein, 279 aa, unknown
  TnpB Polypeptide
MLNDKIREYEATKKMLRNTPAMYKKAYPFLKEVDSLALANVQMHLEKAYKNFFRNPKIGFPKFKSKHRSRKSYTTNVVNGNIQVEDHRIKLPKLKWIRMKKHREIAEKYCLKSVTISMEPSGKYYASLLYEKSDCENQAEEFDYEDAKILGIDYAMHGMAVFSEDIQKENEGYFRKSEERLAREQRKLSHCVKGSNNYYRQKKHVALCHEKIRNQRKDFLHKLSYEMAEAYDVVAVEDIDMKAMSQCMHFGKSVMDNSYGKFRELLEYKLTWRGKNWYV

SEQ ID NO: 47168 - protein, 236 aa, Oscillatoriales sp.
MKQVLTVSCKLQVMPEQSIKIDATLQAFANACEYVNQTVSPTLTNELAMQSLIYHDVRDMFGLSAQLAIHAIRRVSGNRKTAKKDGKSVNKFTPTSVTYDARIFSFREKDWTVSLTTTGGRERFVLAIGNYQLGLLKGQNPKTATLCKRNDGSYYLNIQLESMPVEPPPSDRVLGCDLGRTDIAVTSDGDTFSGKQITQVRNHYAKLRANLQQKATKGTRSTRRRCRELLKRLSGS

SEQ ID NO: 47169 - protein, 463 aa, Oscillatoriales sp.
MKYTYQYKALPTTEQKLELNLWLRTCQYWYNRQLGDRFDWWECNRSYVNACPLICHLPELRDQPNYYSQKKYLPDIKTDLVTVGWSSELLDFSRVPANTLQEVCKRVDKAFERFIAGDSTGKRSGKPRFKSADRFRSMVFEGAGVELHSCSLGGKYLFVKIPKLRLLKVRMHRDLPDGAILKQVQPIEKADSWYVNLRLEDPTVPIKSDGVDLNWDTALGMDAVLHEDDYLATSEGEKLPSLKSFRKSEKRLAKVSHRKAAKKKGSRSRRKLAHREAREHQRIARARRDHAFKTAHKVVRTGKTVFFHENLNLKGLSKRNGAKQDEQGKYLPNGQSAKSGLNKSWNDAAFGQFFTILEYIAAKAGAVVIGVNPAYTSQLLAYRDEFIFTDCSIREYWDEVENMRVDRDINAAINIKRVGLGEFPTINRRRGKVVVGRSTTDSTSKEVLSTLRSLEKPTLYAKH

SEQ ID NO: 47170 - protein, 385 aa, Lactobacillus sp.
MTIKGIKLRLYPNETQKDKLLQMFGNDRFVWNQMLGMAKQRYQNNPNSQFVNGYQMDALLKQLKQEYPFLKDSDSTSLQIVNHNLDQAFKMLFKHRGGYPRFKSRRTAKQSYTGKARISVIAKRYIKLPKLGIVKSSKTTQLANCKIKRYTVSCDATGRYYLSLQLEVPAPRPLLKTGRAVGIDVGIADLAISSDGEKFGTFNADWPEKQALTWQSKYSKRKYKATVTVRQWNHNHKDIKEDVYDYQNWQRAQKQKARYQQRIANKRKDYLHKLTTNLVKKYDVIVIEDLKTKNLQKNHALAKSIANASWYQFRIMLEYKCNWYGKQLIAVKPNYTSRICSQCGYHSGKKPLNIREWTCPKCGVHHDRDINAAVNILNKGLKAIG

SEQ ID NO: 47171 - protein, 417 aa, Erysipelotrichaceae sp.
MRLSHKTKIKLKDNESNILGHMNYAAYKLWNVCNYERRNYRKLELKEYPDWYYQKKAHKDDLWFKSLPSQTAQEVCKQLDKAWKSYHALLKSGGIKNPNPPRFKQENMEITYMQNGIRHEAGSGKVRLTLPKKLKEYMKSEYDIEDKYLYLENEIFRDTDVIKQIRIYPPENGESEIIVIYEVADPEYMEDNGHYLSIDPGLYNLFTCYDSSGRSFILGRQYLNICYRYEKEIARVQSQWSLIQSSKGVKYPKTSKHIQKLYENKRCSIHDYLHKVTRYIADYCHDNDIHRVIIGDIRNIRKGKNLGGSTNQKMNSLPYAVIYMMLEYKLQLYGIRMIRQNEAYSSQCGPHTERVCAEEAIKGNRIKRGLYQEGQNIYNADALGAYNILRKYLYENQIDMHIPETGLSSTMVIQAAV

SEQ ID NO: 47172 - protein, 392 aa, Planktothrix sp.
MFTALKVRLYPTEEQRIQLSKEFGCARFVYNHFLAEWNNTYQNTGQGLSYVKCANQLPGLKQEKPWLTEVASQVLQQSLKNLDKAFKNFFQGIGKHPRFKSKHRKQSVTYPQAFKLTQSTIKLPKLGEVKVKFHRPIKGKVKSITVSMTPGGQYFASLRIEIAGEYPETSTQGKVIGIDLGLDSLIVTSDGEKIKPPKFYRKYERKLAKYQKRLSRKLKGSQNRKKARIKVAKVHNKIANCRSDSHHKLSRKLVDENQVIVFEDLNIKGMSKNHCLAKSITDATWGMLQTLTEYKAQEQGKVVVFVDRGFPSSKTCNCCGHKMKSMPLQIRIWECPKCGKLHDRDINAACNLRDYFLASGSGVLASGDEVRPISNLVLGEAFVREGGSPRHK

SEQ ID NO: 47173 - protein, 296 aa, Chloroflexi sp.
VRDRRRVHGLGGGVQNFFAGRKAGRKSGFPKFKAKKHSRDGFYLANDKFDVSGHWLKVPKLGLVNMAEALRFAGKILSGHITRTADWWFVSIQVEMPDAPQLPREGQIGIDLGINRLATMSDGSALENQKPLRHLLHKIKRLSRSLSRKQMGSNNREKTRRKLARLHYRIACIRENHLHKATTALAEQYGFIGVESLHVKGMMRNHALAQALGDAAFGTFSRFLSSKVAARGGKVQTVGRFYPSSKTCSCCGHIKADLSLSERTFLCAICGFTLDRDLNAAINILNEALRLSASSP

SEQ ID NO: 47174 - protein, 369 aa, unknown
  TnpB Polypeptide
MWSNKKQGGETMSQTITVKIKLLPTKEQALTLTEMSHTYISTINDLIAEMVKENKSTKKSSKNIDASLPSALKNQAIKDAKSVFKKAKKSKFKVVPVLKKPMCIWNNQNYSFNFTHISLPIMIDGKAKKTPIRALLVDKDNRNFDLLKHKLGTLRITKKSDKWIAQISVTIPTVQGTGVKVMGVDLGLKVPAVAVTDDEKVRFFGNGRQNKFKKRKFRSDRKALGKKKKLNAIRNSKNKEQRWMEDQDHKISRAIVNFAKENKISVIRLEQLANIRQTTRTSRKNEKNLHSWSFYRLSQFIEYKANLEGIKVEYVNPAYTSQTCPKCSERNKAQDRRYKCTCGFEKHRDIIGAMNIRYAPVIGGNSQSA

SEQ ID NO: 47175 - protein, 393 aa, unknown
  TnpB Polypeptide
VSKTKRAYKFRFYPTDEQRIILAQTFGCVRFVYNWGLHTRSTAYKEHGEKLFYNDLAAMLPDLKKQNPWLANASSVPVQQSLRHLDRAFKNFFEGRARYPTCKKRQNSQSATYAANAFKWDSHAKELTLAKMDAPLNIHFHRDLPKNAKPSSVTITKDCANRYFVSLLVEEKIKPLPPTANMVGLDLGIKSIVILSTGESIGNPKFFAQDEKKLAKAQRRHARAKKGSKNRQKARLKVARVCARINDRRRDYQHKLSTRIVHENQVICIESLAVKNMVKNHCLAKAISDVGWGEFTRQLEYKSKWYGRTLVKIDRFYPSSKTCHACKHVLDSLTLDIREWVCPQCGVAHDRDTNAALNILAEGLSVAACGGSLRPVRAKARQATPVEAGISPS

SEQ ID NO: 47176 - protein, 474 aa, unknown
  TnpB Polypeptide
MGEPHPQHTSLTGYSTSDHNFYNKSMYKRLYRRSTMLEVHRTHRAAICNHSQVADALDRHGWSASKLWNVANHHSRQVWDETGKIPDHEELKDELKDHPKYKGLHSQSSQRVLEELAESFNSWYSSDDDRANPPGYRKENYYDDEGRRVHEEHPRSTVTWKQNGIRHDTKNNRVRLSKGANHKEHPKAWEYILVEYETRPGVTVKNLQQVRAVYDSATERWELHLICKDEIETPTAPGEETAGIDLGISNFAAVAYSTDDANLYPGTRLKQDGYYFPKEIANCDDSSGNRATRLHNKWSERRTHFFHSLATHIVERCVEKGVCRINIGDLEGVRENDDGAAKNWGRHGNLDLHGWAFDRFSKILTYKAKVEGIEVEEVSERDTSKTCSVCGTADDSQRVERGLYVCDECDAAFNADVNGAENIRLDINNTESNSESSAGLDEDRSTGWLAQPVVHLYDLSCGFQPQAEVVDCKP

SEQ ID NO: 47177 - protein, 395 aa, unknown
  TnpB Polypeptide
MQVRYRYRLYPSPGQQQTLARTFGCARVVYNECLRLRDACHAAGEKISDTEVQRQVVTLAKLTPERAWLAEVASVALVQACQDARRAYRNWFDSLSGKRKGRKVGHPAFRRKHHRQSIRLTRNGFALHGLRLYVAKVGDIKVEWSRDLPSVPSSVTVIREPDGRYYASFVVERRAAPLPACESEVGIDLGLGRLVVTSDGVVIPNPRFLRVKERKLARMQRALSRKPEGSANRAKARHRVAVMHRRVRESRLDHAHKTALKLVRDNQAVYAEDLAVSGLMRTRLAKSVADAGWSQLLRLIEEKAVQYGRTFKRIGRFEPTSQVCSACGVKDGPKPLSVRTWACAACGSVHDRDVNAARNILAAGRADKSNACGGQVRPAALLAPAGETGTLRGAA

SEQ ID NO: 47178 - protein, 363 aa, unknown
  TnpB Polypeptide
MNYHPLTHKCRIYPKDRQIKQFEMTFDSCQFLYNELLKQYKIDYKNNNIPYNLKNYFKSLTEQYKTMYSSISKLNDSTIDDVLNNIIRAIRFSNNPYNLKTKNDKIRVHSFLLNNNEDIELTGNILHLEKYGKLKLYYGKTIEYHRVISYKVLNQNMKWFILITIRSNNIKPFPKTGKKIGIDLGLKNLIVLSNGQKYDPPNISYSNNKLDRLNHKLSSKEDHSRNYNIIINKQNSEHFHRKNIINDYFHKISTKIVKEYDIIAMESLDIQDMLKNRNYSKNIFHANWHKLVYMIKYKCELYDKIFIQVNRRFPSTKLCSKCGYKYDDITIDVRTWQCPKCGEIHDRDVNAAKNILNRALINN

SEQ ID NO: 47179 - protein, 414 aa, unknown
  TnpB Polypeptide
MNRTNTILLTPTETEERELHALADASAQLWNMANYERRQAYFAGNRVPSYENQWRTFKDTDTFKRIGTCKGQALLLKLREAWGSFLALKRLQGIGQLPAHMKRISPPRYMKDRKTQKRMADAIYVRNDGYKQQENVLTLSKSLRVPFKTGDLWLGKQGRLELHYDRLREKWYGRIPIRVKWSRKGLPHHSTPKRASIDLGICNLATCVIEGGDRAYIYSGRAVLSDWRYWTKRIASCESTLKKTNGQDSSKRLSRLYRTRRRRLDHAVKSMLRDLYEHLENEHVADLVVGDLKHIRDNANHGKVGNQKMHNFWPFAQIRQRICELSEEYGIRVRFKSERGTSKRCSLCGEKHKNGRKYRGLYHCKPRDVFMNADVNGATNILYGHKVAAVSGSRPMAWPMLLKWNRQEWRVSAA

SEQ ID NO: 47180 - protein, 347 aa, Streptomyces sp.
MFLRADGESGKRFGNETIRVTNNGVVSIKLPTPLAHEANDGRVRYTLTTPVAFAHRGVQWADRIADNRAVAYTISHDADRDRWYLTACWQPAPVPQLSLEAALAAGCTGVDANDDHLAAWQLDVHGNPVGAPHRFFYDLSGSADHRDAQILPQTSSGGAPIALTRLLHWARRTGVSAIVVEDLDFAESKTRERHGRKKRFRQLISRFPTTRLRTRLAAMAAEQGIAIVAVDPAYTSRWGARHWLTPLRATHPQTTGHDCASIVIGRRAQGHPARRRTPPPPHHQSDGAGHRSAQARPDALGREETRPPRTGPPARRVPPPGTRTRATSAPNTVRDARTEPGHTPAQC

SEQ ID NO: 47181 - protein, 482 aa, Acidimicrobiaceae sp.
MDQPYSLRAVVVPLDPTPAQEQLLRSYCGASRFAYNWTVAIAKANLDTRDEERRSGIKEVDLTKLSWSAWSMTPLWNSVKEEVAPWHRDVTKHALCSGVTNAATALKNYNESKKGLRKGQPVGFPNFKNRHSKQSFTLIQFDRVGNWFSDDSRHVRLILPRFATDPRITRRREQLQWLHTTESLRRLKGKVISGEWTVQSVTISFTSGRWQASFSVRQHVISRPSAKRRLGPIVGVDLGVKHLATLTVPVVGLSGASGHVTNPRHLDDELVRLAKLDRQLSRCVRGSKNHAQLRLRRQRLYGRIARTRNLYLNRLTTTLAGSFETVVLEDLNIAGMVKKSKKNTAKALSRSILDAGFFELRRQLTYKAEDRGHRIVVRNKFYPSSKMCSHCGETKAKLALSDRVFECSNCGISLDRDVNAARNIRDEGLRLLTNEVSTVAGHQPETLNAVSRDRETKPLRRGRGDRYQSRTTQPIREFSPLA

SEQ ID NO: 47182 - protein, 393 aa, unknown
  TnpB Polypeptide
MSSTEPTVILRMSVRSAVFYLDDHLAPEARFLMEDFRLATNGLIRAGLQARVTSRNALCKLVYKDSRVEYPGLYAKHLVSAFGVAAGILKSHRRRLRKFGTEPVVRPPYVKRLMMKAENQAYKLDRKDGVIDLPVRAGLHVELKLVVSQYHRRYLDDEAWSLGSLTLLPDKVIVAFRRIPPKPYAPRSVLSLDTNERSLDGVFLREGSVVAVRAEFPDVAIIQQRHHDRRKRLQKKKANDRRTSSTLCRREGQREHNRVEYRLHQVADRVLSFARSQESAIVLEDLTGIRHKKGKDMNRRLSMWPRRELHRIIEYKAEDNGIPIVKVDPMYSSKKCPICGSIQHSRMGTEFECECGWHMDRHINASINLLQTASLKGLAGVYGSTPAHSGMTR

SEQ ID NO: 47183 - protein, 342 aa, Scytonema sp.
IDVGWIADAAKSRRYYPLQKKPEHEWTQCLGKTRQEAVCEAESAKRQALKAWKSQPKTERGKFEMRFRSCRDKSQVIQFKNDAYKNGTWFPSKVKGLLFCSAIGYEVPQNCAYGTELVYQKGQWFACFPEVREVVATESDRVISLDPGNRCFLTGFDGENILEIGQGDIGRITRLCLHLDRLISQKVLAKGQQNKRKRYQLSLAIERLRERIRNLVNDLHHKASSLLTSAYKLIFLPTYETSQMVLKTARKINRKSVRNMLSWATGRFAKHLEQAALRSGVIVVRINESYTSKTCPHCGEIHRKLGGNKVFACPKCKFTAPRDWVGAVNIMLAALQATAFLV

SEQ ID NO: 47184 - protein, 226 aa, unknown
  TnpB Polypeptide
VSHPGNILPAFCSAVRTKQWKKDRQRDFLGSILPCRECVYFLQEKEPGTLCFTEKQRKNLQENRESSPTVKKKAGTIRNRKKRVALCHEKIKNHRKDFQHKLSRELAERYDAVCVEDLNLKGMSGGLHLGKGVQDNGYGQFLFMLGYKLEECGKHLIKVDRYFASSKICSVCGHKKKELALSDRMYVCECGNRMDRDVNAAVNIVKKEKESIKNVPDGTRKNSVTG

SEQ ID NO: 47185 - protein, 540 aa, unknown
  TnpB Polypeptide
MRKKSQAASEQKKEVSKRTPTFLLELPLQVSVGQAARLEAGRQFYNAVLSEGLKRLRRMRADPAWQAARALPRSQKQERARAFAALREQYGFSEYALHEAGKALRVSWLAAHLDAVLAQTLASRAYHAPNRVCLGKAKRVRFRSRGRGLGSVENKRNDTGLRFVLQKPEEGNQGFLIWQDDHLVTLIDWNDTVVKHGLAHRIKYARLLQRRASSAKAQGADAQGYRYAVQLALEGVPHHKPKHTVGTDIIGADLVRSTIALGPRKGEASLAMFCEELAPNEQHMRRLQRKLDRQRRAANPGNYDDKGRIKKRSGKQKLVWKRSKGYQRTQRRKAVRERKLAAHRKSLHGRKVHEILAVGNTIILEKISYKAWQKQYGKSVGLRAPGMFVEHLRRTVASTGGILLEVPTGRAKLSQFCHGCGKRVKKPLSQRWHHCACGVGPVQRDLYSAFLASTLDQDHLIPSCAQAVIHWEASEARLRAVHERVAQRAKEGQILPRSFGLARAGVRRPQSLREPTQELAFLFRQGRLEAWKDHSEPPLL

SEQ ID NO: 47186 - protein, 450 aa, unknown
  TnpB Polypeptide
LVPLPHHACGHVLERVHQRSSGGLWRVPGQQCGNHVPAAAVVADGCLRLSVDSGAVLVRYRYRLRPTTRQQMTLAQVFGCARVVYNDSLRLRQQSRAADEKISDSEVQRRVITLAKLTPEREWLAGVSSVALVQACNDARRAYRNWFDSLAGRRKGRKVGHPVFRRKHGKQSFRLTRNGFSLHGQRLYVAKVGEIRLRWSRPLPSVPSSVTVIREPDGRYYASFVVERPATPLPAYGREVGVDVGLDRLAVTSDGEIIANPRFLRAKERKLAHAQRALSRKQKDSANRVKARRRVAVLHRKVRETRLDHAHKTALVLVRDSQAVYAEDLAVSGLARTRLAKSVHDAGWAQLLRLIGEKAEQYGRTFHQVGRFTPTSQTCSACSANDGPKPLHVRSWQCKVCGVVHDRDVNAARNVLAAGRAERLNACGGTVRPGASLARPSEPGTHRGAA

SEQ ID NO: 47187 - protein, 421 aa, unknown
  TnpB Polypeptide
LEFQDKLFSLRKQYSSVVRYSYNRLKDGLTEKEIRDSFSKLNNINYLDVWTKQCGIIEAKSILTKNGDDKVIFGGKHNFLNRIKNKISGDLLKDKRLLPLTIFGEKSQKGNRKFKLDILNNNQIIYKLNKKEHFILELPNLRNNFKKKLSNLQLLNENVGSTYQIKLTDKYIFFSFEEEVEHTKELDDNIYIGIDLNPEFIGLSIKKGDDILHTECFNLSKIIEKFKKLNKSSNSLEMKYLNNKLNHEILEISKKISEISLKNKCKFIFIEDLKFKNEKNHKSFNRLTKNLWKRNIFIDNLEKRCVLNGQKIYKINPVYTSFIGNCIYEYVDPINASLEIGRRGFELIIKKTKKFYPELWIKNSLKDQWKEYFSEFPDSWKELFGLVKNSKLRYRVSTDDVVFSKFKTEKSYITYLCNQSC

SEQ ID NO: 47188 - protein, 139 aa, Blautia sp.
VGRYIKLPKLGFVKIRQSMEVEKINHVIIEHTPAGKYFAVLNVDFEPEPRLNAGGTIGIDVGIKAFYSDSNGNTVSNPRYLERSMRKLIREQRRLSRKQKDSHNREKLRIRVARVYEKVTNQRNDFLQKQSTMLVRENQ

SEQ ID NO: 47189 - protein, 381 aa, Bacillus sp.
MKRAYKTEIELTSNQAEKVNQTIGVCRYVYNLYLKRNQDLYEKEKKFISGFDFSKWLNNVYTKENDPWIKKVSSKAVKQAIMNGDKAFRNFFEGKAKFPRFKKKKDQDVKAYFPKNNKTDWTVERHRVKIPTLGWIKLKEFGYVPTNAQVRSGTVSQKAGRYYVSVLCEVPPKEKTVNNHDGLGIDVVIMNFAVCSNTDVYGNINHSPRIRKLEKSLKRQQRKLSRKYEYKKKGGETCCKNIQKQVKMIQKLNARLTHIRKEYVRDVVTRVVKAKPSFITIEDLNIKGMLKNKHLADSVRKQSFYYFRVCLEQKCKQNGIELRIVSRFYPSSKLCSCCGLKKVRLSLSERIYKCDSCGIEMDRDFNASLNLKYAMNYTIVT

SEQ ID NO: 47190 - protein, 411 aa, unknown
  TnpB Polypeptide
MPETIPQRWTYQVVVHRRNKRLDRLIDIAGIIWNHALALQRRYHRLTGRYISKYDMKAHLRKLRAGSPRFQYWQNVNSQALADICGRLEQAYEPYRKGAAKKPPKFRKVKQYKSFTLPIGNGCKLIESDNSKIGKLRLAFGWRGAEKMTVKYHIGGRPLPDKVNSVVIKRTGDGKFWLTFVVEAELTQTDYPSTGEVAGLDYMLQYLFMTDDGEIIDSPRFLSEELEEFRRLSRELSGHGRKIIGSGSRKRAKLALARHHSKIRNRRVDFHWKLGHAMCRQWDVLVAETLNFEEMKQQRGRGRIISDQAPAAFLRKLEWVAKKSGRLIVRAAWYFPSSKICRGCGHKAADMPPKRRVYECAACGLVMDRDENAARNLAQLGRGSAPGQSGGKAYLRNADSGAPASTAGPSV

SEQ ID NO: 47191 - protein, 519 aa, unknown
  TnpB Polypeptide
LAKNQTYKAFVARPTHILDLNGELLDGAHVLASLASEVRDISAYATFVVRNDIELGDELARVAVTAPAEAGRQAGVTMPDFLVSGKSGGSRKEKLLQYNVVTSYRSLQERVKAANGESSKYVSQGWKRTVDRSAPSYGEDYVNLGAVDKCYASIENNPFTDGEIILRLVIQGTWYRLIFNFDNKRFTEGKVTLPIIKIQDGRPVFVFTVVTDNPVVQFSGDYTIGVDVGINNYATVVVRDVKTGRIVHETTLSRRVHSLWNGVRASQRQVRYLRGKAATLLHGRQARMSALDEAQLHREAASRKKRELAILAAQEIADLSHLWGNAVVSVEDLSWIANTMQNGRWNRGELMRWLTHYVSQNGGWVVAVNSARTSQLCYKCGSKVTHTTHEVSVCPEHGAMDRDVNAAVNIAARAVPRVVKARVTRAKNRKLRPQPPLRTPVARNSLKYPGRDRTKSKPTPKRKNHRLVSREVILPVCPARAQAPRLGVRVLADQGTFGTLGTNVAALKQDCVTYKCMLL

SEQ ID NO: 47192 - protein, 358 aa, unknown
  TnpB Polypeptide
MAKAVIRTAKNQLKLLTESARYRFKNLYKRRKSLYKKIQKYKSMLSLSSIFLKQRKSIKLRLFWTQMKLNKVNQLIANGLKFHLTFGTKHLLKTNKQKFFAKRDNQVVYIGDKNETCGNQQLQIRFNHKYNRFDYKLRLDNKWMSDSEKYIFGSFVLKNKEAKSDILKTLSEKKSNPLTYRIIKRKGTLYLQIIYRRETIDITRANYGVLGVDFNKGFISVSEINSGGDLKSLTRYNYLHTGKATKTRTSMLELVAKLVNKAITVGKDIVIEDLVSLDSNKKQEKTTSKDYNRMINSLKFGSFKRCLLSKATKVGGAVHSVNPYNTSKIARKSYTNRMKLNVHDAASYVIARRFYQYD

SEQ ID NO: 47193 - protein, 432 aa, unknown
  TnpB Polypeptide
VAMRQVERHLIKPSNDLYTICDDLTFKSKNLYNAGLYQIRQSIFERNKSDKKNKKPIPSWAQLISEFRKQDQNDMKALPSKVSTNIIKMLGGNISSYYQLLKGYNDKSNKSITNKPKLPGYLHKTEGRYVVEFTNQTFAKKRGDNNELILCPKDLRILIPTKVDHPKCVRIIPKNNCFFIDVIYEVKEKPLRKSKKYAAIDLGVDNLAAITFSDGTNPLLVKGLKMKYINQGYNRLIAKAQSKLPNNQRTSKHIHRLFRNREMKLQSEFHKITGFLAEYFDEMSLEKVFIGKNNNWKSGISLSRKVNQRFVQIPYNKFISQLKYKCELRGIEVIEQEESYTSKASFIDSDNIPVWKNDGKKYSFSGKRVKRGMYKTKDGLTINADVNGSYNIMVKGLNNFGEILNRSLVSFHTRSFGGYDTLSNKDLVEKYK

SEQ ID NO: 47194 - protein, 497 aa, unknown
  TnpB Polypeptide
MRAQTSSYVVSVKLKLTKSVENRLEKTFFVTSSAYNEALSFGLHRLEDLKQNSRYQELLELRRNNNHQVKEYDKELLKMRKMYSLTEFGLSARLGQQRKKPNSPYQQLNSGELQVIAGQAYKTLEKVLFYRIKSSSTRFRSKYDLNVSYRNRVNTTGTRIIPSDRKGFAYRLYIHKSTTFVDIPTKAFNNHQQMSLLKSEKIKYVQIIRKTIRGKHVYILQIVCQGSPITKVKRGKGTMGIDPGISTVAYVSKKSLALVDLVPKDVNRKEKLMRYLDRAIERSRRINNPNRYNSNGTIKKGSKFKSQSNRQMRLKTRRLQAYHSLSEERKKIQGQLVNHLVSQASLIKIEDLNIKGLQRRSKEIRINPKTNRPFSKKRFGKSVFRAAPSSFRQLLQTRAHQLGVDIEIITPKNLKPSQYNHLTKTFEKKTLSTRLYDLSDKWTSVQRDLYSAFLIGHIENGSYEQEQITQDFPDFYKKMKKFLQKTRKTNRLDWYLN

SEQ ID NO: 47195 - protein, 468 aa, unknown
  TnpB Polypeptide
MVTRVAYSRDLNRGKFAALTEQAGRLGRVRAEVWQRYGSVTGARLSDRQVRDAWMAAGHTEFGVLANAWKETVRDAMGGIRASRDAAKVKVRRAVSHRTTDPAERKRLFTALKADDWAADPYLSRMMRKHWLRGHSHITNQIIIRADNVRTFTLTEGGDVWLAVPGLLPRTSVTVPLNTTVAPSGTLRVILRAGRAEVHYQVDGSALKSSARPHGDRTLGVDKGYTEVLTDSDAVHHGPGLGRLLSAESDRLKVKNRRRAKIRAAAKRAAARGDQAKADRITRCNLGTAKKARARHRFEGRARTVTFEAVHAVIDKAATIVAEDLTKPFAGRNYGRNMNRRLAAWTKGLTAEALHSVSERRSSALVHVNAAYTSQADPGDHCTLGVRRGDRLHCESGVVWQADVAAAINVLHRHGDPGITLFTPHTRVKQILQERADRQRARLPAQDSSPENGGGERNIPICSGLSNE

SEQ ID NO: 47196 - protein, 468 aa, unknown; identical to SEQ ID NO: 47195
  TnpB Polypeptide

SEQ ID NO: 47197 - protein, 737 aa, Clostridiales sp.
MQVVKRDGKIVDFDESRIINAIEKANKEVDKKERATDEEIAEITSEIRNLKKKRILVEDIQDMIEDKLMDFGKHELARCYITYRYNRALIRKANTTDKSIKELIDGESEYWNNENSNKNAKVVTTQRDYLAGITSTDITRRFLLPDDVVKAHDEGIIHFHDADYFAQNVLTNCELINLNDMLQNGTVINGVKIEKPHRFLTACTIATQIILAVTSSTYGGATVSLTHLAPFVRDSYNRYLDKYKKRGLNEEQCKQFAMEDTKKEIADGVQTFNYQVNSMTNTNGQSPFLSVNMYLGETDEYKDELAMIIEEFLNQRILGFKNEKGVYITPAFPKLLYVLEEDNIKEGSKYWYLTELAAKCTAKRMVPDYISEKMMKKYKINEKGQGECYPCMGCRSFLTPDRTMSLGNIAHAGDYVEGKGKYYGRFNQGVVTINLPDVALSSGKDMKKFWEIFDERLDLCHKALRVRVDRLEKGTSDVAPILWQYGALARLKKGESLHELLHHGYSTLSLGYAGLYECVKYMTGHSHTDGAEGEKFALEVMQHMNDKTAEWKKEEDIDYSLYGTPIESTTYKFAKCLKKRFGVIKGITDRNYITNSYHVPVFEKIDAFKKLKLESKFQRLSPGGAISYIETPNLQNNIPVVEQIIKFIYDNIMYAELNTKSDYCQKCGYDGEILLDDNLEWYCPNCGNRDHRTLNVARRTCGYIGTNFWNKGRTQEIKERVLHIDNMQYEETEKKSK

SEQ ID NO: 47198 - protein, 244 aa, unknown
  TnpB Polypeptide
  misc_feature (160)..(160): Xaa can be any naturally occurring amino acid
LHVQAGYPDLGGPKINAAMTKKMKAHFEFDTSKVSRINVKYHSGKWYVNLTSEIQEAELVDIVKKVGIDVGLLTFAALSDGAKIENPRYFRKSEEKLARLQRRLSRKKKGSNNRGKAKAKVTRLHDKIASQRRDFLHKASYSIVQKYDMIAVENLAVKNXIRNRHLSKSIADAGWGKFVDYLEYKCLKYGKKLVKVPPGGTSQTCVCGTYAPKDLSVRVHECPECGLIADRDVVSAMVILQRVS

SEQ ID NO: 47199 - protein, 410 aa, unknown
  TnpB Polypeptide
MVVSYNVKLSFPDEETRKKYIDVLSVERDCYNYLSKIFEKIDFVHHRLTRYDVQSRYYRDLRSRFPELSSEMVLKCILEAVSNWKSAIRNCYTDFDVPYKKNLSMILDKRLYGKLTASSVELTVPGGRRAHCTFSPYTKLAELLNLYRVQNCNVFFRRSQFWLTLQFDVPRAEDAGSGVLGIDRGMRRIVACSDNTGWIDRDFSRKRRQLRYLRRCLRSRNTKSAKRHMKRLSRTERNRSRNEIHRVVNWLLAKPVHTYVVEDLSKIKKRTSRKKVVTPIGVTIEVKKRKHNNRFGQVPLREIQSVLEYKAPLLGKEVATVEPAYTSLLDSRGMPQGIRQGTRYRASDGVLLDADINAASNIALRHRPDSIVANPVYGSAVFSGRPMSTGQSWTKLRQNPQAHALQDVGS

SEQ ID NO: 47200 - protein, 380 aa, unknown
  TnpB Polypeptide
MWTQLEAVKAVRFHYKPRGDVLNLLKTFRDMVNEALRIGFEKKPRTRFQLITAVYPVFRKRYELHSHYILNACEVAFAMLRNRKWKKLPYAKHFFLKLDNQTYRLDYMMLRIPTTPRNFIRIPLRGGNYQLSFLRDPALKRGSITITESAVVLAVQKTASVIEPLSKAVAYDINEKNITASNGERFDLSHVANIKHQYSRIRTSIAKNTCRDLRIKQKLLSKYGKREKTRTVQALHRVSKLIVAKAKESKSPIILEKLTNIRNSVRRGNGMDRKLRGRLNRWSFHELQRQIEYKARWEGLPVEYVGASMTSKTCSRCGYRNKALKAEKCWICPNCGVQHDRDLNAARNILSRFKEADVVRPSNEGLTSEGMVLREAITGS

SEQ ID NO: 47201 - protein, 373 aa, unknown
  TnpB Polypeptide
MLYDINKKNEGVNMTRSYKFIIYPNKSQEELIQRTFHCSLFVYNHFLSRRIDEYKNNKKNLGYNLCSKELTELKKRFSWLCSVDKWALQNSLKNLDSAYQRFFKCGAGFPKFKKESATRKSYRTTSNNNNIECVGGKIKLPKLGWVRFRDNIKGISYKILNATISQVPSGKYYCSICFEIQNSCGNTGNKSIGIDVGVSDYAVLSNGDKIENPKYMKSFHQKIIMLSRRFSKKKEDSKNREKARIKLARAWEKLSNKRKDFIHKLTKELISRYDVLCIETLDIESMKRKHRISSLICDASWYEFSRQLKYKAETVGKTVLSADKFFPSSQLCSNCGYKNDDIKDLSIRFWKCPVCHEIHDRDINAAKNLLSIM

SEQ ID NO: 47202 - protein, 367 aa, unknown
  TnpB Polypeptide
MIEFNLTNRMAKAIIRTAKNQLKLLKESARYQFNNLYKRKRSLYKRIQKLKHVLYLNSTSLKQRKLLKLRLFWTQMNLNKVNQLISNGLKLHLTFGTKHLLKTNKQKFLSKRDNQVIYIGDKNETCGNQQFQVSFNSKYNRFEYKLRLENCWISGSDKYIFGSFVLKNKEAKKDILKTLSKKMSNPLTYRIIKRENTLYLQLLYRRDVLEVTRSNYGVLGIDFNKGFISVSEIDSSGKLNSLNRYNYLHQGKSTKTKTSMLNLVSNLVSQAIRVGKDIVIEDLVSLDSNKKQEKTTSKNYNRMINSLKFGLFKRCLLSKATKNGVSIHCVNPYNTSKIAKASYTDSMKLNVHDAASYVIARRFYQYD

SEQ ID NO: 47203 - protein, 362 aa, Actinocrispum sp.
MAKTLVKRAFKYRFTPTVQQERELLRTFGCVRHVYNMALEARTAAWYRERRRVTYAETSALLTEWKTTDELAFLNEVSSVPLQQCLRHLQKAFTSFWEKRARYPRYKSRKRGKATAEYTRSAFRYRDGQLTLAKMAEPLAIVWSRPLPPGARPATVTVSRDPAGRWFVALLVETSVGHLPAGEAEVGVDAGLTAFVTLSTGEKVTSPRENEDRARLAVARRSLARKQKGSRNQAKARRRVARILARIGDRRRDFLHKLSTRLVRENQTIVIEDLNVRELRSMLEYKTQWYGRRLVVVDRWYPSTRTCSECGLLLDRLPAHVRGWTCRRCGAKHDRDVNAAKAILAAGRAVTACGAGVRPPRH

SEQ ID NO: 47204 - protein, 440 aa, Nitrospirae sp.
VILSSLDRYDMVIRKAFRFRLEPDETQQALLHQFCGQARFVWNKALELQQRRLERGVPLLRYGDLAKYLTLWRDSEEYGFLRQGSVHTQQQALKRLDQALWEGLDRSNPKGFPGFRKRGVHDSLRYPDPKQIKLDLSGWDEAGRRRLPKIFLPKVGWVKFRNSREIEGTIKNATVTRRAGHWYVSLQVEVEQTPALPPLKVTALDLGVRNLVTLVDGTQIDPLSPLRRFEEKLAWEQRKLSRKKTFSRNWYKQKQRLARLHGRIANIRRDVLQKLTTWLCKNHAVIVVEDLKIRNMTQRTKGTLEAPGTNARAKAGLNKSILDRGWGMLVEMLGYKLAWRYGLLMKVGPRNTSRRCPRCGHTDRANRPDQSTFRCVECGFATHADQVGAYNILSRGMEKLRDEGRDTADASVGWLEALLSSHSPDRLFAEVFGEPGLSPV

SEQ ID NO: 47205 - protein, 381 aa, Chlorogloeopsis sp.
MQTISVKCKLQVPVELRYEIDRTLQGFADACNQILNTAKEHKQWNTTKLHHLSYKTVREDTGLSSNHICMAIRRVVGNVKAVKQIHKFRPTSISLNQRTFRYWEEKQEVGITLSKRHNFKLSIGNYQLALLKGQNPTAATLCKSKKGDYYINICVDLPTDPMGKTPKVIGVDLGRRDIATTSTGQSWSGKQIQSVRDHYSKVRANVQSKRTRNSRRLLRRLSGRERRFQEWLNHNISKQLVQDAKRSNSTLAFEDLTNIRESLNQKPRSKTERRRTNNWAFYQLRLFVGYKANIAGVPVVFVPPAYTSQSCSRCGGIHPIKGKSYRNGKVFKCGRCGFEHDADINAALNIAALGKSVSLPESPGVSCQLQGQMPLFPISQI

SEQ ID NO: 47206 - protein, 374 aa, unknown
  TnpB Polypeptide
MKTLKFKLYSHKRNRYLKRSINAAGVIYNHCITLHKRYYRMWGKHLNCAQLQAHIAKLRKRRSFWQLVGSQAVQDICQRIEKAYQLFFKHHTKGVRPPNFKKVKKYKSFTLKQSGYKLLGGNRIKIGGKVYQYWNSREIEGTIKTLTIKRTSLGELFMLVVVDDIDEQISKSETGKIAGFDFGLKTFLTCSDGSQIESPQFFKQSLNAIKKASRQHSKKVKGSAHWERARKNLVRRHEDISNRRSDWFWKLAHDLTDRFDVLCFETLNLKGMKRLWGRKVSDLALGEFLKILGWVAQKKGKQVVYIDRWYPSSKTCSHCGHVLKELDLSVREWRCPSCHTVNGRDKNAAKNIKAVGALTAGLGDVRQAVPAIAV

SEQ ID NO: 47207 - protein, 216 aa, unknown
  TnpB Polypeptide
MLRLIDGRILIYLTLTKEFEISYNPDNVVTADINENKVTLAVFINRRLYEISRIDTSIGRTAIAYSERRKRLTIGRSARDRGVRKTLRKLREKERKEDIIYKTAKIIEEISRKYGAALIVGNAHRGKDRMASNVRKNLKNGIHQWCVGKLVEVLKNKASIPFEISEAYPSSRNPFSERPIKNHAPSMISVALRGVEGEDIKNTDEASKAEQRISRG

SEQ ID NO: 47208 - protein, 573 aa, unknown
  TnpB Polypeptide
MSDHLSLPIRLPDEDTERFERLATLTQQVATHVLEDHWTPTHLDGIADSSHQAWKYFDEHEPFEELDLYLPSRFRRCLLQKVGETLRSHADRRDAFHSIRNVLPDHKIRRIHRRRIKERLWDDGDYLSSGYVDILIDQLNSYYDRHGRYPDTYFEMQDCPTYDSGVLPFSADDGPTSGQAVNYQYDTDSETLTVRIKTPDTRSPETRGEWSWTEYERGGYEAFHDLLSHGDLSAPEFRPSRRKSGDAYYELSFPVEVEHAEATDGTDCVLALDAGMRKDMTAVVVTKDGEQLSTPQFIQFTDRDGMRRLHRERTKLNDRLSALRRDGRSHTDDFAHIHSEYERVNSKLQHKREQLTHDVANQVLALALLYDVDAIVHEDLRSLSPPRGEGALSWELSSWARRDIIENIEYRAEYVGLDVERVYPEGTSRSCPRCGATGHTCKSPNHHEEVWWGGHFRCDNDRCGFEGDRDYIGALNVARVFFSETDELDHGFTSSYTGDSEIVLAGRSAGTRLAFGTGIVAYEPEQAAATAGGGSAVIAPAVAVPESNADGSDGRGPVVQQCTRFLRCTTESY

SEQ ID NO: 47209 - protein, 414 aa, Okeania sp.
VDRIYQNIPEFRVQTRDGRKKDNNGNPITKKGDKHPNIVNGYVLWETVQLANLGQTKQLFPEYKSMHSQVLQDVIQRVQTTMDNFIKPDKNGKTSGRPKFKGKHYYNSFSYPQLSNTNIVKNANGRYCINLPKIGLVPFVFNRPIPEGFKVKAGTVIRAADGLYISLTIEDQTVPLRRAEIQPTEDNSIGIDLGLLHYIVTSDGEFIEVPRFFRKSEHRLSKLQVRLAKKQKHSKTWKVLKRKIAKLHQLIARQRLDWQFKLAYHLFSDYQVIFLEDLQIANLVRRCRAKLGDNGQFLPNGQSAKSGLNKSLQDAAFGQFVQVLEYVVWKLGKRIIKVDPKGTSQNCWECLNKVSKSLSERWHSCSRCGQELDRDYNSALLIQKIGLLSTQGEDITSVKTAVRVSQAEESRVVP

SEQ ID NO: 47210 - protein, 351 aa, Blastocatellia sp.
LRKWFGAARFIFNKTIEYLRQPGTKANHFEVKRRFLADLPEWAQEVPYQIKNVAVRDGCRAVKAAKKKYRQTGQFQQVKFRSRKDLQQNIFIPESAISSNGVYYTILGNLKLSESLPEHCRDSRLIFRRGRWFLCVSYTATVQRGENQARIVAIDPGIRSFLTFFAETSCGKIGKSDFGRIQRLCAHLDNLISRMAKAKCKQRRRMKKAADRLYWKITDLINELHHKAAAFLCTHFDYILLPAFETSKLVVRGARRLRSKSVRMLLSFAHYRFGEFLKHKAKELGKTVLEVCEAYTSRTISWTGEVLPQMGGRRVVKSKIDGQSMDRDYNGARGIFIKNISGALVDTPLLG

SEQ ID NO: 47211 - protein, 485 aa, Micromonospora sp.
VKKFQPRSGFVVQALRFALDPNVTQEQRLRSHCGAARAAYNWAVSWVVASWWQRKAEASYGIGEEELTPWRPWSLPALRKVFNEVKKTDPRFADWWGENSKEAYSTGLANAAAAFDNYATSKRGQRQGKRVGMPRQKSKHKARLACRFTTGTIRVEPDRRHVTLPRLGTIRTHESTRKLQRRIANGTARILSATVRFERGRWFVSFQVEIQRAADRAAARPDVAAGVDLGVKCLAVIADSQGTVRFVPNPAHYDGALTQLKRLSRRLARRRGPDRRTGQEPSGRWLAANTERNRVHHRVANLRADALHKLTTGITAEYGSVVVEDLNVAGMLRNRRLARKIADAGFAEIRRQIAYKTDWTGGTTVVADRWYPSSKTCSNCGAVKAKLPLHVRVFICDACDLVIDRDENAARNLAALAAAVTTGTGVAGDPGVPAPKPREADQKTRATTRSRKATGGRAGGATLPHQRQQETRDRHQDTETQHALR

SEQ ID NO: 47212 - protein, 461 aa, Micromonospora sp.
VVHRTARVALRVTPGQRRRCFGLLRSAGDVWACVLEVNAWRRRRHDSPLVGYQELCRELAASGPGTFAELDTTGARSVLRRFSDAWFGAAKRRKAGDLSARFPRRRRGLLPVRWYHGTFTLDGRRVRIPTAKGTSQLWVRLARDLPYPVEQVRSITLLSEAGRLFLDVTAEVPITVYPAGEEPDPGRVAGVDLGVIHPYAVAGPDGEGLLVSGRAIRAEHRMHLADTKARRRAVARRAPKPGEKGSRRWRKYRRRARLVEGRHRRRIRQAQHEAARTVISWAVRQRIGVLHVGDPRGVLDLPAGRRHNLRLRQWQIGRLIQVLTDKATLAGITVRLVDERGTSSTCPTCGRRVPKPRGRTLSCPHCHFSGHRDLVAAASIATRTPGGGPTTETAVVLPQVVTHRRAGRHLPGTGRSRRDPRRPPRTARGSVGPRRPAPPPGGESLAHTARIHNRHRTSGER

SEQ ID NO: 47213 - protein, 304 aa, Micromonospora sp.
VTCGRACWRSTRGGAAATTCRWWAIRSCVGSWRRPGRARSLNWTRSVRGRCCAGFRMRGSRRRSAAATVTGRPGSRAGGGGWCRCAGITARSPLTGFGCASPPPKAARRIRQAQHQAAATVVSWAVRQRVGVLHVGDPRGVLDLPAGRRHNLRLRQWQIGRLVQVLTDKATLAGITVRLVDERGTSSTCPTCRRRVPKPRGRTLSCPHCEFSGHRDLVAAASIATRTPGGGPTTPTAVVLPQVVTHRRADRHLPGAGRSRRDPRRPPRAARGSVGPRRPTPPPGGESLAPTARIHNRHRKPGER

SEQ ID NO: 47214 - protein, 481 aa, Micromonospora sp.
VKKFEPRPGWVVQAFRFALDPNASQQQALRSHCGAARAAYNWAVSWVSASWWQRGAEESYGVSGQHLTPWRPWSLPALRKEFNQVKKTDPRFCRWWQENSKEAYNTGLAAAAAAFDNYAKSKRGQRKGQRMGVPRRKSKHRARMSCRFTTGTIRVEADRRHITLPRLGTIRTHESTRKLERRVDNGTARILSATVRLERGRWFVSFQVEIERAQRTPSRPEVAAGVDLGVKCLAVMADSAGEVRYVSNPAHYDQAIKQLKRLCRRVSRRQGLDRRTRQTPSKRWLKADLERNRVHYRVANLRADALHKLTTTITAEYATVVVEDLNVAGMLKNRRLARKVADAGFGEIRRQITYKTGWTGGRTVVADRWYPSSKTCSGCGAVKAKLPLHVRTYHCDACGLVLDRDENAARNLAALAAATGTGVAGDQDAQASKPRGADQKTRNTRPSRKARAGWAGGTNLPHQRQQETGDRHQVTEALRLR

SEQ ID NO: 47215 - protein, 217 aa, Micromonospora sp.
LKQRNRRRARLRSIANNAARRGDHAKAQRITLNNLGSVKRDRQAAQHQARVRTEIFTAVHEVVDKAATVIAEDLTKRFTSRKKLPKNINRRLAAWTKGVTAEALTNVSERRGSALVPVNAAYTSQTCHQCGRFGRRSGDRLHCTRCGVVWQADVNAAINILHRAGDPDIALHTPHHAVKQILQDRTDRHRTRLPVQDSSPATAERRANHPNRSTMSK

SEQ ID NO: 47216 - protein, 528 aa, Micromonospora sp.
VADLRPIDAPFVALGPSGVAIRDRLKGLTGEDERVLRLVGDHLGRLAGKDLKARCVTGLDHDTDAWAERKRALTQESSSRWAGSITKATHDQWALSRRAQLAHIQGLEVGIKTIAYRLSLPVGEKGSKRVPGGYRTAQEWFVKTRRLHVLQDRLERERGDRETGRVRVVRGGKRLLRNRHNLDAAQLTEAEWRQRWEAQRRFLQADGESGKRYGNETIRVTCEGEVSIKLPAPLAHLANARHGRYVLAAKVSFPHRGDAWRDRVTANRAVAYRIHEDVDRCRWYLTASWTIPAARPMPLATARVNGIIGVDTNADHLAAWRLDEHGNPVGEPRRFCYDLSSNADHRDAQVRHALIRLLHWAKRHGLSIAIEDLDFAAQKTREKHGRRKRFRKLICGMPVAKLRSRLVSMAAELGITVVVVDPAYTSQWGAQHWQRPLTSTNRKTTRHDAAGVAIGRRALGHPIRRRTAPPRDDQSDRRGHRTAQAGPGAREREGTRPHIPGPRTRSDGAGCGANAGGPARPTPLGARG

SEQ ID NO: 47217 - protein, 477 aa, Micromonospora sp.
VKVTRIAYSTRLNPGKYAALAEQARRLGQVRSEVWQRYGSITGVGSGLRDRQVRDRWLADGTHLRFGVLANAWKETVRDAMADIAANLASAKVEVRRAITRRTNDPVERKRMFTALKADQWAIDPFLARQMRKHWKRGRNRTHDQIVVRADQYNSVTDARGRLWLAVPGLERRKTVKIPLSSTIAPTGTLRLILRGGRVEVHYQVDASEMRSSQRPCGQRAVGVDKGYTEVLTDSEGTHHGTRLGQLLSSESDRLKERNRRRAKLRSIANNAALRGDHAKAHRIAVNNLGTVKRDRQAARHRARVRTEIFTAVHRVVDKAATVVAEDLARRFAGRKKLGKNVNRRLAAWTKGVTAEALTNVSERRGSALVHVNAAYTSQTCHRCGRLGRRDGDRLHCSPCGVVWQADVNAAINILQRAGDPDIALHTPHYTVRQILQDRTDRHRTRLPVQDSSPATIRAESEPSEPLKNEQLVGSRN

SEQ ID NO: 47218 - protein, 393 aa, Oscillatoriales sp.
MLNLTYEYKLIPTDAQRETFDQWLDICRKVYNFALRERKDWVNSRKCDVDSCSIKQEYIITNDAPRPTFARQCKTLFEAKKSIPELKLPHTHVLQQVLRQLEAAFVAMWERGHGFPRFKKRMRSFVFPQLNLESVKRFDGEDWVNLPKIGLVKMHLSRPIPDGFEVKQIRVVKRASGYYAMLTLQCDVEVPQVSPSGHGLGIDLGLEHFLATSDGELIDRPRFFVDGQRKLKLLQRQRSRKKKGSRKFRQLQHQIANHHEYISNSRKDFHFKTAHHLCDQAQTVFAEDLNLKAMSAGMLRKHTLDAGFGQFLNLLNHVCFKRGAYFAKVNPNGTSQTCPRCQTHTGKKELSERMHKCPECGFETNRDVAAAQVVLQRGYTAVGHIAVNFGEGK

SEQ ID NO: 47219 - protein, 247 aa, unknown
  TnpB Polypeptide
MQDEIRCLKRAMNRSRKMSNPGMFYPDGQVIPKNRLSSELLDRRGQRKWVKTKHYRQMEVQLRALYRRQAALRKHLHHRLANKILPLGDKFFVEDMRWKALAKRAKKTRQNRKGKFLSKKRYGKSIANKAPGSFLSILEEKAIRFGGTFQRIVTWEAKASQFDHQTGKYNPKKLSQRWHILSDGTKIQRDLYSAFLIQHTSTNLKSFDQSCCSKDFPAFIAMHDRAISRLKACSTHLPSSMGIKKPA

SEQ ID NO: 47220 - protein, 504 aa, unknown
  TnpB Polypeptide
MYTPAVFAKRVGVSVKTLQKWDRIGVLPAKRAITNRRYYTDEDLAAALRLPRVQKQRRTIAYCRVSSQAQKPDLINQRAVLEQFCQQRQIEVDEWIMEVGGGLTFKRKQFLAVVDAILDGQVERVVLAHQDRLARFGYHLLVHLCHTHQCELLAMNTEELSPEQELVQDLITIPQCFSSRLYGLRNYRKALKKAIADKNFFEGRKAGHKTGYPKFKSKKRSKQSFSLANDTFTVGDHWIDVPKLGRVNMAESLRFFGKILSARISQTASWWLVSITVEMPDEVPLTTHPPLGVDVGLNRLATLSDGRQYENQRPLAQQLKKLRRLKKELARRTKGGQNWQKTKGKLGRLHSEIACIRLDWLHKLTTEIATTSGIVAVEDVHVKGLIRNRCLSRSFSDASVGKLLDFLESKVPRQGGMLLKVDRFFPSSQLCHCCGARKEDLTLADRVFVCPNPDCGYVGDRDENAAYNIIFEALRLFGLNLNMPSARVATARRKTAWGPGVRPK

SEQ ID NO: 47221 - protein, 394 aa, unknown
  TnpB Polypeptide
VFNSNLREEDKLILLALNNVEGWLKYDKDEIEVYEKKGKRRKVKISEFHKRLARKIFKHLLDRNRKPKFSNISMHLDSKVVEISKKEKDGAKAFDYWIKVSTLEKGKPVYIPLKANTYAEKLEGEFLNYCQVVEDDGKIEFRIIKELKKKEYVPVIDEIAIDLGLRPLFATDKGDLFGRSFFDMLKTFDKKITKRMANLQKRNIKPRSDKKYRKLVDDLREFLKNEINRLINIIIKIYKPKRIVIEKLDFRSPELSKRMNRMIQNFGKRYIKEKLERLQQLYGIEIIEINPAYTSQECNSCGYVDKNNRKDTQEFECKACGNKTNAQINGAKNILKRSSLGNLTKKQVLKILIERYLERLKGCESAPLDVIGDNPYFKDYLDSILNPCQSLTPS

SEQ ID NO: 47222 - protein, 376 aa, Synechococcales sp.
MTQRAFKYRFYPTPEQETLLRRTIGCTRLVYNRALAARTEAWYERQERVGYVESSALLTTWKKENGLEFLNEVSCVPLQQGLRHLQKAFGNFWAGRAKYPTFKKKRNGGSAEFTKSGFKFKDGQVFLAKSSDALNIRWSRFLPEGAEPSTITVKLSPAGRWTVSLLVDIEIEPLPESPNKIGIDLGITSLVALSTGEKVANPKGFKAKRRKLRKAQKALSRKVKGSNNRYKARLKVAKVHGEISDARQDFLHKLTTRLVRENQTIAVEDLAVKNMVKNRKLSQSISDASWGELVRQLEYKCDWYGRSFVKIDRWFPSSKRCGHCGHVVEKLPLNIREWDCPKCGTTHDRDVNAANNILAAGLAVSVCGANVRPDKQ

SEQ ID NO: 47223 - protein, 377 aa, Burkholderia sp.
MNVKRAYRFRFYPTPEQEAILARTFGCTRFVYNHMLRQRTDAWYERQQRMGYHDTSAALTKLKKTEGHSWLNEVSSVPVQQALRHLQTAFANFFAGRAKYPSFRRKDGRQSVEYTTSAFKWDGATLKLAKMDKPLAIRWSRTIPKGAKVTTVTVSKDTAARYHVSMLCDDVVSKRPIVAGEVGVDLGLTHFAVLSTGEKISAPKVFRNNEVKLAKLSRCLAKKQMGSANRRKAKLKVARLHAKMANSRRDFLHKLSTRLINENQVIAIESLSVKNMQKNRFLSKSISDAGWSEFARQLEYKAQWYGRKLIGINRWYPSSTRCNVCGHTAAKMPLKIREWTCPECGTAHDRDVNAARNVLAAGLAVSAHGESVSPMSL

SEQ ID NO: 47224 - protein, 385 aa, Lactobacillus sp.
MNLSGVKLRLYPNEHQVKLIWQAFGANRFLWNQTLQMINQRYQNNPSLHLPNNYKLDYLLTCLKQEYPWLKEVDSSSYQITNKRFYQTWKQFFKHQGGRPKFHSRKNSYQSYTTKSHIRVVAKRYIKLPKLGYIKCSKTGRLIDSKIKQATISHDPTGRYYLSLEVEQTHQALPKTGQMVGIDVGIADLAISSDGIKYGTFNAKWDKKQAKMWQSRFSKRKYQATVRVRQYNHEHQGLPEMDINDYQNWQQAKQRKARYQAKVADKRADYLHKLTTQLVRQYDVIVIEDLKAKNLQRNHHLAKAIINASWRRFRTMLEYKCAWYGKKLITVKPNYTSQICSNCGYHSGSKPLKIREWTCPNCSVHHDRDINAAVNILHRGLKAIG

SEQ ID NO: 47225 - protein, 465 aa, unknown
  TnpB Polypeptide
VIRTAVVPARLQGANLRLAKAAERESARGWNIVVEWGREMLRNKQWPDAYELKKRLLALPAPERPKLHTHATQEICFDYEAACKTAKENRASGRKVRYPHKEKRFRPITFTKGFGWTISRRRGEERLKLSFGKTRIYLAIPVVGAGPSTWGEIKLVWAGRNFDLHIPYEVADHPECARSGRLGAIDPGIIHAMACVAEGEDGKLHTLVISGREARSVKRHRNKKVGQLARAQSRLQTGSKRWRRIQRAKGKVKGEADRRLRDIDHKTSRMAADFFNVHGVETVYLGDVSGIEAKTRQNRRLNRIARQQVSQWSRGRQERYLEEKLHCSLDRVGEAHTSQTCPACGTRRKVAGRTYRCQNPACGFTWHRDGVGALNILSRGKTGTLAAMDVDRLAPITYRQPTRHLPAGRDGVVALNRASAKRRWRLDSTVCTPAAVMSGGSPPPTCRLSSQTAAEGATPCTEAAA

SEQ ID NO: 47226 - protein, 685 aa, unknown
  TnpB Polypeptide
LASSGARSRSGCARATSSRSAPAMSDRGSSTFRAPHQPLGILAPAPVRGPTPTSPSLSWSARTSSTPGSPRASSSATSPPKSPACKPSTPAAASSKTAPPASTSSAKDSRRYFNSRLKGVYAQCTLPTETASAASHTSLSSSYSGSTARRSSWTQTTHTPPSRSSPTTSSLSSPFSALASTASGAAAAVANKRPKKAATPAVPTPTPPAEEDRKRKTPLPFQRKVAVEGHLRCFKVRMLPTPEQTRELKRAFSASRRAYNWALDRVKNHGEKPNNIALRNAYRKEPPPHWAAGKQAVASRIVAGGVKQLADAYASNFAKQKKDSSHSFEVKFRSTRRNPNEAIKIDKDTANDKQSPLNRFAPMPHPYPKRFAEQRRHGRTECRAFLGNNFSGVGGIVLQDKPRVIERLLGEGNRLKEDAKVLWDRRTGHFHFVYTFEQPKLADPDPTFASKRVLATDPGVRVFQTWYSPTSGAYGTLNEGFQQQIEPRIHALDALQSRVDRRYDVHRDAKGKVTSKTLKAPPRNRTKKQYHATTRTLKRKLARDRRRHVGWIESAHYDAANFVLRDHDVIIQPWLHSARLTQRSTRVIRSKVARNMLTMSHFKYRQRLQWASTRYAGRHVLVTEEPGTSKTCTLCGHWHAALGSAELFACPKCDLRIGRDLNGAIGNYYAAYGEAVGVGWDRQSG

SEQ ID NO: 47227 - protein, 391 aa, Oscillospiraceae sp.
MDVMEQSRQDGHSGPERATQYNTIKVRLCPTPEQEELFQKTFGCCRYIWNRMLADHERFYEETDAHFIPTPAKYKKEAPFLKEVDNQALTQEYNKLSQAFRNFFRNPAAFGYPRFKRKKDDRDSFTACNHVMGTSATIYTTRDALRMTKAGLIRAKFPRRPRSGWRLTRVTVERTKTGKYYGYLLYACPTRRPEPVAPTAKGTIGLKYSIAHFYVTDHGGTADPPRWLRQSREKLAATQRKLSRAQPGSRNYQELVQKYRLLHEHIANQRRDFLHKESRRIANAWDAVCIRDDSLRAVSGQLGGSAVQDAGFGMFREMLRYKLERQGKQLLEVDRLSPTTKACSACGAVNETLSPRARRWVCPVCGAEHRRGVNAAINIKAQGLMKDQAAC

SEQ ID NO: 47228 - protein, 308 aa, unknown
  TnpB Polypeptide
VAHSRHGERVQKPLAQSVAPASRAAGHSRRRCPSLRGARFRRAGSRGAVRGFGHAARKVPHCRAPVLLRGHGHPRDRRGAGHQGTHGAHPARPSKEVTETVIEGGVDLPQPEFIRTNKYVGLDLGIKDFVITSDAVKYSNPKYLQKSLTRLAKLQRELSRKTKGSSNWEKARVKVAKLHDRIANQRHNLLHQVTCQLIRNYDVICLEDLQVENMMKNHKLARNIADVSWSEFMRQLTYKAKWFGKIIVKIDKFYPSSQLCHVCGYKNTEVKNLNVRKWNCPKCKTYHDRDVNAAINIRNEGLRILNIA

SEQ ID NO: 47229 - protein, 639 aa, Okeania sp.
MVEKAYKFRFYPTPEQESLLRRTLGCVRLIYNKALAARTQAWYEHQERVSYKQTSAMLTSWKKQEDLDFLTEVSSVPLQQGLRHLQAAFTNFFGGRAKYPNFKKKRNGGSAEFTKAAFRWKDGQVYLAKCAEPLPIRWSRQLPQNCVPSTITVKLEPSGRWSVSLRVDDTRDLKLKPVKKQVGIDLGITSLLTTSDGKKVANPKNLQRLHKKLRLAQKSLDRKPDKKSNNYHKARLKVAKIHSKIKDSRLDYTHKLTTQLIRENQTIVVEDLAVKNMVKNHKLARAISDANWAELVRQLVYKAEWYGRELIKIDRYFPSSKRCSNCGHVVEKLPLKIREWDCPECGSHHDRDINASVNILAAGLAVSVCGATVRPEESKSRKAGAMKQKVSNSNVKESRAVPSGQRREDVNEYQCQDNINIYDSSECNLLATQAAMGRNLQVIQLQEKLNSAILVKLQEDDYQGWLKYTDIDKIQPAKTPFKPHIFGETEIREKLPEIIAFTYKAMSIPNYYLWGGTVGPNYDCSGLIQAAFVSVGIWLPRDAYQQEAFCQNISLDKYQLNNQLIVGDLVFFGTGEEADHVGLYLGEGRYIHSSGKSQGRNGIGIDVLSEVGDEVSQRYYQQFRSAARVVRTYIPHDKT

SEQ ID NO: 47230 - protein, 391 aa, unknown
  TnpB Polypeptide
MKQKRAYTYRFYPTDEQRKILAQTFGCARFVYNWGLRLRTDAYYKEQRRLYYSDTSTMLTELKKQDDRAWLNDVSSVPTQQALRHLDKAFRNFFEGNAKYPAFKKKRNQQSAEYTTSAFKWNNGTLTLAKMTEPLAIVWSRPLPKDSKPSTVTVSKDAADRYFVSILVEDTIKQLDPVEQTVGADLGLKDFVILSTGETVGNPKFFTKDEKKLAKAQRRHSKKQKRSKNRAKAAKKVARIHARIADRRRDFLHKLSTRLIRENQTICVETLAVKNMVKNHSLAKAISDVGWSEFVSRLEYKAEWYGRNLVKIDKWYPSSKRCFDCGHILDSLSLDIRQWSCPECGVVHDRDANAARNIHAVGLTVLEACGEAVRPGAVKAKPGKPLRSRKP

SEQ ID NO: 47231 - protein, 293 aa, Moorea sp.
MIILEFKAKGKRCQYQAIDEAIRTVQFIRNSCLRYWMDNKGVNKFDLNKYSAVLAKNFTFANELNSTARQSSAERAWSSIARFFDNCNKKVPGNKGFPKFQKHCRSVEYKQSGWKLSPDKKAITFTDKKGIGRLKLKGTWDLWRFDKKQIKRVRVVRRADGYYVQFCVSVDIKEELELTGTVVGLDVGLKDFYTDSTGQSEPNPRFYRTGEKRLKFYQRRVSRKRKGSANRRKAINRLGRTHLKISRQRVGEACAKRIEHAKRLARCVIRSNDLVAYVRVACRKARIEGKKYG

SEQ ID NO: 47232 - protein, 286 aa, Chloroflexia sp.
VVDFLHQKFKEGIKCIVHREVKGKIGKCTLSKTPTGKYFVSILSEEQYQPKEKTGAVCGIDLGLKDFAITSDGIKFKNNKYTKQYERELAKAQRHLSRKQKDSSSFEKQKRKVAKIHEKISNTRQDVLHKVSHQLVSDYDIIALEDLNVKGIIRNRKLSKHIADASWGTFVRFLEYKADWNDKQIVKINRFYPSSKVCCECGWINQDLNLSIREWTCKNGHVLDRDLNAAKNILKEGLKTLNSAGTVENTGGDSNKTLATKHKSVKPEAHLSLANGQFTMIDNYKF

SEQ ID NO: 47233 - protein, 390 aa, unknown
  TnpB Polypeptide
MFQRAYNIRLYPSRQQAVLLGKTFGCCRKVYNCMLDARLKSYEATGTQCRTKPTDYYAEFPFLKEVDSNALTGEVLNLNAAFKNFFKRKADGVGLPKFKAKHRDRDSYTSYRTKENIRIENGRLRLPKIGFVKFKDYKNIDWNGKDIKHATVSRSRSGKFYASIMVEEEAPKTLSKSDYAVGIDIGIKDFCVTSDGEAVANPRYMKQAEDRLAVLQKAFSKKNGKSVRREALRKRIARLHEHIASQRKDFLHKLSSRLIRENQTIAVEDLDVRQVAEGDLAKSEHDTGWGMFLNMLNYKAEWYGRTIVRVGRWFPSSQICHCCGFRNEVVKNLSVREWKCPQCGTSHNRDLNAAINILDEGKRILAAGTAVQGAGAPTGLTRSVQLSSCA

SEQ ID NO: 47234 - protein, 377 aa, unknown
  TnpB Polypeptide
MRKTYKYRLLGNKTTLSKADEWLLLCQRLYNIALAQRIYIYRYTGQTISCYDQCKQLPELKETFPEYQSVVAQVLQDVIIRVDKAYKAFFRRVKTARGKAGFPRFKSRDRYHSFTLTQNGWKLDGRYLTIRNVGRFKLRLSRPIEGNIKTVTISREATGHWYVCFSCDNVPERKLAPSGETIGIDVGIKSFCVDSDGHREFNPAYFRQSEKHLRVRQRVLCRRVKNSNGRKDARILVAKAFEKVSNQRNDFLHKIANHYITNYGVIYIEDLNISGMVKNRHLAKSIIDASWKKFFGMLAYKAEETGRQLIKVPRFEPTSKTCSECGAINQELTMNDRQWVCKSCDASHDRDYNAAKNIRRVGQTLQEQTYGTGQSVS

SEQ ID NO: 47235 - protein, 314 aa, Planomonospora sp.
VESSALLTAWKRDPGLEFLSEVSSVPLQQALRHLQAAFANFFAKRAKYPTFKSRKKSRASAEYTRSAFRWRDGTLTLAKMDAPLDIVWSRPLPEGAQPSTVTVSKDAAGRWFVSLLVEETIRPFDPVDACVGVDAGITSLLTLSTGEKITNPRHERADRRRLAKAQRNLSRTAKGSNNRAKARLKVARMYARITDRRRDFLHKLTTRLVRENQTVVIEDLTVRNLVKNHALARAVSDASWRELRSMLEYKTAWYGRELLVVDRWFPSSKLCSTCGALRAAMPLGVRIWECACGAVHDRDVNAARNILAAGLAER

SEQ ID NO: 47236 - protein, 407 aa, unknown
  TnpB Polypeptide
MSDLTKTIKLRINVTPEQESLFLQTTEQYRQACNFVSQYIFDNAFDLAYLSLNRALYAEIRSRFGLKSQMAQSSIKTTIAKYKTVKQQLFQKPYRYKDENGDWKCINRTLEWLWKPVFFGRPQADLVRDRDYSFVDSGKTLSINTLGGRVKCAFFGEHFAEYLDGSYDLGTAKLVELNGLWYLHIPVTKAIEDFEKENVRHVVGIDRGLRFLAVSYDEQGKTNFVSGKKIATKRRKFQEVHRQLQSKGTKSAKRRLKAISGRENRWMSDVNHQISKTLVQKYGENTLFVLEDLTGVSFEESNLSRGAKQNHDLRSWSFYQLEQFLSYKAHENKSEVLKVSAKYTSQRCPKCGTIHKENRDHRKHFYSCQCGYKSNDDRVGAMNIQFLGTMWISGDNNPRYERITASE

SEQ ID NO: 47237 - protein, 408 aa, Scytonema sp.
VIIYEFKVKGKDKQYSAIDDAIRTSQFIQNKCLRYWMDEKGAGKYDLNKYCAVLAAEFPFADELNSMARQSAAERAWSAISRFYDNCKKKVKGKKGFPRFKKHSRCVEYKTSGWKLSSTRKAITFSDKKGIGTLKLKGTYDLNYYDIKQIKRVRLVRRADGYYAQFAVDIDLKVEAQPVGQVVGIDLGLKYFIADNIGNVEPSPQFYRKSEKQLNRANRKKSKKYDKAKKTANKPQSNNYHKARIRYARKHLGVSRQRKEYCKRLAYSVIQSNDLVAYEDLNVKGLVRNTQLAKSISDAGWSTFRSWLEYFGHKYGKVTVAVSPHNTSQNCSNCGKKVKKSLSTRTHVCPHCGYVADRDVNASINILRLGLSTVGHTGTYAWGDLPSWAVGATLLSNGESTNQESPLL

SEQ ID NO: 47238 - protein, 440 aa, Microcystis sp.
MYGVQEVLIHTDSEIRAVLEFVCEEANKLANCGIYYCRQMLFKAGRYIGKYDLDSQLKNNPHFRAMRSCCAQQLLHDVAESFSSYKGLLGLWNKGQLPNKPRPPKYRKKGGMAVVTYTARYVKLTEKGLRFSLGDQVKAWFGIDSFYLPMPSNLRFEDIKEFRIVPRNLSFYLECVYKQPDQEKVKPNNNVLGIDHGLGNWLTCVSNTGKSFIFDGKKVKSQNQWYNKRVAQIKTGKPPGYWDDELAKITERRNRQMRDATNKAARFIINWCLGNDISTVVFGGNQRQKDSIELGKKVNQEFVSIPTAKLKNRICQLCEKYGIKFVETEESYTSKASFLDGDSLPKFGEKPEGWQSSGKRIKRGLFKAFSGQLINADCNGAANIIKKVATQLGVSLDKVGRASLTVPQRYKLDSLSKIYRNRIEARFQPASIHRLESPSF

SEQ ID NO: 47239 - protein, 398 aa, Moraxella sp.
MTIIRGHIIRLDPTNKQATHFSKACGVARLAYNWALGQWKKQYEQDKNYRDDCQAKGITIDENRLNKPSQGKLRRQLNAIKREKYPFMLEVTKCSPQLAIMQLGDAFKRFFKGESGYPTFRKKGVNDRFSLSNDQFKLKLKKDKPFIQIPNLGLVKMRENLRFDGKILCAKVFTKGGQWFVSIAVELDNNTQVRQLKTNQTLKTLKTGNAVGIDLGITDLATLSTGEKIQAPKPLKNKLKKLQRLSKQLSRKQKGSNNREKAKTKLSRLHYQISCIRKDFLHKLSTNLVKKFDVICLENLNIKGMVKNRKLSRAINDLGFYELKRQLIYKANQWGKTLKELDRFYPSSKTCSCCGVKLDELPLSVRNWTCPNCNTNHDRDINASINILNKADKILNLS

SEQ ID NO: 47240 - protein, 345 aa, unknown
  TnpB Polypeptide
MKKLRAFKFQLRTNSIQQSKMARFSGCGRFVYNKALAEQIERKDRNERVIEIDYASLCRSLTQWRHAEETAFLAEAPTHPLQQSLKDLGRAFTNFFAGRAKFPRFKKKGMDNSFRYPDPKQIKFDEINSRIFLPKLGWVRYRKSREISGTIKQVTVSQAGDAWFVSIQTEQEIAAQVPFTGSAVGIDLGVAIFATLSDGTTYASEFDYRNYLRRIAREQRRLASKQKFGKNWRKQVTKIQQLYKRVRNSRLDFQHKTSTSICKKHATVIVEDLNVKGMSSSAAGTLENPGKNVKAKSAGIVGRVSPIFHALHVVTQRMQIVMRREIFLRRGSPCKLVEKRQWAFH

SEQ ID NO: 47241 - protein, 361 aa, Chloroflexi sp.
MGDDSSVRRAYRYRIYPTARQRLAMEAQLRFACELYNAALEQRRDAWRRGRHTVTLFEQFRDLTDVRAAGIGPVAMNCTAMRDPLRRLDRAFEAFFRRLEAGVKPGYPRFRSSRRYDSLTWADGWAVRDCRELPATAVARTVTVRSVAGRWYACFSLLLPPRPRVSAGPRAAVGIDLGVQHFLTLSTGDHVAGPRAYRASVRRLRVIQRRLSRQKKGSRRQQTVGLLLARKHDRIRNLRRDHAHKLSHRLVADFALIAVEDLNFRGLASGFLAKHVSDQGWAAFLTVLKYKAAEAGTRVVRVAPAGTSQVCSPRARSRPAARAHGGFRRARARSRVDSWLARGDSGPGFQRGCSAVRPAPH

SEQ ID NO: 47242 - protein, 404 aa, unknown
  TnpB Polypeptide
MLTATKIRIYPNSLQEESLTKAFGCARWLWNNSLAETQKVYQETGKGLGQYELNARLPKLKEKFPWLAETHSQVLQYVSLNTSRAFINFFERRAKYPKFKSKKSKQSIQYPQGVKIIKDRMYLPKIGLVKAVIHREIVGKIKTVTVSRVPSGKYFASILTDNGIPIPSVSFEGKVIGIDVGLTHIVITSDRSKFDNPKFLIRAEKNLKRKQQKLSRKMKGSKSRNKARIIVAKAHEKVANCRKDYLHKISRRLVDENQVIAVEDLHVKGMMKNHKLAKAISDVGWGTLVEFLRYKTEREGKGFIKVNRFFPSSKACSICLHVQGSMPLNIRSWRCDKCGTLHDRDINAAKNIRNEAQRFIAAGIAVTAGGGTVSQGRGRKSSVLASACETGNPMLKRRKLLHIG

SEQ ID NO: 47243 - protein, 395 aa, unknown
  TnpB Polypeptide
MKIKRTYKYRIYPNREQKSILEEWLEICRILYNDCLTERKDAWGKSRKSINYYDQANQLKEIKTFDGNIKEVHSQVIQNVLKRIDKAFKNFFRRVKGKEKAGYPRYKGSDRYGSFTYPQGGFKLGDRKLILSKIGSINIKKHRDIPKDAKIKTCTIERDLDRWYACFTVEVEIEEPNYNEEITNPIGIDLGINHLITLSNGDMEDNPRYLVKSQRKLSRKQRKLSKSKRGSGNRTKRRFETAKTHRKVREQRTDLSHKISRGLVDTYDLIVFEDLNIRGMLKNHHLAKSISDVSWSQLTNFVSYKAEEAGRRVEFVNPKNTSQECSNCGGIVKKSLAQRVHRCPYCGLVMDRDQNAAINILKRGLKRVGQELSEFKPEDFSKRRVIQEAPSVRVG

SEQ ID NO: 47244 - protein, 422 aa, Cyanobacteria sp.
MLVLEYKIRAKQKQLSAIDEAIRTMQFVRNKCLRYWEDNPGTSKYDLNKLCRLLSHQFSWANKLNSQARQAAAETGAKVRTWAAINRFYKNCRHPIQGKKGYPKYQKNNRSVEYKNTGWKLDPNTKKHITFTDKNGIGRVKLVGSRDICFYSPDQIKRVRIVRRADGYYCQFCIDIEVKEDLQPTKRVVGLDLGLAHFFTDSNGEKVENPRFLKKGEQELKRFQRQVSRKEKGSSNRKKARKRLARKHLSISRQRVEHAKRVARCVCQSNDLIAYEDRRPSPNSIRAGKRRRIPRLQVRNLVKNHNLAKSISDVAWYQFRVWLEYFAFKFGKVTVAVPPHYTSQECSNCGRIVKKGLSTRTHTCQCGANLCRDENAAINILKKGLSTAGHVGTHAWGELASTLVESVLSEQADSVNQESHAL

SEQ ID NO: 47245 - protein, 202 aa, Actinomadura sp.
VPGLTPGEAERLKRLLRRLARARRGSNRRARVKAAIARLKARETDRRKDWVEKTSTDLARRFDVIAVEDLNVRGMTRSAKGTIDAPGANVRQKAGLNRGILANGWGQLVTRLEHKAPGRVVKVDPRYTSQTCNVCGHRARDNRESQAVFRCVACGHRANADVNAARNIKDTAVGRTVAVPRHQVWGRTSRRISSGPRRTSPT

SEQ ID NO: 47246 - protein, 373 aa, Gottschalkia sp.
MILAKKIRIIPNIEQEQQLWKSVGTARFIYNWTLAKQEENYKNGGKFINDGDLRKELTILKKAEFNWLNEVSNNIAKQAVKDACNAYKIFFKRLADKPKFKSRRKSKPSFYNDNIKLKVKSKKVLIEKVGWVKTSEQVPMNVKYTNPRVSFDGKYWYLSVGIEKENPVVELTNEIIGIDVGIENLAVCSNRMTFKNINKTRLVKKLEKRLRRLQRKVSKKYEMNKEGRKFVKTSNIIKLEKQIRLLYRKLSNIRNNHLHQATTKIVKTKPSRVVMETLNVKGMMKNKHLSKAIGSQGLYKFKRQLQYKCEFYGIEFIEADRFYPSSKTCSKCGHIKAKLLLSERTYICEECGVAINRDFNASINLSRYLSITT

SEQ ID NO: 47247 - protein, 402 aa, Escherichia sp.
VKRLQAFKFQLRPGGQQEREMRRFAGACRFVFNRALALQNENHEAGNKYIPYGKMASWLVEWKNATETQWLKDSPSQPLQQSLKGLERAYKNFFQKRAAFPRFKKRGQNDAFRYPQGVKLDQENSRIFLPKLGWMRYRNSRQVTGVVKNVTVSQSCGKWYISIQTEREVSTPVHPSASMIGLDAGVAKLATLSDGTVFEPVNSFQKNQKTLARLQRQLSRKVKFSNNWQKQKRKIQRLHSCIANIRRDYLHKVTTTVSKNHAMIVIEDLKVSNMSKSAAGTVSLPGRNVRAKSGLNRSILDQGWYEIRRQLAYKQLWRGGQVLAVPPAYTSQRCVCCGHTAKENRLSQSKFRCQVCGYTANADVNGARNILAAGHAVLACGEMVQSGRSLKQEPTEMIQATA

SEQ ID NO: 47248 - protein, 387 aa, Syntrophaceae sp.
MNNMKLIRTIKLKLDIPAEAIKPTVEAYTKAFNFVCQTGWNDSDSNGVSLHNKTYSATREYLPSQLAVSARMKATETIKTVKARIKKKQKATCPQAKQSSIRYDARSYNVWFDRNELSLLTIEGRIRISVSVPEYFKQYLTWKRCSAELFIRKNKVFLNIVFSKDISDPESSGKVVGIDRGIKKIAVTSKNQFFGGGQIKKVSKRYEKIRSALQSRGSKSAKRHLQKISKKENRFRTDANHVIAKRIVESLDSGDIIVLEKLTGIRQNVRLRKKQRKDLHKWNFFQFEQFLAYKANARGIGIEHVDARYTSQKCSAPSCGYISRSNRQSQSIFKCKHCGFSLNADLNASRNIKQNYLDAICSPGSGSVNNRIVGGRLQPTYLQATGL

SEQ ID NO: 47249 - protein, 399 aa, Kouleothrix sp.
MSTPLSIRTVCCKIAVDALADAALRQTQTAFNAAASYCARVAWEQGITNKNKLHYLVYGESRVTYGLGAQLACCARDKAAEAVRAVRTAPERRDRDTDQIIPKTCPTFATDSSIRYDARTYRLLSLDRVSLNTLSGRVVGQLVLGDFQRRYLYDTSWKIGGAELLRRVDVWYLCITQSKVAPAPDEPVGYLGVDLGLVNLAADSSGQTYSGQQVQAVRKRRYDHRRRLQLANTRRARWRLRQSARREHRFQKDVNHCISKALVAKAQTERKALALETLDGIRERVTVRRSQRRVRHSWAFRQLRTFISYKAQLSGVRVVYVDPCNTSRRCANCGFCDERNRPDQAHFRCLSCGHTAAADTNAAVNIARVAAVNQPIVSLLSHSIERADTSRAVSTAAVC

SEQ ID NO: 47250 - protein, 366 aa, Ruminococcus sp.
MKQNKAYKFRIYPNEEQKIIFAKTFGCTRFIYNKMLSDKIDYYQQTKQKLNNTPAQYKSEFEWLKEVDSLALANAQMNLQKAFTNFFTNPKSGFPKFKSKHKNRKSYTTNNQKNTVTLKNSYLKLPKLVDLVKVKQHRQIPKDHKIKSVTISQTPSGKYYASILCEYENQIQTAEPKTFLGLDFSMKELYVASDNTSAEYPRYFRKSQEKLAREHRKLSKCVTGSQKRNKQRLKVAKLHEKVANQRKDFLHKLSRQIANTYDCVCIEDLDMKAMSQALNFGKSVADNGWGMFTTFLKYKLEDLGKQLIKIDKWFPSSKTCSKCGNVKENLSLSDRVYHCNYCGITINRDYNASMNIKNQGMKLVIS

SEQ ID NO: 47251 - protein, 405 aa, Nocardiopsis sp.
MKVVVRVKLLPSPVQARALAATLHACNRAANHASHIAQNTGARRKYALQEKVYHQLKAEFGLSAQPAVRVIGKVADAYTTRAANLQAGNLGRKGSVKRKRVEATPIAFRADAAQPFDDQCVSWRMDARTVSIWTVSGRLKNLGFTSSPDQLKMLAEHRQGESALICQDRAWFLAAVCEVPEQPLNEEPEGFIGVDLGIVEIATTSTGQRHGGRQLNRYRRRQMRLRAKLQAKGTKSAKRVLKRQRRKESRRARDVNHRISKSIVGQAERTGHGIALEDLKGIRGRVRQAHPSPATTLNGRLRRSPAKKQRAALHAWSFAQLRDFITYKARRAGVPLVVVEAAYTSQTCSECDHTSRGNRPSRARFVCRGCGVILHADVNASRNLAHRGEAVWIAGRPSTAPAPSG

SEQ ID NO: 47252 - protein, 331 aa, unknown
  TnpB Polypeptide
MRLVDRHIIKDNRFEDICLKSGLLYNYVLYLVRQGIFNKEYLKEYDLSTKLGRENQFDFRQLPASVSQQVVGQVFKSVNSWIKLKSDFDRNPDKYNNHRPHLPKYKKGKKQNMVVFTTFSCRVKDDGYIHFVKNVIEPIKTNVKKDELKQVRIVPQATCYVVEVIYERRETDLNLDKDNFLSIDLGLNNLCSCISNVGIKPFIINGKVIKSLNRWYNKKKARLMSYVGDKGTSRRIRRISLYRNCWIDDKMHKISKYIVNFCVSNNIGRIIIGLNKEWKQEINIGRRNNQHFVSIPHSKLIDKIMYKAKLLGIEVVTHEESYTSKIDHLAF

SEQ ID NO: 47253 - protein, 380 aa, unknown
  TnpB Polypeptide
MNKAIKYRIYPTTEQCVLFAKTFGCCRKVYNLMLSDKIDSYKATGKFISVTPAKYKKDYPYLSEVDSLALANKQMDLQSAFRNCFSKSRKKKSGFPKFKSAKHSRKSYTTNNQKGTVAIIGNGIRLPKVGIVKAVIHRQPNVDWVIKAATVSQESDGKYYISVLFEFETPECDYTADTTNAIGLDYASDGLYTDHNGNKGTDHKFYRESHAKLAKEQRRLSRKVGNKKGSAKSSNYLKQLQKVNKIHRHIANQRLDNLHKISTEIANQYDVVCVESLNMRSMSNKGFGNGKATLDNGYGLFLNMLEYKLSDRGKYLVKVDKWFPSSQICHNCGMLHPEMKNLSIRAMDCDCGYHIDRDQNAALNILQEGLRLLDESFKVA

SEQ ID NO: 47254 - protein, 299 aa, Photorhabdus sp.
VSLNPRKDLKPLLAVAKKSRKYAWLKAYDAIALQQAVINLNTAFDNFFNSKLRAQFPTFKRKHGCQSSYHCVGVKVLEGAVKIPKLSPIKARIHREIKGEVKSIMLSRTATGKYFAAILCDDGKNAPEKPGVITRVTGCDMGLSHYLIQLTGEKVNNPRHLINATRNLRRKQKSLSRKQKGSANRGKARLRLAAVHERIAHARADFQHRLSRTRVDENQAVIVETLKSANMMKNRHLARAIGDAGWHGFLMKRQHFTALWILLEPRYSALFNTDPISRFSLSQFAFFAGLPHCECEYLW

SEQ ID NO: 47255 - protein, 419 aa, unknown
  TnpB Polypeptide
MPITRRTHVCHITNHAQVAGALDRHGWSASKLWNVANYYARQQWDETGEIPDENELKHELKTHPEYNGLHSQSSQKVLEELSQAYSSWFGSDDGRDNPPGYRKRNYYDSDGNRVHEEHPRSTVTWKQKGIRHDTKYNRLRLSKGKTHKDGRDFILCEYDTPPEVTVQTVQQVRAVWCSYKQRWELHVVCEEEIAAESPGENTAGVDLGICNPAAVAFPDDALLYPGNTLREDKHYFQREEYQTEGNHGPSQTAEWAREKLSRRKDHFLHALSKDIVERCVDHEVGTLVVGDPSGVDEDNWGRHGNKRLDNWAYKRVIALIEYKARERGIEVEIPDERGTSSSCSVCGHEDDESRVERGLWKCDRCGVVAHGDVNGADNIRQKTLPVTPPLGDSGNGCLAQPRVIQFSRTRGFQPRATAE

SEQ ID NO: 47256 - protein, 468 aa, Syntrophothermus sp.
VQQTVKQKGLSLNKKKWSEIVKTTEAYARQKDAFLVQFEHVKYLHYLGEKRELRDELVKAGLPNRFGLQARQWKLALDDALHTLERQWEAAIAEVKEHLYRHKGMTDEEKHYAFWLLYRHKKHGRDWKRIQAVFTGEDVASKKINLDAKGRAKVRKYLKRTFRHVLGKKPRVKRVRSFVVDQQMYRVFTVGNRQYIAVATLVPGERVIIPLAGVHAIEGNLRVILLPDEQAVEIHLTREPKAYPPGEEEVGIDLGVTEVFTDDAGKKYRPEYGKALREMSDRILDKSQKRGKLWTLYRKFLKQDPPKARRILRHNLGLAKQTKRNKRYRARCENEINRAFNEFYKERRPKIIAYEDLAHLRGKAKSKGLTRKVSIWQRSIMKKRLEYKNRVHSVTDPGPQNAAYSSQECPKCHWVDTQNRSGDFFRCRKCEFTADADQVSAMNLKSRLHDEEQAARRRDNPVHALQRG

SEQ ID NO: 47257 - protein, 418 aa, unknown
  TnpB Polypeptide
MIAPSILRLSGSCGKHLHHGKESEKKMARKAFKYRLYPTKQQEQKLFWTLARCRELYNAALSERKDAYRMAGKSISYYEQKRDLPEIKKEIREEYQDIHSQVLQDVLLRLKKAFDTFFRRVANGEEPGYPRFQGRNRYDSFTYPQGGYSLTHDNRVSLSKIGSIKIKLHREIEGTIKTCTIKHEAGQWYVIFSCEVEPEPLPVSNDTVGIDLGLLHFATLSTGETIENPRYFRKGEKKLAMLQQALARKKRGSHRRKKAVKQVGKAHRKIRNQRADFLHKESRTLVNAYGTIVFEEVQPANMSRRAKPKQDENGTYLPNGGRAKSGLNKSIVDAGWGMFQRYCTYKAANADRKVLFVNPRHTSQVCSGCGTVKKKELSERWHSCECGTELDRDHNAAMNILRLGRSQRGATCVEAPSF

SEQ ID NO: 47258 - protein, 421 aa, Fischerella sp.
VYNFVGGDETVLSLTYEYKAMPTSEQVQQIEHTLTVCRKVWNFALRERKDWLNSRKCSINACSITSEYITPADAPYPNYYEQANSLTRAKAEFPELKSVNAQVLQQVLRKLETAFVDMTRKKMGFPRFKNKYRMRSFVYPQLGKGQVLKGNQVKLPQLGWMEYVKSREIPDGFKVKQVRVVRKASGYFLMITLECDVSVPDPVASGHPRGIDLGLDKFAATSDGELIERPRFLNTLHRKLKLLQRKLKNKQKGSNNRHKLSRKIARLHQRISDTRKDWHFKLAYKLCDGAGMVFVEDIDFRAWAKGMLGKHTLDAGFGQFVSILKWVCWKRGVYFGKVDKDYTSQVCPQCDTHTGKKELKDRIHSCHSCGYTTHRDVASAQVIRNRGISGLGRRLEENACGDGLTGTLNSLVKSRKSRNKG

SEQ ID NO: 47259 - protein, 189 aa, Fischerella sp.
VARVYEQVSNVRQDYLHKLSRKIVDNNQVVVVENLNVKGMVPFGNAKGERNHKLAKAISDTGWGTFVNFLSYKLERSGGKLVEINRWFPSSKLCSNCHYQIAELPLDVRTWICPSCGTHHDRDGNAAVNIRTEGIRMLALSAAEMLSSSGTGEANANGEDVRPIRGRKSKMRQSSVKLEAHTVPSGQCG

SEQ ID NO: 47260 - protein, 372 aa, unknown
  TnpB Polypeptide
MLLTLKVKIQPTEEQRVKLLSTMKTFNAACDTISREAYTSNTFNQYKLHRRIYHRVREQYKLPAQLAIRAIGKVMESYKVDRRHLHVFDPLGAVVYDQRIMSFKGLDKVSLTTAWGRETIPLMVGDYAKLGQRALRGQADLVYVRKEFYLCLVFEQPEEPPFTPEDYLGVDLGVVKLVTTSDGVSYSGEEVDAVREHYTEVKAELQRVGSKSSKRKLRRLSGREALFKRYTNHVISKGFVAVAEGTKRAIALEDLRGIRSRTTVRRGQRERLGKWDFNQLRAFVEYKAKLRGVPVQLIDPRDTSRRCSRCGHVEKGNRVSQSEFRCRAYGFGSNADLNAAVNVRWRADVNQPIVVCQRVLEFELQAHDFSRG

SEQ ID NO: 47261 - protein, 372 aa, unknown; identical to SEQ ID NO: 47260
  TnpB Polypeptide

SEQ ID NO: 47262 - protein, 128 aa, Bacillus sp.
MSRRFKKGVKIQSAGYEKAKIEHLRLSRKITNIRNNHIHQATATLVKTKPMRIVVEDLPISNLLKNKKLSKAFSFQKLNFFFQCLSYKCEKYGIAYVKADKWFASSKICSCCGVKYTTIQFNQKDSGV

SEQ ID NO: 47263 - protein, 195 aa, Gammaproteobacteria sp.
MKRTWISLNLKTVRNPIFSSRICLRLLEFHWTEDVPNEAVGKTVIVTYTNGQWKACVTVAQTLSIVALDPGIRTFQTAFSFDSAVSYGDGFVNDQLVPLMLELDALLSARDKLHREDKSKQWVKDRLKNLNRRIAKVRARQQNLVDDLHRRVAYDLVSNYEVILLPTFETKKMVQKSHETRKRFLRRKTVRGKRR

SEQ ID NO: 47264 - protein, 896 aa, unknown
  TnpB Polypeptide
MNLLHLLPSRKRQREDSSDEDGSVDDHADQLRQRDDSSDDEGSVEDRADQLEKRPDLEVSVGGTMYLPNGMQILNDDESSNGSSDLGDSGQRYFGNADDVDQDDETDEEVAPTQMESSEETEDQEDHVAPMLLDDGSQQAPEPDDNGGNGDEQEQEQNENGDGIEFEERNDVDGIFEGFATGSVLVVAFAHARHAFFSYDVRADDGALRRKVKGTAEYKRFIQGKEGYVFKEFSKKQLADAKAFAQNPRAALDTRNDKSEQTKQRKQQKTNETEARRNQESRPSNEDESFWKDEYKDVYKAIPLPEEDYDDDVVEKVGELFDNEKCDARALEPKKNMFKKDITDNHKTFAFRVVNKFTTKDQREALRSLSRVHRQVYNATVAYLKRRNRQIRARPPDDEEQNNEETNDEETEEDGDEVEPETDEEQNDADFFAVLRNKKRVRRKVFGLENDDITWGMSNCAWHIPTRTLSLAEMTDCIRDSWKSVPYAVKEDAVNQALMAYETNFAKRKKQRERNEEVKPFTVKFRKYGQNFVINLPKRKVLLDFVQTEKKNFKKPKNKPKKQKKQKNQNKKEKKKKKKKKKRKAKNKRTRDAPVGEHKNDKVHFFARFSAHGVRLCSSPKVANQVLHNESEDVVQTQIRYNQKTRQYFINAVVKCDRTKPDKSGKKIVAAVDLGINPLYTVYTSEGKTLTEDKDDRKMIFKMKDDIEKLETRIRKREYKPTNGRTKKQYAGTTKRLKLKLERMRVKLKNFRTMWQHKEAKKIVDAGDVIIWNSLRMQQILKDSKSEYKKLNPTARRNASVAAPGMLTEKMMWQVRKTEGKKFVTGEGEKGTSKTCSKCGWWKPGLRGDKTYVCENPECLYEGNRDVLGARNNLLEKLQQIWGGFVGWFQDHVLQN

SEQ ID NO: 47265 - protein, 458 aa, Rhizobium sp.
LSALKHSLSELHAKTAASASIGRRIHALRVALHQHKRRRAILEHRRVEAQRQAAQPALCFGSRKFFRAQFALQENGYSELSDWRKDWASKRSAQMTLDGNSSRESGNQFARLRKRAGGKFDLELRLPKQLAQRATRSFAFAGSTISCVDFSGLSFNHGNVVIQRAIDAGRPVTVKFLRDEKSWKVYVSVDDRSEPKAADFSGGSLGVDLNAGHVSVSVVDASGNPVEAFNIPCVTYGKPADQAKDTIRKAAAEVAAIAKRFGVSVVSERLDFSKKKTALKDSNDARYARMLSSFAYSSFDAALASACLRRGVGHRQVNPAYTSIIGRVKFVRRYGLSVHDAASVTIARRAMGCSERLPRSNDGTVTVPTNGSVHVTLDLPVRNGSRHVWTEWNGLNKEYHKKALAAQGSSGRKPRPGRRPKTSTGRSGAPLHGPSAEVGRSRRMPLQSRDPGVGRVPG

SEQ ID NO: 47266 - protein, 397 aa, Methylorubrum sp.
VGSAGRILRFYGNSVEQFGPKRCVNTGSGPNPETASTVIVAAPSSPTQTITVKIRLRDKRAASLRRQARAVNVVWNYVNEVQKKAAQAQRKWLTWVDLKKLTAGSSKLLNLHSHTIQQVCIAYDRSRSAQKRPWLRWRGRKSLGWVPFSTGHVLFDGECFVFHGGRYEAMHLRDVLKPGMRFGAGSFNADAKGHWYINLPVEVECAEPKVEDAVGIDLGLKTLATLSTGDKIEMPRFYRESEEALAKAQRARKTKRARAIHAKARNRRKDFLHKASKALCEKHGTIVVGDVSPSKLAKTTMAKSVYDVGWSGFREMLRYKAITHGRRYAEVSEAYSSQVCSSCGSLPPSRPRGIADLSKRMWICDDCGTEHDRDVNGAINICRAGLSTLVAGAPYVG

SEQ ID NO: 47267 - protein, 600 aa, Rhizobium sp.
MSRAERLLLAQLKAGRTWTGDLKVSFYKPLGLSATHLDMAYRQLMAKLSSVAELAKDNLKDAVAKIASKKVDIKRKEKAREKARKNLIKLNGELRSLMEKATERRKLLINASARYRDDCLFALKVRLEELHAKRAAVATARTEIRDLSFALHQHKRRLAILERRAERTKKHIDDPTLCFGSKKLFRAQFNLTGNGYDSHAAWLGDWRSHRSAQFTLDGNSSKEGGNQFARLRKRADGRYDLELRLPTALAHLATRIEKHAGSLIPCVDLRGLSFNHGNDVIDDAIVRGQPVTVKFLRDDKSWKVLVSVDHKQASKTPDFAGGALGVDLNAGHVSAALVDASGNPIAVYNFPCVTYGKSSAKAQDAIRKVAAEIAVLAKQFDVPVVAEFLDFSEKKRALKDAKNARYARMLSSFAYSAFGTALSSACLRQGVALRRVNPAYTSIIGRVKFARRYGLSVHEAASATIARRAMGYSEKLPRSSTGTVKVPTNGSDHVTLDLPVRKDASEQAPKSRHVWSEWNRLNKEYHQKALAALGSSRRKLRPKRGSPQTTGRSTLPGGSGRNLVGGAENRSMVSRNTRDVPADSRFSHAARGGGVPGINS

SEQ ID NO: 47268 - protein, 383 aa, Enterococcus sp.
VNFVERLKAYKFRIYPTEEQEIFFAKTFGCVRKVYNLMLNDRKKAYEEVKNAPSKKMIFPTPAKYKEEFPFLKEVDSLALANAQLNLDKAYKNFFRDKSVGFPRFKSKKNPVQSYTTNNQNGTVALIDNKFIKVPKLKSLIRIKLHRQPKGRIKSATISRHASGKYYISLLCKEEINELPKNNSAIGIDLGITDFAILSDGQKIDNNRFTSKMEKKLKREQRKLSKRALLAKNKGIPLSEAKNYQKQKRKVARLHEKVMNQRTDFLNKLSTEIIKNHDIICIEDLNVKGMLRNHKLARSISDVSWSSFVAKLQYKADWYGREIIKVDTWFPSSQICSECGHKDGKKSLDIREWTCPICHTHHDRDINASINILTEGLRIQTLA

SEQ ID NO: 47269 - protein, 372 aa, Clostridioides sp.
VIAVKKAYKFRLYPNKKQQELINKTFGCCRFVYNKYLAKRIDVYKNNKETFTYKQCSSDLTNLKKELKWLKEPDKFSLQNALKDLDNAYKKFFKEKAGFPKFKSKKINRFSYKTNFTNGNIMYCGQHIKLPKLGMVKVRDKQVPQGRILNATISKEPSGRYYVSLCCTDVDIEAFENTNNHIGLDLGIKEFCISSCGEFIENPKYLKKSLNKLAKLQRELSRKTIGSLNRNKARLKVARLQEHIANQRNDFLQKLSTKLIKENDIICIEDLQVKNMIRNRKLSRLISDVSWSEFIRQLEYKANWHGRQIVKVGKFFASSQICNKCGYKNEEVKDLNIREWICPSCNETHDRDINASINILKEGLRLITIQNK

SEQ ID NO: 47270 - protein, 374 aa, unknown
  TnpB Polypeptide
MRAYRTELAPTRAQTRLIRQYCGVARFAYNWYLDCAQAYYRETGAFLTGYSFSKVVNNSARPDWFTAAPSKAVKHAIMCAEQAFRRFFAHKGGFPQYKRKGMNHDSYYVIGSIHVQRHRIRLPKLGWVRLKEKGYIPCKGIPKSATVSIVNGRCYVSVLYDSEDAAPGPATGEPLGMDVGLKELAVLSDGTTFGNINKTRRVRKLEQRKRRVERSIARRRRANQGKDGEHGWHNYRKAIERKRRIEQRLTNIRAEHMRQVCNEIARRQPSSLTIEHLNVKGMMKNRHLAPALQKQGLATFLELIGHTCRKHGIALRQVSRWYPSSQLCHDCGYRNTHLTLRMRAWNCPECGARHDRDVNAALNLRDATECHTIE

SEQ ID NO: 47271 - protein, 389 aa, unknown
  TnpB Polypeptide
MASREKQYNVLKLRLYPTSEQAELFEKTFGCCRYLWNQMLADQQRFYLETGVHFIPTPAKYKKGAPFLKEVDNQALIQEHNQLSRAFRLFFQNPEAFGHPNFKRKKDDRDSFTACNHVFTSGPTIYTTRDGIRMTKAGMIRAVFPRRPQNGWKLKRVTVEKARTGRYYAYVLYESLVQSPEPVLPVPERTLGLKYSLRHFYVDDQGNRADPPRWLKQSQEKLVHLQRRLNRMQPGSKNYEEAVLKYRLLHEHIANQRRDFLHKESRRIANAWDAVCVRGDDLGAMTDTLIQAGSAVKEAGFGMFREMLCYKLARQGKAFIQVDRYLPTTRSCSACGLTRDALHARDYRRSGWVCPECGAVHDREVNAAKNIKARGLEQFFDLQGQNRSA

SEQ ID NO: 47272 - protein, 162 aa, Pseudothermotoga sp.
MLKRTKHQITDILHKITSNFLRICSQKGVGTIAIGDVTNIRERVEGNDNFNQKVHQWCFRKMVDMITYKAQLLGIEVKLASEEYTSQVCPVCGSKNHAVGRNYECKSCGFSYHRDGVGAINIWQRYLGKKSQVVAGLAPIRGVRFKPHLCGHGVSNAPWKAA

SEQ ID NO: 47273 - protein, 405 aa, Pseudothermotoga sp.
MSRYIVRTYKVPVPRELYPLCSELNRLAGRIYNKTMSLVKKVKSKKGFWLSPGATQKYILRSSSTINIHTHSKQAIVQQYFQALNSYFTAVKTNPQLKPPHKKKRFMPFIWKDTAIKLSPEGVLRLSMGSSQEPILIQTTLPAGTTIRQVRLVYEAEKYYLHLAIEVKNEHKKKQSVEVMSVDLGILRPITCFDGSEVISYHGGILNSLIRYRNKKLADFQRTLSKCKKGSKRYRKLLKAKQRMLKRTKHQITDILHKITSNFLKMCLQKGYGTIVIGDITNIRERVEGNDNFNQKVHQWCFRKMVDMITYKAQLLGIEVKLASEEYTSQVCPVCGSKNHAVGRNYECKSCGFRYHRDGVGAINIWQRYLGKKSQVVAGLAPVRGVRFKPHLCGHGVSNAPWKAA

SEQ ID NO: 47274 - protein, 401 aa, Glycomyces sp.
MGKRVVQVKLLPSPEQARALAATLRAVNEAANWTAAVSFAHGVPREYALRQYTYTELKARGLGSQVAQLVIKKTCHAYATIAGLVKSGRLQGKRAVKARSKPVVFRVDAAQAFDDRCLSWQHDARTVSIWTLGGRLRGIAFTGHPDQLQVLEQHRKGETDLVFRDGNWYLLATIEVADAEENTHPVDFLGVDMGIVNIATTSDGRNHAGTGVRRYRRRMAKVRAELQAKGTKSAKRKLKARARREARAVRDVNHRIAKQLVASAERTGRGIGMEDLAGIRDRVRLPAAQRGELNSWSFYQLQAFIAYKAKRAGVPVVVVDARDTSRRCPRCGHTANANRPSRDHFACVGCGLVGPADQVAAVNVRDRARMTWAVVNQPMVADTPQPAVGTSDKPPASAGGS

SEQ ID NO: 47275 - protein, 316 aa, unknown
  TnpB Polypeptide
VFAAFFDRVKAADRSGADNKPGYPRFKSYQRFSQVMFVAGDGAKWQPRGTGKWAYATFQAVGSVEVRQHRPVPGTVKALQLKREHRRWYVIVITETQPVPLPVTGRQVGVDLGVARFLTTSDGQVVANPRFLAASAEVIADLQRRKARARAGSGNRKRIRRALAKEWRKVRNRRRDFHHKTARALVSSCDAIALENLNTAGMTKRPAPKPDLENPGTFLPNQAAAKAGLNKSILDAGWAQFAGILAAKAAEAGRRVVLVNPTGTSIGCHRCGRRCIRPRQDTVTCPVHGQIDADLDGARNICTRAGLGSGQATTAA

SEQ ID NO: 47276 - protein, 322 aa, unknown
  TnpB Polypeptide
MSKIDCNNWKNKTLKVQFEWLKEVDKFALDNAIINMDSAYQKFFKEHTGYPKFKSKRDNRKSYKTNYTNRNIEASFEKNKIKLPKLKWVKAKIHRNFDGKIKSATISQVPSGKYFISILIETEYIPVSHIDGKVGIDLGIKDLLITSDGEKFDNIRTIQKYEDKLAKEQRKLSHKVKGSKNYQKQRIKVARIYEKIHNTRIDNLHKISHQLINENQVIVSENLAISNMVKNHNLAKSISDCGWYELTRQLTYKAEWNKRKYIKIDRYFASSQTCNVCGYVNKDTKNLSVREWICPKCGTKHDRDINAAINILNEGLRLLAVA

SEQ ID NO: 47277 - protein, 281 aa, unknown
  TnpB Polypeptide
MRDGVLRLAKTTRPLRFVWTWPDVDVGALDPTSVTVTKDPAGRWFVTLHADVPHPAPLPATGASAGVDVGLTYFAVLSTGEQIGHPKDWERYEQLLKRYQRRLSRCQKGSLNRAKARVRVAKTYARVTDARRDFLHKASTSLVQRFDMIAIEDLNLRGMVMNRPLARAISCSGWAEFRSMLEYKAERCGRTVAVVDRWYPSSKTCSTCGHLLASLSLGTRHWMCPRCGTLHDRDINAARNILAAGLAATACGGDVRRAGTTWPRPPVKQEPRPVREGVPVF

SEQ ID NO: 47278 - protein, 367 aa, Lachnospiraceae sp.
MLKAYKYRIYPNSEQRTQIAKTFGCCRFVYNQTLAYRKETYEKEKKSVSRTDCNNYCSRELKQAYDWLREVDKFALTNAVYNMDSAYQKFFKEHAGYPKFKSRHDSHKSYTTNFTNGNIAVDFEKGKIKLPKLKTVKAKLHREFKGEIKSATVSQASSGKYFVSVLVETEHVEMPYTEGNIGLDLGIKDLCITSNGEKYGNPKTIKKYEKKLAKLQRRLAHKEKGGSNYYKQKKRIALCHEKITNTRKDCLHKVSNEIISENQVIVSENLQIRNMVKNHHLAKSISDVSWYELTRQLEYKAAWNGRQYIKIDTFYASSQICSACGYQNADTKDLSVREWECPVCGAKHDRDINAARNILAEGLRQTA

SEQ ID NO: 47279 - protein, 517 aa, unknown
  TnpB Polypeptide
  misc_feature (66)..(93): Xaa can be any naturally occurring amino acid
LYRILVLDIPLNGETFECGEGDHVHCFVSAPPKLSITAIVKYLKGISGRKLFERFPEIRNQLWKGXXXXXXXXXXXXXXXXXXXXXXXXXXXXYYGGEEMLLSKKTSIKVSREYANLIGHMCYAASKFWNVCNYERQHYKETGIEQYPDWYYQKKTHKEDLWYKQLPSQTAQEVCKLLGKAWKSFYDLKRSGGIETPRPPRFKQESIPITYMQMGIVHERDMGRVRLSLPKALKKYMEETYQIHENFLYLENKIFRGMDQIKQLRIYPPEKGNCKIIVVYEVPDQEELPQNGHELSIDLGLHNLMTCYDSGNGKTFILGRKYLALERYFHKEIARVQAQWYGQQSGKGVKYLATSKYIRKLYKRKHDSVTDYLHKVTRYLTEYCREQGITCVVAGDIRNIRREKDLGHRTNQKFHSLPYNRIYIMLEYKLKRYGIRFIKQEESYTSQCSPLSPEVGKRYAEPSKRKERGLYRDGNRTYNADAVGAYNILRKYHSVSGVKKELSVTGLKTPEIIKVAV

SEQ ID NO: 47280 - protein, 381 aa, Micromonospora sp.
VKKFQPRPGFVVQAYRFALDPGAVQEKALRSHCGAARAAYNWAVSWVSASWWQRKAEASYGVPDDQLTEWRTWSLPTLRKAFNQAKHIDCRFADWWEENSKEAYSTGLANAAAAFDNYAKSKQGKRKGKRVGMPRRKSKHTARLACRFTTGTIRVEPDRRHVTLPRLGTSRTHESTRKLQRRIANGTARVLSATVRFERGRWFCSFQVEVSKKARTAARPGVVVGVDLGVKCLAVMADSAGEVQYVPNPAHYDGALRHLRRLARRVSRRQGPDRRTGCKPSRRWAIANAERNRVHHRVANLRQDGLHKLTTEITGEYATVVVEDLNVAGMLRNRRLARKIADAGFAEIRRQITYKSGWAGGETVVAKRWYPSSKPARTAAW

SEQ ID NO: 47281 - protein, 488 aa, unknown
  TnpB Polypeptide
MTSTFKIPKKFSFRTRLFVVMILMLLVAGLLILGTTSIQYESQRENYHLGRLDRKEIQIKRHIDYLVNKHDLLNGSDSLWKQYASDFEKINEIHNIQYSLFNIDGSPLFIYHSPLEIIANDYILNPILLNKIFNSEQGRYLEHYSSDIDKFHASYRLLKDRFQRPYAILFFPYFEDVSFSENELNAFLENLYQIYILLLFGVIFIAYFLSKFVTRSLETIRVKMGKMGLEKKNEKIYLKNATREIDSLVNSYNKMVDDLAESAEKLAKTERENAWQEMARQVAHEIKNPLTPMRLTIQSFEHTFDPDDPESNQKLKEFSKLLIQQIDTMSEVAEAFSDFATLPKPTMKDCDLVEVTQMAINIFQHDYIVFSSNEAHIFHKMDRTQWIRVITNLIQNALHSVSKKKTPQIGVQIVTEPSQTTVSITDNGSGIPDKLKSKIFEPKFTTKTAGMGLGLGIVKNIIKSHNGKISFVSTQKKGTTFSVVLPKD

SEQ ID NO: 47282 - protein, 488 aa, unknown; identical to SEQ ID NO: 47281
  TnpB Polypeptide

SEQ ID NO: 47283 - protein, 459 aa, unknown
  TnpB Polypeptide
VAKFEVPDGWTVQAFKFTLDPTEDQARALARHFGARRKAFNWAVATLKADLSAYRDAGVETDKPSLRVLRKRWNQAKDEVCVNLETGQVWWPECSKEAYADGIDGAAEAYWNWQQSRAGTRAGKRVGFPRFKKKGRDQDRVSFTTGALRMEPDRRHLTLPVIGCIRTQENTRRVERLIRAGRARVLAITVRRNGTRLDASVRVLVQRPQQPGVTRPDSRVGVDVGVRRLATVADADGVVIEQVPNPRPLDAALTELRHVSRARSRCVKGSRRYRERTTEMSRLHRRVNDVRIHHLHCLTTRLAKTHGCIVVEGLDAAGMLKQKGLPGARARRRGLSDAALGAPRRHLAYKTRWYGSELVVADRWFPSSKTCHRCKHVQDIGWAEHWQCQACSAAHQRDDCAAINLARYEETPSVVGPVGAAVKRGADRKTRPSRAGGREARKGGSRTAAEQPRDGVQVA

SEQ ID NO: 47284 - protein, 387 aa, Deinococcus sp.
VTHIQATTHLKTFRYRLRPTKAQEVALLEQLRLCRGLYNAALQERRDAYRKAGKTVTAYDQMKYLTEIKAALPEYAGVYSQVLQDVLKRLEKAFKAFFRRVKAGQTPGYPRFKGAGWYDSICYPQSGFSVSDKTAFFSKIGNIRIRLHRPLEGKLKTATIRRECGEWYVSYVCEVEAAPLPATSSQVGVDVGTTWFCITSDGEFVENPRHFQGAMRKLRVAQRTLSRRKRGSNRRKTAKAAVAKLHRKVARQRLDFHHKTAAKLIRENDLVAHEALNVLGMGKGNLARSIHDVGWGQFFSLLSLKAASAGRTVIAVDPRYTSQTCHECGHACGENRIGQAKFRCVNCGHTANADHNAAKNILARALPSVQNAEVMRGLRSPGLKSGE

SEQ ID NO: 47285 - protein, 385 aa, Deinococcus sp.
MTMGFKAMKYRLFPNAIQEKALDSTLYLCRTLYNAALEERRTAYRKCGVSISFYEQKRALTEIKADSPEYKGVHSQVLQDVIERLDKAFKGFFRRVKTKQTAGYPRFKGRFHYDSFTYPQAGKTGAMPLPESGKVYLSKIGNVRCKYHRPLEGVVKTATVKREGDKWFIVFTCEVEAQPLPMTGDVIGIDLGTNPNFLITSDGEFVEAPRHFKKAERKIGLLQRSAAKKKRGSRRQKELKRQIASEHRRVANRRRDFHHKTARTLVNRHDAVFHEDLNIIGLARTRTAKGVLDAGWASFINILSLKAANAGRTVLGVDPKYTSQDCSECGHRQKVKIGHAYVCANCGMDMHRDVNAALNILNRGRDAAFSEGAKVAPIDLRSLAL

SEQ ID NO: 47286 - protein, 419 aa, unknown
  TnpB Polypeptide
VRTNPFREEGDTRIIVLSAKWCILSIVTTKTVKRAYKYRFAPTEQQEALLRRTFGCVRVVYNKALEERTTAWHRDRKSLTYADTSKLLTGWKSSEDYHWLSEVSSVPLQQALRHLHTGFSNFWNKRSGYPRFKKRTHRQSASFTQYAFRWNAAASELKLAKTAEPLAIAWSRPIPEGSVPTTVTVSLDTAGRWFVSILVEESIADLEPTSTSVGIDLGAKDLAVLSTGEKIAPARMTRTERFLLRRAQKAVARRVKGSKNREKALREVARIHAAVVDRRRDQLHQLSTRLVRENQTIVIEDLAVQPMMAAGRGRHKAGLNAAIAQASMAELRSMLEYKCAWYGRELVVIDRWFPSTQLCSSCSAQTGPRGFASLRTRVWTCGSCGAAHDRDVNAANNVLAAGLAVTVCGDGRSLAHATA

SEQ ID NO: 47287 - protein, 385 aa, unknown
  TnpB Polypeptide
MRFVQLRYQYRVYPTPGQQARLAQVFGCARVVFNDSLRARQVAYEAGVKLSDTAVQKLVVTEAKQTPQRAWLAEVASVALVQACQDARMAYRNWFDSMSGKRKGRKVGAPRFRSRKDHRQSIRLTRNGFSLRSNRKLYVAKVGELKVSWSRELPSAPSSVTIIGDAAGRYFASFVVETTDEALPLIDSEVGIDLGLTTFAVLSNGKIISSPKFLRRAERKLRKAQQNLSRKQKGSNNRAKARIRVAKAHAAVADTRKDWAHKHSTTIIRENQAIFVEDLCVAGLARTRLAKSVHDAGWAMFTRMLEEKAARYGRAFAKGDRWFPSSQICSTCGVQDGPKPLSVRQWQCQGCGAVHDRDLNAAKNILAAGRAERLNACGGTVNPAA

SEQ ID NO: 47288 - protein, 456 aa, unknown
  TnpB Polypeptide
MLAMTYFLCYYDRVINKDIYRNNLFGCQQVLIKADKDTEAIIEYLCRESNDLYNCSVYYGRQMWFKAKHLVTGYELTAKMKSNRHFNAGYASSMQQTCLNVGEAFTSFKKLLVKAKSGALEQKPKAPNYRKSGGLFTVTYPKKWLKLVNDSIRFPLGDQVNAWFGIREFFLPMLSNLSWDKLKEIRLLPRNGCFYAEFVYPVEISNVVTDSTKVLGIDPGLNNWLTCISNTGTSFIVDGKHLKSLNQWYNKQIATMKENKPQGFWSSTLGNITEKRNRQMRDAVNKAAKIVVNYCIGNKIGTLVFGWNQGQKDSANMGKKTNQKFVSVPTARLKTRISQLCEQYGIQFVETEESYTSKASYLDKDELPKHGEKPQMWKPSGKRTKRGLYRTSTFGYINADCNGLSRLQRLQRIADKAFTLYTLSITCRVDAFLTSLQNVSTDHPKYIKQYHLSLVD

SEQ ID NO: 47289 - protein, 387 aa, Catenibacterium sp.
MRKLLKSFKTEINPTEEQKVRIRKTIGTCRFIYNFYLAHNKELHENGKKFMSSSQFRVWLNNEYLPSHPEYSWIKEAYSKSVTQAVNDGQTAFKRFFNHKSAFPKFKKKGRSDVKMYFVRNNPKDCHCERHRLKIPSLGWVRIKEKGYIPTTKDGNVIKSGHVSIKADRYYVSVLIEIPDKTSANNSSEGIGIDLGLKDFAIVSNGKTYKNINKSAKLKKLEKKLVREQRSLSRKYENLKKGESTQKRNIQKQRLKIQKLHHRIDNIRTDYINKTIAEIVKTKPSYITIEDLNVSGMMKNKHLSKAVASQKFYEFKTKLQAKCKENGIELRVADRWFPSSKTCHCCKHIKKDLKLSDRVFKCDCGYIEDRDFNAALNLRDATTYEVA

SEQ ID NO: 47290 - protein, 454 aa, Escherichia sp.
  misc_feature (298)..(388): Xaa can be any naturally occurring amino acid
VKRLQAFKFQLRPGGQQEREMRRFAGTCRFVFNRALARQNENHEVGNKYIPYGKMASWLVEWKNATETQWLKDAPSQPLQQSLKDLERAYKNFFRKRAAFPRFKKRGQNDVFRYPQGVKLDQENSRIFLPKLGWMRYRNSRQVTGVVKNVTVSQSCGKWYISIQTESEVSTPVHPSASMVGLDAGVAKLATLSDGTVFEPVNSFQKNQKKLARLQRQLSRKVKFSNNWQKQKRKIQRLHSCIANIRRDYLHKVTTTVSKNHAMIVIEDLKVSNMSKSAAGTVSQPGRNVRAKSGLNRXXXXXXXXXXXXXXXXXXXXXXXXXXXXXXXXXXXXXXXXXXXXXXXXXXXXXXXXXXXXXXXXXXXXXXXXXXXXXXXXXXXXXXXXXXXRYWIRAGMKCAASLSTSSSGVAVRCLLFRQRTQASVARAVVIQRKKTACHKVNSDARYVDIQRTPM

SEQ ID NO: 47291 - protein, 283 aa, unknown
  TnpB Polypeptide
VLQTNPADPEHPHQFSRPLFVNTGSLDGHQARTRRQIDELKAVRDTLAEDDPRRVTHDQEIRCCWRLYEARNRELAHLAANVLLFARVWNCSLISGESLKTLKTTGRGRGVRGRWRNWRNNTTIRADIWRILRYKSHLLGLRFRSERPRGTSHTCPCCGKGAATYRSPRLHHRSDPVKWAAGSGAPTVATMTTATTARPSTSLAWASPISFRFNRQAKEKPSPWPRSNRSSRARIARGAVLLLPPQTDPSRLMDSGKIYLNGWKRACSIRSSYATPLFLRLCS

SEQ ID NO: 47292 - protein, 448 aa, Okeania sp.
MVEKAYKFRFYPTPEQENLLRKTLGCVRLIYNKALAARTQAWHENKERVGYKQTSTMVTNWKKQEDLDFLTEVSSVPLQQGLRHLQKAFTNFFSGRAKYLNFKKKRNGGNAEFTKSAFKWKDGQVYLAKCAEPLPIRWSRQLPQNCVPSTITVKLDPSGRFSETLTINDTRSLKLNPVTKQVGIDLGITSLLTTSDGEKVTNPKNINKLHKKLRLAQKSLSSKTKGSSNYQKARLKVARIHAKIKDSRLDYTHKLTTQLIKRYQTIVVENLAVKNMVKNHNPPPSPPGRGARGAGRDANWSELVRQLEYKADWYGRQLIKIDRYFPSSKRCSNYGHVVEKLPLNIREWECPGCAAHHDRDINAAINILRMGTRVGVRCKRYNPATTIVASGQTPRRRQLACGMLTKRGNAHQERERPRSKAAGLTVSAPVAHGGDPLWRRWLVCGARL

SEQ ID NO: 47293 - protein, 249 aa, Okeania sp.
VKDSHGGQKTVVQLMLGPRCMPIPQLRDNPDYYSQKKDLVNTKEKFPEYKLIHSQVLQDCIKLVKLAFDRWFKADKNGHKLGKPRFKGKGRYRSFTYPQIKQDCIEGNKINLPKIGNIKLIQHRPLPNGFQIKTVTITRKADGYYVTLSLEDKSVPALTTKVEPTLKNTLGIDMGLKEFLVTSVGESVPIPQYYRKSQQRLKTLQKRLSRKKKGSKRWLKSVKAVAKQHKKADATPRRRQLACGMRTKQ

SEQ ID NO: 47294 - protein, 357 aa, Clostridiales sp.
MLKAYKFRLYPNKEQQEYFAKCFGCTRFIYNRMLADKIEHYKKTCEMLNNTPAQYKKEYTWLKEVDSLALANAQMDLNKAYRNFFRDKSVGFPKFKSKKNNIHSYTTNNQKGTVFIKDRYIKLPKLKSTVRIVQHRQFDGEIRSCTITKTPTNKYYISILVNEDIKQLPKSKNKVGVDLGIKDFAITSDGKVYENPKWLRKSEKRLAKLQRDLSRKEKGSKNRNKARLKVARLYEKITNQRKDFLHKLSSKIINENQVIVIEDLRVSNMLRNHKLAKAINEVSWSKFRRQLEYKADWYGREIIVAPSNYASSQLCSNCGYKNSEVKNLALRVWCCPECKTEHDRDINASKNLLKLAI

SEQ ID NO: 47295 - protein, 413 aa, unknown
  TnpB Polypeptide
MYLTVKQQLKGLSKTEYNILRELCHIAKNMTNVALYNIRQEYIHNDKFLNYNKNYKLCKKNENYKILNSNMAQQIIKEVDSSFKSFFALIKKAKSEKDKKLIRIPKYLPKDGYTTLVIGFVRIEENKLRLPYSNLYKKTNKPILITIPPVLKDRPIKEIRIIPKCKARYFEIQYTYEVSDITQNKLNTQKALAIDLGISNLATCVTNEGKTFIVDGRRLKSINQWFNKKNAKLQSEKDLRKITGTTRNQYLLRNKRNNRVNDYITKTCRKIINYCIQNDIGNIVLGYNVDIQRNVNIGKVNNQNFVNIPLGKIKDKLDYMCKLAGIEFKLQEESYTSKASFFDNDDISIQKDSDKYIFNGERIKRGLYKTKKGYILNADVNGALNILKKSKVVSLTALYNRGEVDTPVRIRIS

SEQ ID NO: 47296 - protein, 183 aa, unknown
  TnpB Polypeptide
LTTASGEIVANPRPFKKAQTRLRVVQRALARCKRGSARRAKVKRRVAALHKKVANVRKDFHHKTARTLVRATDTIVHEDLAVKNMVRNHSLARAIHDAGWSQFIAILTYKAEGAGRQIIAVDPRGTSQTCLCGEHVPKTLADRWHDCPACGLSLPRDQVSALLIKRLGHSRQASTQRVTAHVA

SEQ ID NO: 47297 - protein, 241 aa, unknown
  TnpB Polypeptide
MEVDSFALCNVQLQLEKAFKDHFRNRKQFKLPKFKKKRDKQSYTTNNVRNSIKVDFEKGLLYLAKLREGVRIELHRSFDGKIKSVTVSRTNDGKYYASILVETDNPRNKVVESKSKACGIDLGLEHFVTVTNDFGTCKIEHPKYLRRGEERLKRLQKSFSKKQKGSKNSEKARLRIASQHAYISNVRNDFLHKLSKAIIDENQVVVVEDINVKGLLRSRLAKSISDSGWSKFLTYLKYKAE

SEQ ID NO: 47298 - protein, 377 aa, unknown
  TnpB Polypeptide
VKSSMLVNKAYKFRIYPNKEQEILIAKTIGSSRFVFNHFLDKWNSAYQETRKGLTYSACSSQLTKLKKEFSWLKEVDSIALQSSLKNLSDSYTRFFRKQNKAPRFKSKKNRVQSYTTKHTNGNIAIIENKIKLPKLGLVKFAKSREVEGRILNATVRRNPSGKYFVSILVETEVHELTKTNSSVGIDVGLKDFAIFSDGTVHKNHRYFRTLEKKLAKAQRALSRRKKGSSNWHKQRIRVARLHEKITNARNDYLHKISTNIVKNHDIIGIEDLQVSNMMKNHKLAKAISEVSWSQFRTMLEYKAKWYGKQVVAVSKNFPSSQLCSSCGCRNQDVKNLALREWTCEECGKHHDRDLNASMNLKNEAIRLLTVGTTGIA

SEQ ID NO: 47299 - protein, 340 aa, unknown
  TnpB Polypeptide
MKTFEYRLYPNKEQQHLLMQCLIESRLIYNEMLETVKKQYEEKRTFPSKYDLTAVFKGRGGEQVPATTVQCLADRLSKSLKRFLACKELGLVCGFPRFKKATQWHSIQLRQYGKDCYLHEDKKHLIIPKKIGHFLKIKLHRPFEGTPKTVHLVLRADGHWYALIVCETTPQTVHFPSTCEHPDIGIDVGLKVFLADSEGNTIANPRYYRTAQKTLRRKQRSSCRRKKGSHRRRKSAKNTAKTHLKINRQRKDHHFKVAKSYADQYHHIVVEDLIVSNMVKNHHLSKSIYDASWSQFLNILSAKAESAGHTVIRVNPRYTSQKCHHCGEIVLSVVASKTAM

SEQ ID NO: 47300 - protein, 398 aa, Streptomyces sp.
VRPPNEEVPTPARFRGAGIPVRSDPNASQEHALRSHCGAARAANNWAVGWVEASWWQRRAEESYGITEAELPEWRPWSLPALRKAFNQAKTTDPRFAAWWEENSKEAYSTGLANASAAFDNYAKSKQGKRRGKRVGTPRFKSKRKARLACRFTTGTIRVDTDGRHVTLPRLGTIRTHEPTVKLLAHVQAGTARVLSATVRHERGRWFVSFQAEVKRDLERVARPDTAVGIDLGVKTLAVMADSTGEIRTVPNPGHYDAARKQPRRASRTVSRRQGPDRRTGRKPSKRWEKATAQRNKMHHRVANLREDALHKLTTSVAAEYGTVVVEDLNVAGMLKNRCLARRIADAGFGEIRRLLGYKTRQRHATRLVAANRWYPSSKTCSGVRRGESQAAAAPGST

SEQ ID NO: 47301 - protein, 405 aa, unknown
  TnpB Polypeptide
MPTYEQEQQLRSLAEASARLWNMANYERRQSLFKGQRAFTYAQQCKHLKDTSAFKQLGTCKAQALLMKLREAWGSYYALKHLERLSQLPSHIRRVCPPRYMKNHETRRLVAESIYVRNDGYKQQENVLTLSKGLRVPFRAGDLWVGKQGRLELHYDPLRKKWYGHIPVKVKWFRKGKSHQSTRKRASIDLGICNLTTCVVEGSDKAYVYSGRAVLSDWRYWTKRIASCESTLKKTNGYNSSKHLSRLYQTRKRRLNHAVKSMLRDLFDCLETHEVTDLIIGDLKHIRDNANHGKVGNQKLHNFWPFAQIRQRIHELGEEYSIRVRFKSERGTSKRCCLCGKTHKNGRKHRGLYHCKTYNIFMNADVNGAYNILYGRKVAAVSGSRPMAWPLLLKWNAQEWEVSAA

SEQ ID NO: 47302 - protein, 389 aa, unknown
  TnpB Polypeptide
MSEWLELCRKQYNYRLGERFNWWEQNRCPVNACPLICYLPQLKDNPDFYSQKRDLVNSKALFPKYKSVQSQVLQDCIERVKKTFERWMKGDAKGKKSGRPRFKERGRYRSFTFPQVKQDCISGKYIKLPVLGELKLILHRPLPDGFKIKTATITQKADGCYVILSLEDTSVPEIQPPLPTPENTIGIDLGLKTFLVANDGEEVSIPQHYRKSEKRLKRLQRSLSRKKKGSNRRKKAVKKVAKVHFKVANQRKDFHYKTAKKLLSKGKNVGHEDLNIKGIAKTKMAKSTHDAGWGMFLQVLKVKAERAGLLTIAVNPSGTTQNCSGCGEKVLKTLSDRWHSCPCGVELDRDLNAAINIRNLAVGHPVSKARGVRQEAGTAKREARALSAG

SEQ ID NO: 47303 - protein, 396 aa, unknown
  TnpB Polypeptide
MLVFEFKTYGKAKQFEAINEAIRTVQFIRNKAIRLWMDGKAKSWIELSRHCAIFAKEFPFANNLNSMARQAAAERAWTSITRFYDNCKKKVVGKKGFPSFKKDNRSVEYKTSGWKLADNRKSITFTDKNGIGKLKLKGTRDLNFYQIDQIKRVRLVKRADGYYAQFCISVERTETLKPTHQTIGLDVGLESFYTDSLGCKVENPRSYRTGERKLKRVQRLVSRKVKGSVNRRKARTVLGKVHLKISRQRKDFAIKLARCVITSNDVVVYEDLRIKNMVKNHCLAKSINDAGWYQFRVWVEYFGKVFGRITIAVNPAYTSQECSICGAIVKKSLSTRTHICQCGCKLDRDENAALNILNKGISTAGHVGTWGLDSLNASGESTSTLVGEILLEQVGS

SEQ ID NO: 47304 - protein, 382 aa, unknown
  TnpB Polypeptide
MKTFEYRLFVNKEPSRLLMACLMESRLIYNNMLETVKTQYEQDGTFPTKYDLEKLFQGQGEHVPATTVQMLADRLSKSLKRFLAAKKNDIPGIGFPRFKKPNRWHSIQLRQYSKDCYLHEDKKHLIVPAKIGKSLKIKMHRPLEGTPKTVHLVLRADGHWYALIVCETEPRAEHEPTDCEHPDIGIDVGLKSFLTDSEGNTVENPRFYRISQRTLRRKQRQMCRRKKGSHRHRKASKNVAKTHLKIKRQRRDHHFKTAKPYAKGYRRIVVEDLTITNMVKNHHLSKSIMDASWGAFLAILSAKAASAGHEVIRVTPHFTSQKCYKCGEIVQKSLSVRTHICPFCGYVADRDVNAAKNILKAGALPSDAKHSDGGARLRSPRL

SEQ ID NO: 47305 - protein, 439 aa, unknown
  TnpB Polypeptide
MDRWRDEMQVVKTVKIPVHYATTRRKLDILNRLTARLTYGVHLWSQIVDANDIRTRSGLRRSKFERQVQERTGLSAGFVQCCADTALWMWRSYRKLHREWRWRVRRAQRKGDERWLRRLVKREPQPPFSNGLRRKIPIWFDYRIGSLEVSELKLSPRVVRISTLKRGERITVLLNPARYHLDLLERGEIKSFQLIKRGKKFYVHVKVEYEVQDQPVRAVCGVDLGIKRSAATVLLRPNKPMRRGDFSVICDGEKAHRLNELNRRVEKLQRLEKWEALKRVRDKRRRVAEYYDRLMAKRIAEISNGCAVAIGYPKGIKYGNYRGNGKRKLRRLMARWTYGRIIRYTQEECAERGIEVVTPDERWSSMTCHRCGSRNTERLRQSIIHCYDCGLTYNADFNGAINIGSSILATPRSRWAAVDPAITSDELAEEVREAGSPCL

SEQ ID NO: 47306 - protein, 393 aa, unknown
  TnpB Polypeptide
MIKTHQIKIEPNAHMTRVIEDLFNYRRYCWNQALATWNNMYDESVILDNKTLRPNSGKVRNELVSNKQDWQYSRSARVLQQSVNSLEKAWKNFWNPSMPNHGKPRFKSKKNYKPTFSTDRARLASGKLVLDKPQGVSKSVWYGIRMREAPRFEGRLKLCTITQKSDGYYASLMFDTTHNEIVPKASEIVGIDVNVKHFNYNDGQQIDIYPKKLEKYYQRITHYQRMLAQKRLENPRNFKTKRHMKVKTKLRRDYQKVTDLQKDILNKFTCHLISTYPEIHIEDLNVHGMMMSKKMGKNLHRSLFGKLRDTLTYKCKWNNRKLVLVDRLYPSTQICSECGFCKTKEGYGGKQTLSGDSIHHNHQRYYCYNCGAILDRDENAVENIKNYVALSYN

SEQ ID NO: 47307 - protein, 261 aa, Ruminococcus sp.
MNKAYQFRIYPNEEQKILFAKTFGCVRFIYNKMLGDKIEYYNQTKEKLNNTPAQYKTEFEWLKEVDSLALANAQMNLQDAYNNFFRDKKVGFPKFKSKKSSKRSYTTNYVNGNIIVRDGMIRLPKLGFVKMKQHRNIPDDYKLKAVTVSKNAGGKYFASVLFEYEEEIAEKELESFIGLDFSMHELYIDSNGNCPAFPRYYRLSEKKLKKEQRKLSKMVRGSINREKQRVRVAKLHEKIANQRKDFLHKQSRQIANAYDCV

SEQ ID NO: 47308 - protein, 434 aa, Kitasatospora sp.
VHLRYSFRVYPTTGQRSALARTFGCARVVYNDALAARREARRGGLPYPGSCELQKRVITEAKKSAERAWLASVGVDPLIQSLRDLDTAYRNFFDSVSGKRAGQQVSLPRFKSRKDNRQSLRFTRNGFRIRGNGKLNLAKVGDVRVKWSRTLPADPSSVTIVLDPSGRYHASFVVDVEPEHLPELDTEVGIDLGLATYAVLSDGTVIDNPRFLRKAEKRLKAAQRELSRKAKSSKNRAKARRKVAKAHAKVADTRNDWLHKQTTRLICENQAIYLEDLNVRGLGRGRLAKSVHDASWSAFRRMLEEKAARRGRTVGIVHRAYPSSQLCSNCGHRDGPKPLAVREWACSTCGVLHDRDLNAARNILAAGQADRLNAPGGPVRPGVAIPHQARPVERGTHLGDLPRTGVRATGAGGIPIPRGGEDVKRPTRRCAAGC

SEQ ID NO: 47309 - protein, 490 aa, Kitasatospora sp.
MSTECAWEKRQFGHRARLALTPAQVQLMDDQAHAARTMWNCLHDWWTMLPKERRSLAAADVAIRQARREVDWLGVLPAQAAQAVLKTYFQAWRNCWEGRADAPNFKARFRSVMSVDVPQGRDLNITRVHRRWGMVTIPKVGRVRFRWTKDLPVGKRANADNRITGARLVKDSLGWHIAFRVQTRESKPVPHTGPEVGIDAGVTVPLALSDGNHQMHERWKSTKEKPNTWLTEKEQAKLLCLEQRAAQRKQHRKPGERTSNRLRTTYDQIAGLRARAKRRHLDWQHQTTTGLAWQYGTVVVEALQVTNMVRSARGTVDEPGKNVAQKRGLNRSISQEAWGRTVDILTYKLAQRGATLHKVPAPGTSQRCSECGLTTPGSRESQALFVCRNTGCGWSGNADHNAARNILHLYRMGHALIPAAGRAVVRRAKRVKPTAARQVGISRPQPEEHFNEVMRHRSASARRWRRCCWPTRRRSCCCSTSRATTWTWRA

SEQ ID NO: 47310 - protein, 400 aa, Kitasatospora sp.
MWNCLHDWWTMVPAGRRSLAAADAAIRQARKEIDWLGVLPAQAAQAVLKTYIQAWKNCWEGRAGAPNFKARFRSVMSVDVPQGRDLNVTRVHRRWGMVNIPKIGRVRFRWTKDLPVGKRANADNRITGARLLKDPLGWHIAFRVQTREPKPVAHTGPEVGIDAGITVPLALSDGNHQTHDAWKSTKDKPNTWLTEKEQAKLLCLERRAAQRKQHRRPGERTSHRLNATYDQIARLHARAKRRHLDWQHQTTTGIAQQYGTVVVEQLQITTMVKSARGAVDAPGRNVAQKSGLNRSISQEAWGRTVGMLTYKLAQRGGTLHKVPAPGTSQRCSACGLTTPGSRESQALFVCKKTGCGWSGNADHNAARNILHLYRMGHALIPAAGRAVVRRAKRVKPTAAR

SEQ ID NO: 47311 - protein, 405 aa, Kitasatospora sp.
MVAIHVKRAFKYRFYPTDTQAAELSRTFGCVRKVYNLALQARTEAWTLRQERVSYNATSAMLTAWKKTEELAYLNEVSSVPLQQTLRHLQGAFTNFWTKRAKYPTFKSRKKSRRSAEYTSSAFRYRNGRLTLAKMAEPLAIAWSRPLPQGARPSTVTVSQDAAGRWFVSLLCDDRPTMPPPVHPAVGIDAGITSLVTLSTGEKITNPRHERKDRERLAKAQRDLSRKAKGDGANRAKARLKVGRTYARITDRRRDFLHKLTTRLVRENQTIVIEDLTVRNMLKSRTLARAISDASWSEMRSMLEYKAHWYGRDLVVVDRWFPSSKLCSACGTLQPKMPLNVREWTCDCGTTHDRDVNAARNILAAGLAVAACGDGVRPQRSTPGGQSLMKQEVVPPQRTRAAAQL

SEQ ID NO: 47312 - protein, 449 aa, Kitasatospora sp.
MKRQRGHKALLELTAEQVIALDEQGHAARAMWNLLHDWWTMAGKCPLRRASLALADQHIRQARKEIPWLATLPAQAAQQVLKQYHRAWINCWEGRAGAPNFKSRIRSRMSVDVPQGRDLQIRRISRRWGQCRVPKLGLVRFRWTKDLPGATRNGPAGRVTGARLVKEAYGWHIVFRTETLMDDVQPKSTGRIVGIDRGITVPLALSDGTDRDHGPWLTAGERKRLVRLERKAARQHRSRKPGQPTSRRLTTTYDQIARYRATAKRRAADWQHKTTTELADTFIAIGIEDLAITNMVKSAKGTVENPGTRVRQKAGLNRAIAGEAWGRTVELLAYKLTDRGGHLIKVPAAGTSQRCSACGIITPGNRETQARFACKARGCGYTANADTNAARNIEHAAGRAVSGRGAFHCEGREASTTNDVHPRDVEISRLQPEEEVNPGCPPGSGLPSH

SEQ ID NO: 47313 - protein, 413 aa, Kitasatospora sp.
MDDQAHAARTMWNCLHDWWTMLPKERRSLAAADAAIRQARQEIDWLGVLPAQAAQAVLKTYLQAWRNCWEGRSGVPNFKTRIRTVMSVDVPQGRDLNVTRVHRRWGMVSIPKVGRVRFRWTQDLPVGKRADADNRITGARMVKDPLGWHIAFRIQTRESKPVPHTGPEVGIDLGVNVPLALSDGNHQNHGRAPRLPDGTADRDKWLNPDEKAKLLRLEQRAAQRRAHRGPGEKTSRRLHHTYDQIKQLRARATRRAADWQCQTTTAIAKQYGTVVVEQLQITNMVTSARGTIEEPGTNVAQKSGLNRSIAQEAWGRTVTMLAYKTARCGGTFAKVPAPGTSRRCSMCGHTTPGSRETQALFVCKNPGCGWIGNADHNAARNVLHLYRMGHALIPAAGRAVVRRAKRVKPAAAR

SEQ ID NO: 47314 - protein, 347 aa, Kitasatospora sp.
MLTAWKKTEELAYLNEVSSVPLQQTLRHLQGAFTNFWQKRAKYPTFKSRKKSRRSAEYTSSAFRFREGRLTLAKIAEPLAIVWSRPLPQGARPSTVTVSQDAAGRWFVSLLCEDRPAMPAPVNAAVGIDAGITSLVTLSSGEKIANPGHERRDRERLAKAQRDLARKAKGDGANRAKARLKVGRTYARIADRRRDFLHKLTTRLVRENQTIVIEDLTVRNMLKNRSLARAVSDASWSEMRSMLEYKADWYGRELVVVDRWFPSSKLCSACGTLRSEMPLNVREWTCHCGTTHDRDVNAARNILAAGLAVAACGDGVRPQRITPGGQSSVKQEVVPPPRTRAAAQPRG

SEQ ID NO: 47315 - protein, 207 aa, Shigella sp.
MASWLVEWKNATETQWLKDSPSQPLQQSLKDLERAYKNFFRKRAAFPRFKKRGQNDAFRYPQVKLDQENSRIFLPKLGWMRYRNSRQVTGVVKNVTVSQSCGKWYISIQTESEVSTPAHPSASMVGLDAGVAKLATLSDGTVFEPVNSFQKNQKTLARLQRQLSRKVKFSNNWQKQKRKIQRLHSCIAGLPSQSHNGRQQKPRNDSH

SEQ ID NO: 47316 - protein, 384 aa, unknown
  TnpB Polypeptide
MLIPNNKQKTKLFQYANTARFAYNWALSKEQENYKNGNKFISNGDLRKEFTQLKKTKEYAWLNNISNNVTKQSIKDACIAYSRFFKGFSNFPKFKSKKHSPPSFYQDNGKIRFTNTHIKVEGFSNSKKKKRQKLNFIKLAEPNRIPTENCKYYNPRIKYDGLNWYITVSIECKNISTIPVNTGIGIDLGINNLAVCSDATIYNNINKTFKIRKLEKRKRRLQRSISRKYLKNKKGESYCKTSNIIKSEKKLLKIIKKLTNIRHNYLHQTTTEIIKRKPSFICIEDLNVSKMMKNKHLSKSIQQQNFYEFRQQIEYKSKWNNIKLIIADRYFPSSKLCSCCGDIKKDLKLSDRIYKCKCGNIIDRDYQASLNLKKYGENIFKSIS

SEQ ID NO: 47317 - protein, 384 aa, unknown
  TnpB Polypeptide
MIKGFKVRLFPNEVQTRLSWKHINVSRFVWNYALAEQLNRYKNGEKYLNKYGMRSIFIELKQSKEYAWLKEVSAHTIGNICIDLDKAYTSFFTKIGGKPKFKKKNKCKNAFPVRCETVYFINNCVNIEKVGKIKYQSDKELPQGRNTCKFTNPRIVFENNKWILSFGMECENQAQKLNDFSVGIDLGVKELAVVAYGGNHKNYKNINKSKRMKTLKHKLSHLQRKVSRKYETNNKHKVYDTKWYKSNGILKTEEQIRKIYNQLSNIRKNYIHQTTHEIISFLPKRVVMENLNVSGMMKNKYLSKAIAEQMFYEFIRQMKYKCEYNGIEFVQVDRFYPSSKTCHKCGCIKHDLKLSDRTYICPECGEIIDRDLNAAINLANYSKA

SEQ ID NO: 47318 - protein, 394 aa, unknown
  TnpB Polypeptide
MLKGVRIRIYPNKTQKKLISKTFGCCRLIYNKGLALRKDTYESTKESIGYKETSAMLTALKKEDDFSFLKEVDSVSLQQSLRDLDKAYKNFFRTKTGYPKFKSKHNPLRNYRTQNVNNSICVTLDGKHIKLPKLGYVKAKCSYDLTSAKINNATIEQLPSDKYYCVLNIEVKTPTYTNDGCMVGIDLGIKDFYTDSNGYKCPNHKWIAKSIAKLRKEQRKLSKMIESHIVEYKIIKGYRHPVYDKPLSECKNIQRQRIKVAKIQEHIANQRNDFLQKESTKLVKENQIIGLEDLNIRGMVRNHKLAKSIYDVSWSKFVSMLKYKAPLYGTEIIKVPRFYASSQLCNCCGYQNKETKNLLVREWTCPVCGTYHDRDENAAINILNKALEIRNKVA

SEQ ID NO: 47319 - protein, 435 aa, unknown
  TnpB Polypeptide
MGLFLSSEVKKRFRSGASRLERMFQEQAVTVLRSWAARSGAASGDYTGYVSAGWRRTVKDSKPKALQPRLALSVTDKQYRRMNVTDERITLEMVVQGQWVTLHFPTPPQLMEPSCDPGVPDIWVDKNNRVMFGFHGKTDPGRPEFSSRYVIGVDVEVTNPAAYVVWDTEKKEIVEQSLLGQRACSLHNKIIRTQTQVTSLQRKNRPEEVVSHRAHLSNRRRELSILIAQEITDAAWRYGNALVVFENLSHIKNTMRFGRWFRGEVYRRTRDMVEADGGRVLKVNAAYTSRKCHICQSDLDMSDYSQPRCTACGITRHRDVNAAANIAQKVNHAKACQTRKRHATKTKRIRRSKCRIKPLKHPGTKNRPTPKAPQNQKKNSVRSSLPSGEVSKGMCPADARVSAVDHDTWFQTTSGTTNPKDSPSVSTVDWVYPKE

SEQ ID NO: 47320 - protein, 454 aa, unknown
  TnpB Polypeptide
MTEQNLALVTYFDRFKPAEAGWRMGLFLPSEVKKRFRSGSSRLERMFREQVVVNLRSWAVRSGVVSGNYSGYVSAGWRRTVKSSKPKSLQPRLSLSAADKQYRRMSVTPERIELMMIVQGQWVTLNFPTPPQLLEDGCDPGVPDIWIDDQNRVMFGFHGTTDPGRPEFSERYVVGVDVGVTNPAAYVIWDKKNKEIVEQSLLGQRARSLSNKIKRTQTQVAVLRRKGRDSEAALHRIHLSNRRKELSILIAQEVADAVWRYGNAIVSFEDLGHIKNTMKFGRWFRGEVYRRTRDMVEADGGRVLRVNAAYTSRKCHVCQSDLDMSDYSSPVCHSCNITHHRDVNAAANIAQRANVKKACQTRRRHATKSKRIRRSKCRIKPLKHPGTKNKPTPKAPQNQPKRTRTPATPSREVSKEMCPADTRVSAVDHDTWFQTTGGTTNPKENPMDWVYLKE

SEQ ID NO: 47321 - protein, 418 aa, unknown
  TnpB Polypeptide
MFQSRKVKLKPTKEQVEFFHKNFGAARFVYNWGLEQLNKHWEENKDKEKKDRTKRPTTFDLINSINRLKNTDEEYAWLRKVDSRIIAFSLRHLDKAFKRFFAGISKYPSFKSCRDERQAYATNGLSLYLKDSNHLRLPKLKSVKFYERDYLPEVRYIRATVSTDGDYFYCSVIYEDTPKELPEPLHESVGIDLGVKTAVTTSHGTTFHLKRNRRLERRLKRAHRIVFRRTKDSRRRLEARKRMRSIYRKISNQRKDFLHKTTSTLVSENQVIRMEDLNTKGMMKNHHLAASIAHASFGEIKRQLTYKCEWYGRSLQLVSRFYPSSQLCSHCGARNKEMKNLNKRTFTCASCGISLDRDLNAAININNFCTHGEWGTGDQANGRGDSSSTKRRYSLSRVANRGNDNPKESQLNPSTYND

SEQ ID NO: 47322 - protein, 371 aa, unknown
  TnpB Polypeptide
MIVPCQEKNMQKGIKFRAYPNKKQKNLIDRTLGCCRMIYNKGLSMREDAYKSGEKVNYSQTSAMLTALKKDDDYAFLKEVDSVALQQSLRDLDRGYVNFFQKRAKCPTYKSKHQNRQAYRTLNQKDNIRIVGKHIKLPKIGFLKIKQSMDAGHINNVTVEKTPTGKYFVVLNVDFEPVRIANGGGRIGVDVGIKEFYTDSNGAVVENPKYLESSLRKLARESRRLARKQKGSNNRRKQRLKVAGVHERITNQRNDFLQKQSTMLVRENQTICIEDLNVKGMIKNRRLAKSIASVSWSKFFSMLEYKAEWYGSSVIKVPTMYPSSQTCSCCGYKNPLVKNLVVRKWECPECYALHDRDKNAAVNILNKGLSA

SEQ ID NO: 47323 - protein, 445 aa, Okeania sp.
VKARYKYRIYPNHIQIKKLSQLFGCCRYVWNQSLAHCNQLYANGKNKPSNSELQKQFITQAKKELLWLKEVASTPLQQSLNDLNQAYQNFFKSCKGKRKGVKVRPPKFKSRRSKQTARFVGDNYKIGQDKIYLPKVGKIKIIWSISLASKPSSVTIIRDSANRYFASFVIETCAEHLARTNNSIGIDLGISTFATLSNGEKILAPKPLKKNLKKLAKFQRKFVKTQPGSNLYEKRRLKIAKLHAKIKDISFGMLRKRTDFLHKLSTDLVRKYDTIVLEDLNVSGMVKNRKLAKAISDLGWRQFRTLTEAKCEKYGREFRVISRWEPTSQKCSCCGFKGGKKELNVREWTCLNCGAKHDRDINAAINILETIQPKTKVEATEILETPVQLSLFVSVAPPQEAEVAGGQSETINKTRSRRKSTPKKVVANNDVSTRPEFFVQLSLFD

SEQ ID NO: 47324 - protein, 721 aa, unknown
  TnpB Polypeptide
LPQDGRHVLEKHPHVRGEGNPDLLQPVLLRQLPQPADRLLPRNSVVGLERRIAAGPGSQGVEAELHHRRSVTCGARNARPQKAQPRLEALVAADGLHLHLGAVQPADAAEAGGGHDVGQGIRDSQLPLVLAPDPVGALPVIRRQTDHGLPPASPRARAGCRAPQQREAPAVLQALEDPENAPPLLLPGVEPDVRLSIGPNDRQRGQLLRRERQRHAGASAAGIPGAKRWLFRRGKEACRLCHPALLVWYHGNPRPAGKGPALRLAGPRRRRAPGGGFCWALNSLIPAYPKSDTMSRGDAKEMDIGVTRLDASFSSRDGQGYHHNGGGDDADSLPAVPIRGHPEIRARMEACADIQRQAVDHALENGKTAAFTLIKALYPSLRAQHPDLHAVWARSAVRAGAAVVHSFRNRRRKGKTQLQKPEIRRPFVCVRRDLLRIEWDSETLTITIPVSPWDPDPIVLTFRPHHKHRRLLDEWKAGRARMGEPTLTARSLSIPLKFPDPIPYKPEGVIGIDSNEGSLTAFVASTGEIREIDTSHVGKVNRDHLRREIKGTRGKRNPKAKKKIASKHRRIRREKTENFWHHLALALIAWAIGMKSALALEDLKGMKERIGKGKSRRMRQRPLNFWSIMTFHRIPVHKARFYGVPSILVNPQNTSRACPACGRVVDRLRGPVRACPCGVRMGRHVAAAASIARGGVEFLEGSGLRSRGRWATLVAGPLASG

SEQ ID NO: 47325 - protein, 507 aa, unknown
  TnpB Polypeptide
MRHTTFRFALDPTPAQEQLLAQHAGASRFAYNQCLKFVTNALTARRVDPSVRVPWSGYDLINAFNAWKRSEDAGRLFVVAPDGTISKQATGLAWRHKISAQVFEEAAVDLGRALSAYSRAQNGKRAGRKVGFPRRKRKGRCRDSFRLRNRRQPGGYLIRIGEGHPRSVTLPTIGQIRVHDDTRRLRRLLRPRSHVDPVTGEEQLAPSATVLFATVVRRGTRWYVTLNIRAPDLHPERRHQPRSGPGVGRFVGVDLGLAAFAVAARSDRTEVGRWHANNPLRCRLRRLRRYSRAYSRARRGSRNRAKAARRLRREHARIADARLGFLHEVSSQLVKNHARLAIEDLAVTNLVHNNRLARAIGDAAWSEFTRQLAYKAEWFSAELVLCDRWFASSKTCSRCGVIKERMALAERVFACDCCELVVDRDRNAAANLAAWAERARAPDRQAGGRVTNASGGEGAGRYHGNGATGPMKEEPRLRHALEPRTPEKGGVPAPHEGTDALDRMRLP

SEQ ID NO: 47326 - protein, 357 aa, unknown
  TnpB Polypeptide
VSDTGRLNIPANKISTVEVKVGEVFEERTLTVLGSQVKQEIADRLKDNLRALGRLKENGYKVGRLRPKRFVNSIPLKQCGVTYGLDFARNKVRIQKLGEFRVLGIHQIPPGAEMANAVLVRKPSGYYLHVTCYLPREHFLRKPVGEAVGVDFGIDSKLTLSNGIKIDFEVHETPRLKRLQRKLHRTKKGFKNGKKVWFLLRREYERLNNRRRDAQNKVLAFLRLYEKVVFQDDCVKKGWAALFGGQVHSSGIGGLKSRLRTSLEVPVVVGRSEPTTRECYACGKQHELSLSDRIIKCDCGWECDRDVNAALVILERGLGLSRDQAVGLDRPELKPPEREAAARLLGSNPCIRVSFPR

SEQ ID NO: 47327 - protein, 370 aa, unknown
  TnpB Polypeptide
MIVKRNYKFQLCLKQRHEKRLQEMLDTCRFVYNQILEKRNAYWKEHNKSLSCFDCQKLIKDMDLKTPVHSQVLQNVAVRVDLAYLGFFRRLKSKQGKAGFPRFKSYDRYDSFTFPQTGFKLKEKKLWLSKIGDIRIHLHRKMEGKVKTLTIKREGIRWYAIFSCEVDVKPEAKKWKRAVGIDMGCKNFVTCSDGTTIPNPHFLKQSQETLSKIQAKYSELKNQPKDDPKKVKVKKQLVKLYCKVKNQRKDFLHKLSKKFVSEYSHICVEDIKPSQLLSDNWRSLNKSILDSGWTTFRQMLHNKAVEAGCEVIDVDPKYTSQICSDCGSIVKKELSDRQHKCPICNLNIGRDLNAAKNILRVGMDSFSNVS

SEQ ID NO: 47328 - protein, 371 aa, unknown
  TnpB Polypeptide
MKQYENITIKLVNPTTIKRKVLEDLQERFSAAVALGLQLAEPEKVSSRGKIHELLYYRAREEFDLPSYYATQAVGIVMTKVRSFWGVAKSKRTGLTSWPKASDKEPIGLAGNCYRLFCNKDRWVLRISIGNGEFLWLPLCVPKKYHDSMSVASGEAKLYERDGKWYVVLPLRTTTDTPPSSGGSCYGVDLGVAKLATVVGPGVVRFWSGTKLQHIRRKYRQYRRMCGRQKNVRKAKASKGRESRWSRDVNHKLSRQIVDLVAGIPGGFIALEDLTGIRKRNNLGRRFNRMLGGWSFRQLRDFITYKAAKANILVVLVDPRGTSSTCPKCGSKGSRPKQSLFKCVCGYQANADYVGGVNISRRGLEAISVAP

SEQ ID NO: 47329 - protein, 378 aa, Cyanobacteria sp.
MQAKCRGLYNWWIAGLRNGEHWKLYQAKKSLIASKQYDLELKYVYGKLLAEVDFRLDKAMATFFRRVAAGEKPGFPRFKPRHQFFTLKYPGAYLAVSGGRITLPTGGKGKGKKFENVVAHLTETPPPNFKEVAVTKDSRGRYYCCFVYETNSYSPGDNPTYLGIDLGIKTLASGVNEQGRVYQIGGFKGYRWFNRQLDKIRSRRSSCKKGSRRYCFLSKVYQLVAEKKRNKLVDSLHKASSFIAYKLAESAVVIGELSQRQMVSNSNNKFRNRAVFNDWGLYQFVVLLKYKCVLAGKSLHIISERDTSKTCSRCSHQQDMPLYKRTYRCPHCGNVMDRDTNSAINILLRFLARLAPHKLATVCGVLGVIQAIDTFTHV

SEQ ID NO: 47330 - protein, 410 aa, Thiothrix sp.
MIISHKIRLDPNNQQATYFAKAAGTARFAYNWALAEWQTQYAAWKDDNTQPKPNQMSLRRQLNAVKREQFPWMLEVTKNAPQMAIIQLGAAFKNFFAGRAKYPQFKKKGKSRDSFTLTNDQFSLDASRIRIPNLGLVRMRETLRFSGKILSATVSRTADQWFASITVDTDSNHLLPAENQGVVGVDLGISALATLSTGGKVAGAKPHNALLSRLQRLSRSLSRKVKGSANRHKAKQKLAKLHARIANIRQDSLHQLTTDLTRRFHTIGIEDLNVSGMVKNRHLSRAISDMGFFEFRRQLEYKAAMRGSVVVVADRFFASSKTCSAPGCGHKVDKLPLSVREWACPACGAIHDRDVNAAKNLQEYASAALSNHAVSYTVSACGGDGTGLTRKRQVKPAPMKQEFNTMTTFS

SEQ ID NO: 47331 - protein, 192 aa, Methanosarcinaceae sp.
MKQESPSPERSDRWERNIYKIMRARLQSKGTSSAKRVMKRLAGKEKRLMKDVNHCISKAIVKFAVENNVSVIGFEDLTGIRTQTEHKIPKKHKYHHSSWAFRQLQSFVEYKAKLAGIITEYVDPAFTSQTCFRCNHISRNNRNDLKFHCEICGYETNADLNAANNIEHRTRDFRYTLESQGCQSITHTREMI

SEQ ID NO: 47332 - protein, 384 aa, unknown
  TnpB Polypeptide
MKLIQTAKLVIDCSTSEFKSTIYAYTNAFNHVCQVGFESKDTNGVSLHHKTYNECRKTLPSQLSISARTKATETLKSVKAIINKGKKATCPKSKQTTIRYDVNSYSLWLNKNLISISTISGRKKFNIIIPEYFKQYLTWKYTTADLFIKNDKVFIHVVFEKEIADTPSNDNFVGIDRGINKIAVTSQNKFYDGKKIKTISRRYEKIRSMLQSKKHSGKRHLKKIKSKEQRFRRDVNHTVTKQIVNSIDSGSTIVLEKLTGIRNAKARKEQRKELNKWNFFQFEQFLTYKAMAKGIKVEYTPAQYTSQKCSNCGVILKSNRKSQAVYECEKCYFCLNADLNASRNIRKNYLDAISNPSGASVNKPNAPSALLEVVEQAQPSLVVG

SEQ ID NO: 47333 - protein, 421 aa, unknown
  TnpB Polypeptide
MKIVRSTKCSTKFATKKKKDELNTVLKEYGKVVNIFISYFWDKPEFDNTQLLKPIVDIPMNQTWLSARLRKVAAREAIGMVASVKNVFEWNKEQLQESITRLDQKTRTTLPDTKKNRRDLNRWYKKLKALESKRSMLKAHKPKHKGNKMQVSCTIAELQTPKKTKDGEFDAWLHLASIGNKITIDIPINYHKHFNELNRRSVRQNAYIITSDYVQFSFERETGKKKEVKEIVGIDTGINALASTSDKIQFGRDIKELIEKSKRCQKGSKGKQRAINSIKQRINEVAKEVIKNKDLVIVEKLSNLNNNSKLKGRLSKNIRSSIGSWNYGYWLMRLEQLCEESRTSFRTVSPYNTSIKCSACGHTDRGNRVGEMFKCQSCDYTDNADINAALNIRERFLTGKYGSCYKPKNDTILECPELSSL

SEQ ID NO: 47334 - protein, 295 aa, unknown
  TnpB Polypeptide
MGSHPIASMQLAERVQDRKTPALSLLCHRAKNLYNLANFYVRQELFHLESMLTYFDLDFMLHGFPAYQALPAQTAQQVLRQVAGDWRSFFAACRAYRKDLRKFLGAPRPPRYKPKGGESIATFTNQQCRIVSGWIRFPRKANSPPIKTRISEFQQVRVVPKAACYVIEIVYNVKPTNLGLNKRRALGIDLGVSNLVTAANNIGLPPFAVKGGAAKSINQFFNKHLAQLRSVGTRANGMRVTKRIERLNRTRTNKQASRCLPQDIPCHCGLLRQARHRHHRHRASDRISHTTECRT

SEQ ID NO: 47335 - protein, 416 aa, Aphanizomenon sp.
MLKVVKVRLYPDVQQQQSLAQAFGSCRWLWNYFLNLMNQTYQETGKGLSGYEVKKIIPQLKKEHEWLSLTYSQCLQQVCLNLGVAFNNFFEKRAKYPKFKSKHGKQSIQYPQNVKIADNQLILPKIGKVSAIIHRQIEGKIKTVTITKNCSEQYFAAILFDDGKEKPELITEGKSIGIDLGLTHFAITSNGSKYDNPKILSQHEKNLKFKQQQLSRKQKGSNNRNKARKKVARVHRKITNCREDFLHKLSRRIVNENQVIVVENLHVKGMMQNHTLAKSIQQVGWGMFCTMLKYKAENEGKIYQEVDRFFPSSKTCHVCLNQFGNLPLEIRFWTCEKCNTRHDRDINAAINLRDEGLRIMTSGTGDKTMKCGFFGFQNEQLHQEACRPDVSRSNRGRKKSTTALSVGQEVHTVPSG

SEQ ID NO: 47336 - protein, 388 aa, unknown
  TnpB Polypeptide
MTVIRGHIIELKPNNKQATHFKKACGVARFAYNWALAEWKNQYEADKGYRDDCKKLGLPIDNLKLNKPSESKLRKQLNAIKYEKYPFMLDVTKCAPQIAIMQLGDAFKRFFKGESKYPQFRKKGENERFSISNDVFKLIKVNNKPFIQVPKLGLVKMRENLRFDGKILSAKIFTKGGKWFVSIAVELSEPQRFLPKTNKSVGIDLGITDLAVLSNGEKIKAPKPLKIKLKKLQRLSKSLSRKQKGSNNREKAKTKLSRLHYKISCIRKDFLHKLTSKLVRQFDVICIEDLNVKGMVKNKRLSRAISDLGFYELKRQLIYKANQSGKTVKSVDKFYPSSKTCSCCGFKLESLPLSVRTWTCQNCNTTHDRDINASINILNKADKVLTLS

SEQ ID NO: 47337 - protein, 421 aa, unknown
  TnpB Polypeptide
MVTYAVQSNVIRGLSKQQYALLKEMCAYSNNLYNVALYHIRQHYFSTKKFLTYESNYHECKTNENYGLLQAGVAQQTMKVVDRSFKSFFNLLKKCKVGDYRYHDVKIPHYRKKGGLFNLVLSTNAITIKNGFLYVPMSRDFRTLHQDIKDVKISFPERLKDKTIKEVRILPISNGKVFKIQYVYEVSEEPVVLNKDNILAIDLGIDNLATCVSTTGTPFIMDGCKLKSINHQWNKEKARLQSIAMKQGTKTTNRIQRITEKRNNRVNDAIKKTARYIINYCIANEIGTLIVGYNADFKRNSNIGKVNNQNFVQIPLGNLRQQLEFLCWRCGVEYIEQEEAYTSKSSFLDKDVLPEYKPEQPYTGKFSGSRVYRGLYKSKNGTIINADVNGSANIMRKCKQNLDYEKLCNGLLASPQRIRLS

SEQ ID NO: 47338 - protein, 414 aa, unknown
  TnpB Polypeptide
MKTKNQRIKDSLLITREKRKTQTCKVYELKLSENKFNLQQIEFLNRIFLEAKWVYNDILNFNDIKNYDCKKKEVEILNKDKEKEMRELKVLGSQVKQEILQRTWGSIKSLSTKKKKGKKKEVGKLKFKSQINSIPLKQYGITYKFQDDTLKIQNCKSLFQIKGLRQIPKEAEFANANLIRKASGYYLKVTCFLPKDDIIANKEIIGIDFGIKDDLVLSNGIKFQTKFPVSFQIKREQRKLAKKKKGSHNYWKQKNKVALAYEKQNNKKQDTKNKIVSFLKNTYSHIAIQNENIKGWHAGLFGKQVQQSILGGIISELKKLPQTHIVDRFFPSTKLCPECGQLNILALADRIYNCSCGYSQDRDVHSANNILLESIPMECRKFKPVEFNTSAIDYLKSFVSVNCEAGRYNSLELC

SEQ ID NO: 47339 - protein, 413 aa, unknown
  TnpB Polypeptide
MKINKAYKFRIYPNKIQREIFEKYFGICRFVHNSVLDYKIQSYKKRVKYSVYDAINDFVEIKKLEGYEWLQEINAQTIQQEIINLDNAFQKFFKEKKVGFPKFKSKKNDSNSFRVPQHCGVDFKNKKIKIPKIEWIKFRDKRVFENKIKSITISKNKCNQYFASILIEQNFEINLSQTIEEDKVFAADMSCKNFLVSQEMEFENQKFYRKNERRLKIRQRRLSRTLKGSNNREKERLKVAKTYLNITNQRKGYQWNLAHELTQKFDAFCFEDLNIEGMKQFNKGISKTVTMDFSFSEFLSNLEWKSFKENKHFVKIDRWFPSSKLCFECGNIKTDLQLSDRTYICDCGNVDDRDINAYKNIKREGISILKQRGINLLKNSTDVKMFSESYAYRDTSVEVNKLGLGRYNSLELC

SEQ ID NO: 47340 - protein, 379 aa, Enterobacterales sp.
MEQMTVTAKIQISVSGTDRALLDNTISVYRDACNYVSDYIFRTHDLKQFSLNKVLYSDLRERFGLKSQMAQSVFKTVIARYKTILENQKEWIKPSFKKPQYDLVWNRDYSLTQNCFSVNTLAGRVKLPYFTKGMDKYFDHTVYKFGTAKLVNKHGKYFLHIPVTYDIEDANLSDVCNIVGIDRGINFVVATYDSKHKSGFVSGKTIKQKRAAYSKLRKELQMRQTPSARRRIKAIGQRENRWMQDVNHCVSKALVESNPKHTLFVLEDLTGVRNATERVCTKNRYVSVSWSFYDLEQKLIYKAKQNQSTVIKVNPRYTSQCCPVCGHIEKANRNKKLHLFTCKNCGYKSNDDRIGAMNLYRMGINYLEDSQVPSTVTVE

SEQ ID NO: 47341 - protein, 379 aa, unknown
  TnpB Polypeptide
MEQMTITAKIQIVVDETDKVLLDETMSVYRNACNYVSDYVFRTHDLKQFSLNKVLYSTLRENFNLKSQMAQSVLKTVIARYKTILENQNEWMKPSFKKPQYDLVWNRDYSLTQNCFSINTLNGRVKLSYFGDGMSKYFDHTIYKFGTAKLVNKHGKYYLHIPVTYDVEESNVSDICNVVGIDRGINFVIATYDSKNKSGFVSGKAMKQKRANYSKLRKELQMRQTSSSRRRIKAIGGRENRWMQDINHQVSKALVKNNPKHTLFVLEDLSGIRNATERVKTKDRYVSVSWSFYDLEQKLIYKAKQNQSSVIKVDPRYTSQCCPCCGHIEKANRNKKMHLFTCKNCGYKSNDDRIGAMNLYRMGIDYLADSQVPNTVVTE

SEQ ID NO: 47342 - protein, 303 aa, Halopenitus sp.
VSLATVDGRIEVAYVLPDEDRDTPHSRYLDNDDYEVTGAELHNRDGEWFLHLRTKAEVESDTPEQATAGHNTVLGVDLGVNQLAVTSTGTFWSGHEFDHWRREYEKRRASFQQCGSRHAHENIQSVGRKETGRFKLMLHRIANGIIEEAAENGCTVIAFEELTGIRDRLSGASWGHKWAFERLYEYVEYKAEPNGIDVEQVDPENTSRRCSHCGFTHPDNRDGEEFACLKCGYENHADYNAAKNIGLRYLRRNQTGDGGGAPVGVRLNRGTLNASGEYESPVENSGQSGSPRESPITRTEGSG

SEQ ID NO: 47343 - protein, 437 aa, Halorubrum sp.
MLEVHRTHRATIRNHSQVAESLDRHGWSASKLWNVANYYARNVWDDTGEIPDHGRLKDELKTHTNYKGLHSQSSQRVLEELAEAFTSWYESTDDRDNPPGYRKENYYDDHGNRVHEEHPRSTVTWKQNGIKHDTTNNRVRLSKGANHKEHPKAWEYILVEYETRPGVTIENLQQVRAVYDRQKSRWELHLVCVDEVETPDAPGSETAGVDLGICNFAAVAYSTEEADLYPGNRLKQDGYYFPKEIAKCDDSSGDRATQLHHTWSERRTHFFHSLAKHIVERCVEKSVGQINVGDLEGVRDDKNGDAKNWGRHGNLDLHGWAFNRFTSILKYKAKVEGIEVVEVSERDTSKTCCVCGREDESQRVERGLYVCDACDAAFNADVNGAENIRLDMNESNSESSASLGGDRSTGWLAQPGVYLYDLSSGFQPQAQVVDCKP

SEQ ID NO: 47344 - protein, 471 aa, unknown
  TnpB Polypeptide
MSILIKTIKQHSFPFHKMKKNNFESLEKLGYEFRDTKNFFYSRFSGISYINKLKDKYTIRNEVIKEDLKNISKIPARYWKICLSHVLGNIKTLLENTKKLIKKATYNNSNLSAEDRHYVYTVLKSSEYLENVLRRKKLPNYLYDKFKINHKKLNNLIRRYFRRYKNKTPYSKKNNFLVLDSGLYKYKDGFLKISTLNKGKRICFKMKDRRVFKGNLMIKWENCLTVFGTKKIESKTIFKTENSVAIDKGYKKLIATDKNTFYGTEYSLLNKFLIDKQVQKLKNRSRLFQIAQRHKGKGNSEKAENIFKNNLGKIKQNRFTMKIRKRSENYINKEVNYFFDKEKPTEIIKEDLTWENYKNKKKKGFKNQIKRWEKGILDKSIEWKALQKNIKIININPAYTSQICNICDNFGIRNGENFTCECCQNKMDADVNAARNIKKRKNIKEIDLYTNAKKVKQYYENLKKGEAAFNI

SEQ ID NO: 47345 - protein, 453 aa, unknown
  TnpB Polypeptide
LKNPKNRKEVKEMKVKRTGKFRVKENHPDYKLIMLHTIEAKEIYNYANYIIRQIFFKKSGKENFSLNFINEYPELAEDFNIYISENFQFTSTFYRIICKFARIKKYSLNSKMVQNIVDILKRDWKSYWKLLKLKQENKYSKNINIPRYKKKYSAVEYNPQVISKRKFKNGYIGTSKMNEGFKIPKFYKEYKFKSSRAIWKNGFLYMETVYEKEVPEKRKIKKVAAADLGGKILMSIAYNFNRRGISISANMLRSLNHYYNKMIGIMTSLLPKGIKISGAIQNMWRKRDEQIRNFLGYYANKLVKEFKLIGIDKFIIGKNKEQKQEIDLHSRLENRNFCMIPFNKLIEILKYKCEENGIECMEQEESYTSRASFLNNYFMPVYGEEDKEYEFSGWRNGRTYKIKGKNQKIHADYNGAFNIMRKAGHELIEKVIFFNNNWIFPVGKFKVKNFNYS

SEQ ID NO: 47346 - protein, 251 aa, Clostridioides sp.
MYCGQYIKLPKLGMVKIRDKQVPQGRILNATISKEPSGRYYVSLCCTDVDIEAFENTNNQIGLDLGIKEFCISSCGEFIENPKYLKKSLNKLAKLQRELSRKTIGSLNRNKARLKVARLQEHIANQRKDFLQKLSTKLIKENDIICIEDLQVKNMIRNRKLSRLISDVSWSEFIRQLKYKANWYGRQIVTVGKFFASSQICNKCGYKNEEVKDLNIREWICPSCNETHDRDINASINILKEGLRLITIQNK

SEQ ID NO: 47347 - protein, 383 aa, unknown
  TnpB Polypeptide
VKSAWQHYAPNEQVLWVLEQFRQMLNESVRIGLAENVTSLKSLSLRAYRQLSEYDVHSGYKLCAISAATGILRNYRKAKRKNPCVKEPYARRPCLTTCYGLKVRDGELSLPIHARKHVRIPLNQHVQATIRGFTLRSVTLTEDRLCLCYAKEVQEVQPDGFIGLDHNLNNVTVAATDGTVQQHDLSEATRVKDRYREVRSHFKRNDVRVRRRISGKYGRKQRDKVQQILHQASKHIVEEAKEKRYGLVMEKLTGIRKLYRRGNLQGRSYRGRMNGWSYAELQRQIEHKARWLGLPVVYVHPHGTSSRCSICGQKMKPEENRTLRCPSCGYVVDRDVNAARNILARGVRFAPVASASEAMVQEPPREVILKVDAGESNRGVPQI

SEQ ID NO: 47348 - protein, 455 aa, unknown
  TnpB Polypeptide
MGLQTVNKAYKLNVCPLTRIKNEKLIDIENRYKTVLNTIKCGVEFWDALPNSDALPFTKFNLQKLLYKGIAKDSDLQSQLIIDAIADAWGNRKAPCARLNHPTIPYNRPRSGNLGKTKKGNPVVTIAIKDSGGGRMALPIAKDGAWERLQSELKDGWDFTCFELHHLRNKQEDRWCIIINLRKDFVVSDLAQAKTVLGIDTGSGTPAAITIVDKKGRTVHQEYFGRDIAHRQRAVWWRRAKLQSHASKGSRKAKGKLNDLKGYERNMVMTGCYQVAHRIVDLAVEYSSLLALEDLKGLNRPRKRKRQRKDGKGMEPLPPKVEKRINRKVHHIPYDILHTAIRSVGYQRRVGDVKVNPMYSSQTCSHCFVIDGSYRKGRIFVCGKCGLVVNADRNASVVIAIAPLLERPQTRHLGPVSRRDGRVNGHVWDHDGVKEAGREPVRSPETKPVNSFTGG

SEQ ID NO: 47349 - protein, 421 aa, Bacillus sp.
  misc_feature (84)..(117): Xaa can be any naturally occurring amino acid
MEVNEMMINKAYKFRIYPNQAQAILINKTIGCSRFVFNHFLSLWDHAYKETGKGLTYGTCSTKLPAMKKEFVWLKEVDSIAIQXXXXXXXXXXXXXXXXXXXXXXXXXXXXXXXXXXKEVDSIAIQSSVRNLADAYTRFFKKQNSAPRFKSKKNNVQSYTTKQTNENIAVIENKIKLPKLGLVRFAKSSEVKGRIVNATVRRKPSGRYFVSLLVETEVQELPKTNSYIGIDVGLKDFAILSDGRPYKNPKFFRSLEAKLAKAQRVLSRRMKGSSRWNKQRVKVARIHEYISNARKDYLDKISTEIIKNHDVIGIENLQVSNMLKNHKLAKAISEVSWSQFRYMLEYKAKWYGKQVIVVSKTFASSQLCSCCGYQNKDVKNLNLREWDCPSCRTNHDRDINASINIKNEAIRLLTARTAGLA

SEQ ID NO: 47350 - protein, 392 aa, Actinophytocola sp.
VRRSYKFRMRPTSRQHVALARCVDSHRELYNAALQERRDAWRAKGTRIFYRDQSAQLTQIRAVRPDVGVWSFSSQQATLRRLNKAFDGFFRRVNTGQIPGYPRFKGANRFDSVQWPKDGDGCRWHPDTKRVYLQAIGQVKVAAHRQVEGTVKTIQVKREGRHWYLILSCDDVPPNPLPATGKQAGVDVGIASFATTSDGEHVDNPRWARTGAAELAAAQRNLARKKRGSNNRKRARETVAARHRKVANQRRDFQHKLALDLVRSYELIAVEDLEIRNMLGRAKPVEDPNNPGQYLANGGAAKTGLNLSISDAAWGRFVSILRAKAEDAGRVVIDVDPRHTSDRCEHCGHAAKQNRVTQALFVCGSCGYAAHADEHAARNILRAGLARHAAAA

SEQ ID NO: 47351 - protein, 451 aa, Beggiatoa sp.
MKKAKKVTRIIYSDNLNQAKYDALNEIAKRCGSIRTEVWRNYGSIGGLGARFRHVRDSWMANKHIKNLPNTIWRVTLDNTLADIKANREAAKEQVMRHLFRNIDDKPKRQELVDKLKDDALWIKDSYLRRLMRQYWKHGKNHTFNQIVLEPNSYKCFSHNGKNYIKVSGLVKGKRIAIPVKSNQAITGRIRLILREGQVEIHYTIDNTDDRACGNKKIGIDKGYTEAFVDSEGEFYGKSLGEVLSKESDYLKKKYQRRNKIKAVFCKVEQKNPKKAKRIRKHNLGRKKLNRRKQRHQASVKTIVFTAVNEVVDKAKTVVCEDLTKTFKSKSYGKNANRRLSGWVKGLMALAIDIVASRRGSRVVQVNAAYTSQICSQCGCFGKRTGDKFHCAWGCGAGMQADLNAAFNVKARLDDKELHRWLPFKKVKQILLERCRRTDETAHPEVQLQLI

SEQ ID NO: 47352 - protein, 315 aa, Actinomadura sp.
MANFFAGTHRRPTWRRAGKDEGFRIVAMKPGNVRRISRNVGQVRIPKVGWVRFRWSRAVPRAKSYRVTRDRAGRRHVAFAVAPPPLAGPGTGSVVGVDRGVVVSAALSTGELLRVPGLRETEARRLRLLRRRLARARPGSRRRAGTKAALARLHARAADRRKDWVEKTSTALATRFDVIAVEDLKIANMTRSARGTRSAPGRGVTAKAALNRGILASGWGQLVRRLDQKAPGRVVKVKAAYTSQRCSACGNLDRKARESQAVFRCGPCGFVGNADVNAALNVGNAARHAVAAREGLWDAGPTHREPHLAHLRSFA

SEQ ID NO: 47353 - protein, 399 aa, Actinomadura sp.
VRTAYKCRAYPDPEQAALLGRTFGCVRLIGNKTLAARHRRWHDEGKPTTYKQTDAQLTTWKKTEELTFLNEVSSVPLQQTLRHQHAAFTSFFAGHARYPRYKSRNGRQSAHFTRAAFRMRDGKLTLAKTTAALRFVWSFEDVDPATLHPTMVIVSREPDGRWYITFAVDTHAPDPLPQVGHAIGVDLGIKHFATTSDGDRLPNPRHLERKARNLARYQRRMARKQPGSANRKKAKAKVARAHRKVRNARQDFPHRTTTGLVRSADTIVIEDLTVTNMMRNRRLAKAIADCGWGEFRRQLDYKCARTGRTLTVIDRWFPSSKTCSTCGHLLKTLTLSTRHWTCPSCRTRHDRDLNAAKNILAAGRAVTACGADIRRQGHALPQSATKQETQPARAGLPCR

SEQ ID NO: 47354 - protein, 402 aa, Actinomadura sp.
MARQVKRAFKYRFYPTDEQAVELSRTFGCVRLVYNKALEERTRAWYGQQRRISYAQSSAALTQWKKSEELAFLNEVSSVLLQQALRHLQAAFASFFAKRAKYPRYKSKKKARASAEYTRSAFTWRDGKLTLAKMAEPLDIRWSRPLPQGTEPSTVTVSRDSAGRWFVSMLVQDTIAPAPATGTAVGLDAGVTALVTLSTGEKITNPRHERRDRTRLAKAQRELSRKAKGSANREKARRKVSRIHARTTDRRRDFLHKLTTRLVRENQTVVIEDLTVRNLLKNGRLARAISDAAWADLRSMLEYKCAWYGRELVVIDRWFPSSKLCGACGRLRERLPLNVREWTCGCGTTHDRDVNAARDILAAGLAVSACGAGVRPQRESSRAGRSAMKQETQRATAGLPRL

SEQ ID NO: 47355 - protein, 367 aa, unknown
  TnpB Polypeptide
MLKAYKYRIYPNKQQIEQIQKTFGCCRFVYNQTLAYRKEVYETKKESMSKIDCNNYVNRILKKEYEWLKEVDKFALTNSVYNMDSAYQKFFKEHTGYPKFKSKHDNHKSYTTNFTHGNIAVDFEENRVKLPKLKWIKTKVHREFVGKIKSATISQAPSGKYFISILVETEHIPMESTGYMVGIDLGVKDLLITSDGEKFENIRTTKKYENKLAKEQRKLSHKVKGSKNWNKQRIKVARIHEKIHNTRIDNLHKISHKLINENQVIVSEDLQIKNMVKNHHLAKSISDVSWHELTRQLEYKAKWNGRKYVKIDTFYASSQLCSVCGYQNTETKNLSVREWICPVCGTNHDRDINAAKNILEEGLRQIA

SEQ ID NO: 47356 - protein, 390 aa, unknown
  TnpB Polypeptide
MELRMYKYRIYPSTKQKVRLINSLKTCKTIYNELLALNIDSWKYGKVFLSGFDCNKYLTDKYSNIHSQSKQNVSDRVHKAFRNFFRRVKDKSYKKKGFPRFKSKVNSVTFPQSGFKILSDKRISISKIGNIPFVLHRVPKGKIKTMTIKVNKANQWFAIFSCEVEAEKVKHPSKEKVGIDVGLENFATLSNGESITNPRFLVKSEKRLKLLQRRLSRKKKGSKNRKKAKFKVSREHLKVVNQRTDFLHKLSRSLAFKYSVIAVEDLNIKNMLKNHWLAKSISDASWNQFIQMLSYKEVKFGGQLLKNPRTRGSSHRCSKCGEWVDMPLSKRIFKCSCGNVCHRDLNASINHLNDTVGTDCSKPNACGDSTSTTEQSVASGIVESGTIFGN

SEQ ID NO: 47357 - protein, 396 aa, unknown
  TnpB Polypeptide
VKRAYRYRFYPTPQQASELNRTLGCVRFVWNWALAERTKRYRVGGESVGYHQLSAELTVLKRTEHAGFLSEVASCPLQQCLRHQQSAFGNFFAKRARYPRFKNRHGHQSMEYTNKAFTFRDGVLRVAKLAEPLAVVWSRPLPDGCAPSTVTVSRDTAGRWHVSMLVDEHIEALPPVGTAVGIDLGLKDFVVTSDGERIPHPQILRRKEQRLARYQRMMARKTKGSKNRGKAKTRVAKAYARVADTRRDFLHKTSTSMVRRYDLIVVEDLAVRNMVRNHHLAKSISDSGWGEFRRQLEYKSAWYGRTLVVVDRFFPSSKLCSHCGHLLSKLSLGTRHWTCPTCGTLHDRDLNAAKNILAEGHSVTACGADVRRTGATRARSARKQETHGGDPGNPRP

SEQ ID NO: 47358 - protein, 360 aa, Clostridium sp.
MQLTETVKLYPNKYQTELIKVTMTEYISTVNHLVLDAANGRTITKMTTADVKVNLPSALCNQCIRDAKSIIRKYNKALRNSNTKVRLPVLKKMCCYINNQNFRINDDCINFPVIINGKSKRISVKTKISKKQKSIFSSSKLGTMRIVVKGYDLVSQIVYDTKEDAASSNDNVMGVDLGIKCPAVSYCPDGSVKFYGNGRKNKYIRRHYNNLRKRFQKAKKPKAVVKINNKEQRIMKDIDHKLSREIVNTAKAHDISVIKLERLQNIRSTTRTSRKNNHNLHTWPFYRLATFIEYKAKLAGIEVEYVDPAYTSQICPICGRIQHAKDRNYTCRCGFHTHRDLLGAINIYNSTEYIGNRYTA

SEQ ID NO: 47359 - protein, 364 aa, unknown
  TnpB Polypeptide
MKTLKLRIKDKHCKELDQLALEVNFVWNYVNDLCFKYLQRKQQFFSAYDIAKYTKGASKECNLHSQTIQAVTEELVTRRKQFKKAKLKWRVSNKKSARRSLGWIPFKKVAIKYADGYIQYGKHQFKLWDSYGLSKYNVKTGSFVEDSRRRWYVCLVVENVQQVKTNTKTSIGIDLGLKDLATCSNGVKLKAAQIYRQYEQRLSIAQRAKNKKRVKAIHAKIKNIRQNMLHQFSHKLVNEHAAIFVGNVNAKALVQTKLAKSVLDAGWTTLRSMLKYKCENAGVWYEEVNEAYTTQTCSCCGSRSSSPKGRAGLGIREWQCVECGTFHDRDINSALNILALGHERLVGGIPVLKVGEDVKEQKLR

SEQ ID NO: 47360 - protein, 398 aa, Bacillus sp.
MNIHKAYKFRLYPTDKQATLIHKTIGCCRFVFNQALAKQDKKVVYWYIVHEMVQNGQLTENRWKSEFFNASNAQKELTSMKKEMQWLNEVDSTALQSTLQDLGKAFKAFYHKSKGKPRFKSKKNNIQSYKAKCNYNKGVGSVRMERMGNKDFLLLPKMGWVKVAKSREVRGKILSATVRRSATGKYFVSILTEQKIEMIQTSMFKIGIDVGLKEFATFSDGTTISNPKWFRSLEEKLVKAQRILSRRKVGSSNWHKQKRKVAKIHEDIMNARQDFLHKLSSSLVRENQVIAIEDLRVKNMLKNRKLAKAISEVSWSEFRRMLAYKCKWYGKHLVVVGSHFPSSQLCSSCEKKNKAVKNLSIREWTCECGAHHDRDHNAAKNILKEGGRLLTAGQAGIA

SEQ ID NO: 47361 - protein, 424 aa, unknown
  TnpB Polypeptide
VKLANAVQSSHSDEKSSLTYEQLSRSVSLFVPIAPTSSSFRELPVVRTLRFKLMRSKKNRKLHREIEQFCRVYNHFIAVIERYYRLFKKHPSANRLKKLLPKLKRTRRLSWLKELPSQALQDVVERIDRAYKRFFEERKKGRRCARPHFKQSENYKSFTLKQAGWEFIGEHALRIGEFVFKFHKSREIPAEKVKTVTIKRDKLGDIHVFFVVKSTEFVPKRCATGQSVGIDFGFDQFLTLSDGMSVDAPMFFKRDLRHIKQLSRSMSRKVHDSKSWNLTRLARNRAYRAIQHKRDDWHWRLAHELCQTYDLICFETLNFKFFQRKHGKKVQDFGFVNFVKKLTYLAKRYGTQVVFIDRFFPSSQLCNACGYQNPALKDLKIRSWVCPACGKHHERDLNAAKNIHDEGGRALAGLTEFKNFEIIS

SEQ ID NO: 47362 - protein, 385 aa, unknown
  TnpB Polypeptide
MEKGYVYRAYPNAKQRELIKKTFGCKRFIYNHFLDLRKARWENDKKNMTFFEMNKLLTPLKQEKDFLCEPDKNALQNALRDLDKAYDNFFGTVNSPRKRKFGYPRFKSKRDNYQSYRTNFTNNNIAFEGSHIKLPKLGRVRIRGGKTLVPDGRILSATVRIEPDGRYYISICATDVPAPVLEHNEDPVGIDLGIKDLAILSDGTQFDALKPLNASLKRLKFLQRSFDRKSKSSARREKDRVKVARMHAKIAAQRLDYIHKLTNFVTKKYGIIFLEDLNVSGMMKNHKLARHIADSSWGELRRQLEYKSLWRGRVLLTVDRFYASSQTCGNCGFKNPSVKDLGVREWICPECGRHNDRDLNAAQNILCEGLRLLAELDEKFRDKTA

SEQ ID NO: 47363 - protein, 364 aa, unknown
  TnpB Polypeptide
MSVRSRRCEPLLSSVLLSNVAVGCVGCRFCDVAIFPRGENPAVYGGSESDNPKRFANDAMDGYSTLFRTIKSICLHRLYMAIQVTRTYIGSIQNQRQVQSGLDSLGDSASKIWNVARWTADRIWDETGKIPDVSVLKAYMKNQACWKDLNAQSSQKVIEELSDAFQSWFDLRQKDDTANPPGYRKHGDERPRAVRSRSKKTGSNTTPTTTASDSRKVPISRGIGRISCCANTRPALTLISQKSTRYRTFVRSGTVTSGELHFVCKVKLKTNDSTGNEVAGIDLGITNIATVAFPDEYVLYPGNSIKQDKHYFKRSEYDTEGKTAHLTSRRGHVENLLTARHTFSTFSQTPSSQSVSNVVLERWQ

SEQ ID NO: 47364 - protein, 299 aa, unknown
  TnpB Polypeptide
VDRRRNGLHFVCKVEIEVSESPGEKTVGIDLGINNFAALAYENGHSELYPLNCLKQDDYYFSKRIAQCDNSNSEQATRLNHKKSARRTHYFHTLSKHIVQRCVDEEVGTIVVGDLFGIREGEEISESKDWGAQGNLDLHSWAFDRFTDLLEYKAEMEGITVEPVSERDTSKSCSCCGRERKANRVERGLYVCDECGTVANADVNGAENIRQKVSPSSPNLSVNRSNGWLAQPSTFLFDKGNWCVCTSRTGNVVNHNIPTQRCGAVGILALQRGRMSRCGSWSVQPTFAGATRSRDTGRI

SEQ ID NO: 47365 - protein, 335 aa, unknown
  TnpB Polypeptide
VNGRRDPKYKHKTEGRNILVYTVQALSKPGMRDGLIRPSGLPSTIETEHTVVDQVRIVPRNGYYVVEVIYTKEPVQAKVDPSFCVAIDLGVTNLAAIASNREGFAPRLVNGCPVKAWNQWYNKRRKELKKQLPKEDRERVTKQMQRITKTRNRQIMHIDELMRPSRAQSCPHLIFNLHNHYLHTASKRIVDFLVKEGAGTVIIGKNPLWKQETGMGKRNNQNFLSIPHARFIDMLTYKAALVGIQVEVREESYTSQASFLDLDPIPTYTPNDEEKHVFSGKRIGRRNRLYRTKDGRTICADVNGAYNILRKSRPDAFSKAKGVAGYVVHPVRLAV

SEQ ID NO: 47366 - protein, 393 aa, Thermococcus sp.
MLSETIKLTAKIKLKNPPEGLDDLFSLYREIVNLLITHACENNITSFYRLKKETYKELRGKYPQLPSHYLYTACQMATSIYKSYRKRKRKGKANGKPAFKKEVIMLDDHLFKLDLEAGVIKLSAPGGRIPLEFYPAKYHEKFKSWRVGQAWLVKTPEGVFINVVFSKEVEVGEPETFVGVDLNENNVTLSLPNGGFVQIITHEREIRTGYFVKRRRIQKKLRAGRKRSELLEKYGERERNRLNDLYHKLANKIVELAEKYGGIALEDLTEIRESIRYSAEMNGRLHRWSFRKLQSIIEYKAKLKGINVVFVNPAHTSSLCPVCGEKLSPNGCRVLKCLNCGFEADRDVVGSWNIRLRALKMWGVSVPPESQPMKLGGWKVIRYDCITCSKSSG

SEQ ID NO: 47367 - protein, 259 aa, unknown
  TnpB Polypeptide
MKLILHRNLPENAHICNVTLSLDTDGHFYASIAFSYVMQMEMDLRNLAITGGTLPENLTFLGLDYSQNDFYVDSDGKKANYPHYYRKSEEKLGKLQTRLAKKQKGSSNYKKLQAKIQKLHAKIKNQRNDFLQQESTRLVRKYDVIAVEDIDLRAMGGALKLGKNLHDNGFGMFRTMLAYKLEQKGSCLVKVDRWFASTKTCSHCGHVQKVGLDERTYVCEECGFTIDRDWNAAINIREEGKRIFLDYFKTLIEEKQAAA

SEQ ID NO: 47368 - protein, 270 aa, unknown
  TnpB Polypeptide
MIRAIRIRLYPTPDQKKYLAGLFGAVRFCFNKALYLKTHFYKVKGVNLHPIHDLKKLIAIAKNTKKYAWLAEYDCMALQESVRNLNKAYSRFFKKEAGYPRFKSRRGEQSSYHCTGVSAGDDFVKVPKMKKIKAVMHRKIEGKVKSITLSMDACGDYWASVLYEDGLPEAVPATCVRQSKTVGVDVGIETFGTCSDGEKIKSPKALKRAEKKLKKAQRAFSRKQKGSKNREKARKRLARLHRKVKRRRSDFLHKTSRRLVIHGQLPFCKG

SEQ ID NO: 47369 - protein, 505 aa, Kerstersia sp.
LVLAGHLGIKPGRKTVVWEESGATVPAERVREASMVGHARNTWMSVSDLVAYLIRKRVKPRPSGRGRIARATQWPYTIAVYVYSVAMQRLQAFKYELRPDGQQERQMRRFSGSCRFVFNKALALQKANHEAGGKFIGYVAMARHLTAWRNGTETPWLKDAPVHPLQHALNDLERAYRNFFAKRANFPRFKKKGQHESFRYPDAKQFKLDTGNTRIFLPKLGWMRLRLSRALLGKPCSATISQSGGKWFVAIQTEREVRQPVPQATSAIGIDMGIARFATFSDGSFLAPLSSFQKHEMRLRRYQRAMSRKQKFSNNWHRARRRVQATHTCIGNARRDYLHKATSAISQNHAMVSIEDLQVRNMSHSARGNADQHGRNVKAKSGLNKAILDQGWFEFRRQLEYKLAWNGGILVAVPPQNTSRTCPCCGQVAKDNRRTQALFLCVACGYEENADVVGAMNILRAGHARLACGEDVSRARPEAARTKARRAASAKQEPAEATHSSPLPL

SEQ ID NO: 47370 - protein, 393 aa, Archaeon sp.
MLALRAVSQKHQASGEILPLLEEFRRMVNVCITVGMEEDISSLKTLSSKAYHRLNKSTPGYYRFCAVSTATGILRNYRKAKRENRVATFPYARKLMLRTYASCGGFKIQDGFLRLAVKPRAFIHIKLNGYTLRVLSGMTVRSVTVTPGVLSISYSKEVVQVKPEGYIGVDRNLDNVTISSTDQRATSFDLSKVTRIKSTYRYVTSRFRRNDSRIRQVVYSKYGLKQRNRVQPLLHDISKRIVSEAKNRRYGIVMERLTKIRRLYRKGNWQSTNYRAKMNSWSYGELQRQIDYKGRWEGVRLIYVPARNTSKRCSMCGCKTLEGTQRKLWCPNCGTLLDRDVNAARNIAAGGMRFIPDGPPVEAMVEEREPMNATLIPKVDGGKSSLKEALTPS

SEQ ID NO: 47371 - protein, 380 aa, unknown
  TnpB Polypeptide
MIVNRTYKYKLYRSKKNKHLHNRINIAGIIYNHCIALHRRYYRLYGKHLNQYRLMKHITRLKRLPRHSYWNKVGSQAIQDIVQRINKAYQLFYRNLKHGIKTSPPGFKKVRKYRSITLKQSGWKLMGDNCIKLGKTVYKYSKSRELPEAIRTVTIKRDTLGAFWLCFSVQEEIIVPDRSGNNAVGFDFGLTTFLVGSDGTRFHAPLYYHQLLNELRQAQKKLSSKRKGSNNRNKARLSVARIHQKIINLRRDYFFKLAHELTDSYDYIFLEDLNLKAMQRLWGRKISDLSHATFVNILKYVALIKGKEVVFVDRFFPSSKTCHICGRVNHALSLSDRTWACPCGATHDRDVNAAINILMEGASPIGLGAVRPAIKEASSA

SEQ ID NO: 47372 - protein, 394 aa, unknown
  TnpB Polypeptide
MRLVERHIVKDSRFEDICLKSGLLYNYVLYNVRQGIFSGNYLKEYEFSTKLGRENQFDFRNLPSAVSQQVVAQVFCAVKSWMRSKKEFKNNPSKFNSKPKLPSYKKDKRQNMVVFATNACRIKDGYIHFVKNIIQPIKTKIGDSKLCQVRIIPQAICYVVEMIYEKKEQNINLDRDNVLSIDLGLNNLCSCISNVGLIPFIVNGRIMKSFNQWYNKKKAKLMSYVGDVGTSKRIRQLNNYRNFWIEDYIHKVSRYIVNYCINNNIGSIVIGLNKGWKQEISLGKRTNQKFVEVPFSRLIDKISYKCKLVGISFHIHEESYTSKVDHLAFEKLGKHDVYLGKRKKRGLFQSSIGKLLNADINGAIGIGRKVFGDSYVSKIIDSGFAFNPVRVSIL

SEQ ID NO: 47373 - protein, 422 aa, Firmicutes sp.
MIVHQAYRFALDPSPRAEQALASHVGARRFAFNWGLALVKARLEARKRGEDVEVPWTLPALRREWNRAKETVAPWWRENSKEAYSSGLAGLADALKNWSDSRKGRRKGRRMGFPRFRKKGRGRESVCFTTGPIRVDDKSHVVLPRIGRVRTHEPTTALLGRIEAGTARILRATVSREGGRWFVSFTCEVEREPKAPRFPDAVVGVDAGLRHLAVLSTGERVVNPRPLKAALRRIARLNRELARRKPGSRNREESGRRLARAHARAANIRRDAWHKLTTRLARTYGTIVVERLCVAGLMRSRRLTRAVADAAPAELRRQLVYKCVWYGSRLVEADRFWPSSKTCSRCGAVKEKLPLWERVFRCDACGFVLDRDENAARNLAALVAAVAGSGPETLNARGRDVRPARWGGRSRMKREAGSAPGA

SEQ ID NO: 47374 - protein, 429 aa, Glycomyces sp.
VLLRYRFRLYPTRPQRIALSRAFGCARVVFNDTVAARRLAHAEGLPYPTSATLSKRLITEAKRTPERAWLGEVSAVALQQALADADQAFRNFFASLKGRRQGSRMGPPRFKRRTGTQSIRFTRNARFEVLANGRLHLPKVGDLKVAWSRDLPSKPSSVTVLMSPTGKYYASFVVTVEDGTDFPGLLADPEAETGIDLGLKDFAVLRGGKVIENPRFFARLEQKLKKAQRALSRKAKGSQNQAKARLQVAKIHERVKQARSDWIDKQVKTIVAENQGIYVEDLGVKSLSRGRHSKSIQDAAFGMFLTRLESKANRAGRTFVRVDRFFPSTRLCSACGALTGPRGLEGLKVRAWACGCGAFHDRDANAEINIRREGKRMVAEGHSDTRNASGQDVRPGTLGRPGNPRKGKNEEPDRSRSATADRKPGIPAH

SEQ ID NO: 47375 - protein, 425 aa, unknown
  TnpB Polypeptide
MTSITLVTESKLYLKDNTSLYDYFDDYSKLFNFLVRRCVHHLKNKLNGESESCYRTNLMFEFNITNRMAKAVIKTAKNQLKLLKESAKYQYNNLYKRKRSLFKKITKFKAILSSSSTSLKRRKLTKLRLFWTQMKLNKVNQLINNGLKLHLTFGTKHFLKNNKQKFFVKRDNQVVYIGDKNEKYGNQQFQINFNSKYNRFEYKLRLDNRWVYGKIKYIYGSFVLKNKEAKSHILKTLSEKKSNPLTYRIIKRKNILYLQIMYRREATDITRSNYGVLGVDFNKGFISVSEINSDGKLQSLTRYNYLHQGKATKTKTSMLNLVSNLVNQAKDVGKDIVIEDLVSLDSNKKQEKTTSKNYNRMINSLKFGLFKRYLLSKATKEGVLVHTVNPYNTSKIARKSYTNRMKLNIHDAASYVIARRFYQYD

SEQ ID NO: 47376 - protein, 382 aa, unknown
  TnpB Polypeptide
MLTAVKYRIYPNKNQSILINKTVGCARFVYNKMLSDFYDNDLITTPAYYKQDYPFLKEVDSLALANSQMNLKQAFRNYKNNKDHFDKPKFKKKSRSKLSYKTNNQKGTIRIENDKLILPKFKAGIKIVLHRQIDGLIKSVTIEQVPSGCYTASILYDVPNNQEETILSKDNIVGIDLGLTHLAITSDNEKYDNPKHVRQLQKKLAKEQRILSRRFNNNVKERIYDENGDYVKTVFKKPLKDCKNYQKQKRKVAKIYNKIKNRRLDNLHKVSTKVVKSHDYVVMETLKVHNLIKNRKLSKSIADVGWSMFVNMIEYKCERYGKEFVQIDQWFPSSQICSHCNHKDGKKALSIREWTCNNCGTHHDRDINAAINIKNKGLEMIS

SEQ ID NO: 47377 - protein, 436 aa, unknown
  TnpB Polypeptide
MKLTGDLTALENSIRIYRQALSVLIPIINDEWEVLSECEYTNQKYNLIEKWIHSTSKNQARFDFDKQFPKFPTYLRRSAVAKSLGIVSSYRSNFENWEKEPKGQTPKLSLTHYDYPAYYKANLFRNFDPVHQTIELKVFKNGDWIYEVYQLKTSDCTYYQTHLTSKKQNVPVIQKKGRRFYATFSYEEKTVLVPEESIRKVCAVDLGLGTDATCSIIDAEGTVYARTFISFSEEHDRLDTQLGRIKRNQKRGSRHNRTLWRKVSGISQDIADKTVKAILDFGNEHGVDVFVLEYLDFNGKSAVKRAHFWRYKRIYKVLTQKAHQYGLRIARVNARNTSRLAFDGSGWSQRGEEITPETPYAIMRFKTGKLYNADLNASYNIGARYWIRHHLKTVTATQRLVLEAKVPQVTKRSTCTLSDLINLRSELAAIADRTQA

SEQ ID NO: 47378 - protein, 402 aa, Escherichia sp.
VKRLQAFKFQLRPGGQQECEMRRFAGACRFVFNRALARQNENHEAGNKYIPYGKMASWLVEWKNATETQWLKDSPSQPLQQSLKDLERAYKNFFRKRAAFPRFKKRGQNDAFRYPQGVKLDQENNRIFLPKLGWMRYRNSRQVTGVVKNVTVSQSCGTWYISIQTESEVSTPAHPSASMVGLDAGVAKLATLSDGTVFEPVNSFQKNQKTLARLQRQLSRKVKFSNNWQKQKRKIQRLHSCIANIRRDYLHKVTTAVSKNHAMIVIEDLKVSNMSKSAAGTVSQPGRNVRAKSGLNRSILDQGWYEMHRQLEYKQLWRGGQVLAVPPAYTSQRCAYCGHTAKENRLSQSKFRCQVCGYTANADVNGARNILAAGHAVLACGEMVQSGRPLKQEPTEMIQATA

SEQ ID NO: 47379 - protein, 339 aa, Burkholderia sp.
MISVYRYRVKSLNGLLNKQSRAVNYVWNFCNDTQKHALKWGKKWPTGFDLNVLTTGSSKELGIHSGTVNAACEQYAKSRNQHKRPYLRYRGRKSLGWVPLKGRELKREGDAFRFAGNTFRVFNSRPLPEGKIKDGTNFAQDARGNWFLNIVIETPDVQVRPICSGVGVDLGLKDFATLSNGESIPNDRFGRQAAEKLAKAQRARKHKRHLAKLHAKVANARADFQHKLALDLVRRFDYIAVGNVSAGKLAKTRMAKSVYDASWSSFRDKLRYKAITHGATFEEVNESFSSVTCSACGSRSGPKGIAGLRIREWTCGECGSIHDRDTNAAANILRCGRAS

SEQ ID NO: 47380 - protein, 423 aa, unknown
  TnpB Polypeptide
VAYGLLRTQGKLQYPGKSNRKVSACSCNDGGGYGSGQYAGRQRWNEAGINGGVGMSNKMMQRGTRLRIYPTEEQKIKIDDTIEACRKVYNMGLTMREEAHKIGKSIGYEQTAKALTKMKNLPKYTYMKELDSVALQQALRDLNQGYKNYFAGRAEVPKYKKAKPGGSYRTVNQANKIRIENNKIRIPIIGRIKVRQTREIGIIRFATIVRTASEEYYVSLNEYFIPDNRPNAGGAVGIDMGLKKFITTSNGDVVENPKILEKSINRLQLEQRRLSRKQIGSKNWKKQRIKVARRCEKIANRRNDFLQKATTQLIKDNQLVCVEDLSVRDMVKNRYIARLINDASWSKFYDQLEYKASWYGNDLIKVPRFFPSSQICSACGYQNKETKNLMLRNWECPKCGSIHDRDKNAAINILRKGQEIKGA

SEQ ID NO: 47381 - protein, 401 aa, unknown
  TnpB Polypeptide
MGHLTYNTRLVFDDQKDHQKLLDVLSAYTEAFNECSKIKFNSVKENSIVLLHSKFYKQYRISNPALPSILVVQAEQECLSSYRGIKPNKHKISKPIERNHGKQSVRLNKCSYSYKQEAKIFSIVSLEKRVKCKLHLFPKLEELLLKYKFADPLLFTRENQVWMALTFNVPEVPLVSTLALGVDLGIRNYAATSEGNLYKDNKFNERKRRLRHNKDILKSKKNNSHSARYKLKALKHKERNQNKNFCHHLVNKILKDTPADTIVLENLKSLKVKKHKYQNKNRVSQVPFFLIRTILTYKAALLNKQVITVCPSYTSQIDHRTGLKDGIRQGCRYIGKDGFIQHADINAAMNIANRSKHPVSQAFGLTYGQAVVNQPIVRKSETPQGYRTSFLASPAVLTVDY

SEQ ID NO: 47382 - protein, 194 aa, Okeania sp.
IPKRGFPNFKKKGKKDSFYLEGRIKILKGNYIKLPRIGIVKTYEILPSCRVKNVTISKRADEWYISFKSDEYQPKSPTKKRAAIGVDVGINALATCSDGTTYANVKAYKQVKKRLARYQRRVNKKEQGSKNRAKAIKKLAKLHKKVADIRVDALHKLTTWASFEPQHHSHRRFECKWNAQKPQVGKCHSRLWLL

SEQ ID NO: 47383 - protein, 422 aa, Acidilobales sp.
MLRLLPDEGAGERLKSLCNLSSKLWNEVNYARRRMFFETKRVDLKQTYKEFYERYKKLIGSATTQQILNKNDEAWRSFFSSLKAKKEGRLPPFIKKVNPPGYRKRGGIRILWTVLRNDQYRIDGEYIVIKGLGAIGSIRVRYSGKIHVSGKQCRAEIHYDQDDKKWYIYISYEVDRKAIRGSSFRIPLKPNGNKEAGIDIGVNNLLAIYVDDGSALLVNGRPLKAISFYWRDKISEYQSTLNRYGLRSSKRLRRMYRKWRKQIKSYIGWAVRNTIEWLYNEGVKKIYVGYPKYASQEPNKGSKVNFEIVHIWSYGYLLKRLREVAEEYGIEVEHVDEENTSRTCPICRAIENHERITRGLFKCYKHNIVFNADLVGAFNILAKGKAITPSPALCGVGVTRLRPGVRLNPAEAGDVAPNLPTL

SEQ ID NO: 47384 - protein, 348 aa, unknown
  TnpB Polypeptide
MILVYKYRVKSLNGLLNKQARACNYVWNYANDVQKQALKWGKKWPSGFDLNVLTTGSSKELGLHSGTVNAVCEQYAKSRKQHKKPYLRWRGKKSLGWVPIKGRDLKREGEAFRFAGNTFRVFNSRTLPEGKIKDGTNFSQDSRGNWFLNIVIEVADASPRPINNGVGIDLGLKDFATLSTGEKIEAQRIYRGSEQVLAVAQRAGKKRRVKAIHAQIANRRNDFHQKLSTRLVREFDYIAVGNVCAKGLAKTNLAKSVLDAGWSSFRNMLRYKAIAHGAKVEEVSERFTTQTCHECGSIAGPKGQTGLNERNWICGDCGCLHDRDVNAALNILFRGYGHVAPAQGIPVL

SEQ ID NO: 47385 - protein, 205 aa, unknown
  TnpB Polypeptide
VNIVVITHRPRIRLSGATTSSLQVRIAAQRPAGTADAPGKNVRAKSALNKAILDQGWYEFRCMLEYKLAWKGGRLIVVPPQNPSRTCPCCGHVSSDNRQTQAWFECVACGYENNADRGSGPEAFRGSGPEAFRGSGPEAFLVGAINILARGIQLLRDEGQDTADAAVGMRVGEPPVSARMACGSNCTGGRKQEPAETTAQGAIHA

SEQ ID NO: 47386 - protein, 571 aa, unknown
  TnpB Polypeptide
  misc_feature (540)..(541): Xaa can be any naturally occurring amino acid
MQKPKKKSKRQQINPEEGIKYTVCGEWFPEPAAIMHEANAWARGTEDPLTTEMRLFCACIRFCFNRLLEGSTREELKKQAQGMFGLNSRYCDDAILKAQEIINSQKELLNIESKETEKKLNRAKKKLGWAEKDLARAVKTNDATKIARAKLTVHGRKMRVKKLAAKLAELQAHQESGTIPKVVFGGRSLWQQVCKGKASREEWRSTRQNRLYARGDASKGGNPNIKISYRDGQFTLFVTISHLSIQAKADSLGRPVMTNAPRVTGKLWLPEKHRQKVWELLLSGAPYAVELIRDKDGRYRAHITFTITQPQTVTNPNRGYLGVDTNPDGIALANVGYTGQPEPWPQGLIVPYPQALHKYAGEFQVTVHPNGFLYIKLPELAYSRGYRRAYLIGVLAKVVVDMAKHLSKPLAVEKLDFGKDRLDTNKRFNRMAANFPFKKIIEAITRKAFKEGVGIKLIWPAHTSTIGYYKYMERYGITVHHAAAYVIARRAIGFKEKITKELKQKVLALKAKLNQKANSLPGEGKGMTRKVKRLFKYLDXXIPLHNGLTRYQQETFYSAWHDLKQLAYLSR

SEQ ID NO: 47387 - protein, 438 aa, Glaesserella sp.
MSENNEIISLSHKIEIIANNKQKTHFRKAFGCSRLAYNWGLAKWQEYYKQGIKKSHLDLKKEFNAIKKSEFPFVYEVSKYATQQPFLNLNLAFQKFFRDLKQGKLSYPRFKRKRDNFGSYYIGGDQVALSESNKNSDKYKRLHSNVKAQYLKVPNLGYVKLAEKVRFDGKINSVTISQQGNKFYASFSVSIPQSQFKSQPRSDLGLGIDLGIKSMVSLSNGLEVKSPKPLAKLTRKLVRLSRQLSKKQHPKTKGDKTTKSNNYKKASLKVSKLHKRITYIRTDFLHKLTSSLIKNVGYFCLEDLNVSGMLKNRKLAKSVADVSFYEFRRQLEYKANYHHRWIEYVDRWYPSSKKCSQCGEIKLDLTLSDRIYKCEHCYAVLDRDYNAALNLFHYLKEKIGQVLPEFTPADLTALQADLAVNQLATSKVETGIQQKSYL

SEQ ID NO: 47388 - protein, 305 aa, unknown
  TnpB Polypeptide
LDGQPCRYSIHIRVRVSQPIRDYTSVGVNWTKRTLVFVNDPLPIQREASRSIVGLDRGCKHTLATSDGRFIDLPKHRLERIDREIRRRQKSQAHRINMSGKDVREYVRQPSRTYRKVQREINGLYAKAHRIIDDWQHKTTSMLVKRYDLIVLEDLNLQGMSRKAKAKNAPGRPSVFLPNGQAAKRGLNRSLRSAALGGIADKLEYKTRLADDSLLMLVNPAYTSQTCSECGHCERNNRESQAEFHCKKCGIRMNADLNAAQNILDRGWRQLSGSDGAGHATMTQDVHPAYRGADAAIGACGTSAS

SEQ ID NO: 47389 - protein, 424 aa, unknown
  TnpB Polypeptide
VGNKLSSTQREALVRVFLEAKWLWNECIASGDPFSYKPRKNVLVKTKDDTMDEREYRVLGSQMKQSLVKTIRSNIKTLATLKKQGRKTGTVGFTSEVKSLGLPQPETTYRIRGQKARIQNIPGWVRVRGVGQLEGWEQAKAVLTSEADGWHLHVTCYMDKEEHRKRREAKRLAPVKNTIIGLDMGVKTAITCSDGTEYDVMVGETDRLKREQRKLNRKKKGSNNRQRNRMRIRRAYTKQQNRLNDAANKTAAELLRNETIFMQDEQVKAWHRRYGRKIQHSILGRVKNRLTRHAGQVVVLSKWEPTTQLCPICGVKTRIPLKQRIYKCANCGYTAPRDIKQPRPWCGWDNPSMQKKYLGTRGIQACGERIGVIRGQSAYVLHAFGEAGNRDGFSLTVVHNLLFSLRIDGLVSSWADSNFSAASL

SEQ ID NO: 47390 - protein, 392 aa, unknown
  TnpB Polypeptide
MKIIHKTYKFRIYPSEQQKIVIEKHFGCCRFVFNKFLNERKEEYLNNGNYLNYYNNAKSLTEIKKDLPWLKEVNSQSLQSVLKNLDIAYNRFFKKITKFPKFKKKNYNQSFHIPQSVEIKNYKLSIPKFKQGIKIKIDRAIEGKILNATLSKNSTNKYYICITCQLEYQTYSPTKSSIGIDTGIKDLAILSDGTKYENIKSLKVSLKKLKYEQRQLSKKTKGSGLRNKQKIKLALIHEKVSNRRKDHLHKVSTEIIKNHDIICIEDLNVKGMMKNHKLAQALSDVGLGIFYSLLEYKASWNNKTIIVIDRFFPSSKMCSECNWINQELTLKDRKWTCLYCRTAHDRDINASRNILIQGLNILSGLGTNSDNKQKQVESSSIEEAMKLEIQKI

SEQ ID NO: 47391 - protein, 381 aa, unknown
  TnpB Polypeptide
LGGIADLIIPEGINKNNVEYIIYMKKTIKIKLITNEEQHNSLLATMNMFSVVCNDISNIAFENKEFRKFLIHKLCYHSLKEEYKDFSSQLLVRAFDVVAQSYTDKGIKRKCPTSFKKQSAVIYDDRVLTFKENLVNIWTINGRTKIPIHIHNKEIFQLRKGQTDLVYQNGNFYLCCVVDIPNKEKFIPKDVIGVDLGIKQLATTSDNVSFTGEIVEKKRQKYSSHRHRLQKRNTRNAKRRIKQIGNKEARFRKDVNHYISKKIVEKAKGTESAISLENLTGINDRTTVRKSQKSQRMSWSFYQLKTFIKYKSEEQGITVVEVNPKNTSRTCNKCKYCDKKNRKNQSDFQCLECGYIENADYNASLNIRELGLQSISLLLSK

SEQ ID NO: 47392 - protein, 311 aa, unknown
  TnpB Polypeptide
VQLALEGVPYHKPKHPVGTDTIGLDLGPSTIASVPREGEARLEQFCEELVPDEQAIGRLQRQMDRQRRAANPDHYDEKGRIKKGGKHKLVWKTSKGYQASRRRKATRERKLAAHRKSLHGRKVHELVAVGNTVVTEKISYKGWQKRYGRSVGLRAPGMFIELLRRTVASTGGTLHEIPTRSTKLSQYCHGCGQWSKKPLSQRLHQCGCGLGPVQRDLYAAFLAAYLDPAKLSLSCAQYVIAWEGAEARLRAAHERTIQRANEGQVLPRSMGIPRARARLPKSRSEATQELLFLSRRGNVEAWKRRSEPPVL

SEQ ID NO: 47393 - protein, 404 aa, Haloferax sp.
MPDERIRTVVASLVEPTSHKEQKLQNLQSTYREALCEAFDANATTMTAVNDIVTPYDLPYQAKDALKRHVPGLLKSGSAELSETQPIRFTNRAAVFDHSTDRTHAFCWEVPQPGRGTNFWIPLAINPDQRKWWLQLLDGEATAGQLQLITRPRQARWELHVPLKLPTTTSEVDCETCTPVGFDVGEAILLTGCALVNGRPVDPLLVDGGRARHLNQTLQTTLQRLQERDAAEWRIDEQAAYFRNALRDEIETATRNAVEYAAGFDQPVLVLEQLTSIQEDLDFGPHMNRRLHAWAFDQLQTRLADKAADAEIPVQYVDPAYTSQICHACGVIGTRPKQAEFRCTNDDCWVSVYQADINAAANIAGRLDPWGESCPWNPASDDTLRNGRTRDSATGPREQSPSQR

SEQ ID NO: 47394 - protein, 390 aa, unknown
  TnpB Polypeptide
MVVRKVAQRIPFTPSRTQAVLLEQCFGARRFAYNQQVEAFNSYDKESNPRPKYPSTTDMKAANEWLRDNPVPSSALSNAIMDFRKTQAAYFRKAEYGKNRPHFVSKSDSVQSFRNTVPMRHMDGNRYPLSRKLGSVRIRRRDRIRYPLESLSSWTVKRENGMYYLVLLFNVDVQPKPPVDGQVGIDMGVKDFLTLSTGEKINYPDRLRQLEEKVRWEQRKLSRRVKGSSNYRKQKSTVAKAYAKLRHFREDFQHQVSHRLIEDNQFIGMENLSVGNMTRRAKKKLDENGKPTRNGQSAKRVMNRSILRNGWSGFVEKLAYKAQWYGRMFVQVDRFYPSSRLCNSCGHKCDGLLLSEREWVCESCGVLHDRDVNAAMNILGEALRLSQVGK

SEQ ID NO: 47395 - protein, 383 aa, Escherichia sp.
VKRLQAFKFQLRPGGQQEREMRRFTGACRFVFNRALALQNENHEAGNKYIPYGKMASWLVEWKNATETQWLKDAPSQPLQQSLKDLERAYKNFFRKRAAFPRFKKRGQNDAFRYPQGVKLDQENSRIFLPKLGWMRYRNSRQVTGVVKNVTVSQSCGKWYISIQTENEVSTPVHPSALMVGLDAGVAKLATLSDGTVFGPVNSFQKNQKTLARLQRQLSRKVKFSNNWQKQKRKIQRLHSCIANIRRDYLHKVTTTVSKNHAMIVIEDLKVSNMSKSAAGTVSQPGRNVRAKSGLNRSILDQGWYEMRRQLEYKQLWRGGQVLAVPPAYTSQRCACCGHTANADVNGARNILAAGHAVLACGEMVQSGRPLKQEPTEMIQATA

SEQ ID NO: 47396 - protein, 373 aa, unknown
  TnpB Polypeptide
MPRYVTIGLDFHVDGEDAKAILSTAWLSKLVAHRVLNLVKENELLAGLSEYMFLKVMRRKCYSILPNRRYVDGMLKLIHSIIKSAKALGVDIESIELKQWLLFQSDGERGYARGNMNIKLIDTHHARVLTLDYTGKTRYEELKLTTPKGWNKLVESLIERASRGEIGYPVRLVIRDYGIGKHGLHVHGEVQVMAPYTLYLEVMRRYEEPRGKNIAGIDVNVGRLDAVVVDEHGNLLSYRTFWIKNATFMGVRRRRSRSLIGEQIHALLKWLYSQGVSIIGLENPEVIGYLRYYWVRSGERRGNMWNWKISMFRNSIIERLTWKAPLYSMKTIYVNPRNTSKEGKRIGKKLGLDRHLGSAYIIARRTLKNLQRP

SEQ ID NO: 47397 - protein, 478 aa, Ktedonobacter sp.
LLDTRCKSIIKYTYETRRCDYQDQTRELTQAQGDCCLAARNYALRLRAAYRCRIGTDYQAGKEVAMNRSHVIRLNPTPEQEVHFRKACGVARHAYNWALARWKEYRVQGKWAKMNDLKTEYNRIKGEQFPWCYEVTKCAPEQAFDNLGQAFDNYWRMKKEGTLPKLKHPRKDGEEGGFPHFKSKKRDRLSFYLANDKFSVDGHTIRIPKLGAVNMTEALRFQGKIMSAVISSRAGWWFVSISVEVKHEVPTHSGGPVGIDLGLKTLATLSDGIVFENQKHYRRGLGRIKGLSKGLSRKGEGSQNWGKTTKKLAKAHYRVSCQRQDSLHKMTTHVARTHALIGLEDLNAKGMLANHSLAQAVSDASFFEVKRQLLYKAEQHGGYVQLLSQWYPSSKTCHECGWIKEDLTLADRVFICEQCGVVLDRDYNASLNIRDEALRLVTDVPAVASSERKFACGAGSSGSEMGETFCCEAGTKVL

SEQ ID NO: 47398 - protein, 418 aa, Cyanobacteria sp.
MIVTRRVTFRLYPKPAQERKLYEWRRLHCYLYNSALADRKDSYQKLNRSVNYLDQQNRLPEFKKVWTEFAELGSQALQATLKRVDFAFQRFFKGLGGYPRFRSIRNYSGWTYPATSGWKVHTTGDNGYLELSNLGQIQMRGKARTWGTPNTCTIFYRHRKWYASITVKCIPHRQTGTGAIGIDFGTLTAIAMSDGTKIENPKFLAKTQAKIRKASKEKRRKRAPNRNQKIKASRRYKKAQTKVSKLIRKAARQRLDWAHKRTTEIVSRSSLVVSEKLNISGMTRKTKKGKRKRQKSGLNRSILDVGWGMMRGMLEYKEAEANGVYLEAPTQTLKPSQRCPECWNVKPKTLDERVHRCLNCNCVEDRDVAAARVCLNWAKGLGTSLLDVDQSGSTSKTRINTGSLKQLAETKRQKPRPS

SEQ ID NO: 47399 - protein, 349 aa, unknown
  TnpB Polypeptide
MVLTNLMYRGYPIMVPDMLKTVQYQLIWWREFRQSLVFGTTPKRWLTKTWILLKTYRIFSDGRRIGDRIAPVVLDFKHNVVRLRQVCRNQPRYSVEFPIPKWVLERVAEGGDVKFAMVGVRRGKPYLVLVAEREVQPIQTSDYVLVVDVNSWKHGIAWALVKGSRVVKWARERPDLGHIERMYTELLKLEQKYGTLKRLGLHETAEGKKLWREIRRKKRKLYAILRDFSQKFTSRLARKAVRHHAKVVIDDMLEESRRKLLEEKIPNGLAKIYLSSVRRFVKLFVNQLRWYGVPYEFKRLYSTVCPRCGSKMRELPGRIMKCENCNFSAHRDFVPVTWYLFYERRSSEV

SEQ ID NO: 47400 - protein, 385 aa, Acrocarpospora sp.
MKLVVRVKLLPTPEQAAALEATLRVANLAANRVSGIAFEHNLQRHYDLRKRVYGQVKEEFGLAAQAAQHVIKKVADAYTTLRANIRAGNLGEAGSKRRVKAESKPIAFRPEAAQPFDDRCLSWRIDARTVSVWTLAGRLRGIAFTGSPHQVAMLAKHRKGETDLVRQDGSWFLIATCELPDLPIADPGGGFVGVDVGIVNIATTSDGTRHSGKALNAHRYRQRQLRRRLQAKATKSAKRLLKARRRKEARFAADTNHVIAKRIVTEAERTGRGIALEDLQGIRERVRLRKPQRVTLHTWSFHQLATFIGYKAARAGVALVYVDPAYTSQECSQCGHVDKRNRPDRETFACTSCGFAEHADVNAARNIARRGVMDWAVSHAADDAA

SEQ ID NO: 47401 - protein, 402 aa, Escherichia sp.
VKRLQAFKFQLRPGDQQECEMRRFAGACRFVFNRALALQNENHEAGNKYIPYGKMASWLVEWKNATETQWLKDSPSQPLQQSLKDLERAYKNFFRKRAAFPRFKKRGQNDAFRYPQGVKLDQENSRIFLPKLGWMRYRNSRQVTGVVKNVTVSQSCGKWYISIQTESEVSTPVHPSASMVGLDAGVAKLATLSDGTVFEPVNSFQKNQKTLARLQRQLSRKVKFSNNWQKQKRKIQRLHSRIANIRRDYLHKVTTTVSKNHAMIVIEDLKVSNMSKSAAGTVSQPGRNVRAKSGLNRSILDQGWYEMRRQLEYKQLWSGGQVLAVPPAYTSQRCACCGHTAKENRLSQSQFRCQVCGYTANADVNGARNILAAGHAVLACGEMVQSGRSLKQEPTEMIQATA

SEQ ID NO: 47402 - protein, 273 aa, unknown
  TnpB Polypeptide
MSANKKRPSRIYLKDNGKLQIPTIGDVGFGSTRTEFDLSCKKQVANISFDGKYWYLSYTEDVELQEVDLPEYTSGVGVDLGIKTLATVSDGTTVPNIKTFRRVRILNKRLKRLQRKVAKKYLINGCNKHNKTKNIIKLERQIKLIYRLLRNIRINHIRKFVSELVKKQPQYIAIEDLNVKGMMKNKHLAKDVANCSFYTIREHLIRKARERSIVVRLVGRFYPSSKTCSNCGSYKKDLKLKQRVYHCNTCQEKIDRDLNAALNIAKTDNYILA

SEQ ID NO: 47403 - protein, 403 aa, unknown
  TnpB Polypeptide
MIRSTKTTLKFSNTAKLDNIDLFINEYRRVVSLFVDKLWNMDDVKCLLDKSLTSTVDSWLSARSIQCAGKQASGIVRGCKKKQSKRLFQIRKFKKLGMPKKARILQTIYNNVRLSKPNIQVIQPELDSRFVEIDLNNTTLFDGWLTLTSLGNGLKIIIPFKKTKHFNKMLECGVLKDGIRISNDDITLMFEIPSPVKIDDGETVGIDIGQTTTLTCSDGQTVEADIHGHTYKSICQKLSRRKKDSKNFNKTDRHRSNYIHWAVNRINLDGVKKVNIENIKYLRKGRKSSRLMSHWNYGELFNKLEGRLNDAGVQISKVSPTYTSQRCNKCGWTRKRNRRGKQFKCDKCSYECDADLNGSLNISFDLVSIKKQERLEHNNIKGFYWNVISKEPIVPRVQKTNTL

SEQ ID NO: 47404 - protein, 418 aa, unknown
  TnpB Polypeptide
MEHLCYNRHMNMLIQKAYRYRLYPNNTQQNQLAVNFGHARFVYNFFLAQRIQFYEENRCSDTKKGLNYYDNANKLSAMKRSAELEWLKDAHSQVLQQSLKDLDTAYQNFFKKRAKFPRFHSKHGKQAIRYPQGVQISEKHIRVPKIGWVKAVIHRPCEGKIKNVTVSKTKSGRYFASVQVEIDVPEPQEFKPDCVGVDVGLKSFLVTSDGMEVPAPKHLEKSQKRLTRLQRKLSRTKKGSSGREKARLAVARQHERVADQRKDFLHKSSRWLVDNYGFIGIEDLLVRGMVRNHCLARAISDAGWGEFRRQLEYKGTWYGTQVVAIDRFCPSSKTCSDCGYIVPELNLSIREWVCPECGAYHDRDLNAAVNIKNEALSRAGIARIHAGGESVRPTLSWQFSQKPEAQCLHCPADAGQHG

SEQ ID NO: 47405 - protein, 393 aa, Actinobacteria sp.
MSTFRSFQYVLYPPARQARSLEHLLAVQCEAYNAALEERKEAWKRGIHIHRFDQFAQLKDLHEPRPDFMQYGVTVARGTLTRLDRAFCAFYRRVAAGQKPGFPRFKSRSRFDCASWEDASGWRLKEGDRRLYLQGVGHVKIKLHRPLRGIPKTLHVRRQGRRWTASIQCASVPPAPPAPTGREAGFDLGVAQLATSSEGEVFENPRHLARGTDALVSAQQALARKQRGSARRRKAKDRVARQHRRIASRRRDAAHQLSRALVNAYDVLVFEDLKIANMTRSARGTLEHPGSRVAQKAGLNREILAASWGGLIGMVAYKAEEAGRELILVNPRDTSRRCSSCGHTEAANRRSQAEFCCLACGFGDHADRNAARNILWLGSSLRRQKREAETSAA

SEQ ID NO: 47406 - protein, 381 aa, Rhodococcus sp.
VQLRYRYRVYPTPGQQDMLARSFGCARVVFNDALRARQDAYAAGVKLSDTDVQKQVVTDAKNTPQRAWLTEVASVVLVQACQDARRAYRNWFDSMSGKRKGRRVGAPRFRSRKDNRQAIRLTRNGFSLRSNRKLYIAKVGELKVAWSRELPSEPSSVSIIKDAAGRYFASFVVETTDETLPECDMEVGIDLGLATFAVLSDGKIIESPKFLRQAERKLRKAQQALSRKEKGSKNRAKARVRVAKAYAKVADARTDWAHKHSTAIIRENQAVFVEDLCVTGLARTRLAKSVHDAGWGMFTRMLEEKAARYGRTFVKADRWFPSSQLCSTCGRVDGPKPLSVREWTCPCGAVHDRDLNAAKNIHAAGRAEWLNACGGTVSLLA

SEQ ID NO: 47407 - protein, 527 aa, Scytonema sp.
MIEYRKQVDKYKEVMVVQVRWNLKIKATKTQDKTLSRHLNTLRAHRNFALRERETGYNTNNQHANSEIVYAWGSFCDLETKMEYGSCCPLSCPVLKHGVVPQDLNIAKKVNKKTGQVRWDSASGIQSKITTELRNTRANFAEIDSCVLQTNLAKLDTAFTNFWKHGRGFPQYKKSLDSFEFKTGRVRIRNVRNNYATIYLPGIGSVKIHNSRDLNGIEEFGTCTVKREGGNWYISALVEVPNLPETKKLEDVKSVVGIDVGVNKLVALSDGSFIENTKPATNKRTARRLKMRQRAASRKQLGSQNKKKAHQRVAKMQHEISQERDGRNWQGAQKIVNTADVIGREDLNVANMVKRAKPKHNGNGGYQKNGAKAKSGLNKAILDCGWNDLFNKIAWLALKTGKPVVLVNPKHSSQECPQCHHVDQSNRDGEKFLCVKCGYTEHADTKASRTVGKRVGLVFPRKIKKTLPRDSRKVTPVKPASQEASTGLRVESRNHAFGQLNMQLSLFDTTVYTTADNRVSRRYGKNS

SEQ ID NO: 47408 - protein, 467 aa, Scytonema sp.
MARKKTPSFITEIPLIVDSAQEKELLSKFEASRQLYNACLNEAMVRMELVRNSEAFKTAKKIPKSQKKERTEAFSAARSAYRYSDYDLQAYATIVANSSQWIADKIDSNTQQTIAKRAFKASERVIFGRAKKVRFKVSSRFHSVEGKTNKQGLRWSREQLVWGSLKLRPIIDENNPVIMHGLQSSVKYVRILWRELNGKRRWYAQLINEGLPYQKEKNYVLNGLIGLDLNISNIAFVGDKKAGLLPFAEKVPTYEKEITALQRKMQRSQRFNNPDNFETDFEIKKGHRTVKKKGQVKKGKRPWQRSKNYKKAAQKKRELQRKKAAYAKSQNRKIVNEILRHGNVIKTEKVSVKGWARRYGKAIAAKSPGFVQSELQRKAESAGGQFITFSTQKTALSQTHLDGSRTKKSLSERVHHDATGIKMHRDLMSAYLSRYVNQDDILSLQDACSGYRGAESLLLEAWCDSFS

SEQ ID NO: 47409 - protein, 318 aa, Scytonema sp.
RAPSYIDGELNIVKFNYQAIGKKEFKNGCIAPSMSPIKIPVKPGLKFEDLREVRIIPKTGCFVIEIVYNVPDSTEFFCSLNPELAASIDIGLDNLATIVFSDPTIQPIAINGKPLKSANQLYNKQVARFRGFLPAGIGTSRRIQNVVRNRNDFVDSYLHSSTKMIVDELLKNGVTLVAIGKNEQWKTSLNIGKRNNQNFTQIPHAKFIEMLTYKLEKVGITVKVGEESYTSKASLIDWDIIPTFDPHHKIKHTFSGKRTQRAWYISKDGLKIHADVNGAFNIARKVIPNSFNCLQEIVGRDRGCLVVHPLAFNTFVLS

SEQ ID NO: 47410 - protein, 512 aa, Scytonema sp.
MAFKSKEQKEQDKEKNKNTYISTVVQHLKLSNLGYAVISDILSHANSLYNTLTFNLRQGFFVHKTLNFQSLTIDLQTDFKENYHYKMLHSQAAQSVCHKVTENFKSFKQLLDKHFSEGTKKPKLPGYRQKGGMFEVTYPGQSVNISQEHGIIFATVSTGMMFKKQHKEDVMETSLNERLKFRVPDDVDPQSLVELVITSKHREVYLHWVCRKKKEIITELDKSSVLGIDIGLNNFVTCIPNTGQEGFIINGRPLKAINQFYNKTVSKLKKGHQFAFRKRGNPITGYPALPHDESRGLRVPPFSLFTLGKDENFWSGSLARATQARNNQVRDFIKKSARTIINKCLESKIGKIVFGWNQGIKNEIDNGRVNNQNFVQVPFTALRDTLKYLCERYGIEFVVVEESYTSKMSFFDGDELPIFGKETESQKKQKPSGRRTKRGEYKTASGTVVNADAQGACNILRKAKIDTSKITFRVCQILKRINIWIGKKLSSRKSTAAGLSCCTTIGLTEPGQ

SEQ ID NO: 47411 - protein, 563 aa, Scytonema sp.
LSVVTIQTTAFNTNQNRTALDYLEEYGIIFGQATRTAFALRNRIGKTTTKESGLEKTICKELEKRFGISNSEAKNAYNKAASTYSSQVELVDLYIEDNYDRIKEIRQTIKKLEFKLSKAVVSGHESTAKRLKRKIHFKQQKINKLEAKILRLKESKTTGHFTVTFGSSRLFEKQYRLKENGYKNKKEWLEDWRAERSNRSFFIGSKNFASGNQLVRYNAISQTLTITVTPELRAKYGDAVTLHNISFAYGQEWLLTAIEPVKHTSTRKGNDGEKKAASRNGSKQPVTYEIVNKDGEFYVNATLETVDPVTQTFLENGALGIDFNPNSIDWSVIDRHGNLKRHGSIKINVQDKRSAQTKDIIGKAVSEVVRIALRCGVPVVIENLDFAQKKASMKEKSAKYARMLSNMAYSQFTQMIESRCVKSGVELIKVEAAYTSVIGVTKYMAIYGLNSGCAAALVIARRGQNRTERLPKHLDSYFKKPEDKLKSGAWKKVARKIDICGAFKRHKFYSPGIKQVKTNCLLHGTLRQTKTSRRFDTVQVLVTPHIRKKPCAIGIPVLKGLNP

SEQ ID NO: 47412 - protein, 382 aa, unknown
  TnpB Polypeptide
VKGYGFMEQTITAKIQIVVNEKQSVLLQRTLQAYQDGCNEVSEYIFKTHDLQQSSLNKHLYQHLRQNFGLKAQMAQSVIKTVVSKYKTILENEKTWIQPVFKHLQYDLVWNRDYSLTNNQFSVNTLEGRVKLPYHEKGMERYFNKDIYKFGTAKLVVKHQKYFLHIPVTYTVDECTNDLVSNVVGVDRGVNFVVTAYGSDRKTWFVNGRSVKQTRARYKEVRRQLQRRQTPSARRRLKEIGTRENRWMQDVNHCISKALVERYPKHTLFVLEDLTGIRQATEKVIRKHRYEIVSWSFYDLEQKIRYKAERYGSKVINVNPAYTSQTCPCCGHTERANRRKKIHTFVCKRCGYRTNDDRIGAMNLYRMGINYLVDSQVPDTVV

SEQ ID NO: 47413 - protein, 398 aa, unknown
  TnpB Polypeptide
VKNIHRTYKFELLPNEEQKTLLDKHFGCVRYIYNHFLNERKEQYQSDKKTDNYYGQAKTLTELKKKEDTIWLKEVNSQTLQFALRSLDTAYVSFFRGNAKFPRFKSRKNKNTFTVPQHTKVVDGRIFLPKFKGGIKVNIHREIKGEVGKFTISKTPTGQYFVSILTEQEYNPKKKTGKSVGIDLGLKDFAITSDGIKYKNNRYTKRYTRKLKKAQQHLSRKQKGSNGFEKQKLKVAKIHEKIANTRQDILHKVSNDIVSNYDIICLEDLNIKGMIKNRKLSKHIADASWGTFVRFVEYKANWNDKTVIKINRWYPSSKTCNVCGYINQDLNLSDREWTCKNGHKLDRDLNASQNILKEGLKIYGEELAITKVERKSDVSNNAHSMKPEAHPIASGVGG

SEQ ID NO: 47414 - protein, 408 aa, Okeania sp.
MVEKAYKFRFYPTPEQENLLRRTLGCVRLIYNKALAARAQAWHENKERVGYKQTSTMLTNWKKQEDLDFLTEVSSVPLQQGLRHLQTAFPAECCANTNFFSGRGLYPNFKKKRNGGSAEFTRSAFKWKDGQVYLAKCAEPLPIRWSRQLPQSCVPSTITVKLDPSGRWSVSLRFNDIRDLKLKSTKKQVGIDLGITSLLTTSDGEKVANPKNLQKLHKKLRLAQKSLSRRAKGSNNYQKARLKVARIHAKIKDSRLDYTHKLTTQLIRENQTIVVEDLAVKNMVKNHKLARAISDANWGEIVRQLEYKADWYGRELIKIDRYFPSSKRCSDCGHVVEKLPLNIREWDCPECAAHHDRDVNASINILAAGQAVSVCGATVRPSESESWRAGAMKQKAPNSDARESRAVS

SEQ ID NO: 47415 - protein, 410 aa, Micromonospora sp.
VMLRYNYRVYPTPSQRRSLAKAFGCARVVFNDGLRARQTARENNQPYVSDGDLSKHIITQAKTTAERAWLGEVSSVVLQQALADLNAAYRNFFASVTGKRKGRTVAPPRFRSRKDNRQAIRFTKNSRFAVLDNGRLRLPKIGDLPVRWSRRLPSDPSSVTIIKDAAGRYFASFVVTTAEDETLPPVESEIGIDLGLTHFAVLSDGTKVTAPKFLRRAARKLRRLQQTLSRKIKGSNRRQKAVVKVARAHARVTDTRRDWQHKLSTAIIRDNQAVYVEDCVVGLGRTRLAKSVHDAGWADFTGMLEYKAARYGRTFARVDRFFPSTRMCSDCGRINDKIALNVRSWTCPCGADHDRDINAAMNVLAAGRADNLNDRGARVRPPAMVAPRGEAVIHPDAACATRSVEGIAVR

SEQ ID NO: 47416 - protein, 510 aa, Streptomyces sp.
VRPPVRAASGEDPRRPRGGRGDRRGRRVKKFQAQPGFVVQAYRFALDPNASQEHALRSHCGAARAAYNWAVGWVGASWWQRRAEESYGIAEEDLTEWRPWSLPALRKAFNEAKHTDPRFAAWREENSKEAYSTGLANAAAAFDNYAKSKRGQRKGKRVGVPPFKSKRKARPSCRFTTGTIRVERDGRHVTLPRLGTLRTHEPTAGLLTRVQAGTARIPSATVRHERGRWFVSFQAEVKRDLVRVARPDAAVGIDLGVKILAVMADSTGEIRTVANPGHYDAARKQLRRASRTVSRRRGPDRRTGQKPSRRWEKAEQGPPPGGERPRRRPAQAHHRRGRRVRHHRGGRPQRRRHAPQPAPRPPDRRRRIGRDPPPARLQDQPTPRHPPRDRQPLVPLIQDLFRVRRSESQAAAAHPYLRMRRLPPGHRPGRQRRTQPRRSRGSLRDWYRSGRRPGHRPGGAETSWSRPEDPHHPPRRKAEARRAGGATLPHQRQTEARDRTQTEALDALVM

SEQ ID NO: 47417 - protein, 402 aa, Escherichia sp.
VKRLQAFKFQLRPGGQQECEMRRFAGACRFVFNRALARQNENHEAGNKYIPYGKMASWLVEWKNATETQWLKDSPSQPLQQSLKDLERAYKNFFRKRAAFPRFKKRGQNDAFRYPQGVKLDQENSRIFLPKLGWMRYRNSRQVTGVVKNVTVSQSCGKWYISIQTESEVSTPVHPSASMVGLDAGVAKLATLSDGTVFEPVNSFQKNQKKLARLQRQLSRKVKFSNNWQKQKRKIQRLHSCIANIRRDYLHKVTTAVSKNHAMIVIEDLKVSNMSKSAAGTVSQPGRNVPAKSGLNRSILDQGWYEMRRQLAYKQLWRGGQVLAVPPAYTSQRCAYCGHTAKENRLSQSKFRCQVCGYTANADVNGARNILAAGHAVLACGEMVQSGRPLKQEPTEMIQATA

SEQ ID NO: 47418 - protein, 238 aa, unknown
  TnpB Polypeptide
  misc_feature (211)..(238): Xaa can be any naturally occurring amino acid
MAKPRRLMGIQQNQIHCDVETLAILKYLCEQSNSLYNCGVYWARQVFFKTNKIISKYDPIYEVGHNIHATARPSVAAQQTLLSVSEAFKSFKGLRELFFKGELEDQPKPPGYRTSGGLFKVAFPNIGAGKPTLVDGMIRFPLGLQVKRWFGLKEFFLPMPSNLDFAKIKEFTILPKNGVFYLECSYGMEAEETCLDINQALSIDLGMSANXXXXXXXXXXXXXXXXXXXXXXXXXXXX

SEQ ID NO: 47419 - protein, 416 aa, unknown
  TnpB Polypeptide
MIVLRAFKTELDLNNRQKTACAQHAGAARWAYNWGLARKIEAYQTGQKVPTAIDLHRELNALKKGELAWLYEVSKCAPQEALRNLDQAYAHFFRRVKKKKAGKKIQVGFPRFKSKKNGLGSFRLTGAIHVFEKAIQLPRLGRLRLKERGYLPLDGVKVLSATVSEQGGRWFVSVPVEMSQPDQTHRLAFGAGQTAKPVAGVDLGILALATVSDGTRIENPRALKRNLGKIKRLQRSVSRQQKGSANRRKAVQQLARAHIRVANIRKDTLHQATSLLARTKSAVVLEDLNVSGMMKNHHLAQAIADVGFHEFRRQLTYKGEWYGCEVQVADRFYPSTKRCSRCGNVKPEFDLSERVYECEVCHLIIDRDLNAALNLECWPTASSAERHACGEGVRPGRPAVLDEAGTERRSTSCRYV

SEQ ID NO: 47420 - protein, 418 aa, unknown
  TnpB Polypeptide
MQLTRKVRIYPSKEQENTLWVLSDRCRLIYNFALAGRRERYALEGKGISYIDQQNKLPEIKERYPEYKQVNSKVLQMVLRTLDGNYKSFFALIKQDPEARPPGFCGRKYFFTMKYNQSGFKVTDDEVQLSHKVEGGAKLVFPITTYERIVDPKQVDVHFNEGKWYLSIIDEIKPPEYHDNELYQAFDLGITKQTAVNMEGKFFELKNIRPDLYWNKTIDKITGRRDHCVKHTKTNCRPSSKKWSMLNSIKRKFEKKRSNQILDFQHKASLMIVKNTKANTIVVGDLDVKSMPQSKKANRGMNRSTQGTGYLARFTGFLTYKAERIGKKVIEISEWNTTKACCQCGKLHDMPTWKRVMKCDCGNVLDRDRNSAVNIMARFLSQNAMCTGYQQFADNLRTGSGIIISPGYSQEAPSVRVG

SEQ ID NO: 47421 - protein, 356 aa, unknown
  TnpB Polypeptide
MAWPNVKPQDPNAVQRTLRFRLKDKHAPALLEASRWVNFVWNYCNETAVRMFERERKFVTKVDLDRLTSGATREGIPLHSQTIQAISAQYVQSRRQHKKVKLRWRVSRGAKRSLGWVPLKSSAIQYRQGQFHVSGLGALSIWDSYGLHAGMRFGVAHLSEDARGRWYLNVVVTRERRILPKTGKVTGADLGLNNALSLSDGAQIEAPRSFRQYEERLAVAQRARKPGRARAIHAKIANARKDFLHKTSTALVREFDAIFIGNVSSTQLAKTRMAKSVYDVAWGSLRTMTQDKGDDAGRLVDSIDEAFSTQDCHVCGTRCGPKGLAGLAVRQWTCVVCGTVHQRDQNSAHMIEGAGC

SEQ ID NO: 47422 - protein, 464 aa, unknown
  TnpB Polypeptide
MTTVTRTLRAEVSDAAALARIGRATAFLRADLWRRLGALGTVGKSAADVRRQITAAGWYAGLDVDGTIRAETTKDVIHDILTYKAAAAARVRQSIARRGADVAERKRLDALLRQDRWLDDRYLHRQMRKRFRHGVSRAGNQFIVRSDKHHEAVVDGRLVVTVRIASLYGQALRLTTTSDGTHVDLRGKNLRIILRDDGQVDMHYATTKPAGRPCGTQELGVDKGYTEAFTTSDGAQHGAGFGTVLGAYSEQVSRTGQARNRLHALEKAHRDAGRVAKADRIRAHNLGRVKMDGRRTRTQQRLRTLAYQSAHQVVDKAALVVSEDLTSPIRGKVQWRRFNRRMSAWAKGVLAQALDEVCAQRGATHVVVNAAYTSQMDSVTGRLEGRRVGDKFYRANGDVMQADANAARNVLGRLHDREIGRWTPYTQVKRILLARSSGATERQEAPVGRLTPRQRSAEKSKGQM

SEQ ID NO: 47423 - protein, 393 aa, unknown
  TnpB Polypeptide
MKSRWTFRCYPTPEQVEHLNRTFGCVRFVWNWALRMRSDGFRNGERIGYPATDKALTALKAMPEHAWLNEVSSVCLQQALRDLQVSFSNFFDKRSAYPSFKRKEARQSANYTERGFSFDPATRTLKLAKIGQVKVKWSRNAIPHPSSLRLIRTASGKYFVSLVVETQPAPLPQTGEAVGIDFGVARLATLSNGERIANPKHGAKWQRRLAFYQKRLARCQKGSKRRLRVKRHVARIHENIANSRSDTLHKLSTNLVTRFDVICVEDLNLRGMVKNHSLARAVSDASIGAAIRMIENKAERYGKTVVKIDRWYPSSKTCSACGHLVETMPLSVREWKCPECGTAHDRDANAAANILAVGHTVSAHGGTVRRSRATASERKSLRSANRQGDGHVA

SEQ ID NO: 47424 - protein, 397 aa, unknown
  TnpB Polypeptide
VTGAETRCLPTSKDKRKRKKKPDRRNDLWRKEMQTVSSYGVELRKQNIPIRQTLEIYRSAVCYLTEIYEQVWEELAEIPDAKRRFNAAEHLVHTTKKNPARFDFDLRFPKMPSYLRRAAIQHALGSVSSYETRMDLWEKSGEKAGKPRLAYENHAMPVFYRDVMYREEKEGKDEAYLKLYDGHDWKWFCVRLNHTDMEYLRKNWSGKKASAPTLEKRHHKYFLRFSYTEEVTLTKTPVKEQIICSVDLGINTDAVCTIMRADGTVLGRKFINHPSEKDRMYRTLGRIRRFQREHGSAQSRGRWAYTKRLNIELGRKIAGAIVKNAEENHADVIVFEYLEMQGKISGKKNRNCICGENGISRNAVSIRHTEKECGYPESAHGIRAGLHTMAPEVCPVT

SEQ ID NO: 47425 - protein, 733 aa, unknown
  TnpB Polypeptide
MFAITYTDNKTSNPVEENMTVINKLSVFYEDHYKCFLSEKISRSGILAVLDSQIEQYATNLSNIIHTHYWMRLKQCLNLEFKISEKREKIDLQHTDVNERRELKSKLTRQTNTIQDSLLINDFNISDKEIKGTFDIDETKMRALSDKFKIPVFSEFKVRDIEEKKYLYNLKKERKERPKYVIKQEEKIENLENKINKKANEPLKNKTPKGRESEYLRKEKELIELRVKLEGEKEYLKLLEEKAGLKVVKDLVIKDDIYNYKWQFDNNPTLYLQSFFKLNNYLSSNNDEKGKFHTVPLCTSAIPPYVTLTTSSLLDIFGNMQGNINDKVDYIIWRKYFHLFKGDTIDSKNKSALRKEFRRKNYHFHYITTDGVGATILFRHDRFLSGYVPMKATVNKTGKPKTSIDDTPYLRDINSSIYCHHNKVAIDPNKMDVLYCTDGKLDLKNNKKVNTFRYTKPQIDFETKRKRYEEVRNIAKDKSGISLIESKLSNVNPKSTKYDIFRTYVEVKVNTFTEELLSHYRYNRKLNEKVDNSKASYRKMRMNVKINTERSEAKMLNNFEKKFGNKNEAIVCFGDYSQNHLRGTAPVKGKGLRKFFKERGYNVFLISERNTSKLCHSCHGVLEKFHRKGDRKRKKTDYKVRSYYETVSYVHGVLRCKNCNERGDLYNTGCFEYLKSVEINNFINKKTWVDGNMYKIWNRDLNASLNILMKAKYEIFKYWIPDANFHQTFNSIF

SEQ ID NO: 47426 - protein, 427 aa, unknown
  TnpB Polypeptide
MLLAKKIKIEVSTEGAEALEWMQGKCRGLYNWWVMRLRSGEVRWNLKAAKLSLRESKAYDPDLRFVYGKLLAEVYFRLDKAMQAFFKRVAEGNKKPGFPRVKPRHQFFTLCYPAMYLELQGKNLILPTGGGGRAWGPKRYPNIVAHLTEEPPVGFREVAVSRDGRGNYYCSFTYEEAEQHQATPSEQRASAKKKRQKRKPRRPMREEGVVAFDLGIKTLATGYSDQGRFYHIGGFKGYRWYNKQLDKIRSKRDKCKKKSRRYIHLSQVYKRVSEQKRNKQQDCLHKAAHLIADRLAERAVVIGDLSQQQMVQQKQEQETPQQKRKREIRNRMVYNDWGLYRFVQILTYKCLLAGKTLHIISERNTTKQCHRCAHLQPMPLWKRTYRCGNCGLVMGRDDNSAINLSQRFLARLGPHTDDSVRCTECSP

SEQ ID NO: 47427 - protein, 486 aa, unknown
  TnpB Polypeptide
MKNINHEIYHIYIRKPVERSHRMGLSIKTCYTVKIQKQLDVTQDKTTEKLNITRERAVDSRLMRQTSLVCLEALKFCVSVISEEWDTIMSVESKLRKRLIDTLVHRTKTAAPKYPEFDLRFPKMPGYTRRAIIADAFGMVKSYRSNHKNWEETPPMERGAEPKLGLPSRYELTFYDQERKMSCLADGQIGLKLYNGQTWNWYYFQISPSDAKQISRLSKTRNMLSPIVDKVRGRYQIRFTFEEIRELVQDEDKLAYRILAVDLGINAAASWCVMEADGTVHAKGVIHLPCEEDRLNHMINRKRMYQQAGKKSHCVYRWIRETNRQLSIQTTKSLMDVAVLYSVDCIVFEHLDSKWKIRGRRYRERIHLWRKNDVQHRVELQAHRMGMRLSRVCAWGTSKYAFDGSGVVDRHSIYHYEHGRKVYNYSLCTFQNGKIYNCDLSAAQNIGARFFLREYQLLGAEGLPATPQRTLCTLRTLVSNGLPVAT

SEQ ID NO: 47428 - protein, 380 aa, Staphylococcus sp.
MYKGIECKLYPNQKQAELIQMTFGHTRFIWNQMLGMLKERYQNNANLKMLSYSKLSSLIPQLKREYPWLKDVDSVAIQCSVKTLSDTFDRFFKGGCRYPKFKSRKQTVQSYLSTIRGENIRFNGNQRYVKLPKLGWVKCRMSVPHIENERIKSVTIKQKPSGKYMMSVLVTSENQTLPKTHQTVGIDLGVSDFAITSDGHKYRSQRLHLKYQKQLHVWEKRMARRRLRAKAEDKSLSESKNYQKARQQVARIHEKIAHTRKDYIHKITTDLVKNYDVIVIEDLKTSNLLKNHHLARIIASQSWHQFKIILKYKCERYGKQLHCVNPYKTSQFCSNCGHDSGKKTLNIRHWRCSSCHTLHDRDINAAKNIRNVGLGQALVK

SEQ ID NO: 47429 - protein, 401 aa, unknown
  TnpB Polypeptide
MTRCRTFRYRLHPTVRQTQALVRQLDYQRELYNAALEERIGAWKWERRSVSYFDQCKTLTDLIEVRPEVVTSGVTLCRGTLLRLDRAFASFYRRIKSDETPGFPRFKTAPRFDSLQWEDRSGWKVKEDDRRLYLLGIGEIKTNYHRLLTGVPKAITVKREGTKWWLSVRCVDVPAMPLSPSGREIGVDLGVRNLIATSDGALLVGEHFGSRAQLRLNEAQRSLATKQRESKRRRRQVARVAQMHRRVANQRTNALHQLSRRLVNDYDLLVLEYLAIPNMVRSPRAKFDPDKPGAFLPNGAAAKAGLNRSIHDAGWGTLLSLLSYKAESAGRMVVTIDPRYTGQTCHECGHVDAGNRVTQAVFTCQCCGHRNHADVNAARNILRAGRAQLASASVGRNWATT

SEQ ID NO: 47430 - protein, 544 aa, unknown
  TnpB Polypeptide
MAERCVFTYQTRLVLAPEQAQALNAYAELHGRAQRCLHAALRRHRSLNELKREFLPRFGLTARQFNGIRVELDGKVEAILQRRPQLIEEAKVRLAKAHRLVNKLAQNSPGTNKLHQKKRRLAVLEQRLAALQRDEADGQVRLCFGSRRLFHAQYNLQANGLSDHEEWLDQWREALSRQFFVLGSQDETAGNQTCQAAVCEDGSLQLKLRLPDALMQECGARFLMIYGVRFAHGHGPIVSALGMSRVVSATTRAGKPASRRVGRAISYRFLRDDKGWRVFASVEVDAAAVTTSPALGCTGIDINADHLAVAEVDRFGNLVDVRRIELPTRGKSSDQVKALIGDAAVQVAALAQARGKPLALEKLDFRKKKAELEAVDPARSRLLSSFVFSRMTSALKAASLRAGVEVIEVNPAFTSIIGAVNHAQRRGISVHQGAACAVARRGLGLREAPAVREAIVPLRNGGHVTFAVPARNRAKHVWQQWSGIRTCLKAAHAAHWRSGSSTDPPAPLSPATQASSAHRLSTAQSRGANRSQHCSGSVMDDIPF

SEQ ID NO: 47431 - protein, 441 aa, Streptomyces sp.
MSQLATVKRQFGHRARLALSPAEVLTLDGQAHAARTMWNLLHDWWTMLPKGKRSLALADAAIRQARKDLDWLGVLPAQAAQAVLKTYFQSWKNCWDGRAEAPNFKARFRSPMSVDIPQGRDLSIVRVHRRRGMVNIPKLGRVRFRWTKDLPVGKRANKENRITGARLVKDALGWHIAFRVQTLEAKPEPHQGPEVGIDAGVNLPLALSNEDHQDHGRPPRLPDGKSDRDKWLTPKEKAKLLRLEREAAHRKTFRKRGQQSSRRLQHTYDQIKQLRATATRRALDWQHQTTTYLARTYGVIVVEQLNITNMVKSARGTVEEPGTNVKAKAGLNRSNLQEAWRRTVTMLTYKLERLGGELVKVPAPYTSQRCSACGLITPGSREDQATFVCKNPDCGWSGNADHNAARNILHLYRIGHGTVVIPAAGRAVVRRTRGVQPAAAR

SEQ ID NO: 47432 - protein, 290 aa, unknown
  TnpB Polypeptide
VALQASYENLIDAFKRFFKKQNKYPRFKSKKNPVQSYTTKNTNNNIAIVGNQMKLPKLGLVKFVKSREIEGRILKATIKYNASGKFYVSVLCEVPDFKPLPKTNETVGIDLGITDFAVLSDGRKVDNQRFTAKMEQKLKREQRKLSRRYEQAKKECRDLRECMNYQKQRRKVACLRERVAFQREDFLNKLSTELIRQYDVICLEDLNTKGMMKNHKLAKAIADVSWSEFVTKLKYKAKWLDRKIVEIDRFYPSSQICHTCSHRDGKKPLDIRVWTCSSCGTTLDRDINAK

SEQ ID NO: 47433 - protein, 530 aa, Escherichia sp.
  misc_feature (287)..(522): Xaa can be any naturally occurring amino acid
MKRLQAFKFQLRPGGQQERQMRLFAGACRFVFNRALALQNENYEAGNKYIPYTKMASWLVEWKKDTETEWLKDSPSQPLQQSLKDLERAYKNFFQKRAAFPRFKKRGQNDAFRYPQGVKLDQENSRIFLPKLGWVRYRNSRQVTGIVKNVTVSQSCGKWYISIQTESEVSTPVHPSASMVGLDAGVARLATLSDGTVFEPVNSFQKNQKKLARLQRQLSRKVRFSNNWQKQKRKIQQLHSRIANIRRDYLHKVTTIISKNHAMIVIEDLKVKHMSKSAAGTISQPGXXXXXXXXXXXXXXXXXXXXXXXXXXXXXXXXXXXXXXXXXXXXXXXXXXXXXXXXXXXXXXXXXXXXXXXXXXXXXXXXXXXXXXXXXXXXXXXXXXXXXXXXXXXXXXXXXXXXXXXXXXXXXXXXXXXXXXXXXXXXXXXXXXXXXXXXXXXXXXXXXXXXXXXXXXXXXXXXXXXXXXXXXXXXXXXXXXXXXXXXXXXXXXXXXXXXXXXXXXXXXXXXXXXXXXXXXXXXVMGYNGLH

SEQ ID NO: 47434 - protein, 379 aa, Lactobacillus sp.
MTLRAIKTRIYPNQTQQDKIIANFGCCRFVWNQLLNMQIKRYNNGSSYVNEFGMNYLIKCLKQEYPLLKQAESTSLLHVSRDLHKAFQKLFKEHVGYPKFKSRKFPKQSYQSNSVNHNIQQTDKHAIKLPKLGNIRFKAGRQVTGKIKNVTIRLSATGKYYAIVLIDEDILELPTTNQSVGIDMGVADLMITSDGVKFPTIRFDKLLSRKKHYWEKRLARRRLQAMKEIAWDHHNKVLVPRELSDFSNYLKAKHMVAKYNEKIANQRNNYLHNLTKQLVEQYDVIKIEDLKTKNLLRNHKLARAIANQSWRELRSQLEYKCAWYGKQLVTVNPRKTSQICSNCGYDDGKHTLDIRQWICPQCGVSHDRDINAAKNILSA

SEQ ID NO: 47435 - protein, 312 aa, unknown
  TnpB Polypeptide
  misc_feature (276)..(312): Xaa can be any naturally occurring amino acid
MLSYRYRLYPNKKQAKLLDKTLDLHRQLYNMALDQRQYVWRTRKRSLNYYDQANQIKELRPGTDFALLNYSSMQRTLRRLDTAFAAFFAGGGYPRFKAKDRWASVTYTFGDGIGFAKNGRLRVQNIGNIRIFQHRPFPDGAKIKTAQLVRQRATGAWFITFSLELPDSDIPSHSGQPVGIDLGVTTIAALSTGELVAAPHYYRSTERKLRVKQRRLSRRKKGSSGRNKARKQVAKTHLRITNQRLDFNHKLARRLVDEFSLIAVEDLNILGLSKSXXXXXXXXXXXXXXXXXXXXXXXXXXXXXXXXXXXXX

SEQ ID NO: 47436 - protein, 576 aa, unknown
  TnpB Polypeptide
LTDDQNVTIEKTFDCCRYIHNWALGERTNAYQEKKETLTYNYQSSPLPQVKKDCPWLKEVYSWAVLNSLKNLNTAYRNFFRDTKKVGFQTFKKRSHRQSFTSNVCKVDFKSGTITIPEMAPIETRFHQEFKGMVRQATISMTPSQKYYVSILVDTGTALPQKSEISERTTLGIDMGITTLAVCSDGRTFCNPKNLYKSMAKLQLLQKRLIRKQKGSSNYEKARLRVAGMHEKSANQRRDNLHKITCSLTHDSQVRTICIENLDVKYREKNHQLAGYVCDASVGMFRSILEYKCNWYGVNLVKIDRYAPSSKTCNNCGHIYDGLTLSERQWTCPACGTHHDRDLNAARDIRDIGLETLPTERGKVKPVDRPTVDDRPCVLESRDGMKQENRRDVGLSEATKYLVYRFIYNFFLRFRSLILPRSASMNQPHGLVFCLACPCSRTISIRKSSMARFASIRTPRLLSMPLLEKPTSSRIRISCLLRTAELPYFSTCRWNSAFGWSFFFWTTGVKAMEVIFLPFLISSYVNVMGDFSSSSAFAGSMTLRIRSLVFLYLAGTFFPSFSVPSSPNILRISSTL

SEQ ID NO: 47437 - protein, 391 aa, unknown
  TnpB Polypeptide
MTITVEFKLRGKIAQYHAVDEAIKTAQFIRNKAIQYWMDHWGADKYDLSRLSKNLAAEFSFVSALNSTARVAACERAWRAISKFYANCKDRKISKNNKPGFKHNSRSVEYKTYGWKISVDYRYITFSDKKGIGTLKLIGTIPLNQYPKEKIKRVRIVKRAGSYYVQFVIDIDKTEGAPFTGSMIGLDVGLKSFYTDSNGKEEPNPKFFKVSEKKIKKLHQRVSKKKKGSSNRKKAIQKLQRGYLKTQRQRKDFVTKLARCVYQSHDLVAIENLNIKNMVKNHCLAKSISDAGWGLFREKLTHYSKVFGKSLILVNPAYTTQECSKCGNIVKKSLSQRTHQCSCGCLLDRDHNSAIVILNRAIQQINLKTTVGHTESNAWGENDLCSKPVVV

SEQ ID NO: 47438 - protein, 401 aa, Thermoplasmata sp.
MKAIIKTKIYAGKQKQQLLRQSLGNIRFVWNKFVWLEKEYYKQHKKFIRFAGLCREITRMRKEYEFLNYTSIWNLQQIARKFNFALRLFIKHKSKGYKFPSYKRKKNYDGILIYPKDFKINGKMIYLPKIGWVRIKDKATKKSLWKHITETAKQVWVKEEPDGFFAYIVYEKELSIQRQNGKIVGIDLGIRNTITISNGETISLPIKNIMRIAKKIEELQSIIDKKKHINKKRGIKQSKRVIYLERRRSKLLKRIKNIKYDFYQKTINHILKSHEYVVVENLELKELKEVKSENKKATKKIHKYLQYISLSKFYQILEYKAILYGRKIIKVNPKNTSKMCSRCGHINNITLSTKVFKCSECGFRIDRDLNASINIYKMGLSISSGQGEYKREMVSERIPIR

SEQ ID NO: 47439 - protein, 389 aa, unknown
  TnpB Polypeptide
VNRNCLKIRLYPTKAQAHELEETLETCRLVYNSLVNDRKFQYDTAQVSVGRYDQQAYLPAWKKKNPELGKVYSQVLQDVVHRVDLAFSAFFDRVQKGETPGFPRIKGSGQYDSITYTQKASFKVGESSVHLAKIGQVKAKIHRKPWGEVKNCTIRRINGKWSASLCQEVEPEYLPRSAEAVGIDVGLKTFAAFSDGTFIENPRFFRKDEKALAKAQRKLAKQIKSASGQKRGSRELKFCNAERRKARKVVSRIHERIRNRRHDFCHQNARRIVNRFGIIAVEKLSVKTMLGNHCLAKSIADASWSQFRLVLTSKAESAGREIIAVNPAYTSQDCSGCGYRPDGLEGRTKKKLYDRWHLCPMCGLSVDRDTNAAVNILALGQQSLASVKA

SEQ ID NO: 47440 - protein, 376 aa, Microtetraspora sp.
MAQVVKRAYKYRFYPTPGQADVLARTFGCVRLVYNKALEDRTRAYRVEGRRVSYGESSAALTAWKRTQELAFLNEVSSVPLQQALRHLQAGFVNFFTKRAGFPTFKSRKKSRLSAEYTRSAFRWRDGTLTLAKMDGPLDIVWSRPLPEGAEPSTVTVSKDAAGRWFVSILVEEKITPLAPAENVVGVDARITSLLTLSRPIDGVTDAHGTVANPRHEPAERRRLARAQRALARKGKGSANRVKARRRVARVYARITDRRRDFLHKVTTRLVRENQVIAVEDLTIRTMVKNRTLARAISDASWRELRSMLEYKARWYGREVVVVDRWFPFSKLCSACGTLAESMPLSVREWVCACGAVHDRDVNAARNILAAGLAER

SEQ ID NO: 47441 - protein, 413 aa, Lachnospiraceae sp.
MPYHIGIVLKVYPSYRQKHLVSVNAGAQRSVYNHLVACGNEIYRLSKTASYVPSDRRRIDDLRHMTGSAANIQNALPYLYTPEVDCQTVANGMKNYRTAWKNMRERHTGVPAFHKKANDLSYQTNCHYVKSSKGLKDGTVRFLNQRYILLPKLGKIRFAGSPKLVSSLLSHTDNTRIGTVTIRKDAVGEYWVSLQIASEYPFHELLPKTGKMLGIDLNLLELVYSSDGGSMANPRFHANLDQKITKAQKKLSRMGDRAKRENRSLYESRNYQKQRAKLASLHRQVARQRADYLHTVSKHLVESQDLIAAENLQVRNLLKDHHLAKAISDAGWRTLLTQLQQKANVYGKTVILVPPQYTTQTCSECGYVLKKEERLPLSVREWDCPKCGTHHLRDQNAAKNILQKALLIMAETA

SEQ ID NO: 47442 - protein, 401 aa, unknown
  TnpB Polypeptide
VQLRYNYRLGPARQHRIAFGRAFGCARVVFNDALAAREEAHAAGLPYITDAEVSARLTAAKASPGRAWLGEVSSVVLQQALADLNAAYRNFFASATGKRKGPKIKPPRFRSRKDHRQAIRFTANARFKVLANGRLRLPKIGDVPVRWSRPLPSEPSSVTIIKDSAGRYFASFVVETSPAALPEAEPVVGIDLGLTHFAVLSDGRKITAPRFLRRAEKLLKRRQRELSRKQKGSANRAKARLKVARAHARVADARRDFHHQLSTALIRDNQAVAAEDLAVAALGRTRLAKSVHDAGWSSFVGMLEYKARLYGREFHRIGRFVPTSQTCSVCGAKDGLKPLHVREWQCGACGVWLDRDVNAAVNVAKAAGLAVTACGAQVRPPSGAAQRIEAGTHPKPHREAA

SEQ ID NO: 47443 - protein, 403 aa, unknown
  TnpB Polypeptide
VITSYRFRIYPSKTQQEIMRQHMELCRWLYNQLLKAKRENPNLKKYDTQRLIVELKKENPELNKVYSKVLQMVNHQLWSNLKGLNELGRKGYKVGKLRYKTSPHSWKILNYNQSGFKLDEERKRLHLSKIGEFSIKLHRRIKGKVKGVIIKRTKSGKWYAIFQVEEEPKPLPKTGKVVGIDLGVKHFAVDSDGNAFENPLFLENSLEKIKKIQMQLSRKRKGSKNWEKMRVKLVKAYERLYNQRRDFLHKLTLYYVRNYDVIILEDLDAKKIVENGHTKGFRRRFLDSALKEFVRMLSDKAGRAGRRVVFVKPAYTSRTCSRCGAIVELSLSDRVFACPKCGLVLDRDLNASLNILKKGLDEGLGRPGLPVEGGPLPRVVPYRAVITGQVFLMKQEAPSERAG

SEQ ID NO: 47444 - protein, 456 aa, Planobispora sp.
VDVVALTVELRHLALEISAHLSHDLLHALQVDAGEHRMPELGDENQMGMQGRNAVSTSPDVSVFSHKPREDHGVQLRYNFRLSPTPGQRAALARAFGCARTVFNDGLRARQQAHAAGLPHLSDGELSQRVITQAKKTPERAWLGEVSAVVLQQALADLNTAYRNFFASLSGKRKGPSIAPPRFRSRKDNRQAIRFTRNARFSITAGGKLRLPKIGDVTVTWSRRLPSEPSSVTVVKDAAGRYFASFVVDVAAEPLPQTAAEVGIDLGLTHFAVLSDGRKIENPRFLRRTERRLRKAQQALSRTVKGSNNSKKATYTLARAHARVADARRDFAHKLSTRIIRENQAVVVEDLCVKGLARTRLATSVHDAGWSAFVNMLEYKAARYGRTLVKIDRWFPSSKLCSACGALAGSMPLNVRSWACPCEASHDRDVNAAQNILAAGRAERLNACGGTVRPAA

SEQ ID NO: 47445 - protein, 254 aa, Okeania sp.
LLAHAGTARHAYNWGLATCISEYKETKKRPSAITLHKRLIAEVKSENTWYYEVSKCAPQQALRDLDRAFKNFLTIPKRGFPNFKKKGKKDSFYLEGSIKIIQGNYIKLPRIGIVKTYEILPSVPVKNVTISKRADNWYISFKYDLESVSNSPPKKRGVLGVDLGINTLATCSDGTTYPNVKAYKQAQKQLSRYHSRVNKKEPGSKNRLKAIKRLSKLHKKVADIRADTLHKLTTWASFKPQHHSDRSMTMSVEC

SEQ ID NO: 47446 - protein, 536 aa, Streptomyces sp.
MAAPFIALGPSGVAVRDRLKHLSVEDEEVLRLIGDHLGTLASRDLKARCAAGLDHDTGQWAARKRTLTQESSSRWAGSITKATHDQWALARRGQLAYIQSLEADVRMVAYRLSLPIGQKGGKRAPGGYRSRREWHAKARRLRVLEDRLQAARADWEAGVVRVVRGGKGLLNARHHLRAAGLTEERWRTRWQAVRRFLEADGESGKRFGNETIRVTPDGEVSLKLPAPLAHLANAPRGRYVLAARVAFAHRGEQWRDRVTANRAVAYRIHEDTSCGRWYLTASWTVPPVKTVPLAAAHRGGLVGVDTNADHLAAWRLDTHGNPVGAPVRFGFDLSGPAAHRDAQVRHALISLLHWAKRHGLAVAIEDLDFTADKTREKHGRRKKFRNLISGMPVSRLRARLVSMAAELGITVIAVDPAYTSRWGAQHWQKPLTCKNRTTTRHDAAAVAIGRRALGHPIRRRTTPPPHDQSDRVGHRTVQARPGAPRREEPRPRIPGPRTRSMRAGCGANAGDQCAQHRSGHAAEHESWRQDSLPLSL

SEQ ID NO: 47447 - protein, 405 aa, unknown
  TnpB Polypeptide
MPIVGFRFRAYTDRRTLRALKAQLEVACEVYNTLRWADTYFYHEDGRGLSENELRQLALDLRKQDEEYQQLYSQTLQQIADRYYEARKRFFDGLSRFPREKKLHKYYSLVYPQSGWRILAREVRTSGTKKRLVLRLSGLGAFKVIAHRDFPLEKVKRIAVKVTRSGKVYVSFIVEDYGFPKLPSTGKVIAIDVGVEKLLVSSDGEYVPNLRPYERALKKVKRLHKALSRKKYLSRNWFKAKMKLARAYEHLANLRRDLYMKLGRYFAEHYDAVVMEDIHVKQLVGKSSRGLRMRLHNVAFHELRSIVKYQMEKYGKGFILVDPRDSSKTCAKCGYVKMDLTLSDRVFECPRCGWRADRDYNSLNHLKNAGWEPPAAPVELRPLPVALSYGQGWAGKREASPLRAG

SEQ ID NO: 47448 - protein, 399 aa, unknown
  TnpB Polypeptide
MEMVETHIQVRLHLTKEQKGILKKSCKLYLKCLNAMSKCFFEHDFSLTEKSLKKQAGKELLRAFRATPLVASASKEVLSKYKAEKQRLSSEVYSYQGGKGIEKIAKDLSWLKKPIEFKEEHIYYESGMLWKFRNNYKQVAFTCFGSRIRCEISYKDGEKLSNDDRGTAKIVHKRKGNEDVFYLLVPVEKRIEETESPFVRNSATTVVGIDIGERFIITAYDGEKTIFVSGKEIAEKAKKYQQQKAELTGKKSKAAQERLKTVTQKERNWLCNVNHKIAKDLVESYGKQTVFVFEDLPHAMFQSKSRLWFLERLEEYFRQKIASRGAHMLKVSAQYTSQRCPYCGKISKKQRNHNKHEYHCSCGFRTNDDRVSAINLHELGQRWLEGETNPRIVLPDVIQ

SEQ ID NO: 47449 - protein, 365 aa, Beggiatoa sp.
MKKGRKSSSEFRTQICDWCKLECEEHDITYNSNLVQAAYRKACDTRSAVIKKRMKGEKAEMSFMSRNAPQQYFVVPRLSSNKQIFPKILKGCRWTECAPSEAIGQTVIVTYTNNQWFASVKSNQSVEPTKTQSLSIVALDPGVRTFQTAFSFDSAVSYGDGFVNDRLVPLMLELDALLSARDKLHHEDKSKQWVKDRLKNLNWRIAKVRARQQNLVSDLHRRVAYDLVSNHDVILLPTFETQQMAKKSNETRKRFLRRKTVRGMLGLAHYKFKQTLKWMAKKYGKTVIDANESYTSKTLWDGSILKNLGGKASILFQGKRVNRDIHGARNILIRFLTKVIDVLSPKGACPLNITKARFCCFGVLK

SEQ ID NO: 47450 - protein, 289 aa, Beggiatoa sp.
MVFLEKGLSFSLPEKLVGKTIKQVEIVPKYRHFEAIFVYEDDEIVDTVSPSDKVMAIDLGLNNLASCVTNGVTRPFIVDGRRLKSINHHYNKRYAKFQSHLKKTRDRKWSNRLQRLTDRRNARITDYLHKATRKVTDICVEQGISKVVVGDVTKSLNQINLGKKTNQNFVNLSLGQFIDKLRYKLELHGITLEVINESYTSKASFVDDDILPKKYEPKTTHTFNGKRVKRGLYRSQNGVAINADVNGAYNILRKNDSKFSFNKLVKKLGNYFKAWLHPTERILIDLPSK

SEQ ID NO: 47451 - protein, 215 aa, unknown
  TnpB Polypeptide
MGLTKPGQTLISQKLAECKTFEPSGTATSGEPHFVCKVELETNDSAGNGVAGIDLGIKNITTVAFPDEYVLYPGSLLKEDKHYFKRTEYDTEGKNGLSEKSMWARQKLTNRETHFYHALADAIITECVERGVGTLVVSWPENVRESDWGKTGNKKLHSWAFDRIYQYLAYKGEMRSVEVLKENERNTSKTCSACGDDTKSNRVERACTFVRRASW

SEQ ID NO: 47452 - protein, 254 aa, Clostridia sp.
VKWIKHRPLQGEPKKITIIQDGDHWYCSVLCEFELPDRPKDSSSLVGIDVGLKSFATLSDGTVIDNPKHLRKSEKRLADAQRKLSKKGKGSQNRKKQKRQVQKLYRKIRNQRLDFLHKTSASVIAKHSVVLEDLNVKGMMKNRCLSKAISDAGWFEFRRQLDYKAKWNGKLFITIGPREPTSKKCSCCGNIQEMPLRKTVYSCPVCGMTMDRDLNAAINILNIGLNTAGRAGINACGVGTVVPMMKQEKECLVN

SEQ ID NO: 47453 - protein, 293 aa, Escherichia sp.
  misc_feature (194)..(267): Xaa can be any naturally occurring amino acid
MASWLVEWKNATETQWLKDSPSQPLQQSLKDLERAYKNFFQNRAAFPRFKKRGQNDAFRYPQGVKLDQENSRIFLPKLGWMRYRNSRQVTGVVKNVTVSQSCGKWYISIQTENEVSTPVHPSALMVGLDAGVAKLATLSDGTVFGPVNSFQKNQKTLARLQRQLSRKVKFSNNWQKQKRKIQRLHSRIANIRRXXXXXXXXXXXXXXXXXXXXXXXXXXXXXXXXXXXXXXXXXXXXXXXXXXXXXXXXXXXXXXXXXXXXXXXXXXVIQRKKIACHKVNSDARHVDIQRTLM

SEQ ID NO: 47454 - protein, 397 aa, unknown
  TnpB Polypeptide
MGKSIIRTDKWPLQASEHQQKLMLMTVAEYRAFCRALCIVILNNWPKLASDPAFMPSIERLMHPTAKNPNPKHRYFSSRFYKFPSYLRRAAINFAYGQVSSYVTRYNAWLDGERRSPTSKPPVFNTTSGCYPALYRGQLLKLDEDYTVASLKLWDGKEWLWHDVSIKQTRHRHELGKMKSPALIVGRDFHLSVPVELKPEKLTNRDRVCAVDVGINTLATASVISSSGTVAARGFFHPAADIDRRNKRASLIRQKARKTKKLSKGFCASMYRKARHINEQIAQITSKRIVQFALKNQADVIVLENLKSWRPRGGRKRSTLKQKFHLWLHRRLALLIEQKFEEHGGKVVYVYPRGTSSWAYDGSGLLKRSSKQYELATFQTGKQYNCDLNASYNIGAR

SEQ ID NO: 47455 - protein, 543 aa, Streptomyces sp.
MGQVRELAAPFVVPGPTGVAVRDRLKHLTAEDENVLRAVGAHLGRLASKDLRARCTDGPGHNGDRWAARKRALTADSSSRWAGSLTKHTHNQWALSRRCQLAHIRGLEAGVRMLRHRLSLPIGQRGSKRAPGGYRSRREWHAKSRRLACLETRLETARAGWEAGQVRVVRGGKQLLVTRHHLAKADLTEREWRERWEAERWYLAADGESGKRYGNETIRVAPDGAISIKLPAPLAHLANAPHGRYVLTTRVRFQHRGEEWADRITADRAVAYRIHYDVQRGRWYLTASWQHPVVQTIPLEAARARGMIGIDTNADHFAAYQLDRHGNPVGDPHRFFFDLTGSTSHRDAQLRHAITRLLHWAERVGVTAIGIENLDFTAEKSREKHGGRKRFRQLISGMPTARLKNRLVSMASQYGLAIVAVDPAYTSVWGAQHWQQPLTSATRIMTRHDAASIAIGRRALGHPIRRRTAPPRHHQSDGAGHRTVQAASGTPGREETRRCIPGPRTRCAPPGRGAKAGDQRTQHRSGHAAEQQSWQQDALPLSP

SEQ ID NO: 47456 - protein, 272 aa, unknown
  TnpB Polypeptide
VHVIFRAQPRTELSKFINAYKSASSRLLKKEYPEIRKKYREPAEGLRLRSVTVSMEPSGKYFASLLYEGYSCENQAAEPDYSTAKILGIDYAMQGMAVFSEKIEMEEAGFFRKNEKRLAREQRKLSRCVRGSHNYELQKKKVARCHEKIRNQRRDHLHKLSRKIADSYDAVAVEDIDMKAMGQCLHFGKSVQDNGYGLFREMLDYKLVWQGKKMVKVDRFFPSSKKCCKCGRIKKELRLSERVYHCECGNEMDRDRNAAINIREEARRMLTA

SEQ ID NO: 47457 - protein, 479 aa, Trichocoleus sp.
MSSRNTSFCVRFVNLQYCMKCSCSRSDGLRVIFAMPPYCRQLRYNYGMRTAYQYKLRPTKQQAAEIDRWLSMLCSQYNYLLADRFNWYEQNCSPVNACPLVCHLPELRDKPDYFSQKRALPQLKKTHPWYSEIYSSVLQDVVKRVKITFDRFLKGDSNGKRSGKPRFKPRDRYRTFTYPEIKQNCLQVTGKKSSILLPKLGTIKVVLHRPILDGFKIKTASVTKKADGYYLTLSLEDPTVPEIKPDFNPNKIIGIDVGLKEFLTTSEGEAVAIPQHYRKTQKRLRVIQKRVSRRKKGSNHRQKAVKQLGRQHKKVADKRKDFHFKTANRLLSKHDVVAHEDLNVKGLARTRLAKSVLDAGWSSFLSILATKAENAGLLVVPVSAHNTSQNCSNCGEKVPKKLHVRWHDCPDCGCSLDRDHNAAINIKNRAEGHPVLKAQRLLSNSRIGCEASAHFNKDRAHGDVTSGELTINNRKQIER

SEQ ID NO: 47458 - protein, 401 aa, Trichocoleus sp.
MRTAYQYKLRPTKQQAAEIDRWLSMLCSQYNYLLADRFNWYEQNCSPVNACPLVCHLPELRDKPDYFSQKRALPQLKKTHPWYSEIYSSVLQDVVKRVKITFDRFLKGDSNGKRSGKPRFKPRDRYRTFTYPEIKQNCLQVTGKKSSILLPKLGTIKVVLHRPILDGFKIKTASVTKKADGYYLTLSLEDPTVPEIKPDFNPNKIIGIDVGLKEFLTTSEGEAVAIPQHYRKTQKRLRVIQKRVSRRKKGSNHRQKAVKQLGRQHKKVADKRKDFHFKTANRLLSKHDVVAHEDLNVKGLARTRLAKSVLDAGWSSFLSILATKAENAGLLVVPVSAHNTSQNCSNCGEKVPKKLHVRWHDCPDCGCSLDRDHNAAINIKNRAEGHPVLKAQRLLSNSRIG

SEQ ID NO: 47459 - protein, 355 aa, Clostridiaceae sp.
LLLTKKIIYKPNELELNILNSMAFSSAKLWNIGNYEKRNYKTLGFSEFPNWYDQKKRLKDNFWYKNLPSQTSQDVLNKLQKAWKSFFELNKSKGIKNPKPPRFKGKKDLFNFTYLNNGFKKVSDDTIKFSISKQQKEYLKDKYDFDSKYLSLKIKYFSTIKGNIKTIEFKPLKNKKYQINVVYEIEDVALKDDNGNYLSIDIGISNLFTCYDNKGKSFIASGSKYLEISHYFNKKISHLQEIANKQQIASGKKYVTTTKRINNLYKKKQLQLNHYYHCVTKEVVKYCVTNNINKVVIGDIKGIRDNAKLGSINNQKLHFLPYDRLYDLLAYKLLREGIELIKIKESYSSHSIHVE

SEQ ID NO: 47460 - protein, 413 aa, unknown
  TnpB Polypeptide
MSEIVKTMKLHIHVNETEAKSLEELTACYAQACTFISKYVFDHGFILNFMKLQETLYQTIRAEFGLKSQFTISAFKTVTARYKTVQEQPFQNPYRYKNEKGETHFISRTLEWLQKPIVFRRPQADLVRGRDYSFVTADDGKKQLSLNTLKKRIKVTFDLPKKFKEYFDGTLSFGSGKIVSMNGNWYFHIPMTKNVSEEFSMDHVKHVVGIDRGIRFLVTSYDEKGKVTFVSGKEIQKKREHFQQVRSELQSKGTKSAKRALKRISGRENRWMSDVNHQISKTLVTKYKAGTLFVLEDLKGISFSDDLLGKRSAKGRQELRTWTFYQFEQDLTYKAQAIGSQILKVKPDYTSQRCPKCGRIQKGNRHHDIHEYICDCCEYRSNDDRVGAMNIQILGTMYVSGDSNPRFGVRKVN

SEQ ID NO: 47461 - protein, 424 aa, unknown
  TnpB Polypeptide
MLVHGLILFPINQSRVFMILAYRFKLAPSKAQYAALERVRELQRQLYNASLQERCDAWSKNGISISKIDKNKSLTQIRSFDEAYAAVPVAMSRWSIARVDDAFKGFFSRVKRGDKPGFPRFKGRSRWRSFGFAEWSGIRLMHGKLVFGGLVGGLKVRLHRPIPDGASIKSCTFSQHGRHWFVSMQVDVPAAETHACPSASVGLDVGVEHLVTTSDGLHIPNHRPRKRRERDLRLTQRALARCRRGSKRRRKVRERLALLQRRIANARSTYLHQVSAKLAREHAFIAVEKLKVRNMTGSARGTADEPGTNVRQKAGLNRALLDAAPAMLVSYISYKAERAGGMMVKAEAAYSSQDCSSCGGRVAKPLSERMHRCSCGTVLHRDHNAAINILNRANEAHGRARPPGDGNVGHQPVRRLGNMAVVAA

SEQ ID NO: 47462 - protein, 381 aa, unknown
  TnpB Polypeptide
MKSVATIKIKIPRNDQLLETMKQYSKAIQYIADEGFKANIHNRYKLHHLCYYDTRKLFNLPSQFVVNANRVASQALKSIKANKGRKPQFKEMMPLAFDKRTFTFSKEKVRLSTLKERIDIPIEIPEYYLKYLSWSYQTALLTIDKNGRFFLNITFSRDININKISNGLQVGVDVGINHIAVTSNRQFFSGNKIKRYRLKFKRLRAKLQAKGTRSAQKLLKKISGRERRFKAWVNHSISKQIVANCNAGTIVLENIKGIRQGSRGKKFNFWLNGWSFYQLHSFITYKAIQNGINVIRVNPYHTSKLCSKCGQIGSRSKGFFKCLHCNYSLNADLNGAINIASKHHSKADGVSALVTEPHIQSDDVKGLLTTATELMDKSPHL

SEQ ID NO: 47463 - protein, 374 aa, unknown
  TnpB Polypeptide
MPTFNNMKSVATIKLKVRHNKELINMSNTFIQAVQYAIDKGFEAKISNRFKLHHLVYKDLRQWLPADFACEAIAKASENLKSIKLKKKPIMKSCPISFNRNLFTFSFDKVRIATFIPRQRQDIPIEIPEYYWKYLDWRYQTLEIAKDRKGRMFFHITFSRDINTPISCCSDRIIGVDVGINNLAVCSDGKVFKGHKTRIMQHNYLRRELQAKGTKSAKRLLRKISRRQKRYIAWVNHSISKQIVQNADTIVLENLKGIRKGRNKFMGKRFNRWLNSWSFYQLQSFIKYKAEREGKRVVFVKPYLTSQTCSNCLKLGSRYYDSFTCFHCGFSSQSDLNASFNLRRLNVTQPNVSDDEGKGQLTTEPEFRGKSPRL

SEQ ID NO: 47464 - protein, 428 aa, unknown
  TnpB Polypeptide
MRLTFKYPVYPTKTQEQTLLAWFDHLCELQNSARNNRKHAHETEGRFVSRYDQEQLLKIAREKYDDFRSVPQDFQVSALKRVEKAFDAFRKRCKADVAKKGYPRFKMRVRSVTWCLRKHKVKDKATGTYERVRQNPIRETGTRLDRLKVPKLGEVKIRMHRPFVGDPKEVTLVKKASGWYAHISCELPDIPKVEPTAAIAVDMGTTDYLTTSDGEKEGNPRWYRKAEGLLHKHSQTMARRKKGSQRWYKAVHAIALHHERTANKRKDFIGKLVYKLFHHQKNNVLISEDLRIANMVKNKHLSKSISDASWGIFFEWCGNIAERDGFHFHQVNPKDTSQTCSCCGQKSPKKLSLAIRTFDCGYCGSSLDRDHNAALNILFRAAAALRGERWVTTLYEARNTATKAFGFKTPNQLSLFDGLTQAPCFSEG

SEQ ID NO: 47465 - protein, 402 aa, unknown
  TnpB Polypeptide
MEQTLTITCKLRPTSEQALKIEALLKAFADACNFVNQSVKPSVTSKTTIQSQVYHDIREQFGLSANQAVRVCARVGANRKTAKLKNKPVKAFRPTSADYDARIFAFREKDWTVSLTLLDGREHISLDIGNYQRGKLKGRKPTSAQLCQHRDGFYYIHIQLTDDAPEPIKPDKVLGVDFGRREIAKTSTGQGWDGKQLNQVRDRFSRVRASLQKKASKGTRSSRRRCRQVLQRLSGRERRFQQWLNHSISAAIIREAKELNAAVAIEDLTGIRERTNQQPRSKTERRRSNSWAFYQLRQFLAYKAIKEGIELVAVPPAYTSQTCHCCNHIGLRSGKSFNCGHCGWQGDADSNGAINISKLGAVVSLPRGSGLFCSLEQGVSGLPKAPSLWRGDAYKSLGIKQG

SEQ ID NO: 47466 - protein, 485 aa, Streptomyces sp.
VKKFRPQPGFVVQAYRFALDPNAVQERALRSHCGAARAAYNWAVGWVTASWWQRKAEETYGVPEESLTEWRPWSLPSLRTAFNAAKHTDPRFAHWWEENSKEAYSTGLANASAAFDNYAKSRSGKRRGARMGAPRFKSKRKARLACRFTTGSIRVDADGRHVTLPRLGTIRTHEPTVKLLARVQAGTARVLSATVRHERGRWFVSFQAEVKRDIERVKRPDTAVGIDLGVKTLAVTADSTGEIRTVTNPGHYDQARKRLRRASRVVSRRQGPDRRTGQKPSKRWEKANAHRNKVHHRVANLREDALHKLTTAVAAEYSTIVIEDLNVAGMLRNRRLARRIADAGFGEIRRQLAYKTSQRHATRIVVADRWYPSSKTCSGCGAVKAKLPLHVRTYECDACNLVIDRDDNAALNLAALAAAAVTGTGVAGDQDTAPAVSKPRGADQKTRATRPRRKAEAGRAGGATLPRQRQTETRDRTQAEALTLW

SEQ ID NO: 47467 - protein, 445 aa, Natronorubrum sp.
VKRTNTFAVRPLSEDGEQLLRDLLDASAALWNEVNYERLMRYNDEDSYEDEGVWDADTGSLEGKYKGVLGASTAQQVIRKNSEAWRGFFDTKNKYHDESNTSVTEHPEPPGFWGNKDDGRKLHTVIRNTSYTVEWGDRSRLEILVGSELKDRYDHTGRLRLEIAGDPNWPNYEKQGRLDLWYDKTDSTFRASQPVTVTDARDTPLADETATLDIGANNLVACTTTTGEQYLYEGRELFQRFREMTREIARLQSKLEEGRYSSERIRRLYQKRTRRRDHAQEALCRDLLERLYAEGVDTVYIGGLTDVLDTHWSVETNAKTHNFWAFRQFTERLACTAEEYGISVEVRSEAWTSQECPLCGGTDRTTRHQDTLTCPCGFEGHADLTASGTFLERQTNETVWSMARPVRFEWDDHEWSESPRSHRPKEQRTDPSTVHRDGNVASGES

SEQ ID NO: 47468 - protein, 275 aa, Natronorubrum sp.
LTPRRFTLCEYDTGPDADLTDVEDVQQVRIIWNGDHWELHFVCKVAIDAADSSGETTAGVDLGICNTAAISVGDETVLYPGNALKEDAHYFRQEEYDTEGENGPSTHAEWARQKKSRRQTHFLHALSKDIVEQCVDRDVGKIAVGHPKNIREDEDWGRHGNKRLHDWAFETILSHIEYKAEERGIEVERIDEYELATSITCCECGMKADSNRVERGLYVCEECELVANSDCNAAENMRKTVTPSPSQDRSNGCLAQPSVRLFDKSTGRVAPQEQV

SEQ ID NO: 47469 - protein, 378 aa, unknown
  TnpB Polypeptide
MTKMILKAYKIRIYPNKQQIAQIGKTLGCCRFVYNYYLAKSIKDYEETGKSNTYNQNSSLLTQMKKLDEYAFLKEVEAMSLQSSLRDLDTAYQNFFRNIKQGKNPGFPKFKKKSANRQSYKSTYSTPAQFHVENNKLFVPKLKWVKFRGNLDIKGVPLSATISKTASGKYFASICCKDVEIEEFDKTGSVVGIDLGIKDFAITSDRDKIKNPKYLSKSAEKLKRLQRQFSKKQKGSKNRNKLRISLAKQFEKVSNQRNDFLHKLSEEFVKNHDIICVENLKVKNMIKNHKLARAISDASWSKFVEFLTYKCEWYGKQIVKVDTFFPSSQTCSYCGFKNPEVKNLEIRKWTCPNCQTTHDRDINAAKNILNEGLRIAFA

SEQ ID NO: 47470 - protein, 399 aa, Actinomadura sp.
VSRYRLCPTPAQEAGLLEHCSHARFVWNLAVEQQAWWTPRRGPAPGYVAQARQLTEARAAFGWLAAGSQTVQQQALRDFAQAMANFFAGTHRRPTWRKAGVHEGFRVVGARGPAWEVRRLSRRTGGVRVPKVGWVRFRWSRPVPSDVKSFRVTRDRAGRWHVAFAAVPASIPAPGNGEAVGVDRGVAVSAALSTGQTCTVPGLTPGEAERLKRLLRRLARARRGSNRRARLKAAIARLKARETDRRKDWVEKTTTDLARRFDVIAVEDLNVAAMTRSAKGTLEAPGVNVRQKAGLNRGILANGWGRLVTRLEHKAPGRVVKVDPAYTSQTCNACGHRAPENRESQAVFRCTACGHRANADVNAARNIKDTAVGRTVAARGGTPSGGPANREPQPALLPA

SEQ ID NO: 47471 - protein, 462 aa, Moorea sp.
MLSLYRTIPIKATFSDEEKAFWVFQCQQANSLINCAIYYTKQKHYKWLKEQPEAYSTYWRGDELRFGWKTYKCATKYPELDKYLKLSPHYKAMAAQSAQQTLKSVGEAITSYNQLVGQYYKGQVDRPRLLRYRKKGGLAAITFPRQALTYKKGLFYPSISKESKPELITEITLEPPQFIDPDWVKEVTVRPTLGQLWIDWVIDDGNQSVDHNPNLDYSQAWSFDHGGDNWLTGVSTQGKSLIIDGRKLKSMNQGYARLVAKYKAGKPEFYWDSNLDRVQVKRNNQMRDAINKAARFIINRCLQERIGNIVIGWNERQKDSINIGRRGNQNFVVIPTKRLINRLEQLCSEYGVKLTITEESYTSKASFLDDDPLPTHGEKPSGWKPSGKRVRRGMYKTSNGWLINADCNGAANIAKKVATQLGLDLTKVGRGSLTLPHRYDLFSSLSRSYRTRCGAARFQPAA

SEQ ID NO: 47472 - protein, 383 aa, Actinoplanes sp.
VKLVVQVKLLPTPVQASALEATLRACNTAASQVAATARTVGCYRNYDLRKHSYQAVKADCGLGAQAAQHVIKKVCDAYTTLQANLKAGRYGRPGSRRRRRVEAGPVVFRWDAAQPYDARMLSWQHDARTVSIWTTTGRLKNVAFTGSADQLTAVATRPVGECDLLHRDGMWFLYATIEVPEPELIEPAGFLGVDMGIVNIAYDSDGTRHAGAELNGYRRRQARLRQRLQAKNSQSAKRLLHRRRRKEARHAANQNHIIAKTIVTEAARTGRGIAVEQLTGIRDRVRLRKPQRVTLSSWSFHQLGTYVAYKARRAGVPLVQVDPRYTSQTCHRCGHRDKRNRPNQETFTCRSRGVVAHADHNAALNIAHRGAESWGAVSRPHVA

SEQ ID NO: 47473 - protein, 430 aa, unknown
  TnpB Polypeptide
LDSLGFAASKLWNIARWTCDRIWSETGTIPEDGPLKAYLKTHERYADLNSQSSQRVIEELAEAFKGWYAKRRNGDDRANPPKYRKHNGDHPRSTVTFKEDGFKHDSKNNRIRLSKGRNLKEHWSDFILCEIETRPDVVTENVRQVRAVWNGDEWELHIVCKHEIEAESPGDETAGIDLSMKNFAAVSYSTADHELYPGNVLKTNERYFAKEIAKCTSSRSNIALRLRRKRSERRFHYLHAVTKHIVTDCVEQGVGTIAVGNLKGIREEDETGETHNWGDRGNEGLHGWAFDRFSNLLTYKTKAEGIAVTTVGERDTLKTCSCCGQKRDANRVERGLYVCRGCTAVMNADSNDAENIRRRLNQAEKVTPNPRSSEDRSSGRVARPVVNLFRQQKSMISALPPDRRSGDDRGEHDPSSGQGTFAEQASSCKP

SEQ ID NO: 47474 - protein, 412 aa, Planctomycetes sp.
MHKGYSFRLYPTETQKALLEKHFGCARWVYNWALEQKIAYYQKEKKGVSMYEVARELTKLKREEGKEWLQEVSSQSLGYSMMHLDRAFTNFFKHKKGFPKFKSKKKSRASFTHNLSNDLNEEKGLVYATNFREGIRCVFTRPVEGKIKRMTFSRTKTGKYYVGILVETPEEFPTPPPPREELSVGIDLGLKTFATLDDGTKIDTPKFLQGSLQRLRRAQKHLSRCQYGSKNWEKARDKVARLHEHVANSRKDFLHKVSHKLVCDNQATTLCIENLDITEMIEKAPSRRKRSIYDAGWRMFRGMLEYKCEWHGKNLMMIGQFEPSSKICSCCGEMNKDLGKKREWTCKKCETHHDRDINAAKNIKKIAFCKQNTVSAKILPPDRRDVKPVESSVLEFNEAGTEKDRLTPSRGV

SEQ ID NO: 47475 - protein, 391 aa, Rubidibacter sp.
MELLLTLVCKLDPTPEQSAKLDRSLQAFAAACNYVHAAVDPRVVNKVRIQAQVYHTIRACFGLNANLAVRVCARVAANRKTARDRGHRVKTFRPTSADYDQRIFAFREVDNRVSLSTVEGRERIVLAPMGDYQRDRLRGRNPTSAQLCQHRDGLFYIHIQVKSDAPAPHRSRDVLGVDLGRADIAVTPAGESWSGQEIRAKRDRFNRTRASLQRKGTKGAKGAKRLLKRLSGAEKRYQRWLNHHISKQIVETAKSSGVAVALEDLKGIRDRTNRQRRTKTERRRANSWAFYQLRQFVAYKALGAGVEVVCVNPRYSSQTCHQCLHIHPERSQSYRSGKRYECGHCGWKGNADYNGAQMIRLLGVALVSPPERARLSCSLHVNSSVVRKLPA

SEQ ID NO: 47476 - protein, 348 aa, unknown
  TnpB Polypeptide
MKIICGFRYELYTTDEQRSALSRNAGCRRFVFNKALELQNECKKSGLSLLRYKELCLELVKWKKEEKTVFLKEAMSQPLQQALKDLDRAIADSFRPKSDPARKEWPKFKSKDIGDGFRIPQFKPEHIDDAIGRVKLSKIGWMRYRRSRPLAFKCADGSMKSGTVRQIHIRKDCGHWFVVFTTEFDIEMPDPKALDVGIDLGVVHAVATSDGQFFDLNTGRIKELEKEIARYQRKLALNRSSRLKLTKAGRAETFDKTKPSRKRRRLLEKLQKLHRRVRNIRRDFQMKTAHTLAQEYGCVYVEDLKTRNMTKSAKGTIDNQGKNVKQKSGLNRAILRTGFFGMRQAIEW

SEQ ID NO: 47477 - protein, 381 aa, unknown
  TnpB Polypeptide
MAKRAYKYRFYPTPEQVVLLAQTFGCVRFVYNSVLRWRSDAYRQRQEKVGYAGASARLTQLKRDPELAFLADVSCVPLQQCLRHQQTAFKNFFEGRAQYPAFKRKRGHQSAEFTRSAFSYREGQLYLAKSKTRLDIRWSRELPCAPSTVTVSMDPAGRYFVSCLCEFEPASLPIRTSVIGIDLGLKELFITDQGERVGNPRHTVKYAAKLALAQRRLSRKQLGSANRAKARLKVARLHAKISDCRQDNLHKLSRRLINDNQVICVESLKVKNMIRNPTLSKAIADAGWGELVRQLGYKADWAGRSLVSIDQWFPSSKRCSDCGHTLTTLPLSVRQWRCPACGVDHDRDHNAAVNIKAAGLAVLALGESVSGMESVSVSCSH

SEQ ID NO: 47478 - protein, 267 aa, Lactobacillus sp.
MTLKAIKTRIYPTIEQQERIIANFGYCRFVWNQLLAMQKARYENGGRYVNEFGMNYLIKCLKQEYSFLKVAESTSLLHVSRDLNHAYQKLFKAHQGFPKFKSRKFPKQSYQSNSVNHNIQLVDNHHLKLPKLGDLKFKSGRKPVGKIKNVTIRFSATGKFYAVILVDTDIKFLAKTSNSVGIDLGVADLMITSDGVKYPTIRFDKRLGKKKHYWEKRLARRRLQAQQEIAWDKHNKVIEPRELADFKNYQKAKRMVAKYAEKNSQPT

SEQ ID NO: 47479 - protein, 329 aa, Bacillus sp.
  misc_feature (289)..(292): Xaa can be any naturally occurring amino acid
MGVKRMIINKAYKFRIYPNKAQATLINKTIGCSRFVFNHFLSLWDNAYKETGKGLTYGTCSAKLPAMKKEFVWLKEVDSIAIQSSVRNLADAYTRFFKKQSSAPRFKSKKNNVQSYTTKQTNENIAVVGNKMKLPKLGLVRFAKSREVKGRILNATVRRNSSGRYFVSLLVETEVQELPKINSYIGMDVGLKDFVILSDGTTYKNPKFFRSLEEKLVKAQRVLSRRMKESSRWNKQRVKVARIHEYMANARKDYLDKISTKIIKNHDVIGIEDLQVSNMLKNHKLAKAXXXXKWDCPSCHTHHDRDINASINLKNEAIRLLTARTAEIA

SEQ ID NO: 47480 - protein, 489 aa, unknown
  TnpB Polypeptide
MHDMANSSRKKARKLQDAKKAKAAEKEKTAKKVKPAKEKPIKYTATAKQQTDGTFEFCGGKGGFNITKQKNKALEPYGKCIHNYGVLLELIPGDKQAAINQQIGNARVVHNDYLSKREEYYKETKKALTVSQYKKEYLPALKKEKEYLNDTDKFVYENACRNVDDAYNRFFKGLSGFPKYASKTKPNGNNFTTNFTNNNIELKMIDGIPYAKLPKIGNVRFILPKGKILTDIQPHGVTIKAATVSMEPDGSYRIALRMESVIDKPVFPTVINAREIISVDLGLKEFGVFGNLEESIPVPNPRWIKIHAKRLRRFQQSLSRKQYDHKTHTGSKNWEKARAKVAKEQRKIADQRRDFHHKLSRIITDNCVAFICEDLAVKNMMKNRRLSKSIASVGWYQFLTMVQYKMERAGKYFRKISRWYPSSQTCGCCGYKNTDVKDLSVRKWICPKCGTWHDRDINAQQNIYKIGAKMLQDEGIQITGLPVTNKSAN

SEQ ID NO: 47481 - protein, 409 aa, Planktothrix sp.
MFQAYKYRIIPTPEQQISLAKSFGCCRWYWNYALNLCQETYKTTGKGLSKGALQGLLPQLKKEYPWLTDAYSQCLQVVALNLSTAYKNFFDKRARLPRFKSKHGRQSISYPQNVKFEGDYLKLPGKIGLIYCRRHRPYEGTIKTVTVSQNSDGKYYASVLVDDGKEQPTISTNGKAIGIDLGLTHLAITSEGSKYSNPKYFTKHEHNLKRKQQKLSRKQKGSNNRQKARLKIAKVHAKISRCREDFLHKLSRKIVNENVETCHGTSVLAVEDLGVKNLVRNHKLAKAISDCGWAMFCTMLKYKAEKEGKTYIEVNRFFPSSKTCNVCLNQVGSLPLDIRVWTCEHCQTTHDRDINASINIKNEALRILSLGTSDTANLRGCKSSDKTSVLSDAIPVEVGSSHLLVEKCG

SEQ ID NO: 47482 - protein, 457 aa, unknown
  TnpB Polypeptide
MAFSVTQRVISSEDMIYSYCDDFCRKAKLLYNAALFRIRNIFTGYEKEHRTDNEEDVFCEVHSLQDVYPQIHVRKVISYNHLEKLMRVTENPDFFIGLPMQTAQAMVKQAVTDFKNWLASLREYKKHPEKFLGRPKMPHYKKQNLATVIITNQDAVLYPSETGVSLKLPIIKKRLSFSNISEHAFLKEVRIKPYHGRFLFCLTFEEPEQVIETSMPYTCAIDFGIDNFAAIVCDDGSSAIYKGGAVLSDTQWFHKQKAKYVSILTKGHKNQYATSARLKDLSFHHANFTKDQCHKISRSIIDFCVEHQAGTLIFGVNPLWKQNSRIGKINNQKFVSMPIAFLRTMITYKALNAGIKIIEQEESYTSKADITTKDYIPTYGVDDKDVQFSGLRIKRGLYRCADGTILNADCHAAANIMRKAVPDIWDRTTDFSFLASPKVYGFHDLNPKSIPVKGIAA

SEQ ID NO: 47483 - protein, 568 aa, Desulfofundulus sp.
MKKREKNKKKLTESDDGIKYTVCGEWFPLFWDYHPDLYGKEDETPLDTEMRLFCACTRWAFNRLLEGRSRKELKREGQGLFSINSRFCDDAVLKAKAVIESQKELLALEIEETETKLARARKKLGRAEKDLDKAVKANDPVKIEKAKRAVRGRKVRVKKLSDKLDELKTHQSNGTISAVVFGGRSLWKRVCKGRATKEEWRQARQNRLFARGDETKGGNPNIKICYRNGDFSLSVTISHLSEQKGTDKKGRPVMARAPRVEGKLWLPEKHRLKVWELLLSGAPYTVELIRGRDGRYRAHITFVVTAPVLVTNPNRGYLGMDTNSDGVALANVNYFGQPESWHEGFNVLYPKALHKFDGEFQVTVHPNGFLYIKVPELAYSRGYRRTYLIGVLAKVVVDIAKALGKPIALEDLDFGKDRLDTDRRFNRMAANFPFKKIVEAVVRRAFREGVGIKLVWPAHTSAIGYYKYMERYGVIIHHAAALTIARRAIGFKERITGELKQKIQAVKEKLNRKVDSLPGEGKGMTRKVRRLFKWLDKKILVHNGLTRYKQESFYSVWHDLKELVLLSR

SEQ ID NO: 47484 - protein, 567 aa, Desulfofundulus sp.
MRKPKIKKTVNPENGIKYTVCGEFFPEVYPAFRFQKWGRGDEGPLATEMRLFCSCERWAFNRLQEGRSREELKKEGQKLFGINSRFCDDAILKAKAIIESQRELLALEIEETGTKLARAMKKLNRAEKDLDKTVEANDPVKIEKAERTVHGRKARVKKLSDKLDELKTHQNNGTIPTVIFGGRSLWKRVCKGRVTKEEWRNARQNRLYARGDETKGGNPNIKISYRNGEFALSVTVSHLSEQTGTDSRGRPVMTKAPRVTGKLWLPEKHRLKVWELLLSGTPYNIELIRSRDGRYRVHITFTIAAPEPVTNPNRGYLGMDTNPDGVALANVNYFGQPEPWPEGFAVPYPKALHKFAGEFQMTVHPNGFLYIKVPELAYSRGYRRTYLIGVLAKVVVDIAKALGKPIALEELDLGKDRLDTDRKFNRMAANFPFKKIIEAVTRRAFKEGIVVKPVRPAHTSTIGYYKYMERYGVIIHHAAALTIARRAIGFKERITGELKQKIQAVKEKLNRKVNALPGEGKGMTRKVKRLFNRLDEKIPVYNGLDRFKQESFYSVWHDLKQLALLSR

SEQ ID NO: 47485 - protein, 377 aa, Lachnospiraceae sp.
MNKAYVYRLYPTADQKILFAKTFGCCRKIWNLMLGDRIDAYNDYEITLLPTPAWYKSDDRYSYLKEVDSLALANVQLDQQRSFTAFYNGTSGYPKFKSKRRSKLSYTTNNQNGTISVADKSVRLPKAGMVKAKIHRKAPSYMKLKSATVSCDKCGRYYISVLYEYDKTDTADKASDPEKLLGLDYKSDGLYVDSEGRCADMPHFYRKAQKKLKHLQRELSRKTGSKKGETPSHNFEKQLARVRKQHRHVADQRRDYLQKRSTALADEYDLIGTEDLSLKGMSSSKGLGLGKATNDNGFGMFVQMLAYKMADRNKHLVKVGRTFPSSQLCQCGYKNPITKDLSVRTVVCPICGRIYDRDVNAAINIRNEAYRIFRCGE

SEQ ID NO: 47486 - protein, 352 aa, unknown
  TnpB Polypeptide
MTGDERAASRSRPALGRPDDKSMAETGARPSDNKVRYVGWQCRLYPNGLQARSLARCREGLRELSNALLGASQLKYSRTGRHMTGKEFRASAQDWYYRRTDRSHFPSTAIYQAAADMHAAFRNWHRKVGSAQGLPRFKPEGRAPAAYLAGAGIRFDANRVRLPKFGWMRWRGGSLPGRRLPGPKRRATRGLVSGRVWRDAGERWMLSCVFECGPLEPIAPVAAMGEVRWDGNSIVTKLDGTPLETNLARPDERLHAERRRLRRLQRRMNRCEDGSKRKARLLERFRTVARRIRNRERDRHHKLTTTVVRGAEGIVAEGVRGEVLRQLRYKAAWHGRRLQVRRGPPEPGRDSA

SEQ ID NO: 47487 - protein, 401 aa, Phenylobacterium sp.
MNRAVVFRLEPTAAQRGVLERYAGAARYVYNCALEQQQTWGRRHPITRFSQDRELTACRREIEWLREPPREILASALADLSAAYEAFFKRRGAYPNFRRKGHDDRFRYTHGEDIRFERLNRNRGRVRLPKVGWLKLRGYRELPGDIRGATVRQRGQHWYVSILLRQERPATLDAACDRSIGIDRGVAVFAATSDGVLHGAPSHFAKIQKRLGNAQRQLARRKRGSANYKKTRARIARLHMRAADARKDYLHKLSTDIAKSHGFVALEDLKIGNMTRSAAGTVEAPGKNVRQKAGLNRSILDKGWGMFATFLRYKLEERGGELIMVEPAYTSQTCAACGVISRESRKSQSVFECVACGHADNADINAARNIIRAGHARRACGSSQTTGRKQEPHQEATDVAA

SEQ ID NO: 47488 - protein, 475 aa, Bifidobacterium sp.
VKAYRTEIKPTPEQCRYLAQAFGNARWAYNEFIGFNQARYRHRKDGYGDYGYCNAYAVAARYSLAKLLHARVEGNVRKATVAQARLLNELLVCACLPAVDLNTLGPDLARLLLDALTEARQLPRYEPWMDLAHSKSVKQAFINADKAYAKLFANRKTGKTTKGRKGKTLAGPRFKKKNRSKDSIYLVEHIRVERHRIKMPGMGWVRLKEYGYIPIGTDTVSSVTVSRVAGRHYVSCTPKRNTVETHEPRHDGKTDGLGIDLGIKNLAAMSDGTLIDNPNRRKEPRRLSRKLKRQQRALARKLERITVRTYHEEGKDKGKVKQVNYKRPLKECRNIAKTRLAIQKTWQRITNIRHDHMDKAIDQLVGQEPRFITIEDLNIQGMMRNRHLSRTLAEQELGRFVTHLKAKCAEHGIELRQADRWYPSSQLCSDCGYRNTAVRNLNIRAWDCPSCGVHHDRDVNAAKNLKAATEYTVIA

SEQ ID NO: 47489 - protein, 442 aa, Streptomyces sp.
MHRRNNMPATPVVVLPIHETNCPRIVGVQLRYNYRAYPDASQRRALTRAFGCARVVWNDCLRDRKEAHAAGLPYVKSAELSRLRITQAKRTEERAWLADVSAVVLQQSLRDLDTAYKNFFDSLKGKRQGRKVGPPRYKSKKDTRQSIRLNTNAFCLQGDGTVYVAKVGNLKVTWSRRLPAAPTSLTVTKDSCGRYFLSCVVDTEPDLLPEVDIDTGIDLGLSAFAVLSDGRKIGSPRFLRRAEKKLKRLQRELSRKAKGSKNRAKARIKVARQHARVADRRRDFHHKASTQIIRDSQAVYVEDLAVSGLGRTRLAKSVHDAGWSAFVGMLEYKAALHGRTFTKVDRAFPSSQVCSACGFRDGPKPLHVRQWTCSACGTVHDRDHNAARNVLFEGRRIVAAGRAETQNASWSAGKTRTKVPAQRGETGSPRKGQPTQTGIPAL

SEQ ID NO: 47490 - protein, 407 aa, Ralstonia sp.
MQRLQAYKYELMPTGEQQRNMRRFSGSCRFVFNKALALQKARYEQGEKKHGYAGLCKLLTEWRNSTETAWLADAPVHPLQQTLKDLERAYGNFFAKRADFPRFKKKGRGDSFRYPDPKQIKLDQASSRLFLPKLGWLRYRNSRKVLGVVKNVTVRQSCGKWFVSIQTEREVEQPVAQAASAVGIDMGVARFATLSDGTFYAPLNSFKRQEAALRKAQQAMSRKKKFSSNWKKAKARVQRIHSRIGNARRDYLHKCSTTISQNHAMVCIEDLQVRNMSRSAAGSTEQPGKQVQAKSGLNKAILDQGWFEFRRQLDYKLAWNGGYLIAVPPQNTSRTCPCCGHVSADNRQTQARFECVECGFEENADVVGAINVLRAGHARLACEVNAAVAASASGTHRSDSGAAQCRV

SEQ ID NO: 47491 - protein, 303 aa, Ralstonia sp.
LPVLGKVKMKEAPRFAGKIMGATVWRDGTRWYLSLQQEVEVCWIERANRRPVTGVDLNVNEIVCSDGKRYETPRALKKAQKRLTRLQRSVSRKLEAQKQRMGLAKTDRIPKGMRLVPTKNREKASQKLADQHRRIRCIRNDFTHKMTTSLTRENQTLGIEDLSVLGMTASAKGTVDRPGRSVCQKAGLNRAILDVAFGEIRRQIEYKSVWYWTTLVAADRFFPSSKRCSCCGEVNHSLTLKARTWQCPGCGTHHDRDFNASVNLEQVAGLPGATGKVTPVRDDFGQQGRSGQEPDEHIWARFG

SEQ ID NO: 47492 - protein, 235 aa, unknown
  TnpB Polypeptide
MGHRLIFEKKPEKYKRTGNVIGADRGIRHAVVSSNFVGRSSTGAKTDNKFFGKGEWREYERRLLLLRSRLQSKGTTSAKGHLKRLSGRLRRFRENCDRIVAKDFFSDIFPGDTVVLENLTNIRERCGKKGQVHKKHRKKMGRWSFKRLENAINYIAQLKGVYVEYIKPHYTSQMCSNCNVIIKSNRKSQSFYSCSCGLKLNADLNASRNIANIWRMANGYMSGLTVNQPIVTNCL

SEQ ID NO: 47493 - protein, 427 aa, Halobacterium sp.
MAAETTATKTLEATLAPPTAHKEQRLQRTVATYRRALDDAFESGADTQTAVNDVVTGYNLTSYAKDALKNYVPQLRRTYNASELEDDHPVRFTNRGFRIDHSEEREHEFCWRVPQAGRGNAFWIPLRINPAQRELWEDLFTDDATVGEFRLQEHRKNWVLHVTVEYDVAEPEEPDDPTPIGFDIGESKLLTGCACRDDTPTQPMMFDGGRARHLRKEMFTTLRRLQERDADWRINERFDHYQNALTDIVEKASRQAVEYARSFESPVIVLEDLSEIREHLDYGKWMNRRLHNWAFARLTGRIEDKALDAGIPVRFVNPSYTSQTCHACGNLGRRSAQAEFRCTNSECWVTEYQADINAAANIAGRLNPWGESVRWKPERDDTPQDGSTCDSALGHREMSRNSRQTTLSEYGSGTPDDEASLVGSPAL

SEQ ID NO: 47494 - protein, 378 aa, Halobacterium sp.
MEVRRTVPVTLDVESDDDALLCDTVNEFLFAAQFVVDYALQGEYVTTSKGQLQDETYNDVCEQTPLNTGLVQNARNKADKACKSVVERWKQGKKASKPRMTSPHVVYDHRTAIFYDDYVSLATTDGRVEADYVLPDEDSDTPHADYLFSDEYETTGAELHRKHGEWQLHIYCKKEAESDTPDQATTTHGTVLGVDLGVNTLAVTSTGTFWTGDEFDHWRREYEKQRGDLQACGTRWAHENVQAVGRKEEGRFKLTLHRIANELVAEARDHDCSVIAFEDLTDIRERTSASWEHKWAFNRHHEYVEYNAAEYGIAVAQVDPKNTSRRCSTCGFTHPDNRESESFECQQCGYENNTEYNAAKNIGARYLRRNLGATKAHP

SEQ ID NO: 47495 - protein, 193 aa, Symploca sp.
MQPFSICKHTSAQRYKLSGCVRVIWNDALAFCINRYQDGEQKPKNAELQKQFITQAKRTTQREWLSQVSSVPLQQALNDLEQAYQNFFKSYKGQRKGKPVKPPRFKKRHAKQSARFTQRGFTLRGDCLKIAKIGKLKIAWSRPLPCVPSSVTLIKDAAGRYFVSFVVEIASEVLPKNENSVGIDLGIAVRIVG

SEQ ID NO: 47496 - protein, 360 aa, Symploca sp.
MHKDLYKAALYNRKTQYQRFNHSVGYLEQQNCLPAFKQVHPEYKELGSHALQATLKRVDFAFNRFFKGLAKYPKFKSGKLYRGWTYPCSSGWKTHTTGDHGFLELSNLGEIRMRGRARTWGRPTTCTILWKNHKWYASITVNCDPVRETSTGAIGLDFGCQTAVAMSNGTKVENPRFLAKTSEKVKKASLRLRRKQTPNRKKKIKASKRWKQAKKLVSKLNNKVANQRDDWQHKVAAQIVSGNSLVATEELNLKGMTRKAKKGSKRQRQKAGLNRSLLDVGIGAFKQKVKYKVEEAGGVYIEVKTTKVKPTQRCPKCWKTEPKDLSQRVHECKHCGFTTDRECDSFWRNPEMGGFQAYVR

SEQ ID NO: 47497 - protein, 423 aa, Ignisphaera sp.
MYSIPISDARVRELVTWYLNTLQRAIDIIWESIEWRYVFPKIEKRKGKLRVVAPYKVKVPELPKSRSFKKKLRDELLKNCPYAKHWVDAVIRTAYSIVESWRKRYVKGKARKAKPKVKRRFARCKITLMRVDYERKAIRITLKPGEYLEVSWAGRWFTKRVDGWRVGEVVLKDDRILIPFKTTKIIEVKNVVAWDSNELSLDGFSQSLGFVKVDLRPLQSMKIVYEKKKAIAQSRGKREVYEKYVKRERNRERDFVNRLAKGLAVLFSNSVHVFEDLDKEDLISREKAPKSRRKRNARTPWKLIQRKLSEKALVVKVSPRNTSRTCPRCGFVVKTQVGRVFKCPECGFKLDRQKLASINIYLRYAKMRGLPHSNDPDTWMKGELWVGVTLSGGSPVIWAPMKRSPEGSEPKGRGIHIKPHKHL

SEQ ID NO: 47498 - protein, 266 aa, unknown
  TnpB Polypeptide
MKTYTFEGKTKEAAVELALEELKIRGYRNITKINGKITNVTISKDKNSKYYVSILYELPEPSKRKPNTIVGIDLGIKKLITMSDNTSYDNNKYINKYEEQIKREHYKLSKKNKGSQNYYKNLKRLNKLYSKLSNARKYYIHKITKEITDNYDIIITESLNIKKMIMDKNINLSKKINDATFREILKQLEYKSKEKGKYFFKINTYYPSSQTCSVCDNIDKKYKNLNERDYVCQCCKNTLDRDLNASINIMFEGLKLYMKKVYSKYQ

SEQ ID NO: 47499 - protein, 496 aa, unknown
  TnpB Polypeptide
VPYKTIQLKLLRPGAGKRKALDNAIERYTDAFEAILRAFHERYGDLSGADQPQKPDKELMALADGFHAKPFKDALCLDAAAVLKTYRCTLKASGHTSYPVCRTGDRDIEENILKAENPERHLINRTIDKYGSVRPLLFCRFDARRDYSLLRDGKTGRLYAKLYLTELKDAFPPASGERCALRYLMPGGKGDILEEGKRRRRYLLFPIEPGQWGEEQLLKIERGLASPKSASLFRKNGDYYLNVRLWFEPPETLPCENYLGVARGIKNDLYCAVTDAKGRLIHEKGIGLHSVHGINRLHRLSNEVLKLALRYRCKIVMGDLLRFGDRLGREGAFPPLSPMEYGRIFSLLQYKAEFAGLEKPAAVSALSVFRRCPVCGSVRDANRLESDKFLCVECGYFRPLELVGAVNLAGTLERYGKNKLSVVCREEDGNITFYCRLLGLEYTCRNGEGALGGFFGRVEGYIEDPPRPLDKNRRSILRRLSEAESLSGCFAFELRI

SEQ ID NO: 47500 - protein, 323 aa, Streptomyces sp.
VATTHVKRAFKYRFYPTDAQAAELSRTFGCVRKVYNMALDARTRAWQQGVRVNYNATSAMLTAWKKTEELAPQGARPSTVTVSRDAAGRWFVSMLCEDLNIKPLAATGTAVGIDVGLDHLLTSSTGEKVTNPRHERKDRARLVKAQRELSRKAKGNGANRVKPRQKVARIHARVADRRRDALHKITTRLVRENQTLVIVDLAVRNMVKNRKLARAISDAAWSDFRSMLEYKAAWCGRDLVVVDRFFPSSKLCHACGTLAERLPLNVRTWTCGCGTTHDRDVNAAKNLLAAGLAVSVCRAGVRPQRRTPGGQSVKKQKTPRREP

SEQ ID NO: 47501 - protein, 385 aa, unknown
  TnpB Polypeptide
MIKSFKYQLHPTKPQQKDLENTLSLCCELYNAALQERRDAYKKVKKSITRFEQINSLVLVKNEIPEYKKIHSQVLCNVIDRVDNAYKGFFRRVKKGQKPGFPRFKGKQRYDSFTFPQAYATGVKIQNDGKRVLLHGIGSVKVKLHRDLEGKIKTATIKREGELWYIVFSCEVEPKRLPENENAIGIDLGTNPNFLVTSNGEEVKAPKYYQNAQKKLAKVQQNLSKKKKNSCRYKLIKKQLSKLHRKIANQRKDFHHKLSRRLVNEYGIIVHEDINIQALSQSRLAKGIYDSGWAQFLQMLSYKAEEAGRKVIAVDPKYTSQNCPVCGHKEKKPLWIRNFTCPKCNNTFHRDTAAAMNILAKARTEPSAINKLRSLGLQSEESSPL

SEQ ID NO: 47502 - protein, 395 aa, unknown
  TnpB Polypeptide
MTMQRTIRVELQPTAKQTSVLLDTMKQYTECFNAVATLGFDKGIKNGVELHKRTYYELRAQYPDLPSQLVCASRVVATESVKSALALKKKGNKATCPHAESLPIRYDARSYRVIVKDSTVSLATVSGRQVIKFGMNRHSQKWLDKAVGFDSADLIYKRGRFFLHMVLTIPDVVFVPNGKVVGVDLGLNRPAVTSNRQFLGERRWKEIDKRYFRLKRELQAKGTPSAKRHLKKLSGKVNRFRRDCDHVLSRQLVDSVDTGTAIVVENLTDIRKKTKQRGRKSRRRMHSWSFAQLRTFLEYKAEEAGCKVFAIDPRHTSQRCSRCGHIQRSNRRSQSVFKCRKCGYELNADLNASYNVASKYLAESGIPAPSGLCRQPAYRDGLRLNHKLSPLGDSS

SEQ ID NO: 47503 - protein, 266 aa, Paenibacillus sp.
MKSKYEMKNVHSQVLQNVVERLDKAYQSFFRRVKNGEKAGFPRFKSGSQYNSFTYPQSGFSIKQLLLSKIGDVRIRLHRQPQGTIKTCTIIIKNSKYYACFSCEVESLQLPVSEKQIGIDLGVSQLAVTSDGERIESPKFLRKSEEKLKRKQRAVSKKKHGSNRRCKAVRELAKLHEKVANQRRDYAHNESRKLVNEYGLIAFEESAGRQVVQVNPYHTSGQCSNCGEIVKKSLTVRVHHCPCGYVADRDENAAIDILKLALQNVS

SEQ ID NO: 47504 - protein, 345 aa, unknown
  TnpB Polypeptide
LESRELYNAGLQERRDAYRMCGVSVGTSMQQAQLPAIKEVRPEYAALDAQMLQDVLQRLDRAFRAFFRRVKAGQTPGYPRFKSRDRYNSFTFKQTGWNVTAGCLVIRGLGSLKVRWSRPLLGTVKTVTVKRDADAWYVTFSCVVDVADPVAEPALPAIGIDLGLEHFLSTSDGEHVANPRYFRTGEDILARRQQALARKKRGSARRKKAKLPVTKAHRKVRNQRRDFHHKTAQRLVQGHGLIAVEDLHIANMARNPSLAKSISDAGWGQFIAILTQKAEEAAVVVIAVPPAGTSQCCSGCGRTALKGLSERWHTCEHCGCSLQRDVNAARNILARAGQAPQTSLV

SEQ ID NO: 47505 - protein, 787 aa, unknown
  TnpB Polypeptide
MQATNKRPDVAARKRRNKDSITRTVKCCLAPTTAGRRGPVSLLGSAVLDGGARPKVPFCVYSEIAADIESAVVVMSELRIRANILAELWLRRCVDAGVRPVIDQNNFFVTALRSCLEGCGIRNYRKKASTDPVFACLVDAYEGPFVSLFSDVPGGYADLKMPTGTGEMVPAEALTMATNHATYIERTLMAHVVRYAMLKLERTLPSPQTTGKRRASLAVVVKRAIGSAWSTDGAPKVHERSVETILPRFPRIAEAAAPHTDAIQRVVDDLWDRLSECGPMPLDVRRASKNAGDYAAFRLHILGALETEVDRVRTAVEADAIPKAATDEDVEECELESEELDALLPRKTQRPRRKLAFALLPVLKYRAAYVSVVPSVLRNMLRRYKNVSAEATTILRLTEGDDASLFAWVFNVGRVRAPLGAGKWTVVRVATDGVGCSVTLQRAPATPAEAADVAVQNAKSKRKKLAAERSKAAVEEARATFAAGGFRRIVGVDDGKKAVVTVAEHSDTDVVERPGAARHAMTTVSGREYRFEMGFDRRMGLTKSWTATAPAVAAFNAAALSPRTADTTRYEAAAKVLVDALPALADFYVTRRRFRRLRFGTYARGQRGLQRMADKVLSPASGVGSRGQPTALKQQGEEKDVLVGWENASFNGVKGCAAAGPGRLKKVVAARATLVDVDAYRNSKVCSHCHAEMKGLPLHDLRDAFQNVVRADGSRLVLNTVSDKIPLLSRTGQRVRSYTVRLCTSETCHRMLFNRDTNAAINVRAKLLMMLHGVPFPDVWTRGTAVV

SEQ ID NO: 47506 - protein, 434 aa, Streptomyces sp.
VIRAYKFLLRPTTGQEASLRAMLADHCSLYNGAIQERRDAWRHASKTSIKYGDQSAQLKEIRAFDPERRGRWSFSSQQATLRRLDKAFQAFFQRIKAGQAPGYPRFKGVGHFDTVTFPKDGDGCRWDSTGHDTQTRVRLQGVGHVRVHQHRLVRGRVKTISIKREGRRWYAVLACDEVPAEPLPATGSIVGIDLGVRHFLTTSKGVHVENPRFLQTRGEELAAAQQHLATFPQRTRRRAKKHRAAARKVAKLHAKIRRQRLDHHHKQALALVREHDVIGHEKLNTAGMTKTPAPKPDPERPGSFLPNGAAAKAGLNRSILDAGWGLFLGILAQKAESAARRVIPVNARNTSRECPTCGHTAKENRTTQAKFECVQCGHVANADHVGALNVLKRAGLVLCAEAWPPTQEARRFSGGWSHGQRSISSPPSRGTAQT

SEQ ID NO: 47507 - protein, 348 aa, unknown
  TnpB Polypeptide
MYIKKQPGNEFLNDVISYAIHGRAGMFLEAKTRLFDKTKTYKMGSMKYKKKGIAKDSFYVPGTKIKVDLDNNLLKIPKMSAVKMKVDRKFAGIFKSVTISMNKTGQYFASILVEEEISPLVKTGRSIGVDLGLNHLLVTSDGHQIENKKLFRKNQAKLAKQQRHLSRKHKGSVRFEKQRKKVAVIQRKVADSRSWYLHNLSKWLVTEYDVICTEDLDIEAMRKRFGKSISDAGWGILIGFLNYKCAWYGKTHVKIDRFEPSTKKCSACGVLRESIPLTIRTWTCDACKKEHDRDFNAAINILHSGLNKLFGVKSEELPDHMRGEVVRPEVAIPNILASSVKRISASAE

SEQ ID NO: 47508 - protein, 392 aa, unknown
  TnpB Polypeptide
MKVVNKSYEFRICPNKEQEILLSKHFGCSRFIYNHFLNERKEQYQKDKKSDNYYVQAKSLTELKKDEDYKWLKEVNSQTIQFALRCLDTSYVNFFRGNAQFPNFKSRKNKNTFTIPQFGRLEENKIIIPKFKGGIKVKLDRRKIKGKIGKMSITKTPTGKYYVSIFTEQEIEQLPKTGKKVGIDLGIKDFVITSDNKKYKNNKYTKKYARELKKVQQHLSRKQKGSNGFKKQRLKVAKIHEKIASCRLDTLHKVSRELVESYDLISVEDLNVKGMIKNHKLSKHIADVSWGNFVTLLQYKCNWYGKELVKIGRFFPSSKTCNSCGWINQGLKLSHREWTCSPCGETHDRDINASKNILKEGLKIFGQGLSNTKVESKSDFCEEAHSVKPETH

SEQ ID NO: 47509 - protein, 431 aa, unknown
  TnpB Polypeptide
VPKKVSAGTGEAQCRHKVDKFRLYPTKAQETALNSTLEVLRGVYNSLLHEREFLYQTTGKGIGQFAQEKHFTHWKKDHLELTEVHAHLLQSVALRVNLAYCAFFRHVRENAKKPPHEREPVGYPRPKGRGQYASFTFKQFGSGVQFKRGSLYVSKIGEIKGKFHREMVGTPKTATVKRDGAKWYVSITCEMPPEPLPKSEEAIGIDVGLEKFAALSNGEFIENPRFVRQDEKMLAKAQRKFEKVKNKHRTKARRKAKKVVARIHERIRNRRHDFTHQTARRLVNRFGVIAVESLSVDNMMASPASKPDPENEGQFLPNGASQKAGLNKSIADVSWSMFRSVLTAKAESACREVYAVDPRYTSQDCHACGYRPDGKECRTKKTLKDRWHLCPMCGESVDRDTNAAINILNRATHLCGTTQSQGVAPVEASAL

SEQ ID NO: 47510 - protein, 402 aa, unknown
  TnpB Polypeptide
MKKTIIVKLNVNFEQEKHLHNLCSIATKLYNTDNWIRREQWEKTGKIPSVYTQKKLLKENHWFKLLPSQTAQEIIFNLQRNYNSWFKLRKKDATANPPMFRKKEMLSVISFYQQFRIIGDKIRISMSRKYQFEHKIKLMEIPFKSWKIQEGFPKFCQIIFNKGKWYAHVVYEIAEQIPLLNDKVIAVDLGVINTAVTIDSDGNSKIYSGKQILAIQYYFNKEKAKLTSALIKQYPHRYLSRVLRIFQNKQIRQINQALHTHSKAIVTDCLNRGIKTLVVGDITDIRKDKNFGHKNNQKLHSWSFSKFTQMLEYKSIQAGIRFVRVNEYNTSRKCSICGVIRRSNRIYRGQYRCKRCGNLINADINGAVNILKKYLQDFLSRSIGNVALPSVERITNIVPFKV

SEQ ID NO: 47511 - protein, 295 aa, Bacillus sp.
INKTIGCSQFVFNHFLSLWDQAFKETEKGLTYGTCSAKLPAMKKELVWLKEVDSIAIQLSVRNLADAYTRFKSKKNNVQSYTTKQTNENIAVVENKIKLPKLGLVRFAKSREAEGRIVNATVRRNPAGRYFVSLLVETEVQELPKTHSYIGIDIGLKDFAILSDGTHYENMKFFRSLEEKLEKAQRVLSRRMKGSSRWNKQRVKVARIHEYISNTRKDYLDKISTKIIKNHDVIGIEDLPVSNMLKNHKLAKVISEVSWSQFRSMLEYKAKWYGTHLLPANYVLIVGIKIKTLKI

SEQ ID NO: 47512 - protein, 418 aa, unknown
  TnpB Polypeptide
MGRCLKYGAVFHIKVSMLYRGFTFRLYPTPDQEDVFSRFAGVCRLVWNLALEQRRDHWRRYQATTGNNLNYVTQARELTLLRAEVDFVRAVHVTPLQRALKALDEAYRRAWQGLGGYPVPKKKGVHDAFSFAGREIVLENINHRWGRIRLPKIGWVRFRLTRPLAGTIREATVSRTVLGWQVSIGCLIDAETPDPGGAVGIDRGVTVPLMLSDGTSYSLPASVADLDRRVRKAQRVASRRKRGSVRHAKAQRRVAALKARQARIRKHWAHEATTTITRRYGTVAVERLRTMNMTASASGTIAEPGRNVAQKRGLNRAILNVGWHQIEAMLLYKAHRLVKVNPAFSSQTCASCGTVDSRSRKSQAAFVCTACGHRDNADRNAAVVILHRGNTPGVEPCLVAGDEARTIQAPIGLGSLRP

SEQ ID NO: 47513 - protein, 405 aa, unknown
  TnpB Polypeptide
VVPQTERQEIVLQRLLDSSASLWNQLTYARRQQLFAGKSVWNCDDYYEDYVDVLGSATTQQISRVNDAAWRSFFETLEQSDQEVNPPGYWGNQADGRDLRTYIRNDSYTINWCGRSRLEIPIGSQLKDEYGFGRYERLRVVVRGDPHWQGKQGRLHITYDDVDETYRAHQPVTVHEDELDTTTGTAVAALDIGANVLVACTTTTGDQCYYSGEEPFRQFRETTGRIADAQAKLPADQRTSTRIKRLYRKRARRRDHAVNALLRDLVERLCNADVGTIYHGDLNGVLGEYWSVEANLKARSFWAHRQCLDQLGNVCEEYGINLESVSEAWTSQTCPACGERERTHRHQETLTCPCGFDGHADLAASCNLLERTTNTSIRPTARPVRFQWDNHQWYPVEDATVDSNE

SEQ ID NO: 47514 - protein, 355 aa, Desulfobacteraceae sp.
MKITRSSKTSLKFITEKKRDILNEIMDEYSRVANIFIEMFFGNSFQRKDLKKDIISIPPSWFSARMRQCCAREALGMVQGAVRSAAGKGIEPVTPKHTGRKMILSSQCVRIEKGRNSFDIWLVIHSVGNKIKLQIPLKSHRHINLFQDWKLSDSVMFHRKYVMFTFEKETGKKKTSGKLIGIDCGINHLLATSEGSLYGSEVKPLINVIKRKRQGLKAYKRAKKTLSYYIHKVLKELNFGELQLAAVESLKNLKQGKKKNRLKAFRKTLSNWNYRELLRIIEMRCEENRVSFRSVNPCKTSQMCPSCAHTERGNRVNENFKCLNCGHSGQADIVGALNILTRLVTGRYGAGFKTD

SEQ ID NO: 47515 - protein, 472 aa, unknown
  TnpB Polypeptide
VKRTNVVKLVVDKNIHEKLKELAIVTAKCWNEVNWLRMQQFKKGGRVDFTKTEKEVYEKYKHMLKVNAQQVARKNAEDWRSFFSLIEEKKEGKLPKWFKPRPPGYWKDKSGKYKLMIVVRNDRYEVDEGKRIIYLKDFKLALRFKGKLKWHGKQGRLEIIYDGRSWYAHIPVEVENVIKGKGNLRASVDLGIVNLATVYVEDGTWYIFKGGGVLSRYEYYGKRVSEVQKVLVRHGQRRGRKLKLLYDKRRRFLKHALNSMVKKMMEELREKGVSEVVIGYPKEINRNHGNKLTVNFWNYGCIIKRFEEIGEELGIKITKVDESYTSKTCSLCGEAHEGGRVKRGLFKCPRMGKVINADLNGAINIPHIPKSLGSGSGGQLPVRDRGNGLKTQPVVYRWTNGAGWVIPTSYEVMRMKAVNRKPMIRPKGTLALQGGEEVSRLSVSRDSKPKTGVHGEISGLVRERVESVVMSP

SEQ ID NO: 47516 - protein, 516 aa, Ectothiorhodospiraceae sp.
MTAAAIHRTDLLPTAMNPGKAAAVRELLRAWRRAARAVAADQWTRLFRDGSFAKNLSAAQEAAAPGVAAAKAEIGAQRLQMVRYQVVGTLSSFIANRQNEFAEIIARHEGFDERTRHMLRVVNKAGAWFDLRRDVVMPDTRESVPETVRDLARRIMRHVLGRHRRPSFQRVNMVIDRRQATLAEARHASAFPLWLRLGTLERSRRVEIPLQPHPYFERREGRRCQTVQVNEDRDGRIRVGVVTDVSAPFAERRAVYTPLRDDLAIDFGLSTLIATDAGDRMGRGALEHLERLDRRLTRIARHRQKAGLKVLSSRHDRAVRQLRGWLRTEINRILNRRVYLHRPAHLTVERLDFRMPGLSRRMNRILTNCGRAVLRAKLRDLEERYGVTHTEVNAAYSSQTCSHCGWTERANRRSRSEFRCRCCGRRMHADVNAARNLGARRSCPVMGNPRRGRRAVLDEALRRFAERQPCHPPEAVRRSPGRGSRGDPGDPGARDDPGITLRSAQPQHLGAESATQ

SEQ ID NO: 47517 - protein, 403 aa, unknown
  TnpB Polypeptide
VVFSTRTEQIWIQHHKNLSWLCHLSKNLYNEGNYQIRQELFEHNKWIRYNALNNKIKTTNNYRQLPAQTAQQVLKILDRSWKAFFNVVKAWKNDKSKFKGRPKPPRYKLKNGEFLLVFTNQQVKLKDNFLIFPKKVGFTLKTRLPDKTNIREVRIIPKGVGYVVEIVYKKKINPKPLKKYNIIAIDLGVRNLITTVNNNGLKPFVINGGVVKSINQYYNKECARIQSTYDHQGIKTGKAMQKLTNKRNMKINDYFHKTSRRIIGYCVLNDIGTVVIGYNPNWKQNCQIGKRNTQNFLTIPYKKLIQQLVYKAEDQGLTVIKQEESDSSKCSFLDDEPIEPHDKYFDRRITRGLFKSHKGTIINADVNGAYNILKKALLNAVDADRIEDVGLHPTRWRLASVTS

SEQ ID NO: 47518 - protein, 287 aa, Streptomyces sp.
  misc_feature (237)..(264): Xaa can be any naturally occurring amino acid
VKRAYRYRFCPTDAQAAELSRTFGCVRKVYNMALAARTEAWVTRQERVNYNATSAMLTAWKKTEELAYLNEVSSVPLQQALRHLQTAFTHFFGRRAKHPRFKSRKKSRRSAEYTTSAFRFRDGALTLAKMAEPLAVVWSRPLPEGVSPSTVTVSQDAAGRWFVSLLCDDPGVKSLPARGNAVGIDAGLEHLLALSTGEKITNPRHERRDRAALAREQRRLAKKEKGSANRARARLKXXXXXXXXXXXXXXXXXXXXXXXXXXXXEDPRADRRPAPRQPAQDHHSARS

SEQ ID NO: 47519 - protein, 409 aa, unknown
  TnpB Polypeptide
MKLTEQHVINKSDPRFAVIDAAAFASKNLYNAALYEMRQAFIHQGVYLSYEEMDKRMQSHEAYKALPAKVSQQVLRQLADAWKAFREAKAAYEEDPSKFLGRPCLPKYKHKTEGRNMLVYTIQAISRGKYGLKRGIIKPSKLPISVKTQQKDIDQVRIVPRKGFYVVEVVYGKEPVQANVNPILYAGIDLGITNLATVASNAPGFQPVIVNGRPVKSINQFYNKRRAELQKKLGHTGSTKRMERMTNKRNRRIDHYLHAASKKIIDLLVQAEIGILVVGKNDGWKQEVEMGKRNNQQFVQIPHARFIQMLTYKAELVGIAVLVTEESYTSKASFLDRDPLPVRKPNDEEKHTFSGKRIKRGLYRASDGRLINADMNGASNILRKVAPNAFGSEGVEESVVPPVRITLTK

SEQ ID NO: 47520 - protein, 689 aa, Streptomyces sp.
MRRKIAVGAGEAERVACAPAAAFRGLDTVSGQVLGAAVLAERVGWLTALVETMAVAVTAEHWSRAGLDRLASGQALSGEKLPSHAWMALRTLGWAAAAPEGVYVPDRVRRIAEEQAGRVLRSVHWRSELVDAVLATWPAGGDPLQRTPQEWDALRAACPDGAAVPASVLRARTRQIQRFHARHGRLPDGLCELEEAPGGGRQVVLAAADKQLLTLARCEDDPARYAVLTVRLPVRPNPRTRADWHPVRIRFRLPPPVPLSAALHAPTLRLRGGRLRLDLAHTTAAPKTKRDGHRRAVAFDYGLNTLLTGGTLTLTGDIQPTVRTDGRPVFLGVDGALAKADRLRIHAEHLWAKAEHLQQLLDGRRARGRRPDPLAVAKLTMLRTEHARVSRRRERLNKAIARAAAHFMVTHARAADASVIYLEDLRDMEARGKGRTLNTRLSSSVRGQIVTDVRHAAARHGIAVVIVPARGTSKYCPRCLTTFRHHAAPDTPKPGWKWATCPNAACGYSADRDVAAWQRIGARGLTHQHTTVLDRNSGTYVIRRTVQELDQPVRHTHPDPTGPAGPQASAVDRTKAGPTRNRPVPRQRRRVPAPPVTPAARTAAGSGGKRPAGRMPQPPRRRPQRRGRRQAPHTMSTPTRHQPRGARLGAGFHLHTHATPVPRRIRPGAQPSSLFQWGGAGNPAPPRKT

SEQ ID NO: 47521 - protein, 391 aa, Sutterella sp.
MRTYKYKLLSAKRNKKLHRQINAGALAWNHCVAFTRRFYRFYGKSVSENVLKKHLTKLKKRQPYGYLCEMGSQALQDVVERLYRSYKRFFDAKKNGEKCGLPGFKKVRKYKSFTLKQTGYKLLDGNELVICGQKYKYFKSREIEGKIKTLTVKRDSANDLWLCFAVEDEAANHVLPRLGNAVGLDFGLKTYLTGSDETTIESPEFFKQNLKAVKRLHRILSRKQKGSANYRRAQRDLARLYRRIANQRLAWQWKTAWKLVGDFAFIGLETLNIKAMQRLWGRKVSDYGFSEFSSILSYVASKVGTQVVHVDQWFASSQLCSVCGFKFEGTKDLKVRQWTCPHCGAVHDRDVNAARNILAEALRIADRVVTGGTIVRQGEPESDRRKSASGV

SEQ ID NO: 47522 - protein, 398 aa, unknown
  TnpB Polypeptide
MKNDPMKGAKVITSKKIRFYPENEAAYFDALALYRRSYNLAVERFRNDNYKDENGKFINMRPEIKMQVEQEQKKSGRAYNSLVSDNGTLAATTTFNAVCRKNKKLKGAKSGFSKISFKSRKSSKHSFSIDRLPKGLNPCIQALGHIHLTKSVPSEAIGKRCIITCDKGRWFIQVQQHIELNTEIQGEVRCVGVDQGIRTFATCFSDNDALIVGDNFAKERLFPLMKRVDRLIWQKQKVLNTQEGVKFIDMPQWARDRIVHFDRNINRLKCKKDDLILDLHNRLSHELISKYDVIFLATSKMRGMVTRKDNKIRSIRRDTCRQMLDLNHYGFKLRLNWYAKKLGKKVVECNEAYTSKTRSWDGSIDEKLGTSKIIKGNGFIVERDINGARNILLKHLTR

SEQ ID NO: 47523 - protein, 419 aa, Okeania sp.
MAILEYICSEANKLTNCGIYYCRQMLFKAGRFLTRGEIDQELKSNIHFKAMRSASAQQTLHSVIESFDSYKKLWKLYKEEKLHFRPKPPSYRKKGGMAVVSYPGRWVKLKDGFLKFTLGNQVKAWFGIEHFLLPMPSNLDFSSIKEYRILPKNGCFYIEFVYKQPEIEPVEVNGNVLGIDPGLNNWITGVSNTGKSFIIDGKKVKSQNQSYNKQVAQIKMGKPQDYWDEELAELTEKRNRQMRDNVNKAARFIINWCLANDISNIVFGWNKFNKDGINIGKKSNQEFVQIPTAKLKDRVSQISEQYGINFIETEESYTSVASFLDDDFLPKYGEKPERWKPSGKRVRRGLYRSCDGSLINADANGSANIIRKVRTQLNFDLTKVCRAVLTLPKRYFLDSLSRQYRKRLERDFNPLQASA

SEQ ID NO: 47524 - protein, 369 aa, unknown
  TnpB Polypeptide
LYSEKDVVEVTKSDDSSNDKDQKTSKKASNKWRQEFFEKRHQSMALPGRHTSKYGNFLCKYDGKDLSVTCIDGSVTIFHDFKLPRNEESFQKNFTCKPEDRQSLCYNFILKRDKENKQYLIVSVTMKLKAYENSYYGNGAISMDINYDHFALAELDETGKLLDQKLIRFDLMNKSTGQVTNILGAAVKDIFDWCAEKDKRLIVEDIDLTIKLASRKYGNRKGNHHMTLFAYQRIASGIENQSLKREIAFYKIDPAYTSQMGKFLFMRKYGISIHQAAAYTIGLVGLGLYEKLVPDSRMLNLLKTKEGVVPEFSQETYKNIWARITNTFSGIRKHFFYRSIPYEVLEERKRPSLRTLAAEMKIRYMPVFE

SEQ ID NO: 47525 - protein, 385 aa, unknown
  TnpB Polypeptide
MKMIRCYKVEIRPNKAQKKLIEEHFGVTRKVFNMYLNYCKENGFISAYSFSKILNHSSDRPDYFNKISSKAIKQSIINAEKSFQKSKGKFRFKSKHTSRKSFYLIGTFHVERHRIFLPKLKWVRLKEYGYIKGDVKSVTLSKRAERYFISCLVEKEIHVSNSLGNGIGIDLGLKDLAICSNGLRFGNINKSNRVKKLEKKLKRYQKSLSRMLESNMYSKIYFKSGKKKGQLKSFKFHKPLSQCKNFQKMKVKVNKLFYKLECIRNDYINKMISFLMKRKPNFISIENLNILGMMKNKYLANKISKQKWFYFVTRLKQKCLEYGVELRQVDKFYPSSKLCSSCGFKNVNLKLKDRFWNCPSCGALHDRDVNASVNLFHAKDYSILV

SEQ ID NO: 47526 - protein, 399 aa, unknown
  TnpB Polypeptide
MTRRINAIRATVSMNIAITNTLLVFAKNYLEGLRYVLHWLKERKINPNKSNILSIVHEELYDELKKEFNLPPRVAQDCNRNAISIYKGWYNNPKKGRFPKIFKPTVWLTPKHSYNVNFKKMLVKISKIGEFEILGYPRNYKEYLSWKMKESRLIFRNGKAFLKITFEKLMQKIEPKESIAVDINMKTIVIGKDENNYVNIPTRISEIHHYKSLAENLQRKYPKRWKENRNIKRRIKAFHLKAKNIAEDFARKVGKRVVNEAIKMNTNVIILENLKNLIKHVKNLHKQLRDKLYFMQYRKIQYWIDWQAKKHGLLVKYVYSAYSSIKCPKCNRKMKEIYYRWLKCNCGYENDRDIIAIMNLNGRGSLSLSTAPQMRDVIPNQLRGTLILQGGRKSGKMRV

SEQ ID NO: 47527 - protein, 671 aa, Acidimicrobiaceae sp.
MATLVLSLDTSDARARRRLERLYFTMFNIRRALQRDATARCRSYWARKEDRDTLGWKYVAEDLGLTRNSFEQAARAHFQASGWAADHVSAALVNHMAAAVFENVRRHLWSDASGKRHGALRLTAFHDFATIHGRARSHSVENKWETFRLYGSLEGHLDTYRHGDLGVHPTLAQIAALRSGSSVLNQHTMTTPGVTKWSSYAGPLVMVFAGGPQSNEPELQLPVKLPKGRGQWDRMVHFLSDAATWHKIDLVRRQDTSQPGGWRYEMHLLVLHAGYTSARNQALLDAAPSNRVACVDVNVSNLSVFSVPASHAAPGPTTAQGTDIHSADLRSTTVRATIDERDHLVEAAAKKRRGQRLVDRSRRASNQDQYAHSAAQTRRDERRVARGLRAVTTELPRGPRHTNAKNVPLRSYRRDELSGAYRVARRRQGERDRAASVTKRARAQDIVLQLVATHGATWLIEDCNLTLWARRWGKHLHSFAPGMVTAGLSEIAESRGGSFSKMATGPTALSSHCLCGHRAKKLLSERRHTCLVCGLRGDRDLVSAALGTCVQLSDPRDAGTALVDYTRAAALLGALTASDGTASDGTASDTSSSINHGHQDALTSQTHPLVGGRHSGVHHQGARSVGSSRRAARLNASKTMPSTTYHGTGPGHPGPAKVALDSGLGHPVPTG

SEQ ID NO: 47528 - protein, 412 aa, unknown
  TnpB Polypeptide
MQTAHKIELVPNDKQKIYFKKACGVSRFAWNWGLAEWNRRWKEEGSLSTGMGLKKEFNAIKKEKFPWVYEVTKYAAQQPFIELDKAWKRFFKGVGGKPKFKKKGKCKDSFYIGGDQIKAKGKRVKIPNLGWVKMRENVRFFGKIHSVAVSRTADRWFASFQVDVQASGVPCKNQAGTGIDLGSRKMAVLSGGGIAIAAPKPLKKALKRLKRMNRSLSRKRHPRKKGDTTPISNNFRKQQAKIAKLHARIANIRKEALHQVTTWITDRYKIIGIENLNVKGMLSNRRISREMADVGLYEFRRLLEYKAKRKGCEIVVFDRFFPSSKTCCKCGFLNEKLGSGEIFECPACGSRMDRDLNAAVNLDPTENPIPEVLRELTPVEIAALQRKAGLSVATSIVEAGIERQCLSMDRFA

SEQ ID NO: 47529 - protein, 223 aa, Okeania sp.
MKYQNVHQGQALRDLERAFKNFLTIPGRGFPVFKKKGKKDSFYLEGSIKILKGNYIKLPRIGIVKTYEILPSVPVKNVTISKCAGNWYISFKYDHQSNPTTKERDIIGVDVGINALATCSDGTTYANVKAYKQRKKRLTRYQRLVSKKKPGSKNRVKAIKKLARLHKKVADIRADTLHKVTTWLAKNHSTIVIEDLNVSGMVKKWSRDGEVSLPYPIDQEIIN

SEQ ID NO: 47530 - protein, 415 aa, unknown
  TnpB Polypeptide
MLLSHKTIIKLSDNYSNIIGHMCYAAYKLWNICNYEKLHNKELNLPVSFPDWYYQKAAHKNNLWYKQLPSQTAQEICKQLNSSWNSYFKLLKTGGIKNPKPPRFKHDNIAVTYMQNGIMHNSDVVRLSISKGLKDFMSKEYGINDDYLYLKNPIFKNIDTIKQIKIYPPEGNCCNVIVIYEVPDIIKLADNGKYLSIDLGLKNLMTCLNSETGETFIIGKKYLSLCRYYYKEIARIQSQWYHQQIKMDIKYPKSSKHIKKMYIKKNNVIKDYLYKITRHIVNYCKANGINTVVVGDITGIRKDNVKDDKYNQKMHFLSYDKIYQMLEYKLALEGINFIKQNEAYSSQTSPLADKVCKKNAEKSNRVYRGLYVDGENVWNADCVGAYNILRLYLKNDAIKLSPYDIKVPKIIKVAA

SEQ ID NO: 47531 - protein, 465 aa, unknown
  TnpB Polypeptide
MTDFSTKGGGLDQMKVLRQNRYHVKNTHPDYELLLDHMSDSKAVYNFANYLVRQRYFRKTGRNFNENLLDEFADDPTLQADIQTYLDGNKMFSSLLKNIVCAVARRFGCKIIAKVVQNIVDKLHADWNSFFELLKKKKDGDYDEKIRPPRYKKEAFNLVEYNPQVVSKTKLKDGFIGTAKMAQGVKLRRLLPNERVQSFRVYWENERVLLEVILVREIVDMPKENECDGQKIASVDLGVDNLMTVAFNYERRPVVISGMEIMSLNRFFNKERAKLQSKLPNGVHSSKKIRRLLARRYDEIRNLFGRVANRFVAFLLREGVTKLVVGYSKGWKDEVHIGKKNNQNFVQIPFLSLVKILRYKCEEAGIWMVTQEESYTSKASFLDSDFVPTYRKFKEGEEKPSYVFSGSRVKRGLYRTKDRVFINADLNGALNIMRKAGDLPLEKTSTLAYLKRYKHLFPISFECVA

SEQ ID NO: 47532 - protein, 427 aa, Halorubrum sp.
MNYNYRYRLTPTDSQRETLDYHRDTCRQLYNHALYRFNQIPESEGTVKQRVRNIRDELPNLKDWWDALTDVYSKVLQPTVMRIAKNIKRLGQLKKQGYKVGELRWKSPREFRSFTYNQSGFELDKKGGQTVLSLSKLADIPIELHRPLPDDATVKQVTLKKEKTSEWFAIFGIEMDTKSPAKSSLENIDTAEMVGIDVGILKYAHDTDGTAVESLKLSEERDRLEREQRNLSRKEHGSNNWENQRRRVAECHFDIKRKRRDFLHKLSAYYAREYELVAVEGLDVKGMLASPRNSRNTASSAWNTFTDLLEYKCKREGTHFVEVDPGGTTKECAQCGVETDKPLWVREHSCPACGFEADRDANAAWNILSRGLTDLGVGHSELPPVETALAVDTAVVSAKRVVEAGTSFRKERSPCLKEPPKAASRQG

SEQ ID NO: 47533 - protein, 418 aa, Halorubrum sp.
VADDYVRRTAITRLSVDDEQRELLEETISEWKRGCQLATDMAWGKCNAKSDVQPLAYDDVREHTDLGSQHAILATHQAAQAITGCLERRSNGKQASKPTFTAPTVTYDTRTMTLFDDDTVSLSTTESRVRCELALPETEDGYQRQYLGSDHWSVTETTLTARDGDYFLHIGFRRPKTDTERDTAEDGTVLGVDLGIENLAVTSTARFINGRELSHNLREFEKVRAGLQQTGTRSAHRTLEQSSGRERRYVRDVVHQASNAIVDEALRYECDVIAFDDLTDIRDRTGASWGHKWAFRTLYEQVEYKAEAVGISVKQVGSAYTSQRCAECGFTADENHRTRTEFRCVKCESGANADYNAAKNIGMRYVRRGQQSSRRTGDSQLALKSGTVTPSGGFSAHPDGFEAEFTDKPPPQRANPSG

SEQ ID NO: 47534 - protein, 382 aa, Cyanobacteria sp.
  misc_feature (289)..(335): Xaa can be any naturally occurring amino acid
MRDEPTQLFFKHHKKGVKPPGFKKVKKYKSFTLKQAGYKFLRGNRVKIGNKIYQYWNSREIEGTVKTLTIKRTALGELFMVVVVDGYSTPEVTFETGKIAGFDFGLKTFLTCSEGFSIESPLFLKSFLNTLAKASKQHSKKHKGSNNREQARKHLVRCHEAICNRRRDWFWKLAHKLTDQFDVLCFETLNLKGMQRLWGRKVNDLALGDFLQILEWVAKKKGKRIVYVDRWYPSSKTCSCCGHVLDELDLSVRRWRCPSCHSVNDRDTNAAINIKRVGSSTLGVEDVRXXXXXXXXXXXXXXXXXXXXXXXXXXXXXXXXXXXXXXXXXXXXXXXKGTALPIGFNLNPNRTYAWIPHIVGVNGRSPLHMAVQTKICVSPIHK

SEQ ID NO: 47535 - protein, 469 aa, Lachnospiraceae sp.
MYFTRNIMVTDRELFEWCDTVAHKANNLYNAALFRIRQSMTSRKKETSELTLNEKEVLNEIDCMNNALVSRGKKPRHVPESGFLSYGFLDDLMKHTDNPDYNCPELPKQSAQSVLKHAVRDMTSFFEAMRAYQEDPSRFTGKPKLPHYKHKQGACSFDVTNQDCVIRQNEKGHYVAKLPKTKCVVSLGREVPGILKEVHATPLNGRYQISFVFDDQKPVGKLLTEKPERIAAIDFGIDNFMAVTNNCELECLLYKGGVIKSANHHYNKRIAVIMSEQTKGGSGKFVPTEEYYKITQRRNNTVNDYMLQTGKHFITWCVENRIDTIVMGDNPFWKQEVNIGHKNNQKFVQIPFDRMKEIIEYQAERNGIRVLRQEESYTSKASFPDNDPIPVYGMDNDSCSFSGKRIHRGLYRTDRGEIINADLNGSANIMRKCIEESFEHTALRHDRIIVIKHPMYDAMTRNRSAQKYK

SEQ ID NO: 47536 - protein, 199 aa, unknown
  TnpB Polypeptide
MLATSYDGETTVFQHGGEVKSKRGKYKRLRQQLQKRGTRSARRRLKTIGDRENRWMTDVNHQASKALVNHYDRDTMFVLEDLTGIRNATEQVRVKDRYVQVSWSFHQFRQMVEYKAKRNGQKVVFVDPAYTSQTCPKCGKIRKANRDKKRHLYVCRNCGYRSNDDRIAAMNLRHKGYDLLNSQYAASMTDGVRVQSTTL

SEQ ID NO: 47537 - protein, 317 aa, unknown
  TnpB Polypeptide
MPLLELTILLKLASRAWISVERHLYNGGAPRFISSRRGLHSIEGKTNRTGIIWKADQQCVTVCKHVYRVRVDKRDDWLTRALQDPTDPTKPRKVKYCRIVREMRKGKERFLLQLVAEGTSPLKHAYAGKDLRMAIDPGLGSLTYATEDGTIAKVQIAPSADTDHRAVRKLQRAMERSRQATNPDNYETVEVVRHSKKHKSLKVKSGRLQWRFSKRYEKLRSELAEMLRLCAATRKREHGEVCNWLLGHAGHIIVEDNSYKAFQRGRFGKTIGRHAPAALYAQLTNKAESAGLQVLIVSVNRLIYIKSLNDFRDFFYS

SEQ ID NO: 47538 - protein, 460 aa, unknown
  TnpB Polypeptide
MRSFRFMCITLLFLYYSDILLVRQSHMLYNRNRKEANEMDQKKMADYAYHYGLKVRIYPSQQQKEMIQRNADAARCVYNEHVAVNQEIARFGKRSIYIDVIEKRIEALRERIRTVTALKDRYPWLRHPDIDAQSIANARQNYQHAWKQFRAVHHAGVPNFHKKTSVESYQTNPHYSKCTEISLLTSNARFLDKHHLMLPKLRRIRFQGSRKILDRLFAMKEVRIGTITITKDSLHRYFASFQLGSDEPFVKASPKTKAEIGIDLNIENFYADSNGEIVANPRYYRRQKRRLANAQRKLSRRIVRAKKEHRPLREAKNVEKQRLLVARLTAQVMQRRKDFLHRTSATLIKNHDLVAAEELRSRNLLKNHALAMSVQDNGWRMFLSMLTYKAALYGKNFVTVDPRNTTQTCHACGHIMSGKEKLTLKDREWICPKCGIHHIRDVNAAKNILARAKAKLVSMH

SEQ ID NO: 47539 - protein, 451 aa, Scytonema sp.
VATRRVTFRLYPTSLVNQKLHYHRKLHKDLWNAAVYNRKTQYQKLGHSVNYYEQQNSLPEFKQTWVEYQDVNSQALQATLKRVDLAFQRFFNGLGKYPKFKSARKYKGWTYPAISGWKAHTTGKHGYLELSKIGQIQMRGEARLWGQPTTCTIMFKNRKWYASITVEVDNVLLKKSRRTKVSNVIAIDMGCLDALTTAWIDEEETEITGYAQVIAPKFLRKTEAKIKKLSKEKRRKRAPSFKKKIKASKRWKKAVLRVGKLQTKAANQRQDWIHQVTKRISFRHGTVVTEALNVKNMTKKAKKGSKRKRQKTGLNKSILDVGIGKFLQTLEYKLKEAGGVYVELPTKSVKPSQTCPKCGTQKKKELSERVHQCDDCGYIQHRDKAACEVMLSWAFNNLSGCGTHLVSADGHSSTSSTHVRKDTGSMKQLSQMKRQKHYSMGEVAETPPSTR

SEQ ID NO: 47540 - protein, 418 aa, unknown
  TnpB Polypeptide
MIVQKAYKFKIKTNAREKGFFSKVAGSVRLVWNKSLALQKANCEYINRQFVRLGGYSMNESEAKKLKKQLYREYFPTGFDIITKALVPIWKKSEELSFLNECPAQSLQKPLGDLDKAFFKAFTKKGGFPKFKKKGLRDSIYFPQGFKIKNNKVFLPKLGWVKFFKTRDIEGTIKNITVTSDGFGNWFASFCCTEQERNIARRTIGEIGIDLGVTNFSALSNGELIKKPTSIKNLLAIKKRVARAVSRKKLGGKNRAKTFLVLRKVEVKIANIRKDFLQKTSTLLSKNHALIVAEDLKILNMSKSAKGTKKNPGVNVKAKSGLNREILANGWGDFRTILKYKQEYSGGIFKVVNPINTSRTCSCCGVIDKNSRVRQEWYACLHCGYEIHADTNAAINILAAGRVALGDMDNISCLAQES

SEQ ID NO: 47541 - protein, 477 aa, Blautia sp.
  misc_feature (380)..(457): Xaa can be any naturally occurring amino acid
MQIISSYGVELRKQNIPIRQTLEIYRSAVSYLIGIYVQVWEELAEIPDAKRRFNAAEHLVHTTKKNHACFDFDIRFPKMPSYLRRSAIQHALGTVSSYKTRLDLWEKTDGKSGKPRLVYENHAMPVFYRDVMYREGAEGKDEAYLKLYDGHDWKWFCVGLEHTDMEYLRKYWSGKKASAPTLEKRHRKYFLRFSYTEEVTLTKTPVKEQIICSVDLGINTDAVCTIMRADGTVLGRKFIDHPSEKDRMYRTLGRIRRFQREHGSAQTQGRWAYTKRLNTELGKKIAGAIVRYAEENHADVIVFEYLEMQGKISGKKKQKLHLWRKRDIQKCCEHQAHRKGMRVSRICAWNTSRLAYDGSGVVTRDWENHSLCTFQTGKRXXXXXXXXXXXXXXXXXXXXXXXXXXXXXXXXXXXXXXXXXXXXXXXXXXXXXXXXXXXXXXXXXXXXXXXXXXXXXXQPYPAWEIRITAHLSYRRIR

SEQ ID NO: 47542 - protein, 279 aa, Sporomusa sp.
VQITVQAKILPTKEQFQLINSTTKEYIRLINQIVSDYITAEKDLKYTSKNVNAELPSAVKNQAIQDAKSVFHKYQKTKKQSILKKPVAIWNNQNYCIKDQLLSFPVLIDDKSKRIEVPIILTDYPKRLLTNKLGSLRISQKSGKYIAQIAIQVPESESTGNQAMGIDLGLKIPAVAVTQDGKTKFFGNGRQNKFIKRKHRSARRKLGKLKKLKAIKKRHDKEQRWMKDQDHKISRQIVDFLRKKIMFQPFALNNFLVYARRQEQAVKTRKTSITGHSIV

SEQ ID NO: 47543 - protein, 464 aa, Faustovirus sp.
MKFNIHKYYQSILNGDIESIFTKRNNEVKDPVCDYKFNNYTKLLSLTTHDEISGIKRNETVEDSVVYETKPLTSPTISVFGKLELDATGFTADDVQCARKIRIYPTETEKSKINKLFSISNAFYNLAIEGIENKTININNKTDIRRKCRVNDDVCNTVHVDAKMAYFDTRSLAAMMAVSNYKAMLTNHQNGNIKHFKLSNKHSTQIVYFSPKDAKLRDDHLCIRDMKLRIRNRDLPWLVEQGINQQISIKRYNRKYYVVVPFKRRSLDNHAKGICAIDPGNRTFATYYSPDEIGKLGVNLIEKVRKINVKIDHLNYIKDTVKLVSRTRHGLKQRIAKLSDKITRLVDYAGWKFAAYLTRRFRVIFVPRLANVVKGGRNSTVNRETRNLRHSEFINKLTHLGKINGCKVVETKEYYTTKTCCRCGIRNDDVGSSKVFSCVNAACKFTIDRDVNGAKNIWLRSLTN

SEQ ID NO: 47544 - protein, 463 aa, Faustovirus sp.
MKFNIHRYYQSILNGDIESIFAKRKDEVNSPVCDYKFNNYAKLLSLTTHDEIKGIKRNESVEDSVIYETKTLTSPTVSVFGKIEVDATEFVAEDVQCARKIRIYPTEMEKSKINKLFSISNAFYNLAIEGIENKTININNKTDIRQKCRVNDDVCSTVHVDAKLAYFDTRSLAAMSAVSNYKAMLTNYQNGNIKHFKLSNKHSTQIVHFSDKNAKLKNGCLCIRDMKLRLRNRDLPWLVEHGINQQVSIKRYNHKYYVIVPFKRRSLDNNAKGICAIDPGNRTFATYYSPDEIGKLGVNLIEQVRKINAKIDHLRSVKDTVKLVSRTRYGLKQRIAKLSSKITRLVDYAGWKFAAYLTRRFRIVFIPRLANVVGKANSTVNRETRNLRHSEFINKLTHLGKVNGCKVVETKEYYTTKTCCRCGIRNDNVGSSKVFSCINVACKFTIDRDVNGAKNIWLRSLTN

SEQ ID NO: 47545 - protein, 466 aa, Faustovirus sp.
MHLFNEEGNLKVNLQELRKICESEKFQRSETGFWNQNCSIIKDKLLATEFINHDKATDTIISRRIKFKPNYLQRKLLNDCFGAYRWIYNKAIDVIFEVKKYSDKFNCIIDIKLVKKAIYENVKINDDEIPDFIKILPSDSRKEALREAIKNYKTCLTHLNKKLCRRFLLKHKRKDATTFRIKTNAIKLTGNKLVIFKKRILDLIEAGNLNKDLRYATLNNGNLRRLKPYLNASGNPTAYPLINYSHGNYYIIVSGNRKVEQCNVKKEICAIDPGVVNFHTIYDGVVGYEGVKLYETRLEGINQRIDKITQHKQNFTGAKRKRMHLRELKLRAKVSNIVYQFRHTLASKLCNKYKVILLPKLGIKQVAKHLRRQVNRKLYALSHYKFNELIKQIATRTGTTVIHCLESYTSKTCGNCGNLQTCDVDRTFRCRACYYVADRDENACKNILIRSLNNYILSCSSSGKRK

SEQ ID NO: 47546 - protein, 334 aa, Halobacteriales sp.
MEVRRTAPVKLVVPDEHRDDLHESARQFLHCANRAAEFCRSDDSYIKRVTANTTARDALYDELRDETDLTANLVQEAIRRGVQAVNGCVERWKSGKRVSQPEFTSWSMLYDKRSATFYRNKVSLPTVNGRIECVFELPSDSPTPHEQYVLSEEFEFRASTLQYDAVDDEFYFHITTRKYDSKGEDGEDAEVSEDTEHQTALGIDLGVSSLAVSSTGRFWQGDDYDHWCREFEKRRGEMQQRGTQAAHNALLRLGKREEAWPTFGSGFSKRSGTTYGRSDAYLSMSPTRHLNGVSLWYKSSRATRPSAALGRTAGSRTTTTVTENNSVARSADTK

SEQ ID NO: 47547 - protein, 588 aa, unknown
  TnpB Polypeptide
MTQLTEQFYIPDEHHEACDRLTTLVQKHTRRLLDAEYWADSHLDAITDHTGQSYTYIRDDDYDAFEGVEEYVYNRFKRCVYYRVTHVLDAHVDEFQAFQFVTDTVVERKIRRIGWERLRSRLYDENSQYIEWRLVESVVEQLNTYYDTHGRFPETYTELIGTPKPNGTLPYAPDKGDYHIHDFSVEENELVFTLNAPDSLSTDSHYDWTEHEVRLPIPGRFHELLDVGVLKAPTLHTSEHGYTLDVPVEIPEQAAETEEDRVLAVDLGVKKQATAVVLDNGDETHEQVATPSFIDHPSKNKLFRVKADAEGVNDRLAELRRQGKAHTDRFDHLLNEYRQTRRKERRLREQIQHDVSNELVWVAVRHGCEEIVFESLGQLENDDVSGKTAWSISSWARGELLDHVEYKAGLLDIDFETVNPWGTSRFCPRCGERGRTVKAPDDHAECRSGGHFHCPECGYECDRDVVGAVNVGRKHLDGSKMEGANPAVYTTEGDHASFPSHGECDRSDALAESQTAGVSGVQSAADKQDTASGRQTHLPQFRSMPLSGAVKRGGAQSGGLLQNRGSNTGVRMPSGSITQYLLASTECG

SEQ ID NO: 47548 - protein, 343 aa, unknown
  TnpB Polypeptide
MLADKIAYYDEYKESFDTQPPVYKADFPFLKEVDSLALTSEYRDLNTAFKNFFRDISVGYPKFKKKHDNHKSYTTYNQKGSVSIVDKYVKLPKIGYVKMKQSQLVLGSIKNATISQVPSGKYYISFNVEIWVQTLPHTDKELGLDLGIKELLITSDKEHFENPKTLYKYEKQLARLQRQLAHKQKFSNNWYKQKHKIALLHEKIVNIRKDNLHKISHKLVQENQLIVSEDLKISNMVKNHHLAKSIADVSWYELTRQISYKSDWHGRMYVKINTYYPSSQTCNCCGYKYTATKDLSVRYWTCPNCGTYHDRDENAADNILAEGKRMVVSQNIISNSDDFQIVS

SEQ ID NO: 47549 - protein, 176 aa, unknown
  TnpB Polypeptide
MVDGITTNQLCQLAKKRNFRMQDILRKTARYIVDFCIDHQIGIIVCGYNRDFKRGLKLGKVTNQHFTQISLSYLRSTLKQLCERYGITYLEQEESYTSQASCLDLDDIPVYQPDTPYTGTFSGQRVRRGLYRFANGRTVNADINGAANILRKSKQNFDFEGLCKGLLDSPLRIRLS

SEQ ID NO: 47550 - protein, 371 aa, unknown
  TnpB Polypeptide
MRKSFKYYIKANKGTVKKANQTLELCRILYNLCLEQRQFAWKNYHKSISGYDQVYELPSLKKFFPQFKEVPSQTLQEVVERVNRAFQNFFRRVKNGDKPGYPRFKSFGRYDSLTLKQAGWKLTDKDLQINKIGSFKLFLSRPIEGDIKSVTIRKTSSGRWYATFSCDNVPSKPLPKTGKTIGIDVGCESFLTTSEGEKVDNPRFFQRTNKLLIKRQKSVSRKKKGSKRRNKARILLSKTHEKVYNQRRDFHFKIARKLLQSYDIVCIEDMNHFKSYRSLNRSMRDVAWFGFFNILLFKAEEAGKEVIKVPTKNTSQACSECGKIVPRTLSDRVHSCPHCGLSIDRDINAACNILRLGQSLQGAGTLVPAMN

SEQ ID NO: 47551 - protein, 427 aa, Cyanosarcina sp.
MLLTQTVRLKLDESSQEILKTLCHLSKNLFNVGLYTVRQYFFQERKYLSYESAYHLCKQNENYQSLATDCGQQTLKYVDRCFKAFFKLLSMRQEGGYARLVQIPKYLPKDGFFPLVIPIRARHDFAAYDWKFLIPTSRQFRRDNGSIYITVPENIRQFRIKEIRILPKQRGHFFDAAFVYERQDEKVKNNFNNAIGIDFGLDNLATVVSTTGESFIIDGKHLKSVNQWFNKRISHLRSHKDKQGIKGLTDGEAWLSYRRSNQVRDYLSKSARYIIDFCIQRQIGTVVVGYNPTLKQGINLGTRNNQNFTQIPIFTLRAKLESLCARYGINYVEQEESYTSQSSFLDNDPLPIYNADNPTAVKFSGKRIKRGLYRTKRGHLISSDTNGAANILRKSNNELDFQRVDRVCLTQPVRVRILRESPTTAAA

SEQ ID NO: 47552 - protein, 363 aa, Streptomyces sp.
VALGVDWGLNTLLSAGAARLRADGTITALGAGAQFRAAGVVAKQHRLRRTSEHLHGKTGHYTRLADPALDGKHAVLAEEIRRVSARRSNLNDALARSAARWAVDQAIAAGPTVIYLEDLRSLEARGMGRTTNTCLSQTVRGQIADRMRHFAAETGIAVVTVPAGNTSRHCPHCLTPLRHRKAPDRPTTPGWKWALCPQPDCGWQGDRDQGAWRRIAARGLTHQTKSVTDRTSGQVVIRTVAGRLEATAVITTIPKTAGSDRSKTGPTRPRTHRPAPRRRGVPSPVGPHGLAGKRPEGHAPTDRPRLPRAAHRHQSVTTISTPTTRHKPRGAALGAGFHLHAHASPPRWTDPAPDPTVRTGSLS

SEQ ID NO: 47553 - protein, 370 aa, unknown
  TnpB Polypeptide
LQQKVEEGFRVLTLMTEVDKEVLDFIKQYQVIASHLYWAKRLGIKPSDAVLRRAKESIKSYWRWHIIDEKDPMYLFKGIEKTPRPHSIILNLPLVDALHESKGGFIKDGKLILRLNKKVEIKIPERALEWLNKRLAENPDRKTVRVFERRGRLVAQIILHKENIVIPPSNPLLVVVDINSSYGVVVHYWDGKLIKTEKYKPPNRGMKWHSARKLMKLRDNLYNQGCLTQEKINIYSALIRRTLSGSSRSWVQQTVDKIVRRIRRIAKRHKKDPLVLIDIPNDESLRGSVLQRTLLSFVKYFENILSWYGIYWDESRLYSKICPQCGSELDLEMRTKNARIMVCKNCGFKEERDKIPLYWALIKIKLLPNP

SEQ ID NO: 47554 - protein, 544 aa, Azohydromonas sp.
MADAAVFTYQARIALASEQARALDAYAKLHGRAQRALFAAQCAERPLNESKREFLRTFGLTSRQFNALRIELDGKVEAIRRRRPELIEEAKTRIAKARRLVQKLSQTAPGSDKLHQKRRRLALLEQRLAALQRDEAQGRVRLCFGSRKLFNAQYDLQANGLADHQEWLARWQESRSRQFFVLGSKDEIAGNQTCQATLEAHGSLCLKLRLPDALALHSGAKFVTIPGVRFAWGHATIVSALQASHRVNATTQAGKPTSRRTDHAISYRFLRDDKGWRVFASVEVEAAAVTTSPALGCVGVDINVDHLAVAEVDRFGNRVNARRIELPTRGKSTDQAKAIVGDAVAKVVALAKGGAKPLAIERLDFQRKKAELESVDAARARLLSSFVFSKVRGGLKAAGLRAGVQVIEVNPAYTSVIGAVNHAQRRGISIHQGAACAVARRGLGLRESPAVRFGLVPVRSGGHVTFAVPVRNRAKHVWSQWSRIRAGLKVALAAHWRSGQPRGHPAPLSPATRTLGATCLSTARSRGANRSQHCSGSVLDDVPF

SEQ ID NO: 47555 - protein, 378 aa, unknown
  TnpB Polypeptide
VPIKLDVGVNAPALGETARRFNAAATWIARVCWDEGITNTNTAHHRVYGETRADYGLGAQLAVCARAKAMEAIKATRSKGGDTCPAFGPTGAVRYDARTYRLLALDGVSLNTVQGRVTCLMVPGQRQRAMLLDADWVIGGGDLVQRRGVWFLHLTQHRAAPPTNEPTGYIGVDLGITRIATDSEGDSYDGAQVKAVRERRFAHRQRLQAKNTRRARARLRRIAQREARFQSNTNHVISKHLVAQAKESCKALALEDLTGINERVSVRHTHRRQRMSWAFFQLRTFLAYKALAAGVRVVLVDPRNTSRTCPACGSCDKANRRDQSHFLCLQCGHAANADVNAAINISRKAAVNRPIVLPSAGLRQSMASTSPRALAVGR

SEQ ID NO: 47556 - protein, 387 aa, unknown
  TnpB Polypeptide
MSIRTIALTLAPTDAQRAAFLALRRAFADACNHVSAVAWDAQEFNRVRLHALVYYDLRAEYGLMAQHAIRAIGVVVDAYKVDRKTQRSFKPERAVVLDTPRLYRLEGNHADITTLDGRITVRLNIGGIQRAHLKAATKLLEADLIRDRKGRWRLMVSARYDDPPVVETEGTIGVDLGRTDIAHTSDGATFSGRQVTAVRDRYAHTRAMLQRNVSKGTRSSRRRGRATLARLSGRESRFQRNVNHTISRRIVDTAATTKRAIALEDLTGIRERTNQQPRDKTERRRSNSWAFHQLRGFLAYKAVATGVPLVLVNPAYTSQTCHCCLHIGERSGKRFHCVNPCCLWSGDADCNGACVIALMGAAVTSPRGPWLCCSYQPGRRAPESLRL

SEQ ID NO: 47557 - protein, 480 aa, unknown
  TnpB Polypeptide
MGKKREVSRVQIIPLELQNKEDIDLLKEVAFGQKRTYNHITYSISGIKNYLLVKDGKRTDVRKKVIAEMEYIRSINFEYKSVMMDKAVGNIKSNWGQTLKKVRSAVRNNEGLTKEDRRYIFTILKIPEFLHIVLNRKGTIDYEGNKYLSQFHGIVNTKKLNNLIRRYVRRYKVKISKIRNSNNVYLTKNNYGLLASDETNKVIKITTTMANRGNRITATMKTKFNKDKRSIQIRILLDDKLEILAPFTQRVRSYSQNEAILGLDLGMRDILSLSNGNTYGMNSTQYFYTYSDEMRRPNKSRLWSKYYNELYNGNYEKAENILNNNLSNKQYKERLRKRKEHCKSVVNKAIRDMVKNEGLKEIIREDLSWKSDKDKMFSGRQRNRFNTWLKGYITERLEAYCEKNTIKVTVVNPAYTSQICHICKKFGKRNNETFTCEEHGKMNADTNASINIRDRKDEKNITLNSKPEYVKAYYEKLAQK

SEQ ID NO: 47558 - protein, 431 aa, unknown
  TnpB Polypeptide
MKYGSIDLKMMNSLTSELRSNYDLTARCLDAIVNNMIGRYKALKELKKTELTRIERKIEKTEAIIEQLKKDKIGLQEKAETNKIDSEELKELRILKIKLHWRYDRLNKLKSRYNLLEDEILNNRLKLCFGTKELLKKNLSKFRNKRDNEIYFIGRSSDITGNTNLQIRYNRRLNQFYLKVRKEIDLENGKYVYGKIYFNKDRSKIIKNILRRKDTALSYRIKKENNTFYLYLIFKVKHNAESCITRNSNGVIGIDFNKGFVSVTETDKHGNMVNTFNIDYRFKQGNKTKTDLEKIACRLTRYCLDTGKDLVVEKLNFSKTKDSIISGKGRKYNEMISSFPYRIFGNVVISRCIKNKIYLRQVNPAWTSYIGNIKFAPSKKLNIHSAASFVIARRGMFISDSLSEKRMKKIKKKRKKYEKRIEKLKRPNNKY

SEQ ID NO: 47559 - protein, 470 aa, unknown
  TnpB Polypeptide
MSYVFTYTTKIKNKNYNQSLCKYISDWTIVFNKIQRKVWQQIKAEYKETGEIKGKFITVLSDDEIELTSRAKDSILANMIGRFQAIKELKNYELENTDRRVERIEEDIVEIKDRIKKLKYKQKEDIFGLSNKEKEELKNTKHKLYWKLNKKNKLHQRRNNLDKEIKEGNFKLCFGTKHLLKTDYNKYVKQRDSELFFVGRAAETSGNNNFQLEYNPKKNNFQVKVRKEIGLEDSKYEYGEVHFNQKRTKQIRKILKDKSSALTYRIKIKNDEIYLQLMFTLKHTTEDCLTRSSNGVFGIDFNKGFISVTETDKQGNMVKTYNLDYKFGSGNKTKNDLELVIGQVVKEALEKGKDVVVEKLDFKVKKSELISKKNKKYNEMLSSLPYRMYGSIVKSKCAKNKVYLHQVNPAWTSYIGNIKYATLRKLNIHTAASFVIARRGMKLIDSVRKKKMRVKRKKRKKYEKRKVNNK

SEQ ID NO: 47560 - protein, 369 aa, unknown
  TnpB Polypeptide
MTIRQKAYKFRLYPNEEQKQFFAKTFGCSRAIWNMMLADKIKHYEETGKTLHNTPAQYKKDFPWLKEVDSLALSNVQLNLQKAYKSFFQSGFGFPKFKKKNHSQSYKTNNQKGSIALENGYVKLPKVGWVCVKAHRQIRGIIKSATISMTTTGKYYVSILCETEITPLLKTSSSVGIDLGLSDFAILSTGEKIGNERFFKKLSKKLTKEQKILSRRALVAKKSGRKLSDSKNYQKQRIKAAKTHEKIANMRRDFLHKLSTYLIKNHDILCIEDLSSKNLMKNHKLAKAIGDVSWSEFVRMLEYKAKWYEKQVSKISRWYPSSQLCSDCGFNSGKKPLSVRDWTCENCGSHHDRDINASINILNEGLRLV

SEQ ID NO: 47561 - protein, 553 aa, unknown
  TnpB Polypeptide
MKFNKTKGTVFRMYKTKGPDLLIPLYNILQGELDRILSTSTYVNSLSKIELKYKDEDGEERSKLNGMLWDEIDGIIGDSLRDKGLYVWYIRILYHNIISLLKSRQEQIKIYEILKLNQYKINSTLRAKLVEEKLYPTNSYLETLVNAKNMPTLPKRKTFILDFSVSDKQMFRVGKNSNVYEIKIYNNKEVKDYNLKTGWLSFEMYLPTYIRENFTGKTAKPQFYWDHNKEEFVCAIPCEIKKVANEYENIMGVDLGKIKVYSATVVRKDGSISDEYVPTEELQNLVDKLRRMNQHINSVYEKKKRSYKYGNFTKRQDRRELDYKRSRNKRTKLQFAIARLVAVEVVNIAIKEQCKEIHLENLSWVKSSGGKWNFAQVQTYIEEVAELFSIKTLKVNAKNSSKTNPVTLEVGTVSNRDVIFKNGQKVDRDQLASLNLALREPKKQKQRKIRTLNIRYSTIIQRQSRRFNNYLMKKSFTQLKSKRKIHKEFLKEKELSLKPDLIKKENKKIVMFSHDKAKSDFAIVSVYKSSNLKLEYYFTNNLQLKHIYTDLLQ

SEQ ID NO: 47562 - protein, 423 aa, Chloroflexi sp.
MYAWKQQSIPSCVCAKPHAICSNWSRSYPMKAWWRRLIGLHGKNWLVFRKSRKSQMLPCTKRRKEVPDVKRSHVIRLHPTPEQEVYFRKACGVARHAYNWALARWKDSRAEGKWAKIKDLKAEYNRIKGEQFPWCSEVTKCAPEQEFRHLGQAFDNYWRMKKEGTGKIMSAVISSRAGWWFVSIAVEVEHDVPTHNGGAVGIDLGIKTLATCSDGAVFENQKHYRQSLGRIKSLSKGLSRKGEGSQNWGKHARKLAKAHYRIACQRQGTLHKMTTSLARRYALVGLEDLNTKGMLSNHCLAQAVSDASFFEVKRQLLYKAEQYGGYVQLVSQWYPSSKICHACGWIKEDLTLDERVWVCEQCGVITERDLNAALNIRTEALRLLTDVPVVASSGQKFACGAESAGSRCVESETFCDEAGTRML

SEQ ID NO: 47563 - protein, 400 aa, unknown
  TnpB Polypeptide
LYPTEKQKAQIDLTIHSCRFLYNKMLAERIEVYENLKDNKDALYAYKYKSPADYKKEFPFLKEASSWALNNEKRFLQSAYKNFFRRVKAEGGNVGFPKFKTRKTDKLSYTDYRCLGIPRVDGSRLTMNKIKEIKFRGLSDDFHGEIKSVTIEKTRSGKYYASILTEFDEPDKKERIGDGVVGVDLGLKTFISTSDGRSFTGIKTRLKEFDLKLRRQYKHLSRKVVNSSNWNKCRVKLNRIWDSRRFFINNFQWALANKLCRENQTVVLESLNVKGMLKNKRLSHAIHEVNWSSFVERLKQKAIEYGTEIVQVPRFFPSSKMCSRCGAIKQDLKLSDRIFRCECGFVQDRDLNAAVNIKNYFLYYTSPKNDEYSRRENIRPQDVSYDNRGGFYEAVIVLRS

SEQ ID NO: 47564 - protein, 233 aa, unknown
  TnpB Polypeptide
VICSVDLGINTDAVCSIMRADGTILGRKFINFSSDKDHLYHVLGRIRRFQREHSSRQVQSRWDYAKRLNMELSRKIAAEITKYAAEYQAGVIVFEYLEMQGKISGKKKQKLHLWRKRDIQKLCEHQAHRNGIRVSMVSARNTSRLACDGSGAVVRNQENHSLCTFRTGKQYNCDLSASYNIGARYFIRELLKPLPETERSSLEAKVPAVKRRTSCVYADLRKLYVEVNNLKAA

SEQ ID NO: 47565 - protein, 370 aa, unknown
  TnpB Polypeptide
VYSLKLELKLNNKERSLLAGCAGFKRVVYNFGLDLVKSSWQFKGIIASDSKRLTALKKILTGEVMPRSDYSWMKKYPSTVYQSALQDLKNAFDRWRKGLAQIPVFKTKKGGDSFTVYRTSGIYPETGKPALPFTNRQVLHPGKKITLPGLGKFRLKEKLKFICSSQTFTISRQANRWFVSFTIDAQKIPPLFHEVVEPIGIDLGVKCFATLSDNTIYEAPKPLKKAKTKLAKLQWRNRRKLQGNRKKGTRASANAKKFYVKQAKLHAGVANQRKDYLQKTTTEIGRKYSCIKIEDLNVKGMIANHKLASAISELGFYEFRRMLEYKQTFYGFKVELVERWFPSSKTCSFCGCVKQKLLLDERVFQLSPNI

SEQ ID NO: 47566 - protein, 423 aa, unknown
  TnpB Polypeptide
MSEMRMVARGVVWFEDPEPIHRLMRSQCSAMRSAYQAIHKHGLKGNDVKVHVKQNYMEDLNQRYISDAVSRAKGIRHENVIFGGRKAWDDLRSGRLSKDDWVALRNDQLYSRGDLSKTGNPNLRIVGEELWVNDPSGRGSWIRGRLFIPEKFGVELDCYDVRLTSRPDGRFDVVVTWEQEVEMIQTVSGSIGVDVNPNGIAVAEVDGEGNLMGHTFLTNDRIRFASRDKRDMEVRLLAIEVVDRALDARKPIVIEELSFKQRSKGKRFNRMASNFLHRKMLDAIRRRATRCGVPVVEVNPAFTSQLGLLKYAEVYSLNRHSAAAFVIARRGIGITETQTFEDPSPTGKREKLNLEGRGFSCELSPKAWGWLRDKFLRPQHPSSQDRHPYRDDHGRRVKPGWDSPGRVANNWSATQAAFAASDS

SEQ ID NO: 47567 - protein, 375 aa, Sarcina sp.
MRRAYRYRICPDREQRRLFAKTFGCCRFLYNRMLSDKISWYGKHKEMLRTTPAQYKNEYKWLKEVDSLALANVQLHLERAYRNFFQKPKTGFPRYKSKRQPRQSYTTNVVNGNIRIEGNRLRLPKAGMVKIVLHRQIPGKAKLKSVTISREASGKYYASILCELPEPENQGRGVRAEEAKILGIDYAMQGMGVFSDGSRAEYPGYLRAAQEKLAREQRKLSHCRKGSRNYEKQRRRVALCHEKIRNQRTDYQHKLTRKIADSFDAVAVEDLDMRGLSQCLHLGKGVMDNAYGSFLQKLTYKLEERGGKLIRIDRWYPSSQICSGCGHIHPEVKPLSVREWLCDWCLEIHDRDENAAVNIREEGRRMLKQQEENCA

SEQ ID NO: 47568 - protein, 465 aa, unknown
  TnpB Polypeptide
MHLTHKIALRPAPEQADYFKRACGTARRVWNWALAEWNRQYAAGQKPNAMALKRQFNAIKYSDSDWLDENGQPWLEGIHRDAHSQPFAHLQKAWKRFFKQIEEGARIAPQDKALRRKLRKQGVKLAYPPQFKKKGHSRDSFYVANDKFVVSGQTIRLPKIGDVAMTESLRFEGKILGATVCRMADRWFVSIQVGVKDEQFYRRRKADGIVGVDLGVKAAATLSNGESLRAPKPLKAALRRLRIRSRRLGRKLEAAKVAAGFNPKGTLPKGTRLPISSNRQKSAQALARLHARIAHIRADFAHKLTTRLCRENQAVALEDLNVSGMLANEKLARAISDVGFGLIRSQMEYKAQRYGTRLVFAERWYPSSRLCSVCGWKHETLTLGEREWTCPECGTHHDRDLNAAINLQRLATATALPVASPSGNGGATSGGVPEVVGKVTPVRHEHGHQDGSGQEENRAHFCVRF

SEQ ID NO: 47569 - protein, 441 aa, Gemmobacter sp.
MQVHRAHVYRLYPTPQQLTLLARTAGVVRLVYNLALEQRRTWGGRPYRGGRSRNFGSKGLSGELSALRREVDWIGAVSQTAQNQALIDLDRAFANFFEGRARFPTPRKKGVHDSFRHVGREVAVRRLNGKWSEVRIPKIGWVRYRDTRPLRERSDGAVEIRSATVRLGPDGAWQVSIALRCEVAARPLPARAVGVDRGVAIPFALSDGSVWRLPETVARRERLVSRLQRKLARRTRGSQRYRLLRSRIAKLRGSNARARKHLAHVLTTHLARTFGLVAIEDLRILNMTRSAAGTVEEPGRNVAAKSGLNRAILNVGWHQFELLLSYKLEETGGVMVKVPARNTSRECAECGHVDEGSRKNQATFVCTACGNAANADHNAAINIVNRALRGDEARQRRNAPLLDGEGNALAPDEPSTPSGTTGVNSPNGPPEIHLSSGGGRC

SEQ ID NO: 47570 - protein, 444 aa, Glycomyces sp.
VLTGRRYRLELDEQQRVFAESIGDAVRYLWNVALEQHRHYRARGRFISYTEQCRQLTEARAEFDWLRAIPVHCLQQVLKDLGEACRRHGARRVHWKSRSKCAPAFRFPDGSRITVEKLNRKWARVKLPKFGWVTFRHSRPLGGVIKSATLIRDGNRWFVSFLVDDGLSTPAHGKPGTATGLDRGVATAAVTAEGEFFDRRHAGPRTVSSPEPPVQPTSGKPKDYLSVGEMERLVRLQRVLARCQRGSARRRQVKEQIANLYRRARLRRADFNAQSAARLTRDFALIGLEQLSTRAMTASAVGSLEQPGVNVVQKRGLNRAILNKGWRGLEAALRSKARYTGTRIILVSAVGTSRTCSAPGCGNVDARSRESQARFVCTSCGFTEHADVNAARNVKYRTLLAAGPAVPGRGDLQASAGSANRQLPENLSRLTGNPPATFGGGGQL

SEQ ID NO: 47571 - protein, 283 aa, Okeania sp.
SRLLSSWKKQEDLNFLTSVSSVPLQQSLRHLQTAFTNFFNKRTKYPNFKKKRHGGSAEFTKCAFQWKNGQVYLAKCSKPLPIRWSRQLPLGCSPTTITVKLDPSNRWSVSLRFNDNRDLKLKPLKKRVGVDVGISSLIATSDGTKVNNPKYFNKLYKKLRLSQKSLSRKTKGSNNYQKARLKVAKIHAKIKDSRLDYTHKLTTQLIRENQTIVVEDLAVKNMVKNHKLARAISDANWGELVRQLEYKAEWYGRELIKIDRYFPSSKGCSNCGYVVDKLPLDIS

SEQ ID NO: 47572 - protein, 285 aa, unknown
  TnpB Polypeptide
LNDLYATVAQAAVMRIKDSIKALSELKNKGYNVGSLNWKAPSDFRSFSYVQSGFEFDNKNGQTVLSLSKLADIPIECHRDIPDQESVKEVTLKKEPTGKWHASFAVDDKEEPAKPSLEETDADNMVGIDVGILKYVHDTDGTAVGSLDLSEERDRLEREQEHNSNNWEKQRQTVAECHQQIKRKRRDFLHTLSNDYAREYELVVVEDLDVKEMLESPRNSRNTAAAAWNILSRGLEDVGVVHSERTPVETALPVDTAAVSAKRVVEAGSPCLKERAAAPRVSRQG

SEQ ID NO: 47573 - protein, 508 aa, unknown
  TnpB Polypeptide
MRASTPSFVVSVKVHLPEQIENHLEKSFNIANSAYNEVLGLGLRRLKVMRANPRYQELLESRRSLAKSTQQLKKSKGLAWQLKLCDKALSNLRLKYGLSEFSLSKHLTNRRNEPNSPYQHLNSGELQVIAKDVYQTLEKVIFYKVEPHKVRFRSKYSLTASFRNKVSDAGTRIAPSEKTGVAYKLFIHKKGTFVEISTKAFNEYQQLSLLRAEKIKYVQIVRKTIRGKRIYYLQIVCQGYPPAKTTKGKNKVGIDPGVSTVAYASKENAELVDLVPENITSREKLIKYLDRRIERSRRVNNPDCYNSNGTIKRGVRFKRPTNRAKRLIRRRQKAYRSLTEERLKLQGELINRIVSEASIIRMEDLNVKGLQKRSKDIRINPRTNRPYSKKRFGRAILKSAPSYFREALKTKADTLGIEFEMINPQKVKPSQYNHLTQSFEKKTLSTRIFDLSDEWTGVQRDLYSAFLIGHIENGQYDQTILKEFPNFYRKMKEFLAKQKPSRLDWYLT

SEQ ID NO: 47574 - protein, 372 aa, Thermicanus sp.
MEITLTAKIRIFPTEEQTVLLGETLRAYRDGCNFVSEQVFTNPSIRLMKLHQKTYPALRERFGLRSQMAQSVMKTVLARYKTAKHNGHKPTLIRFKRPEYDLVWNRDYSLRKGLFSVNTLKGRVKVPFTIKGMERYFDGTWLFGTAKLVMKKGKFFLHIPMTKGIPELKDHEIQRVVGVDLGVHFLATVYDDQGKSLFVRGRAMKERRSRFKEVRRQLQRKGTPSARRRLKRIGQRENRWMTDINHTVTKALVSRYGERTLFVLEDLTGVRDATERVWRKDRYETVSWAFYQFRQMLTYKAKQRSSKVIAVPPHYTSQTCPRCGHREKSNRSKKTHTFCCKRCSYRSNDDRIGAMNLFLKGMEYLKTGALPA

SEQ ID NO: 47575 - protein, 433 aa, unknown
  TnpB Polypeptide
VQLRYNFRLDPSPGQRVALARVFGCARVVYNDALALRRDAFRAGLPRLSASQVQQEVVTLAKLTARRAFLAEVGVDPLIQAVRDLEGAYGNFFASLSGKRKGPKIAEPQFRSRKDNRQAVRFTRNGFRLRGNGTLHLAKIGEVRVRWSRGLPSEPSSVTVVRDAAGRYRASFVAETKLAEDAARFPLDPDRAHPETGIDLGLVHFAVLSDGRKVDAPKFLRREERKLARCQKELARKQKGSKNRKKAVAKLATAHARVADCRRDFQHKLSTQLVRETQALYVEDLCVKGLVRARLAKSVHDAGWSTFVAKLEYKCARYGRYFGKIGRFTPTSQTCSTCGVKDGPKPLHVREWMCAGCGAHHDRDVNAARNVLAAGQADRRNACGDQARPGLVPAPVSEAGGVEIQSSHRSDLSSAQCASARAAPSGAVGIPAL

SEQ ID NO: 47576 - protein, 394 aa, unknown
  TnpB Polypeptide
VISYKYRIYPNKATEQKLVDALDACRWLYNHLLEDLNSAREKGIKLTLIDTQNTIPMLKLENPKLTQVYSKALQMVNNTLWGNVKSLAALKKKGMRVGKLRFKGKDWYKTINYNQSGFKIDQDHSILKLSKIGDIKIKLHRKIEGTVKAILIKKSGNKWYAIVQAEPELKMADSDISAVGIDVGLISFAVDSDGNDVDNPRFAERQSEKLKITQKRISRCEKGSNNRRKLRDRLDRTHERINNQRSDFLHKLSRHYVTCHDIICIEDIDVKGLIEKGHNKAKHRNIHDASWSRLAFMLSYKAESAGKKLILVDPRNTTQRCSNCGMIVPKDESVRMHNCPYCGLSCSRDYNSSRNILITGMEQPIEPIEPKPLRHITVMQVLVMKWEALAFRPG

SEQ ID NO: 47577 - protein, 392 aa, unknown
  TnpB Polypeptide
MLVNKAYKFRIYPNKKQMELINKTFGCSRFVFNFFLGKQKDKDAYWYICEEMAQNGQLQANNWKGEFLNKYQTIKELPKLKKQYTFLKEVDSIALQKSVENLANAFERYYKKQGNYPRFKSKKNPVQSYTTKYTNSNIAIDGNKIKLPKLGWVRFAKSREVDGRILNATIRRNPSGKYFISIGVEVEVSELPKTNSAIGIDVGLKDFAILSDGTTYSNPKFLRKLEEKLAKAQRILSRRKVGGSNWYKAKIKVARIHEKIANARNDYLHKISTEIVKNHDIIGMEDLSVSNMLKNHNLAKAISEVSWSEFKTMIEYKAKWYGKQVVTVAKNFPSSQLCSCCSYQNKDVKNLGLREWECPNCHTHHDRDINASINIKNEAIRLLTVGATGLAY

SEQ ID NO: 47578 - protein, 478 aa, Caldilineaceae sp.
LTPADHQHCCPVYWYFLVMKTAKVTRILHSQGLHKAKFDRLARIAALCGRVRTDAWQRCSGLSTAQQSAYEIRNTWMAEGYDWHGLPARLGKATLADALGDIRASREAAKVSVKKAIWHRTRGDGAERHRLYALLKRNRWDEDSFLHRQMRKKWKGGTSHCTNQIVADAGSYTTKVWHGRAWVYLQGLERGQRLAIPLRGTHLPTGTLRIILQDNGQVAIHYAIDEDTACSTKSCGTDTIGVDKGYTEAYADSEGERHGEGLGDLLVAESDARRAKGGCRNQLRAVEQKHREAGRIKKADNIRRNNLGNQKWDRRQKKHTAQTRDFLCHAAHRVVDRAGTIACEDLTAPMSSSKYRHRDTNRRLSGWVKGVMADTLTSISRRRGTALVLVNPAYTSQIDSRTGLLQGTRRGDRFYGLDGVVLDADTNAARNILQRMYDDEITLYMPFREVKRLLLDRSGTTDGTAHPGLEPARQLALP

SEQ ID NO: 47579 - protein, 401 aa, unknown
  TnpB Polypeptide
MIVQKAVKVQIYPRESDKELLGKHFGVRRFIFNKFLEIKQKEYLENKISLGYNACAALVTKMKAQPEYEWLNEVNSQSIQAAIKDLDTAYDRFFRKISKFPKFKSKHNSTQSFKVPQSAKIDWGAKTLKIPKFKTPFKFKGSFKGEFLKLNSVTISKNASGKYFASIQGEFEITPKESTGECIGVDLGIKTLLVDSNGTEIKNERFLKKKLKKLKYLQKQHSRKKKQSKSREKSRIKLAKSYQKVTFQRNNYLHQVSSKLINDNQVIVLEDLAVKNMIKNHKLAQAIADVSWGSLVSMLKYKAKWHNRQVIQIDRFYPSSKTCSHCNHLMSSMDLSVREWDCPSCGTHHDRDINAAKNILRQGLNIMSGLGTKSDTKQKRMEASAMAESMKSENTCSLDKY

SEQ ID NO: 47580 - protein, 415 aa, Marinobacter sp.
MLIRKAYRFRLKTNPVLEQKLFRHAGCCRWIWNQIWRMNQRRLDAKQPLIWYQEAAYWLTLWKQSEEYGFLRKVHSQPLQQVLKDLDRAYRDAFDKDQPLKRLPRKKRKHQHASFRYPQGVKLDNRRIYLPKIGWVGFFKSREVEGKVKNATVSWRAGHWYVSVQVEQELPESVHPSTLDVGIDLGVANFASLSNGITYDPISPYRKYQNQLARAQRALNRKVKFSENWKRQKRRIQRLHHKIACCRQDFLHKISTTISENQAVVFVEDLKVRNMSRSAAGTLDEPGRNVRAKAGLNRSILDQGWSEFVRQLDYKLQWKGGWLVKVPAHHTSQECAACGHTSPDNRPSQAVFHCRACGHKEHADINAAKNIRARGHRVLACGGNGIARLLKQEPVGNREGVPPVVSPEAAGIPPL

SEQ ID NO: 47581 - protein, 395 aa, unknown
  TnpB Polypeptide
LIISYKYPIFPDKISQWKLAENLDACRWLYNQLLQDLSAAKERGIKLKTYDTQNMIPSLKLINPKLNLVYSKVLQMVNYTLWSNIKGLFASKKNGRKIGHIRFKGYGWYNTLNYNQSGFKVDQDHGLLHLSKIGDMRIKIYRKIEGCVKAVIIKREGKRWFAIVQTDQEPQTLPKTEEAIGLDVGLTSFVVDSEGNEIENPRCGDHAADKLAKLQRKLARAAKGSNNRKTIKDKIAKLHKRINCQRDDFLHKLSRTYINNFDIICVEDLDVKGLKEKGHNSGMHRSIHDASWSKFIFMLSYKAQSAGRELIKVDPRNTTKRCSACGCIVKKDLSIRVHECHYCGFSCNRDYNASRNILLTGMEQPVAPIESKPLHHVSVMQVLAMKWEAMPNRAR

SEQ ID NO: 47582 - protein, 433 aa, Colwellia sp.
MSLISVSKFNIGQTTPLQTELRRESARLWNDMVKLHKFIRKRRWKWPFRGDFEKHFKSKYRLHSQTNQALIKKFFANIETTSENRKAGDKKARYPYRDRKHFQVVMYKASAIKRKGNRVILSNGLGVKKLIVRIPKDIPIGKITGAELSFRELRLTIKQDIKTIKSAGSNVVAADLGVIHLAAMTDGETSEIIVGRGLRSLIQYRNKKLAEFSRLLSKCKKGSRRSRKLRVAKAKMLFRNDNQQRNFLHHASKQMIDYCVKQQAGMLVVGDCINMSKNARKKKKGSRRSNQMNSNNPLGQLLTYLKYKGKFQGVELDKIGEQYTTQTCPKCGHRHKPSGRNYQCKNPECDFIGVRDLVGSANIKNKFENGRIEKGYLLPPLVAKYRRPVKVPVIRLNCVVHLTDGMLLDNTLDAAQALSSAGGKTPSELFHVA

SEQ ID NO: 47583 - protein, 411 aa, Phormidium sp.
LEFVCSEANKLTNQGLYYARQWYFKTGKYVSKFDLNYQYKPSKHFAALAAQAAQQVLGSVYEAFKSYRELLKLWRAGELADKPKLPNYRTKGGLAVVSYPKQAIKLVDGQVRLPLGNQIKAWFDLDCFMVPMPSNLKFKDIKEVRLLPRNGCFYAEFVYRLPQFKVEVDFSKALGIDSGLHNWLTCISNIGTSFIVDGLQLKSVNRWYNKQISTVKEGQPQGFWSKRLAGITETRNRQMRDAINKAARLVLDHCLEHSIGTVVFGWNKGQRQAVNLGHQTNQKFVQIPTARLKDRIAQLCEQYGLQFVETEESYTSKASFVDGDQLPVFGAKPEGWQASGKRTKRGLYRTAMNWYINADCNGAANILRKVATMLGLDLSGVGRGSLTAPTRMQVWVTAKRRREAASLQSAA

SEQ ID NO: 47584 - protein, 359 aa, Allobacillus sp.
LEQTITIKLKLQPNRFQKKLLEKMSKTYICVINDLVSEMVEYKQPTKKTTKNVVAPLPSAVKNQAIKDAKSVFTKSKKTGYAMIPILKKPVCIWNNQNYSVSEREISVPLFVDGRSKRIPIRVQWNEKNNRFQELMKGKRGTLRITQKSHKWIAQISVTIPTKPINGHQLMGVDLGLKVPAVAVTEGGQTKFFGNGRMNKFKKRYFRKKRKSLGKAKKIKAIRTIHDKEQRWMKNQDHQISRAIVDFAIKNDVSVIRLEKLKNIRQTARTSRKNNQNLHSWSFYRLANFIEYKANLIGIAVEYVDPAYTSQKCPSCSERNKAADRQYHCKNCGFSTHRDRVGAMNIIHAPLMHGKSASA

SEQ ID NO: 47585 - protein, 405 aa, unknown
  TnpB Polypeptide
VLVLEYKVKGSRQQYQAIDEAIRTTQFIRNKAIRYWMDAPKEAKINKVALNNYSTALRKEFKFVEELNSMACQSATERAWSSIDRFYSNCKKKVKGKKGYPRFQKDNRSVEYKTSGWALHLTNRRITFTDKKGIGEVKLLGKWDIHTYPTKSIKRVRLVRKADGYYCQFAIQIDASHEQRTTDAEVGLDVGLEYFYSDSNGHHEENPRFLRKAEKAIKHAQRQIYKKEKGKNQRRKARHRYAKKHLRVNRQRNEHAKRLARNVCKANALVVYEDLNVKGLVKNHCLAKSINDVAWSNFRRWLEYFAAKFDTEVIAINPRMTSQKCSDCGVIVKKSLSTRTHKCNCGCELHRDVNAAINILNRGLQARDGQSQSNATGLVTSTLIGENLLEQVTRVKVESPDFSIT

SEQ ID NO: 47586 - protein, 381 aa, Streptomyces sp.
MQLRYSFRLYPNGPQRSALARALGCARVVYNDALRARETARMEGAPFPKTGDLSKLLITDAKKTDERGWLGEVSAVVLQQSLRDLDTAYRNFFDGLKGKRPRMGAPRFKSRRDSRQAVRFTANARWKITMGGDLSLPKIGDVRVKWSRTLPSTPSTVTVVKDAAGRYFASFVVQTRPEEMLPEVAGQVGIDLGLSHFAILSDGTKIESPRFLRRAEKKLKREQRRLARKAKGSNNRTKARIKVARTHTRVADARREFHHQLSTRIIRENQAVAVEDLAVKGLARTRLAKSVHSAGSSRPLRSAACAVSRTARSPYTSASGSAGHAGPSWTGTSTRRSTSPRPPDWRCQPVERNPHRRPERLHPQRGRPRRLHPLRPRPDHP

SEQ ID NO: 47587 - protein, 398 aa, Kribbella sp.
MSRFRLYPTPEQQTALLEQCRHARHMWNLALVQWSMWSRDKGPTPGYIEQARQLTEARAAFAWLRAGSQTVQQQALRDFDHAVTSFYAGTRRRPTWRKADRHEGFRIVGGQATRIVHLSRKWARVNIPKVGWVRFRLSRAVPDAKSYRVTRDRAGRWHLAFAAVPPPIPAPGTGEVVGVDRGVAVSAALSTGELLSCPRPPKTEEARLRYLQRRLARCCRGSNRWQRVKAAIAKLRARARDRRKDWVEKTSTDLASRFDVIRVENLRIAQMTRRPRPKPDPERPGQFLPNRRRAKAGLNRSILASAWGSLVRRLEDKAAGRLEKVNPAHTSQTCSVCGHCAPESRESQAVFWCVACGHQAHADVNAAINIAAGRAVSARQETPGRVSPKREPQLATSA

SEQ ID NO: 47588 - protein, 440 aa, unknown
  TnpB Polypeptide
MTTPIEGTKSAEIGGSTLTFESANNCAQVSRGRVAEKKVDVVGIATKLNNRTADAINNASKHLTNKRKVGKKLPAELRAKDDAHTKMVDTVTCCIKIKCPDFLRPVLDSLVPKARACVDRMLAHRDQSSSKYYHEIPSAISKSLIAKYQRNKKCKSVTNLVLPISGDKGRQIKLEAGGLRIPALFKKEILPVIWLRLPVGFIRSAEFFMRKGGWYAAVCYNAKADKQFVCTGTVGVDRNSVGAVATLADPQSGKVLHLGFNPAKTKEVWRGRKANLQGLGKKRLLHEIRNKQSRRTKYENHVVSKQIVDYAAKHRRCINVEKLENVRKGKIRRYSESSQWSFYQLLQFILYKAALRGVMVLEVDSAYTSQECSRCHQLTKPNGKSYRCGHCGHNDHRDANAAFNVAGRAMPIGGVVGDSVRSDSGLLVVPFLGTEVQQCN

SEQ ID NO: 47589 - protein, 446 aa, Halorhodospira sp.
VKLIRSDKLGVKVHRPEQREALDATLAVYRNLVRDLMTMMMTHWPALGRFEGNAIVKEVERLIHPTSKRPQVRYPYFARRYYKFPSYLRRVAIMDAAGQVRSFHTRFDTWRCGDRRHQHAQPPRLVCATNTFPALYQGQCIRFNERYTEAAIKVFHRGDWVWMHFRLTGAHRYLGTGKQRAPQLVAKRGRYTLSVPVERPITLPRNADVDRVLSVDVGINTAATWAVVDATGTVHARGFLGRCDKDREARLIARIQKAARQHTRHGCRLPPGFCARDHRRLRGLFDNAAHQISRRIVNEALAHGAQAIIVEHLKGWRPRAGRRRSPLRQRFHRWFHRLLVDRIEAKATEAGLRTRTVYPRGTSSQAFDGSGKVLRDQANARLCTFPSGKRYNADLNAAYNIAARGIVSIHRPTRESQAGAQRPKPAATPRSPVTLSSLWPTATATA

SEQ ID NO: 47590 - protein, 580 aa, unknown
  TnpB Polypeptide
MKGGCLSVKTYCSTYIKKKSMASSMAAKLETDIFTYNTMLRSMVRDLGLPHSKDEPTIHVQYKNYGLSDYMVTSMERTASGIRDSAKECLALDIETKEGRIKQANQKIEQLEYQILNMQKIKDSLITRNKARKAGTPIPKFVNYFGSTIYPEPAKDGGLSFTVDFYRGKNRKRKRSPLFFANEYLFEILYVDPYIKKRKRRINQIKGRIHNLETKLSKLKRDMGSKAYHICFGGKKLMRQRSTVVDVNAWHDAFTRRRTREMLLVGRHDATQGNFMVKYDCTTRTLSYTAISGTVITLPNVHFPYGQEDVDAAVSASRITKQNKKLPKDKQIPCWEPGPVTWAIKDCGNTFQVKCMISVQSTQTINSCFDDGCVSIDMNYDHLAVAELNQYGQLMNHFVIPFRMDGRTSNQIDNAISEALEVVFQHAVNVKKPIAMERIKNLKKELVYGNGTRNRKISQFAYGKIEMLAESKAQKYALAVRSINPAYTSQIGKLKYMGAMGLSIHESAAYVIGRRAMGFKDRVPNCFKHLMPPKKRDSHCWAQWASVSTPLKSIPICKFYEKIDYGKYKTMTALKEALTA

SEQ ID NO: 47591 - protein, 381 aa, unknown
  TnpB Polypeptide
VRAVKAVKQNYSPSEPILVLLESFRSMVNDCIRIGLKEGVTSLKALSLKAYRQLHDYDVPSRYKLCAISAATGILRNHRKALRRNPCARSPHAKRLMLTTCYGFKIKDGCLNLPIKPREFTNILLNSHTREVLSGPGLTMRSVCLTARTVSVTFSKEMAEMEPVGLFGLDRNLDNATIATSGGDVRRYDLSEATRIKAVYREVKAHFTRDDVRVRRRIFAKYGRKERNRTTQILHHTSKEIVSEAKAKRFAIVMEKLTGMRRLYRKGSGQGRWFRARMNSWSFSELQRQLEYKARWEGIKVVYVDPRRTSSTCAICGRATTECAGRRVWCARCRTLVDRDVNGARNILARGMRFVPIALPGEGMKQSKDADSMAVELARRR

SEQ ID NO: 47592 - protein, 158 aa, Gloeobacter sp.
ILSVQQAKQKHWSIAIEDLSGIRTRTNQQPRSKTERRRSNSWAFFQLRQFLEYKCRMQGVRLLVLPAAYTSQTCHCDAKLTPWGCYRIGERQGKRFRCLDGCGWSGDADYNAACVLSVLGASVILPRGPWMACRLEGFQNFLYGLESPPYDAKLVPCG

SEQ ID NO: 47593 - protein, 333 aa, Klebsiella sp.
VRFVYNSILRWRTDAYYERQEKIGYIQANARLTALKKEPEFVWLNDVSCVPLQQSLRHQQTAFSNFFAGRAAYPAFKSKRHKQAAELTASAFKYRDGKLYMAKSKTPLDVRWSRPLPSVPSTVTISKDAAGRYFVSCLCEFEPVSLPITASTVGIDVGLHDLFVTDTGFKTGNPRHTAKYAKQLALLQRRLSKKQKGSKNRAKARAKVARLHAKIADCRMDNLHKLSRKLINENQVVCVESLKVKNMIRNPKLSKHIADASWGEFVRQLQYKTEWAGRTLVAIDQFFPSSKRCSGCGYISKSMPLNVRDWVCPECGTNHDRDVNAAIPPGWRG

SEQ ID NO: 47594 - protein, 432 aa, unknown
  TnpB Polypeptide
MKVKRIVRFNIKKSHVDYKYIKTQLIESKEVYNFANYILRQLYFKNSNKQKYSLEFINEYPSLKELFLEYVEGNKKFSSLFYKIICEFSKLKQYSINLKIVQNIVDKLKNDWTCYWKLLEKRKNKTYDKQINIPKYKKKYNLVEYNNQVMSKKKLKLGYIGTDKMKQGIKISNRHKDLECKCFRIYTKNDKILCELVYESEVIEIEKTDRVASVDLGLENLFTVAFNYNKKGVSIKGTKLKAINQYFNKTKAGLQSMLPNKVYTSKSINRLLYKRGEQLRNYIGYYTNKLIEILKVERISKLVVGYNKGWKHEINLGSKNNQNFVSIPFSKILDILKYKLEDNGIEYIEQEESYTSKASYLDNDDIPVYRAETEELKFSGRRIKRGIYKSKQGKIIDADLNGALNILKKSGENLIEELEYLRHQNIFTSKLV

SEQ ID NO: 47595 - protein, 402 aa, Escherichia sp.
VKRLQAFKFQLRPGGQQEREMRRFAGACRFVFNRALARQNENHEVGNKYIPYGKMASWLVEWKNATETQWLKDAPSQPLQQSLKDLERAYKNFFQNRAAFPRFKKRGQNDVFRYPQGVKLDQENSRIFLPKLGWMRYRNSRQVTGVVKNVTVSQSCGKWYISIQTESEVSTPVHPSASMVGLDAGVAKLATLSDGTVFEPVNSFQKNQKTLARLQRQLSRKVKFSNNWQKQKRKIQRLHSCIANIRRDYLHKVTTTVSKNHPMIVIEDLKVSNMSKSAAGTVSQPGRNVRAKSGLNRSILDQGWYEMRRQLEYKQLWRGGQVLAVPPAYTSQRCAYCGHTAKENRLSQSKFRCQVCGYTANADVNGARNILAAGHAVLACGEMVQSGRPLKQEPTEMIQATA

SEQ ID NO: 47596 - protein, 415 aa, unknown
  TnpB Polypeptide
MQVAKSITVKVSKRINRDKFLSLRNFFNTYQTIARFYYSYILENSLEEKLVSGEITSKDLKNILHQKLYRQIRETFDIGSQTVQEIRDTVVGVINSYAQLVKNGKKASLPKVEEFTVRLNHPRVVSVFEHGKEFDFFFKVKVNGDKRVAVPIECGEMQKQLLKDALNGKYKIGAFQLVKRDGWFYFVIPIKKEVEIKQKYDGVVGVDLGLRYNAVITLLYKNGKITKVEFLKYRKLMHKIRELWYRIDELKSMLPEGQNTSKRIQRLWKRIRRINDWIAHNVSKKVVEVAKENNSMIAMENLKRLYPVKGKNSRKNNRRISNWIRGKVVRYTIYKARWEGIRVKLVNPKNTSRICHLCGAEGFRKDAIFVCKHCEHTYNADFNASVNIGIRATLPNAKGCVNHPVGLIALQSHPF

SEQ ID NO: 47597 - protein, 446 aa, unknown
  TnpB Polypeptide
MKIMTAYGVGIKHYNHILKDSVRIYRDAVDFLIDVCLKEWASISVINGLQSRCIYVESLVHKTKKRPTVPYSFDHEFYKFPSYLLRSAICCALGKVSAYLSNLENWKNADAKCRGQRPGYPKAGFAFPCLYRGNMYIQTGDYEFQIKVYIRNTWDWIPVQVRKSDMDYIQHHCTGRKRCSPELTKRGKKWVLTFPFEEQVDLHNTPIKKQTIVAVDLGINNACVCSVMQSDGAVLGHKFLKLPREYDCLMHKLGHIKRAQHHGSKKTGNLWAYANGVNDDIASKTASFIVKVAVEYQADTIVFEHLGMQGKKRGGAKQRLHLWKARTVQKIVENKAHRLGMRIARICAWNTSRLAYDGSGRVRRGKKSSRTMSNYSLCEFTTGKLYHCDLNASYNIGARYFIRELLKPVSATKRQHILANVPECAKRSTCTLSTLISLNAELYASA

SEQ ID NO: 47598 - protein, 457 aa, unknown
  TnpB Polypeptide
MAYSVTQRIISKTDTIYDYCDELSRKSKLLYNASLFRVRNIFTGYEKEYRTSNESDVFQEVELLQDAYPNIHVRKVISYKHLEKLMRITENPDFFAGLPMQTAQAIVKQAVTDFHNWLKALKAYAKHPEKFLGKPKMPHYKKDNLSTLTITNQDAVLYAEEVGASLKLPLTKNRVLFSNVSGHSALKEVKIKPYYGRFLLCLTVEGPDREEDSLMPHVCAIDFGTDNFAAIVCDDHSSAVYKGGAVLSNTQWFYKQRAKYVSILTKGHERMHATSSRLKDLSFHHANFTKDQCHKISRSIIDFCLGHQAGTLILGVNPLWKQRICMGTVNNQKFVAMPIALLRAMISYKALDAGIRIIEQEESYTSKADLISNDYIPTYGEDDEKAKFSGTRIARGLYCCADGTILNADCHAAANIMRKAIPDIWKDTKDYSFLSSPKVYGFHELNPESIPVKGIAA

SEQ ID NO: 47599 - protein, 408 aa, unknown
  TnpB Polypeptide
MNVVLTEQIKLTFTSEQDQIQADHAFSEVTRRYADACTYVSEYYFRDGCVDSFQSLHHLLYKDVRFMFGLKSQMSISVFKTVLARYKTVEEQVKQQTVSYSDENGTNYLFRKSLDWLQYPIHFRRPQADLVRGRDWGFLSGMAKVSVNTLSGRVKCMYECRKDSRLFDPSWKHGGAKLVFHESDKNWYLHISVNKVFPETDRSKIRTIDGHDRGLINLTTSYKEDGTVLYQDGQHVCKVKGRYTKTRASLQSKGTKGAKRVLRRISGRENRMMQDKDHCISKTLVTGNREHTLHVFEDLSGISFENLESRDASGRYALRSWTFYSLEQKTAYKAAIRKGMILKVDPKFTSQRCPACGTVDKTARDRLHHKYTCKHCGRSYNDDEVAAINLRQLGLLYVSGIDEPSFSK

SEQ ID NO: 47600 - protein, 249 aa, unknown
  TnpB Polypeptide
LKNFLTLSSHGSTCGRKTTRRILPATANTETNDRAVRSRSKKTGSNTTPTTTASDSRKVPISKGYWSDFLLCEYQTRPDVDLSEVNSVQNVRAVWNGDEWELHFVCKVKLKTNDSTGNEVAGIDLGITNIATVAFPDEYVLYPGNSIKQDKHYFKRSEYDTEGKNGPSNKSTWARRKLADRETHFFHVLSDTIITECVERGVGTLAVKRPEDVRDSDWGRPATRNSTRGRSIASTSTSNTRAKNVESKY

SEQ ID NO: 47601 - protein, 440 aa, unknown
  TnpB Polypeptide
LVLRGIDGTKWEHRPLPHLKAYRLKLYPSRRQASTLARHAGACRWLWNHLLALQKATYEAEKKFIFFHDMSKMLPGLKMEYPWLAEAPSNSLVRVCRNLDLALKKCFREGAGFPRFKAKGRARESFYVINQAIRIDGEGRRAFLPKLGEVKFRTGRIPEGTVRGANVAWNGRAWELTVQCVVEESVPQVEAQAATVVGMDLGLKELMVRSDGVVVKPAKCLRKALKRLRRAQRKLARRQKGSANRKRQARLVGRIHAKVRDTRRDGQHKATSALVAAASAVVTENLNIVGMMRNRHLALSIADAGWGEIVRQIGYKCEWAGKGHIKAGRFEPSTQTCSSCGVRKSGDDRLRLHQRAFRCACGAVQDRDHNAAKNLRRIGLAALGLTEVEDVGQAMPELAVEVLSIADACGETSGGRDAQATLSHASRKQEADRFSTEVSV

SEQ ID NO: 47602 - protein, 304 aa, unknown
  TnpB Polypeptide
MIYGERAFKNFLKGLSGFPVFKKKGKNELGAYFVKNSKTEFEFYRHKIKIPTLKFVRLKEYGYIPKNTNIKSGTITKVADRYFLSLIIKIEDTVKVTNTYNKGLGVDLGIKNTAVCSNGMIFKNINKTKRVKKIEKKLKREQISLSRSIEYSKANKIKLKDCKNFNKKKLQMQRLFYRLKCIRADYNNKIVDKITRTKLKYITIEDLKVSNMMKNKHLSKAIQEQNFYSIRTKLINKCKERNIELRLVDTFYPSSKTCSCCGSLKKDLKLKDRIYKCSNCGLEIDRDFNASINLEKAQVYKVIA

SEQ ID NO: 47603 - protein, 430 aa, unknown
  TnpB Polypeptide
MRQVERHWIKEGHALYSVCDDLTFKAKNLYNAGLYQIRQSIFERNKYKEEEKPSVLSWVALVSQFQKEKQYDMLALPSKVSTNVLKNLGSSIGSYYKLLKIFRDKSNLSVTRKPQLPRYLHKTEGRYVVEFTNQTFSKKRGLKGELVLCPKDLSLVIPTKVKTPKCVRIVPKLKAFIIEVIYEVEVSPLKQTGNYAAIDLGVNNLATITFSNKANPLVVKGSQLKSINQGYNRLISKAKSKLTANQKTSQHIHRLWRNREMKLQAELHKITSFISLYFDEMAIETVFIGKNQGWKQEVSLGKKTNQSFTQIPFNTFISQLTYKCLVKGIIVLEQEEYYTSKASFVDKDDIPVYDNAQTKPQFSGKRISRGLYKSKDGRVLNADVNGSYNILVKGLLSLGKILNRETVSFHTRSLKRWQSVSNKTLLSQYM

SEQ ID NO: 47604 - protein, 408 aa, unknown
  TnpB Polypeptide
MILVEKHIIKSKHKNYDELDNLCWLSKNLYNSTLYNVRQYYFENKKLLKYQVVNKMYVDTNNPDYRALPAKVSKHTQMLVEHNFKSFFELLKLKAKGKYNKPVKIPKYLNKKTGRQAVHYEKGAISFKEQGYIRLSKTNIKIKTKLTKNKVQFVRLVPKNNYIVIEIGYNIQEKEVQLNNNVLAIDIGVNNIASCVTTDGDKFLINGKPLKYINHNYNKRIADIQSKLKLTHDKNKSRYTSNITNKRNNRINDYLHKITTYIVNQAVSKNIATIVVGYNKEWKQDTNMSKSNNQNFVNIPFYTFISMLEYKSKLKGIAFKIITEEYTSKCSFIDEEEIERHTEYVGKRINRELFRTKKGIVINADVNGAYNILKKYMIKNETWNEKISQTLVKVCSIPSVRKINLALA

SEQ ID NO: 47605 - protein, 371 aa, unknown
  TnpB Polypeptide
MILAKKIRLYPTEEQEQKLWQSVGTARFIYNWTLNRQEESYKNGGKFIKDSDLRKEITRLKKDKLSWLNEVSNNVAKQSVKDCCNAYKNFFKGLVDKPKFKNRKKSKPSFYNDTSKLKAKEKSVLIEKIGWVKTKEQLPMDVKYTNPRISYDNKYWYLSVGIEEEMPVVQLTGESLGIDVGIKDLAVCSNGMTFKNINKSKEVRRLKKSLKRKQRQCSRKYEKNKKGKEYVKTKNIAKLENQIKLIHRRLSNIRLNYIHQVTRMIVKTKPSRIVMEDLNIKGMMKNKHLSKAIAEQCLYDFKLKMKYKCEFCGIDFVEADRYYPSSKLCSCCGSIKKDLKLKDRIYKCSCGLNINRDYNASINLSRYKLAI

SEQ ID NO: 47606 - protein, 430 aa, unknown
  TnpB Polypeptide
  misc_feature (355)..(362): Xaa can be any naturally occurring amino acid
MVMKQIITIQARLFPKKEEKECLDNLMRKWNSCKRYAYNRLLEGKTRKVLKKELQQLFNLNSKYVDDAILEANEVLQSTKELGENPGKVVFGGKDLFSKLKSKHLSIKQRQKYKKEWLDKRKGTLFSRGDKTKQGNLNLRVIEEKGQFFLRINTGNREWLFIQLKSSHKKWRKFEEAMLNTCPYSARLQRKNNKYYAYISFEEDLPDTAIDFSNGAIGVDLNAFPSHIAWAEIKKDGNLESFGEIPTPHLWDGRKEKRDYFAWVYANEIVKLALKKNKGIVIEKVAIKDKGFRGDCKGRKSRRIKHSFSYRKLISRIKTLAQRYGVAIREVSPAYTSVIGMLKYAPQFNLTKDTXXXXXXXXSLQSKSRSVSLVTEGRNEGTAVKGKTLPYKPWRVLRVALLTGALLDRPLYRDLSPLKRILVSGMGEGG

SEQ ID NO: 47607 - protein, 399 aa, unknown
  TnpB Polypeptide
MYLQRCGVMCNNMLLRAYKFRLYPNPAQTSLLERHFGCARFVFNWGLSEKSRSYSERQEKLSCLALMNRLPKLKAELPWLTEINAQSLQMALRNLDVAFTNFFKKNTDYPTFKSRKGRQSFQCPQSCSVDFEKAVLHIPKVKDIRVRFHRRFNGKVKTVTISRTPTGKYFASILVEQDGEEPSLAPVTENTLGLDVGLKHFLITSDGEKVSNPKHLRRSAKRLGRIQHAFARQQKGSGRRQKRKKQLARLHEKVASQRTDFLHKVTHRLARENQAETYAIEDLAVKNMVKNHCLARSISDASWGQFFQFLSYKAERAGKNVLTIGRFEPSSRRCSVCGHMNQGLTLKDRDWDCPGCGTHHDRDINAAKNIRIFALLKYHNSTAGSAETHTLRESGLVGG

SEQ ID NO: 47608 - protein, 401 aa, unknown
  TnpB Polypeptide
VLPVFSLTYEFKLKPTVNQVSLFENWLEQCRRVYNYALAERKAWYQSRSCQINVCSLHSEYIIPADAPRPTYASQCKSLTAAKENQLALKEVQSQVLQQTLKRLEQAFVSMWERNFGFPRFKKPGRMKSFIFPQLGKKPLLKGAINLPKIGSVKFRQSREVPGDANVKQARIVKRASGWYVMLTLQWDVIVPQSIPCGEPVGVDVGLLNFIATSNGQTLPRPKFFVELQRKLKLLQQRVSRKKMGSNNWHKAQQKVAKLHEHISNTRKNFHWSIAHSLCNQAGMIFVEDLNCKSLAAGMLAKHCLDAAWSQFFNILQQCCFKRGVFFMAVDSRKTSQICPNCQIETGKKDLSERVHQCHSCGYQTDRDVAAAQVVLSRGLAAVGHTVKMLNEGKVIGLPVS

SEQ ID NO: 47609 - protein, 421 aa, unknown
  TnpB Polypeptide
MSFSESYRYRAHPSDAVAATALEQIDGHRQLRNHARHQYEQATYSEKPSAYDQHKQLTAWRKEYDEFRELNSKASQRTITQIHRDLETLDALAANGHDVGTLNWKAPREFRSVTYNQSGFKLLKKSGQTHVHLNKIGDIPITQHRPIPNDADIKEVALKHEPTGDWYVSFSVERDVETDVPETSDINPSDCVGIDLGINTFIHDSDGREINRLDLTDDRERLEREQRSLSRKQRGSNNWSEQRRRVAGVHASMTAKKHDFKHKIAHFYTTTYDAVFLEDLNVTGLMQGPGSARNTVEVGWRDLITIFEHHGRKNGCHVETVPPEGTTKQCASCGVSVEKPLWVREHQCPSCGFESDRDLNAAANVLKRGLEQLGVGHSELTPAETATAVSTDGGDASVRVDASGVVESGSPAIKETVSPVG

SEQ ID NO: 47610 - protein, 384 aa, unknown
  TnpB Polypeptide
MIKGFKVRLFPNEVQTQLLWRHINVSRFVWNYALAEQFNRYKNGEKHLNKYGMRDIFITLKQLEEYAWLKEISAHTIGNVCIDLDKAYTSFFKKIGGKPKFKKKGKCKNAFPVRYESMYFINDCVNIEKIGKIKYQSDKELPQGRNACKFTNPRIAFENNKWILSFGMECENQARELNDFSVGIDLGVKELAVVAYGENHKVYKNINKSKRVKTLKHKLVHLQRKVSRKYETNNKHKIYDTKWYKSNGILKTEEQICKICNQLSNIRKDYTHQTTHEIISLLPKKVVMEDLNVSGMMKNKHLAKAIAEQMFNEFIRQMKYKCEYNGIEFVQVDRFYPSSKTCHKCGCIKHDLKLSDRTYICSECGEVIDRDLNAAINLANYSKV

SEQ ID NO: 47611 - protein, 418 aa, Halorubrum sp.
MLETTRTYVARITNHQQVRDDFDQCGFSASKLWNVGRYYIQQRWDDDGEIPDEAELKSVLKDHERYSDLHSQSSQRVLEELAEAFTGWYNSDDGNNPPGYRKRGDRHPRSTVTWKQKGITHDAKHNRVRLSKGWNLKESRSDFILAEYETRPDVRVENIQQVRAVWNGDEWELHLVCKKEIPVEDAPGDKTAGIDLGISNYLAINYEDGSSELYPGNVLKEDKHYFTREEYQTEGENGPSKRARKAQQKLSRRKDHFLHTLSKHIIHRCVEEGVGKIAVGDLSDIRKAENGGSRNWGTSGNKKLHGWEFDRFTTLLEYKAEEHGILVDRVDEENTSKTCSCCGQIRDANRVERGLYVCSSCETAMNADVNGAVNIRRKITQSPPTGDMSNGCLAQPGVFLFDRESGRFTPREQGDCKP

SEQ ID NO: 47612 - protein, 365 aa, unknown
  TnpB Polypeptide
MTINKAFKFRIYPDSQQRQFFAQSFGCVRFVYNHFLRQRIDYCAETGKGLTYPNNASTLTQLKKQPEFEWLNDINSQSLQQTLRNLDIAYHNFFNKRTQFPKFKKKLSRQSFGVPQHFSIHDNLLDIPKCKGIKIKLHRIIEDTMKSITISKTSSGKYFASILCELEIPEPIYSGGEIGIDYGIKAFITTSEGEIIESPNYLRKSEKKLKQLQRSLSQKQDNAKNRYLAQKRLARQSEKVSNQRQDFLHKLSKQLVCENQAIYIESLAIRNLIQNHCLAKSISDSGWNTFVNMLKYKGNWYGCRIIEIDRWFPSSKRCHICGYINDNLTLKDRSWLCPECNTNHDRDVNASINILTFGRAGIART

SEQ ID NO: 47613 - protein, 426 aa, Halorubrum sp.
MAKQVVTRTYTASIRNQSRVQDDLDSLGFAASKLWNVGRWTCSRIWDEIDHIPNHNELTTYLKTHERYDDLHSQSSQRVLQELAEAFNGWYGKRRNGDTRANPPGYRKHGDEHPRSTVTFKAAGFKLDTQYNRVRLSKGSNLKEYWSDFVLCKYQTRPDVDLSAVENVQQAKIVWTGDEWELHFVCKVEIDVDEAPGEKTVGVDLGINNFAALAYEDGHSELYPLNCLKQDDYYFSKRIARCDDSNSDQATRLNQKKSARRTYYFHTLSKHIVQRCVDEEVGTIVVGDLSGIREDEENAESKDWGMHGNLDLHSWAFDRFTDLLEYKAEMEGVTVEQVSERDTSKSCSCCGRKCDANRVERGLYVCDECGTVANADVNGAENIRQKVSPSPATDGGDRSNGWLAQPSTFLFDKETGAFVPQEQVTS

SEQ ID NO: 47614 - protein, 436 aa, Halorubrum sp.
MEDVIRTVKVKLDVPEGRCDDLHQTKEQFLHCANTTAAWAWRHPDEHCVTSKQQAETALYDRLRNETELTANLVQKGIRRAIEATKSGVARLKKGETTSQPQFDAWSVVYDKRSATFHRDHVSLSTVNGRVECEYVIPDDPEETPIGEYLLNEDYEFRMSTLQYDRSSEAFYLHARMRRTTDEQDENKQPTAASSDAEHRTVLGVDLNVDGSLAVTSTGAFIGNADEMNHRRREFEKTRGSMQQTGTRSAHLSIQSMDDREHRWIQDELHRASNQILDEARNHGCTHIAFEDLTDIRDRMAGAKRFHAWAFRRLYEYVEYKAEMLEIEVEQVSPAYTSQRCSRCGFTHERNRGSKHQFACQKCDYELNADYNASKNIARKLLKRLHSGQTSSDGGAPCQCALKSGTLNLKGGFTASVDSTTEGESTDKPTTSVVGH

SEQ ID NO: 47615 - protein, 322 aa, Enterococcus sp.
MEQLKAYKFRIYPTEEQEIFFAKSFGCVRKVYNLMLDDRKKAYEEVKNDSSKKMTFPTPAKYKKEFPFLKEIDSLALANAQLNLDKAYKNFFRDKSVGFPRFKSKKNPVQSYTTNNQNGTVALIDSKFIKVPKLKSLVRIKLHRQPKGIIKSATISRHSSGKYYISLLCKEEIIELPKTNSTIGIDLGIMDFAILSDGQKIDNNKFTSKMEKKLKREQRKLSRRALLAKNKGTNLFEAKNYQKQKRKVARLHEKVMNQRTDFLNKLSTEMIKNHDIICIEDLNTKGMLRNHKLAKSISDVSWSKFVTKLQYKADWYGRKSSK

SEQ ID NO: 47616 - protein, 530 aa, Hyellaceae sp.
MPSQSKGLMIGVEAKIKDHPALNVLGNQYESIRRTGLNDLQRGMSEIAIEKSYQSRFNLQWAWADAIATEVKQTYSQLSTAKKLNIARITEQIRKKTKRAKSIFKSLSKVKNPTVKQKNQASGLKSKLLKIESLKKQWEQLESSQKLHICFGSKKLFNAQYHLKENGYSNHEEWLHDWRKKRGGRFFCVGKSQHGGGTMIKIFHVNGDDFKAVVTLPRFMQSEHGKTLEIPFQVAECRRRRKSSLLYAIETQKPITVQIFRREHKSDNWYIHLTTYVQEIPVTTSFDNGCIGVDFNRDSVEWAYVLSDGNIKERGKISFKWKGFSSGQRQVMMRNLVVKLSDLAFDYQCPIAIESLDFSKRKASMSEASKAYNLMLSNLSTSTFREALFSRCKRYGIGLHKVNPAFTSVIGMIKFMPRYGLNSGTAAAMTIARRAMGMSERAPQCLVKPEDLARHSWTTWNRVARYLKSNKVRRSKLFDWMKTLEEIVLVGSDAGETDSTPSLASKQSNRQKTGNSPSPDPKYVQLCLGF

SEQ ID NO: 47617 - protein, 436 aa, unknown
  TnpB Polypeptide
MGAPRVVRSLSFPVADMPAPLRWLLGEFRLIVNRSIRIALREDILSRFRLSKAAYRALSEAHDVYKQFIPSAFEVAMATLKNYRRRVRKGKRTSVPYLRRLLLKAENQSYRFDRVTGRLRIPIRRSERVEFDLPLSEWHRSFLSDPAWSLGSLTVTPGRIILAVRKSAPEPYAPAAAIAFDTNEASVDGVAVHDGVATLVTVPFLDVRVVQATHFRRRRRLARKKTHDRRLQRELLDCEGRRERNRVRQRLHVVSKRLVQVAKSSISAIAIENLTLHGAGGRSRRMNRRLSSWPRGELHRQIEYKAALAGVPVIKVNPAWTSKTCPACGARRRDRVGKDFVCLVCDWEMDRQHNAALNILKTALASHEALARAVRFQPGALRHDVVSPLYDLLRGGGGAREEPSGVELGVQKQPDRTCGTQPEPRRGRGRLCVREI

SEQ ID NO: 47618 - protein, 443 aa, unknown
  TnpB Polypeptide
VLFRTARIELRVTPAQRRRLFGLLRSGGDVWAALLEVNRIRFRRHAQPIFGYQAWCREAAGVSVGELSAAVIASVLRRYSSACFETAKRKRAGEQARYPRRRRALVPLRWRAGMFRVEVQRVRVSVAAGAPPCWLRLSRPIPYPQESLRSVTLLVEAGRLVLDVTAGLEVEVHDLDAGRVAGVDLGIIHPVAAQGLESALLVSGRAVRAEERLHLADTKARQRRMSPKEPKPGQRGSRRWRKLRAQQRRAEATHLRRVRQAHHEAARTLVDWAIDQRVGTLVVGDPQGITHQDAGAVHNWRLRTWRRTHLMGAILDKAALAGVTVDRVDERGTSSTCPACRRRVPKPAGRNFSCPHCGHAGHRDLVAAHNIAALRGGTITTNQVVVEHRRVGTPTQRRDRRRHHMDARRSCPAPGRPAHHDGESLADPCEDQPTARPNSAHVG

SEQ ID NO: 47619 - protein, 259 aa, unknown
  TnpB Polypeptide
MVKAIKVMLIPNNVQQTKLFQYAGASRFAYNWALAREKENYEKGGRFIPDTELRKEFTRLRNSDEYAWLLNVSNNVTKQAIKDACSAYKNFFKGLQRYPRFKAKKKSMPKFYQDNIKIQFRDTHVKFEGFSFSRKANKQKLNWVKLAEHGRIPTDAKYRNPRVSFDGLNWWISACVEFPDCRDRSNHDGIGIDLGIKNLAICSDGNTYKNINKSQTVKKLEKCKRRLQRSVSRKYEHNKKGGSYCKTNNIVKKKNFYLK

SEQ ID NO: 47620 - protein, 685 aa, unknown
  TnpB Polypeptide
MRAVKHKLKTLTTEQKNKFFDVAYAYQFEKNYFSDQFLNLWNRSHETSLINLQSSYIQIRNKLVKDGYKSKYNLPARLWKMALKEAYDLHIRTHEAQVALIKKNLNNNLYQYCHFELIERNKMEEAELAIIQSFENFLYFATNSLFFNFKTFCQFETKYFSKKFHKARVYQRAKTLLIDLLKPSNAVKKEVLTKEEAKQLTQLLESEDNPLFKRLFQHYCHGLVKAIQKFRGFKQIQSKINPTITLDGDCYDLYSKYDNEANKNRWFLDIMSMESENRIKGLELTGYHHAKQIMKHRKSANLTISFDPNNLEDGFYAHFTFPIRPVKSIKTKKNTKKSKQQTKDYIERKCEDITGDMQPVLSITTMQTVGGDFGLTECFTFSDGWVAGANQGEMLREITEYTTQAVKNIQKHSKKGYFGVEKNNIKCTKYTKGKKCKNNKRNHKNNCFNHNSELKNVNRHYNKQQERYNRRLENYKHQFMNEIIDHFTTDNIYGQYASNTLLKKQPIQLVFEDLDFVSLGYTKEQKRQINLIKGVLTLLEEKIKLYNLPIEIIYVNPAYTSQTCPNCGFVAKKNRDYQARQFRCQHCGFTANDDVRYRLVSEFVRDSVASGGPAKAIAMLPSADDYIASQNIAMRPSVLLDSQRLRVRKIKEFLLARHEQVKLKGSCKMFGVSNDSDDSKSSDYQ

SEQ ID NO: 47621 - protein, 378 aa, unknown
  TnpB Polypeptide
MNKAIKYRIYPTREQAVLFAKTFGCCRKVYNLMLADKMESYQATGKFVAVTPAKYKKEYSYLKEVDSLALANAQINLQSAFRSRFTKKRKRKNGFPKFKSAKKSRKSYTTNNQKGTITFMDSRYIKLPKVGKVKAKIHRQPEMDWQLKSATVSQNSDGKYYVSVLFELESQPSAYVADKTNAIGLDYASDGLYVDDNGNKGTNHKYYRESHRKLAKAQRRLSRMQGSKKKEEKSANYLKQLKKVNRIHRRIANQRLDNLHKISTEIANQYDVVCVESLNMKSMSNKKFGNGKSTMDNGYGMFLKMLEYKFADRKKYFVKVDKWFPSSQICNGCGKVHSEMKNLNNRIMKCDCGLIIGRDQNAAINIKKEGLRILKSVS

SEQ ID NO: 47622 - protein, 419 aa, unknown
  TnpB Polypeptide
MRAFKFRIYPTLKQRKQLQKEFAASRFVWNWSLDQKDSMFKLYGFKHNVVTLSRDLTCLKKHESWLLKASVTVMTNTLYDLDEAYKKFFRHEAEHPKFKKFKNSVCYQMDKRQGTHIFQSGKLLKLSKLGPIDVKWSDEVPVFPNSATISKRPNGDWYVSLQVDCTKPMKLKSHNKIGLDLGIQSFITTSDGDKIAPPIPYKLSKRKLKILQRRFNKTKKKSSNRAKARIKVANLHQKISDQRKDFLHKLSTTIVSENQVIAIEDLKVSSLAQGKLASAVTDCGWGMFTIFLTHKALWNGRELLKHPRYERSTGVCPNCNYVTEKLPLNIRSWKCPCGLTHDRDIAAAQVILKHTVQNTVILNTARSAGSLITKACGPAKPLDDREAIPENRGRVETGKSLLRPKTRRFSRPLKSAALV

SEQ ID NO: 47623 - protein, 400 aa, unknown
  TnpB Polypeptide
MLLAYKYRAYPSGMQEMRLKRSLHALCQLYNILRAEKIRQHHLNHKNLTLTGLRAMALEIRRSNPKLIQVHSQAVQNVADRVYRAFQNYFEGRARFPHAKKQKDYRSLVYPQSGFKLEADGRLQLSKVGKLRVFQHRSLQGVIKRLVIKHDAREWYIILLTEQGTPEKRDIDAVPLDRIRGGDLGLERYLTLDNSESANYPEFLRKSEETLKQLQRHLSRKTHGSRRYRLLAFRLARLHLHVARQRMNWQNQLVAELYQQTDVLVLERLHVAAMLQNHCLAKSIQDASWSIFARKCIHTANRLGKLVVFVDSWGTSQFCYNCLTWVPKTLADREHLCPVCGVRLPRDVNSAKLVKWLGLSTALACSPPDRGLSPAEQKPLPIASLRGLVSRSRDAGSPRL

SEQ ID NO: 47624 - protein, 408 aa, unknown
  TnpB Polypeptide
MKRAILLQTDPTTSKAHALNRFNQDALLLANTLLKARTSKHLMELHTRTYHDSKKATGFNSQVVCDIERSVIRCKGNVLEAVTVKFNVPRNCHTFQTKKRFFVEFVPYPRRRIAVPVRNNENLRRYRHLIESGWTCKTYGLTANQQVVAYLQKEDTTAQPPGRENTLGVDVNSKCFAITILSPEGRVLLQTYMGKDIWVKRKRMMIRKARLQSLADRGSHRAQRSLNRLKTRERDFVKNRVGEVVRDITLLALQYDANMAIEELKRFSPKGRRFNREVLRMPFYQFRQTLEARCFDKSLVLVPVDPYHTSKWCSRCGAVAARGHVSDNYTLFKCPRCGLTVNSDRKASLAVAIKSLLARNPSPDQRWFQVAGRRVPVSGLLRSDEEAAWHSVPQTATADGKPTTFSRG

SEQ ID NO: 47625 - protein, 349 aa, unknown
  TnpB Polypeptide
LLLTFKVKHGRDLSQELGKARQVAEFAVKTHSCSSRDVKHIGLKSAIANQILRKYSHNDKARKVSRVVLTVPGQSIKTNKKQKTVRVPCLGLELPYWFRNDFTKINQIELDSQYAYVTATVPEPKPVKTERFIGVDLNTTGHCAVAANPQTGKVWKLGKSAEHVHKKYREIRRTLQRKGKFRKLKTVRKREKRKVRDLNHRVSKRLVQIAAANRCGIKMEGLKGIRSSRKHARAFQYSLNSWSFYQLQRMIEYKARLHGVPVAYVDPANTSKTCSRCGQLGSRNSKEFKCPGCGHVDHADANASFNIGTALAVRVAGRLRADSDACKGSIDTPRWATPVNGGDPRTPRL

SEQ ID NO: 47626 - protein, 367 aa, Veillonellaceae sp.
MVITRGYKYRIYPNAAQASCINRTLGCCRFVYNHFLALRRDEWNVNHVSIRYEDTSRLLTEMKRREETSWLKEVDAVALQQSLRTLDKAFQNFFQKFARYPRFKSKRRHQQSYRTMSKSGIRVEGNHVKIPKLGNVRIAKSRTFEGRILNATITRTASGKYFVSLCVEEDASFAPCGTGKIGIDVGLKEFFTDSNGRTVSPQHILHKHQRKLAREQRRLARKMPRSRNHDKQRIRVARVHEHIKNIRKDFLQKLTTRLVDENQVIAVEHLQVKNMLRNHHLARAISDASWSEFFRILRYKAAWRGASVLQIDAFYPSSQTCSYCGHRNLIMKDLSVREWICPTCGTHHDRDENAAKNILARALGHKV

SEQ ID NO: 47627 - protein, 371 aa, unknown
  TnpB Polypeptide
VTKSKKIRIYPTSDQRVLLRQWFGTARFTYNKTVAILNTTDTQANWKAIKTGILHDLPDWAKETPYQIKSVAVRDACIAVRATKKTGEKQFVSFKSKRQPSDSIFIPKSAIKPKGVYHTILGALFMSEALPDNIKDSRLVKEGDKYYLCVSYTVATSKRKSNGRVVALDPGVRTFLTYFHERGFGWLGHHAINRIQRLCFHLDDLLSRASKANRQSKRNMRKAANRIRKRIRHLVDELHKKTARWLVDNFDIILLPTFETSQMTCKAGRKLHKRSVRQMLTLSHYRFKQFLKHKAKETGCIVVGVCEAYTSKTVSWTGEIVQKLGGAKVIKDSWGLRMDRDLNGARGIFLRALGDSPWLLTISNLQTMHSA

SEQ ID NO: 47628 - protein, 380 aa, Nocardia sp.
MGVQVVKRAYRYRFYPTPEQAEQLAMTFGCVRYVYNRALTERSRAWTEDRRRISYAESDKMLTAWKRDPGTCWLTEPSKGPLQAALRNLQVAYDKFWRKQAGFPAFKKKNRSKDSATYYSNCFSFRDGKLRLAKHREPLAVRWSRPLPTGARPSQVTVSKDSAGRYHVSILVETSVVPLPTRVDTVGVDAGIISLYTLSTGEKIANPRHELRDRTRLARAQRALSRKRRGSANRERARRRVARIHARIADRRRDHLHKLSTRLVRENQVIAIEDLSVRNMLRNRSLARAVSDASWSRFRSMLEYKAGAHGRTLVAVDRFHPSSKLCSSCGTVAEAMPLSVRAWVCSCGAEHDRDVNAAKNIRAAGLAVLACGDGVRPSRS

SEQ ID NO: 47629 - protein, 409 aa, Glycomyces sp.
MPSVRTAYKCRLYPDPDQQAMLSRTFGCVRLVWNKALAERNRTWEAEGKQTTYGEASAALTRWKRTQDFAFLKEVPSVPLQQALRHQQAAFANFFSGRAERPRFKSRSGRQTAHFARSAFRLNNGELGLARIVSPLKFVWSFEGVDLASLEPSMVVVSRDPDGRWFVTFAADTADPDPEPAIGRSVGIDLGVKDFAVTSDGQRITGPRHLDRKARNLARYQRRMARCQKGSANRIKAKAKVARAHRKIRNARADFLHKTSTRIVRDNDLIAIEDLAVANMVKNRRLAKRISDAAWGEFRRMIEYKAERAGRTLAVVDRWYPSSKTCSHCGHLLDRLDLSTRAWRCPTCRTWHDRDINAAKNILAAGRVAAGQPPGEACGADVRRQGSSLPQSAMKQEPPRARAQGVPAH

SEQ ID NO: 47630 - protein, 312 aa, unknown
  TnpB Polypeptide
MVTRRNTFRLYPNAAQEKVLYEWRRLHCYLYNSALADRRDSYQRENKSVTYFDQQNRLPEFKKVWVEYKEIGSQALQATLKRVDFAYQRFFTKKGGYPKFKSIRHYSGWIYPAGSGWKALTDGVNGYLDLSNLGKIQMRGSARQWGNPSTCTILNRNGKWYASITVNCELVCVAGDGAIGLDFGVHHAVAMSDGEIIEAPKFLAKAAKDIKKASKEKRRKRSPNRKKKIKASNRYKKAQRKGSVLIRKVGRQRQDWVHQVSSNTGFVKRGESSSTANPTYCGGLQQLGSKKRKKHSLLDGNLETPSSRSRVG

SEQ ID NO: 47631 - protein, 280 aa, unknown
  TnpB Polypeptide
MGKFRTTVRIFLHRAIQGTVKCLTIKYQAGEWYAIFITEREAPSKPPLGAIPAERIRGADLGLERFMTLDNSWSAEYPRFLRRSEKNVKQLQRRLAHKNKNKKRGSKRWRQVCLSLARLHLHIERQREDYQNKLISELYRDNDALVLERLNVEGMLKNHSLAKSIADASFGRFIRKAMFKAEMLGKHFIPVDPWGTTQFCYNCLQWVPKELSDREHRCPNCDCGEELPRDVNSAKLIKRLGILRLRCPPSDGGSSLAEPSPLPSLRGMVRLGVEAGSRRS

SEQ ID NO: 47632 - protein, 404 aa, Symploca sp.
VLKAIKVRLYPTPEQGLLLAKSFGCARWYWNFALNACIQHYQETGKSLKLAVYKGMLPQLKKEYPWLKEDCYSAVLQCVAINLNKAYTNFFAGRAKFPRFKSKQGKQSIQYPQNVIVKGEKLVVPKIGELKAVLHREITGSIKTVTISKTSSNKYFASILCETEDLSQESLGDKTLGIDLGLKDFAIVHDGEQARRYSNPKHFQRQENNLRRKQQKLARKTKGSKTRENYRKLVAKVHERVSNTRQDFLHKLSRKLVDESQVIVVENLNVKGMIRNRKLSKAISDVGWGMFVNFLAYKLEQKEGKLVEIDRFFPSSKKCSCCGHVIDKLPLDIREWDCPSCGTHHDRDGNASLNIRTEGIRILAMGGGNPVPASGGCVRPPARKGKGQRSSKLEAHTYSLEKCG

SEQ ID NO: 47633 - protein, 240 aa, Burkholderiales sp.
VGNTFRVFHSRTLPEEKIKDGSNFSRDSRGNWFLNIVIDVACAAEARQPVKGVGIDLGLKDFAALSIGKKIGAQRIYRDAEAALAVAQRAGKKKRVKAIHAQMANRRSDFHHKLSTRLVKEFDYIAVGNVNAAGLARTSMAKSVLDAGWSFFRTQLAYKAVKHGAWFEEVNEAFSSQVCSDCGALPDSRPKGIADLGIRNWMCSDCGCVHDRDVNAAKNILNKSGFRAGHGTPVVGIPAL

SEQ ID NO: 47634 - protein, 347 aa, unknown
  TnpB Polypeptide
LNAQSSQKVIEELSDAFQSWFDPRHKTDEANPPGYRKNGDTRPRSTVTFKADGFKHDSENNRVRLSKGSNLKEYWSDFLLCEYQTRPDVDLSEVNSVQNVRAVWTGDEWELHFVCKVELETNDSAGEGVAGIDLGLKNIATVSYPDEYVLYPGNSIKQDKHYFTRAEYDTEGENGPSEKLVWARRKLTERETHFYHTLTDIIITECVERGVSTLAVSWPEDVRESDWGKTGNKKLHTWAFDRIYQYLEYKGEIRGVEVLKKNEWDTSKTCSNCGDNTKANRKHRGLYVCSSCELVGNADCNGAENMRQKITPSPHGEDRSNGCVAQPSVHLFDSESGCFAPREQVVS

SEQ ID NO: 47635 - protein, 499 aa, Vulcanisaeta sp.
VFSLPLLLRRAVAVELEATRELNKLLHSVETAYLNIVREVVEYAVKNNVTSANQLYELFYSKYRLEHQDLNSQLIIQAIRQASEIAKSFMERRRKGLVSKPYPEVRRVSIRFTEDAWSYDQFVKSVAPVRVELSLLGGRREVWLRLHKRFWQYWWRVLSGEARLASTLVVKRRLNKWYAIFAFELKPREEEPRSIVAFDINENTVAVGRIDIETTVSKVADWNKQYLTPQLYTIKTDFGRLARRYERVRNAIIERLKPGFTLPSGKYANITNTREFRKRVKRLRERVRKVGRVRHVANELTKTPAIIVTEELGNNPQEEMIDGIGKDELRHRIKQTPFKALEKAVEEKALERGSKIFHVSSYRNSRVCPIHFTKLERTDDWHTLKCPLGHYVDRDYASVMNMAWKITPESWTKGVWWNMKNLNKNMNWREYEGESNPMIPHPIVHHLHATLREFMASLEQSPAVLARGKPMNPARGANEGWARKPPRPLGRGGGQEVCK

SEQ ID NO: 47636 - protein, 379 aa, unknown
  TnpB Polypeptide
LNPSEEQKIKTHQTIGVARFVYNFYIAHNKEVYEKEGKFVSGMDFSKWLNNEYIPSNQEMKWIKEVSSKARKQAIMNADQAFRDFFKKRKGFPKFKKKKDQDVKAYFPKNNKTDWTLERHRVKIPTLGWVRLKEFGYIPTNSIVKSGTVSQKANRYYVSILVEEKDVEVLKPTNEGIGIDLGIKDFVVCSDGTIFKNINKTSTVKKVEKKLKREQRKLSRKYESLKMRNKNIEEGRATQSNIQKQVVKVQKLHQRLANIRTDYINKTISLIIRQKPSYITMEDLAVSNMMKNKHLSKAIANQKFFEFRKKLTTKCKQNKIELRVVDRFYPSSKTCSCCGKIKKDLKLKDRVYKCDCGLMIDRDFNASINLKNAKKYKTV

SEQ ID NO: 47637 - protein, 478 aa, Mycobacterium sp.
MSRHTTFKFRLDATAAQHDALDRHAGAARFAFNQCLRMVKTGLDQRNSGRHTDVPWTGFDLINAFNAWKKPEEAGRVFSVEKSGLPEIQVTGLAWRHEVCQQVFEEAAVDCGRALAAWSDSRSGRGAGMQVGFPKFKKKNGVTPSFRLRNRHSKRGVPSIRVGDGGRPRSVSLPGIGQLAVQDDTRRLRRMIANGRAKILFATVTRQAGRWWIALNIEAANLHPAHMHSPREPSDSGGWVGLDRGLSTFVVAASEDGTEVARIADAPKALARRLGRQRRLSKSLSRKQKGSQNRKAAAAKLGRHHYRVANARRHFLHQVSNTLVKTHDRLVIEDLNVSGMLRNHRLARAISDAGWTDFARMLKYKQQWRGGTVTVADRWYASSKLCSACGLANGELTLADRTFTCSCGYSVDRDLNAAINLARWGEANYNCHLEPRTPKQRGRATNARRPDGADRHPACAGETIRDEAGTNVHAASVA

SEQ ID NO: 47638 - protein, 336 aa, Methanolobus sp.
MERFNEACNYISNIAWTNHTFGKVAIHKLAYYEIRDKFNLSSQMVVRAVGKVAESYKIDKTCQHGFKKHGAVVYDQRILTFKSTDEISILTLGGRERITIKYGEYRQLNMQRVRGQADLIYHNNIFYLMVVVDVPDADPIDPQGIIGVDMGIVNIATTSDGEVFSGKKCTEVRQRYSNLKAKLQSVGTRSAKRHLKKISGKERRFKKDINHCIAKSIVQTAKDTNRAIAIENLKGIRTNSTVNKTVRTAMGKWAFNELGNFLKYKATLAGIPVFEVDPKNTSRECSMCGHIDKKNRKSQSEFLCVNCGHAENADINASNNISSRGICQLPHRPLSC

SEQ ID NO: 47639 - protein, 382 aa, Methanolobus sp.
MFLTKTVILKIANPDNDLVETMQKYSDGMNYTSKVLFDNGKPMGAMKLQKLVYPYLRENLELKSQMSCNIPRQVAGCYKTLKKNKAKWQRVEFSPTSMTFSYKRDFTIDRDTVKITTINGRKPYSILNYDYAAQYFDGSWEYQASKVVLHNDGEYYFHLSIEKEIPDKEITDASTFMGVDVGINYLAVTSTTDKKCKFFAGGEIKNLRNHYKSMRARLQSKGTLSAKRMLKYISGKEKRLMRDVNHKISKEIVKFALENDISVIGLEDLTGIRNTTVSKVSKKNRHTHSSWAYRQLQTFIEYKARGVGILTHYVDPAFTSQTCIRCNHISKNNRNRLNFRCKKCGYENNADLNGAMNIEHKTRDFRYILESQGYLSATQTNA

SEQ ID NO: 47640 - protein, 370 aa, Methanolobus sp.
MLKAYKYRMYPTKEQEEKFFQHFGCVRVIYNWALEQKIKTYEQDGKSISRFSLNKMIPELYEDKEWLKDVNSQSLRGATLNLDNAFTRFFREKKGFPKFKSKKNPVQSFSVPQYYKVDFDANKVRLPKIGWVNTKLHRRYTGIEKTATVSKTPTGKFYISILVDDEQELPVKSIFNEKVTVGIDVGIKDFAVLSNGEKIKNPKHLKNSIKRLAVLQRRLSRKQKGSKNKVKARLAVSELHEKIRNQRHDFQHKVSSKLISENQAVALETLNVSGMLKNHCLAQSIADASWSSFVTKLEYKAEWYGKTILRIGQFEPSTKICSVCGFHNGKLTLAVREWKCPECETNHDRDINAAINIKKFALDKQNLIGI

SEQ ID NO: 47641 - protein, 409 aa, Planktothrix sp.
MLVLEFKVRAALQQRKAIDEAIRTAQFVQNKCLRYWMDNKGVNKYDLNKYCRVLAHDFKFANELNSQARQSSAERAWSAIARFYDNCKRKVPGKKGFPRFKKNCRSVEYKTTGWQLNLETRKAITFTDKKGIGRLRLVGSYDLHFYQPEQIKRVRLVRRADGYYCQFLLSIDVKIQSEPTNKTIGLDVGLSAFYTDDQGNKVDHPKFLRKGEKKIKRLQRQLSRKQKGSNNRKKTRQRLSKAHLKISRQRKEFSKRVAYSVIQSNDWVAYEDLRIKNLVKNHCLAKSINDAAWYQFRVWLEYFGRKYGKATVAVPPQYTSQNCSNCGKTVKKSLSTRTHVCSCGCSLDRDENAARNILRIGLSTAGHTGTFGLEPINALGELTSTLTGAIPLGQVDSLNKESPVTSLGD

SEQ ID NO: 47642 - protein, 405 aa, Planktothrix sp.
MKLVERHVIKKGHLHYQEIDQLGFASKNLYNAANYLIRQSFIHEQVYLNYYTVQKQLQGTEVYQALPAKVSQQILMILDKNWQGFLASLKEWQSEPKKFLGRPKLPKYKDKEKGRNLLVYTIQALSQPLLRQGIVKPSRTNISVKTWIENIKQVRIVPQLDHYVIEVIYEKEILQQQLAPKRIAGIDIGLNNLATVTFNQAGIQPLLINGRPLKSINQFFNKSKAKIQAKLGNQTSQRLQKICTKRNFKVEDYLHKASRLIVDYLVFHQIGTLIIGRNPEWKQQVNLGKRNNQNFVQIPHARLVEMLRYKAELQGIYVGEQEESYTSQASFLDLDLIPVYSPGQKEKPLFSGQRICRGLYRSSTGKQFNADVNGSLNIIRKAVPNAFSNGIEGVVVHPVRLTPAK

SEQ ID NO: 47643 - protein, 536 aa, unknown
  TnpB Polypeptide
MNEKEYKKKLKQFHKHSDRHILVVETDMSFSDIQKVVALSDKIRKAGNELVGLMRKNYDQLIRTKRYRKLRKLYGSTEEKKKRKVLASQLSEMQKQYHVTWENCRTSMIPIGKKYGIDAVFALTKAEDVWRGIEKCLYANGKILHFSKYGELPCIRAKQINRGIPMSVKDNQLQFKIGKSTFGIQLKDRFQSDEVQAVLNYLAEPELLDKKALQTFVDEKYCINTYRPCYATLVPKLIRGKYRVYLHLTIEGKAKPKYDRFGNPRHKFGEGIIGADIGTQTVAYTSNTEVGLKNLSERGNSIQKSERLERLYYRAMDRSRRATNPQNYNEDGTIKKGRKTWNYSNHYKKLKTKHSELCRINARNRQLAINEDTNYLRSLGNVLITEPKNAGKLMKRAKETTKNNKGKFNKKKRFGKSIKNRCPGGFQMTIEKKFKVSGGRYIEVPSNYRASQYDHTADAYIKKKLSDRMYHLADGTLVQRDWYSSFLLYCYDDKTENVNKTKCSTEFEKHYKREKALIKWIQSKQIKILNSGIKTA

SEQ ID NO: 47644 - protein, 413 aa, unknown
  TnpB Polypeptide
MKRIVVVKLVPTGEQAAALKATLVACNEAADRVSDVAQTSSDRRAFALQKSVYAQLKDAGLSAQPAIRVIKKVADAYAARASNLKAGNYGRVGSKRYVAVTESPIRFRVLAAQPFDDRCLSWQVDSSMVSIWTIAGRLKGVRFVCAPWQRTLLADRKGESDLVFRDGEFYLYATIDQPSAEQVVPAEDPAAGWLGVDLGVVNLAVTTDDDPDSLDDRWSGGAVTRRRKRYRAVRTALQKVGTKSAKRKLKTRRRKERRFATDINHQLSKQIVAQAQRTGRGIAIEDLSGIRERVRLAKKQRAQVHSWAYAQLRTHIEYKAEMAGVPVQVVDPRNTSRTCSQCGHCDAANRRTQSVFRCRGCGWAAHADHNAARNIALLGHKDYWAAQSTEPRAATALAPSWRSEPQTWSFRTR

SEQ ID NO: 47645 - protein, 370 aa, unknown
  TnpB Polypeptide
MKPDTGYMKEARASDRHVKYCRIVRRTLNGVKRWFVQLVVEGLPPVRKVYASKCEVVGIDPGSSRIAYFHERHAAIVEVAPHVDLKEPKIRLLQRRIDRSRRANNPDNYNPDGTVKKGSSTWNTSNRGRRPAAKLAEHHRCLAATRKRDHGELVNDLLQIGGTIKIEKNNYRSFQRCFGRSTNRRGMGKFVEHLKRKAESAGCEVIELNAYKLKMSQYDPATDAYRKKPLKERWHRWGNTGTLVQRDAMSAFLACHATEKGHDRALLLEKWTTAEALLSGSGLCRHEPCSDPEVSKDASRLTKPNCGSKAERERGLPRTLCVRTVTFRRLCPLKELSDGVNPLSSDRGASKALNCRAKDLQQRCGARHSP

SEQ ID NO: 47646 - protein, 402 aa, Escherichia sp.
VKRLQAFKFQLRPGDQQECEMRRFAGACRFVFNRALALQNENHEAGNKYIPYGKMASWLVEWKNATETQWLKDSPSQPLQQSLKDLERAYKNFFRKRAAFPRFKKRGQNDAFRYPQGVKLDQENSRIFLPKLGWMRYRNSRQVTGVVKNVTVSQSCGKWYISIQTESEVSTPVHPSASMVGLDAGVAKLATLSDGTVFEPVNSFQKNQKTLARLQRQLSRKVKFSNNWQKQKRKIQRLHSRIANIRRDYLHKVTTTVSKNHAMIVIEDLKVSNMSKSAAGTVSQPGRNVRAKSGLNRSILDQGWYEMRRQLEYKQLWRGGQVLAVPPAYTSQRCACCGHTAKENRLSQSQFRCQVCGYTANADVNGARNILAAGHAVLACGGMVQSGRPLKQEPTEMIQATA

SEQ ID NO: 47647 - protein, 443 aa, unknown
  TnpB Polypeptide
MMVELVETLQFRLVIHSGERERLAQARHDAQPIANYTLALRRLGYSKTDICDKVTDDLDATEHVKNNAQQIVRKACDAYDSYTAAHEKWRNSDDQDELPEPQPPSTNRRGAFPLVMAPGEGYTVSKTDDGRVGFRVSPQPYKKVEGVLRGRDRDLDRVRDALGDDSEWNLGRGELLYRDGVYYLHVTVKREQPLADPEDSETIISVDVNERNIAITAVDRDTRDIHANIVIDYGQVKHHRQRCYDIKRRCQEHGKPSVVASIGNYVENYMEWTLHRISKIVEHYVEWFPKPVVVFESLEGIRNDMDYGSYMNRRLHRLPFYEFERQVTYKTHRHGTPVIHVASRDNSKRCACCGEVGSRQDRRFQCANEACDLAQDHADRNATVNTAVKGIAKLEYGADDHAAADNYRPHKTPPVVRVRRVGSGRVNRPTPSHEFAEVGVLST

SEQ ID NO: 47648 - protein, 591 aa, unknown
  TnpB Polypeptide
MKQHLDQTRVLPAEYNPALNRLHHHTRTSTKHLLDTQYWTTDHLRAYREFVQNDDTSSHNWKYFYNDNACDHLDTHLYNRYKRMVAGRLAQIFDAHADEQHALDLITDTVKERKIRAIGYRRLREKIFNELDEYVSWSVVSNVVDKLNNYYDTHGEFPDEYLDLVGMPDPNGTTLAGPDSRGDIIDLDYDLDSNTLDLSINAPDSTDPDAVNSASDWTRHEFTLDMHDYFADLAAVGELKRPSLRRESDNHGAEQYVLDIPVELDGVDTDPVDGRVLGVDLGVKTQATATVLEDNACECDDGHTEDCTGFSQQTRPFHVDCGALKQKLFRVKSDAEGINSELARLRENGLDHTKRFDDRLAEYRKTRRKERNLREQVQHRVANALVYLAHVYQCETIALESLAELEAAGGRGATSWRIGTWARGLLVDSLEYKAGLVGIDVETVNPWGTSRYCPRCGERGVTVKAPDLRVEQRSGGHFVCEACGFEGDRDYVGSVNVGRMYLSSEWRIIEAKSAAYTDADTTPVRRSTGVRPTAEQATSERVEPVDHWPLFVKPVAPALGTKSESSDDPRSTGESKSSVRLVLFTADHCRK

SEQ ID NO: 47649 - protein, 398 aa, unknown
  TnpB Polypeptide
MSRYRLLPTPAQEAVLRDHCGHARYVWNLAVEQHSHWRPGRTSAPGYLEQCRQLTATRAEHPWLAAGSQTVQQQALRDFSQAMAAFFDPQNPAGRPSWRKAGRDEGFRIVGRRGRQWDVRRASRHVGQVWVPKAGWVRFRWSRTVPPGAKSYGVTMDRAGRWHVAFATIPDPIPAPGTGEVVGVDRGVAVGAALSTGGLLHVPGLTAPERKRLRRLERKLARARRGSHRRGRVKLAIARLKARETDRRKDWAEKTSTDLARRFDIIRVENLNVKSMTRSAGGTAGAPGRNVRQKSGLNRGILRSGWSLLVRRLEDKAPGRVEKVKPHFTSQRCSACGHVDAESRQSQARFVCTACGYAGNADVNAARNIAAGHAVTARGGDGATRPVNREPHLLLQSA

SEQ ID NO: 47650 - protein, 481 aa, Pseudoscardovia sp.
MKTGVAHKSYGVALPMNQGKLKKLLRLLPVWRWGLAYSLDRWIRELFEDGCLSTWQNAKSFPSCLSQRQWDSVSRQAKAALDSWLTNRQNDFRGIVASSTLDDALKHELHSINLRYAWYEHVDDEAHHMARRLMKHLRKRHRMPDLSKCRVMDMDGKIARVEDARNTKCERWAVVSTLESGKPIRVPIVADRKLDGNLFANDETLSNHLTIRFDPEGNPSGRLITTLPKAKARTQGETLGLDWGMDCMFALSDGRLLGTRMSDWLKQRDAELTELTRALQKSGIKPSRSRRYRNLQRRIRAHYRNEIGRLFNKLGRERVKEIVVERLDFRSQGLSHRMNRLLTRTGRAAVSAKLKRLQELDGIAVAEVNPAYTSQECSRCGYTARNNRQTRDLFRCECCGTTLHADINASRNILSRRSRRDGWRSIRKQEIVRMLNQEHADRCAHHGEHHVGDAQTSGAAPRRGKPHERDASAEVKIQTVS

SEQ ID NO: 47651 - protein, 421 aa, unknown
  TnpB Polypeptide
VGDEFRLAVAKGGAFCYNRNKRSQLIEVKCMLVHKAFQFRLYPNKKQKELIHKTIGCSRFVFNFFLGKQKEHDAYWYIVEEMKQNGQVSTNNWKRQGFHKYDIVKQLPELKQYYPFLKEVDSIALQKSVENLADAYSRYYKKQNNYPHFKSKKNPVQSYTTKQTNGNIAVMENCLKLPKLGLIRYAKSREVEGRIINATIRRNPSGKYFVSITTEVELTELPKTDSAVGIDMGVIDLATLSDGTIYSNPKLFRTLEEKLAKAQRMMSRRTCGGSNWYKAKIKVARIHEKIVNARKDYLHKISTEIVKNHDIIGMEDLTVSAMLKNQPLAKAISEVSWSKFKTMMEYKARWYGKQVVTVRKNFPSSQLCSGCGYQNKAVKNLALRKWKCPKCQTCHQRDVNAGINLKNEAIRLLTVGMTGLA

SEQ ID NO: 47652 - protein, 399 aa, unknown
  TnpB Polypeptide
MYRSLKMRIEPNSEQRKIIDDSFRIHCYVYNGLITACKLYHRKYEKLPSQFTLNKLCTVIWHNSPYMHDIIYQNAMNETAKRVLQAFDKCEENRRKKEYKAKREGREQTFHGLSCPRFKKPARFNSYTNPLHTGVFIEKNGRRLLKLSKIKDPIRCYNQRTPVPGIPKTCTVRWVDRGTHTEYYASLSCYDDNERRSGDMFMEYHEPRAVGIDVGVSRTAVLSDGMVFENDHMYSVLLKEIREKHEGLSSMTPYTPGYRKARSRLSHLYKKMSDRRRNNVETISRKIADNYDIICMEDLSVKELKSRSRSKRMTNAYDDASLGILRRRIEDKAIEAGRTFVSVDPRDTSQICSRCGAYVNKTLEVRTHICPECGLNMDRDLNSAINILRRGLTGNPSPA

SEQ ID NO: 47653 - protein, 295 aa, unknown
  TnpB Polypeptide
MIVLEFKLKGKAQQYRVIDEMIRTAQFVRNKTLRHWIDNQGVKLVDLYKQCAIMAKEFEWAGKLNSTARQASAERAIFAIQRFFANCQAKKPGKKGYPQFKKHTRSVEYKQSGWALSNDKRCLTFKDGFAAGKFKLLGSRDLHFYAPGEIKRIRIVRRADGYYAQFCINVERTEASITTGKAIGIDVGLNHFYTDSDGATVPNPRHLRKSEKALKRAQKRVSRKKKGFSNRKKAINKLGRRHLKVSRQRKDFAIKTALCVVKSSDFVAYEDLHVRLMVKNHKLAKSISDAAWSQT

SEQ ID NO: 47654 - protein, 382 aa, unknown
  TnpB Polypeptide
MTVVQKGVRVRLYPTEEQEILINKTLGCVRFVYNQTLADCKQSYEQTQHFPPKNERIKNLVPLKEEYEFLKEVDAKALQQSVRDLNRAIDNFFKNRNHFGFPKFKSKHNLKQSYRTPYDGGSADVLDNKHIKLPKVGKVKTKRFNMPKAYKIFSVTVEKTATGKYYASICIETEVSPLPKTNNQVGFDLGLIDLLIGSDGTRYERPKYAYAYKDKLAMEQRKLSKMRTKLERANLNLDECKNYQKQKHKVAKLHEHIANCAKDFNHKLSIELVRNYDLLAFEDLNVEGIKQNRKLAYSVSDVRWSQLLNFIQYKCQWYGKNFIQVGRFYASSKICSCCGTYHGDIVGSLKVREWICSDCGTHHDRDVNAAINILNQALSVGF

SEQ ID NO: 47655 - protein, 422 aa, unknown
  TnpB Polypeptide
MSEEKNLKIKESLHETKERRSQMDCCVISAKVQENKLSKAKLEKLIRLFLEAKWLYNAVVATDSLSLEDTSSVQIKVNNSFETREINILSAQMKQSVVDSAKNNVCNLSKAKRKGLKVGRLRYKKECNEINLKQFGKTYKIKDKNRIHIQNIGVLNVNGLEQINLDEVEFANAKLIKKPSGFYIHLTVYSKKQPEILTEKEVLGLDMGIKDQLTFSNGVKVNFYLEESEQLKGLMRKLSRQTKGSNQYKQTLARIKRIYEHESNKKKDVTNKLNYVLKNNYVVCFQDELLNSWKRRKSKRRFSFGRKVQHGILGRVKGNLKKNTSNVMLDSSVPTTQTCPECGCLTKHSLDKRKYHCNHCGFENPDRDTHSANMMVLLSGYGTYRSLNTDAVSTEKMVGLLTNLSNLGVVVTTANSMEACCL

SEQ ID NO: 47656 - protein, 339 aa, Nonomuraea sp.
MPYISDRDLSKQVITQAKATPERAWLGEVSAVLLQQALADLNTAYRNFFASLTGKRKGRKLAPPRFRSRKDSRQAIRFTKNARFTITPGGKLRLPKIGDVPVRWSRNVPSDPSSVTVIKDAAGRYFASFVVETTDQPLPGSDAEIVIDLGLSHFAVLSDGRKVANPRILRRAAKKLRKAQKALSRTQKGSANRQKAKQVVAKAHARVTDTRRDWAHKLSTQIIRDNQAVYVEDLAVSGLARTKLAKSVHDAGWSQFVGMLEYKAARYGRTFAKVDRWFPSSKLCSACGRLAEAMPLNVRSWSCPCGAVHDRDVNAAVNILAAGRADRLNACGGTVRPAD

SEQ ID NO: 47657 - protein, 360 aa, Nonomuraea sp.
VFGEAALQLPAVPGCAPAGVAGPDVRVCPRGVERRARTAQKPPGRPAGGGSAARSCRRSRHDPRQSARFNTNAFKLRSGGALYLAKIGEVEVRWSRELPAPPSSVTVIKDAAGRYFASFVIDVPDDSQTLPATEAETGIDVGLTHYAVTSEGEKIANPKWLRRRERKLKKLQRALSRKQKGSANRTKARIKLARQHGRVADARRDFLHQTSTTIIRENQAVHVEGLAVRGLARGMLAKSVNDAAWGAFLRLLQGKAARYGREFIQLDRWYPSSQLCPCCGWKIGKLPLDVREWDCPCCGEHHDRDIAAALNILAEGIRLRSPNDVAAGLADTRNDCEGQVRPGTAIPTLAPPETSTAQAA

SEQ ID NO: 47658 - protein, 435 aa, Nonomuraea sp.
MAKRTRAHVARLDLNQRQSVALDGQAHTARALWNLLHEFMTFRQGRFASLKDCDAAIRAARHEIDWMGQLPAQAAQAVLKTYRQAWANFFNPDHPAERPTFKGRFRSRMAVDVPQARDLQISRVNRRWGAVNVPKVGRVRFRWTKALPGVTKGGPAGRITGARLVKEAHGWNIVFRTELVLAAPAPHRGPKVGLDRGIAVPLALSTGEHLGHGPWLTDGEQTRLLRLERKSARQRATRKKGDPASNRERRTYDQIARLRATAKRRAVDWQHQTTTDLATRFSAVVVEDLKIGNMMASASGTVEEPGTNVAQKRGLHRSIAGEAWGRTVEFLTYKSADRGGLVAKVRPHGTSQECHRCHTTTTGSRESQFRFACKNKACGWVGNADTNAARNQLHRYNSAAGRAVTGRGDSGVPGSAKRQASRSTVSPAPAPRAAA

SEQ ID NO: 47659 - protein, 534 aa, Nonomuraea sp.
MCTMRSWFPGAGKAKCRALEINDEGRRCRRTARSSDPIRPRARSTGTSPSTNRPTTTPRTASRTPTPRATPPSATSTATAATRSSWSGKGPKVAPPRLRSRKDNRQAIRFTRNARFKVGDKLTLPKIGDIAVRWSRALPSEPSSVTVIKDAAGRYVASFVVEVGEQPLPGSTPEVGIDLGLGHFAVLSDGRKIDSPKFLRRAERKLKRLQSTLSRKQKGSANRAKARGKVARQHAKVADARREFHHQTSTMIVRENQAVYVEGLAIKGLARTRLAKSVHDAGWGTFVAMLEYKARLYGRTFTKIGRFFPSSKLCSSCGALAESMPLAVRSWACPCGVLHDRDVNAAINILAAGRAERLNACGDQVRPELARARVVETGSHRVPHEPMRHGRESPGFSPGSASIHQERPGRLRLRRREADAALGVRLGRGRLAMGGPGQPQPVRGGRGRRPEGRDRLRLHDDRRRRRGPLQHAPGPRRRPARQRPRSGPAGTRGVRRPRGHGQQRQAGRDLQGRRHGGGAVGDARGEGHRPRRRR

SEQ ID NO: 47660 - protein, 157 aa, Nonomuraea sp.
MASSVGGSAPAGTLRRRRAEARFAANTNHTIAKQIVTEAERTGRGIALEDLGGIRDRVRLRKPQRVTLHSWSFHQLGSFIAYKAARAGVALIYVEAAYTSQGCSRCGHVDKRNRADRETFTCTSCGFAEHADVNAARNIASRGVAGWAVSHAADDAA

SEQ ID NO: 47661 - protein, 135 aa, Nonomuraea sp.
VIEDLAVKNMVKNRSLARAISDAGWGEFRRQLEYKCERAGRRLVVIDRWYPSSKTCSSCGYLLSQLSLSTQHWTCPGCRTRHDRDMNAAKNILAAGRAVARQNSGDVCGAGVSRQGSSLPQSAMKQKPRAVRRVA

SEQ ID NO: 47662 - protein, 257 aa, Nonomuraea sp.
LSHFEDRRPLPIAAATPWHQPSRARTPGFSHRGKPFSRIFERSDTASRHNDRVAVTLRTNGNIQQQLARTRKGSNRRKRVVAKLGAVMARVRQRRQDFNAQTAAVLVSRYGTVVLEDLKTRNMTSSASGTVETPGGRVRQKAGLNRAILDKGWHGLEIALTGAARYTGTQIVKVNPAYTSQTCAACEHVNPKSRESQAVFRCTACGLVAHADVNAAINIKNAGGQSVSGRGDLAVGRSAKRQPPIGRSRPPAGIPRL

SEQ ID NO: 47663 - protein, 353 aa, Nonomuraea sp.
LRYNFRLYPDAAQCQMLARTFGCARVVWNDALTARKTARKAGLPFIGDAEIQRLVLTAAKKRPERVWLREVSSVALQQAVRDLNAAYQNFFDSVSGRRKGPKMGLPRFKSRHDHRQAVRFTTNAFRLHADGSLYLAKIGNVEVRWSRALPVAPSSVTVILDAAGRYFASFVVEVEESSQSLPEIDAETGIDLGLTHYATLSDGTKIVNPRWLRRRERKLARLQRSLARKRKGSKNRDRARVKVARQHARVADARRDFLHQTSSSIIRDNQTVHVETLSVRGMARGRHAKSAHDAGWGTFLAMLADKSARRGRVLVQIGRWHPSSQLCPCCGWKIGKLAPSRAGVGLSVLRRAP

SEQ ID NO: 47664 - protein, 368 aa, Nonomuraea sp.
VAQIVKRAYKYRFYPTPEQAEELARTFGCVRLVYNKALEERTRAYTLEGRRVSYVESSAALTAWKRSGDYDFLFKVSSVPLQQALRHLQAAFANFFAKRATYPTFKSRKKSRASAEYTRSAFRWRDGALTLAKMDAPLNIVWSRPLPDGAEPSTVTVSRDAAGRWFVSMLVEEKITPFSPVDAMVGVDAGITALATLSTGEKIVNPKHERADRRKLARAQRALARKEKGSANRQKANLRVARVYARVTDRRRDFLHKLTTRLVRENQTVVIEDLTVRNMVKNHSLARAISDASWRELRSMLEYKAAWYGRDLLVVDRWFPSSKLCSACGAIQQSMPLNVRTWECACGAVHDRDVNAAKNVLAAGLAES

SEQ ID NO: 47665 - protein, 400 aa, Nonomuraea sp.
VGVRRSFKFLLRPTSKQAAALTRCLEDHRELYNAALEHRRAVYRKAGVTVRYGDQSAELKHIRADDPDGQGRWSFSSQQATLRRLDKAFRAFFDRVKAGRTPGFPRFKGRGWFDTVEWPKDGDGCRWDSQPHHPSATYVRLQGVGHVQVHQHRRVLGTVKTISIKREGARWFVVLSCDDVPAERLPATGAVAGIDMGVASLVTTSDGEHLANPRYLAVTADRLAAAQRDLARKKRGGKRRRKAVARVAALHAKVRRQRLDGVHKAALALVRDHDVIVHEALKVTNMTKRAVPQPDGNGGYLPNGAAAKSGLNRSILDAGWGAFLTILSHKAESAGRELIAVNPANTSRTCAECGHCAKENRVTQAVFRCTACGHTAHADVNAAINILRAGLALRDAAGAA

SEQ ID NO: 47666 - protein, 428 aa, Nonomuraea sp.
VFEFWDVGVARGWCSVKLRYNYRLYPDAPQRELLARTFGCVRAVWNDALARRKAAWKADRTRIGGVELQKICITAAKRTVEREWLGQVSPVPLQQSLRDLDVAYKNFFESVSGRRKGPKMGLPVFKSRHDQRQSARFTTNAFKVRAGGALYLAKIGEIAVRWSRDLPAPPSSVTVVKDAAGRYFASFVVELDDDAHTLPQADTEAGIDLGLTHYAVTSYGEKIANPKWLRRRERKLKKLQRALSRKKKGSANRAKARIKLARQHAKVADARRDFLHQASTTLLRENQAVHVEGLAVRGLARGMLAKSVNDASWGAFLRLLEGKAARYGREFIEIGRWYPSSQLCPCCGWKIGKPALDVREWDCQSCGEHHDRDIAAALNILTEGIRLRFSHDVAAGLADTENDCEGQVRPGKAIPTLAPPETYTAHAA

SEQ ID NO: 47667 - protein, 413 aa, Nonomuraea sp.
VKLRYNYRLYPDAPQRESLARTFGCVRAMWNDALARRKAAWKAGRRRISGTELQKICITAAKRTPQREWLGQVSPVPLQQSLRGLDTAYQNFFESVSGKRKGPKMGLPVFKSRHDHRQSARFNTNAFKLRAGGCLYLAKIGEVEVRWSRELPAPPSSVTVIKDAGGRYFASFVIDVPDDSQTLPEIEAETGIDVGLTHYAVTSEGEKIANPKWLRRRERKLKKLQRALSRKQKGSANRTKARVEVARQHAKVADARRDFLHQTSTTIIRENQAVHVESLAVRGLARGMLAKSVNDAAWGAFLRLLQGKAARYGRAFITIDRGYPSSQLCPCCGWKIGKLALDVREWDCPCCGEHHDRDIAAALNILAEGIRLRSPNDVAAGLADTRNDCEGQVRPGTAIPTLAPPETSTAQAA

SEQ ID NO: 47668 - protein, 489 aa, Nonomuraea sp.
VLTGRKYRLDLTEEQAAFAERIGGACRSVWNTGLEQRRTYRRRGAFIGYHEQARQLAQAKGEFEWLAEVPGHCLQQTLIDLDQACARHGTWKVRWKSRARNAPSFRFPEGGKIAIERLNRRWARARLPKLGWVRFRITRSLGGKVKHATVSRDGKHWYVSFLVEDGIAPPERHAHPGSAVGIDRGVAKVVTRSDGLFHHQVFARDREVEHAKKLQRDLARTATGSARRKRAAVRVADLARKVRRRREDFAAKTAHTLATGFELVVFEALATRNMTAGVGPRPDPERPGVFLPNGAASKSGLNRSILDKGWHRIELATRGRARYTGTCVIIVNPAYTSLTCHVCTVVDRKSRESQAVFRCASCGHTEHADVNAAQNILTAGRAEHAQPRPGVRVGARKPRDRVGRKVNRQATAAQGHATASPELAGIPRLQSWGALQDPALGDQGEQDHRDAGDHRSGLQQVVADVVGALEVAQTRGKGQGLRDSGLSRT

SEQ ID NO: 47669 - protein, 400 aa, Nonomuraea sp.
LIGMPRYRLQPTPAQEQVLAEHCGHARFVWNLAVEQHRHWKLGRKSAPGFAEQCRQLTEARAAFAWLRAGSIIVQQQALKDFAQATANYFGHSHRKPTWRRRGQSEGFRIVAVRPADVRRLSRHVGAVKIPKVGWVRFRWSRSVPEGVKSYRVTRDAAGRWHLAFAAIPEPIPAPGTGAVVGVDRGVAVSAALSTGELLRAPALREAEQARLVRLSRRLARAERGSNRRAKVKAAIARLKARERDRRKDWVEKTSTDLARRFDVIAVEDLKISSMIRSAKGTLRVPGRNVAAKAGLNRGILAAGWGRLVQRLEHKAPGRVVKINPAYTSQRCSACGIVDAKARESQAAFRCRSCGYAANADVNAARNIRDTAAGHAVVARGRSGLPERTNREPQPVLLTV

SEQ ID NO: 47670 - protein, 406 aa, Nonomuraea sp.
VRRSFKFLLRPTRHQEIALSAMLDDHRGLYNAALQERREAYRRAGVSIRYGEQSAQLKEIRAADAQGQGRWSFTSQQQTLRRLNRAFEAFFRRVKAGQKPGYPRFKGRGWFDTVTFVEGDGAKWDSQPHHPSATFVRLHGIGHLKVHQHRPIAGRVKQIEVKREGSRWYVIVSCDEVSARPLPPSGRQVGLDMGVVHFASLSAPIDGLTDERGHIPHPRYRLTAERELTAAQQAYARTRRGSARRRKAARRIGKIHRKVARRRTDHAHKTALALVRAADVITVEDLRIANMTKSPAPKPDPDQAGVFLSNGSAAKAGLNKNILDAGWGVFLAILTNKAESAGREVISVNPRDTSRTCPICGHVSGENRKTQADFVCVVCGHAANADVVAASNILRAGLVLRDARAV

SEQ ID NO: 47671 - protein, 413 aa, Nonomuraea sp.
VKLRYNYRLYPDAPQRESLARTFGCVRAVWNDALARRKAAWKTNRSRIGGVELQKICITAAKRTPQREWLGEVSPVPLQQSLRDLDVAYKNFFESVNGKRRGPRMGLPVFKSRHDHRQSARFNTNAFKLRDHGTLYLAKIGEVEVRWSRELPAAPSSVTIIKDAGGRYFASFVIELDDDAHQLPQVDTDTGIDLGLTHYAVTSAGEKIANPRWLRRRERKLKKLQRALSRKQKGSANRTKARIKLARQHGRVADARRDFLHQTSTTIIRENQAVAVEGLAVRGLARGMLAKSVNDASWGAFLRLLEGKAARYGRAFIRIDRWYPSSRLCPCCGWQVGKLPLDVREWDCPSCGEHHDHDIAAALNILAEGIRLRSPNDVAAGLADTRNDCEGQVRPGTAIPTLAPPETSTAQAA

SEQ ID NO: 47672 - protein, 379 aa, Nonomuraea sp.
VKLVVQVKLLPTPEQAAALEATLRGCNQAADLVARTAFTTGVTREYDLRKHTYTVLKARGLGAQAAQHVIKKVADACTTLKANLRAGNLGPPGSRRRTRAESKPITFRPHAAQPYDDRCLSWQPHARTVSIWTIAGRLRGIAFTCSERQLAMLATHRKGESDLVLRDGMWFLIATCEIPDRPVVIPNGFLGVDLGIANIATTSDGNRYSGKGLNAVRRRQRELRRRLQAKRTKSAKRLLKKRRRAEARFAANTNHVIAKRIVTEAERTGRGIALEDLQGIRERVRLRKPQRVTLHSWSFAQLGGFIAYKARRAGIALIHVDPAYTSQQCWACGHTDRANRPDQAVFSCTSCGFAEHADVNAARNIAARGVAGWAVSHAA

SEQ ID NO: 47673 - protein, 394 aa, Nonomuraea sp.
VRRSFKFLIRPTARQAAALTQCLEDHRQLYNAALEHRRTAYRKAGVTIRYGEQSAELKHIRADDPDGQARWSFSSQQATLRRLDKAFTAFFARVKAGRAPGFPRFKGKGRFDTVQWPKDGDGCRWDAQPGHPSATFVRLQGVGHVRVHRHRPLQGTVKTITVKREGDRWFVVLSCDDVLAEPLPATGAAVGIDLGVASLATTSDGEQLANPRHLTASADRLTTAQQALARKKRGSQRRRKAVARVAALHAKVRRQRLDHTHKAALALVRDYDVVVHEDLRIANMTRSASGTLSEPGRNVAQKSGLNRSILDAGWGVFLTILAHKAESAGRKLIAVNPANTSRACARCGHCAKENRVTQAEFACTACGHVAHADVNAAINILRTGLALRDAAEAA

SEQ ID NO: 47674 - protein, 409 aa, Nonomuraea sp.
MALRRSQAKHDGLPSVVQVRLSPTSEQAQALSAATALCNAAASFISKIAWRSRTFTVVELHRMAYYQVRAEFVGLGAQAAVRAIARVAGAYANRRSAKTRAHLFRPHGAVPFDARMLSFRRDARTVSIWTPGGRLTVPYSGREADLKAIETLPVGETDLVLRGGVWLLQVAVTLPRPETADPANGFIGVDQGIANLAVTSDGAVLPGKVLPGTIAGNGHVRALRERRHRQRRRLQRKATSSARRVLRRLSVREHRMMTDLNHQISGFVVREAERTARGVAMEDLAGIRTRVRAHRLQRRTLHSWAFAQQITFTRYKAARAGIAFTLVDPAYTSQACPRCGCVSKRNRPARGRFLCTRCGLAGHADHIAALNIARLGVVGRGSVNTPHATGLPSARRDRESRPPGSLGGS

SEQ ID NO: 47675 - protein, 233 aa, Nonomuraea sp.
LKTISVKREGRRWYVVLSCDGVPAQTLPATGAVAGIDMGVASLVTTSDGRHLANPRHLATSADRLAEAQRDLTRKKRGSKRRRKAVVRVAALHAKVRRQRLDSAHKAALALVMVHEDLRIANMTRSASGTLEAPGRNVAAKSGLNRSILDAGWGVFLTVLAHKAESAGRELIAVNPANTSRTCSRCGHCAQENRVTQAEFACVACGHTAHADVNAAINILRAGLALRQAAGAA

SEQ ID NO: 47676 - protein, 394 aa, Nonomuraea sp.
VRRSYKFLLRPTARQAAALAACLEDHRQLYNAALEHRRAAYRKAGVTVRYGDQSAELKHIRADDADGQGRWSFSSQQATLRRLDKAFKAFFARVKTGRKPGFPRFKGRGWFDTVERPKDGDGCRWDSQPEHPSATFVRLQGIGHVRVHQHRPVKGRVKTIGVKREGNCWYVVLSCDDVPAEMLPATGAVAGIDLGIASLVTTSDGEHLANPRRLEASADRLAAAQRDLARTKRGSRRRRKAVARVAALRAKVRRQRLDGAHKAALTLVRGYDVIVHEDLRIVNMTRSASGTLQAPGRMVAQKSGLNRSILDAGWGVFLTVLAHKAESAGRELIAVDPRNTSRTCARCGHCAKENRVTQAEFVCTACGHTAHADVNAAVIILRAGLALRDAAEAA

SEQ ID NO: 47677 - protein, 358 aa, Burkholderia sp.
MLARTFGCARYVYNHMLRLRTDAWYQRQERIGYHESSAALTALKKTAEHAWLNEVSSVPVQQALRHLQTAFANFFAKRAKYPSFRRKDGVQSAEYTTSAFKWDGSALTLAKMKGPLAIRFSRQIPKGAKVTTCTVSKDTAGRYHVSMFCDDVVSSKKKVSGKVGIDLGLTHFAILSTGEKIAAPNMFRKYEDKLAKLQRRLARKQKGSARRAKAKLKVAKLHAKVADSRRDFLHKLSTRLINENQVIAIESLAVSSMQKNRSLSKSISDAGWSEFVRQLTYKAEWYGRTLIGIACWYPSSKRCSDCGHTAAKMPLRIREWTCPECGSIHDRDVNAARNILAAGLAVSAHGESVNPMSL

SEQ ID NO: 47678 - protein, 419 aa, Microcystis sp.
MLNVLKVRIYPNKKQELALAKNFGCVRFVGNYYLNKTNNQYLETGKGMTYCDMAKDLTKLKKQLDFEWLAEATAATLQQSLKNLESAFKNFFSKRTKFPKFKSKHKKQSIRYPESCSIRNKGIKLPKLGVVKAKISQVINGKIKSVTVSKTSTDKYLAAILFEMDDSTTIEKLKISGIDLGLSSLVTVFDGETTYKIDPIKPTRKYAKRLKRRQQALSRKAKGSNNRQKAIKEVAKVHEKIANTRQDFLHKLSRKLCDENQIVVAENLNIKGLARTKLAKSIHDAGFGMLLNFLDYKLKREGGKLVEVDRFYPSTKLCSCCGFKNDLLTLSIREWICPECKTQHDRDENAAKNVREEGMRILSTNTDGQSEFQAWGETVRLVGTCTEKRVWGESRIPRHSVSLTAGVSSLDHANFSSRR

SEQ ID NO: 47679 - protein, 421 aa, Streptomyces sp.
VLKRRRGHRARLRLTPAQALGAEDQGHAARALWNLVHDWWTMIPREGRSLAAADAAIRQGRKDLPWLAVLPAQAAQAVLKTYFQAWKNCWEGRAEAPAFKSRFRSRMAIDIPQGRDLQIVRLNRRWGRMWVPKIGYALFRWTRDLPVGRRADSENRITGARLVKEPDGWHVVFRVQREVPEPAAHTGPTVGVDRGIAKPLALSDGTFREHGPWLTKGETKRLNRLEKTRERRRRARPSGERNSRRLTHTHDQIALLRATAKRRAVDWQHKTTTGITEAFSRIGVEDLAIGHMVRSAKGTVADPGVNVSQKAGLNRAITAEAWGRTVTMLEYKAAERGGSVVKVPAPYTSLRCSACGRITPGSRETQARFLCKSPACGFEAHADTNAGRNIDHAAGQAVSGRGDLGGTRSVKRQPPLGPHAA

SEQ ID NO: 47680 - protein, 424 aa, unknown
  TnpB Polypeptide
MILSYKTRLEPNNKQAQKFKQFAGAARYAYNWAITKEKEAYELGNGFIGEMELRRIFTRHKEEADWLYDISNDVTKQAIKDAVTAFSNFFKGRAKFPQFKTKRKSRPAFYQDVFKFKATNTHIRVEKISDSNKKNKQKINWIKVSEKRRIPIISKGYQNPRITFDGIHWYASVGVEVPDKPTEPLNDGIGIDLGIKDLAVCSDKNTYKNINKTDRVRRLEKQRRRKQREISRKYLMNKDGEKYVKTNNIIKAELALLKLNHKLTNIRRNYIHQVTNEIISRKPRFIVLEDLNVKDVMKNRHLSKAIQQQSLAEFAKILKYKAKQNNIEVICVDRFFPSSKTCSCCGALKHDLKLKDRIFKCNNCGLVIDRDFNASLNLYLYGISTASSAGIYVCGVSHQTAVVSTKQGTKKQKLNRNLSKGVNP

SEQ ID NO: 47681 - protein, 407 aa, unknown
  TnpB Polypeptide
MIVFESRAYGSPLQFAAVDEAIKVTQFIRNKALRYWMDHRGVGKYDLNNLCKTLAAEYPFADHLNSMARQSASERTWSAIARFYDACKKRTKGKKGYPKFRKDVRSVEYKTSGWKLSEDRKSIKFTDGFRIGTLKLKGTRDLFHYQITQFKRVRLVKKADGYYVQFCLDADRREALPATGKTVGLDVGLTSFYTDSFGHREDNPRFLRTAESALKRLRRRVSKKKPARGTPVSRNVLNAKKRLARKHLKVSRQRKDHATKLARCVIRSHDLVAYEDLQISNMVKNHQLAKSISDASWYAFRVLLESYAKIYGRVVVAVPPQFTSVICSRCGQKVHKTLSTRTHRCPPCGYVADRDENAAINVLQRGLEKLSTAGHAGSYAWGDSASTLSSYATPAQVESLNQESHGL

SEQ ID NO: 47682 - protein, 340 aa, unknown
  TnpB Polypeptide
LRLKWYAVFVFDVVPRREPPAEVVAFDVNENSVAVARVSLLSTVDAVARWNRQYVDPAVYSIKTDFGRLAKRYEAVRGRKLEELKRKYPFVGRDEEEKVQNVTDTREFRRFAKRLRERRRKESRVRQISREMTRSPAVIITEDLGKNPQEEMIGIEEKKVKKRELRHRIKQTPFRKLIRAVEDKAAEGGSLVFYVSSFRNSKVCPIHFARLEDGGGWHLLRCPHGHAVDRDVAAVLNMLWKTTPAGWVRGVWWDVKEVRKRLKKEIVPREAVRKANSIIPRPVAYAVWASLRSLKASNKWPAVLARAASMNPARGADEGGARASLRRAGTPALGEEVSSS

SEQ ID NO: 47683 - protein, 765 aa, unknown
  TnpB Polypeptide
MTLSVEDFLLSIQKLILGNDLNTTYKLALVLAVTNKAGEIPFENHPDAEVFEISYRELALEFLRIYWPQAKAYPRADKSAVKDAVLRQSFGGSNALVISLIQAFQERLCPADAQWLTFLQAQRFEKDFDRLVKDCQTRVLKKNPLQYMQGYEFLFDKDDRTNRIYVRREVAVSLCRFQPIVQELIFSRWEKMLRSIRANSGVLGETPESTLRDFLFYPHRSETLAAIRDVLRESTPAQTCFYSRGRKPPDFSQADRAPHDNKRTILARIQNFRHDSLIMKIICGFQYELYTTDEQRSALSRNAGCRRFVFNKALELQNERKKNGFSLLRYKELCLELVKWKKEEKTVFLKEAMSQPLQQALKDLDRAIADSFRPKSDPARKEWPKFKSKDIGDGFRIPQFKPEHIDDANGRVKLPKIGWMRYRKSRPLAFKCADGSMKSGTVRQIHIKKDCGHWFVVFTTEFDIEMPDPKALDVGIDLGVVHAVATSDGQFFDLNTGRIKELEKEIARYQRKLALNRSSRLKLAKAGRAEAFDKTKPSRKRRRLLEKLQKLHRRVRNIRRDFQMKTAHTLAQEYGCVYVEDLKTRNMTKSAKGTIDNPGKNVKQKSGLNRAILRTGFFGMRQAIEWQQYKAGGYVVAVPAAYTSCECPSCTCTDKRNRPRQAQFRCIGCAYENNADIVGAINVRRKGRTGPSAHDKKRIAREVSAGALCLLHETPAPTARTNLLELRKQLRRNPLISGEDVKGEILKISVNFLLVPWFNTAQGRF

SEQ ID NO: 47684 - protein, 413 aa, Streptomyces sp.
  misc_feature (146)..(146): Xaa can be any naturally occurring amino acid
MRRQQNCRARSGAFGRSTTWRLPHGPRRGRSVRSGSITTPPPRCSPRGRRPRSWPTCPRCRRCRCSRRCGTCRRRSAASSASGPSTRASSRRRSPAGPPSTPPVVSATGTAGSPSRRCGNRSTSCGPVPFPKVHPRRSSPCRRTRXTLAKMREPLDIVWSRPLPEGASPSIVTVSQDAAGRWFVSMLCDDLPAPMPETTNAVGIDAGITSLVTLSTGEKVTNPRHERKDRARLAKAQRNLAKKTKGSNNRAKARRKVAKVHARIADRRRDHLHKLTTRLVRENQTIVIEDLTVRNMVKNHSLARAISDAAWTTMRGMLEYKCAWYGRDLVAIDRWFPSSKLCSACGTFQGKMPLNVRTWTCACGVTHDRDVNAAKNVLAEGLSVTVCGAGVRPQRSYPGGQSATKQKIPRREP

SEQ ID NO: 47685 - protein, 420 aa, unknown
  TnpB Polypeptide
MRLIYKFYTRHTEQLDALLKVSNNLWNQALYVFLQRLNSDGTWLWYNDMDKIMKQTLNLNGECNYRLLKAQCSQQILRTLDKSIKAYCKSIKDWKKHPEKYKAMPRMPSYRKRGGMFNLFYTKQCASIKDGQIRLTKDLLIAIPQWEKYGEQVSKFNQIRLIPECDKVKVEVVYDKKLAASDVDKNKYASIDLGIDNLATMITSDGCIIWSGKHLKSYNRCFNKRLSKLQSIKDLQGIKRSTKRIKALYNKRDKYFEDVFHKVSRQIVDVLVEKKVGTLAVGYNVGWKQNTDMGKRNNQKFVQLPFARLTSYLSYKCKLAGIDFIEHEESYTSKCDALALEEVCKHENYLGKRVKRGLFRSSVGKIINAEQNGALNILRKVVGDSEFARIIGSGHSLCPVRHCNPFTWDVRGTNSKVLKK

SEQ ID NO: 47686 - protein, 420 aa, unknown
  TnpB Polypeptide
LIKKIPLQRAVRVHRSLVFPIRWNDSRLNSLLEEFRLVVNKSIRIALREDLRSRASLTRTAYAALSKEHAIHKKYIPCAFEVALTLLKAHRRRVRKGRICSNPYVRRPLLKAENQSYWLDRETGRLRVPIRGTEGVQILLPMSEWHRSILRDPTWGLGSLTLVPGSAILVVRKEAPKAYEPDAALALDTNEDSLDGVFAERKTVHRLTISLRGVREIQATHFRRRRRQARKKANDRRLQRRLLKREGRRERNRVKQRLHLVSKALVVAANTRRSAIVLEDLTLHGARGRSRRMNRRLNAWPRREVHRQIEYKAALAGVPVIKVNPAWTSKTCPVCGARRRDRVGKVFVCEMCDWEMDRQINAGLNILKTALASNEALARAVRFQPGALRDDVVSPLYDLLREGGGAREEPSGVELRRASA

SEQ ID NO: 47687 - protein, 399 aa, unknown
  TnpB Polypeptide
MHRVHKIRLDPTQAQATYFARACGTARFAYNWALAEWKREYEAGGKPSEISLRKRLNSIKATEFPWMLEVSKTAPQQAIKNLGAAFQHFIRRVKLGQKPGYPTFKRKGVRDSFRADNGPLDATSHAVLVEGQTIKLPRCGLVRMRESLRFDGRVLSAVVSRAADGWYVAILVDTANCLARVADHGAVGVDLGVATLATLSTGLTVPALKPHRAAYKRLARLSRSLSRKQKGSHNRVKAKIKLARLHQRIGNVRADALHKLTTKLATEFTTIGIEDLNVAGMLQNRSLARSIAGSGFAEFRRQLEYKSAMTGADVVVVDRFFPSSKTCSDCGTIHEMPLSSRRMVCECGCDMDRDLNAAINIRRQALAHQSVENEALAVASVTTKLHSAKQKIVGLCSYA

SEQ ID NO: 47688 - protein, 441 aa, Acidimicrobiaceae sp.
VPSPAITRVAVTRAYAYALDPTSEQISTLRSHIGGSRFAYNTMLGLMKENWDENRSKKEAGVEVNNDDYIDTGHFGLLYLWAEKRDELAPWWAENGSSTYNDAAQRLSKAFTNFRKGRAKFPHFKRKGQSGSVRFMGPTVRLADSHHVRIARVGEVKTYESTRKLYRHLERGTAKIVAATVYERSGKWQVSFTVEVTRVVPETRPPDRVIGVDVGVTTLYTGAIPDGEQVLHVANPRHFVTAEKKLAHAQRIASRRQGPRPGVAPSKRWKKANGRVQTIHAGVANARKNLIHETTSLLAKDYDVIVIEDLHVAGMVKNHSLAKHIQDAAWGEFTRQLEYKTKWYGSTLVRVDLFYPSSKTCSRYGTVKATLSLDQRTYHCGACGLVLGRDHNAAINLARQGLPGTNSGTGRGGEVRPAQQNLVATAHPEEASTETPPAVGA

SEQ ID NO: 47689 - protein, 477 aa, Paraburkholderia sp.
MYIYSIGMSSTLTSGVRFRLYPAGEVASVLRQWIGCQRFIYSSKVDEDHLFAAQRRLEIASGKTDVATPLDQQYAHFKNRELTPWLYEVPSQILRNGAVRWMTAKQRQLKGLGRAPRRRTRRDFNSVLITGELFRFVRGASGQMLIEPGTDSNPIGQVPFIAHRIYDLPKQIVIREEVGRWYVSFCYERKSDIILREPEELAYELNRLENADLSAATLGIDRNVRDNCIATSDGRQYRLDAVVLKRIKRKEIGAKRHQRRMARSQKGSSNRRKLAARLARKKAYAARARSDFAHKTTCTLATSPTRFFVLEDLQIPNLVKRPKAKFDEFAGKWLRNGAGAKAGLNRSILQSCWGAIHRTLAYKAARRNKLVGTVPAAHTSQECSRCGHIHPDNREGARFVCRRCGLEAHADHNAACNIKARGIERLRDGQYESAKTRKRVAFRRKSNTTGGRPAHACEGKGPRPEHRAERIQDRIAA

SEQ ID NO: 47690 - protein, 374 aa, unknown
  TnpB Polypeptide
MEPYVLGYKFRIYPNKTQQRLINRTLGCCRFVYNHFLAVRRDQWQANHRSVSYFETCKLLTDLKRQEETSWLKEADSMALQESLRNLDNAFQNFWKLHTGYPRFKSKHSHSQSYRTRNQKNGIRIVDKRIKLPKIGFVKIKQSRDCDGRILSATISRTASSKYFVSFCMEQDKENLVRPNAGGMIGIDVGIRAFYTDSLGHIVENPRHLNRFLAKLKREQRRLSRKMPKSQNRDKARIRVARIHEKIANIRKDFLHKHSTQLARENQTIAVEQLNIKGMLRNHKLAQAISDVSWSEFFRQLTYKTELHGGELLKVDTFYPSSQTCSVCGYQNALAKDLSVREWDCPECGMHHDRDVNAAKNILRKALEDKSKVA

SEQ ID NO: 47691 - protein, 715 aa, unknown
  TnpB Polypeptide
MKTKKLKPDKSEQKDPVYVRTISSVVNTKIPIRNKVFDFMANESKKIYNTTLFHTNIFLRYQNLIFKDLLDLVNNNEILDIKQFDKMFYTIYGKYHNNFLIIKDALDNNNRIIYNHIKEYLNEHKLQITNDNYNKIYDIMIIQITNLNTFTVVNKNDMDELFFNLVQNILKSIYTKNFNEFKRCIINNIPCPNDDESFITQVKNEEYLFSKDAAKNYKKILMNHPLFISKKKDKNNENDEEDEIPCKKEETIKSNQNYIARIVYEYYTDCKIPSDLMCNIIAKGHAAFCSYFALLEKGIYAKKPSYLGKDARYILPFFIHSRKLINVDGNDHYRLTAGKFVANNFVDIIGDPDYKCLNFFDKTEYKKYAHVLDLKFSSNLKKIPKGQNYIIETKTNKGYYINKKSDRVIDSYYVFINKPPKSEMDKLVLIEVNPIYDGKWYKINFTYKTEANTNNPDPNKKLSIDFGIINLMTIYDPHGEPKIIKGAHITNMNKFYNNLTDKCKSGIAKQDPKFTSDGLKKLLLKRHHSIDNYLNNLVKWFVTTYKDYATIIVGYNTGWKKKVNMGKKMNRKFYEIPYMKLVYKLRDKLAMSNQKLEITNESYTSKCDALAFERVGFHETYNGKRFKRGLFSSHPKQIYSSVKNKMIKVTKKGILLNADVNGAINIMRKWEEKNGKIMKKITGINICNPRVIKLKDYVNIKNSQKSEQMVTQVLI

SEQ ID NO: 47692 - protein, 293 aa, Enterococcus sp.
MLVMSIKNGLTGKSRLRAKKPRFKSRKKSKPAFYNDNIKLKVKSKAVLLEKIGWVKTSEQIPMNTKYSNPRISFDGKYWYVSVGIDEVQPTQNLTGEILGIDLGIKDLAIVSNGKVYKNINKTGKVRKIEKRLRRLQRKVSRKYEMNKEGTRFVKTCNIYKLEKEIRHTHRKLGNIRQNHIHQTTTEIVKTKPSKIVVETLNVKGMMKNKHLTKSVAQQKFYEFKRQLQYKCEDYGIELVEADKFYPSSKLCHECGYKKVDLKLSDRTYHCEECGYTADRDYNASLNLASYID

SEQ ID NO: 47693 - protein, 573 aa, unknown
  TnpB Polypeptide
MSDHLSLPIRLPDEDAERFERLATLTRRVATHVLKDHWTPAHLDGIADSSHRAWKYFDEHEPFEELDLYLPSRFRRCILQKVGETLRSHADRRDAFRSVQNVLPDHKIRRIHRRCIKDQLWDDGDYLSSGYVDNLIDQLTSYYDRHGRYPDTYFEMQDCPAYDNGVLPFSADDGPTSGQAIKYQYDGDSETLTVHLKTPDTLTPETRGDWSWTEYERDGYDAFHELLAHGDLSAPEFQSSRRKNGDTYYELSFPVEVERTEVTDSTDRVLALDAGMRKDVTAVVVTKDGEQLSTPHYIQFTDRDGMRRLHRERTRLNDRLAELRRSGSAHTDKFAHAQSEYERVNNKIQHKREQLTHDVANQVLALAITHNVDAIIHEDLRSLSPPRGEGTLSWELSSWARRDIIENIEYRAECAGLAVERVYPQGTSRSCPRCGATGHTCMSPDHHEEVWWGGHFRCDNARCGFEGDRDYVGALNVARVFFSDGNTLDHGFTSSYMGDSEIVLAGRSAGTRLTFGAGFVAYEPEQARATAGGGSAVIAPAVSLPESNADGSNGRGPAVQQCTQFLRCTTENY

SEQ ID NO: 47694 - protein, 321 aa, unknown
  TnpB Polypeptide
MKIYKAYRYEIKLNIQDRISCAKHAGAARFAYNWALKQRIDLYEKDKTFTNAIEQHRILNRLKTHEFPWMYEVSKCAPQEALRDLDRAFKNFYRGLKQGKKVGFPKFKKKGKHDSFRLTGTIKIEGNSLQLPRLGKLRLKEKSAVKGKILSATVSRQADRWFVSLTAEEDMDPPTPVQGKNIGIDLGITFFVTTSEEVKIAPPKPLKKALKKLKRLNQQHSRKQAGSKNKKKSALRLARHHRKIGNKRLDFQHKLSTQLAKTKSVIVVEDLSVKEMLEKKDLSRPISDMGWGRFIFMLEYKTKWYGSLLKKAPSYICTLTS

SEQ ID NO: 47695 - protein, 365 aa, unknown
  TnpB Polypeptide
LQITVKIKLQPTKEQSKLLKAVMSEYIRLVNQIVSDFVSANAHLKYSSKDVVANLPSAVKNQAIRDAKSVFTKYTKAVKTNAKLKPEEQKDIKVPTLKKPVAIWNNQNYSLKGNILSFPVIIDGKSQRLEIEAILTNYQQERLVGKFGSLRITQKSGKYIAQIAVEATEQPNIADKVMGVDLGLKVPAVATTESGKTKFFGNGRQNKFIKRKHRSVRRKIGKLKKLKAIRKRHDKEQRWMKDTDHKVSRQIVNFAKENNVKVIRLEKLSGIRQTARTSRKNEKNLHTWSFYRLASFVEYKAFLEGIRVEYVNPRYTSQTCPSCGKRNHAKDRNYQCDCGFKAHRDRVGAINIISATVVAGNRLSA

SEQ ID NO: 47696 - protein, 419 aa, unknown
  TnpB Polypeptide
MTKAERIKQSIKETKERRKSLSPTTYQLKIQNLSKIGEENLNIVLLEAKWLYNWFIADINRVNIPTKDIKEIEIKVKEKLEKREIKLLGSHLKQAIQERVKDNLKVLKGLKNKGYKIGKLKFKKFISSIKLKQYKCSFDIDFKRNRVRIQGLGWFRVLGLHQVPQNSEIANAQLIKKPSGYYIYLTCYVKKKHFERDKVRDAVGIDFGIANKVILSNGLSIDFEVKESKRLKKLQKELTRKRRGSKNREKLLKKIQREYERLTNIRRDIHNKLLALLRHYGAVVYQDDNIKAWHEGWFGSQVQHAGIGTLKARLRNNLATIPVKRFEPTTQECCVCGRKQKLKLSDRLYVCPGCGNTINRDLNSAVNILKKGLDLSLNQVVGADHPELTPVERELVAKILGSNPYIKATSLVEAGSSYF

SEQ ID NO: 47697 - protein, 463 aa, Sulfobacillus sp.
MQSALKMRLEVDQHTAAVLDGQSRIANWLYNHLLEKANELRKRFRETRDPAVGKVLYTKCGLRNRIPALKQEYPFLRTVHSSVLKNAALRLSSAIREYQKGRRGERAKRAGWPKFRSWKREWFSLQYDEPWKGFRLAGRTLVLSLGMALDGATGQRKPVHVSTRLAEPLPDWFEPGMVRQLRIVKEGRLFYAVFTVERPVPSRRPVGRVIAMDPNHKNLGYGVDSEGVATEILNPWFLKILDRRIDEVKSLRDRCQRQSVRVVREDGSEAWLPSRRRRKLNERLEELWRVRREQTKVSLRTVANRLYREYDGVFVGDYAPQGGGISRGMRRAMNNQSLIGRFKETLAWVAVRSGKVYGEWDEDGSTRTCHACHYKVPGGIPPEVREWTCPDCGTHHIRDENAAINGLAQVLKKVEVPCSGRLGGRVAVWTRRAWRFDGLGIAEVPGAVGGRVRDHAASRQEIQ

SEQ ID NO: 47698 - protein, 445 aa, Proteus sp.
VTYPREIQKKRAVYSILIRFYYPLPKSYRAHVSFFMDQSIIGNMKRLQAFKFQLRPNGQQEREMRRFAGACRFVFNRALARQNENHEAGNKYIPYTKMASWLIEWKSDTETQWLKEAPSQPLQQSLKDLERAYKNFFQQRTAFPRFKKRGKNDAFRYPQGVKLDQSNSRISLPKLGWMRYRNSREVVGEVRNVTVSQSCGKWYVSIQTEYEATEPQHESTSIVGLDAGVTKLATLSDGTVYPPVSSFKVNQRKLARLQRKLSRKIKFSANWQKQKRKIQRLHSHIANIRKDYLHKVTSEISKNHAMIVIEDLKVSNMSKSAKGTTERHGRNVKAKSGLNRSILEQGWYEMRRQLEYKQLWRGGQVLAIPPAYTSQKCACCGHTAKENRPSQSQFECLECGYTANADINGARNILAAGHAVLASGGRVQSDRPSKQEPAEVIQTSV

SEQ ID NO: 47699 - protein, 266 aa, Proteus sp.
LRLSREVVGEVRNVTVSQSCGKWYVSIQTEYEATEPQPESTSIVGLDAGVTKLATLSDGTVYPPVSSFKVNQRKLARLQRKLSRKIKFSANWQTQKRKIQRLHSHIANIRKDYLHKVTSEISKNHAMIVIEDLKVSNMSKSAKGTTERPGRNVKAKSGLNRSILEQGWYEMRRQLEYKQLWRGGQVVAIPPAYTSQKCACCGHTAKENRQSQSQFECLECGYTANADINGARNILAAGHAVLACGGRVQSDRPSKQEPAEVIQTSV

SEQ ID NO: 47700 - protein, 412 aa, Clostridiales sp.
MKLSLKVYPRWKESQVAIIQELSFHTTKLYNIANYICTEKYLPYIKLDKELKTNWHCKYLHSHTRQQCLKILEQNWKSYFKSYEDYKKSPRKYKGIPRPPRYKHTEKKRNEVIFTNFAIRRKDGYLHLSLSKTMQQKFEVESLKVEENFPLPQDCSLQQIRLQFNQHQKQWELLIIYQVKEEELPKDYSNTLAIDLGLDNLATITFSHSSHSYIICGRSLKDINRHINYKISCLQSISMKQLGAKNFKNTKQINNLRKKRHNKITNTLHQGSRKIIQLAVEYKVGKIVIGDIKGIKHKSHLKTFVQIPLQRLVQMIEYKAELAGIQIEYQKEHYTSGVSSIDLEPISEQYYDKTRRITRGLFKSETGILLNSDVNGSLNILRKNMQNKGIPYLIQLVRDRGCVDHPKRIRVA

SEQ ID NO: 47701 - protein, 376 aa, Clostridiales sp.
MVLKAYKYRIYPNEEQKVQLAKTFGCARFVYNYYLAEKIKLYKDKQESLSKIDCNNHLNRELKKELIWLKEVDKFALTNSIYNLDTAYQHFFRRVKQGKDKTGFPRFKSRHSNRLSYTTNFTNNNIKIDFSDNKIKLPKLKWIESKVHREFDGKIKSANIVQNSSGRYYVSILVDTEAKDLPLPKVDKTIGLDLGISNFLIDSDGNTISNPKNLYKHERKLAKLQRQLAKKQKTSNSRNKMRIKVARLHEKISDTRRDFLHKLSKQIINENQIIVSEDLNVRGMVRNHKLAKAISDVAWSEFTRQLEYKANWYCRTYVKIDRLFPSSQLCSHCGFKDTKTKSLSVREWTCDNCGNEHDRDINASRNILQEGLRMLA

SEQ ID NO: 47702 - protein, 437 aa, unknown
  TnpB Polypeptide
VAKGLNCAWIADHVDAVLAQTLASRAYRALNRVCLGQARRVRFKSRGRGLSSVENKRNDTGLRFVLQPPEGGNTGYLLWQGDRLEALSDWQDPVVTYSLRHPIKYARLLVRQASSARAQGADNPSQRYCVQLVLEGVPYHKPKHLVGQDTVGLDLGSSTIAIVPRKGPPRLEGFCAELVPDASAIRRLQRQLDRQRRTNNTANYDERGRVKTGRLSWKHRKRYLATRQRKATRERTLAAHRKTLHGRLVHEIVAVGKTILTEKISYRAWQKQFGKSVGLRAPGMFLDMLKRTVARTGGTLVEVPTRSTRLSQFCHGCGQFIPKPLSQRWHQCPCGIGPIQRDLYSAFLAAYLDPADSLPSCAQQRYAACWEGREPGLQAAYEHAVQRASVGQHLPRSFGIPRVRARLPESPRCVPQEPACREKRRETWKQGEEPPGL

SEQ ID NO: 47703 - protein, 408 aa, unknown
  TnpB Polypeptide
MPILAHKIRLYPNNKQETLFRKSCGVARFAYNWALVEWTRQYKAGEKPSYFSLNKLLNSIKETEYPWMKEISKNVPQRAVENLSRAYKNTFTNIKKGKKGKKAGFPKFKKKYHHDSFRADTGTSKQSPNTVKITKDKVKLPRIGWVRLAEPLRFSGRIISAVVSRSADKWFVSLNVETDQKLSIKADLGSVGVDLGITTLATLSTGEEIVGPKAYTKQLKQLRRLSKSLSRKQKGSNNRAKAKTKLARLHFKIANIRKDSLHKLTNKLVTNYSVIGIEDLNTSGMVKNRKLSRSISDMGWFEFKRQLLYKAEMTGSKVVIIDRFFPSTKTCSDCGMIHKMPLSKRMMVCDCGLVMKRDLNAAINLKHKAVSSTVSACGEESSGFGGLTETKLASEKQELSFDFIEKLN

SEQ ID NO: 47704 - protein, 605 aa, Rhodococcus sp.
MSTSGDRRTEVAARQFSVTTRAHAAVDDATGEPIGLDDVDTRVGWLLDLITAAGAELVSRLWQPATFDVLAAGRDRQDRRLPTQGHVAAARLGWNPIYPDGVYVPSRVSRVVTAQVMTTLRTLAYRDTAITALSARFDPATGVVAPPTGPGDHVPSGFARGVRRQLIARSRRGGGAPACRLRITDVQGPPQTSAMARLSAADRQLAQITVTDRELVLTVKLPTSPTPAGRTQWRNVRLTATIPAHLHGRAITDWHLPTLVLDHRGLLWRCAATEMVPAADLTGGTVAVGVDWSPTTLGAAAITAEGAGGLSSDYRGWTYDDRGLGIKLARLQAEGQLLHAKAARLTQLSATAPPEVRAQLEEKIAVLDAHRTAVGIKRGKINRELAFHFARQVTEYAAAAGAQVIAVEDLTTLETRGHGRVNNNRAAQSARRQAVAALAHTAAGVGIAVVSVPARGSSALCPGCDEPLSRPGGYHTAWCSRCRVGGNRDHMAGVNLAKRALLGRNKATKRRGQSPVVRVAEHAPVRRCRDKKSPTPRRPRHRRVRRSLPTTTRRLGVNPKQHVPALQASVWDTVKPTPPHGDTGSRDARTSQASAILVADSMRST

SEQ ID NO: 47705 - protein, 466 aa, Sarcina sp.
MYLAERTVITERIHKQAFTLADRNARLAKPLYNAALFRIRQAFTGWDKTDRTDNEKEVFRELDLLKKTYPKLGVGRVLSYRALEKLMRVTGNPDFFSGLPMQTAQAVLKAAAGDFKNWLAALRAYRKDPSGFLGRPRMPGYCKSEKKTFTITNQDAVLYPVYRDEDGMRAYAGMELKLPGIRQRLKLPQLPEDAVLKEVKVSPYYGRYVLALVLEVKDAPKDTGAEEAPYMAGIDFGTDNIAAIVTTDRASRVYKGGAVLANNRLFHKEKAKAVGILTKGKCHARASSRHLDFLSRKHDGFVRDEVHKISADIVRFLREHRVGILVIGSNPLWKQRTGIGDANNQNFTSVPHALLRWMITYKAGAAGIRVIVQEESYTSKADVTSGDEIPVYGKPGSEKVVFSGKRIKRGLYRCADGLVINADCNGAANILRKAIPDAWEGINDFRFLAHPEAVTYRTLNRCRAAG

SEQ ID NO: 47706 - protein, 291 aa, Streptomyces sp.
VERLGRKWGRVKLPKLGWVRFWWSRPLGGEIRSATVSWKSGRWFVSFLVDDGAVTPERHAMPGTAVGVDRGVAAAAVTSDGEFFDREFITPGETTRYRRLQQRLARTKKGSTNRHKVITAMGRIVARVTDRRGDFWAKTAAHLVQKNALVVLEDLRVKNMSASASGTVAEPGRRVRQKAGLNRAILDKGWHRLELALTSAARYTGTTLVKVNPAYTSQRCYACGFVTEGNRESQSVFVCKNPGCGNVDHADVNAAKNIRHAGGQPVSACGDLGTGQSAKQEPGSRATGQAT

SEQ ID NO: 47707 - protein, 390 aa, Streptomyces sp.
LRPGGLQRCACRAKGRLPGGQVAHPDGTAGQEGDHRGEADARAAVAGRGLRGRVAVLAAGLGCGPCELLRVGDRQAAWAPHRSAGVQEEVRRPAVGAVLEERVPAAGQRTAESGEAGDVRVRWSRPLPSPPSSVTVIRESSVRYFASFGVDAWPEPAEPVTAEVGIDLGLTRYAVLSDGTVIDNPRFLRRAEGRLRKAQQALSRKAKGPKMRARARIKVARAHARVSDARRDRCHQTASRPVRDNQAVYLEDLAVSGLARTRLAKSVHDAAWGMFRRVLEGKAARAGRHVGVVSRWLPSSRTCSVCWAVDGKKPLHVRTWRCEGCGTEHDRDLNASRVILAAGQAERRNAPGGPVRPEAAIPRQARPAERGTHPKPQPVTTGRQAGIPLL

SEQ ID NO: 47708 - protein, 385 aa, Streptomyces sp.
LKIVTQVKLIPEAGQAAALAATLRTVNDLATWVSEVAFVNDVPREYELRKHTYAHLKASGLGAQAAQHVIKKVRDAYTTLHANLRAGNYGKPGSKRRRKVDSKPIAFRSDAAQPYDDRCLSWQYDAQTVSIWTTAGRIKGVPFACSPHALTTLQQYRKGESDLIERDGSFYLIATCEIPEGAPYEPDSFIGVDLGIVNLATTSTGYQAAGRGLNRYRKRQLTLRAKLQKKRTKSAKRRLKERSRREQRHLKNTNHVIAKTIVTEAERTSAGISLEELKGIRRRVRLRKPQRVTLHSWAFAQLGDFVVYKAKRAGVPLVFVDPAYTSQTCAECGHIDKRNRVDQGLFICRGCGVVAHADRNASHNIAQRGVTVWNAGRESRVPATP

SEQ ID NO: 47709 - protein, 404 aa, unknown
  TnpB Polypeptide
VIRTTEHSLKYITDYKKQKLDILFEEYQRVVNCYINVFWNQTSWKSKATSDEYKLVDSWLMGKVMKCAYTQAIQIIRSTKDKQKKLVYKQYKRVYSKVKNKNKNWDIVNQTFTEWSKGKTFRDRTKIPFFSGDSIELNSDLCKIYQDVSIYHFDMVVRLGSIWGNRLSLELPIRKHRHFNQLLQSGFNVKSSLRLSRKNNKYSINLYLSKEFEECKDEGDIIGIDVGVKKLMTVSNNTFIGTEIESIIKKYKRRKQNSKNSKKILKQIKDYIGSSVNQLDFENTQCIVMEDIKSSNMLIKGRTNKEFRKTLSKWNHNLLVGRIRNKCELNRVELRFISPHYTSQQCSQCGEIHKESRKCELYQCVSCGYEIDADYNASLNIVNKFLNKEFAVPNNTKTSIPIFS

SEQ ID NO: 47710 - protein, 384 aa, unknown
  TnpB Polypeptide
MIQKVERHVIRKNNANWQACHKLCSLSRKLGNCAVYLLRHRVFEKAPVLTRKELDTELRHQYGSDYRAMPSAASAQRQGQVIAKQFKGFAKAAAEYSKHPEKFQGKPRLPGYRKKYRTFYVGRNGYQIRDGQLTITGGKDIGFSPIRVVCCERQEFNAKAEEAIAGDLRIIPMENTFIVELTYRVDKDECKNSKSVSLNPNEALCCDLGIDNFATFVSTKPGVRPFLVKGKILKSINQRYNKQVAELRSKKHHEHIRIKGVKRYWQLQDLMHKISRLAVNFCLAHDLGRIVIGTNRNWKQRVNLGKRNNQNFVMLPHNKFIEMVRYKAEEYGIQVTVREESYTSKASAMDFDEIPDFDPKERKPAISFSGKRFKRGLYQSSKDI

SEQ ID NO: 47711 - protein, 424 aa, Halobacteriales sp.
MEVRRTVLVKLDVDSDDAALLHETVAEFLWAANHVVDHAWQGNYKTTSKAQLQEETYGEVRDRTRLHANLVQNARNKAADAVQSVVARWKQGEYAGKPHFSKPTAVYDKRCATFLDEYVSLATVDGRIEVEYFLPDPVRDTPHSRYLDNDDYRVTGAELHHRDGEWFLHLRTKAEVESDTLEQAATEHPTVLGVDLGVNQLAVTSTGTFWSGREFDHWRREYEKRPASLQQCGSRHAHENIQAVGRKETGRFKMMLHRIANGIIEEAAENGCTVIAFEELTGIRDRLSGASWGHEWAFERIYEYVEYKAEPHGISVEQVDPENTSRRCSTCGFTHPDNRDGTAFECLKCGYQNHADYNAAKNIGLRYLRRIQTGDGGGAPVGVRLNRGTLNANGEYNPPAGNGQSGSPRESPTLNEANGEAVSE

SEQ ID NO: 47712 - protein, 398 aa, unknown
  TnpB Polypeptide
MSKRYTVRRLKVGQSAQMDTLARASGELYARIVTSYWRTVRHKGLWLKAKHLMRWHTSDALHAHTSDACVQSFFAALDSWRARRTDDPDAHPPRKRRSYYRVQWKASAIRIKGDDLHLSNGKGNAPLIVPWAHGLPLQVEMGWDGRQYEIRATYAVDAPAVAPVAGAPVAGVDLGEIHPAVAHDGARAIVMNGRYLRSVRRYQNKTKGTLQALLARKRKGSHRWKRLVRSKKRQQRRWDHQIKDVAHKITSRLVSTLHENGVQTVAIGDIRDIRKRVDVGHRGNQRIHQMPSGIIRHMVTYKAERLGMAVVMQNERYTSQTCPACQARHKPRGREYRCKACGFTMHRDAVGALNIRQKYLDSGPVVGVMASPTVGVRYHAHLPRSPLPQGQRERIPAL

SEQ ID NO: 47713 - protein, 386 aa, unknown
  TnpB Polypeptide
MQQKKAYKYRIYPTAEQVHILARTFGCCRYVYNWALRQRTDAYYKDGERLYYEATAQRLTSLKKQADHVWLNDISSVPLQQSLRHLDTAFRHFFEGRAQYPKFHKKHGEQAATYASTAFKWDGTSLTLAKMSEPLTIVVSRPLPKGAKPSTVSVSKDCANRYFVSILLEEDIEPLPVVNKQVGLDLGLKSMVVTSDGYTYGNPKFFAKDEKKLAQAQRRQTRKKKGSKNRAKARHKVAKIHAKIADRRRDYQHKLSTHIIRENQIVCVESLQVKNMVQNHRLAKAISDVGWGEFVRQLEYKAKWYGRTLVRIDKFYPSSKRCFDCGHVLDTLSLDVRVWTCPECGVIHDRDINAAKNIHAAGLTVFDACGEAVRPGRAKARVGKPR

SEQ ID NO: 47714 - protein, 385 aa, unknown
  TnpB Polypeptide
VATIVRTAAVRLEVSAEDSVKLEETQSLYGKASRLLAEIMREQPRGMRPWQRHNLHHAGYRRVRSEIPELGSQLVCNTVRSVSAAAKSWISNNPKFLKDDKIELPAFKFANPIVHLDKNTISYSADRKTASIYTTTGRIKATLAPGAFQEEILSSGAWKESNLVFRKGKRGKPGHWELHIAVEQPSRKVSLEGLTKDQVEGTDVGENNMAATTHGLWKGGKLKYDRDCYLALRKRLQCNGSRSANQHLRKASGRERRHVKHVNNVVSKQIVQEAKANGIRVIVLEDLTHIRDRIKAGLRVRTRLHRWPFRELQEMIVHKAAREGIEVVFVDPRYTSQTCSKCKALGKRRKHRFVCSNCGNRAHADVNSACNLRDLGYQWITQGEK

SEQ ID NO: 47715 - protein, 405 aa, Trebonia sp.
MCTAYKCRAYPDPEQASVLNRTFGCVRVVWNRTLAWRQDRYRTEQASTSYAQASACLTALKATQELGWLNEVSSVPLQQAIRHQQAAFTSFFAGRARCPRYKSRSGRQAAEYTRSGFRYRDGQLLLAKMSTPLAFAWSWPDVDPASLDPSTVTVSRDPCGRWYVSLAVEVPAPAPLPAAGAVVGVDLGIKDFAVTSDGHRIANPRRLARRERSLARYQRRLARCQQGSANRAKARAKVARAHRKVRASRSDFLHRTSARLVRDHDVIVIEDLAVKNMVRNHSLAKAISDCGWATFRRMLEYKAVRGGRRLIVIDRWYPSSKTCSACGHLLPELPLSTRTWQCPSCGTRHDRDVNAAKNILAAGLAVTACGADVRHPGSSWVRSAMKQEPRPVRTGIPVLQLQDGE

SEQ ID NO: 47716 - protein, 423 aa, unknown
  TnpB Polypeptide
MQLTERHLIKPNHELYRTLDDLTFKAKNLYNHGLYLYRQSFFEYKNNPSNPVLSWVEIDKNLRKQGHEDIRALPAKVANAVLKNLGESITSYWKLVRLKRKGGLGQKPGLPRYLHKTNGRYPLSFNYQTFGSKRGTNNELILCPKGINLPIPTKVDNPKQVRIVPNRHNFIIEVIYNVEEQEFKSTSRYAGIDLGVDNFATVTFSTRNKPLIVKGLELKSINQGYNRLISKAQSLLPGTQKTSKSIHRLWSRRSWILRTKIHQMTAFLATLFDEMQIEKVFIGKNVNWKQRLRFGKAVKQRFAYLPYETFIEQLHYKCRLRGISVVAQEESYTSKASFLDNDDIPVHGEVENPRFSGRRIMRGLYRAGSGQLINADVNGSYNIMRKGLITNHQSLHMDNPLVQPLVVKGIGKEPNEKLVKLYM

SEQ ID NO: 47717 - protein, 372 aa, unknown
  TnpB Polypeptide
MLKAYKYRIYPNKVQTEQIEKQFGACRFVYNWALEQKIKAYQTDKKTLSCFAITNQLAILKKSEGYEWLNEGNSQALQMAIRNLDNAFTKFFREKKGFPKFKSKKNPVQSFQLPQNYIVDFEEKNVKLPKMGKVRASFSREFNGIPKTATISRSTTGKYYISILVEDGNGLPTKQEFADENTVGVDVGIKDFAVLSNGEKVDNPKYLKNSLQKLKVIQRKVSRKVKGSNNYKKAKLKLARLHEKITNQRNDFQHKLSMKLVRENQAIALETLKVCNMIKNHNLAQAISDAGWSSFVTKLEYKAEWYGKTILRIGTFEPSSKLCSTCGYHNKELTLAVREWTCPVCKTKHDRDINAAINIKKFALIDQNLIGI

SEQ ID NO: 47718 - protein, 350 aa, unknown
  TnpB Polypeptide
MILTFKLKHDKDFSNELKKAFEVAEFTVLNKIRSPNTTFVKDIRGILPSSIACQVMKKYGHQRTIKEVHNVNLIVPNQGIKYFEETNSIWIPCLKLHLENTIPYTFTKINQIELDKEYAYVSCTVAEQPEMIPQQFIGVDRNTTGHVAVTANPDTGKIEKLGKSALHIHRKYFAIRKQLQREGKFRKLAVAKDRESRIVKDLNHKISRKIVDMAQVQHAALVFEDLGGIRQTRKQHRSFKYALHSWSFYQLQQFVEYKAKLLGVPVLYVDPAYTSQDCSRCGARGQRNGKDFKCPTCGHVDHADVNAAFNIALKVKDMIDRTQKEMCTMGALIPHDAMLECPVTLEPHAL

SEQ ID NO: 47719 - protein, 407 aa, Streptomyces sp.
MQLRYSFRLYPGPGQRIALARAFGCARVVYNDAVRAREDARRAGEPFPTAGALSQKLITRAKRTPERSWLGEVSAVLLQQSLRDMEAAYRNFFASRNGTRNGPKVGAPRFKSRKDHRQSIRFTANARWSITPTGRLNLPKIGEVRVRWSRALPAVPSSVTVIKDAAGRYFASFVVGTDPAADAARMPASDQAVGIDLGLTHFAVLSDGTKIDSPRFLRRAEKKLKKAQRELSRKQKGSRNREKARRKVARAHARVADARREFHHQLSTKLIRENQAVAVEDLAVGGLARTRLARSVHDAGWSQFVNMLEYKAARYGRTLVKVGRFEPTSQVCSTCGTNSGPKPLGVREWTCSGCGTVHDRDHNAAKNVKRAAGLAVTACRAPVGPEPVLAQREETGSHGSPPDARAA

SEQ ID NO: 47720 - protein, 364 aa, unknown
  TnpB Polypeptide
MKRTLKFSLNLANVHKIQALKDLSEEYKKAVNYYLQILSSKGEYILSEEEVKSFNSSLSYRYKQCANRQAIKIWKSWRRNKKKGNLPEFDGSLILDSRFIEMEKAKNSTFDYWVKISTLNKGKRILIPVQSYDYANQYFDSWKLVNGGRIKLENNKWFLLLTFEKETPSKKNKGKAIGVDIGIKKLIITSEGKVYGKEIEPLMDKIQRKEQGSKAFKKALKERNYYINRTVKKLPFTNAKTVVMENIKDIKRNTKKERRLKKEFRSKFQRWTYPRLFSRVNQLCELNSVYFFTINPAFTSQTCNICGFVHKLNRKGEKFLCKNCGYTEDADFNASKNILKSYLAQQFMVAGSEKVSEVDICPLN

SEQ ID NO: 47721 - protein, 365 aa, Escherichia sp.
  misc_feature (365)..(365): Xaa can be any naturally occurring amino acid
VKRLQAFKFQLRPGGQQEHEMRRFAGACRFVFNRALALQNENHEAGNKYIPYGKMASWLVEWKNATETQWLKDAPSQPLQQSLKDLERAYKNFFQKRAAFPRFKKRGQNDAFRYPQGVKLYQENSRIFLPKLGWMRYRNSRQVTGVVKNVTVSQSCGKWYISIQTESEVSTPVHPSASMVGLDAGVAKLATLSDGTVFEPVNSFQKKQKTLARLQRQLSRKVEFSNNWQKQKRKIQRLHSRIANIRRDYLHKVTTTVSKKHAMIVIEDLKVSNMSKSAAGTVSQPGRNVRAKSGLNRSVLDQGWYEMRRQLEYKQLWRGGQVLAVPPAYTSQRCACCGHTAKENRLSQSQFRCQVCGYTANADVX

SEQ ID NO: 47722 - protein, 433 aa, Streptomyces sp.
MSRFRMYPTPAQAEQMLLHCAHARYVWNLAVEQHGHWRPGRRSAPGFAEQCRQLTGARRESEWLAAGNADVQQQALKDFAQAKSARFTSGFGEPTWRRKHVHEGFRVIGTDRVPEFEPDGSAKLNRKTGKQVMGRSVVVQRLNRRWAQVRVPGCGWVRFRLSARGEGARLPVAKTFRVTCRNGQWHIAFAVVPEPVPAPGRGEVVGVDRGVRITAALSDGRKLNCPQLTVRERAQIRKHERRAARAPKGSAGKAAAYARAAGLKAREVNRRKDWCEKTSTMLARGYDVIRFEKLNIKNMTRSAKGTAERPGTKVRQKAGLNRGILAQGWGLLRQRTGHKAPGRVEDVPAPYTSLRCSACGWIEKRSRKSQADFVCVSCGFTCNADENASINVAAGQGGIPRPRQDAGAGGVTAATSRSSAREPQPTRVGIPLI

SEQ ID NO: 47723 - protein, 429 aa, unknown
  TnpB Polypeptide
VATKRYKYQVRGNSLVPEQRVAVAKTFGCARVVFNDVIHAREKAFQNGDPFPTSGELSKRLITQAKHTPEREWLSEPSVVVLQQALVDADRAYRNYFQSLSGKRKGQRVGKPRYKSKRDRRQSARFTRNARFRVRVVSGKRALLTLPGIPGELPLAYSRSLPSDPSSVTLIQEPDGTLFASFVVETPDREPLPANARHAGADPGLDVLLSVVVDDGTRYKAPNPRHLRKAERGLAKKQKALSRKEKGSNNREKARVEVARAHRKVRNARLDHAHKLSLMLVRENQTIGIEATNVRGLARAGAKGRRGRGLRKSVHDAGWGQLVRLLTEKAVEYGRTVTPCEAAYSSQTCSVCGVIDGPKPLSVREWECQSCGAWLDRDDNSATNFLVAGGHSDTINACGGDMRLALASAVSREAGTTGNPQGTTSPKAA

SEQ ID NO: 47724 - protein, 412 aa, unknown
  TnpB Polypeptide
MRSQKIRLKLTKEQEHLAWWYSKVSRNFWNLLVDIDKHNNKGEFDKILNKNGNKTYYSKFYDREIYSLNQSDYLKLAKLVVAHNYEEDNENWSWYYQPNQSFIYTFLSRELVKIRKQNKGRLNFRSINKIQPNFNVRCDVSSDKKRPSRIYLKNSGELQIPTIGDVRFGSIRADFNLSCKKQVAKISFDGKYWYLSYTEDVESQVAELPDYTDGVGIDLGIKTLATVSDGTAVPNIKTFRRVRILNKRLKRLQRKVSRKYLINKCNKHNKTKNIIKLERRIKLIHRSLRNIRINHIRKFVSELVQKQPQFIAIEDLNVKGMMRNKHLAKDVANCSFYTIKEQLMRKAKERFIAIRLVERFYPSSKTCSNCGHYKKDLKLSQRVYHCSHCQEKIDRDFNASLNLAKTDRYVLA

SEQ ID NO: 47725 - protein, 266 aa, Streptomyces sp.
MRPHFVSGPLSSTRAARLLPLPGRDQDGRRGPEETGNGARTTPARKRVPRPSHPAAHPPAPAVPELNWEETETGIDLGLSTYAVLRGRKIASPKFFRRQEKKLKRAQRKLSRCEKGSSNRRKAKLAVAKIHARIADKRRDFIEQETTRIVRESQAVYLEDLNVKGMGSKKGKRAKSVHDRSLGMFARALEAKCARYGRGFAKVDRFFPSTQMCSACGSIEGPKGLEGLRVRSWTCSCGAVHDRDVNAEINIRREGKRLLAAGRAER

SEQ ID NO: 47726 - protein, 379 aa, Streptomyces sp.
MRVRFTIRASLRRGPAECPGAQGHGQGGEGDRDQCAVEQGRGGVRADVRRPDRVDEIAQRHDMREHIEPGGPQRHRQHQPGQQHRRHGDGVDDGGRTPGVCARHSFEGHTGGHTPAGRVTGARLVREPDGWYVAFRCALQRESPVQGTHSGPAVGLDRGVVVPLATSAPDMPYVSHGPWLHPKERERLRRFERKAARQRRSARRGRPVSGRLQRTYTHIAELRGREKRRRADWHHKVTTVLADRYALIGVEQLNVRAMTARVRGSVDRPSRAVAQKTGLNRAILGEGRSRILALLDYKAAERGGVVVRVPTGAADDDPLPGLMAGQINWVHQALMTTVTEEMIAGRKPAEVSREALVLLDDMEELLSEKVLNYAVRAAR

SEQ ID NO: 47727 - protein, 523 aa, Yangia sp.
MSLDAGPNQALTEADVLASFPALPQLMQAPEVVSQAAVFRIYPNKRQKEAFRQWIGAGRWVWNRCVEINQHLYDVEKRFAFHGELSSLLPQMKKANGLEWLAQPPAIHLVDICRRFDTALNKILADRRKIRAGGMKQKKAAGFPKFKKKRDRQGSIYLAPSCIKLIRREASPTAARGWVELPNMDQTEVWKKEVKSGPRKGQFNYFEKKRRYSIRIRGSRWPEGKIRSATIREDGPDVWVMSVQFDAPPPKLRRRGEDIPVPEPEVAARGYDLGLSAAVIGSDGEKVAPGRHLRKSLKKLRRIQRKSARRRQRRLELSTKQAARLPRSKGERLAYEQEARVHRQVRHARTDFLHKITSRAIAKSVVICAEDLNVSGMKQNSKLALSISDAGMGELLRQLDYKASRSGRHFVKVDRWAPSSKTCSACDHKLDELSLKTRRWTCPSCGCEHDRDENAALNILRWGLEEALRRGTPEVTSGESRALARGKGLRRNSARKALEERTGNIDTDEMSCLNTLAPHDSVQ

SEQ ID NO: 47728 - protein, 232 aa, Phytomonospora sp.
MSAPLSFTWSWPETGRDGIESRAADLAVTSGGERLTGPARLSRHERKPARHLRRAAHRRPGSRNRAKARAKTDRARGRARRARTDFPQRASTGLVRRYDLLVVEELAVTGPRPNRRYAKRPPDTGWPAFRSMLEYQAARWGRRLITVDRFFPSSRTCSHRGHLPARPADTTGRRTYPSCRTPHDRDVDAAKNILAEGRSVAACGADMGRRGTPLPRSAVKQEPSPARVRTLH

SEQ ID NO: 47729 - protein, 454 aa, Cyanobacteria sp.
  misc_feature (442)..(442): Xaa can be any naturally occurring amino acid
MPTLTYVKGLPTPAEELNSLGLTELEMFLTAYSPVFRKAACETANHLLTGSRFNKSNWNTHLQTTYGISKRHANGAISYAQGAVDASKEHRKRHIKTLEGKLKSVNSWISRSEKKLADSQKFYFKKNWQNSKTGCRLPLSCSLEFRGTNWQNLRFQLHHKKRRTYQLTKQIEHLKTARIQTVIPKNQVFVVGSKDESFGNQVCQWDGDILKFRVPACLESRFGKYVQTKLGSFDRNINRLPKDGSKTWHFYRKDGKWNAAVQFTPVPAKRVSKHSAYGCIGIDINPGSIGWVYIDDDGNLKAHGQIPLQIGLPSGKQDAQIVDASLQLATLASTFACPIVCEELDFSAKKEELSERGRKYARMLSSWAYSRFYELLESILSNRGIYLMRVNPAYSSVIGLVKYARQYGLASDEAAAMAIARRGMRLTEKIPGSITAYLSVKXWKARMEPVESTQ

SEQ ID NO: 47730 - protein, 558 aa, unknown
  TnpB Polypeptide
MSRRLRSITVPFVVAPPKGARVRTRLMVDDHDAAALRAIGAHLGSLAGEDLARRCNEGKRGAKQRAQSRTERKRDLTARSSSRWAGAITRTSEDAWQLAYRNLLAERRSLSSRVNRIRRRLALATGTGRGRTRGYATRAERFEKQRRLQVLECRLAEAERRIADGRVSVCRGGRRLARTRHHREEAGLTEAGWRERWEVARQFITADGETDKAWGNETIRFHPDEHWVQVKLPAALSHLANRPHGRYQLSCPADFPYRGDEVAAQAASGAIRYDVSLDAEKGRWYLGASWTFAGTEIAPAPGDLRTDPVLAVDLNHGHLACCVVDPSGNPIGEPATVPIELAGLPASTRDGHLRKAISALTGLAREHGCRAIVIEDVDFAANRKEGRERQGNRPACGRRGKSFRRLVAGLPTAKFRERLIQMATNAGLFVVAVDPAYTSKWGAQHWLAPLKQASPQANGHHAAALVIGRRGLGHRARRRERCDSTRPEDREERAADSAVHGVATPIREPVDREAPERPHPRRKTRAAERNTTRGPGRQRPFVPPGSDDVLFVTFLRNG

SEQ ID NO: 47731 - protein, 418 aa, Chloroflexi sp.
MLLCKKIKIEVSQQDAEALEFMQAKCRGLYNWWVMKLRNGERWNVNNAKKSLRESKQYDPELRFVYGKLLAEVYYRLDGAMQAFFRRVKAGEKPGFPRFKPRHQFFTLCYPAMYLGVQDKMIILSTGGGGNWGPKRYQNIVAHLTEEPPEHFHEVAVSRDARGNYYCSFVYDDAEQQEDDRRKTDKRRKERQPRPLRDDGIVAFDLGIKTLATGVNDQGRFYHIGGFKGYRYYNKQLDKIRSKRDKCKKKSRRYIHLSNVYKRVAEKKRRKQQDCLHKASHLIAGTLAERAVVIGDLSQRQMVIKKQEHEAPKDRRKRQIRNRMVYNDWGLYGFVQMLEYKCLRFGKELHIIDERDTTRMCHVCKRKRNITQRITSETSTLLASVHLRWRAASQAAYCLHLRARDKSPVFDRGSLDEL

SEQ ID NO: 47732 - protein, 518 aa, unknown
  TnpB Polypeptide
  misc_feature (160)..(279): Xaa can be any naturally occurring amino acid
MPSSGQLSGYEEREPISPAIPEEGVYEVKYENRRTNVVRLLPNGFQERKLRKLADASARLFNEVNYERRQQFFRGEKVDLQGTYQKYYEKYKGILGVNAQQVLNKNNEAWSSFFSLIKLKKQGKLPSHMNHVSPPRYWKKEKNRKLILVVRQDRYAVDEXXXXXXXXXXXXXXXXXXXXXXXXXXXXXXXXXXXXXXXXXXXXXXXXXXXXXXXXXXXXXXXXXXXXXXXXXXXXXXXXXXXXXXXXXXXXXXXXXXXXXXXXXXXXXXXXXXXXXXXXEVGVEETKTGKKSKYIVRGERKSIQVKSPKGNKVASIDLGINILASVVVDDGTWLLYKGVRIKEDYFYLQRKIAEVQSLPDKARKLGLVDEARNLEEYEAQEGLNRQKRRLFKKLTRRLLHLYRNLASNLLKQLYDQGVSIIYLGYPYNIAQDKGNKFTVNMWLYRELMNIIELKAQEYGMKVYEVVEYNTSRYCAYHDVQVSRNPRGVVSCPKGHKLHSDLNGALNILKKAVGIAVQR

SEQ ID NO: 47733 - protein, 380 aa, unknown
  TnpB Polypeptide
MNKTIRKAFKFRLKVSTETNQKLANYAGGCRFVWNKALALNLDRLNKKQPILRYDALDFWSKLWKQSDEYGFLKDLPSQVLQQKLMDLDKAFKDAFDKNQPFKRIPVFKRKGQSVDSIRYPQGFKIDQPANKVFLPKIGWVRYRNSRKIVGTPKNMTVSRKGKYWYISIQVEYETPEMSHKSTSAIGIDMGVKRFVTLSDGTFIEPLNSFKKSAEKLTTLQRKLKHKKKFSKNWHKQKAKITKHHEKIAAARRDFLHKKSTAICENQAVICIEDLKIKNMSKAAKLKNVKQKSGLNKAILDQGWGMFFDMLTYKQDWNGGMVIKVPPHHTSQKCPSCHHIAKENRLTQAEFVCVECGYKNNADVVGAVNVLTRGLSGASL

SEQ ID NO: 47734 - protein, 368 aa, unknown
  TnpB Polypeptide
MIQRAHTIKLKPNRTQEVLLSKTAGTARFAYNWGLAKWNELYEKGEKCSAYSLISLWKQERPEWSLEVGAACLQRPFMHLEGAFKAFFRGVRKHPVFHKKGLRDSFYVPAGQFRLFHNKISIPKVGRVRITERLRYEDAKMLSASVRRKADGWYVSISVEIEDERRTDSESFVGVDVGCKHLAVASDGTVCDTPGRLKDLERQLRRRQRLLARKQRGSKNRQKARLRVSRTFQRIQNIKNDTVHKFTATVAKNHGTVCLETLDVKGLQESDNRLVRKGVQNSCMSEILRQLKYKCNNFIEVDKYFPSSKTCSNCHSLKADLDLSDRVYTCQSCGLKIDRDLNAALNLRDEGIRIYTAGHAGRASGETR

SEQ ID NO: 47735 - protein, 401 aa, Snowella sp.
MLKVVKIRLYPDVQQQQSLAQAFGSCRWLWNYCLDLMNKTYLETGKGLSGYDIKKIIPQLKKEYEWLSKTYSQCLQQVCLSLGVAFNNFFEKRAQYPSFKSKHGKQSIQYPQNIKVNEKTLSVPKIGDIKAIIHRPIEGKIKTVNISKNCSNQYFAAILFDDGIKKPEQSMEGTAIGIDVGLTHFAITSNGSKFDNPRFLTKYEKNLKRKQQQLSRKQKGSTNRNKARMKVARVHRKIANCREDFLHKLSRRIVDENQVIVVENLNVKGMMKNHCLAKAIGQVGWGMFSTMLKYKVEDDGKIYQEVDRFFPSSKLCNVCLNQVGSLPLEMRHWTCEKCHTKHDRDINAAINIRNEGLRILTSGTGDKACRPDVNRSNRGRKKSTTTLSVGQEAYCVREASL

SEQ ID NO: 47736 - protein, 393 aa, Kribbella sp.
MYPTPAQAGGLLEQCAHARYVWNLALEQWSMWTRDKPPTPGYLDQARQLTEARAAFGWLRAGSQTVQQQALRDFDQATKNFYSGTHRRPTWRNASLCKGFRIVGHQASRVVKLNGKWAAVNVPKVGWVRFRLSRAVPDAKSYRITCDRRGRWHIAFAVIPQPVPAPGTGKVIGVDRGVAVSAALSSGELLTCPGLSERELERLKQLQRRLARCRDGSQRCRQVRASIARLHARAHDRRRDWVEKTTTDLARRFDLIRVEDLRITQMTKRPQPRHDPERPGTFVPNGRRAKAGLNRGILSNGWGLLVRRLQHKAAGRIEKVNPAYTSQTCSVCRHCAPENRESQAVFRCVACGHRANADVNAAVNIAAGRAVSARRETPVRVSPKREPQRATSA

SEQ ID NO: 47737 - protein, 537 aa, unknown
  TnpB Polypeptide
LLLDVPADDAQRRTSAGRGKIRRGPEMPVHEVPVHPAGELRSQPPGRHALEAVHEPGHGDFRRVLHQQVHVVVFPVELPQSGAKVCADLSHGVRAAPEHVRAEHAAPLLRHEDQMDVKRGNHVPAATVVLRDCHRPMVFSGVVQVRYRYRIYPAPGQQQALARAFGCARVVYNDCLRVRDEAHAAGEKISGTEVQRRVITLAKQTPERAWLGEVASVALVQACQDARRAYRNWFDSLSGKRKGRKAGHPAFRRKHQRQSIRLTRNGFTLHGERLYVAKAGDIKVEWSRELPSVPSSVTVIKEADGRYYASFVVERDPAPLPACDREAGIDLGLNSLAVTSDGEVIPSPGFLRAKERKLARAQRALSRKQKGSANRARARRRVAVVHRKVRETRLDHAHKTALRLVRDNQAVYAEDLAVLGLARTRLAKSVHDAGWAQLLRLAEEKAAQYGRTFRKIGRFEPTSQVCSACGVKDGPKPLRVREWTCASCGARHDRDVNAAKNVLSLGRRESLNACGGGVRPGRVLAAASETGTHRSAA

SEQ ID NO: 47738 - protein, 184 aa, Leptolyngbya sp.
IPQHYRASEKRLKRLQRSLSRKKKGSNRRKKAIKRVAKAHPKVSNQRKDFHYKTVKKLLSQGKHVAHEKLNIKGIARTRLAKSTHDAGWGQFLQILSIKAERAGLLTIAVNPNGTSQDCSGCGAKVPKTLKDRLHACPECGLTIDRDHNAAINIKHRAVGHSVLKAQVTSEAIAGVTEKPALYA

SEQ ID NO: 47739 - protein, 372 aa, unknown
  TnpB Polypeptide
MEKSYKFRIYPNKEQQKQIDITFSHCRYVYNYFLAQRIAIYKETGKSISQHEQSRELTKMRSTGETKWLMDVERSAYTYALKSLDAAYQNFFRGLKVGRHIGFPKFKSGKSNRFSYTTQKIGTNIKILDNCIRLPKLGLVKCRISKQIQGRILSATVSKNPSGKYFVSICCTDVEVEPLPKTNKTIGIDLGVKHLAVDSNGAEYPNNKYFAKSQKKLARLQRQLSRKPNGSKRHEKARIKVARLHEHISNQRNDQLHKLTTQLVRENDIICIEDLNVAGMMHNRHLAKAIFDTGMGEFRRQLQYKCDWYGKTLVEIDRFYPSSQICSCCGYQNHDVKDLSIREWTCPNCGTHHNRDVNAAKNILTEGLKQIA

SEQ ID NO: 47740 - protein, 341 aa, Methanosarcina sp.
VILTYKLRHHRDFSDELRKAKQVAEFGIKQKTLSSKDVKHIGLKSMISNQILRKYVKNKKVKSIKSVKLTIPNQGIKVEKRSRKITIPCLKLILEYQFPDFEKINQIEIGKEFACISVTIPDVETKKIDNYIGVDRNTTGHIAVVANPETGKIWKLGKKGLHIHNKYKNIRTSLQKKGKYRKIKQIKDRESRIVKDLNHKISRKIVDTAVKNNSGIKLEDLTGIRDNKKQKKSFRYALNSWSFYQLQMFIEYKAKMQGVEVVYIDPRYTSKSCSRCGLIGNRNGKSFKCICGYVDHADVNAAFNIGRSTKERDLVEGNTDTPKAALGSAKPMVQYHHPDRT

SEQ ID NO: 47741 - protein, 396 aa, unknown
  TnpB Polypeptide
MKLTNVVLVEGDYQTLEELAKITNGLWNKAVHLEKEKLKEGKFAFYAELCNCMKNDPLYRLLPSQTAQVVLQKLDGAIRSYIKLKRKDKKARMPGYHKPKTTWIVPYKSPQIKFEGDTLKLTLSKTYRKSSLTLKTYGRRREGELKYLELYSRNGVWFASIVREVKTPPRMKAHGNISIDSGIINLAATWNNENSELYKGGEVSAILRYREKENGRLQAVLASHGEKTSKAKKEMNRRLTAQARHAVHALTKTLVEKAVKERKGIVAGDLTGILNQKRSRKANQKLHSWMYRLMLFQLGYKCRLAGVPFKTRSERNTSRNCVVCHVAHRGGRVHRGLYRCKLYGQYNADSGAAYNLNVSPNSLDKRIGVVAALAQPAVVLWNDHCWSTRRDESFKP

SEQ ID NO: 47742 - protein, 472 aa, Scytonema sp.
MLLNYQYRTYLDTKQKIQLNEWLRIGRYWYNYQLGDRFNWWEQNRNYAVFPQGEFCQISCSLPPLMLRDNPNYYSQKKLLPVLKKDFVRVKHSGELLDYTKLPSQTMQDISRRVDIAFKRFLAGDSNGKRSGKPRFKNTASFRTLKIEGQAITIERTEKEWLFISASKLSGWLKIRLHRPLPQGFQLKNILLTRKADGWYATIALFDPTVPTFNPDDVVPTWDNSLGMDAVLLEDDYLATSQNTKLPNVKSFRKNQLRLGLISKRKAAKKKGSKSRRKLALSEARHHQRIARSRKDHAYKTAHAIVRTGKKVFYHEDLNLRGLTKRNKKKIDADGKFLKNGQSSKSGLNKSWNDAAFGQFFTTLDYIASKAGAVVVKVNPAYTSMLLSYRDEFVFTDCSIRNYFDPIESLNVDRDINSAVNIKRVGLGLFPTIKRRKGNPVVGNSITNSTSKEVLAALRNVPEAYTIFGTPN

SEQ ID NO: 47743 - protein, 385 aa, Chloroflexi sp.
VRKTFKYRLKPSKSQRTKLVETLELCRWVYNETLATRKDAWEQEGKALSLYDTNKLLTLWKQEHPELKDVFSQVLQNVQERVDLAFKAFFRRVKTEEKPGYPRFRGYGWYDSFTFKQFGFELLKSDLYLSKIGAIKIILHRPISGQIKTLTIQQDAVGNWYACFACEVEPEHLPLNELAVGIDVGLKSFATLSNGAKIENPRFFRNDEKELAKAQRKLSKAEKGTSERAKRRRAVQHVHQRIANGRKDFAHKLSREWVNSFGLIALEKLNSQTMLQNHRLAKSISDAAWNQLIAYTAYKAENAGRVVVLVDPRNTSKQCSYCGTMVKKSLSVRVHECHVCGLVMDRDENAAKNILRLGLESLGVALEAPVFWRGSSHVDDEYFPC

SEQ ID NO: 47744 - protein, 423 aa, Candidate division WPS-2 bacterium
MKYRLVVRLYPSARQAAACEHLLTVTRRLWNALLAQRRDAWKTRRLKISSKRQYHEITELRADDPWFASAYRECEDAVLHRLDLAYQKFFSGGGQPRFRPASRWSQFEFPHGDRAVRWVKNQDRITIPGVGSIRVRKGRARVIPAHGRAMVYRRCGKWYALFECEVAPKPLPATGKVVGIDRGIRALAATSDGELIANPRHAAKLALKVARAQRTLARRTIRDAAGRVRNGDGKNRVRAVKALQKVWNKVKRMRRGYLHEVARALVDRYDAIAVEKLFLAGMTRSAKGTKEAPGRNVRAKQRLNYAMLDASLAMLRTLVGEKAECAARLVIDVPAAYSSQTCSECGTVAAEARNGERYECVNVVCGYVGDADVNAARVIAQRAFGRPAGRGAGLPDPNDLRSEPSPGETRLTRQEVALGHTQR

SEQ ID NO: 47745 - protein, 369 aa, unknown
  TnpB Polypeptide
MKTFLFKLYRAKRNKKLNRQIDVAGLIWNHCLALHKRYYKFFGKYLEKSKLQKHLTKLKRRKKFSYLREINSQAVQDVTDRIDRAYRLFFNNFKRGVKCSPPHFRRVKKYKSFTLKQSGWKIEAWHNTIIINNQSYRYFKSREIVGKIKTITVKRDRVGDIFIFVVTDYKKHEVFARTGKSVGFDFGFKEKILIASDGKDVLAPSFLRSNMQALKRASKSLSKKKVGSKKRKQAQLELARIYRKADNRRKDFHWKLAQRLCSEYALICVEDLSLKGLQRRHGKKMQDYGFGMFLRILEYVASCMGTTLIKIDRFYPSSQLCSVCGNKNPEIKDLAVREWHCTKCGAHHDRDRNAAINILNEGTKMFLSA

SEQ ID NO: 47746 - protein, 402 aa, unknown
  TnpB Polypeptide
MSRYRLLPSPIQEAVLRAHCTHARFVWNLAVEQHSHWRPGRLSAPGYLEQCRQLTQARAQHSWLAAGSQMVQQQALRDFAQAMRAFFDPANPARRPSWRKAGRNEGFRIVAVKSEQVRRLSRNTGEVWVPKAGWVRFRWSRTVPQGAKSYRVTLDQAGRWHIAFAYVPDPIPAPGNGKVVGIDRGVTVSAALSTGELASASGLTTRGRRRMRRLERRLARARNGSNRRGRVRLAIGRLRARETDRRKDWAEKTSTNIAERFDVIRIENLKIRNMTRSAKGTARNPGRNVRGKAGLNREILRSGWGLLVRRLEEKAPGRVEKVNPAYTSQRCSACGHVDAKSRESQAHFVCTACGFVGHADVNAARNIAAGHPTHLPIPLHSRGGDGAARPVNREPQLLLQSA

SEQ ID NO: 47747 - protein, 286 aa, Microcystis sp.
MEKAYFYRFYPTPEQESLLRRTLGCVRLVYNKALHERTQAWYERQERLGYAQTSSMLTDWKKQEELDFLNEVSCVPLQQGLRHLQTAFTNFFAGRTKYPNFKKKHQGGSAEFTKSAFKFKDKQIYLAKCTEPLPIRWSRQIPESCEPSTVTVRLHPSGRWHISIRFDDPTIKPLPVTDKAIGIDLGISSLVITSDGDKVSNPKHFNKHYRRLRKAQKSLSRKQKGSKNREKARIKVAKIHAQITDSRKDHLHKLTTQLFRENQTIVVENLAIKNMVKKPEIISGNI

SEQ ID NO: 47748 - protein, 383 aa, Bacillus sp.
MLVNKAYKFRIYPNKEQEIFIAKTIGCSRFIFNHFLAKWNDAYKETGIGLSYGSCSAELPSLKKELEWLKEVDSIAIQSSLKNLADSYSRFFKKQNNAPRFKSKKNNVQSYTTKQTNRNIAVLDKHIKLPKLGLVRFAKSREVEGRILNATVRRNPSGKYFVSILVETEVEEKPKTGSSVGMDVGLKDFSILPDGTVYKNPKFFRSLEKKLAKEQRILSRRKEMAIKQKRKLSESKNYQKQRIKVACIHERMVNSRTDYLHKISTEIIKNHDVIGIEDLQVSNMLKYHKLAKAISEVSWSQFRTMLEYKAKWYGKQVVVVGKTFASSQLCSICGCKNKDVKKLNLREWDCPECQTHHDRDINAGQNLKNEALRLLTAGTAGIA

SEQ ID NO: 47749 - protein, 363 aa, unknown
  TnpB Polypeptide
VRKAYRFKLNPNKQQRYALARTLDVCRELYNDALYQRKLHHITRFQQDRELTQLKAAFPVYKNVHSQVLQNILNRLDKTFQNFFRSGFGFPRFKSENKFDSFTYPQAGFSLAGNQLSLSKIGNVKCRVSRELPADAVIKTCTVKRSVNGWFATLSFEYTPISLPASSLAVGIDMGVTTFATFSDGSVIENPRIYQSAQAELRVAQRRVARRRKGSHRRRKAVVLLKKLHEHIAAKRQDFLHKHSTAVIRKYGTIVVEALNVAGMSKSNLAKQILDASWSEWFRQLAYKAESAGRQFISVNPRYTSQECSECGFPSPENRKTQAEFLCLSCGHQDNADHNAAVNILGRSVPLDVNVSGVTLCVV

SEQ ID NO: 47750 - protein, 388 aa, Escherichia sp.
MHQENTMLPRRISVSLFIDQSIIWPVKRLQAFKFQLRPGGQQEREMRRFAGACRFVFNRALALQNENHEAGNKYIPYGKMASWLVEWKNATETQWLKDSPSQPLQQSLKGLERAYKNFFQKRAAFPRFKKRGQNDAFRYPQGVKLDQENSRIFLPKLGWMRYRNSRQVTGVVKNVTVSQSCGKWYISIQTESEVSTPVHPSASMVGLDAGVAKLATLSDGTVFEPVNSFQKNQKTPARLQRQLSRKVKFSNNWQKQKRKIQRLHSCIANIRRDYLHKVTTTVSKNHAMIVIEDLKVSNMSKSAAGTVSQPGRNVRAKSGLNRSILDQGWYEMRRQLEYKQLWRAVRCLLFRQRIQASVARTVVIQRKRTACHKVNSDARYVDIQRTPM

SEQ ID NO: 47751 - protein, 394 aa, unknown
  TnpB Polypeptide
MQKAFRYRIFPTKEQAEFLSRQFGAVRFVYNRFLANRKDEYLNNKKSLNYYDDAKLLTNLKQQDDYEWLYDINSQTLQASLRNLDVAYQSFFKKQAKFPRFHSKKNKQSIKIPQFFKIENSQLFIPKLKSGIKINQHQPITGKMLSCSISKTPTDKYYVSITCETDIKQLEKIDNIVGIDLGLKHFIVSSNGQVVGSPKFYRKLEKKLKHEQRQLSKKQKGSNNRSKQRKVVARIHEYIANSRKDYLHKVSKKLIDENQVIIAESLAVKNMMRNHCLAKSIQDASWGELLRQLEYKSKWYGKTFYQVSRFFPSSKTCNGCQFVLNDLLLDTREWDCPSCKQHNDRDLNAALNIRDKGIKDLNLSGCGIQSDIKQKLVERLPKATLRSKKRSALC

SEQ ID NO: 47752 - protein, 428 aa, unknown
  TnpB Polypeptide
MLFHASILHMQTVKIYQLNHLSHKQFQHSKAAQMEAARVWNLCCQTHKEARMARLTWPGREALQKATKGQFALHSQSVQMVVQAFLATIETTRKLRQSHPQMKTKYPWREKRFYPVKWPAQAVSREHGRVVLPMGRGRASLVLALSLPEQSGACSLVWNNGFELHVCIEIPQAEEAPGNVYATVDLGEIHLAAVTTNTGKAMIVTGRGIRSLKRQRNQQLGKIAKKQTRCKKHSHRWKKLQRAKNKQCRRAERRIRDLRHKATRKVIDFCVEQKVGILFIGNPHGVREKNSGRHHNQRMSLWEYGKDIDYLTHKSQQAHIERFTGSERGTSSRCPKCGHKHKPKNRNWVCKACQFSGHRDLVGSVNMHELAYGKQVEFPRSFTYLRPGLSRSSSSRADTPQCCLSKAEDQPRIADTVSSETGHTSDVA

SEQ ID NO: 47753 - protein, 400 aa, Streptomyces sp.
MRLRYSFRVYPNAPQRTALAKAFGCARVVWNDGLCLRQDAYKQGAERPKAAELSKRLVTEAKKTEERAWLSEVSAVVLQQSLRDLETAYSNFFASKNGTRKGPKTGPPKFKKKTSRQAIRFTTNARFSVTADGKLRLPKIGDVEVRWSRDLPSAPSSVTIIKDAAGRYFASFVVEAEDKPLPELDLDDTETGIDLGLSTYAVLRGRKISSPKFFRRQAKKLKRAQRKLSRARKGSNNRRKAKLAVAKIHARIADQRRDFIEQETTKITRESQAVYLEDLNVKGMGTAKGKRGKSVHDQSLSMFARTLEAKCARYGRTFAKASRWFPSTQLCSACGSIEGPKGLEGLKVRNWVCSCGAAHNRDENAELNLRREGRRIVAEGRPDTQNACGAHVRPGTPGSG

SEQ ID NO: 47754 - protein, 414 aa, unknown
  TnpB Polypeptide
MKLSFKLKQKFNDKTLAIIEELSFHTTKLYNTANYNNRENEFNNYIDMNKKYSDNWHKLFLHSHNYQQCLKVLEKNWKSYFASIKDYKKNSNKYKGIPRKPKFKNSTNKNEIIFTNLAIRVRENILKLSLSKAMQKKFRVKSLNFNLSDKIKSLVNLEKLQQVKIKWDRVLKEWYLIIIHIKEKINMDLGTNIMSIDLGLDNLATICFLESKESYIINGKTIKSKNSYLNKEIARLQSIRMKRTGNIKFKNTNKIIKLRRYRENYTNDYMHKASRKILEIALENKVSKIVIGDIKNIKQNSKIKSFVQIPIQKLVSLLNYKAELLGIEIIKQNESYTSGVSAIDLEEVSKSNYDKTRRITRGLFKTNAGIKINADVNGSLNILRKYLQYKCIPKLIELARDNGFVNCPIRIRVA

SEQ ID NO: 47755 - protein, 364 aa, Burkholderia sp.
MEITKTLKLRIKDKHAAAMLAMARDVNMVWNYCNETQYRSLKRYCNRPKVWLSGYDLQKLTSGLTKCDGISVEWSAVAQTCEEFAARLRQCKRQRLNWRVSDRKSPKYSLGWVPFKRGAVKYKDGQLRFNGISIGLWDSYGLWKYEIRAGSFNEDSRGRWYVNIAVKVQVEEKRVPDGAISIGIDLGLKTMATYSDGTAFEMPKFYRESEAALGIAQRAHKKRRVKAIHAKIANQRKDAIHKETSALVMKHAAIFVGNVNAKALGQTRMAKSVYDAAWTTFRTQLKYKAITQCVVFEEVNEAFSTQTCSSCGALPDSRPKGIAGLGIREWTCSDCGTVHDRDVNAARNILAAGLGRLAEGILGF

SEQ ID NO: 47756 - protein, 460 aa, Halorientalis sp.
MAYIQTRNRRIKDWLMKRTNTFAVRPLSNEEEQVLRDLLDASAALWNEVNYQRLMRYNDEDGFKGDVWDADTGRLEGKYKGVLGASTAQQVIGKNTEAWGSFFTLKDQYHDESNTSVTEHPEPPGFRGNEDDGRVLKGVIRKDAYTVEWGERSRLEIVVGEQLRDRHNSPKSRLRLEVVGDPNWPDYEDQSRLELWYDETDSTFRASQPVTITDARDTPLASETAALDIGANNLVACTTTTGEQYLYGGRELFQRFHKTTREIARLQSKLEDGRYSSNRIRQLYRKRTRRRDHAQKALCRDLLDRLYTEGVDTVYIGGLTDVLDTHWSVETNAKTHNFWAFKQFTERLACTAEEYGISVEVRSEAWTSQECPQCGGIDRTTRHQDTLTCPCGFEGHADLTASETFLKRHSEKTVRPMARPVRFEWDDHNWSELPRSHRPKEQRTDPSTVHYNGNVASGES

SEQ ID NO: 47757 - protein, 416 aa, Halorientalis sp.
VSSDEYLRRTAITRLSVTAEDERLLRDTVDAWRRGCQIGVEKAWNRCHDKSDVQSLAYDEIRDRTTLGSQHTILATHQAAENIRSCRSRRENGRKASKPIYTSPTVRYDSRTMTVFEEDEQVSLTVAGKHSRVRCDLVLPEDEDGYQRQYLDGQWEPTESTLHYRDGDWFLHLGFRKLRPDTEQTTTENGTVLGVDLGVEQIAVTSTARFFSAGELNHRRREFERVRGGLQKCGSRSAHRTLETVSGREDEFVKHVLHSVANGIVAEARRFECDGIVFEELSGIRTRLPNVAWHAEWAFERLYAYVEYKAEAAGLFVDTVDPRNTSRRCAECGHVDEANRPSRETFECEVCGNRNHADYNAAKNVAAAYLRREQQSSRRRGVSRYALKSGTVSERNGFAPYESTDKSPNPEATSSG

SEQ ID NO: 47758 - protein, 420 aa, Halorientalis sp.
VADDYVYRTAITRLEVSDEQRVRLEETIAEWKRGCQIATNLAWNRCHEKSDVQSLAYDTLRERTDLGSQHAILATHQAAQAITGCIERRSRGEQTSKPRFTAPTVKYDSRTLTLFDDETVSLSTTESRIRCPLVLPEDDDGFQWQFLDSERWEVTESTLTADGDDYFLHLGFRRPKTDAQRTTAENGTVLGVDLGVENIAVTSTARFFPGGELNHTLSEFEEARAGLQRTGTRSAHRTIEQASGRQLRRVRDEMHRVSKGIVTEAVRYDCDRIVFEDLTHIRKRTEGAWGHRWAFRQLYQFVEYKAERHGIEVTQVGSAYTSKRCAECGFTSDENRPTREHFECQSCGTEANADYNAAKTVGMRYVRRGQQSSRRTGDGQLALKSGTVTPNGGFTAYPDGFEAEFTDKPQYATAPPSDPV

SEQ ID NO: 47759 - protein, 525 aa, unknown
  TnpB Polypeptide
VDVGDDFEIHRVAVESVSTLFSLYSSNAVDYACDGELGASLPTGWSSTAAKFEVQWPTDHERRSAIRAHFGARRKAFNWALGQVKSDMDAKKMDPDHPSVAWELGALRKQWNQVKDQVAPWWSENSKECYSSGIADAVTALNNWKSSKDGTRKGKRVGFPKFKSVRTDRPRVRFTTGTMRFDDDRRTVVLPVIGALRTTENTRRVQRHLASGRARILNMTLSQQWGRLFVSVNYSVRTPNHALGPKNPAARAGVDLGLRTLATVATIDEITGEETIVEYPNPAPLRASLRERRRTGRQLSRRIPGSRGWMSAKAKLTRLDRRCVHLRREATHQLTTELSSGCGHVVIEDLDIAAMKRGMGRRAFRRSVSDSAMGLVRPQLVYKTARHGATLTVVDRWFASSQIHHGCFQPDGSPCRLESKRDSGKIKLDKVLRCPITGEDVDRDINAARNLRDWPDLPVDAQSGRRLRSSAVPGKALETAAQTVGTTDRLGSSRKTTRKKVAAGSEGRTKAAPARAVEEPRKRSA

SEQ ID NO: 47760 - protein, 370 aa, unknown
  TnpB Polypeptide
MKHHLWLSKGLWNEMLSTVKRKYEAEKNFPSRQELRGIVRDKGLYSQVAQELVDRLLDALKRKVRMKKEGKRCGFPRFKSFDRMKSLVYPQFGFSLGRKLRVTPFGEISIKKHREINERIKTLTIKREPSGKWFAIFTAEEPETEQKQNNGPAVGVDLGLVNFVVLSDGTKIKNPHHLKKWEDRLVFQQRRLSREVKGGKNRRKARAKVARLHEKVANARRDFLHKISTKLVSAYSLIAAEKLNSQDMAMNGHGKNINDAAWGTFTNMLCYKAEGAGCRVVFVEPENTSNVCSRCGQVVDKTLWDRQHVCLVCGLSIDRDLNAAINILKRATLGHSGSNACGDGAIASSEKQEAHPSGVVSMSQNLCTSR

SEQ ID NO: 47761 - protein, 427 aa, Firmicutes sp.
MPLKIVVVDPGEVTDDLVQDMMEILTSFCAHLYGRRSAREQGKRGIGKRAGRKGHWRPSSVKMNRAYRYELDPNVQQRILLAKHAGAARFAYNWGLARRIEFYQQTGKSTNAMEQHRELNRLKKTQFPWMYEVSKCAPQEALRDLDRAFRNFFRGLKEGRRTGYPRFKKKGRDDHFRLTGAIHVFDRAVQLPRLGRIRLKERPQVQGRILSATVSREADRWFVSLTVEAEIPEPVPIHGPACGIDVGLSHFATVAASDGSVVKIQAPKPLGRYLRILRRRQRQHSRRQQGANNRRKSALRLARLHRRIRNIRKDFLHKLSTHLAKTKRVIVVEDLNVAGLVQNQRLARHIADMGWGEFRRMLAYKAIWYGSQLLVANRYYPSSKTCSVCGHVLETLPLHVREWTCPACGTHHDRDMNAAKNLLDLAA

SEQ ID NO: 47762 - protein, 514 aa, unknown
  TnpB Polypeptide
MRAQTPSYVVSVKLHLPESIENHLEKSFRISNSAYNEGISLGLKRFEAMRRNPYYQELLEARRLAKAGIDKLKKAKKKTKGLVQQVKLYDKALFELRKAYGLTEFELQKYLAQQRRKPGSPYQQLAACEIHAIADQAMKTLEKVLFYQIKSHKVRFRSKYDLQVSYRNKVNTQATRLVPSDKKDIAYRLYIHKKSTFVDIPIKAFNNYQQMSLMHSEKIKYVQIIRKTIRGKNLYILQIVCQGFSPSKVTKGRGVVGIDPGISTVAYASQKEVALIDLVPKNITNKEKRLKQLDQAIERSQRVNNPKCYNENGTIKKGARFKRPSNRQMRLRNRKRKAYRSLSEERTKLQGQLVNRLVSQASSIKMEELNVKGLQKRSRDIRINPKTNRPFSKKRFGKAIFRAAPSTFRDALERRASQLGINIEIISPKNVKPSQYNHITQTFEKKPLSTRVYNLSDEYPDVQRDLYSAFLIGHIENGYYQQAQLEQNFPVFYQQMKDFIQQPIKTKRLAWYLT

SEQ ID NO: 47763 - protein, 395 aa, unknown
  TnpB Polypeptide
MKKVLDSSCDYRRYCWNQGLELWETMYDARSIGLSTELRAKIKASLKDKTIEFSEEEQAIKALFPAPSERKVRDELVAQKADWQHELSSRVLQLAIKDLATAWNLFFNNPKTVGKPGFKSRKKPKQGFKTDQARIKDGRLVLDKPKKYKGKWMGIRFKGASIPDGYLKLCAITRVKGKYIATITIDVETVALPKTGKKTAVDANVDHFDTTDGQTTLKPELLDPLYVKVRTYQCQLARKRKVNKNYRHSKGYQATRAKLQLTYERIRNIQNDLLHKFTTDLYRKYDTVVIEDLDVKGMQMQKKAKNLHRSLFGRFRQLMQYKTEKFGKTLILANRFYPSTQRCSNCGHIKTDDEKITLRGNQKHGTKHNEYVCYECGYEDSRDHNAVLNLLALAE

SEQ ID NO: 47764 - protein, 241 aa, unknown
  TnpB Polypeptide
MILWISKKMPKLKPYQPRDVIAVDVNERKIVYGDDEINREKDTEIDEAHRWKKLAEDLQKRYSSSKYLAWRRRKAILNRIRSYHRKARDILEDWARKTSLEIVRFAKKLGYAVAREDLTGLINTLRRIKSKDHRTKLIIIGYARLERWIDWQAERHGVPLAIVDPRGTSSECPQCGSKDFEEAGHRRLRCPRCGFEADREVIRKLNIRKRALKILGISGGSLTTPTAPQMTDVNPNRWGNQ

SEQ ID NO: 47765 - protein, 402 aa, unknown
  TnpB Polypeptide
MKKVQLTYKFRLYPKEEQENKMLETLELCRQIYNHFLAQWNKNRDGDGRDRDKDRAKIPSRLELQSQLPKLKKENLELCKVHSKVLQMVIYQLYSNLKALSKLKRNGKKVGRLRFKSKGRFKTFCYNQSGFKLIKTRKRLDLLHLSKIDDIPIRVHRQVEGKVKQITIKRHSSGKWFACISVEVEEEINVNNVNNVIQREKRVIGIDVGVKHLPTDSNGRQIENPKFYEQSLQRIRIKHKKLSRKKKGSRNREKQRIRLARAYEKIVNQRDDFLHKLARFYANNYDVICVENLNIKSMVKAGNHNLAKKIRDASWSKFLHMLEFKAERAGALVVKVNPRGTSQEYKHGKIDRDYNASLNILERGLSVSGLGRSFEPAEMEPLLAIPASSIVEAGSPQPFRGG

SEQ ID NO: 47766 - protein, 170 aa, unknown
  TnpB Polypeptide
VSKRIVERYPHSLIGLENLTDIRERTRRKKGKQASKKQRKSNARHSEWAFAELQSMIAHKALLHGSMAIKVDAHYSSQACPMCGHTSKDNRPGKGLLFVCQQCQYTLHADVIGARNITLRTLLMRQDWMSTGVLSVRPDVSDREAKAARLARYAELRWSPDTSPRLEDVG

SEQ ID NO: 47767 - protein, 396 aa, unknown
  TnpB Polypeptide
MNLSYKYRLQPTSAQVRILEEQLNHCRRAYNALLGRCLDERRAGRGTPTHESLTYHLPAMKVKVPELNEVHSQVLQNVAKRIRLGFENYWARRGVGLRAAPPRFRRVRDYHSLTYPQFGFKLGGSTLKLSKIGELKIIQHRPVEGKIKTLTISRSPSGKWYSVFASIVETKPIPHREKAVGVDLGLNSLVALSDGTLIEAPKNYRKSEDKLRKLHRRASRRCMGSNNRGKAGLQLAVQYERVANQRRDFAYKTARGIVNRYERVVVEDLKIGNMVRNRSLSKSIGDAGWGMLRSALIYMARMSEGVIAFVDPRYTSQLCSGCGELVPKDLAERVHARPRCGLVLDRDVNAARVILRKGIGLERPELTPVGDLASAEEKPVMQVGLMKQEARLFRGG

SEQ ID NO: 47768 - protein, 404 aa, Kitasatospora sp.
MIRAYKFLMRPTVGQAQALGEMLRDHCSLYNGALQERRDAYRHVSKSSVKYGMQSAQLKEIRAFDPERQGRWSFSSQQATLRRLDKAFAAFFRRVRSGDTPGHPRFRGVNWFDTVEFPKDGDGCRWDSTTHDPVTRVRLQGVGHVKVHQHQAVVGRVKTVSVKREGRKWFVVLTAEQEQPEPLPATGSAVGIDLGIANFLADSGGGFVPNPRHGRSNAARLEAAQQALAKFPRVRRDKRSANHRRTVEKVAKLHGKVRRQRLDHAHKTALALVREHDFIAHENLTIRNMVKTVAPKPDPDKAGAFLPNGAAAKTGLNRSISDAGWGVFLTILHAKAESAGREVIAVDPRNTSRRCPQCGHTSADNRTTQAKFHCAGCGHIAHADTVGAINVLRAGLVRREAQPA

SEQ ID NO: 47769 - protein, 497 aa, unknown
  TnpB Polypeptide
MPQLTYRTPLTHSLSDENKQQLLGFMQEQGRYFRTVFNQLYFQILSSKDKHALLKIYCSSQFLQQNRYLFGTKYANSLFLEAYNKVVLHQEAYCFRIQQIQDRIKVLTLKKEKLVDKLTKTLKSIEKLDKKDTCFKTLRFNLLKEAKAIKTSIYWVNRKLEKQESRLNSSSLKSVTFGGKDAQRKLSRKQIAGAKWKSLRNKSIYAIGKSDRKCGNDSIQFDVENKTLKIELERGENYKNYLFLENIENQYASPFFKENNLLAEVHKKTQRIILTKFSPNIAKCKFELHTTVEKEENRVIKEIQAKIRAFPDNLNEPNLDEAKKAIKDYAKALYQEKKQAACLGVDFNYQHLDISSNLPNELKQEDLPENSVLYRFEQTIHYDINAHNRYQNKENLRQAIKVVVSLAKQHNLNIKIEDLNFNKKKAKLFPAYSDYGKGYNRMLSSLPYATYEKMMELECDKAGVYLIKVNPQNTSKKAIEQGWERHIGAARNIAQQI

SEQ ID NO: 47770 - protein, 395 aa, unknown
  TnpB Polypeptide
MHKAFKYRIYPNKAQQALLQATFGCCRFVYNKTLDIRKTAYETDKTRLSKFDLIKKVTSLKDEFEWLKDVPATCLQQAVENMDKAYQNFFKSGKGYPKFKSKHRSRKSCKFPSSHCAVLKDTSHLKLSKIGLVKYKKDREFTGVLRHIVVTQESDGKYYASCLAETGVDAPKPQSVDASTTVGIDLGLKDFIVTSDGCKVPNPRLYATIDRHIARLQKHESRKQKGSKRRARIRLKINKLYVKKRNLIKNYIYHVAKTLLRESQTLVMENLNIGGMVKNHKLAKSIQNVCWGELRRVLTYKSQWLGRNLIFIDRWAPSTKTCSCCGFHNSTLTLSDRSWRCPGCGTHHDRDINAALNIKRMGLETLLPAVSGFNGRGEVGCNFDEASICIINNCI

SEQ ID NO: 47771 - protein, 372 aa, unknown
  TnpB Polypeptide
MIIVHRFNIKPTKEQEQKLFKTLTLCRRLYNTALEQREICYRQRGKPPSCATQKKELPALKKALPEYKEVNAQVLQDCLQRLDNAFERFFNGLAGYPRYKGREYYRSITYPQAYKQNHFKKPGHIYLPKIGYVKLNNHFEFDPLKITRINVKFYNNKWYVNLTSETNEIETMDVINKIGIDVGLLTFAALSDGVKIENPKYFRNSERKLAKLQRQLSRKKKGSNNREKAKKKVTKLHDKIANQRRDFLHKISYKIVRKYDLIAVENLKVNNMIKNRHLSKSIADAGWSRFINYLDYKCLKYGKTLIKVPASSTSQTCVCGTHVPKNLSVRIHKCPNCGLTANRDVVSAMVILQRACHIIGLEAPEFTPVETV

SEQ ID NO: 47772 - protein, 366 aa, Paenibacillus sp.
MQTFVWYNSREGGEEMQTVTVQIRIFPSHPALLREHGDAYILAVNQLTVLAERAGSFPKLTSKDIEAKLPSAVRNQVIRDARSIHKKTNKQGKRPILRRRAYYVNNQNYSIDGNIVAFPVMMDGKVQRLRVAFHMTEREKNILASGKLGLLKVVEKSGKWYIQISVEIQTGQTSGDATMGIDLGLKVPAVVVTSTGKTRFVGNGRQNKYIRRKHRSRRRVMGKLKKLSAIRKQQNKEHRYMKDQNHKISRKIVNMAMEEQVSVIKIEKLTNIRQTTRTSRKNAKNLHNWSFYQLQMFIAYKAALAGIRVIEVNPAYTSQICPKCGKRNKAIDRAYRCPCGFHAHRDRVGAINIMRQPVADGNSLSA

SEQ ID NO: 47773 - protein, 262 aa, Escherichia sp.
VKRLQAFKFQLRPGGQQEREMRRFAGACRFVFNHALALQNENHEAGNKYIPYGKMASWLVEWKNATETQWLKDSPSQPLQQSLKDLERAYKNFFRKRAAFPRFKKRGQNDAFRYPQGVKLDQENSRIFLPKLGWMRYRNSRQVTGVVKNVTVSQSCGKWYISIQTESEVSTPVHPSASMVGLDAGVAKLATLSDGTVFEPVNSFQKNQKTLARLQRQLSRKVKFSNNWQKQKRKIQRLHSRIAISAGTTFTKSQRPSAKTTQ

SEQ ID NO: 47774 - protein, 315 aa, unknown
  TnpB Polypeptide
MPRLPGYSKKYRTFVVGRNGYKVVDGNLVITDKNDIGFPRLPIRSCENQPLNAKINETIVGDVRIVPHGNAFFIELTYQVACSTSILLDGSRACLVDVGLRNIVTLASTISGIHPVVVKGGMLKSINAKYNKDAASLQTHGKQAHRRSKVMKRICRINDNLHKVSRFVVKFCLQHDLGTVVIGHNDGWKQNVNLGKVNNQNFVSIPFNRLIHMIRYKAEEYGIKVIVREESYTSRQSALDFDPLPNYGDKNANQVLSTGRRVRGLFFRSNGQVINSDVNGCLNIGRKEFGDDWLKKLVETDKGCLMQPVTVRIGQ

SEQ ID NO: 47775 - protein, 403 aa, unknown
  TnpB Polypeptide
MRTAYRCRAYPDAEQQQVLVRTFGCVRVVWNRTLAERHRLYQAEHRRLSYAASDAALTEMKKDPGLAFLNEVSSVPLQQALRHQHKAFSAFFARRARYPRFKSRRSRQSAHYTRSAFSMRGGVLRLAKTSAPLRFVWSWPDMDVATLDPTMVVVSREPDGRWYVTFSVDGGDTEALEPARHAVGVDLGIKDFAVTSDGEKIANPRHLERKARNLARYQRRLSRRQKGSANRAKAIAKVARAHRKVRNTRSDFLHRASTRLVRSADVIVIEDLLVRNMIRNRRLARAISDCGWGEFRRQLEYKCRRYGRELVVIDRWYPSSKTCSACRHLLAELSLSTRHWTCPSCGTRHDRDINAAKNILAAGQAVTACGADVRHSGSSRVQSAVKQEPQPATAGILVLRGGE

SEQ ID NO: 47776 - protein, 418 aa, unknown
  TnpB Polypeptide
MSIKLSLKFYPQLDDLQLSIVEKLSFHTTKLYNIANYECREHGFKFYYELEKMFKSNWHNEFLHSHTYQQLLKVLEQDWKSFFVAVQDYKVNPHKYKGIPKPPRYKNMQKRKNQIIFTNFAIRVKGNTLILSLSKKMQSMFNVKSLNFVLPESVQKHINMDALQQVRITWDNSRKQWYLLIIYKVGEHDVTENFHNVMAIDLGLDNLCAITFKDSEEQYLINGKPLKSRNAYYNKKMARLTSVAMKQTGSSNFRRTKQIRTLQKKRNNYVNDYLHKVSRLVVNLALEHKCHTIIIGDIRGIKQESHAKSFVQIPIQRLAEQIKYKAELVGIKVKLVKETYTSGVSAYDLEPITKKYYNKSRRVKRGLFKTKQGYLVNSDINGSLNILRKYLKDNVVPIPILRWRNNGILDMPVRIRVA

SEQ ID NO: 47777 - protein, 423 aa, unknown
  TnpB Polypeptide
MGYKSIKTKLYLSEHERNFILIIMRTSKHLYNQALYNVRQHYFDTGKFLSYEDNYMMLSRESENYRLLSTSQGQAVIKKVDEAMKAFFGSIKSKLTKNVKLPRYLEKNGYFPLFDRMVYKPCADNYVMPRGNFIKKVSKELEDIYQKTMKHDLSIEPIKSLNIKIETPRCITHKKIKEITIREKYDGKYIEVIHTYVEDSISTNNLLKPETMSIDLGLINLAYTAVSNGNHLLVDGLKLKSMNQFYHKKIASLSSTRPNQKILTKQMIKLIEKRNNQMTYGIHKAARLIINHAIQNNVGHIIIGVSDFKDSILKDTYQQWASSIPIARLRHRIHELALENGIRTEELNEAYTSKASYIDGDLIEKGIFSGKRTKRGLYVSQEGIKINADLNAALNIYKKGKPDAERIGTKGWNTPKRTYLFGM

SEQ ID NO: 47778 - protein, 387 aa, unknown
  TnpB Polypeptide
MLRAFKTEINPTQDQIVKIHQTIGVCRFIYNFYLSHNKDIYESEKRFVSGMDFSKWLNNEFIPNHQEYKWIKSASSKAVKQVIMNGEKAFKRFFKGESKFPRFKKKKNQDVKAYFPKNNKTDWVVERHRIKIPTLGFMRLKEKGYIPTNSNVTSGTVSLKAGRYYVSVLVNVEERNYDHLSFTEGVGVDLGLKNFAMVSNGIVKSNINKTVRVKKFEKRLKREQKRLSRKYEDKKKRGEKSAIRSANIDKQVLKIQKLHKKSSDIRSNYVSQIVKELVKTKPEFITIENLNVSGMMKNRHLSKAIQKQNFYGFRVKLTDKCKQLGIELRVVSRFYPSSKQCSCCGNIKKDLRLSDRVYVCDKCGLQIDRDYNATINLRDAKEYTIAS

SEQ ID NO: 47779 - protein, 403 aa, unknown
  TnpB Polypeptide
VKYILIYKTYTIPVNCNKSDYQYLMQCNKYSAIIWNNCVKADQEYYKENKKYLTQSQLQFMMKKSVPIILANSINIVIIKYITARNAMWNSIKIKHENSKKVKLPYKEKKYFNTGYTYQNIKVNKEKGYLTLAKPVLPDEQGINRKQKPMKCHLKEIPDNIVEIELVYRNGLYLLIKTKQQNDNILIQSENEASIDLGEIHSITSIDNNENAIIITGRKLREIKQLRNKHLGKLKSRQSKCVKGSKQYKKYSRAIKNLILKSNNKILNITHKITKLYLDYCIKNNIGKVYYGDLDSCTRNTKKEKRGGKKVHQKLSQWNYGQIMRELTNKLSRYDIKLIKVKEYYTSKKCPVCKTLNTPKGRNYICECGYSIHRDVNGAINILNDNSEFNIIEYKELKYLQII

SEQ ID NO: 47780 - protein, 411 aa, Micromonosporaceae sp.
VQLRYQFRLCPSPGQQQTLARAFGCARVVFNDGLRERELARREGQPYVTDAELSRRLTVAKTAPERVWLGEVSAVILQQALADLNTAYRNFFSSVSGKRKGPKVGPPRYRSKRDTRQTIRFTANARFKVLGNGRLRLPKIGDVCVRWSRELPCEPSSVTVVKDSAGRYFASFVVECGDPKPLPPADAEIGLDLGLASYAVDSQGRVIANPRFLRNHERRLRKAQKALSRKEKGSSNRARARIRVARAHAKVSDCRRDWLHQTTTRLIRENQAVYLEDLAVKGLARTRLAKSVHDASWGTFRRMLVEKAQRYGRHVSVIGRFEPTSQVCSACGHKDGPKPLSARSWICTPCGTTHDRDHNAAKNILALGRRERLNACGAQIRPGAIPAPRGEAGTHPKPHQTTARQTGISVL

SEQ ID NO: 47781 - protein, 380 aa, Pseudomonas sp.
MEYLTTQRSRLYPNLDTRLVLNKTIGCSRFIWNALLGNHKEEYGLWVEDPETHPKPSCSLSSFNQKLNELKVEYPWLNEVSSVALQQTVLHLTKAFSEFFQGIHGYPKFKSKRDPGGFNLSSAAGTLAKDGKIRIPKIKGYTTCRPKLPLDQEIRNYSIVKDRVGNYFVNCLVTKPCLPNTAKGQGLVGVDLGIKSLAVAKRSTGEIFTLENPRTYMKYHRRRVRLQRRLAKKQKGSQNRNKARIKLAKLERKVGNIRKNTLDTFTSKLISENQVISIEDLNVKGMLKNSRLAKHIQDCGFSTLRRMLEHKAKRYESPVIISLVHRFYPSTQCCSACGIKREIKLTLNDREWTCAECGTSHDRDINAATNILYEGLRLVV

SEQ ID NO: 47782 - protein, 393 aa, unknown
  TnpB Polypeptide
MSRYRLCPSPAQEAVLREHCAQARYVWNLAVEQQSWWRPGRTSAPGYLEQCRQLTAARAAHDWLRAGSQMVQQQALRDFAQAMVNFFAGTHGRPSWRKAGRDEGFRIVAVKPRHVRRLSRKTGEVWVPKAGWVRFRWSRAVPASRSYRVTRDGAGRWHIAFAAIPEPIPGPGTDCVIGIDRGVAISAAMSTGELLIVTQLSPARQRRLRRLQRKLARAGRGSGRRARVKLAAARLKARETDTRKDWAEQTSTDLARRFDVIRVEDLKICQMTRSAKGTVEAPGRNIRQKSGLNREILRSGWGLLVERLEHKAPGRVERVNPAFTSQRCSACGHVAAESRKSQALFACVACGFKLSADVNAAKNIAAGHAVTARGGFRVAGPVNREPQLALLPA

SEQ ID NO: 47783 - protein, 410 aa, Streptomyces sp.
VIVMQLRYSFRMYPDATQQAALARAFGCARVVFNDAVRAREDARKAGQPFPTAGQLSMRLITEAKRTAARSWLAEVSAVVLQQSLRDAESAYRNFFESLKGKRKGRKAGAPRFKSRKDVRQSIRFTANARWSITGSGRLKLPKIGAVKVKWSRTLPSTPTSVTVIKDAAGRFFASFVIDTDPAADAMRMPESDRIIGIDLGLIHFAVLSDGTKIDSPRFLRRAEKKLKKAQKELSRRQKGSKNRAKARLKVARAHAGVADARREFHHQLSTRLISENQGIVVEDLSVAGLARTRLAKSVHDAGWSSFIGMLAYKAERYGRTLVKIGRFTPTSQTCSTCGVKDGPKPLGVREWTCSACGTVHDRDTNAAINVKTAAGLAVSACGAPVRPEPVLAQREETGSHGFPTGNCAT

SEQ ID NO: 47784 - protein, 409 aa, unknown
  TnpB Polypeptide
LRAIKSIKQSIPENHDLTDMMDIFKDMMNHCIRIGLKHNCSTLKKLSLLSYHELRDYQIMSSYKICAISQACGRLSQRKRDIKKGKNVKPPFISKPFVTNCYSIKHNGSLLTIPFRYHNPINIILNNYAQKILSDKSLKIRSFTMTDDSISIAVSKEVDDIKCTNMLGIDRNLRNVTVGNNEMVTFYKTNKLLSIKQNTIYARAGFKRNDIRKKRDYYKSLQNRLQNRTKQFIHKISKDIVTNAVKSKSIIAFEDLKGIRKLYRKGNGQGNKYRKKMNSWQFYELQRQVQYKATWNGIPVVFVDPKRTSKLCPICGDRIQEDKQNRRKLLCINCGKSMDRDVIASMNIAHKAWSRFNHARGDTSEGQSSVFEEPMSESKPSNYDGVVIRILDVSKSGSRQPDITNQHLT

SEQ ID NO: 47785 - protein, 397 aa, unknown
  TnpB Polypeptide
MQKTITINIRKPTITKATELSKLYSEYLVCSQEIFSIWKNNKGISRYALQSMIYKDFRKKYKLQSAFIQASLFQVFLRRKVCDKIKSIPIRFDKRLFSIKTNNKGLFIVSVAGYTKSKRVHLPVIQDGAYQRLAKSLIDGWNISSVLIFKNFRVQILIKKDFEKPIESKNIIGIDTNGNNIAISVYNSKNKKFLRHFYFGKEMFIKRKIIERRKDKLKSFADLGSQKAFKSLKRLKSYEYNFIKDSCWKLAHKIIDLSKSYSNAFIVVEDLYKLGVGRKIGNSKGRKANKIINKIPYNKLFHSLTCLCEENLISFNKIDPYHTSKLCSRCGALNKIGKVYKTYVCKSCGLIIDRDNSASRNICKLFRERSIVTNVSQISLNRVAVNQPLLSNAVYDL

SEQ ID NO: 47786 - protein, 387 aa, unknown
  TnpB Polypeptide
MRTLLKSFKTEINPTEEQKVKIRKTIGTCRYIYNFYLAHNKELHDNGEKFMSGKSFSVWLNNEYLPQNPDKLWIKEVSSKSVKHSIENGCVAFTRFFKHQSAFPNFKRIGKSDVKMYFVKNNPKDCRCERHRINIPSLGWVRMKEKGYFPTTKDGYVIKSGHVSIKADRYYVSVLIEIPNNKIANNSNKGIGIDLGLKDFAIVSNGKTYKNINRSTRIKKLEKQLIREQRSLSRKYENLKKGESTQRANIQKQKFKVQKLHHKMDNIRTDYMNKTIAEIVKTKPSYIAIEDLNVKGMMKNRCLSKAVASQKFYEFRARLKAKCDENGIELRIVDRFYPSSKTCHHCGSVKKNLKLSDRIYRCECGYVADRDFNAALNLKDAKTYKIA

SEQ ID NO: 47787 - protein, 340 aa, unknown
  TnpB Polypeptide
MTDSILVVKIKHYADLTEELKKAVLVANYAIKNRYKLSSANVSHIGLPSAISNQVLRKYGKNKKCKSINEKKIKLVAPSQSVKVDGNQIRIVPLKLTLTNESKYQITEVYQVELDATYAYVAFSKANENQLDTNKFIGVDLNATSHCAVAADPISGKVIRLGKQAPHIHKKYKALRSSLQKQKLYKKLKETKGKESRKVKDVNHKISKQIVQFAKDNKCGIKLEQLTGIRNNKKNNRTFRYTLNSWSYYQLGAMIAYKALLAGIPVQYIDPAYTSQNCSRCGHLGKRNGKVFKCANCNHTGHADVNASFNIAKSLNLISATEKKIGGNGDTDAPMRQSNA

SEQ ID NO: 47788 - protein, 340 aa, unknown; identical to SEQ ID NO: 47787
  TnpB Polypeptide

SEQ ID NO: 47789 - protein, 159 aa, Clostridiaceae sp.
MYEHAKKDGRSLKTSTNYQEQRRKTAYMHRKVERRRTDYLHVLSKRKVENQDFIAAEDLKVRNMMKNHNLAGAIADAAWSKFLTMLQYKSVLFGKTFILVPPSNTTQTCSNCGYIMKGDEHLTLKDRSWVCPQCKTLHERDTNAAINILNRGLQIAHAV

SEQ ID NO: 47790 - protein, 369 aa, unknown
  TnpB Polypeptide
MEEFRWMINEAIRIGIERNITSQQAFNSNVYHYLSDNTEFLKLYVARAMQIARSKINHLRKTRRKNPNAKIPHYKKPHVIVDKQSYRIIGNTLLIGVRPGQSYVGIPLNNYTVSQISDPCTKIGAITITQDTISISILKETPSIKFVEFIGIDTNLNNISAVHSDGTTNVYSDIVKITKIKERYRKVTSHFKRNDTRIRRKIFQKYGTKQKCKTQQIIHNITKKLVEQKKQIILEDLTGIRKLYQKGNGQGTKYRSRLNGWPFYEFRKQLEYKSKWYNGIDVIKIKPNHTSSKCSICGAKVIPEENRQIRCHCGHREDRDINAARNILYKGIPAVQLRGMGFRPNASQDEAMKQSKDVKQIVMSQINQL

SEQ ID NO: 47791 - protein, 402 aa, Escherichia sp.
VKRLQAFKFQLRPGGQQECEMRRFAGACRFVFNRALARQNENHEAGNKYIPYGKMASWLVEWKNATETQWLKDSPSQPLQQSLKDLERAYKNFFRKRAAFPRFKKRGQNDAFRYPQGVKLDQENSRIFLPKLGWMRYRNSRQVTGVVKNVTLSQSCGKWYISIQTESEVSTPAHPSASMVGLDAGVAKLATLSDGTVFEPVNSFQKNQKTLARLQRQLSRKVKFSNNWQKQKRKIQRLHSCIANIRRDYLHKVTTTVSKNHAMIVIEDLKVSNMSKSAAGTVSQPGRNVRAKSGLNRSILDQGWYEMRRQLEYKQLWRGGQVLAVPPAYTSQRCACCGHTAKENRLSQSKFRCQVCGYTANADVNGARNILAAGHAVLACGEMVQSGRPLKQEPTEMIQATA

SEQ ID NO: 47792 - protein, 472 aa, Bifidobacterium sp.
VVPVRLEGESYRLAHEICHHAGLMWSRCVDWLRHYWHAEHKDPSNRELRQYAKTAPETILRGLHAHVIQHLVDDVQDAVATYRTNRDRNGDKDARAPYRHHNYRPVEFTKDYGWKLSKDGRTISLSRGIHRNRRLKPILIPTPEITDPKTGLPVPPTEWGSIQLCWDLNRRRWSLHVSVPTGKPAANKGMRPMSMDEGIINPVTCAVETSSSYEILVINGRDARAARQYRDTRIDQLISKRDRCVKGSRRWFKLDLKIRKARAIADGRIRNIAHQTSAKTALFAETLGVTEITAGDVRGIEQSTRKNPAKRKKNGKTQRRRLSQWDRGRIEDHIEHKTGLTVNHIDESYSSQTCPACLTRNRPTGREYRCSNCGFTCHRDAVGALNILQKHQYGQYTPIDMDKPIHVTYLRATPLKGKALGNAPEPGLQDPGRSCRTANPRTNAPTDTHHGKTPATFSNAGLTRSSQTTLRK

SEQ ID NO: 47793 - protein, 469 aa, Bifidobacterium sp.
VAEGRKKRRKYEIPEGKTIRGVKVALDPTPRQAGLLSSNAGAARFAYNTALAHISNQLDCVEPAPSSGKADWSMRGLRNWWNRWKNDLAPWWAGNSKEAYNSGFQALSDAFRNYFDWLNGDREGEPVGWPKYKSKHKSTWKYTYTTGFGLIDGDDRAVRLPCVGRVHCMENVRKCVGDGRILSVTVRYEHNRWWASLRVEKDQPPQATGLSGSVGADLGVKTLVTLSNGIVIPNPRYLKQTERKLERQQKRLSRRQPGSRRYAKKKRQVNKLYAHVANQRLDLRHKTTTWMANTYADIGIEDLNVKGMTARPKPKEDPNNPGHYLKNGAKAKSSLNKAILDAGFGDFRRQLEYKCQQTGSRLHVYDRFYPSSKTCSNCGTVKTKLPLSERVFHCDNCGIKLDRDRNAANNLDPVGSTPARNVRGETQRGLRKTNTPVGRKRIPCRPTERKTRSRIGNGNPMPATQQTEL

SEQ ID NO: 47794 - protein, 454 aa, unknown
  TnpB Polypeptide
MATRRQTFRLYPNKEQENKLFEARRNHAYLYNACIAHRRYEWKANRKSISYFDQQNCLPAFKKEWVEFAYMHSQSLQATVKRVDLAYGSFFQGLRGQPRFKSIRDYSGWAYPALSGWKISSSGKHGTVTLNDLGITLRMRGQAKQWGSPSTLTIVYKPGKSHWFASITVDVPTVESKFGSKSDLSYESILAFDLGTETALTLYDGENFTELENPRFTKKLEAKVKQKSKALRRKRAPNRKKKIKASRRWKKAKKLVSNLQSKVANQRQDWQHKVTSDIASRYDIGVTEQLNTKGMTRKARIGSKRKKQKAGLNKSILSVGFDSLNKMIAYKIEQKGGLMLVLPTKQIKPSQRCPKCGIVHKEWAELSNRYHICNECGFEVPRDKGSVMVMYNVATHAQPGFGMSLADCGCSGSTDSTKKRKHTGSMKQLGQMKRQKPKPKARGLETLSSRSRVG

SEQ ID NO: 47795 - protein, 392 aa, unknown
  TnpB Polypeptide
MYAIKRELKLNNRETSQMRSNAGFKRFVYNFGLDLIQASWSFKGVKASDTKRIDAIKKVFITVTMQKPENSWMKLLPSTVYQSAFIALKSAFTRWRNGQADFPRRKFKKKGDSFTVYKTSGIYPEKGKPALPFTNRVVIESGRRIKLPGLKQFRLKERIDFTCSAQTFTVSRTADKWFVSFVLDAEKLPPVIHPIEKIGVDLGVKALATCSDGSKYDMPASTKRAKIKLSKLQWRNRNKILGSKKLKIKASHNADKFYRKLARSNARIANIRQDATQKMTTELSRKAYTIRIEDLNISGMIANHKLASAVSNNCFYEIRRQLTYKQAHYGTKVELVDRWYPSSKQCSKCHHIQPMKLSDRVFHCQDCGHIQDRDENASINLECAPKNKVRLA

SEQ ID NO: 47796 - protein, 413 aa, unknown
  TnpB Polypeptide
MLNLTYCYRLYPNANQEAKMLDWLEQSRCVYNDALRERKDWMQSRKCRANACSIQLEYIIPSDVPYPNYYVQKKNLTIARKIIPELDAVHSQVLQEVLLVLDKSFRFMQERGFGFPRFKKFGQVRSLVFPQFKDNPVREMQIKIPKIGEVRINLHRPIPEGFVVKQVKVIRKASGWYGMLILQADVSVPDAVPEGNSIGIDLGLEKFLAVSTGKLIARPKFFIQLQSKLKWLQRQLKDKVKGSNNYRSSQRQIAKLHEHIHNTRREFHFLMAHQLCDGVGMIFAEDLNLKATSRGMLAFHCLDAGWGGFLEILGWVCKKRGVYFAKVDPRGTSQTCPLCQAHTGKKELSERVHHCFECGYTIDRDVASAQVVEQRGLAAVGYTVKLSVEEGCSGTPAKQKSLKSDLKKPTLSA

SEQ ID NO: 47797 - protein, 669 aa, unknown
  TnpB Polypeptide
MAATGSKQTRGPNKQPPWRRDPMSGVSVLRLPLDISDPLQRERLEGLFAAAFCLRRALQRDARSRLGAYWAAHHERAAKGSAAVRKRLGLSREALERAAYRHLSRAPHLRLHATKAMAMHLADSVWVDVKRHLFADSRGRRSGKPKVGRWHRFHRIPGRARSHTRPRKWETFQLHGTLSGHQKAYTGTDGRFFQPHSMRPVLAPGSSWFRHQGALVVVFTGLGSGELVLPVRLPISPCNQRILEHYLSDPDRWHKIDLVRRQDPTGRWRYEAHLMVLTAPYASPTTVEWRAIATRLSAGRQAGIDVNVSNISVASHQNGQDLRISRFERDAGDRESAGRLAARKRRRERALERSRRAANPEQYHLSKRQEERAQRRVEAGLPTPPVIPKGPRKARSDGRPLRAFRKDRLSRSYRRTRAALAADAASTAQAKRDRARWIAKLVVLWHGLWFAVEACNLSAWARLWGRALHAFSPGTLLAAIKREAAAAATQACLAAGFLQASTRETALSQHCLCGQRVEKTLSERTHYCPRCGLAGDRDAISATLAAFLVFEDPADPSTAAVDFAAAKESLRCPATRALLGRSLNFVASGRQDARSESTAKNALDGSSVEETWRTPSPSAMVARRNVGTALRPTPDETSLSGWTTPDRTQARTDLSSVAARKLPPLRDSS

SEQ ID NO: 47798 - protein, 425 aa, Streptomyces sp.
MLVGRKYRLALDSEQSEVAEGFGDICRAVWNTGLEQRRAYRQRGGWMSYVQQAREMAEAKSEHPWLRAAPSHILQQTLRDLDRACRAHGTFSVRWKSKTRWRPSFRFPDPKQITVERLNRKWARVRLPKLGWVRFRWTRPLDGAVKAATLSRDGAQWHISFLVETGRKAPAVSLERGRVGVDRGVVFAAATDDGRFFDRTFISPGEAARYRRLQQQLARTRKGSKRRKSCMGKMGRIMRRVRNRRRDFHARTACRIVDGNALVVLERLPVRNMTASARGTVSRPGTKVRQKAGLNRAILDKGWHGLELAIRNRARKTGAVVRKVNPAYTSQTCPVCGHVDSNSRKSQAKFVCTSCGYAEHADTVGAKNTLARGHTGFRAWRPRGCPVREAPTDSRGNPAASSLGHRAGNSPASAAGRNVNLILGA

SEQ ID NO: 47799 - protein, 390 aa, Klebsiella sp.
LLRATKVRIYPTSQQAEFLNTQFGAVRFVYNKALYIKKQVYQRHGVSLSPHKDLKPLLAVAKKSRRYGWLKEYDSIALQQAVINLDVAFSNFFNPKLKTRFPAFKRKHGRQSSYHCVGIKVFDGAIKIPKISPIEARLHREITGTLKSITLSRSATGKYYAALLCDDGIEVQEKPSLITHITGLDMGLSHYAIKSDGGKVNNPRHLINASRNLRRKHKALSRRKKGSANRRKARIQLAGVHERIANARADFQHKLSRAIVDENQAVIVETLKSTNMMKNHNLARAIGDAGWAGFITKLEYKAAEKGVHLVKLDQWFASSKTCHCCGYKMPEMPLYKRIWQCPECDVEHDRDINAAINIERKGILELCAAGLVVQSAHGGQRKSVTQTVAA

SEQ ID NO: 47800 - protein, 402 aa, Helicobacter sp.
MYNKTNKTATALSKKKNGKVMLITYKQKLYKNDKNRRIDTLLRRYGVFYNHCIALHKRYYRLFKKYLKLNDLQKHTTKLKKTHRYAFLKTLGSQALQDLTERIDKAFKKFFKKQAKLPRFKKVANYKSFTFKSQVDKKTGLNKGVGFEIKDNVISFNGYSYKFIKTYALIGKVKTLTIKRDNMGDYFLCLVCELENNPNKQTACDKSVGFDFGLRTFLTGSDNTKIESPLFFSKYLPLIRACNRSLSKKKRGSHNRLKARLRLARLHRKIKNLRTDFFYKLANSLAKQYSHIFIEDLNMKSMQKLWGRKVSDLAFSEFVKILENNAHVVKIDRFYPSSKTCSNCLSVDENFNKDIKKLGKTDKEREYHCKYCGLELDRDLNASINIHRVGASTLGVEAVRHA

SEQ ID NO: 47801 - protein, 443 aa, unknown
  TnpB Polypeptide
MDKAMKKVENLEGKVNYKLLKAKVAQQTLRRLDKNFLGFFRASEDFKKNPGKYKGRPRPPQFKQKKLDNLVFDYQAFKIKEKLVILKENFEIKSFKLPSGKVFQLVEVLTTEGLVVLEKGLEIQLPKQLVGKAIKQIEVIPKYKSFHAIFVYDDEQSDIYQIVKPLKTVEQVNFYQLDSKGEFSSKIVKFHNKVMSIDLGLNNLATCVTNGIVKPFIIDGRRLKSVNAYYNKRKAKIQSTLEKTRRRKWSRKLQNLTNRRNAAVNDYIHRATAMVVKSCLEHNISKVVVGDVAKSLNSINLGKKTNQNFVNIALGQFVDLLSYKLGSHGIFLIVTNESYTSKASFVDGDKMPKTYNPKTKKKRVFSGKRVKRGLYKSADGTLLNADTNGAYNILRKNDSNFSFEKLVEKVGTKFKDWLHATKRIRFFLNNNEHNKQPQASAKG

SEQ ID NO: 47802 - protein, 399 aa, unknown
  TnpB Polypeptide
MAFRQNTIQQSLQRTFKFRLYPNQVQIEKLHHTLGACRWTYNKMIEKIHSEGFQSRNDLCYFLTELKESEKWLYSHHSKMLQMVAVQIDGAQKALIRLRKNGHNAGDLRFARFSEYRTFTYNQSGFDIRDGFLHLSKISKIKIIQHQNIPENNVIKQVTISRSKTGKWHACVIVDVDAILPKISLQKSIGIDVGIKNFAYDSDGFVTPNPLNYSKMLQPLVRAQRKISRRQKGSKNHKKATRFYQIIHERIKNKRKDFLHKLSTQYAKKYDVVFLERLQKLNMVKNHKMARNVLDSGWGIFGNMLDYKTIMIGVHARNTTIDCSRCGNMIPKSLAVRIHRCRVCGFVLDRDYNAAINILKKGLDIFGITHQLPQELREVTPVEIISRSRKQETTSFVEW

SEQ ID NO: 47803 - protein, 360 aa, Microbispora sp.
LSDVLVTEMLKLAPSAQQAESLLATMRACNAAANRAAEVAFALRTANKMTVQKLIYTDLRHQFGLSAQMAIRAIAKACEAYKRNKTIKPMVRELGAVAYDQRILSWKGRDQVSLLTTGGRIIIPVVYQGRWSATAGATMRGQADLIYRDGAFYLAVVIEVPEPPREGAPSEWLGVDLGIVNLATDSSGEVHCGKGVRAVRRRNARLRARLQTKRTKSAKRLLRKRRRKETRFARDVNHRISKHLVGKAQDTRSGIALEDLEGIRDRVTVTKAQRADLHSWSFRQLRTFITYKAALAGVPLRLVDPRNTSRTCHRCGHCDKRNRPTRDDFSCVRCGFAGPADHNAAINIGRRAAVSQPYAA

SEQ ID NO: 47804 - protein, 612 aa, unknown
  TnpB Polypeptide
MLQAYEYRMYPTQTQIPLLMRHVHACRFVYNYSLEQKIRAYEQDGKRISCFDLNNRLPTLKAEYPWLADVNSQSLQYANRNLDNAFTRFFREKKGFPKFKSKKNPVQSFQVPQHYHIDFERCRVRLPKIGDIKTIVHRTFSGKMKYATVSVTSTGKWFVSILVDDELPEPGPVPFSSETTIGIDVGLTDFATVSTGEKVANPRYLKNSLQRLKVLQRRVSRKVKGSQNRQKAIRKLATCHEKIANQRNDFLHKLSFRVVCENQAIAVESLNIAGMQKNHTLARSISDVSWSTFFTMLEYKCRKYGKTLLMIGRFDPSSKICNCCGYMNRDLKLSDREWTCPDCGTVHDRDSNAAINIKKFALQEQNLVGVAGAERAEEPVDSTFSSDPAVVAAIEESAPILLIFGGTFLVFLFFHWLFVEEKSCGLRSERFFSRQAVWFYAVVSILLAALVWFALSINVMMGFAAVLGSTAFFIVHGFRQNAEAQEARLTKPGMSDLSKIAYLEVLDATFSIDGVIGAFAFTLSVPLILIGNGIGAFVVRELTVRGVDRIRSYCYLKNGAMYSILVLGTIMLADSFGFHIPTWLSPVATFAIVGYFLFRSVQEQKKGAAGAV

SEQ ID NO: 47805 - protein, 395 aa, unknown
  TnpB Polypeptide
MILTESHIFNTTSELDELTFKCKNLYNRANYIIRNEFINNGNYLSKFDMFKISKDLDEYKALPVRISRGVLRTLDGNWKSFFTCIKKWKTNKEVFKGKPNLPKYLPKNGKFTALFYETAILKETKKKKGVGLSTLKMRLSVKTTNKIIEIQVVPIKNNKYKINIVYDYKQEKLKVDNNQYCGIDLGINNLMTVTSNKRGCKPLVINGKPLKSINQYYNKTKAKYQSELPKGVNSSKKIDNLTFKRNNKINDYLHKTTNKIMKFSLENELNTIVVGYNDFWKQKINIGKVNNQNFVQIPFEKMLFMLKYKCEKYGINLTTHEESYTSKCSFLDNEVICKHDEYQGKRIKRGLFKSGSGKLINADVNGSYNIIRKVFPKAFANGIEGVAVHPYRVNL

SEQ ID NO: 47806 - protein, 395 aa, unknown
  TnpB Polypeptide
MCRFRLVPSAAQEQVLREHCAHARFAWNLGHEQRSAYRPGRRPAPGYAEQCRQLTEARGAEPWLAAGSQNVQQQALRDLDQAWQNFFAGTHRKPVWRKAGRNEGFRVTGKRGDHWNIRRVSRRWGEVRIPKVGWVRFRWSRAVPDTKSYRVTLDRAGRWHVAFAAKPDPIAGPGTGEVVGVDRGVVASAALSTGAVFCAPRPSLGRQRRLALLQRQASRQLVRGKPASARLKRTRRSIARLRARDADARKDWCEKLSTDLARNFDVIRVEDLQIRNMMRSAKGAPSAPGRNVRQKTGLNRGIGTSGWGLLVRRLEHKAPGRVEKINPAFTSQRCSACGHVDPKSRKSQADFRCTACGFACNADVNAAKNIAAGHAVTARGGDGVARPANREPQAA

SEQ ID NO: 47807 - protein, 497 aa, Moorea sp.
MPRKIGSAKRISTQIVPVVGMTKSVELELLQVMKKLGVVRAESYNKLGSINHWGLDWKKAIPEVKSFRTPDTLGLPAKLMDWTINDVAKAITASQAACTDAVIKKIYKRFTGIENQKTRIELCKQLKTNAFLDSPLLHRLIRKEFQRGHSRVKNQIVYQQVGYNCKRLSRNTYQLELAGLRRGKRNKIVVRSNRKIKGQIRLIYNQLLERFEIHFLVDYGTVEIPADRRAIGVDKGYTEALYDSDGQAHGENLGFAATKKSNRICAKNRNRGKLWAIHRKLEKIDPAKSARILKNNLTRKTENKRYRQNQSELTAIIGAASKSLFKGESLKVFAVRVAWPTASDLTQPIRNKRQSKAMSRKLNSWMKGQMRDSLEKWANWTGSVVTEVQPSYTSQIDSVTGTLLGKRSGDNFTRFNGVVSQADHNAAKNILARGTDFEITRYMNKTEVQAVLLRRTARFLEGMGLSLLDAVELGWLDSKHELCSGFQATPGRDARKA

SEQ ID NO: 47808 - protein, 382 aa, Rudanella sp.
MIQTVRHAVKTYRYKLNPTPSQQQALGQWLGACRYIYNLTLDYKNTLWGQHKVSIGKNEIQKELTPIAKETAWIGCVHSQTLQDVTDRVFNAYDGFFKQGKGFPKFARKGQYQSFSFKQGVKINSTHVQLPKLGKIRYRNSQPCTGTGTPDRIKRATVRERADGWYVCLCVETYIEQLSETSASIGIDVGIKSLLVTSNGETIENPKHLYKAEKKLKRLQRLVSRKKKGSANRKKAVQKLARQHQKVANTRKDFHHKLTTRLIRENQSISVEQLQIKNMLGNHHLAKSISDAGWYSLTQMLEYKACWYGRTFEKVNARHTSQDCSECGYRNTDLTLSVREWICPECGVTHERDVNAATNIKNRAVGHTARETPRLSACGVRR

SEQ ID NO: 47809 - protein, 450 aa, unknown
  TnpB Polypeptide
VLKQKYTTVTQLHEVNNKEIIEYFENASVYFCKLQRKAFHRLKNENSTGNKTEEYKKLRKGFMKEHGISSRTANSILKDIQGRMKALEELKKYEVSQKEQKIKKLREDIGKLDKRILKFQERMKDKIKVDHIRYWNFKKSRAFKKMKLNKFQLALEQLKWQIETSNYKLCFGTKDLLKNNKTEFVLQRDSRISYIGSKDETGRNSMFQLNYNNQNNQFDIKIRKDFGLDKEEKYVFGKCYFNHHKNKLIEALSNEKSTPLTYSIIRRNGRYYLHCTFEYKIEDENDFLTRKTHGTIGIDFNKGFLEVSEIDRCGNLVGADILKYRFGKGNKTQSDLENCISKVLKRALETGKDVCFEDLNFNNKKSKTMKGTTDRSKKYNSMLHSLAYSLYIKLITNITFRNKVGIIKVNPAWTSWIAKNKFCEQMKLNIHTGASFVIARRGFGIKDTVK

SEQ ID NO: 47810 - protein, 422 aa, unknown
  TnpB Polypeptide
MKNLKEWSYRRQSVVVKKGSLLYQEIDNLCFKSKNLFNATLYDERQTYFNTGQFKFYNKINKEFVKNNQPDYRALPAKVSKMTQMKVDQAIKSFLTLKKSSNTNVQHRFPKYLKKDGRFVVEYEKGALSFKKEGFIKLSKTNIYIQTKLEKTVIQQVRLVPKTGYYLIEILYRKSIPKKRKKKITNQTRFASIDLGVNNLATVTSNVFQPFIINGRPIKSINQYYNKCQKKKQQLLPANQYTSKKIQQLGYKREMKLNDYLHKSAAILVNYLVSQTIDVLVIGTNKGWKQNINIGKRNNQNFVGIPFYKFKQILTYLCEENGIEVHEQEESYTSKASFLNGDFIPTFTPGNNTKYTFSGNRVCRGLYKTKNNKLINADVNGSLNILKKFINKNATIKFQWDNLWNDLVEVYSTPHKVTIPIG

SEQ ID NO: 47811 - protein, 394 aa, unknown
  TnpB Polypeptide
MYRAFRYRFYPSPSQEVLLKKTLGCSRFVYNHFLALRIQEWTTNQKSVSFYETSSLLTNLKKGEETKWLNEVSSVALQQSLQHLQEAYNNFFKGLKKKQKVGFPRFKKKSNRNSITLTKAGFSHKDGEIFIAKSKKKLNIRWSRELPSEDISSITISLTPSGKWFISILVEDNVDYTLPLCDKVLGVDLGIETFATLSNGEKVKMPDLKPHYKKLKKLQKKHSKKKNESKNKNKARVKVARQYEKITNIREDFQHKLSTRIINENQVIVLEDLNVSGMVKNRKLARAISQQGWYQFLTFLKYKATMYGREVIQVDRFYPSSKTCSSCGTIQSSLPLHIREWTCDACGTTHDRDINAAINLMALGTSVTAFGGDVRPTCRQSPVKKESAMSLASR

SEQ ID NO: 47812 - protein, 497 aa, Azohydromonas sp.
MVRKPKPTFIHEFPLRVDRAQAHALEKRFGVVHFAYNVVLQEMLARLRSMRNDPRYAQACKAPKGDDAQRKAHGFSEFAAHDVVALHIRASRYLDGLIDSHTAQTLASRAFRACDEHAFGKRGQPRFKRRGEIASVEGKGPTSPLNWKGDRVVWGGKRRDRAMTLRPVFDKRDRDGVQAHALSGKVKYVRLIRRTIQGEVRWFVQLVCDGLPLQRFEARDGVAAIDLGPSTAAIVASDKAALVSFLPEVKEDMAARRRLQRAMDRSRRATNPQCFNEDGTWRKGTRATERSIRYLALCRHLAEQERVMAERRDRAHSRLANIVLRDFGKVVRTEKLSKKAWQKNWGRRMKATAPGMFMEKVSRKAGNAGGSLVEFNAGRHKLSQFDHTRGDFVRKPLSLRWHELRDGSGQIVQRDLYSAWLALFVSADGLDASQASQAWAVAYPLLARAASSPVQAASWRPAAASRPLRGVGAARMRERQERAARPAQKAEESRVTP

SEQ ID NO: 47813 - protein, 419 aa, unknown
  TnpB Polypeptide
MGYNRVEMRTEKARKIRETLNATRRRRKNQVPKVYQLKLQNLSKEDEEKLCKLFLEAKWLYNYVVADVENRLNSNTWKLKEVEIKTPKGLERREIRQLSSQMRQGIVERIKRNLYSLKRAKEKGIKVGKLSFKSEVRSIPLKQYGITYKVLKDKNRIKIQGIKKEFRVLGLHQIPKDSELAEAQLVKKPSGYYLHVVCYLPKEKVIEEIKKNQTKEPVGIDLGIKYQLTLSNGEKFSWYIPETRRLKKLQKELSRKQKGSKNYQKVKEQIKKEWEYIHNKRKDTQNKVISYLKKFSLIAIQKDSVKSWKEGLFGKQVQNTGIGGITARLKTLATLIPVIFVDRYEPTSKSCSFCGYKQKIPLSERTFRCKNCGREIDRDVNSARNILQIALKALADRVKSALPVDCGEVTPVEWSIVPR

SEQ ID NO: 47814 - protein, 246 aa, Bacillus sp.
MVNGKSTRLKVRALLTNKHNRNFDLLKHKLGTLRITKKSGKWIAQVSVTVPTIEKTGTKILGVDLGLKVPAVAITDDDKVRFFGNGRKNKYMKRKFRSVRRKLGEAKKLNALRQLDDKEQRWMQDHKVSREIVDFATDNTISVIRLEQLTNIRQTARTSRKNEKNLHTWSFYRLAHFVEYKAKLVGIKVEYVNPSYTSQTCPKCTEKNKAQDRKYKCPCGFEKHRDIVGAMNIRYATVVGGNSQSA

SEQ ID NO: 47815 - protein, 469 aa, Clostridioides sp.
MMLIFYIIYDKLNFKIKLQKIAYTDNLTGANTIDKFVIDANKILCKNTQVKYALLYIDIDKFKYINDLFGYEVGNEILRNLTKIIKSNIFEEEMFARISADNFIIIMKYIEEEDITKRLKTIFEELDLFNNNQEEKYKLVLSCGIYFILPEDRDINSIIDRANIPHKMAKGGHKSSYAFYDNKIHDQEIKEKEMENTMFSSLENKEFIIYLQPKIDLNTGEIQGSEALVRWKRPDKGLIPPNEFIPFFERNGFVINLDLYVLEEVCIYLRKWIDAGINPVTVSVNVSRIHLYCNNFIENPKYLKKSLNKLAKLQRELSRKTIGSLNRNKARLKVARLQEHIANQRNDFLQKLSTKLIKENDIICIEDLQVKNMIRNRKLSRLISDVSWSEFIRQLEYKANWHGRQIVKVGKFFASSQICNKCGYKNEEVKDLNIREWICPSCNEIHDRDINASINILKEGLRLITIQNK

SEQ ID NO: 47816 - protein, 242 aa, Microcystis sp.
MLKAFKYRIYPTSEQSVLLAKSFGCARWFYNYALNLTSETYKQTGKGLSRDEIIRLLPSLKKEHEWLSEVPSQVLQQAALNLSSAFLNFFEGRTKYPNFKKKQNRQSIRFPQHCKLKDDVLVLPKIGEVYCKVSRQPEGSLKSVTVSVNPSGEYFASCLYDDGQDLPQKLTLSEAEGSSEGKAVGIDVGLTHFAITSDGTKHGNPKYYRKYEQRLARRQKKLSRKQKGSNNRNKARVKVAIS

SEQ ID NO: 47817 - protein, 382 aa, unknown
  TnpB Polypeptide
MLTYKFRLYPTMAQKRKLEDTLETCRRLYNLMLDDRIKNKTSFFEQKKKLVELKKKEDKYINAVHSQVLQDAVLRLDKAFQSYFSGLSKFPRFKRKGRYNSFTYPQHRIGFKLIGNRIKLGMIGKIKIRMHREIEGEVKTATIIRDVDQWFVAFAVEEPERQAPNQDSNAVGVDVGVTNLITLSDGKIIDSPKFLIKAEERIKKIQRELSRKKKGSNRREKTRMLLAKAWRKVRRQRDDFAHKVSNNLLKEYGTIVFEDLNIRHMVKNHSLASAIMDSCWYKLRQFTAYKAERRGGRVILVNPAGTSQKCSGCGEIVQKSLSERVHICPECGLVLDRDVNAARNILALGLERALTETEPLLIHKRISKFGQGSEKPTSFRRG

SEQ ID NO: 47818 - protein, 359 aa, unknown
  TnpB Polypeptide
MLSAFRYRIYPKPEQEMRLNRSLLNLCKLYNSLRAEAKRRYREEHRSTSLIEFRQIALDARKHDEELKSIYSQVVQNEADPIHLAFKNFFRKRARYPRQKKPHKYNSLTYTQSGFKITERKGLYLSKIGYIRMFMHRPLLGDIRRLTIKREADEWYAVFITEREMPQKMPIQDIPAERIRGADLGLKKFAVFDDSTSIEHPKFLRRSEDRIRHIQHHFSRKQKGSKRRRMLGRMLTKLHLSLARQRKDFQNKLIHNIFKENDVLILEKLNVSSMLHNHRLSKSISDASWNKFAIKAMSKADMLGKHTIFVGPWGTTQFCNKCLSWVPKDLSERAHLPGMWRKAAKGRELSHTHQKAWHP

SEQ ID NO: 47819 - protein, 407 aa, Cyanobacteria sp.
MRLTYQYRLRLTKEQEGAIEHWLSMLQSQYNFLLADRFDWYEQSRCQVDRCPLVCHIAEPREEPNYYSQKKTLPQLKKDRPWYRDIDSQVLQDTVKRVKLAFERYLKGDSSASCSGKPRFKSLSRYKTFTFPQLKQDCLQGKYIKLPKLGTLKVIKHREIPEGFKLKTASITRKADGYYLSLSIECEDIPNSSPDVDWSKAVGIDVGLKDFLTTSKGEIVAIPQCYRKAERKLKRLQRQLSRKNKGSNNRRKAVNRLAKQHKKVADTRKDFHFKTSKWLLDNYDVVAHEDLNIKGVAKSRLSKSVHDAGWGQFLSILKVKAENAGLLTVAVNPNSTSQTCSNCGANVPKQLNDRWHSCSHCHYEADRDINAAVNIKTLAEGHPVNQACGERRNNGSRKQEALTIANA

SEQ ID NO: 47820 - protein, 308 aa, Microcoleus sp.
MFAIKRRLKLNSQEKAKFSSHAGFSRFVYNYGLSLFWQSIDTGLKVSDAKRLGAIKKCFTNVTKKRKGFEWTQELSSKVYQSAFQALGEAVKRWRKGLGGKPVYKRRKDKQSFTVYDGNGIMLLKEGKTIKIPTLGTLRLQESLTESYMSQTFTLSCEAGEWFVAFCVEAQRIPPILHEVTEPVGIDLGVKTFATISDGTELEAPKPLKKAITKLRKLQYHNRNKRFGDRRTGEAASSNAKKYFRKVARLHRDIANQRKDFLNKTTTNICCKYAHIRIEDLNISGMIANRKLSKAISDLGFYEFRRQL

SEQ ID NO: 47821 - protein, 380 aa, unknown
  TnpB Polypeptide
LNSKEIKLTMNKAYKFRIYPDKIQRELLSKTFGCVRLVYNHFLSIRKDSYDKEKKSVSYNAMARELVQFKKENEFLKEIDSISLQQSLRHLDTAFQNFFRDKNVGYPKFKSKKINNYTYSTVCVNRNIKLENDFLILPKLKQVKIKQHRMIPEGYVLKSVTVSMTPTGKYYASILFEYDAKIKEVTPVKIIGLDFSIHNLFASSESDIKADSEFLHFYRNALVKLAKEQRKLSHCVKSSNRYYKQKLRVSKIHEKVSNQRKDFLHKKSRQITNAYDLVCIESLDMKAMSQCLNFGKSVNDNGWSMFTTFLDYKLREQGKKLIKIDKWYPSSKTCHLCGYIKSDLQLSTREWKCPSCGTTHNRDYNASINIKNEGLRIAFV

SEQ ID NO: 47822 - protein, 387 aa, unknown
  TnpB Polypeptide
MYRATKVRIYPTPEQAELLEKQFGAVRFAYNKALHIRSHWYKRHGVSLSNSRHIQPLLPIAKKSRRYSWLKQADSTALQAAVQNLDRAFQNFFEKRAKYPNFKLKHGAQSSYHCSCLKITADSIKIPKIPAIRAIIHREIVGKVKSITISRNCAGKYYASILADDGQEAAAKPTYITSVAGYDLGLSHYLIDNNGGKVANPRHLVNAYQRLRRDSKALSRKKPGSANRRKARLRLAAQHERVANARADFQHKLSRRIIDENQAVIVETLKSANMMKNRCLARHIGDAAWSGFVAKLAYKAESAGVHLVKLDQWFASSKTCHCCGHKMPEMSLKVREWKCPGCNADHDRDINAAINIQLKGITELMAAGHVVKAHRGLRKSGCMPVAA

SEQ ID NO: 47823 - protein, 337 aa, unknown
  TnpB Polypeptide
MILTYKIGHEKDFSRELSLAKKVAEYGVQHKSVSSADVKHFGLKSAISNQILRKYSRSKTAKSVKSVKLTIPSQSIRVVEDKIFIPCLKLSLPIYFPRDFVKINQVEIGEDFAYISVSYTDAPKIPELRTVGVDRNTTHHTIVASCLETGKVLKLGKSLNHIHHKYKNMRRHLQKMGKLRKIKEIRDRESRIVRDINHKTTTALMQFARENDACVVMEDLKDIRKTAKSRRKQRYSLHSWNFYQQQMMIEYKSKKFGVSVHYVAPQYTSQRCSRCGNIEQANRNGNLFQCKKCGIVEDSGANAGFNIAYLYRQGISQFSTDRDMLKGNTDTPKEALL

SEQ ID NO: 47824 - protein, 526 aa, unknown
  TnpB Polypeptide
LIKSNPTIYLQSFFNINNYLKSDLTGKFNCFPLYKNSINNYITITTSSLINLFTFSKLKNKYVNDINDKKEVNEKQKIFTKNKKIFEKSVTKDKYIIWREYFNIYKDDNINFKGENKLNYNDLKKLFRVNGYKFHYIKTDGVGVSLVFEKLDYKKSSTNKKSSTNKKSSTNKKSSTIKNDNDKNDNDKDIELDTNEIDTPYLQKIDDYKKYKLIGIDPNKRDVIFCTDGAYSRRSSLKKGRSMENINGKTKFFRYTKPQINHETLKTKYDKIRNKSRKEVGVELLESDLSQTNPKSNNFDIFCNYVDIKNKVYYETYKYYNYIKKPYDQNNIKNVGFLKMKLNTYFNTKRSEENMFKRFENKFLNDENLKPKDVIICYGNYGNGALKGTEPVKGKGMRNLFKQRGYNVFLINEKNTSKLCNHCHSELDKFHLKCHRKRKKGDNTEYSDVEKKSKVHGVLRCKSCKDKGPIKSLIFSNKQFSVMELNKSWNDNKYYRVWNRDLNASLNILIKAKHIIQGLNIPESFN

SEQ ID NO: 47825 - protein, 380 aa, Nocardia sp.
MVSRVVKRAYRYRFYPTPEQAEQLAKTFGCVRYVYNRALAERSRAWMLEQRRVTYVDTAKALTTWKKDAETEWLGEVSNVPLQQALRHLQGAFDKFWRKHTKYPKFKKKGRTKDSATYMTNAFTYRDGRIELAKQAEPLNIRWSRPLPEGAQPSQVTVSKDSAGRYHISILVEDTITEHTPTDATVGVDAGITSLYTFSTGEKVSNPRHEKKDRARLGKAQRVLAKKQKGSANRAKARLKVARIHARIADRRRDHLHKLSSRLVRENQVIAIEDLSVRNMVRNRKLARAISDASWSEFRSMLEYKADWYGRTVVAIDRFYPSSKTCSACGRINDSMPLHLRDWQCPCGAVHDRDANAAKNIQAAGLAVLACGDGVRPPRS

SEQ ID NO: 47826 - protein, 304 aa, Campylobacter sp.
MNKLLSIGQASKALLGLVKMKEKLRFNGKINSFTISQSADKFFVSFSMQISKDEYLKTHNKAKNNNLALGIDVGLKSFLSLSNGLEIKAPKPLAKLNRLMIKRARQLSKKQHAKTKQEALQGIKKSSNYLKASIKLNKLHRKIANIRSDFLHKLTSSLVANAKYFCLEDLNVKGMMSNHRLAKSISDVSFYEFKRQLEYKFSYNDKEIYQVDRFYPSSKLCSNCGTIKENLALKDRVYICDECEISIDRDYNASLNLLSQLKQKIGKVLAEFTPADLTALLDDLAINQIATSKVETGIQQKSYL

SEQ ID NO: 47827 - protein, 109 aa, unknown
  TnpB Polypeptide
VKTKPCKVVMETLNIKGMMKNRHLSKAIAKQKLYDFKSKLQYKCEKHDIDFIETDKWFPSSKLCSSCGAIKQDLKLSDRVYKCECGLAIDRDFNASINLSRYKISSLVT

SEQ ID NO: 47828 - protein, 390 aa, Kibdelosporangium sp.
MAAGLEGPDVKITLQVKLLPNAAEAAALAETLRVVNKAACWVSQVAFTKSVTREYPLRGLTYGSLKEQGLGAQVAQHVIKKVADAYTALKATVRAGNLRSKRNVKAVAAPIAFRPDAAHPFDDRCLSWQHDAQTVSIWTVRGRIRNIRFTGHPHQLATVRNHRRGETDLVYRDGKWFLVAVCEVSEPSPIQPMDWIGVDRGIVNLATTSDGENHQGRRLGRYRRWQARLRAELQAVGTRSATRRLRRRARRERRHAQHINHRIAKRIVAVAERTGRGIALEELSGIRERVRLSRHQRATLSSWPFRHLGHVIAYKARRAGVPVVWVDAAYTSQTCPRCRSVTRSNRPTRDTFSCRSCGFAGHADHVAAINVRNRARVAWVFVNMPESVSA

SEQ ID NO: 47829 - protein, 154 aa, unknown
  TnpB Polypeptide
MERKMKKDQRKLSRKKKGSHNRGKAKVAKVHAKIANQRKDFLHQASVRVVRNYNLIVMEDLLVRNMVRNHRLAKSIHDAGWGQFRNYIRYKCERTGKKFILVDPKGTSQTCLCGEHVPKDLSVRVHECPVCGLVMDRDLVSAKLILEYGLRAIA

SEQ ID NO: 47830 - protein, 587 aa, unknown
  TnpB Polypeptide
MYVQGSLLPDWESTPKRSKDGSQKGKSRVSSPRVGKEDITSTQLSLLDLMTQPAEKQYFTPGFLAALKKPTLSNKYSFLSLITQPPKLSQTLEADSTSGEKGFKPYWNPFCQMMSDWLSLPTKIACAGLDSILLHGLPVARKLKYWFSTKRTLVQKERWLKTCSPLSTSSVADYTDLESTKSKFVKTVSFRVYPCKELATIWKRWVSAVRKVYNISIAYLNEHQGFTKIGKKGGKQGFRTMLKASGLIPAWCTELGVSKLLDNASMEAYTAWSETERKDKFIGKGKDKKPHPQAGKKIARFRSIRDARITLQFDPTGYNNGSWMVSATKHLPKPEFKGHNFCVITDRATELTYAKGRWEAHFVVDAKFEVTQSERMIALDPGVRTFLTGFNGNEFLEFCSGDFQRIARLCVHLDALKSRHEKSWGRSFKRLRYKLRIAMRQVRIRIKNLRSECHKQVASYLAKNYHVIVLPTFETSQMVVRSRRKLHSKTARAMMSWAFYQFSQTLQHLCNRYGSKLVRITEEYTSKTCTKCGHVHKKLGSSKIFKCPECGYEIPRDFNGALGIFLKAVWDTTLFSINNVGHVVLDF

SEQ ID NO: 47831 - protein, 384 aa, unknown
  TnpB Polypeptide
MERTIKLKLGLSEENKETLRQTMALSNQVFNEIARYGFENHTCSKVSVHRATYYSIREKHPELPCSILQGIRDVACESLKGLELKKCPASKPFSAIRYNKRVHRINLIKQNVSLSSVKGRVTATYSIPEYYRQYLNWEFKTSTLRYNRQKDTFYLHVVIHKLSPEPVGDKVLGIDRGIVNIAVTSNNRFFNSKPLKNVRAKYAYLRAKLQSKGTKSAKKLLRKMSGKEQRFVSGVNHCISKGIVAMPFDIFAIEDLTSIRVQSRTKGTDFTRKLNNWAFYELDQFLRYKAEAMGKSVVTIDPRYTSQKCSVCGHIYKGNRKGHSFKCVTCGFQIHADLNAARNIAVLGISGNGRLPVTQPYIACDEVEARKGIETEHSDNAPHF

SEQ ID NO: 47832 - protein, 438 aa, unknown
  TnpB Polypeptide
MMIHYRYGVASVKMFAVWAHVVSQKTGKTTCLPKMQVPTLGYRTDQKMKRTYKFRIYPTKDQEAILNRWIETCRVLYNDCITERRDAWKQCRKSISCYDQANQLPEIKKFDDGLRSVHSQVIQDVLRRVDKAYQNFYRRVRNGDRKAGFPRYKGKNRYDSFTYPQSGFEIRGDKLTLSKIGDIKIKQHRAIEENVKTCTIKRDVDQWYACFSVELPDAPMKERIESAIGVDLGLTSIITTNTGEKVDPPTYLRKSGKKLSREQRRLSRKREGSSNREKQKRIVRRVHRKIRNQRTDFNHKLSRDLVNNNDLIVFEDLSIKNMLQNHHLAKSIFDAGWHQLQRFTAYKAEEAGKYVIFADPNGTSIECSVCGYRVEKTLATRVHRCPECGLIEDRDVNAAKNILKRGCECLPQELRETTPVEMFVGTSMKQETLCVSEG

SEQ ID NO: 47833 - protein, 308 aa, unknown
  TnpB Polypeptide
MRKVIHGEIYNSGFDNLNKLVSDWSSAYRFAFCRFQKNKLSFNEVRNQTKIKYQSLNTRQISDAVKQSQGLYSRVKGKTVIFGGKKNWNSLVKGNLSNQEWKNKRDNQIYARGDITKKGNPNIRLLNKNGDFYLRVTIGNRQFEEYNLFVPTKFEKRLLSLFGSGSSYNVRLLKKDAQHYRVVIDYEAEAPETMVGFSNGIIGIDVNPDRVAISNAGNDGNLVKSFTIVNNRMFFASTDKRNYETGCIVKQITNYALESQKGIVFENLKFRKEFENQGRKFNRVKSNFVWKKILILLERKCVENGINV

SEQ ID NO: 47834 - protein, 337 aa, unknown
  TnpB Polypeptide
VARRGVRGSAAAVGRRSRSRLPQLLRRPEAGQGGPGAQRASQAEGPQAPLQVPPPRPGGSIHPQQLLPGHPRWLPLAPQGRRGQGALVTATPRRPIVGHGHAGCCWPLPRLVRGGGRPGAAAPCRHRGRGRSRPEQLRRPLYWEKVDNPRWLRQREKALRRSQRNMARKRKGSKNREKARRRVARLHVRVADARRDFHHQLSTRLVREYRTVCVETLNVAGLGRSKLARSVHDAGWGQFTAMLEYKAGLYGRTLVKVDRWYPSSQVCSACGRRDGPKPLTVRAWTCSGCGTTHDRDLNAAKNVLAEGLSVAACGPDVRPGSRRAVGHEAGTTLAGAA

SEQ ID NO: 47835 - protein, 440 aa, Arthrobacter sp.
LYPAAWQLPVLLMHIRHARYVYNLGLEQRRMWHPFKREQFKKLSATSQMLELTEARKEFPRLAEGVRDVQDGALWDLERAYKNWWSNPAHFGRPTFRSKHESQSFIIRYPTVHLLSEKWATVKIRKLGEVKFRLTRALADVMVAKGARVILSPSGKWHISFTTLPPPFTRTSTGSELGIDRGVTRTISTSNGAHSTIPALTKGEQRRFLALEHRLGRQIKGSNRWEATRRDLNQLRDRQKNRHRDWIEKTSTRVVRDNDLIALEDLQTSKMVKAPAPRPDPEKPGAFLHNGAKGKARLNRAILGSSWGELERRIEDKAAMAPEDSPVHVVLVHPKNTSITCHKCGHISAENRKSQAVFRCTRCGHTAHADTNAARNILTAARNTLPPDGRSTDASVTQGAASNRTRRLSRLQGTSSQPKGIPNSIPITSRPAGSQPLLSP

SEQ ID NO: 47836 - protein, 342 aa, unknown
  TnpB Polypeptide
MSRLTFKYRLYPNRQQREKLAATLNLCRELYNAGLQERREAWSSHRKSVPSQVLQDTLRRLDKTFKAFFLRCQRGQVQGFPRFRSESRYDSFTSPQSGFQLQGRLSLSKIGAIKIKLHRSIRGAIKTLTLKRENGMWYACFSCLVGAEPLPVSDQAVGIDVGLHFFAVPSDGTAIENPRPFKKMEKRLRRAQRRVARRKKFSQRWKKAVRMVGKMHRQAFHQRNDFQHKWSRDIVNHNGTIVVEDLNVKGLSRGLFRKSVQDVGWAGFFQKLSYKAASAGRLFLRVDPRGTSQRCPCGEAHNKVLRKREHVCVRCGLVTTRDHASALEILRLGLSLKSLTAV

SEQ ID NO: 47837 - protein, 412 aa, unknown
  TnpB Polypeptide
MLVFEFKAKGKTTQYLAIDEAIRTAQFVRNKCIRYWMDNQGVGQKDLYRHNTALRAEFPFVKNLNSHACQTAVERAYSSIARFYSNCKKQIPGKKGYPRFKKNYRSVEYKTSGWKLSETRKQITFTDKKGIGKLKLKGTWDLNFYQLAQIKRVRLVRRADGYYVQFLVNAENKVESQPTGKAIGLDVGLKEFYTDSNGYQEPNPRFYREGEKRLRFLQRRVSRTEIGSTNRKKAINRLGRFHLKISRQREEHAKRVARCVIQSNDLVAYVDAPAACRRLDLRIRNLVKNHCLAKSINDAGWYQFRKWLEYFGVKCGKITIAVNPAYSSQECSSCGTVVKKSLSTRTHICRCGCILDRDWNAAINILKIALSTAGHVGTWILNPNASGDLASTVLGASLFQQAGSMKEESLSL

SEQ ID NO: 47838 - protein, 365 aa, unknown
  TnpB Polypeptide
VQITTQIKLLPTSEQIILIKNTMQEYIKTANNIVSDYVVGNNTVKHTSKSVIADLPSALKNQAIQDAKSIFKKYTKNLKTNSKKEPDKQKEIKVPILKKPVAIWNNQNYSIKFGYIAFPVWLNGKSTRIMVKTETTGYQVNLLINKLGTLRITEKSGKYMAQIAVNAIPVQSTGTDTMGIDLGLKIPAVAVTEKGKTIFCGNGRRNKYTKRKHRSLRKKLGKLKKVAAIKKLSNREQRWMQDQDHKVSRQLVNFAKTNNVSTIRLEKLSGIRQTARTSRKNEKNLHTWSFYRLAQFIEYKATLEGIKVEYVDPRYTSQTCPACGTRNKANDRKYKCGCGFKGHRDIIGATNIISAPVVVGNRLSA

SEQ ID NO: 47839 - protein, 348 aa, unknown
  TnpB Polypeptide
MIRKATISLKNANKGKLEKLEIITKEYVRVVNLFIDIFWEQKQFMFKFAPQSDIDSWLSARIKQATAKQALSIIKSQRKRKKKYKPMLTRFAMELDSRFIEIGQDINSFDFWIKLSSIGDKIILNIPSRKHRQFNKLAKEGWKIKNSLRVRLNENGYFADVFFEKEAPVIKTAGMAKAVDIGYKKLLVSSDGEFIGDNSIYKKIARKKQGSNAFKKALVERNEIVNVSCKALNLDNIKALYAEDLKGVKHGSRGRIRKTFNTLLQRWVYPKVLGKLSMICEEKGILFKKVPPQYTSQRCSKCGTICKSNRNGEVYKCVCGNVMDADFNAAQNILHIGEYGLDALQPSL

SEQ ID NO: 47840 - protein, 415 aa, Fusobacterium sp.
MYLTLKQQVKHLNKKEFRILKYLSHIAKNLKNQAIYNIRQHYFNKKKYLSYNENYKILKNSENYKKLNSNMAQQILKEADESFKSFFSLLKLAKKGKYDFKNIKLPKYLAKDGFTTLVIGFVRLKDGMLIIPYSNSFRKTHEEIAIKLPPVLKCKKIKEIRIIPKQYSRYFEIQYTYEVEEVQRELNKENGLGIDLGIDNLCTCVTNNGASFLIDGRKLKSINQYYNKINAKLQSIKDKQKIKRTTLRQKKITRKRNNRIEDYLSKSARRIINYCLNSDIGKIILGYNEDFQRNSNIRSINNQNFVNISYGKLRDKLIYLCKLYGIELKLQEESYTSKASFFDGDEIPIYDKENSQEYVFSGKRIKRGLYQTKKGKLINADCNGALNILRKSKVVDLNVLYNRGELNTPKRIRVV

SEQ ID NO: 47841 - protein, 383 aa, Actinomadura sp.
VQLRYNFRLYPAPPQRAALARAFGCARVVFNDGLRARREARAAGLPHLPDGELSKRVITEAKKTPERAWLGEVSAVVLQQALADLNTAYRNLFASLSGTRKGPGIAPPRFRSRKDNRQAIRFTRNARFSITAGGKLRLPKIGDVRVRWSRGLPSEPSSVTVIKDSAGRYFASFVVETADEPLPEAAAEVGIDLGLTHFAVLSDGRKITSPKFLHRVERRLRKAQQALSRKQKGSANRRKAVARVARLHTRVSDARRDYHHKLSTELIRDNQAVYVEDLAVNGLARTRLAKSVHDAGWSQFLAMLEYKAERHGRTFAKVDRWFPSSKLCSECGAVAESMPLNTREWACVCGAVHDRDANAAKNILAAGRAERLNACGGTVRPAA

SEQ ID NO: 47842 - protein, 310 aa, unknown
  TnpB Polypeptide
MVNSQFNTLKMSKIVDGNVKLPGNIGIVKAKIHRPITGKIKTVTVSKTPSGKYLASILTEIEGENPTVSEGKIYGIDLGIKHFAVVTDGENVSKYDNPKHLAQHEKNLKRKQKKLAHKQKGSKSRQKYRKVVAKVYERVSNSRQDFLHKLSQKLVSDSQAVIVENLHVKGMVRNHNLAKAISDCGWGTFTNFLAYKLERKGAKLVEIDRWFPSSKLCSNCFYQVSQMPLDVREWTCPNCGSHHDRDGNAAMNIRAEGIRMLKTDGSAVSAVGGEVRPHFGRKSKMGHSPVSTEADTDLVFQVSVGSSLMF

SEQ ID NO: 47843 - protein, 426 aa, unknown
  TnpB Polypeptide
MVCEYAVIQLRSWRERRKTITRQNNEYVSSGFKRTANPNKPEFLKPRLALSATDKQYHAVRVKGSVVELDMVVNKRWVTFTFASPQRFCELGVKIIAPTISIDDNNRVMFNWPFEIPVERASFSNKYVVGVDVGITNHTTVVVRNIVTGEVVETSFMNRRVRSLENKIKRAKTQIAALKKQGRDEEAEPHRMALSNRRKELAILIGQEVADLSYRYGNALVAVEDLSFITNTMKNGRWVRGMLIDRIKNMVESNGGRVMTVNPAYTSRKCHRCSENLDMTDYHTPTCSVCRVGWDRENAAANIAGKLKDKDQHKKSCQTRKKHASKKRRKNSKGSLRTLKHPLKKTGPTPKAPQNSPKNRDNHMVHHAQCVVRTREEVYPILCAAGWSPRCGVSVPAVAPEKASDKQPHDYPYDEAILMGCAHIKE

SEQ ID NO: 47844 - protein, 420 aa, Microcoleus sp.
MHDLHLIVEEPCERKLSRTVLKTRGTGDSLVEFNNSLPAFKEVWTEYKECNSMTLQATLKRVDYAFNRWFKGLAKRPKYKSIKHYSGWTYPSKTGWKVHTTGDNGYLELAKIGSIQMRGKARIWGTPTTCTIVYRNRKWYASITVNITELQAATRQTDFGSVGIDFGCKSALAITDGENHSFIEAPKFLRKAEAKIKRLSKGKRRKRPPNRRKKQKASNRWKKTQAKISKVTRKVANQRQNWVHQVATDIVSCNSFVATEKLEVSKMTRSSKKGKRKKQKAGLNKSILDVGMGMLRSAIEYKVKNAGGVFVEVPTRKVKPSQTCPKCGNQAKKTLDERVHHCHECGLEMDRDLAAALVMLLWALGILPGFGTSLADADVSSSTSETCKRKQTGSMKQLGQVKRQKHSHTGLVVETQTSTK

SEQ ID NO: 47845 - protein, 414 aa, Microcoleus sp.
MLEERFNWWECNRSPVNACSIYITYLPELKDQPTYYSQKRANHWSRESHDALYKGVHSQVIQEAIKRVEDTFNRFIKGDFKKQRSGKPRFKSVKRYRTFCLPQLKADCLTVSPNPHKRKNGKARRDIAQINLPKIGQVKVIYHRPIPEGFTIKTGLVSHKADGWYVTLLLEDKTIPSLTPPEIQANEENSLGLDVGLEKFWTASDGTVETIQQHYRKSEDKLAKLQNRKDKKPHKSASRRQLAKKISKHHQKLQRKRKQFHYESANQLVSRDEQVFFVEDIKSANLSRKNKPKQDANGKYLPNGQSAKSGLNKSINDASWGQFLSILIYKAAKAGKLVVKVKPHNTSQVCSCCDLLVQKDLSIRVHECLCGLILDRDWNAAINIKRVGLGIFPTIKRPKRSLLTTTKEAHTIPV

SEQ ID NO: 47846 - protein, 389 aa, unknown
  TnpB Polypeptide
MTTAYRFRLYPKRAEEEKLETAKEVCRQTYNHLLSELNEGFTKNEIQNYLLDLKVVYPEMNGIHSKVLQMENQRLFGNLSSLSHLKKRGHKVGRLRYKGRNWFKTFTYNQSGFKLIKTNKRYDFLYLSKIGAIPIKLHRKVEGNIKNITIKKSNGKWYCYIVSDAVIKRICGDKEIGIDVGVMNYIYDSNGNSYENPKHFDIYHSKLKTAQQSLSKKNKGSNSRKKARMKVAKIHEKIANARDDFIHKLSTKLIRENKFIAIEKLNIKNLISISYNAKNIADASWGKLSCYLHYKAESAGCVVQDVDPAYTTMDCSFCGIRNNKLELSKRKFICKKCSKEIPRDYNSALNILYRGKELASMEKASNTEQFAQQEASMKLEAITSAGAKL

SEQ ID NO: 47847 - protein, 436 aa, unknown
  TnpB Polypeptide
VVRLLPNGFQERKLRRLADISAKLFNEVNYERRQQFFRGEKVDFEGTWDKCYEKYKEELGVNAQAVMQKNNEAWSSFFSLLKLRKENKLPPHMDRVSPPRYWKDEDGRKLLLAVREDNYVVDEKNHKLILKFFKMEIRFTGRLRWLGKQGRLEVYYDEVRNAWYASIPVEVGVEKTKTGRKSKHVVRGERKSIQVKSPKGNKMASIDLGINVLASVVIDDGTWLLYKGVRAKEDYFYFGKRIAEAQSSADKARNINEYEAYGELNREGRRLFKKLTKRLLHLYRNFASHLMRELHERGVSTIYLGYPFNIAQQKGNKFTVNMWSYRELMEVIELKAQEYGIRVFEVIEYNTSKYCAYHGVEVERGPRGVVNCPKGHRLHSDLNGALNILKKATGITISAIKKPLSFIVDHNRVAPLMGRNPLDLGEPSPNGGEEVR

SEQ ID NO: 47848 - protein, 449 aa, unknown
  TnpB Polypeptide
MQLPVTMHMAQKYAVSRDNPEDVFTFLHKNFGCSRKVYNLCVDSLYRQLEAAGYQSGDDIPAPVCPKVSALKKEFPYLKEADAQGLSNSVMDFRSAWKRFLKQPSHKAYTKRALRRDSSGTEALSFRGLKGIPKFHAKAMGYCSYRTACQYPSGNNKLKQPTVRLIGDILYLPKLKGGVKLVLHRSLPEGAHIENVTLSMETDGSIQASICYSYTLLVDMTLQEAAMSGSLPEDTTFLGLDYSQQDFYVDSEGRKANYPKYYRKSEEKLALLQRRLSHKEKDSKNYLKLSGQIRKLHAKIRNQRRDFLQKESTRLVSQYDVIVVEDLDLRGMGGALSLGKNLHDNGFGMFREMLAYKLQRKGSCLVKVDRWFPSSKTCSCCGHVLDSLELSDRTYTCPVCGMAMDRDVNAAVNICEEGKRIFPDYLEKILQEKQAAAGKTKRKGRRKAA

SEQ ID NO: 47849 - protein, 401 aa, Pseudomonas sp.
MKTDLAEGRVRLCFGSRKLFRMQFNGPVAGDKAFQKAWQADWQASRSAQFFLVGSKDETAGCQSCVATVQSDQQLTLRVRLPYALGKHQVLQNIHFTYGNEAILASLKAQRALSYRFVRDDKGWRIFLSTDHDDVRIKTRRDLGAIGLDLNVDHLALAELDRSGNLIHAEKLPCHNHGKSTEQAKALIGDLAKAVAARCAAAGKPLVLERLDFQARKKALAEHNPREARILSSFYYSKMGSALRTACFRAGVEVLDVNPAYTSTIGAINHAQPRGISVHQGAAMAIARRGMGFSERLSTRVGLAPARRGGHVTFALPARNRAKHVWSFWADSRKNLQAALAAHFRSGASKDNPAPLISPICFVPTRRGLAKTVCSTQKLSVKSRHARYPNCSGTVLEDVPF

SEQ ID NO: 47850 - protein, 489 aa, unknown
  TnpB Polypeptide
MQFTTQMKIDSCHKEFLEASTQYTGTLRARLLTSLLKKESGTELKKKYIAEYGVTARQFNSLISEVRGIISSAEELRKRNIEEAKIRIASCKKRIKTLEKKLKDCSPACGINGNRSPRKSVKFAIHQKKRRQGILEARLKKLQTKVSICLGGKKLFKAQYNLEANGYESHQEWLEDFRRKRNNRVFYIGSKDESFGNQNCQLIGNKLLIRVLPHLQAGYGDCYTIANISFAYGKEEVTQAIAKKQAINYRLIYKKKNWYLQLTTQREDAPQITRKELGVIGVDLNPSHLSWAEVNRHGNLIAFGNIPTPLQDRRSDQVKATLGDAIKEIVEYAKKVQKPIVVEELDFSKKKARLREYSVRYRRMLSYFAYSLFFLMLISKALRAGVQVITTNPAYSSLIGKFKFMSMYGLCTHLAASLVLARRAFGFSERLPAKYALGLAEHKYRHVWSFWRAFSKAVSNREPRVGLVSRQPGANPSSLSSTPGLTCDS

SEQ ID NO: 47851 - protein, 378 aa, unknown
  TnpB Polypeptide
MKQFCGCARYVYNRTLSLERSLYKKDNKHSFKYAEAVNRLPEWKKKNPFLKECHSQVLQQSLKDLDQAYTNFFRKRANFPKYKEKFRNDSIRFPQGVELDEAKQQIRLPKIGWVGYRKSRDIMGAIKNVTVSRRGEKWDVSIQTEYEVSLPAANPSEIGIDMGVKRFVTMSNGDFVEPLNPFKQEREKLAKLQRKLARQKKGSRNSRKTKRKIARLHRYIADSRRDFLHKTSTKIAKNHSIVYVEDLKVSNMSASAGGTKESPGKNVRQKSGLNRSILDQGWYSFFQMLSYKLERGGGKLIKVDPRNTSRTCPRCGFVSAENRKSQATFACIGCGYRSNADEVGAINILRAGQARLACAMSGAVRPLSAGTRRDLLQH

SEQ ID NO: 47852 - protein, 376 aa, unknown
  TnpB Polypeptide
MRRISYKFRLRPTAAQTTLLERTLELCRWTYNETLSFRKTTWETQQKSLSKYDTHKLLPSWKQQKPELIQVYAQVLQNVQERVDLAFRAFFQRVKKGEKPGYPRFKSFGCYASFTYPQYGGGVVLNDEGFHLSKIGLVSVVMHRQLAPGAVVKRVTVKREADKWYAVLLAEEPERKGRCGHGMVGIDLGCKSFITLSDGTVVENPRFLSKSLKRLVKAQRRLDRAPKGTPERSKARKVLGKVHQKVYNRRTDFLHKTSRRLVNGYETLVFEDLRIQDMVQSRPWHALNRTILDASWGRFVFMCSYKAENAGGRVVQVNPRNTTKMCSRCGAIVAKDLSERVHSCPQCLLEIDRDLNAALNILRLGHQSLARAQARA

SEQ ID NO: 47853 - protein, 392 aa, unknown
  TnpB Polypeptide
MFRTYKFRLYPNKDQQDRLNAWSDVCRFIWNLGLEQWLNLVRSSNFKKISLTSFKQQSEFSELRREHLWLRDCPRHAQDAIFSRLFQSWNRCFQGIAGRPKFKKKSEWVSIVEPERSKFSISGGFLRFPKLSPIVAIQHRIIEGTPKKCTIKRTGDQWYAYVQVERSRPDTRLRISSEVGIDLGVNSFIADSNENLVENPRFLQHSMNLLIRSQRDVSRKVRGSSKHKKACRRVSKIYRKIKNQRSDFIHKLSRQYANSHGFIVMEDLKIENMVKGLCGGAILDSGWGLFRECLEYKLLENNGILQKVDPKYTSQTCSSCGYTDSCSRTKSTFNCTKCNHVEHADTNAAKVIYSRADRSVLAVDGDLKYQTGRSGKAKRKVSFFSSTKPKGL

SEQ ID NO: 47854 - protein, 482 aa, unknown
  TnpB Polypeptide
MPRFEVPDGWMVQAYRYALDPAPRQERALLSHAGAARFCFNHMLAAVKAVMDQRAAERSYGIPDSELTSGLGWSLPALRRAWNQRKHEVAPWWGENSKEAYNTGLDALVRALDAWGKSRSGERAGAAAGFPRFKTRRSRVTVRFTTGTIRVEPDRHHVTLPRLGRIKTHESTRKLARRIETGTARILSATVSRDAAGRWHVSFQTLVCRAVPAIHGRGGSVVGVDVGVRDLLVVAAPDGAEVERVPAPRSLARAQGRLRGLQRKAARQHGPDDPAARRKRQPSSRWRRTRARIGRVHVRTANIRRDALHKATTTLAQRHEVVVVETLNAAGMRARGGARKRGLNRALADAALAEVRRMLGYKTRWSGSTLVAADRWYPSSKTCSACGSRKPRLLLSERTFACDQCGVVLDRDLNAAVNLARLGEPAPAGEQGPAGSGPVAGRGATHKTRPAQAGKAAGWEASTPHSHKAEQTGTAPPQGEAA

SEQ ID NO: 47855 - protein, 391 aa, unknown
  TnpB Polypeptide
MLLTFKYRLWTNRNQERELGIMLETHRRLYNACLEQRKVAYESEQRNVRYTEQSAWFKQQRADNPYFARINFSSAQATLRRLDKAFQAFFRRVKSGEKPGYPRFKGQDRFSSIEYPSHGDGIRFFGNRLRLQHVGTVRVNQHRPLTENAQIRTITVTTDAEKWYVEVCCLLPDVAVERSDRPAVGLDVGIESFLTTSDGEFLPNPGYLKTELPELRRAQRSLCREKKGGANRRKTKKQVSRLHARVRNKRNDHRHKTALSFIRRFGFIAVESLNIQGMVRNRRLSRAISDVAWGGFVAALRHKAESAGVEVVEVNPAGTSQNCSGCGQIVPKKLSERKHLCPHCGLFLHRDVNAARNILARAFTASGSGAWALTEPSGSVTQEAVGLLLTE

SEQ ID NO: 47856 - protein, 340 aa, Streptomyces sp.
VQADGESGKRYGNETIRIAPDGEVSIRLLAPLTGLANAPHGRYVLTGRVAFAHRGQEWADRVAANRAVAYRIHYDVARGRWYVTASWQIPVSPVVPLATALTHGVIGVDTNADHLAAWRLDVHGNPTGSPRRFCYDLTGTATHRDAQVRHALTRLLHWAKTCGVKALAVEDLDFTGEKTREKHGRRKRFRHLVSGLPTGRLRARLTSMADATGIAVIAVDPAYTSKWGAQHWQKPLTSPTRTTTRHDAASIAIGRRAQGHPLRRRAAPPRAHRSDVHGHRTAQAGPETPGREGPRPRVPGPRTRSVPPDAERTRATSASTTVRDAPDAQVRVQDSLLLTD

SEQ ID NO: 47857 - protein, 299 aa, unknown
  TnpB Polypeptide
MEQVLTIVCRLQPTPEQAQKIEATLSGFASACNFINANVDPKFVNNVRVQTLIYHQVRSQFGLSANLTVRAIARVCANRKTAKLKNKPVKEFRATSADYDARIFAFREKDWSVSLTLIGGREHIKMAVGNYQIGKLKGKKPTSATLCKHKDGKFYIHIQVKEEVPKPHVQSEVLGVDFGRTDIAHTTEGDNWNGQQLNKVRDHYSKLRAVLQQKASKGTRSSRRRCRELVKRLSGRERRFQAWVNHRISTRIVERAKSLSACIAIEDLTGIRERTNQQPRNKTERRSQIVGRSINCGSF

SEQ ID NO: 47858 - protein, 181 aa, Okeania sp.
LAKFQWRNRNKQLGTKGKPPSKNAIKYYKKLRLNHARIANMRRDFIEKTTTKIVGNIKHVCLEDLNVKGMMQNGKLAASIARQGFYEFRERLTIKIVASGGSVVLASQWFPSSKTCHNCGQINPELKLSDRIYNCPHCGTVIDRDLNAAIVLSQYGEVNQFTRVGCTRIYACELEGADSPG

SEQ ID NO: 47859 - protein, 421 aa, unknown
  TnpB Polypeptide
LDASASLWNETNYARRQAFLEDDESIWDADTGSLEGKYKGVLSSSVAQQIIRKNSEAWRSFFSSNEKYHAGKLDEKPSPPGYWGNEEDGRVLRTYVRNDQYTIEFGERSRLEVPIGSDLKEELGLNRNQRLRVEVAGEPKWNGEQNRLEIVYDETANAFRAFQPVTVPDSRLDSPLASEEAALDVGANNLVACTVSTGSQLLYEGRSLFEQFRETTERVAHYQSLLEDQRETSKRIDRLYRKRTNRRNHAQDALVRDLVKRLYAEGVSTLYVGDIKDVLSTHWSPRVNEKTHNFWAYRRFISRLKDVCEEYSITVEEESEAWTSQKCPECGEREGTIRHEDSLVCPCGFEGHADLIASESFLRRQNNTVGPMARPVYLKWNKHSWREHHGPPSLMETTANEAYTDQSTTVGGNIALGDSDD

SEQ ID NO: 47860 - protein, 435 aa, unknown
  TnpB Polypeptide
MVDDAPRRTVLIKLDVPNDRKANLHQTKNQFLNCANQTSDWAWRYDDYCITSKAKAEKALYEDLKAEHDLTANLVQKGIRRAIEAVKGGVEKLKKGEKTSQPVFDSWSIVYDKRSATFNANHATLSTINGRVKTEYVIPPEDDSKDTPFGRYYESDEWDASSATLQYDEHSEEFYLHVTLKNPNYEVDGTERQEATSRGEGAENGVVLGVDLNVTGAFAVTSTGEFIGSADYLNHKRDQYEQRHAKLQQTGTRSAHLTIQSIGSKFSDWSLDWLHNRANDLIKEAKDADVDGIIFENLDHIRENIANGSKFQQWAYAKFVELVEYKVESTALFVDTVSPAYTSQRCSCCGFTHEDNRNDKEFECQSCGYEVNADYNAAKNIATRYCGYIHREQKSRDGWAGCQSALKSGTLNVNGDFNASAELRQNGSPLTSPDR

SEQ ID NO: 47861 - protein, 404 aa, unknown
  TnpB Polypeptide
MQLRYNYRLYPSPGQRAALARAFGCARVVFNDGLRIREQAHEAGLPYVTDGELSARLTAVKATPERAWLAEVSAVILQQSLADLNTAYRNFFASVTGTRKGPKAGPPRFRSRKDRRQAVRFTANARFKILASGRLRLPKIGDVEVRWSRALPSAPASVTVIKDPAGRYFASFVVETGPAADAARFPAPHAGAEVGIDLGLTSFAVLSDGTVVRSPRFLRRAERKLRRLQKSLSRTAAGSSNKEKARVRVARAHAKVADSRRDFHHKTSTVIIRDNQAVYAEDLCVAGLARTRMAKSVHDAGWSAFVTMLEYKAKRYGRHFGKIGRFVPSTGPCSACGVNSGSKPLNVRQWACAGCGTVHDRDLNAAKNILALGRRERLNARGDDVRPPLAGAVAGETGTLRGAA

SEQ ID NO: 47862 - protein, 383 aa, unknown
  TnpB Polypeptide
MRMYRFRIYPSKSQEKYLNQQRWLAKNLWNELLEHSKETYRCFDKFPTKNTFAALTKQSGLHSQVAQEIGFRVEKSVWRYIKLRKAGNNKVGFPRFKSFVNMNSLNYPQSGFSLDKKLKVTPFGEIQIVQHREIKGTIKTLTLKKEPSGKWFACFAVAETPIVKAPNKGTIIGVDLGLKTLATFSNGHVIKNPRHIRKHQERLAFLQRESDRKKKGSKNRRKAKRLVAIEFEKLKNTRRDFLHRLSRRMVNSYSFIALEDLASKELAEQNYGKSINDAGWGELANMLRYKAESAGCEVVFVDPKDTTKTCCVCGDKQDMPLDIRIYNCNSCGHIEDRDLNASHNILKRATEGHSERNACRNLPYTQPARVEQDISMTQEAHIL

SEQ ID NO: 47863 - protein, 433 aa, Calothrix sp.
VLSYEFKVNPKSQQLTAIDEAIRTSQFVRNKVLRYWMDNRGVGKTEMFRYNTLLRKEFKFVEDLNSHACQTAVERVLKAVNRFYDNCKKQIPGKKTPLASSRETRPTQWLGYPKFKKNTRSVEYKVSGWKLSENRKHITFTDNKGIGTLKLIGTRDLNFYQLEQIKRVRIVRRADGYYVQFSVQLDPRDTVKPITPSQKAVGVDVGIKYFLADSQGNTEPNPQFYRKGEKQLNRLNRQKSNKCKKGNPQSRNYYKARQRYARKHLRVSRQREEFVKRVALRLIKSNDLVAYEDLNVKSMVKNRHLAKSISDAGWSKFRSWLDYFGYKYGKITIAVAPHHTSQNCSNCGEKVQKSLSTRTHICNHCGFVADRDINAAINILQKGLGESLAVDGFPGISKVKNPKGTVGHTGAYKLGEFDPLASLEQSCEGKIGL

SEQ ID NO: 47864 - protein, 393 aa, Deinococcus sp.
MSRRLHHDQHNIQISTSSYHAIRKLIAEGLLIPAERAPEVDNPVKGINGAQLYVLAPDCEFVIRSDVECTMGGVPIRAKLYALPSPAYHAVVRANPFTQYPGLDELRTTIRSSATGAREGLRRAVQQGRQPDQRVVVAAESQQFVASWLAQHTLVQIKSLPTRPAPDMFLTLAFHTSFTGVFPPRREAVMGLDVGLQPHTVVARDDGRVKHFHLSPLAQLPTQCLPSAERELLEVLQYAQGRADFEEVVAYLIGHASHIYAEALEHRGMSPRYIVRSRRLALQDAFYSHLSQYANAAGIPFTRVDARHSSTTCPVPVCGAQGERARDVFRCPACGLQRNAHEVGALNVLARGLAGGVHLRTGQWRISDQRGESAQDDFAEWANAYSFPGLRRR

SEQ ID NO: 47865 - protein, 340 aa, unknown
  TnpB Polypeptide
MYRKLRCFSTQVLQDLPITGLWPGEIENYEKGGKFISDAELRKEFTKLRHSDEYAWLLNISNNVTKQAIKDACTAYKNFFRGLQKFPRFKSKKKSMPKFYQDNVKIRFSNTHVKFEGFSSSRKANKQKMNWVRLAEHGRIPTDANYMNPRISFDGLNWWISVCVEFPDCRETLNDDGVGIDLGIKDLAICSDGTKYKNINKSQKVKKLEKQKRRLQRSISRSYEKNKKGESYCKTNNVIKKEKLLLKRNHRLTNIRKNYLNQTISEIINRKPRFICIEDLNVSGMMKNRHLSKAVQEQRFFGLENSSNTNAAIKGSSLLWLIVFIHHQSFAAVVETSKKI

SEQ ID NO: 47866 - protein, 302 aa, Lactobacillus sp.
  misc_feature (3)..(9): Xaa can be any naturally occurring amino acid
LAXXXXXXXFFDKAQPGWGKPRFRSKKAPRQGFKTDRAKIVNGKLRLDRPISISKDSWFDLASYEALKMNEVKVVSIFKEKDSYYAALPYEEDIPAKTKTHQKTAVDVNVGHFNYTEGQIIVLPAKLQKLYKRIKHYQRVLARKRKVNGKLAAKSNNYFAVRTKLQRDYRRVANIQNDLLQKFTTKLVNDYDHIVVEDLAVKQMMMTHVASKGMQRSLFGKFRQILTYKCDWYGKELVLADKTYPSTQRCAQCGYVKKGDEKITLQGNKKHATKHNEYICYECGYSNDRDANAVLNLLALAK

SEQ ID NO: 47867 - protein, 221 aa, unknown
  TnpB Polypeptide
MRSAVLCVQMALSWGEFINFSSDKDQLYHVLGRIRRFQREHCSRQVQSRWAYAKRLNMELSRKIAAEITKYARENQVNVIVFEYLEMQGKISGKKKQKLHLWRKQDIQKLCEHQAHRCGIHISRVSARNTSRLAYDGSGKVDRSTGNHSLCRFTTGKCYHCDLSASYNIGARYFIRELLKPLPETERSSLEAKVPSVKRRTSCVYADLRKLSVEINNSKAA

SEQ ID NO: 47868 - protein, 396 aa, unknown
  TnpB Polypeptide
MIIAHKIALSPNNVQATYFARAAGTARFAYNWALAEWKRQYEAWTLDNSLPKPSQAALRRQLNAIKREQFPWMLEVTKNAPQMAIIQLGDAFKNFFAGRARYPQFRKKGVHDRFTLTNDQFSIDGSRIRIPNLGWVRMRETLRVTGKIMSATVSRVADRWFVSIAVDTQNDLPLPKAENQGAVGVDLGVSALATLSTGETITGHKPHKALLDRLRRLSRSLSRKQKGSTNSKKAKSKLAQLHARIANIRADALHKLTSDLTSRFHTIGIEDLNVRGMVKNRRLSRSIADMGFFEFRRQLEYKSLRRGGQVVVAERFFASSKTCSACGHKLDALPLSAREWACPACGVIHDRDVNAAINLKNLAVSSTVSACGEEGAGRCFGNGETGLGEAGSKQQI

SEQ ID NO: 47869 - protein, 224 aa, unknown
  TnpB Polypeptide
MIPFSTRNLPPDDWIGVDLNTTGYVAVVAHPASGETVMLGEQPEHPEIGPPGRQGRCSSAGKRKKIRIDRDRESNARGDLNQRIAKEIVKMARQLQCGIKLEDLSGAGFAGRQKPGTPLPFSRRDGSFQHLQNLVQDRAHDAGVPVVLVDPAFTSLCCSRCGEPGIRRRKQFLCPHCGYAGHADANAAFNIAAASPVTDRPHKEVEVCSKSPGATPGGVNAGPD

SEQ ID NO: 47870 - protein, 431 aa, Natrialba sp.
MANRVTRTYVATIRNHRQVCEDLDSLGFAASKLWNVARWTADRIWHETGHVPGHAELSAYLKNHERYADLNAQSSQRVIQELAEAFQSWYAKRQNGDETANPPGYRKRGDEHPRSTVTFKEDGFKHDPKHNRVRLSKGRNLKEHWSDFILCEYEPDPDATVENVQQVRAVWNDARDEWELHLVCRVELEDVDSPGERTAGIDLGISNFAAVSYGDETDLYPGGALKEDEYYFAKERAKCDDSRSNEARRLDRKWSNRRTHFLHTLSKTIIEECARRGVGTVAVGDLSGIRERENGESKDWGSKGNQSLHRWAFDRFITMLEYKGEERGITVETVDERNTSKTCACCGRKDASQRVERGLYVCEECDTVANADVNGAENIRCKLEDAKVPPSPTDDSSVDRSTGWMAQPAVHLFDRESGRFTPREQVADCKP

SEQ ID NO: 47871 - protein, 518 aa, unknown
  TnpB Polypeptide
MHTLRLPLKTNKNTEGLFEKRFQLIARIHNQTVKHAKKLLTQLDKSKEYRTLRKEYGELKVKADAGDELAAIQKALVADKMNAFRDSLGLSKNAFDKYVAKMQHKYKKHINSHQAQVEAERVWAGVEKVLFGDGKDVHYKKITEFKTIRGKNHTTGIFFCKDTSDTKCPYFVKWGSIVIPVKMPDTVKADLPDGSNYVLESLKHEIKYCELERLWFKSGWRYYANVYFDGDAPKKLQPGRGTMGIDEGPSTVAAVSEDLAILEELAPKCKDYNKQIARLQRQIDASTRKTNPEKFNEDGTVKKKSEYKGKRWTFSKTCLRKKAIVRELYRRKSEYSTHMHGNIVNRMVKNASMFITEPMDFKALAKRTKETRRQNKATIIKKADGTEQAVYKYKRKKRFGKSVTDRSPAELMIILQRKCNQYELFYYEVDKWEYRASQYDHTTNTYIKTQLSQRFKTVGGNNVQRDLYSAFLLACRWHSKKPSRKKCRELFPHFVKMQNLLIKQMKENGISRPACFGF

SEQ ID NO: 47872 - protein, 291 aa, unknown
  TnpB Polypeptide
MKESTKGSKNMKTYCFKLYKSKKNKNLHRQIDAAGLIYNHCIALHRRYYRLYHKSLNLYALQKHLTKLKRHPRFSYMKEIGSQAVQDVTERIDRAYRLFFRNLKHKVRTAPPSFKKIKKYKSYTLKQSGWKLLEGNAIRIGTRKQKGSNHQKKARLTLTRMYKKTANQRKDFHYKLANAICEEYTLVCIEDLNLKGMQKRWGRKVSDYGFAAFVSILEYQASKMGTTVQKVDRYYASSQTCHICGARNPETKDLHVREWTCPHCGAVHDRDRNAAMNILKVGASTFFGEVS

SEQ ID NO: 47873 - protein, 481 aa, unknown
  TnpB Polypeptide
MNLCRSFYITKKQYPNVFPQLLELCHLGKNLYNQMLYYWYRWYDVYEKSLSFFDFCWMFKRIQKPFDNYRKIQKIMGTKTSDYSLQMYNGSIQSYFKGLKEFYKNPHKFKRKPNSPRYIKQYYFYFVTGISKCDENGLIRFLPMKNKDLQIQIPKHQWFEEMRKDTKSNNKIYRKIKQTRFYYVKKNIIRIEIIYEKEEKPLMEKNDNVIGIDLGVNNLAAIVSNKISPILIDGRVIKSVNHKYNKESSLYKSKLKKCSIYKNESGNYINGDKSNHLDNLIFKRNNKIKSLMHKFSSYIIDLCIENNITTIIVGKNKGWKNKSNMGKRNNQNFVQIPFDKFISMIEYKSKLQGIKFIETEESYTSKTDNMMLEYLYKYLGKDNKYNEFPPKDYKFIGKRPKRGYFISSNGKLINADINAGIGILRKKLGDGIVKDIINPYNPKKLTIQDIEKVVPNSVKGEGDTSSNQGLLRFMNKINTKS

SEQ ID NO: 47874 - protein, 274 aa, unknown
  TnpB Polypeptide
MILRRDCVKVQPQKDSVFKWWIRIPVSPRSIWIPMQLPYEQKPLLKHDLRECRLIRDGENWFVNITVQKNARLERKYACVLPIDMGIRKLATTIENGQPNFYGKKIRRIRGRYFRLRRSVGKARIIRKWRHKERETVKHEVHMITRRIVDKAKQTNAIIAVGDLKGIRRNSKRGSFNRRLSSQPFYLFKQCLTYKANWEGIRVLTVPEAYTSQTCHRCGMRGHRVSGRFPCQNCGLTTDADVNGAWNIVNRAHGILHETGGLLTVPRTLAKCEP

SEQ ID NO: 47875 - protein, 429 aa, Streptomyces sp.
MARFRMYPTPQQEQTMLLHCAHARYVWNLAVEQHAHWQPGRKSAPGFAEQCRQLTEARRENEWLREGNADVQQQALKDFAKAKNARFNSGFGEPTWRKKFRHEGFRVIGTDRVAEFNDDGTPKVNPTTGKQVMGRSVVVHKLNRRWAQVKVPGCGWVRFRLTRPELPGSKTFRVTFRNGQWHAAFAVIPEPVDAPGTGEVIGIDRGVTITAALSDGRKLNCPQLTARERAQIRKHQRCAARAPKGSARKTAEYAMVARFKAREANRRKDWCEKTSTMLARTCDLVRFEKLNIKNMTRSAKGTVQEPGRQVRQKAGLNRAILAQGWGLLRQRTEDKAPGRVEDVPAAYTSLRCSACGWIDKNSRKSQAEFVCSFCGFTCNADSNAAVNVAAGQGGIPRPRRSAGVGGVTTATSRSSTREPQLNWVGIPLF

SEQ ID NO: 47876 - protein, 370 aa, Anaerobium sp.
MNKAYKYRIYPNKTQEQQLARTFGCCRFVYNQILALQETNHKNNIKHMSKFDMNNYCNHVLKAEYPFLKEVDKFAVTNAIYFLETGYQRFFQKQGGYPKFKNKHRSRKSYTTNFTNNNIEVLEHEIKLPKLGKVKAVIHRVAPSGYHLKSATVSQERDGSFYCSVLYEYEAVIMPVAVKEIIGLDYKSDGLYVSSDEKVCGSPKYSRKAAKKLAKAQRRLKHMQMHSSNYNKQQQKVARIHRHISNQRKDFLHKKSTEIANLYDLVCVENLNMKSMSNKGFGNGKATLDNGYGMLLNMLDYKLADRGRQLIRVGKWYASSQICSCCGEVNKMTLSDRKYQCSCGNRMDRDLNAAINIKNEGYRLYREIVA

SEQ ID NO: 47877 - protein, 441 aa, unknown
  TnpB Polypeptide
MQIVSSYGVEIKKKNIPLRATLDIFRKAVSYLIPVYAGTWEELSEIRNPQKRFNAAEHLIHETKKNPARFAFDRHFPKMPSYLRRAAIQHALGAVSSYQTRLGLWEKGELKGKPKLVCENHAMPVFYRDVMYKEAEYGEDVAYLKLFDGRDWKWFQVKLLHTDMEYLRKKWSGKKATAPTLEKKHHTYFLRFSYTEEVSLSKTAVKEQVICSVDLGINTDAVCSSMRTDGTILGRKFINFTSDKDHLYHVLGRIRRFQREHSSGEVQSRWNYAKRLNMELSRKIAAAITKCAIEYQADVIVFEYLEMQGKLSGKKKQKLHLWRKRDIQKLCEHQAHRNGIRVSRVSAQNTSRLACDGSGAVVRNPENHSLCTFRTGKQYNCDLSASYNIGARYFIRELLKPLPETERSSLEAKVPAVKRRTSCVYADLRKLYAEISELKAA

SEQ ID NO: 47878 - protein, 384 aa, Pseudonocardia sp.
MSNIGSKMVWRAYRYRFYPTDEQAQQLARTFGCVRYVDNRALAERSRARIQEHRRVTHAETDRWLTGWKRDPATVWLAEPSKGPLQAALRHLQAAYVSFWAKRAKYPTFKKKGRTTESATYFRNCFSYRDGRLTLAKQDAPLRIVWSRPLPEGAVPSQVTVSRNARGQFHVSILVEEIVSDGPPSDAIVGVDAGITSLVTLSTGEKVLNPLHERRDRAKLARAQRRLSRKARGSANRAKARARVAKIHGRIRDRRRDHLHKLSTRILRENQTVVLEDLAVRNLVRNHSLARAISDAAWAELRRMLEYKAAWYGRTVIAIDRRYPSSKTCSGCGRIADALPLAVRSWSCSGCGVVHDRDVNAAKVILAAGLAVSACGDGVRPPRS

SEQ ID NO: 47879 - protein, 444 aa, Deinococcus sp.
VRLTTRIHPTPTQDAHLRAIWTTLLTAQHTLTAWLHHRAGGGNHSLLAFASGTSPISADHPRPRTRALPTLDQLDDEVRAARDALGWTPTVPPSALRWMAAQTARQWHSCPHGTLPGPWPPAQPPELHLDHSVRVLDPVTLAISTLGADELIVADLYLPNPHWHALLRRQQRRAVHERNLRDALECSWLDAGDRDAAAEVLARRTRGGPWAELPWPELPEPCPGDPVSREETVLRWIDGDGLPARWVVEWRFGAGEVPGWVHDDVLGVDVGYHHPFACAAHGLNVLTPRPFRGPFAQPPLVRTSAAPHHEAWARAQHRRAMFLRLRPLLESHLDLALGYRAVVVERLDWGGFARRGFPFADYAQDVGLVSWLDWLNALSVQHGVTVLRMPPAYTSRTCCVCLRVGPRPQTGELFRCASCGQTSHPDLNAARVIRRQGWTALGWP

SEQ ID NO: 47880 - protein, 554 aa, Scytonema sp.
VAKKKSLYAELTHRSYSRQKDDSGNRIPQLRRGIEAQLPFHPFLEDWGFYYQSFFHSAVNQLQKGQTEDQIEKEFQKRFGIEWAWADSLATDAKSTYDQLVTARENRILELSKDIESGWKAVSEGIEDLENRLKNPTRQNFQGFEKKLLGLESKTSRLIRKQGDLDRLLSQKRLHICFGGVKLFNSQHHLEANNYKSHDEWKSDWEKYRSGNFYSIGKGRTPGNNRVAGIFYQGDDNFTVRFAVPGFLREDYGQYVYLTFEVTGQRKHDLLYALESNKPVTVQCFRREHKSDQWYIHLTTYVQDVPRISSLQNGCIGIDLNAETIDIIYVKRDGNPARTSGKQIILSFPIPTGTTGQNQAALRDIVCEIVKLASIYQCPIACENLDFSLKKAQLRHSGSKHYNRMLSSFIYDKFRSFLVVRAEKSGIEVKFVSPYMTSVIGMVKYMAKYGLNSASAAAMVIARRALGFKEYIPHLWLKTLSPFFEPEDSKDGGFGGGWGKISYWLKIYSIRRPRLFQPDTVLRFLLDSLTVASPKKPRRRRGKVTAISTSVETA

SEQ ID NO: 47881 - protein, 383 aa, unknown
  TnpB Polypeptide
VVAVRKIRIYPENEQAYRRTIHATRRVYNLTIEALKARDERPQTLLRRTLVNQVVTEFPGVPTVALDEAVNSAYSTRQAIIRKRSKGEKCEYQFRSRKASRQSFTVQKLSKTGMPYPTLLGGAYLTEDVSQRAVGSLADVIYEDGRWFLCAKIIVKTRTTESQGLRVAAVDPGVRTFATVFSFDSLAKIGDNFSRDRIYPLLVKLDGLMSLRKKLENLCPVKRGEWVQWMWDRWNNLQKQINRIKNRVSDLKSDLHRRTADWLTDNFDVILLPTFEVQQMTRKVKRKLRRKTVRSMLSLSHWHFKIFLKWIARKKGKIVVDVNESYTSKTDSRTGEVKDIGGAKSINGLDRDINGARGILLRALTRQLEPEIITTSGVSDVAV

SEQ ID NO: 47882 - protein, 397 aa, unknown
  TnpB Polypeptide
MAYINSNIDKCDTNKRDFYNNILRCCEKFGFERLYELALSKRKRIINKYANNPIEFRSLTFSGRCRKKKIIEYNHRFGSVINSFISLSGFSRNSFDIPVSFNKGWHGNMKDYRKRNPDYIYTLTFDKKKHQVNINLCKDGERYIPEPNGKTIGIDVNCKHNLFSLSDETTYDYDRKLVNDFCKLSLEIDRLKEDRDYVIGKRKQRKLDTLKTKMIKSEQQLIANMCRTLQSQGVGHIVMENLDNGFGKCYVKDSNNEDINYNRKVKFLGLSSLKQEVEHIARKYDIAVSTVQASYTSKMCPICGCIEDGNRPDQETFECVECGHKDNADFNAAKNIRNRVLVTVLRDKLLKQLDNGAFEPRMLSREKVKEALLSFRRSLSKVGSECTGSRMTTFKDV

SEQ ID NO: 47883 - protein, 351 aa, unknown
  TnpB Polypeptide
LKTLRVRIKDKHAKALDEMACECNMVWNFVNELSHTHTQRTWQFFSAYDLQKYTTGACKEGLKVHSQTVQGITDEYVTRRKQFKKSKLRWRVSGGSRKSLGWIPFKAGTVTYKNGQLRYVGQFFSLWDSYGLADYKLRSGTFSQDARGRWYANLCVEVEEQKSDGTSSIGIDLGLKDFATFSTGEKIEAQRIYRGAEQSLAIAQRANKKGRVKTIHAKIGNRRKDFLHKLSTRLVSQNGAIFVGNVSASKLAKTKMAKSVLDAGWSAFRTMLQYKCDNAAVWFEEVNERYTTQTCASCGVIPASSPKWLAGLNKRDWECCECGAVHDRDINAAINIRARGHSRLAVGIPVL

SEQ ID NO: 47884 - protein, 367 aa, unknown
  TnpB Polypeptide
MAAQRNKKKMVRSCRVFLNDLNHGKVVVITDFLYQCRTVTQYFVDLFWQRLDFGGKLADLPTVHRAVKRFGITTRLSQSLAKQAKECVRSQHKKGRKDKPALRSHTATLYYHFVKIEPFRGAGFDWAVHLIGSGAPRMTLPVHATQPMLDRMQHGWAISRTVRLGLRDGLVFIDFLFEKDRPALRTEGVVVGMDSNYKAGFVFSDGQQVGEHIYVRVQQFGRRQKHSFAEVDSMVGHAVKTVDWGNIKTLAIENLKRVKHGTRGTFSRQLNRRMSHWLYRACEARLERACEEQGIRLERKDPWKTSQTCRSCLRWDRRSRVGDRFKCVHCGHADHADRNASANLEYLATAGKYGFRSPQNADCQSSS

SEQ ID NO: 47885 - protein, 541 aa, Acidimicrobium sp.
VRTRLQVTDVDAAVLMALGTYLGSLASNDLAERCRQGELDAKGKTESRRERKRALTALTSSRWAGTITRTSEDAFQLAMGNLEAEQRSLRARIAQIRRRLAVPAGTRRGRSYGYPTQAERFQKQRRLQILEHRLEVVEARLESGRVSICRGGKHLANVHHHLDEAGLTDDAWRERWRAERWFLTADGEKDKYLGNLTIRWHPDEQWLDIALPRALAHLANRSRNRYRLSCPISFPYRGDEVAAQAVNGAVRYDIVFLPQKGRWYLDASWRYPDRQPLTIEQVREHRVMAVDLNAGHLATVLLDPSGNPVGRPATIPIVLDGLPATTRDGHLRQAISDVLTMAKTGGARAIVIENLDFAESRDIGRELHGNRPSRGKRGRRFRRLIAGIPTAKFRNLLIQMAANTGITVVAVDPAYTSRWGAEHWLGALQETFIDISGHHAAALVIGRRGLGQRARRKTRCDLTRAEHREERATRPVVGATGDGGPSLLSRQRMRGLGTREARGQPQTWQKTRRADRTTPVTQVAQDRSGPPTKRDRVSLSV

SEQ ID NO: 47886 - protein, 274 aa, Acidimicrobium sp.
VWQVNFTVLATTHRAPVNDGPTVGVDFGIACAAYVAGESAPRIMPPTLTPGEERRLRGLERRKARQLTYAKRHNGGRYSNRLRRTIREIARLRARQARRRQDFTHKLTSDLAKNHSLVAIEDLRVKHMTSSARGTVEAPGTRVRQKAGLNRSILDIAPGERRRQLDYKCPKYGSLLVAVPPAGTSQTCPACGVRDPASRPGCGRSFACVQCGHTAHADAVAARNILDRAIALVGGGIAVGRTVDSAGRASGPSRRRTAAGVSAKVPPAVGATGA

SEQ ID NO: 47887 - protein, 598 aa, Rhizobiales sp.
MGRAERLLLAQLKAGKTWTGDLKVSFYKPLEMSATHLDMAYRQLMAKLSSVAELAKEHLKDVVAKIASKKVDITRKEKARQKARKNLIKLEGELRSLVEKANERRKLLNNASARDRNDCLFALKVRLEELHAKRAAVATARTEIGNLSFALHQHKRRLAILEHRAEGAKMQIDDPTLCYGSKKLFRAQFDLTGNGYDSHQHWLAEWRSHRSAQFTLDGNSSKEGGNQFARLRKRADGRFDLELRLPKALAHLATRTEKAGGVVISCVDLCDLSFNHGDDVIEDAMVRGQPVTVKFLRDDKSWKVMVSVDHKFEWKTPEFASGALGVDLNAGHVSAALVDASGNPVEVYNFPCVTYGKSSDQAQDAVRKVAAKIAVLSKQLGVPVVSELLDFCEKKKALKDKNDARYARMLSSFAYSAFGKALSSACLRQRVALRRVNPPYTSIIGRVKFARRYGLSVHEAASVTIARRAMGYSEKLPRSSSGTVKVPTNGSDHVTLDLPVRKDVSELAPKSRHVWSKWNRLNKEYHQKARAALGSSRRRPRPKRGSPQTTGRSILPESSGRSVAGGAENCSMVSRNTRDVPAENRFSHVATGGRRAGN

SEQ ID NO: 47888 - protein, 447 aa, Streptomyces sp.
VCVGFVILKLVMQVRLLPTPVQAAALEATLRACNEAATWASGVAFEKDVKRNFALREHTYCQIKNRWGLGAQATQHVTKKVCDAYTTLRANLKAGNLGKPGSKRYEQALAKPVAFRAESAQPYDDRMLSWQIAERRSSIWTVHGRVKDVAFTGSCEQLAALVLYRRGESDLVCRDGMWFLYATCEVPEAPANTSPVDFLGIDLGVVNIATTSDGEITAGRELYRIRVRERTLRAKLQKKNTPSAKRRLKKRRRKEARRAKDINHKIAKHVVAEAERTGRGIALEGLTGIRERVRLRKPQRATLHSWSFARLGAFIAYKARRAGVPVVYVDPAYTSRTCAECGYNDKANRVFQAWFACRNCGFVGHADRNGSRNIRARALELWRRGAQSTAPAHHRVSGMGLDANAAPQPVAPVGQAWDSTPGSLTLGHPRRARRRRRPSAGPGPRSR

SEQ ID NO: 47889 - protein, 460 aa, unknown
  TnpB Polypeptide
MLSSGQLLGHEGREPNSPAMPEEGIYEVTYSNKRTNVVRLFPNGFQERKLKKLANISAKLFNEINYERRQQFFQQHHVDFNTTWDKYYEKYKEELGVNAQAVMKKNNEAWSSFFSLLKLKKEGKLPPFIKRVSPPKYWKDKETKKRKLMLVIRQDRYVVDEQNHKLILKDFELEIDFVGRLRWYGKQGRLEIYYDEAKNAWYASIPVDVGVEITKKGNKSKHIVHGQRKSIQVELPKGNKMASIDLGINVLASVIVEDGTWLLYKGIRTKEDYFYFENKIAEVQSLADKTKNLGKYEAYEELLKEKRRLHGKLKRRLRHLYRNFASHLVKELHALGVSTIYLGYPFEIAQEKGNKFTVNVWSYRKLMDTIEFKAQEYGIKVFEVVEYNTSKYCAYHDDVEVERNPRGVVSCPKGHRLHSDLNGALNILKKAVNVIVSTVKKPISFIVDHNRVAPVKGCNP

SEQ ID NO: 47890 - protein, 417 aa, unknown
  TnpB Polypeptide
MRRSNTVRIIAGKETKAKLTALGKAFVDCWNEVNKLRLEQYKKHEPVDFNKTEKVVYEKYKAVLHGANVQQVTRKNASAWKSFFELSKKKKESELPKWMKPKPPHKKRDGLFLLIRHDRYRIEGNEIFLMDFKMRLKFIGKLKWVGKQGTLEIFYDNARRKWYARIPVSVKVDNKPKGKMKAGIDLGIANLATVAVDDGSWMLFKGGSVLSEFKKITKRISIEEKKLAKHGLKTSRKLEMLYNKRSLLLKNAREGLAREIVESLYDKGVGEIFIGYPKGIAQDKGNERNTNFWSYLAIIKRIKDVAEEYKIKVKLVDEENTSKTCSLCGEIHENGRIKRGLFKCPHTGKVINVDLNGAINILHIPESDKDRGKWLKAQPVVYRWTSRAGWVTTSYEAMRMIAINHKPMIRLEGTITF

SEQ ID NO: 47891 - protein, 533 aa, Ferrimicrobium sp.
MIRRDQDHREYHHFDQEKRKKKPPVVRAYRLQHKANVGKVARVAAVLPEYQKAAKIIQANQMQAFVQDGAGFWSRRDPGEFETKLSERYKRSVQNQVVAGLDSWLELSKQEIRQIIAHSELPDETKADLWWLNACNAHYAKEATVPVWIYPDDVRTGSGERRSAPPETLSLLRAIMKHVRRHRVHVPQLWRSRTMALDGTVAQVTPTQGSMYELWVRVSTLDAGHPVWIPLKKNQFFNDAPGELSNFAQVTVSRDGALKVTLVKRSNRAAPVLIGEDISLDWGLNSMFASDLGDQLGRQFYPWLRKVDVQLTKLTVELQRRGIKPKTNARYRKFNQRIREYVRNEVGRILNRLVKRYGIKSITVETLDFRNGDLSKKMNRILIRAGRAAVKERLKSMSETQGIEIHEVNPAHTSRECSGCWFVSKQNRKGPHFVCGFCHKRLNADTNGSRTISMRRSHGLQYPYASRQTVLQRLDARFEARWGLKPGEAEKLRLAKERRKTTPCHSRANLSLEHPGIGNEISSMPLLLADKHQ

SEQ ID NO: 47892 - protein, 367 aa, unknown
  TnpB Polypeptide
MLKAYKYRIYPNSKQRTQIAKTFGCCRFVYNRTLVYRKEIYEKEKKSVSKTDCNNYCNRELKKDYEWLKEVDKFALTNAIYNMDSAYQKFFREHAGYPKFKSKHDSHKSYTTNYTNGNIAVDFENGKVKLPKLKDVKAKLHRDFRGQIKSATVSRVPSGKYYVSILVETEHKELAHTKDSIGIDLGIKDLCITSDGKIYENPKIIRKYERQLVKLQRQLSHKEKRSKNYYKIKKKIALCHEKITNTRKDYLHKVSHEIISENQVVVSENLQIKNMVKNHHLAKAISDVSWYELTRQLEYKAKWNGRKYIKIDTFYASSQICSVCGYQNPDIKDLSVRTWICPECGAEHDRDINAAKNILAEGLRRIA

SEQ ID NO: 47893 - protein, 416 aa, Acetohalobium sp.
MKLAFKFKPNFSHKQLEIVKELSWHCSKLYNTVNYEIKNNEEIKPVYTRLENNFKSNWHTEYLHSHNRQQLFKQLAQDWKSYFNSIEDYNNNPNKYKGKPKPPNFKYLDSNPSEIIFTNLAIRVREDNLLLSLSKEIKSKFQVDSLKFQLLPIIESLTNLDNLQQVRIKRDNLSDNWYLIIIHKVNEKNKAKGNNIMAIDLGLNNLATLTFKDNPESYIIDGKVIKSENRYYNRRITKLQKIRMKQIGNQKFKDTKQIKKLRLKRRNFVADYLHKASKEIVKLATKNNVDTMVIGDIAGIKQNNKHNKHFVAVPIQRLKNLIEYKAKLEGIKVVFVNEAYTSGCSAIDEEKLNKNNYDKSRRIKRGLFKTGNKVINADVNGSLNIMRKYIKNGTPKMVKQIRDMGEVNTPERLRVS

SEQ ID NO: 47894 - protein, 268 aa, Acetohalobium sp.
MDNNPNQIIYTNLATRIRDNHLLLSVSKEIKSKYNVDCIKFELPPAVQSIIDLDKLQQVRIKQDRLSKEWHLLIIYKVEPKDKPQDNNIMSIDLGLDNLATLTFKDSPKSYIINGKTIKSKNSYFNKKIANLQRIRMKQLSTIIIGNIKNIKQNNTLKSFVQIPIQRLVELIEYKAKLAGIKLIKVNETYTSGCSAIDLESLNKTNYDKSRRTTRGLFKTKNKILNADVNGSLNIMRKYLKDKCIPEMIRQIRDNGVVDTPKRIRVAC

SEQ ID NO: 47895 - protein, 203 aa, Acetohalobium sp.
VPNELLSSNRDILNSTTRIEFKPLSDDTYKVILTYKVETPTIKEDNGNYLSIDLGINNLMTCYSNQNQESFIIDGGQYLAINRYFDKKIKHYQSILNGQGKKTSKRIQNLYKKRRKQLFHLIHSATKKVVNYCIENNISRVIVGDIKNIRDDANLGKQTNQKLHKLPFDIIYHQLEYKLNLQGITLIKKNEKYTSQCSPYSKK

SEQ ID NO: 47896 - protein, 433 aa, Acetohalobium sp.
LKLAKYFIHKPNQTQQIVLGCLAYASARLYNIGNYQRKNWSKDSDKEYPDWYKQKKQLKENFWYKNLPSQTAQETLKILADNWDSFYQSKKDYQNNPDKYTGEPNPPNYKPKDSKFNFRYLNNGFKIIDGKLRLSIPKQLKKYLKEEYSITNKFLWIRVPNELLSSNRDVLNSTTRIEFKPLSDDTYKVILTYKVDTPTIKEDNGNYLSIDLGINNLMTCYSNQNQESFIIDGGQYLAINRYFDKKIKHYQSILNGQGKKTSKRIQQLYKKRRKQLFHLIHSATKKVVDYCIKHNISRVIVGDIKNIRDDADLGKQNNQKLHKLPFDIIYHQLEYKLNLQGITLIKKSEKYTSQCSPYSKKVTKKYGDKSNRIKRGLYVDKNNNQAFNADSVGSFNILRKYLQQRRKGKDITLQVKGLSNPVKYSWNDHQFAA

SEQ ID NO: 47897 - protein, 429 aa, Acetohalobium sp.
MKLSFKFKPDFSHKQLEIVKELSWHCSKLYNITNYAIKNNKDIKPVYTRLENNFKDNWHTDYLHSHNRQQLFKQLVQDWKSYFNSIEDYNNNPSKYQGQPRPPKFKYLDNNPSEVIFTNLATRIREGNLLLSLSKEIKNRYQVDSLKFRLPTVIESLIDEDNLSMSKGHSVENSLQQVRIKQDNLTNQWYLLIIYKQQPKENSPGDNIMSIDLGLDNLATLTFKDNTENYIINGKPLKSKNKYFNQEINRLQSIRMKQTGSKKFKDTKQIKKLRTKRRNYVFDYLHKASRKIVNLAKKHNVSKIVIGDLKEIKQGMDYNKSFVQVPIQRLKDLIEYKAKLEGIEVNIINEAYTSGCSAIDLEKLNKDNYNKSRRVERGLFQSNFGLTINADVNGSLNIMRKFLDKCIPELINRARDNGVVNPPKRLRVA

SEQ ID NO: 47898 - protein, 414 aa, Acetohalobium sp.
VKQVNKTYILPINQQELAKQLSRQSGRIYSKVVSTIFKLKQNKNIWLSKNGMEKLIKLYASEFRLHSQTKQGIVQQYYNNLKSFFNAKENQENAKPPYKTRKYNKVIYKRSAIKLKDNGVLRLSNGRKGKAIKVKAPSLTKKPKYAELIYHHNEDKYKLHITVEVKNKKIDYDNDKVLAIDLGQKHPMVTYNNQTKESIIYNGGRLNSFIRFRNKELAKLQEKMSRCQKYSNRWKKLNRAKKKLLSKSKNKIMDVLKKYASHLISFCLKREISTIVIGDLKGIREKINFGTKDNQKMHQWLFGQLIDIIKYQAKAIGIKVKFIDESYTSQTCPQCGYQHKPSDRNFDCPNCNVSFHRDFVGAFNIYKKYTRGSLDKSSRLEGVLTSSYGVKYDSNSISCLTNWNTSPFGQGIPA

SEQ ID NO: 47899 - protein, 502 aa, Acetohalobium sp.
MLRTSKIRITDQEFKEFAIEKVYLTRHFENMLLILLEQDYKQEIGDRKLISNPYVMRAVIRDTKGGQYADKVSYIKDKYQDHGLMQDLIKVGKQLKKDNLVMTMRKVRKDFKSFYTKVKNGDNSANPPKPKKLSKMNSYTLLIDNDKGMSLAYLKKGQNKLGITLDHDEGRKYLYIDHQAVRDIVGDLDNIQSVNLQYSNGELYLLITYHQEVETNNDRPHKLAGLDIGVDNLAAIYIEDEASPSLIVAGKKYKTYNSKFNRQIAQISNSIDTCKLESRKNYLRKYKSYLFEKRNRFFYDQFHKVSKRLLEYLDQHDVTELVISDNLNHLKNNGNCKLQKKTKQNFIQIPFGKLLDYLKYKAKEYGIKVTVVNEAYTSKSNSFTNEVHKVKSLQQKIDSLKAQQKQIESDIKYQQYQCLIDAYQDLLDKYNYQGKRVKRGLYLDYINDLAMHSDINGARNIAKLSSNYQKKDCNNLKKLCNPIKVENDYQFCQLLKQDKQAA

SEQ ID NO: 47900 - protein, 430 aa, Acetohalobium sp.
MKLSFKFKPNFSHKQLEIVKELSWHCSKLYNIVNYQIKNNEEVKPVYTRLENKFKDNWHTNYLHSHNRQQLFKQLAQDWKSYFKSIEDYNNNPGKYQGQPKPPNFKYLDNNPSEIIFTNLATRVREDNLLLSLSKEIKNQFQVDSLKFELPPVVQGLINLDNLSMSKGHSVENSLQQVRIKKDNLSSDWYLIIIHKVNEKDKAQGDNVMAIDLGLDNLATLTFKDNPENYIINGKPLKSKNKYFNQEINRLQSIRMKQTGSKNFKDTKQIKQLRIKRQNYISNYLHQASRKIINLAKRHGVSKIIIGDLKQIKQNINYNKSFVQVPIQRLKDLIEYKAKLEGIEVNIINEVYTSGCSALDLEKLNKANYNKSRRVKRGLFKSEIDLNINADVNGSLNIMRKFLTKKCIPELVNQARDNGVVNPPERIRVA

SEQ ID NO: 47901 - protein, 371 aa, Acetohalobium sp.
MIKRFVPTKKGYKTRIYPNQEQKELINKTIGSCRWVYNYFLEKAKINGYESKTKYIKQLPQLKNEHVWLKEVDSIALQQAVRDLDQAFQNFFDGKQNYPQFKSKKHSRLSYRTQYFKRSSGTESIEIQNNKIKLPKLSWIEFNKHQEVKGNILNVTVSKEIDKYYISINLKDVIVTEVNYNQGEIGIDLGIKDFAITSDSEKIENPRHLQKYQDKLVRLQKKLARKEEGSNNWQKVKQKIVKLHRKIKNVRKDFLHKLSTRLVKENQLIAIENLNIKGMLKNSKLAKHIQDVSWSKFVNMLEYKGKWYNCIVEKVNNFFPSSQTCSECGKKNPKVKDLSVRNWVCKCGATHDRDLNASLNILKQAKKQLAD

SEQ ID NO: 47902 - protein, 421 aa, Acetohalobium sp.
MKLSFKFKPNFSHKQLEIIKELSWHCSKLYNTVNYQIKNNEDVKPVYTKLEKQFKSNWHTDYLHSHNRQQLFKQLAQDWKSYFNSIKDYNNNLSKYQGQPKPPNFKYLDSNPSEIIFTNLATRVRENNLLLSLSKEIKNQYQVDSLKFELPPAVQSLINLDNLQQVRIKKDNLSSDWYLIIIHKVNEKENASGDNLMSIDLGLDNLATLTFKDDIDSYIINGKPLKSKNKYFNQEINRLQSIRMKQTSSKKFKDTKQIKKLRIKRQNYISNYLHQASRKIINLAKNNNVSKIVIGDLKQIKQNMNYNKSFVQVPIQRLKDLIEYKAKLAGIKVYIINEAYTSGCSALDKEKLNKVNYNKFRRVERGLFFTEDSIPINADVNGSLNIMRKFLKDKCIPEMVDKFHSRDNGAVNSPERIRVAR

SEQ ID NO: 47903 - protein, 275 aa, Acetohalobium sp.
VPNELLSSNRDVLNSTTRIEFKPLSDDTYKVILTYKVDTPTIKEDNGNYLSIDLGINNLMTCYSNQNQESFIIDGGQYLAINRYFDKQIKHYQSILNGQGKKTSKRIQNLYKKRRKQLFHLIHSATKKVVNYCIENNISRVIVGDIKNIRDDANLGKQNNQKLHKLPFDIIYHQLEYKLNLQGITLIKKSEKYTSQCSPYSKKVTKKYGDKSNRIKRGLYVDKNNNQAFNADSVGSFNILRKYLQQRRKGKDITLQVKGLSNPVKYSWNDHQFAA

SEQ ID NO: 47904 - protein, 294 aa, Acetohalobium sp.
LFSLGFHHFYTRLENNFKDNWHTDYLHSHNRQQLFKQLVQDWKSYFNSIEDYNNNPSKYQGQPRPPKFKYLDNNPSEVIFTNLATLTFKDNTENYIINGKPIKSKNKYFNQEINRLQSIRMKQTGSKKFKDTKQIKKLRTKRRNYVFDYLHKASRKIVNLAKKHNVSKIVIGDLKEIKQGMDYNKSFVQVPIQRLKDLIEYKAKLEGIEVNIINEAYTSGCSAIDLEKLNKDNYNKSRRVERGLFESNFGLTINADVNGSLNIMRKFLDKCIPELINRARDNGVVNPPKRLRVA

SEQ ID NO: 47905 - protein, 322 aa, Acetohalobium sp.
LKLAKYFIHKPNQTQQIVLGCLAYASARLYNIGNYQRKNWSKDSDKEYPDWYKQKKQLKENFWYKNLPSQTAQETLKILADNWDSFYQSMEDYQDNSDKYNGEPNPPNYKPKDSKFNFRYLNNGFKIIDGKLRLSIPKQLKKYLKEEYSITNKFLWIRVPNELLSSNRDVLNSTTRIEFKPLSDDTYKVILTYKVDTPTIKEDNGNYLSIDLGINNLMTCYSNQNQESFIIDGGQYLAINRYFDKKIKHYQSILNGQGKKTSKRIQQLYKKRRKQLFHLIHSATKKVVDYCIKHNISRVIVGDIKNIRDDADLGKQNNQKTP

SEQ ID NO: 47906 - protein, 380 aa, unknown
  TnpB Polypeptide
MLKAFKYRLYPTKPQIKDLERTLELCRQLYNAVLQERRDAYKKAKKTISAYEQNNHLPEIRAEIPEYKHVHSQVLQDVIKRVDLAFKGFFRRLKERRKAGYPRFKGEKRYDSFTFPQAGTTGVKLQKDGKRVLIHGIGSVKIKLHRPLEGKIKTATIKREGKDWYIVFVCEVDPKPLPPNDKQIGIDLGTNPYFLVTSEGEKIEAPNHYQRTQRKLASIQKELSKKKKNSYRFRQIREKLAKLHRKIANQRKDFHHKLARRLVNKYGTIVHEDLNVEGLMRSYIAKGVQDAGWAQFLQILAYKAEEAGRQVIKVDPKYTSQDCPVCGYREKKPLWIREYTCSQCGTHLHRDVAAAINILTRARTEPAGSVISHEPQSPTF

SEQ ID NO: 47907 - protein, 418 aa, Okeania sp.
MIITHCYKIKPTTEQSVKIDYWLELLRRHWNYALGQRLDWLNRTRCQVDRCSLISCPIGEISTRPDYYFQQSALKQTKQLFPDYKEIYSEIQQINLQRLDKAWKRWLIPDKKGQRGGRPRFKKSGKLRSFCFSRVNHSKAAIKFDGKQIIISRFGTIPVIVHRPIPDGMTIKTATITKKADGYYISFSLEDKSVPNLIPTNNIKTAVGIDVGLKEFLTTNTGETVSVPKFYRKSQSNLARKQKKVSRKEIGSNNWKKAQNKIARLHQHIARQREDFHYKTAHKLVKQYDMIAVENLNIRGLAKNTKLSKSIYDVAWGNFIEKLNAVAVKRGVHVVKVNPHNTSQNCSNCGQKVPKTLSVRTHSCQKCGTVLDRDENAAKNILNKALNEVGIILSACGGLDIGQPAKQETSLFVEKLRL

SEQ ID NO: 47908 - protein, 257 aa, Symploca sp.
MLVLEAKLIGKNWQYERLDEAIRTGQFVRNKCLAYWIQSSRDEKINRNRLNKLALELRKEFEWAGKLNSQAAQAHAERAWSAISRFFDNCKKKVQGLKGYPKFKKNSRSVEYKTTGWNLSEDKKKLTLTDDFNAGTFKLKGTRDLSWYTKKQIKRVRIVCRAKGYFVQFCIDVERSEPLPKTNKFVGIDLGIKEFYTDSNGEVVNNPRYLRKSELRLKRRQRRKSARVKGSLNRLKAIKKLGRAHFKVSSQRKDGSC

SEQ ID NO: 47909 - protein, 227 aa, Symploca sp.
SLISTSDGEKITNPKHFHRLYQKLRRVQKALSRKTKGSKNRYKASVKVARIHAQIKDTRTDFLHKLTTRLVQENSLIAVEDLGVRNMVKNRKLARSISDAAWGEFFRQLEYKCEWYGRKLVKIDRFFPSSKRCNNCGFVVERLPLNIRSWDCPECGTKGIDRDINAGKNILAAGLAVRQRGLGGFPHERLPNPFGVSVCGANIRPDNHSVKGQLRKTPRGKKQKPKL

SEQ ID NO: 47910 - protein, 332 aa, Mycobacterium sp.
MTPTRGQRIALNLGPLPQRLMPRSTIAIAPDGKGGWSVTAAYPARQVASVRPQKPNPTPVEGIDAGVSEVFTTTEGRRFGEGQYAVIATRAERDRGRGKARNTLRGVRDRHLARAAAAAEVGDTRVAAAAQAKAARIDRHNLGRHKLSRQRDHDRAVTKDVVYQAVHDLVDTATMIVAEDLTGMRGKSKYGRTASRIYAAWQRTFLADALASVPGRRGSAVALVNPAYTSQQVHPCGHLGIRRGKKVHCQTADCPQQGIVYDTEINAARNIRDRATDRTITRYTPHTEVKRILIARAGTVENCPTTTQAANPNNGGCERNNLSPNQQHPRNR

SEQ ID NO: 47911 - protein, 238 aa, Microcystis sp.
MRDMEKAYSYRFYPTPEQESLLRRTLGCVRLVYNKALHERTQAWYEKQERVGYAQTSSMLTEWKKQEELDFLNEVSCVPLQQGLRHLQTAFTNFFAGRTKYPNFKKKHQGGSAEFTKSAFKFKDKQIYLAKCTEPLPIRWSRQIPDGCEPSTVTVRLHPSGRWHISIRFDDPTIKPLPVTDKAIGIDLGISSLVITSNGDKVSNPKHFKKHYRRLRRPQKVFLENRKAQKIGKKRESK

SEQ ID NO: 47912 - protein, 400 aa, unknown
  TnpB Polypeptide
LSSTGVKQRKLHETYTAFKAIAAESLQTIQSENPRTYTQLHHLTYTKNRANGIASQLIEEAQRYAWQRRKVASAINQPTVRFDKRLFSFKGTGRKHPVLSVRINHERLGLPIKEDGAYRRLQEHLADGWVTTSVLMTCRYRFLTVLQKELPAPRKAENVLGIDQNSNGVAVTVMSGEGRVLKQLYLGRNISLRQIRYEDRRAKLQEYRDGKGHRGKAGVKLRRLSGRQRNYVRTNTWLLAKRLTDLATEHNAGIAIEYLHRLRRRRGQLSCKSRRKTNRIPYGFFRHTLTHKSEMLGIPLVEVPAEYTSQTCPRCGHVSRNNRRNWRHFRCIKCHFEANADRVACVNICRRAIQATYPVTKGQFPPTGAPVSVPVRQDEEASWQQSPLQVASSRLQSRRS

SEQ ID NO: 47913 - protein, 518 aa, unknown
  TnpB Polypeptide
MIKNSTTMTKAEKIKLSLNQTRQKRKHQRPITYQLKLQNLTKSKRDILDRLFLEAKWLYNWLVADLNRLSLQPHKIKTVQVKVGDHFEERKLCYLGSQIKQEIADRIKDSLKALKAQRQNGYKTGKLKFKRYVNSIPLKQYGITYSFKNKQKTKIRLQGLGKRTWRVLGGHQIPEFAEITKAELIKKADGYYLHVTCYLPHCELLYRRDRKGREKAIKRFYIDKPIGTDFGVKEQLTFSNGLKLKFAVKETKRLKKLQKKLNRIIRQAKKEGRDFHTQNYYKCLEGLRKEYQKIGNIKKDIQNKILAFLRSYKVVCFQDDSIKSWQEGLFGRQVQRSAIGGVKARLRASLATPVVVDRHKPTTKSCAGFGIQEAEILEIIDHHHLGDISTFNPIYVYNDPVGSTCTIIAELMQMRQVEIPPEIAGALLGGILSDTLILNLSTTTDRDCKAASFLAKKAKVDIKEFGKSLIQVQADVIKGKTAKEILFSDFREYTIGDKKNWCGTNFSCRQKRSFYFKT

SEQ ID NO: 47914 - protein, 395 aa, unknown
  TnpB Polypeptide
MQLVRQVQFKRTKLLDEITFLSKNLFNVATYTVRQRFFMDRHWTRYHELWRLLKTHEAYQTLQEMCGSHPPQQVLKQVDRNFKSFFKAIKMWKKEPSKFKGMPKLPRYKRKNGRNLVYFTSLQCRLKDGFALLTRKMERLGFPRIKTDLKSVKGVRIVPFGDRYNIELIYDYEPWDLHLNENNTLGIDLGLNNIVTASDNVGNNPLIIKGGVVKSINQFYNKQLAKYKSLGKICNDTELTKRILRLHRKRNNKIRDFFHKTSKKVVNYCISHDIGTIIIGYNEDWKQKIKIGKRNNQNFVSVPFLKLVQQIEYKSEMIGIKVVKITEEYTSRTCSSCGVVRKSNRKYRGLYACKDCGLVLNADVNASRNMIQKGVPESKWLGDRGCLNHPTVLKV

SEQ ID NO: 47915 - protein, 401 aa, Thaumarchaeota sp.
VLVRKSVRQRFTPCDSISRLMESFRLMCADAIRIGLAADASSLKRLSKLSYGELKRYDDVPSYYKLCAISRAAGILAARKKSIKRGFPTRNPYPSKPLLVSCYRFRIEGGSLLVPLGDRRFERIQLNSHTLDVLSQQGVAVRSFTLSGHSISLCIAKEVEEISPVQGMVGIDRNLTNVAAGNPGRVTLYDVSKVVKIAENTRSIVRSFRRNDARISKRLAGKYGERRQERIRQILNRVSKRIVTEAKENRQAIAFEDIRGIRKLYRKGNGQGRGFRGRMNSWPFQELKRQVEYKATWEGVPVITLTTEETRGTTMYCARCGERLQGPIRGDSTRYRQLWCRRCERWIDRDVTAVMNISHRGWMRFVQSKGEGEACEAVKGNETRTLILRVDASKLSRPTKT

SEQ ID NO: 47916 - protein, 460 aa, Nodularia sp.
LQFGERSPEAGLCPSLSQMLRKIRVMDRFLTGGYKRISQIYLALKTVSLFLRYTMCMLNLTYAYRLKLNKQQFQTYDAWLETSRRVWNFALAQRKDWYNSRSCRIDACSIKSEYIIRADTPRPTFASQCKALTQARKTHPDLNAAHSQMLQQVLRRVEKAFIGMWESGRGFPRFKKQGRMRSMLFPQLGVNPIQGSRVKLPGVGWVKMQLSRPIPDGFVAKQAQVVKKASGWYVMLTLQADVNVPSFAPHGYPVGIDLGLKSFLATSGGEQIPRPRFFVDLQGKLRLLQQRASRKKLGSNNWRKAQHKVSRLHEHIHNTRKDFHFKLAHYLCDKGGMIFAEDLNFKAMAQGMFSKHTLDAGFGEFLSILEWVCCQRGVYFAKVNPDGTSQTCPNCNNHTGKKDLSERVHRCHECGFETDRDVAAAMVVMQRGLAAVGHTVKMLGEGLSNSSLLTQESPVF

SEQ ID NO: 47917 - protein, 251 aa, Gemmatimonadetes sp.
LKNVQIIYDTHTRDFQARLVVEVDVSDKSGEATVGVDIGEDWLIAADFCDGSQYLVCGRMLKSTRRYWQKVRAKVKPPSQDRPKMSRRYRQIARKEARQITHALHIASRRFVDAYADKGVGTIILGDLTGIRSSIAYGKRMNQRLHAWPYARLSAMIEYKAALLGIKVKVVSEKYTSQTCPQCNIRKKSNRKHRGWYSCHCGFEGQADLVGAFNIHRQVSGVSSSGRSARPVVLVYDHHTVHEVASSRKAA

SEQ ID NO: 47918 - protein, 239 aa, Shigella sp.
MASWLVEWKNATETQWLKDSPSQPLQQSLKDLERAYKNFFRKRAAFPRFKKRGQNDAFRYPQVKLDQENSRIFLPKLGWMRYRNSRQVTGVVKNVTVSQSCGKWYISIQTESEVSTPAHPSASMVGLDAGVAKLATLSDGTVFEPVNSFQKNQKTLARLQRQLSRKVKFSNNWQKQKRKIQRLHSCIANIRRDYLHKVTTAVSKNHAMIVIEDLKVSNMSKSAGVRSASRGAMSGQNQV

SEQ ID NO: 47919 - protein, 367 aa, unknown
  TnpB Polypeptide
MLKVYKYRIYPNKEQERQIAKTFGCCRFVYNNILAYKKDVYEKEKKSVSKIDCNNYCNRKLKEEYEWLKEVDKFALTNAIYNMDNAYQKFFKEKTRYPKFKRKHDKHKSYTTNFTNNNISVDFDKKRIKLPKLKYVKAKIHRYFIGQIKSVTISQVPSGKYYVSILVETEHIKKPDVTSKVGLDLGIKDLCITSDGKKYENPKTIKKYEKKLAKLQRQLAHKRRRSRNYQKKRKQIALCYEKITNVRKDYLHKLSNEIISENQVIVSETLQIRNMVKNHRLSKSISDVSWYELTRQLEYKAKWNDRIYIKIDTFYASSQLCSCCGYKNKETKDLSVRQWKCPNCGKIHDRDINAANNILAEGLRKIA

SEQ ID NO: 47920 - protein, 421 aa, unknown
  TnpB Polypeptide
MSPAAAVRSLSFPVADLPRPLLGVLAEFRQVVNKSIRIALREDLRSRFRLTRAAYAVLSAEHSIHRHYIVSAFEVALAVLKVYRRRVRKGKRANVPYVKQLFLKAENTSYWLDRETGRLRIPMRGTEGVQLMLPLSDWHRSFLSDSSWGLGTLTVTSERIIVTVRKDVPAPCVPQAAVALDTNEDSLDGVEAAGTEARLVTVPLGGVREVQATHFRRRRRLAKKKCGDRRVLRGLLAREGQRERHRVTQRLHRVSKGLVETAKTMKAAVVLENLTLHGAGGRSRRMNRRLSSWPRRELHRQIEYKAALAGVPVIKVNPAWTSKTCPVCGVRRRDRVGQDFVCLLCDWEMDRQHNAACNILQSALASNEALARAVRFRPGALRHDVVSPLCDLPALPASARDEPSGAESAVGCHRPMKGQNR

SEQ ID NO: 47921 - protein, 533 aa, unknown
  TnpB Polypeptide
MLADVSIDDPHFVPQARIRELMPVSDLPAYRTMVRSIDPNSLARHSTEIESLMRAFGRQRQYFLDLFGRRECRALCSGTNWRAIRDRLVAEKYKSAYGLQARQWKMALQTSAATINNYWRLAQTNALARIRRKPWFATLNKLEQRYVNRLLGSLSTDFFAVMDGRMPRVFADTAKEKIASRKGLCQAVRRTVRSVMGRMPRHGEDASVWFDSSCYTATPSGENVLLSLMTMTPGKRMTLIVKGTVPVKSTIRLVKKSDGTIDLHVQKSLSKSDIRPVESMPAPQGMLSVRTFDTGFTEVFVDDAGNRFGVELGVKLISYADYLDRKLKERNRLYARAQKAGKAKRRRMLRCNLGKKKFEREVNRIRVEIKNIVNEAINRVLKQSLAQVYALEDLSHRFTFDGKYGKKVRNMLSKWVRGTIKDRLLFKTACAGVQVVFVPAAYSSQHCPECGYTSRENRSGDRFECKHCGYKAQADQNGAWNLLMRVKDPEYKRYMSKDAIRALERRRYEAWCKVREEEPLPPMVNRKRLNKAA

SEQ ID NO: 47922 - protein, 432 aa, Eubacterium sp.
MSAGYAITTYKIQLNYKHLDWFKQTQSLFDAVLAFYYKLLEKQPEALSLTNQNLLRHLELQTIKQRDGTPPETPLPFEKIPLYFRRAAINAAISMYRSYVGKLKAWQEGTIKSGKPSPPKRLHMSMLYYKGMYKDFDEKSILLKLYTGKTWAWVKHRYTGRPFPKDAELMSPTIVIKKKKVMLHIPVKEIVKDSRTAKERVRQNEKFVAVALTGSDSLAVCTTIEADGRATAPYFIKGGKELAHRRKQLLGYTKRGIVGNKAPRFMTHTVGNAALSVPQEQRPNKKYYDKITRLTDHYAHEVSRKIVDYALKQGAKLIVLPELKESFDQAKKPYLGKTPYDFIGRRIVRYVQYKAWQKGLVAMTSKPYYVSTRCYHCDAPIARHNTEYQNPSVNFYGGKNFICKEGHRGSTALNSARNLGKGFYERFYAGAA

SEQ ID NO: 47923 - protein, 397 aa, unknown
  TnpB Polypeptide
MEIVKAFKYRLKTGHQDDIILSRFAGCSRFVWNHALSFQKDLLDNGNRCLSYESLTSQLPIWKKDFPFLKDVHSQTLQQRLKDLCRAIDAAFDPKDARKFPKFRKKHKSVASFRYPQGFRINGNCVYLPKIGWYRFHKSREIIGTPKNCTVSKRGKHWYISVQTEMSITNPIHPGVSFSGADMGVINTLALSDGMTYKPADSFKKASFKLAAMQRKLSRMVKRSNNWKKQKSKINRLHIRIKDMRQDHLHKISSEVSKNHAVLVLEDLNVKNMSASAKGTIANPGKNVKRKSALNRSILDQGWFELRRQFEYKMDWLGGTVVFVPPSGTSHTCSCCGHISPENRPSQALFYCVKCGHTESADVNAAKVILGAGQALLACGSNGASMPSEAGTIQKLR

SEQ ID NO: 47924 - protein, 468 aa, unknown
  TnpB Polypeptide
MGQATRTTKLLLDLGNRRQGGANTGKRAALDATVGGLNGARAFYIDFLLAYADKLSERIPYYSEQHLEMRERAISANELLTWAEACTVETREHQEPWKGWNFTQRFPDMPFSYRRSVIKDAIGKVRSYLSNLAHWEKSGKKKGKPGLPGAKDHPTLYQGTCSLELESRDLHARFVQLKIYDGQGWRWVNYPAKCSRYFEQRLSSEAWEHKSPLLVLRPHAAEVHFPQTKEIAARKVRESKLDPELITVAVDLNVKNLAVITVRQHQRIIETVFVRDHGLDQQRYRHLRRIAKKQWQAGKPVKGEHSNQQLWGHVRRMNEDAAHKVARSIANVCARYPGCVLLFERLRKIKAKAGSKSRRMNRKQANQLRGKINRKAREKAFVEGVVTVEVNAHGTSQYCSRCGAKGERFSTLRGKRIKAKWGKLFWCPVCHYEANADLNASKNVHCSFYHEWHWQPRKKAPAKAAPSG

SEQ ID NO: 47925 - protein, 431 aa, unknown
  TnpB Polypeptide
MADREVTRTIRARITNQSAVRENLDSLGFAASKIWNVARWIAGRIWDGLGYIPDNIGVSLQNYLKNHERYADLHSQSSQRVIQELAEAFDSWLEQRAHGSQTANPPGYRKHGDDHPRSTVTFKQKGFKHDGQYDRVRLSKGANLKDGGRYAHDFVLCEYEIIGPPGTTVENVQQVRAVYEHGEWRLHFVCRVDIDVEESHGEQTAGIDLGICNFAAVSVGDETLLYPGGALKEDEYWFLKERASCDDPTSRRARRLDQKRTDRRRHFLHAVSRDIVEQCADRGVGTIAVGDVSGIRDDEDGQARDWGDHGNLDLHSWPFDTFTDLLEYKAQQRGIDLKRVDERGTSKTCTVCGTAADSHRVERGLYVCQECGLVANADCHGAENIRQKVLPNLAPDGGDRDTGCLAQPGVRLFDTSTGQVAPQDQVADSKP

SEQ ID NO: 47926 - protein, 406 aa, Candidate divison MSBL1 archaeon
MKVRRNMRRTVKLKLELSSTERSLLEETVDQFKDACQKVVDCGWDEDGLKTYNKNKLHDRTYQDVRKETDLPANLVIRARDRASEAIKGCVERLKNGKKASKPEFTSDSIAYDKRTLTVWLDERKCSFSTIDGRIKTDFAIPEELNDYFEKYLEDGWQVCQSTIEKHEYEDGEPYYLHLGLEKETPRNTSPNPTVMGVDLGVENLAVTSTGEFFSGTELFHKLERFEEIRGELQAEGTRSAHLTIKSMSGRENRFACDTLHRVSKRIVQEAVEKNVDVIVFENLEEIRESISNGKKFQSWAFRKLKEYVEYKAEDQGIEVKTVSPKYTSQRCSKCGNTRRENRNNQHFKCERCGYEVDSDYNASKNIGMKAVLGGQKSQSRMGNGQLALKSGVLKPNGNYFPTHSG

SEQ ID NO: 47927 - protein, 365 aa, unknown
  TnpB Polypeptide
MGGTMRAIKVRMYPNREQERLLNECLGTCCRLYNLMIEHCNRCHENDGRHPSRYDMQNMLPGMKAYDPMLRNVFSQVLCDVCARVSRAYDGFFRRAKENAGKAGYPRFRSWKRYDSFTYTQKGFRLSKDRLRLSPWKMDVRIRGYREMPGKLKTCTIVRKGAGPHYRWEAVLVYERKEPEGNGARIRGDRRSGPVGIDLGLSNVVVTSDGRKYPNRKGYIQAERRISKILRRMSKYEKGSPQWEKYRQRLFHAFEGLKNAERGYIYEVVNDLVDNHDMIVMEDLSPWNLIAKSVSRGMRKTYKDASWGRFIFVLGYKAEEAGIPLVKVDPAYTSQLCSRCGIEVPKDLSVRRHLCQHCGLDVDRD

SEQ ID NO: 47928 - protein, 543 aa, unknown
  TnpB Polypeptide
MDKDKSIERTTTDTRFAKEAAHPPIPSSVPRYPERSQGTVPGPRFWAPVKGSAYTYKTLRCPLDKEDGQANQAAIEELFRQYGLAVGEYLHLVSLWGTDRAAMGPSAHEAVRALTPGLYAHIRYAALDKAIESWRSREALERTGRIPERPVLLLDEHDLSGHQDAIRLDMRTYRLVPERPVRAGNATIRPLWASIPTPTGRVALRIGDDGYQVPIILNIIDGRDRAAIRSAELVRRGCGPDQELSLDIRLSRPIPEEHRSIEGFVSFLAAHPDIKVIPTGVDIGIVNTAVAVAPGKGRTGVRFFKGRAERARKRRMADLIRRLMVRGTRKATFDAQMSREKEKRRNRAYLHEVSRGIVELAMSVVDRSKGEVPVIVLEDLRFEDIARRPARGREDRGGEEGNARGSSVPLRRDVASELRSWAYGQLRDLIAAKAAWEGIPTVLVPPCGSSTECPRCRRGDVVRRRDVHRLVCPDCAYKADDDYCAALNIARRGLARLLEDRDQTRPVRYHDHELRGVMRPAEGGAADAPRGPEWERCGASTRA

SEQ ID NO: 47929 - protein, 424 aa, unknown
  TnpB Polypeptide
MDYVLKYRLFPDEHQREQLDWVRDTVRQLYNHGLHRFNRIPESAGTVKQRVTKVRDELPDLKDWWTDLKNIYSTVLQQAIEQIATNIENLGKLKQKGFDVGSLNWKAPHEYRSFTYRQRGFELDEKSGPNGRGTLTLKKVNGENIDVPIRLHRDLPDETEVKHVTVKKDQTSAWYACLNVEQDTPENPDPSEIDTEDTVGLDLGILKFIHDSDGRQISRLDLSNDRERLEREQRNLSRKEHGSNNWERQRRRVAEVHKRMRNKKADYKHKVAAFYTREYDAVFVEDLNVKGMLESNRNGRNTAEVGWRDFITILKHHGRKRGCHVVEVDPTDTTKECSQCGVTTDKPLWVREHCCPSCGYTTDRDYNAALNVWERGLRKLGVVHSEATPVETGTAVETEESASVSASSVVETGSLCLKEAAYGG

SEQ ID NO: 47930 - protein, 313 aa, unknown
  TnpB Polypeptide
VKEASKPIFKSDSIAYDKRTLTVWLDEERCSVATIDDRIGVDFDLPNELNDYYRKYLSDGWEITQSTMEKHSYEDDKPFYLHLGLEKEIEKNQSINPTIMGIDLGIENLAVTSTGKFCSGTELFSRRERYEELRGKLQAKGTRSAHLTIKQISGRENRFARDTLHHISKKIIKEALSKDVDVIAMEELEKIRQNISDNNKFQTWAFRKLQRYIKYKANEKGIEVKYVDPKYTSQRCSRCGTTLKQNRKNQHFECKDCGYKVDSDYNASKNIGSKTILGGQMSQSRDGQRSTCPKVRSVETEWKILLLPKLNGV

SEQ ID NO: 47931 - protein, 426 aa, unknown
  TnpB Polypeptide
MQLTQKIKIEPTEEQEEVLTSLSEICRLLYNFSLKERIENWKENKNKPKEERNYITYTDQQNKLPKLKEEYPKYNWVYLKVLQMILKKLDANYKSFFSLWKKGDNKAKPPRFKGSKYFTNLCYNQSGFKIKKEEIKFSHNHPDKTELSFDIPTKFHLEDKNIKQIEIFRDEIKEEYYISISYEVDTPKYKDNGKYQAFDLGVNKHIGVNMSGKFVEFKNPRPDKYWQSKIEEVQSKKDRCKKGSNRWKWYNKKLQQMKRKLANQMKDWQHKLSKKIVENTKANTIVVGDLDTKDMAQNNKNVEGLNRSLQNTGTIGRFVRFLIYKAELVGKKVIEINEANTTKKCCVCGKKQDMPLHKRTYKCDCGNEIDRDKNSAINIMNRFLSQERSVNEQSSFMEDFLRQTGLEYANQQMSKHSQETPSSRTT

SEQ ID NO: 47932 - protein, 430 aa, unknown
  TnpB Polypeptide
MQLTQKIKIEPTEEQEEVLTSLSEVCRLLYNFSLKERIEDWKKNKNKPKEDRNYITYTEQQNKLPKLKEEYPRYNWVYSKVLQMTLKKLDANYKSFFSLWKEGNEKANPPRFKGSNYLTTLCYNQSGFEIKNGEIKFSHNHPDKIELSFDIPSKFDLEDKNVKQVEIFRDEFKGEYYISVTYKEETPEYKDNGLYQAFDLGITKHTGVNMDGKFVEFKNPRPDKYWQSKIEEVQSKRDHCKKGSNRWKRYNKKLKKMKRKCANQMKDWQHKTSRKIVENTKANTIVVGDLNTKDMAQNNKYAEGLNRSLQNTGTIGRFVRFLTYKAKLVGKKVIEINEANTTKRCCVCGKKQEIPLHERTYKCDCGNEIDRDRNSAVNIMYRFLSQERSVDEQSSFMEGFLRQTAEHKMRVSPIRSWEDSQEAPSSPKVR

SEQ ID NO: 47933 - protein, 258 aa, unknown
  TnpB Polypeptide
MKVHDSKIVWKDYGFELHLSVSLDVSFQVPKNVLSVDLGERVMATTVSSADNGKPEFHGKQIRGVRRHYNHIRKNLQQKELTKKVNEIKDKEKRKVEDQLHKISRKIVDEASEINAVIVLGDLKGLGNKDTGKGKRMNRIANTMPYYKLTRMIEYKAKEREVQVVKVDERNTSKTCHRCGSKNTVRPSQGIFDCRSCGLRDYNADLNGAKNILYRFLAYMVRNGASVNRLITKAFIEKNDVEVSEKALGTPYLTSVSE

SEQ ID NO: 47934 - protein, 377 aa, unknown
  TnpB Polypeptide
MRRTVKIKLGLDQNQQKLLQETIEQFKQACQKVVDYGWNEDGLKTYQKNKLHKATYDKIREDTDLPANLVIRARDRASEAIKGCVEKLKNDEKASKPIFKSDSIAYDKRTLTVWLDEESCSIATIDDRIEVGFDLPNELNDYYDKYLNDGWEITQSTIEKHSYEDGEPLYLHLGLEKEIQKNKSINPTIMGIDLGIENLAVTSTGEFFSGTEFFSRRERYEELRGKLQAEGTRSAHLTLKSMSGRENRFACDTLHRISKKIVEEALSKDVDVIVMEELKEIRQNISDNKKFQTWAFRKLQKYIEYKAKEKDIEVKYVNPKYTSQRCSRCGTTLKQNRRNQHFECMDCGYRVDSDYNASKNIGFKTIFGGQMSQSRDG

SEQ ID NO: 47935 - protein, 231 aa, unknown
  TnpB Polypeptide
VNVPSAQRRGGINIPVKTGREIKDSWELCESKLFRKKDNFYLNLTFKIESKEFKEYNGVLGIDLGLRNPVVGAVSVAPSSQSKIFFKGEDIKKTQTKYYHLRKNSKTNKGWKKRGYNKVNDKLHKLTTEIANYAEQNKLIVCVGDLEDIQDQDKGRAMNRKLHRFPHYTFKQILEYKLKERGIKYIEVSEAFTSQRCSRCGEKGDRYKGRFRCCSCGLEIDSDVNGAKNIA

SEQ ID NO: 47936 - protein, 400 aa, unknown
  TnpB Polypeptide
MITYKFRLYPSNEQKEKLEETLDLCRWTYNHFLEKLNECEEVPSRYELQKELPKLKEEKPGLKQVHSKVLQMTLKKLYNNLKALSESKKNGYKVGKLRYKGKGWYKTFTYNQSGYKIKETNTRKNLLKLSKIGEIPIRMHRKVKGEIKNIVVKREQTGKWFASIVTDFQKDLSSGEGVVAIDLNTTNYLTDSNGLVIENPKYLEEKEERLRKEKQKLDRKQKGSNNYEKQRRRVAKKYEELRNARKDFLHKLSRAYVENYDTIILEDLSISDMCEDSFFAKSNLDTSWGKFKDYLKYKAESAGTEIILVNPENTTQICSNCGEKVSKNIWDREHKCPNCGFSTTRDHNSSLNILKKGLDSLGMGQAEVTPVDTGTSTDTNFVSASSVVESGSPLHTEAEA

SEQ ID NO: 47937 - protein, 345 aa, unknown
  TnpB Polypeptide
MKKTIQSGVVSLTNVKKQILNKEYNNLQKLLHGNNKNVELHSANKQQAKRFYDLDKIKEDKKYPISLRKDLIDIQKCESSVCDYFVNIPTAQRRGGINVPVKIGREIKDSWELCESKLFRKKNKFYLNLTFEIEVSEVDEYNRVIGIDLGLRNPIVGATSVASSSQSKVFVSGEDIKKTQTKYFYLRRNSETDKGWRQREHNKVNDKLHKLTTEIANYAKENQLIVAIGDLENIQNQDKGKAMNRKLHRFPHYSFRQMLEYKLKERGIKYVEVSEAFTSQRCSLCGEKGNRYKGRFKCNNCNLEIDSDVNGAKNIAQRALGKPEIRSMVSAGASVTSPMNSVAMT

SEQ ID NO: 47938 - protein, 337 aa, unknown
  TnpB Polypeptide
VDGEDSQLYSATKQQARRVVIQNNPEKKQPIRLRNDVIKLEEQDTEISSYWVKIPVYNPEKGRGESIWCPAIIPRKDREDVKECEFGDSELVKHEEDWFVHLVIKREVELETIRPDCPSSFSDVIAIDMGVRWVVMSVALLNCETKFYGEEVREIREHYKMLRKKIGKKKVRKGKQVIKKIGNKESRKVEDRLHKISREIVEDAKERDAIIAIGDLRGIREQEDKGRKFNDKLHKFPFDKLKRFIEYKAEWEGIRVIEVDERDTSKTCNRCGSQNTKRVGQGKFVCRDCGLEDNADKNGASNIAKRALGKSIRRPLSEAGALLAVPRTPAEKGEAKC

SEQ ID NO: 47939 - protein, 324 aa, unknown
  TnpB Polypeptide
LNRSYKYRLYPSEQDKEELEKHLDLCRQVYNHFLEELNETEEIPSRYELQKQLPELKNEWEELQQVHSKVLQMVLKQLYDNLKSLSEQKKNGYKIGKLRYKGEGWYKTIEYNQSGFKLKKTENRLDRLKLSKIEEVPIRLHREIEGEVKGVILKRDSAGDWYAIFQTEQKPETDTTDSENLEAVGIDLGIQKFIVDSDSNRIEHPKNVEKAEQRLKKEQKNLSRKEKGSNNYEKQKKRVAKLHKRVKNRRMDFLHKLSNAYVRNYDKIVLEDLNIFSMVQGEMNSKNTLDSSWRTFIQLLLYKAENAGTEVVLVDPKDTNKECS

SEQ ID NO: 47940 - protein, 437 aa, unknown
  TnpB Polypeptide
MEKTTPTKTRIGKGITIKSNKTTNKRVRGIINITQSGCMIIYKLRMYPSDDQEEKLGETLELCRWIYNHFLKELNKSEEVPSRYELQKELPELKDKKPELKQVHSKVLQNVLRRLYSNLKALSDSKKNGYKVGRLRYKSKGWYKTFTYSQSGYKIKETKTRRDLIKLSKIGEIPIRKHRQVKNEIKNVFVKREQAGKWFVSIVTDFQKDLSGGEGVVATDLNTTNYLTDSDELVIENPKYLEEKEERLQKEKQKFDRKEKGSNKYEKQRKRVAKKYEELRDAKKDFLPSLSRVYIENYGTIILGDLSISDMFENSYFAKSNLDASLGRFRDYLRYKAESAGTKIIFVDPDNTTQTYSNCGEKVSKNIWDREHECPRCGFSTTRDHNSALNILKKGLDSLGKGQAEVTPVDTGTPAGHFVSASSVVELGTPSHTEAEV

SEQ ID NO: 47941 - protein, 364 aa, unknown
  TnpB Polypeptide
MKAEKTIICRITEPTKRKKALLIKELSNANGYIRGITNDLYSATKQAMDKYIQKDKIKEQHTYPLFLRNDTFRVEEAKNTKEFDYWAKIPISNVYGGIWVPIKPHEPIKEEHEIKDSKVVWKPYGFELHLSISFEVKPQSPKNILAIDLGERVMAATVSTADNGNPSLYGRDVRGIRRHYAYLRKKLQEKSKSKVKEVKDKESRIIEDRLHNISREIIEKADKQDALIVLGDLKGLGNKDTGKGARINRIANTMPFHKLTKMITYKAKERGIRVIKVSERLSSVTCHRCGSENTDRPTQARFDCNTCGLKNYNADLNGAKNILYRSLAYMAGDGAVVNQPKTKASITKQDYDTEKVLGNSSLNS

SEQ ID NO: 47942 - protein, 343 aa, unknown
  TnpB Polypeptide
MILKKLDADYKSFFSLWKKGDNKAKLPGFKGSKYFTNLCYNQSGVKIKKGEIKFSYNHPDKAELSFDISTKFYLEDKNIRQIEIFRDEVKEEYYISISYEVDTPKYKDNGKYQAFDLGVNKHIGVNMSGKFVGFKNPRPDKYWQSKIEEVQSKKDRCKKGSNRWKWYNKKLQQVKRKLANQMKDWQHKLSKKIVENTKANIIVVGDLDTKDMAQNNKNVEGLNRSLQNTGTIGRFVRFLIYKAELVGKKVIEINEANTTKKCCVCGKKQDMPLHKRTYKCDCGNEIDRDKNSAINIMNRFLSQERSVNEQSSFMEDFLRQTGLEYANQQMSKHSQETPSSRTT

SEQ ID NO: 47943 - protein, 399 aa, Nonomuraea sp.
LASVSRYRLQPTPTEEAALLEHCAHARLVWNLAVEQHAHWRPGRLSAPGFAEQCRQLTEARAEFAWLRAGSVIVQQQALKDFAQAMANYFIGTHRRPTWRKRGRSEGFRIVAVQADDVHRLSRNVGEVKIPKVGWVRFRWSRDVPEGVKSYRVTRDRAGRWHVAFAAIPEPIPAPGTGGVVGVDRGVAVSVALSTGELSHAPRLLEAEETQLRRLLRKLARAKPGSNRRTSVKHKIAKVKARERDRRKDWVEKTSTDLARRFDVIAVEDLKIRNMTRSTRGTLAEPGRNVRAKSGLNRSILAAGWGQLVERLEHKAPGRLVKVSAAYTSQRCSACGIVDAKARESQAAFACRSCSYAGNADVNAARNIKLAAGHAVSAREGPRVAEPVHREPQPVLLSV

SEQ ID NO: 47944 - protein, 458 aa, unknown
  TnpB Polypeptide
LITLKIKYEIESKERDKIFEYIKNYNSVFNCLLNHFQDLNKVLSTKDSFSFIKTLNNIFIDTYFKNGILYDAKQVFKKFGNKKLVFGGKKLFLNRIKNLVSKEEFRLKKLRPLQIVGSAYNKGNCKFQILSENELLFKPTKKEHFILQLKNIGKNYQKKLKALILEQEKCSIPITYKLDLEYVYISLDETKIEKVNIRPKLKNRIFAIDINPNYIGWSVVDWKSGTKYNLIASGLISLKPLNDYENSLKVSSDSPDKKYIVNKRKFEVIRVGYELAKLANHFRCEIFSLEDLNIKSSDKSKGRNFNRLCNNQWNRSLLVHILEKNCKLYQIYFQKVMANYSSFLGNLVYREEKLPDPCLASIEIGRRGYEFYHQYVVKDKEKVKNIIFDKLENVKDRIAESLEEFGYSDTFENLSDLYYKLKKRKCNYRFSLEKALKMHQKSFSSLKHSKSLCNFIIF

SEQ ID NO: 47945 - protein, 389 aa, Okeania sp.
MQSIKTKLKVNNYQKTMLAKHAGVARHAYNWGLATCIAEYESTKKRPSAITLHKRLVAEVKSINPWYYEVSKCAPQQALRDLEKAFKNFLTIPKRGFPNFKKKGRKDSFYLEGSIKVLKGNYIKLPRIGIVKTYEILPSVPIKNVTISKRADNWYISFKYDYQPTTTAKKRDIIGVDVGVNTLATCSDGTKFANIKAYRQAKKRLARYQHRVSKKEPGSKNRLKAIKRLAKAHKKADRPRDDESRKGTRTKQWLISEPTHFINSQHGRALNHSTIVIEDLNVSGMLKKRCDPATTTVARERAPRDHKLASAIADCGFSEFKRQLIYKCEWYGSQLVIADRFYPSSQICSHCGHQQKMPLHERTYNCANCGFETDRDFNAAVNLENYVNK

SEQ ID NO: 47946 - protein, 324 aa, unknown
  TnpB Polypeptide
MDFDTIGGKSNKNGARFDLDAMHVNWLGLSLKCYLPKSENSLSYVWESLKGKISYCNIKRLMFSSGWRYYAEIVVSGAAPTRVSIGTSTMGIDPGVSIIAGVSEDACVLEELAPNAIQYEKKIQKISQGMDRSRRISNPNKYNEDGTIIRSNRDPWKYSKNYVKMRRLLKALYRKKHAYIIDSHRELCNKLITIARYFPVEKMHFQALQKRAKETKRQEKKTEVKQKDGTVKVIQKYKRKKRFGRSINRRAPARFLLELKRKAEAVGGVYAEVDTKEFKASQYNHVTDAYRKDSVVTRRKGDWNRKVQRDLYSAFFNSKCRFGF

SEQ ID NO: 47947 - protein, 338 aa, unknown
  TnpB Polypeptide
VHATKGCVERWKNGKRVSQPEFTSWSMLYDKRSATFYRNKVSLSTVNGRVECDFELPADSPTPYEQYVLSGEFEYRASTLQYDEATDEFYFHITTRKYDSDEDSSDNSEGSADAKHQTVLGIDLGVNSLAVASTGRFWQGDDYDHWCREFEKRRGEMQQRGTQAAHTALLRLGKREEAWRKQYIHTVANELVSEAVKHDCDVIVFEDLTDIRERLPEAKWHHVWAFRRLLKYVEYKTPERGISVKQVEPNHTSQRCSRTDCGFTHDDNRHGEHFCCQKCGYEVNADYNGAKNIGLRYARKRQHRLRSSPKSGSGDAPVDVRVNGGTLNGESHQPIAGD

SEQ ID NO: 47948 - protein, 375 aa, Bacillus sp.
MAKQNKAFKFRLLPNKEQSALLAKTFGCVRFVYNKMLVERKETYEKFKDDKELLKKQKFPTPAKYKSEFPFLKEVDSLALANAQMNLQTAYKNFFEGNADFPKFKNRKAKQSYTTNMVNGNIKLENGHIKLPKIKKPIKMKQHREIPADYKIKSCTISKTKTGKYYISILTEYENYEKDIRPVKIQKVVGLDFAMDGLYVESEQGKKANYPRYYRQALDKLAKAQRILSRRKKGSARWNKQRLVVAKLHEKVANQRMNFLHHKSKELASNFDAVVIEDLNMKGMSQALHFGKSVHDNGWGMFTTFLAYKLKEQGKQLVKIDKWFPSTKKCSCCGAEKPVKLSERTYRCSCGYVADRDYNSAINIKNEGIRLLALS

SEQ ID NO: 47949 - protein, 252 aa, Bacillus sp.
METSNGKDGHIKLPKLKLVKIKQQGEIPADYKLKSCTISRTKSGKYYVSVLTEYEKDIQPKTIENVIGLDFAMAELYVSSENEKANYPRYYRVMSEKLTKAGRILSKRKKGSARWNKQRLVVAKLHEKVANQRMNFLHHKSKELASNFDAVVIEDLNMKGMSQALHFGKSVHDNGWGMFTTFLAYKLKEQGKQLVKIDKWFPSTKKCSCCGKEKEMPLSERVYKCSCGFVLDRDHNSAINIKNEGLRLLALS

SEQ ID NO: 47950 - protein, 389 aa, Cyanobacteria sp.
MTQVTRTIKLKFLNLNQVKQQMFADMLEENTRLANELLAMPYKERREMTTAKVRTTLKSALANQTIRHTICATGRKVKQYKKLPVEINKQNWKLEKRGDTYSISFPTICGVKRVPIVVASSDWEPVLQQILDGIARKGSVKLIFHRHQWYAYMSVTVDVPPVQTSNRIGCDRGQNNLAVVAPKQGFGKFFNGLEVKHRRRRFQKRRDRLQKAKKFRSLKRWNKKERRWMEAVNHTVSRRIVRFAEFMKAEVVIEDLEGCRKTMKQKKVNRQDAGESRQSWAYFSLEMKLDYKLAMVGLQLVKRPAPYTSRSCSTCGTIGERRRHDFNCPHGHYHNSDLNAAHNLAQWDGFRCSLDLQRVVSVMGATDSENGWFGNTPHSMNTLPVRVGE

SEQ ID NO: 47951 - protein, 428 aa, Promicromonosporaceae sp.
VLVCAPTCGFEGGSAVRSGVGAEWEGDLVTLQGFRVELAPNPVQADRLAQHAGLHRVVFNHCLAHVKAVMGQRAAERTYGLAEGELTPAASWSAPELEKYWRRTHAQVYPWFTGEGLSSRVPKEACRALASALSNWAKSKAGARKGRRVGFPRFRRRKDGATCRFDARTAYPATARSVHVPTVGKVAVREDMGWLTDRIADGRARVLGSRFERRAGRWWLSFQVEVDRADLNTRRAVPTGAAVVGIDLGIKTFATVADGDGKVTKVANPRHLGRELRRLRRANKALARKRNGSANRAKAARTVARVHLDVAHARADFLHKLTTTLTRTNSVLVIEDLSVAGMVRNRRLARHIADAGWAEFRRQLEYKAKWYGSKVIVADRWYPSTRTCYACGHVHPGLTLADRTWTCPCGTAHDRDHTAALNLLRLAA

SEQ ID NO: 47952 - protein, 419 aa, Promicromonosporaceae sp.
VACGCRGGGDVSTGWEPEGVTLQGFRVELAPDAGQADRLAQHAGLHRVVFNHCLAHVKAVMGQRAAERTYGIADDELTPAVGWSAPALERYWRATHREAYPWFGDEGLSSRVPKEACRALAAALSNWARSRTGARKGRRVGFPRFRRRKNGATCRFDANTAHPATSRLVHVPRIGKVPTREDMGWLTDRIAEGRARVLGSRFERRAGRWWVSFQVEVDRADVNARRAAPVGGPAVGIDLGIKTFATIAADDGTIVEVPNPRHLQHKLRRLRRANKALARKQKGSKNRGTAAAAVAKIHLDVAHARANFLHKLSTSLTRTKSTIVIEDLSVAGMVKNRRLARHIADAGWAEFRRQLTYKADWYGSTVVVADRWFPSSRTCSSCGAVNRDLTLAERTWTCPCGTIHDRDRTAAINLLRLAA

SEQ ID NO: 47953 - protein, 408 aa, Promicromonosporaceae sp.
  misc_feature (304)..(310): Xaa can be any naturally occurring amino acid
VSVAADSVRGVSRHTTFQFTADPSAEQARALARHEGAARFAFNQGLRLHLNARDASKGGTDDGAVKIPWTGFDLINAFNAWKKTENAGRRFVVDGSGVAELEVTGLAWRSEVSAQVFEEAVVDLGKALKAWTDFRRGKRTGRQVGHPRFKKKNHERGSFRIRNKTSKTKTGERAMIRLGENGRRSVTLPGIGPVKVHDDTRRLRRMLATGRARILFATVSRRGGRWRISLNVEAAELHPAARHRVREGTDGGGWAGVDRGLHTPVIAALADGTPSVHITEAPKALCTAQPTTRRLQKSVSRKVXXXXXXXPQRAHHRGTQGAVHRTAHDPPAAEVGLTQGEGLTEPSGGRSATGPSSRAGPCPPSPLPAPGLERVGQDPRPPRPRRPQHRRDARQPPPRCRNLGRSVG

SEQ ID NO: 47954 - protein, 399 aa, Streptomyces sp.
MIRAYKFLMRPTVRQSQALREMLRDHCSLYNGALQERRDAWRHASKTTVRYGQQSAQLKEVRAFDPERQGRWSFSSQQATLRRLDKAFAAFFRRIKAGDKPGYPRFRGAARFDTVDFPKDGDGCRWDSTPHDPVTRVRFQGVGHVKVHQHRPVTGKVKTVSITREGHRWYVILTAEQTEPEPLPATGSVVGIDLGIANFLADSGGGFVPNPRHGQKAAARLEAAQQALSRCKRGSKRRRKTVGEVARLHRKVRRQRLDHAHKTALDLVREHDFIAHEDLKIRNMSRAPAPKPDPDKPGRFLPNGASAKAGLNRSIADAGWGVFLAILNAKAESAGREVIAVDPRNTSRECPACGYTAKENRPTQEKFHCVSCGHSAHADTVGALNVLRAGLVRREAQPA

SEQ ID NO: 47955 - protein, 477 aa, Microcoleus sp.
MQLTYKYRLKPTKAQLMTIVAHLELCRRQYNYRLGERFRWWESTRTPINSCPLVVSIVPLEEIYRSIPLTRVQTRDGRKKDESGNPLTKKGDVFSNIEGGYVQWQAIQLADLKNTKKLFSDYKALDSQVLQDVVNRVETAFSNFTTPDKNGNRRGKPKFKGFHYYKSFTYPQLDNLDIIKDEQDRICISLAKIGQVPMVFHRPIPTGFKVKTGTVIRKADGWYISLTLEDKRVPITVAAIQPTEENTVGIDLGITNYVYLSKVERIENPRLLRKSAQKLARLQAKLANKVKGFKPWRIIKDKISKLHQFVARARLDFQFKTAHELFSKCDVLVVEDLSVKNLTRRAKPKADVENGNLVYLPNGQSAKSGLNKSMLDAAHGQFASVLKYVAWKLGKNVLFVDPKGTSQHCWNCLNKVPKELSERWHSCQCGEFLARDENSAKLIKKIGLSCESGGGTPSLKKAFAKKEKEACGLTVLR

SEQ ID NO: 47956 - protein, 233 aa, Microcoleus sp.
MTDGRYYASLLLDDGTEKPESNSEGHAIGIDLGLTDFAVTSDGSKFQNPRHLKKHERNLKRKQRQLSRKKDKTTNKRRKAKKALAKVHSKISRVREDFLHKLSRKIVNENQVIVVEDLAVKNMVKNHNLAKAISDVSWGTFQTMLKYKAEQDGKIYLEVGRFFPSSHLCSNTLLKVAKIDLSIRMFECPHCGEHHDRDINAAINIKNEGLRILSLGTSDTALGGNVRPSSVWA

SEQ ID NO: 47957 - protein, 505 aa, unknown
  TnpB Polypeptide
MNTDSKRVLIVRLNPTRDEQIYLISLIKAYTSIAKKLHTDAYAKFKELTANGVIENIKQLKDVKKKFYSWYNEYFKTQRKWITDALGSNVTDQLFQFLRGQYENFFANYENFFKHKIEGRPSFPNLPELFQIRDRGVAIDFDRKILTIKLKGKRLSLRFQADRLLYRGEPGSVTIKQQDGRFYAYIPFDFTPKFEEGKKGAIDIGLVNFFATVTEDGDVILVKAKEYAYVYKKYKEKIKELDRLIGKIKKHILRMYFTPPKSFRRYPFLGFTNNRQVSKIITSLYTSWYDVGRAKKKRLRREDMTSIVKKIRKVDYRLRITKLNFVKSDGSVKLFPKKSPFVRDVYKDLPILHKLEYEKKKLFEKRDRTLTHIRRTAINALLRILRERGVTHVVVGHPYNINKNRNELTVNLFQYRKTINDLKIIGERYGIKVDEIVEYNTSIRCSICGEVHKNGRIERGLYRCEKTGKVINADVNSALNIFYKAFSKMPKQLKKIETIKLHFFT

SEQ ID NO: 47958 - protein, 388 aa, unknown
  TnpB Polypeptide
MVSVEKGFEYRIYPNRQQIQLLDRIFGCVRWVYNFFLRVCIDTYEKTDKKPSCFDCIKMLPNLKGQEDTAWLAEADSNALQQAIIDLDRAFDNFFKRKSQGVGYPKFKKKKMARKSYRTTKARIIDDSHVFIPKLGVVKARITRSVEGRITSATIKQTPSGKYFIVFTCVDITEPPKTKTGKSVGIDLGIASLVTTSDGQKIEGIADTRKLDKKLARQQRKLSRKKKGSNNRAKQKIKVARAYEKIVNKRKDHLHKVTASIVSENQVVCAETLNVEGMMKNHHLAKSIAMQSFATILGFLEYKARERGKIFVQVDRWFASSKTCHTCGAREEKMPASKRKWKCKACGTKHDRDINAAQNILAEGIKVLEGTEGHSGTTAKSFAVTLVE

SEQ ID NO: 47959 - protein, 394 aa, unknown
  TnpB Polypeptide
LKIIKYTYKFRLKPTKDQEVLLNKHFGSIRWIYNYFLNQRKQEYLNNKKSISYNKQSASLTLLKQQEETEWLKETNSQSLQYSLKCLDQAYQNFFNKRTQFPKFKSKKSKNSFTVSQHVKNEGNMIHFPKFNEGIKMIMEREIKGIIKKATLSKTPTGEYFVSILTEQEYIPKEKTGKSVGIDVGIKDFLVLSNGSKVKNHRFLKHYEHQLKKHQKHLSRKTYGSSRYEKQRLKVAKIHEKITNSRMDLIHKTTLNLVKEFDTIYLEYLNVKGMMKNHRLAKSISDVSWGKFIDVLTYKAEWNDKHVIHIDRYFPSSKTCNKCGYVNNGLKLKDREWICPDCGEKLDRDLNAAINILNEGCRKDISGGTSEYKRRAQIRLEKSSKGVETFKEMV

SEQ ID NO: 47960 - protein, 627 aa, unknown
  TnpB Polypeptide
MAKTQMLSFPIRLPDCMQAEALRLLDESRPAINTIIEDLWPLLDEFAAERTGIAWKQVEQHLVARSGHGSRQERCEMEQAGRILRAQATRKQVFQTILPLLTDELIKPAEGKRKAHKDYRLIKEKVRALREALDDPDSYMAMTNVIEQAANFFLETETWPRTYEELQPVPVLSVGQLTFAGDDGMEKGQTYRAKIDFRHVCTLDTHEERQTARLGLWLRAPSDQGKWMWGQVCAVIELPDPIVERLSQGAVPQAPTLRDLRADDGTRVAVLDLILEVPAASLRDLDQEHRVLGWDWGIRSLITVSILEQPEAEGEEKYRQISRPVFLDSGGLDGRQARLRREIDRLKACRERYVKLVKAAVIARVEHQKPLPVHFQQWQDHIDAYEARIKLCWKKYEKRNRELAHLASNLLILLALLYDCRLICGENLTTLKTIGRGRGVRGRFRNWRNNSQVRGELWRILRYKCYLLGIRCRDVEARGTTHTCPRCHQPAKTYLSPDPSHRKKADDWAPWLYCANAECGWNGARDYAASLNIARLGMAYLVTYHQTRRYHPYRMSESKDSLKPASYMGAGAALLLQPQGITPRPSEGKRVYYAGWSSSIAVRTSHPKRFLAILSSSRFRKRLLDSA

SEQ ID NO: 47961 - protein, 412 aa, unknown
  TnpB Polypeptide
MRNTKHKLFHDKRLKHLHDDLNIIGVVRNHFIALSMRYYRRYGKELSYSKLSKHLTKLKKLEKYQHWNIPYAWSLQNMLKRLAQSFREMKTLGRGHPKFKACQKHKGMTFDGTQAPLEKVLDKQKHERNHPTYSIRLNGRWYRFALHRAIEGEITSVQATRDALGDVYITLTEDFTEIRYEPKTGKAEGFDFGIKDFLTPSDGKRIASPMFYRQNAKKLAKAQREHSRKVKGSNNRERARKQVARIHKKTENQRTDHHWKLAIDLCRHSDILFFENLNLDGMKRLWGKQVSDLAFGEFMRKLKHQGRKRIRSVLKIGRWTSTTKSCSVCGHKNENLTLADREWTCPKCNTHLNRDQNAAINILKEGVASFGLGVVRPVVLFNKIVGCAVEARSPLLYSTNAFVEKTAEAPML

SEQ ID NO: 47962 - protein, 403 aa, unknown
  TnpB Polypeptide
MPIQHKAFKFRLYPTKQQAELMQKTFGCCRLVYNTMLARNLDGYKKHGKTWKNEFNPTDLKQTHEFLSEVSAATLQQATRNLQSAYEGWFKSIAGKRKGKNLSKPQFKSKHKSRKSFRLPNQKFSLGDQWIKLEKLGRVKAVIDRQVPADAKLVSVTVSQDASGEYFASVCVEVEIDLYPPSRTTVGIDLGLKDLLVLSNGARLSNPRWFRESQTGLRKSQRHLSRKQRGSSRYTKQRIKVARVHRDTRNARSWLTHNISSALVKHFGVICVEDLNVSGMMKNHCLAKSIGDAAFGELVRQLEYKSAWRGRTLVKVDRFYPSSKTCSCCGHVNQELTLSDREWTCKSCSAIIDRDLNAAVNVHNRGLSDLSAESVDHRRGGFVSPTDPQGFAWQDSVKRLLNL

SEQ ID NO: 47963 - protein, 383 aa, unknown
  TnpB Polypeptide
MYLAYEQEMYKDTGKFITSYDFSKYINHLKKHDERYSWIKGYSSKAIKDAIINQEKAFKKFFKKKGGYPHFKSRKRIKKESFFFVKNHIHFNTGCNNIIKIPILGKVRITEHNYLPDESSITSGRVIKDGNKYYLMFIYNMYYQPYHVTYDVGYGIDVGIKTYATISTTNGDTISCKHFKDDTRWKVLEEKKKRLQQILSHKVEVNYMRRLNAYMDSHHEEPKDRYKNIMKGESYNTSGVRRLRRKINKLDEKMYNIRKDYICKLVHTIVVKAKPRYITIEDLSIKSILSIGNTDIHRYISMSGFYYFRQKLSELCQSYQVELRIANKFFASSKKCSNCGYKINDLKLSDRIFKCPECGMVKDRDVNASINLLYTKKYSIGFA

SEQ ID NO: 47964 - protein, 430 aa, Lutibacter sp.
MYKRQETINKIKILIKKYNNKVPLNDIPINNFIQTNSWFDIKESNQFDHINQFKFNKLVDNNKIIKCKKVILIPTIKQKKLLLGWLNSVRIMYNDTIRYIKYRYWNNMKTTTSFISLRKELRSKKLNLIKIYDTPTHILDSGIKLASISYKSAFTNCRNGNIKHFNIRYLKEKKDTHIMGIEQQYFSKNTICVRKLGKKLLNKSNISYDEINKDCKLHYCKLNNKFTLLVPVEQPKYERVENNDYISIDPGVRTFLTGLSNNNHFEICNNMYVESKKILKKIDKSEKYIKDNKKCKNRCRLLRNKLKNKITDLHWKSINYLINQNKNTIIIGKWSTKSCISRKGSLNKMLKRVCSSLRYYDFLQKLDYKSKCHNINLKIQDEAYTSKLCSVCGKINNKLGSSKVFKCTNCNLLYDRDMNSCRNILMRSFE

SEQ ID NO: 47965 - protein, 459 aa, unknown
  TnpB Polypeptide
MPSQRRSAMSAVVCASRLRSVSVSSMRSRKRPPARRASSRLNSAVRAFPRCSSPVGLGAKRVTHFAACAGGEIALALIGPAAQKLLHCCRNTSAGPVCSSSLPVYLYSDRSLPLSSEVFVGLLNQQSRSVNYLWNYCNDTQKHALKWNKRWPSGFDLNVLTTGCAKELGLHSGTVNAVCEQYAKSRSQHRRPYLRYRGKKSLAWVPLKGRYLKREGEAFRFAGRTFRVFYSRPLPDGKIKDGTNFSRDRRGHWFLNVVVELADTPVRALKRSVGIDLGLKEFAALSTGEKIENPCRYRGFEKRLGKAQRAHKKRLAAKIHGRITDSRRDFLHKLSHRIVREFDYIAVGNVNAAGLARTRMAKSLLDASWSSFRAMLAYKAVKHGARYEEVDERFSSQVCSSCGSLPDSRPNGIADLGIRQWICSDCGYVHDRDVNSARNILARPGHRTPVEGITGLRAA

SEQ ID NO: 47966 - protein, 389 aa, Photorhabdus sp.
MLRATKVRIYPTSEQAEYLNAQFGAVRFAYHKALHIKKHAYKRYGVNLNPRKDLKPLLAVAKKSRKYAWLKEYDSIALQQAVINLNTAFDNFFNPKLKARFPAFKNKHGKQSSYHCIGVKVLDGAIKIPKLPPVEARLHREINGEVKSITITRTATGKYYASILCNDGMEAPVKPSRVTRVAGLDMGLSHYAIKSSGDKIANPRHLINASRNLRRKQKALSRKNKGSANRRKARIQLACVHERVANARADFQHKLSRTMVDENQAIIVETLKSANMMKNPKLARAIGDAGWHGFITKLEYKAEAAGIHLVKLDQWFASSKTCHGCGHKMPELPLNKRIWQCPCCGVEHNRDINAAINIQRKGILELQAAGLVVSAHGGQRKSVASTVAA

SEQ ID NO: 47967 - protein, 139 aa, Lyngbya sp.
LWRFDKKQIKRVRIVRRADGYYVQFCVQVDINEELEPTGNTIGLDVGLKDFYTDSDGHAEPNPRFYRTGEKRLKFYQRRVSRKQKGSTNRRKAINRLGRTHLKISRQLEVHPKRLGTKLPQDSGAFMGDRLCIKGLNLL

SEQ ID NO: 47968 - protein, 424 aa, unknown
  TnpB Polypeptide
MFPYFNELAHKAKNLYNASLFRIRNAFTAYSKTSLTSNEKEVLDELALLKGQKTYRVLGYMLLERLMRVTQNPDFFADLPMQAAQATLKRACSDFQSWLSAMKKYKQDPALFTGKPRMPKYCKGDITAFTLTNQEAVIYDDELKLPKTKQRLKIRKRCSARLQEVKVRPVSGGYDILLVYKVKVPSVKAGTHSAAVDFGVDNTMAVVTDTGDSIIFKGEYIKSINQYFNKEKAYRVSLMSKGDVTTARVWSKKLDQLSVYRTNYIRDCFHKMSRLLMEWCKSHKVGYLVLGSNKFWKQESSMGKCNNQNFVSIPFEMLKTMIELKSNEYGITVVRQEESYTSKASFIDLDFIPVYGKEDPDKKYHFSGRRIHRGLYKSADGTLMNADINGAANILRKAGHDVSNIKIARLLDPAIIQFKTLNCK

SEQ ID NO: 47969 - protein, 312 aa, unknown
  TnpB Polypeptide
VNYNYRYRLRPSDALEQQLAWTVDTCRQVYNHFLHRLNRTDDTSAYSEQKLLPSLKKWWNDLKHVHSKVLQKVVQRLYDNLSTLRGRKENGYHVGTLKWKAPSEYRSFTYGQSGFKLKNTSGRTRLWLSKLGEIPLTFHRALPDDAEIKTVTVKQEPTGKWYAILGVETPDDPPAKPETPEKCVGIDVGILKYAHDTDGTAVESFDLSDERERLERAQRDLSRKEHGSTNWEKQRRVVAERHAELKNKRRDFLHKLSNYYAREYDFVAVEDLDVKGLIELPGNSRNRAGAAWERSYGCSNTSANGKERILSR

SEQ ID NO: 47970 - protein, 243 aa, Lachnospiraceae sp.
GNRVKLPKLKNVKAKLHRNFSGQIKSATILQIPSGKYYVSILVETEHVELPHANQNTGIDLGIKELCITSAGKKYENPKIIRKYEKKLIKLQRQLAHKEKRSQNYYKTKKKIALCHEKITNTRKDYLHKMSHEIISENQVIVSEDLQIKSMVKNHHLAKSISDVSWYELTRQLEYKAKWNGRKYIKINTFYASSQLCSACGYQNTETKNLSVREWICPVCGTNHDRDINAAKNILEEGLGQIA

SEQ ID NO: 47971 - protein, 442 aa, Lachnospiraceae sp.
MQTVSSYGVELRKQNIPLRQTLGIYRSAVRYLTEIYGQVWKTLAGIPDAKRRFNAAEHLVHTTKKNVARFDFDSRYPKMPSYLRRAAIQHALGSVSSYESRMRLWEKASEKSGRPRLVYENHAMPVFYRDVMYREGAEGKDDAYLKLYDGHDWKWFCVRLSHTDMEYLRKNWYGRKASAPTMERRHRKYFLRFSYTEETVLTKTSVKDQIICSVDLGINTDAVCTVMQSDGTVLGRRFVNFPGEKDRLYRTLGRIRRFQRAHGSAQSRGRWAYTKRLNIELGRKIAGAIVNYAEESHADLIVFEHLEMHGKISGKKKQKLHLWRKQDIQKRCGHKAHRKGMRISHVCAWNTSRLAYDGSGQVSRDPQNHSLCTFRTGKRYHCDLSASYNIGARYFIRELLKPLPETERSLLEAKVPSVKRRTSCVYADLKELYLQMEVLQAA

SEQ ID NO: 47972 - protein, 259 aa, Methanosarcinales sp.
MATLHGRQIVPTKFGDYQSARMDRIRGQADLILVKKIFYLCVVVEVSEESPYDPKGVHGDDLGIKNLAVDSDGEVHSGEQTTNTREQLDSLKSRLQSKGTKSAKRHLKKLSGRMARFSKDVNHCVSKKLVTKAKGTLRSIALEDLQGIRDRVTVRKAQRRNLHTWNFRLLRLFVDYKAKIAGVPVVFVDPRNTSRTCPSCRHISKENRPTRDEFRCESCGFAGAADYIAAMNIAFRAVVSQPIVTRFFAQSQAPSFRVG

SEQ ID NO: 47973 - protein, 468 aa, Streptomyces sp.
MGELAEKPKPKAVKGEEAKRIKREALGIGDRRKHHSRKATPLKGHAKEPDAHHRLYRFRFYPTEEQAGQLAQTFGACRWVYNEGLALRSMAWEEHRVNVGFAETCRALTGWKRAEETVWLKEVSSTVLQQSLRHLEQAFGRFFKGVARYPRRKKKGRSRDSATYVRTGFTWVEDPERPGTGLITLAKQSQPLDVRWSRALPAGTVPVRLSVTRDRASRYFVSMLVEERIAPLPAAFVPGSRAPKAVGLDLGLASLVTLDDGTKIDHPRLLKRYAEKLVRLQRELHKKVRGSRNREKVKQKIARLYALISDVRRDMLDQFTTRLVRENQVLVVEDLSIVNLMRAARGKGKRRKARLNEAIIDASWGELLRQLRYKCEWYGRTLVIVDRFFPSTRRCSACQAKGPRMDVSVREWTCTGCGVVHDRDVNAAVNLRDEGMRLYWLVATGLPPEKKAPMVIKASELEKCLLAA

SEQ ID NO: 47974 - protein, 474 aa, unknown
  TnpB Polypeptide
MYGISHKIALRLDDLTRQNCVCAAGTARFVRNRLLVEADRLQASGTSPTAARLSPFLTRLSADNPWIGDVPPSVASGALDDLTRAITNHAKWGQAAPRPRQKGIHDSFHLAPADIGWPDDPTVLTTPLGPFALKMPVRDFADLPQVKNILLAVVVSRHHDDWFVSLSFDVDKRKNPPKPTQIIKTIGIDLGISHFATLSDGTTIDYPDTFHAVRKRLRRLFKAVETAPTQSRRNKLLARINTVQTHLNNIKKDFIHKFTSYLVDTYDAIAIETLDVKGMLSDAIKKDEYFFYQIQRQSFFEFGRQLTYKTELYGKHLVKADQFFPSSKLCSACGHVIDHLDLDQRDWTCPACRTHHNRDHNAAKNLDNQILGLVGPARSEPASGRGNAPPGNGEGRPAAPSRRASPGFPRREAVGEAHSEAASPVATGPAAHAPQGNPVQAPLPCQPGEGTPAGGVAPTSTLPPRWRLPRPRKQ

SEQ ID NO: 47975 - protein, 369 aa, unknown
  TnpB Polypeptide
MERAYKFRIYPTREQESLIQRTFGCCRYVFNHFLAERKETYEKTGKSPTFFVQNKGLTVLKHSEETAWLCDPDKHALQNALRDLDTSFQNFFRGVKTGRHVGYPKFKSKRDRHRSYRTNGPFRFEEKAVRLPKLGLVKCRISKKIEGRILSATVSQNPSGKYFVSLCCTDVEIEPLPKTGAKAGVDLGVKVLATTSGADIYPNNKRLSKADKQLRRLARALSRKQKGSRNREKARVRLACLQERIANQRRDDIQQATTDLIRKYDVICLENLKAKGMLQNHRLARSVADASFAEFRRQLEYKAAWHGRTVSVIDTFYPSSQLCSNCGFRNSETKDLKVRKWICPECGAIHDRDVNAAINILNEGLRLLA

SEQ ID NO: 47976 - protein, 279 aa, unknown
  TnpB Polypeptide
VLHRKFKGTVKTVAVSMTPSGKYFASVLVDTAIREIPVTPIKGDTALGIDLGIKSLAVCSDGRTFVNPKNLQRSLDRLKLLQKRLSRKQKGSSNRNKARIRVARMQEHIANRRKDNLHKITHALTHDSQVRTICMEDLNVKGMQRNHHLAQVVGDASFGMFLTMLEYKCGWYGVNLVKIDRFAPSSKTCCKCGYIYKGLKLSERSWTCPECGAHHDRDFNAACNIKEFGLKALPTERGKVKPVDCPTADGRPRVLKSNDRKKQEKRGGIGISEAAKSLV

SEQ ID NO: 47977 - protein, 474 aa, unknown
  TnpB Polypeptide
MALRVVSNYLRLPKKTFQILDTLAYHAKSMYNVGLYNVRQHYATHQENTQILQGIRPDLTSGVDILVGSYLPFTRKKDFPYKECSNYAQAKPNENFSLLHNDNAQQTLKSVEEAYKSYFELLKLYRKGQLEYCPSPPHYLPRDGRFKLAFPRAHLTIRNGAVTLGMAIKFRKQHGLTGKELTFPIPPCIKPHQIREVTILPAHGGKAYKIEFCYKVPSKPQNLDPAQYLAIDLGLNNFATLVDTATGAAVILDGKRIKSINRWYNKENARLQSIKDKQKIGGITKRQARLLKKRDCRIGEAMNRYVNWIVDYALKHTIGTVILPRWDGIKDQINHGARGNQNFVQVPYHKFRQKLKSKCELYGIRFDDTHSEAYTSQVDALNLDPIAKPPYGRKRRIRRGLYRSALGTLINADVNGALNHLRKVAGDSVVPRIIGRGRVNRPVRIRTSFEPSTFAHIKLQPCAPQGAPAASTLR

SEQ ID NO: 47978 - protein, 373 aa, unknown
  TnpB Polypeptide
MILAHKIRLYPNNKQKTYFKKACGVARFAYNWALARWNERYEAGEKPNESELRKELNSIKKTEFPWMLEVTKCAPQQAIKDLGKAFSNFFKGKAGHPKLHRKFANDSFGISNDQCSVSGKSIRIPNLGKVRMAEELRFDGKIMNVTISRHADKWFVAIQVELQDYYPDSKSAGCENQAAGVDLGVKDLATVSDMAGSRKISGSKPLKKLKAKMRRLSKSLSRKQGASSGEKKSKNFAKAQKQLSRLHYRIGCIREDETHKLTTELAYHYPAIGIEDLNVKGMMANHKLAKAVSDMSFFEFRRQLEYKSGISGARIVVADKWYPSSKTCSCCGHKLDELKLSVREWECPKCGTHHDRDVNAATNLRNRALAAMA

SEQ ID NO: 47979 - protein, 430 aa, unknown
  TnpB Polypeptide
MLQAERHWIKENHELYSICDELTFKAKNLYNAGLYQIRQSFFERERSKNKENHSIISWIDVVSNFRKEQQEDMLALPSKVSTNILKSLGNIMNSHYQLLKRFYDKSNTSVTHKPQLPRYLHKVNGRYVVEFTNQTISKKRGENGEIIICPRDLNLLIPTKVDKPECVRIVPKLGAFIIEVIYEVEESPLKHTNNYAAIDLGVDNLASVTFSSGINPLLVKGKKIKSINQGYNRLIAKAQSKLPTNQGTSKHIHRLWRNREMKLQSELHRITSFLSQYFDEMCIEKVFIGKNVGWKNNVSMGKKTNQKFVQIPFNTFISQLRYKCLLKGIEVIEQEESYTSKASFVDDDEIPVYRKINHEPQFSGKRICRGIYETKDGFRLNADINGSYNILVKGLNSIGKTIDRSDVSYHARIFKSSNHKSTKDLVLEYM

SEQ ID NO: 47980 - protein, 369 aa, unknown
  TnpB Polypeptide
MTIRQKSYKFRLYPNEEQKQLFSKTFGCSRAIWNMMLADKIKYYEDTKETLHNTPAQYKKEFAWLREVDSLALTNVQLNLQKAYKNFFRSGFGFPKFKKKSHRQSYKTNNQKGTIALENGYVKLPKVGRVKVKANRQINGVIKSATISMTPTGKYHISILCETEITPLTKTNSSVGVDLGISNFAILSTGEKIGNKRFLSKLSKKLAKEQKILSRQGLLAKKNGRKLSDCRNYQKQKLKVARIHEKIANQRKDFLNKLSTNLIKNHDVICIEDLSSKNLMKSHKLAKSIGDVSWSDFVRMLEYKANWYDKRISKISRWYPSSQICSDCGFSSGKKPLSVREWTCTNCGIHHDRDINASINILNEGLRLL

SEQ ID NO: 47981 - protein, 384 aa, unknown
  TnpB Polypeptide
MLQAYKYRMYPSREQVALLMKHIHACRFVYNHSLEQKIRAYEQHGQKLSCFDLNNCLPALKKEYPWLAEVNSQSLQIANKNLDNAFTRFFREKKGFPKFKSKKNPVQSFQVPQHYCVNFERDRIRLPKIGEIKTTFHRHFDGKMKTATVSVTSTGKWFVSILVDDGKPTPDPAVFTSDTTLGIDMGLTDFATFSNGEKIENPRYLKNSLQRLKVLQRRVSRKVKGSKNREKAIKKLARCHEKVANQRNDFLHKLSFRVVSENQAIAVETLNVAGMQKNHCLAQSISDVSWSSFFRMLEYQCERYGKTLLKIGRFEPSSKLCSCCGYIKRDLILSDREWQCPDCGTSHDRDVNAAINIKKFALQDQNLVGVAGAERTVEPVDLPQ

SEQ ID NO: 47982 - protein, 405 aa, unknown
  TnpB Polypeptide
MLKSYVYKLYQNKHSKVLIEEIELASKIYNHCIALHKRYYKLFKEHLKLNDLQKHITKIKKRDRYLEWNRLNSQSIQDITQRIERGYRLFFNLVKKKRKSSPPSFKQHWKYKSFTLKQCGYKLLDGNSIRVGKYKYRFHKSREIEGEVKTLTIKRDNLGNLYLVFALDVENKVNIKSKTGKIAGFDFGCKVFLTSNSGEEIESPYYLERSEKKIRKAQRVFSRKGEKYKGKRILFNKRSNSWKRARMNLVRCHEKIANQRKDFNFKLARRLLNENDILVFEDLNMRWMQSRHGKKVLEHSFSQFISILKFKSEENDKRIIEINQFYPSSQLCSECGYQNKDLKLNEREWKCLQCGVHRHRDVNAAKNIIIEGMREMNLIEVGAPTSEFRISETQYFEHYPHSNRN

SEQ ID NO: 47983 - protein, 253 aa, Bacillus sp.
VNGNIMLLNGHIKLPKLKMVRIKQHREIPQGHIIKSCTISMTPTGKYYVSILTDYEKEIVQKEVKTVVGLDFAMDQLYVSSEDERANYPKFYREMLDRLANAQRVLSRRTKGSGRWNKQRIRVAKLHEKVANQRKNFLHHKSKELATHFDVVAIEDLNMKGISQALHFGKSVADNAWGMFTSFLAYKLNEQGKQLVKIDKWFPSTKTCSSCGNMKNMSLSERAYSCICGVNLDRDYNAATNIKNEAIRLLALA

SEQ ID NO: 47984 - protein, 544 aa, unknown
  TnpB Polypeptide
MSKEVLEIPTKKKSEKNFITVECLLAFDKEEDKRRVLNLMRKFSAMVRFAYKRLMDGAERKELKKLLSRKYGINTRYASDAILLAQQTLESCVEREQNPKKLVFGSRELFEQLKKKHLAGKRRDELRQKWEERRYGTLYSRGDKSLQGNLNLRLVNLNNQWHLRINLGDGEYVWTKVTRSVKRKTDKWISFISSLEHSEKTEDWFPYTVRLKLRNGKVYAQFSREEKFPEVTITKDNGVTGIDINAYPFHLALVHTAKDGNLEKYERISLDNLLEGSSDKRAYLSWQTAHQVVEIAKRERKAIVVENLEKLPKGKRGDGMPKLRQKLQKWVYKALLQKIEIVAKRNGIQVIKVNPAYTSIIGKLKYAPLYNIDKDTAGAYVIARRGLGFKERLPKNYKELLKDTEFLSYTIAKIEDKIANLKQEIREEKNEYKRNRLKSVLWKTRKELDLLLIPFLGSGESESFAQQAVNRELKPMRGRVQALQKSWQVLSVAFAFSCLESLRDFSPLKRILISRDWVGVANKASPSHLGQGTTVRNNLRNNLI

SEQ ID NO: 47985 - protein, 420 aa, unknown
  TnpB Polypeptide
MKILRSTKCSTKFATQKKKDELQTILQEYGRVVNTFVDHFWINPVQSKTELLKPIVDIPQTWLSARLRKVAAREALDMIKSVTEVQESNREMLEHDISDIENIISKTSPVSKKNRRKVNNLHIKLKKKRNKLSMVQPHKPKHSGNRMSVSCTIAELQTPKNTDEFDSWLHLASMGNGITLNIPIRNHKHFRELSSSGERLNSYVITNNYIQFAFERETGPKKTVEKLIGIDTGINALASTSTGEQFGTDVKSMIERSKRCQKGSKGKQRAVNALKQRMCEIAKQVVKDTDLVVVEKLLSMNKNSKLKGRLSLNMRSSIGSWNYRYWLNRVEMNCEGNRVSFRTVSPYYTSQRCPICGHTDSENRSGQVFKCQKCGYSGNADLVAALNILDRFLSGPYGAAYKPLIDTQSVAERLTKIYQL

SEQ ID NO: 47986 - protein, 500 aa, unknown
  TnpB Polypeptide
MPKAETPSFVLEFPLVVKPGDERVMLGRLEAGRRLYNVVLQGALNRLKLMRESKAWQAACAMPKSTDKDKDKTKTSARNAAFIACRQRFSFDDASVQNDATWHKNAARFEDRLGAHETQKIGTRVWNAVNSYALGKKGKPRFKGTHRPLHSLEGKSTGSSIKWRRDRSCVEWDKLFLPAIMPKLDRDPWVNEALKSRVKYCRVLWRTFAGGKRWYVQLVMEGLSPQKYEFLAAGMEVGLDIGPSTIAIEGDQVAALEQFAPSVVQPWKKVRVLQRTQDRSQRAMNPDNYDDKGRIKKGKKTWKKSARYKQRQADLADLERRLAAGRKRDHGELANKVVGLGTVVKTETLSYKAFQRLFGRSVKVRAPGAFFEHLESKAARAGGQVIELDTWRLRMSQYDHVLERYEKKPLSQRWHALGGTDVRVQRDIYSAFLAHHAKEDGHNPSHLAREWAAQEPVLRRAGLCIDQSASGKAPPSPRVAISSERIARRRRLGRGLNSGV

SEQ ID NO: 47987 - protein, 533 aa, unknown
  TnpB Polypeptide
MSELPVFTYQARLALNQEQEAALAAFADLHGRIERSLFAAMQARPEHNLKSGRERKELRNELKRTFCRRFKITTRQYNAIRSEVDGKIDAIKERRPDLIKEAGARLTKLKKTIAKLEKKAPGTNKLHQKKRRYATQVARLFDLKSDQKVRRIRICFGSKKLFRAQFSLEENGYPEGKDGLAAWREDWREARSRQFFVLGSKDEMAGNQTCSASLVDDGSFTLRLRLPDAHIRSKQDKYIALTCVRFAHGQEAIRGALSTSRIISSVTKKGEPSRKYDGTSISYRFLRDEKGWRVFVSVEAQPVETRTSRLSGAIGVDINGDHLAVAETDRFGNLIDTWRLDCVTYGKSEEQAKALIGDAAKAIAEKAIAAGKLVVIELLDFAKKKAELASVDPARARQLSSFAFSKTIGAIKSACFRAGVEVIEVNPAYTSVIGSVNYARRHGISVHQGAALAIARRGLGYSERPPRREASVPVRNGAHVTFALPVRTRAKHVWSYWASVKKKLTAAHAAHIRRGKPPPRSLSGSRAPPGCCR

SEQ ID NO: 47988 - protein, 301 aa, Okeania sp.
MVEKAYKFRFYPTPEQENLLRRNLGCVRLVYNKALAARTQAWYDNKERVSYRQTSAMLTNWKKQEDLDFLTEVSSVPLQQGLRHLQIAFPAECCANTNFFSGRAKYPNFKKKRNGGSAEFTKSAFKWENGQVYLAKCAEPLPIRWSRQLPPNCVPSTITVKLGPSGRWSVSLRVNDTRDLKLKPVKKQIGIDLGITSLITTSDGEKVANPKNLNKLHKKLRLAGKSLDRKTKGTNNYHKARLKVARIHAKIKDSRLDYTHKLTTQLIRENQTIVVEDLAVKNMVKTITTPIPSREGSKRGG

SEQ ID NO: 47989 - protein, 402 aa, Escherichia sp.
MKRLQAFKFQLRPNGQQEREMRRFAGACRFVFNRALALQNENHEAGNKYISYAKMTSWLVEWKNATETQWLKDSPSQPLQQSLKDLERAYKNFFQKRASFPRFKKRGQNDAFRYPQGVKLDQENSRIFLPKLGWMRYRNSRQVTGVVKNVTVSQSCGKWYISIQTESELSTPAHPSASMVGLDAGVAKLATLSDGTVFEPVNSFQKNQKTLARLQRQLSRKVKFSNNWQKQKCKIQRLHSRIANIRRDYLHKVTTTISKNHAMIVIEDLKVSNMSKSASGTVSHPGRNVRAKSGLNRSILDQGWYEMRRQLEYKQLWCGGQVLAVPPAYTSQRCACCGHTAKENRLSQSKFRCQVCGYTVNADVNGARNILAAGHAVLACGGMVQSGRPLKQEPTEMIQATA

SEQ ID NO: 47990 - protein, 390 aa, Hydrocoleum sp.
MFKAYKYRIYPNTEQQAALAKSFGCCRFFWNYSLNLCQETYQKTGKGLSRSKIQGMLPGLKKEYPWLKTDVYSQCLQVVALNLSTAYKNFFEKLAQYPRFKLKHHKQSISYPQNVRFEGDYLKLPKIGLVYWVCHREFEGKIKTVTVSKKLDSQYYVSVLVDDGKEKPKQSARDKAIGIDLGLTHFAVTSEGSKYDNPRHTKKHERNLKWKQKKLLRKVKGSNNRNKARKKVAKVHSKISRCREDFLHKLSRKIVNENQVIVVENLAVKNMVKNHNLAKAIMDCGWGMFGTMLNYKVEREGKTYLEIDRFFPSSKTCHVCLNQVGSLPLDIRSWKCEYCQTTHDRDINAAINIRDEGLRILSLGTSDTALGGNVSRVGKTSVLSDAIPGE

SEQ ID NO: 47991 - protein, 430 aa, Micromonospora sp.
VWACVLEINAWRRRRRDAPLAGYQELCRELAVSGPDTFAELGSTGARSVLRRFSDAWFAAAKRRKAGDLSARFPRRRRALMPVRWYHGTFTVGGRRVRIPTARGTLPLWVRLARDLPYPVEQVRSITLLCEGGRLFLDVTAEVPVAVYPPGEEPDPARVAGVDLGVIHPYAVAGPDGEGLLVSGRAIRAEHRMHLADTKARRRAVSRRAPKPGEKGSRRWRKYRRRARLVEGRHRRRVRQAQHEAARTVVSWAVRQRIGVLHVGDPRGVLDIPAGRRHNLRLRQWQVGRLLRVLTDKATLAGITVRLVDERGTSSTCPACQRRVPKPRGRTLSCPHCTFSGHRDLVAPASIATRIPGGGPTTPTAVVLPEVVTHRRAGRHLPGAGRSRRDPRRPQQAARGSVGLRRPAPPPGGESLAHPARIHNTHRKPG

SEQ ID NO: 47992 - protein, 373 aa, unknown
  TnpB Polypeptide
MKLTLQIKLLPTKEQGKSILQTMKDSNAACNKISDVALEKKEFNQYRLHHLVYRDIKDSSDLSAQMVVRCISKVVDAYKLDKKTKRVFKPLGAITYDVRILSYKEESVSIWSVGGRLKILFVCHNSKYLPYVKGEADLIHRKGKFYLFQTVEVPEDEIKDIEGFIGVDFGIINLATTSDGEVFSGKGVDTVRKKMTKIKKALQKRGSKSAKRHLKKLSGKERRFKKHTNHTISKKIVSIAKDTNRGIALENLKGFNGRQTVRKEQREIFGKWSFDELGKFISYKAQLAGIPVIFVNPRNTSKTCSECGHISRSNRKSQSEFVCQCCDFSCHADLNGAINISQRAIVNLPIAVHSESLKSLSLGTAMPRPLAAR

SEQ ID NO: 47993 - protein, 372 aa, unknown
  TnpB Polypeptide
VEKAYKFRIYPTKDQEILIQKTFGCTRFVYNHYLAKRIEMYNKDQSTLNYIACSADMTILKKELKWLKEVDATALQSSLKDLDFAYQNFFRRVKNGDKQCGFPRFKSKKDNNRSYKCKFVKENIKVFENCVKLPKLGIVKCAVSKQIEGRILSATVRQNPSGKYFASICCTDVEIPKFKPTGAIVGIDVGIKEFCVTSDNVHIANPKHLYKSEKKLARLQRQLSRKSIGSNNRNKARVKAACVHEKVTNQRGDFLHKLTIGLIRDYDLICVENLKIKNMVKNHKLAKSIADVSWGEFKRQLNYKAVWYGKHVQEIDTYFASSQTCSNCGYKNSETKNLAVREWDCPTCGTHHDRDENAATNILNEGLRILAS

SEQ ID NO: 47994 - protein, 518 aa, Streptomyces sp.
VSALDAAVLAEVGVFLGSLAAGDLAERSRQGLGHDAPSWAVRKRSLTGKSSARWAGSITKASHDQWALARRGQAAHMAWLRGQITSIEARLARPLGAKGDKREGLVRGYGSRAEWHAKSRRLHALKDRLAVVEADWAAGRVRVARGGKRLANTRHHLEAAGLDEQAWRERWRAVRMFLAADGESGKRFGNETIRVTDTGRLSVKLPAPLTRLANAPHGRYVLDATVRFQHRGQEWRDRVTANRAVAYRIHRDTARGRWYVTASWQRAAAPTLPLEAALARGVVGVDMNDDHLAAWHLDVHGNPIGEPQRFFYDLTGSSGHRDAQIRHALSRLLHHARRCGAAAIAIEDLDFSDGTSREKHGRNKPFRRLISRFPTAKLKARLVSMAAEQDIAVVAVDPAYTSRWGARHWQQPLSTATRKISRHDAASIAIGRRALGHPIRRRTTPPPPHQSDGAGHRIVQARPEIGRREGTRPLVPGPRTGCAPPGRGAKAGDQCAQHRSGHTAEHGFWQQDSLPLSL

SEQ ID NO: 47995 - protein, 146 aa, unknown
  TnpB Polypeptide
VFGSNRWKKQKVKVQKLQLKVANQRKDWLHKTSYRLAQEYDAIMVEDIDLRAMSQGLKLAKNLQDNGFGMFRNFLKYKLEEQGKQFIKIDKWYPSSKTCRFCGKVHEELKLTDRSWFCPHCGTEIADRDHNAAINIREAGSALLAW

SEQ ID NO: 47996 - protein, 378 aa, unknown
  TnpB Polypeptide
MILTRKIKLHPSFEQKNILMDTLVQYKMCIQHCFQVGFQNKITSNSKLHAETYFPLRKKTTIQSQLVCSARTRAIGVLRSIKNNTKGKWNTKQPVVHKYPTICYYKNCCSYTGMGIKLSTSQGRIEIPLVHYPFIDGEWKNLKPTCQLQYKASKDEWYILALFDVISKPKTSGNEVLGIDRGIKQTAVLSNNQFVNSKHTRKIKSKYSHLRHRLAKKGTKSAKRLLKKISGKEHRFVKDANHCIAKMIINLPFDIFVLEQLSIRPKKRLGKSFNRRLMGWSWKQLEQFLTYKAELAGKKVEYVDARYTSQKCSRCDHIKRSSRRGILFKCAKCGFQLHADLNAARNIKNNFFKTQNATSILGRAISTVQTSQSELCSA

SEQ ID NO: 47997 - protein, 610 aa, Microbacterium sp.
MKSGAAAYMVRMSSQTAHEPGVTPTLPAGYDHGTTRAYRHCKPACADCRAANAAAAAERRSARLAAGMPDDAHEKASGYTFWNCRCRRCKKAWRSSSADLKRTPRVKPSLADMPAEEHGTPRGHRYWGCKCTNCAAVGTALRAELVVRRRASADGPSSIRRYRYRIHPEPAAQAALRRVFGSCRFVYNSYIALARTRFEAGEKHPSGFEATKALVTGARKAEATAWLGEVAHTVLSASVHDAADAYTRFFDSAAGRIAGRRIGRPQFKSRRTARQAARYPENSFTIRGGWQNSRGGGGRLHLANIDQDIRVNWHRELPGYPSAVTITADADGTFWASFIVRVPQAPAKTPTRQPRTAGVDVGLNDYAAIAYSDGIREKIANPRYFRAAEDTLRRADKALARKQPGSNNYAEAKRARARAHRRVANLRQNHARQLASKLSRENQAVVIETLNVAGMAKTKLGKSVNDAGWAQFVSYLDEACTRKGVSLTRVPRFYPSSQICSSCGTNGGRKALAVRTWECDSCGTKLDRDYNAAVNILAAGPAVNACGRDVRLQLAGAGPGEAGSHRSEVRASASRRRKRASRPKVGRDVQASSDPRNHSDLRDVVENGAA

SEQ ID NO: 47998 - protein, 348 aa, unknown
  TnpB Polypeptide
MMVQKTIRAKIIAPTKSKAEKIEREYRHFQLALSGGDMPLYSATKQQAQRLLKRVKGKMREQPLVIRNDVFKIQRQDTKIAQWWARIPVYGKSIWVPVQLPREQEHLLCLSIRETHLVKETGGWSLRITVRHEVQMRSPKNILAVDLGEKHIATSVTLADGAPRNPRFYGEDVRGIRRHYAWLRRRLGEKKALDTIKKIGDTEKRKVNDILHKVSRQIVDDAVAQDACIVLGDLRGIRSRARGRRMNRIVANMPYFKLSNYIAYKAAWEGIPVYRVKEAWTSKTCHRCGHMGERVSQGLLVCPSCGLVYNADLNGAINIAKRFSSYMQENGASLAMPVNSPRGRRWTR

SEQ ID NO: 47999 - protein, 428 aa, Haloferax sp.
VAGIIRTVKVKLDVPTERCDDLHQTKDQFLHCANRTADWAWRHPNGYCVTSYLDAHSALYQPLREETELVANLVQKGIQRGIEATKSGVVRLKKGDKASQPHFRAWSIVYDKRSATFHRDYVSLATVNGRVECDYVIPKEPDGTPIGKYLLNEDFEFRMSTLQYDKSTESFYLHARMMRATDEIESAMAQSTDTKHQTVLGVDLNVDGSLAVTSTGVFIGNADEMNHRQREFEKTRSSMHQTGTRSAHLTIQSMSNREHRWMQDELHRTSNQILEEAATYDCTHIAFENLTDIRKRMGGMKRFHAWAFRRLYQYVTFKAEVLDVEVRQINPVYTSQRCSKCGFTHKSNRQSKHQFVCQKCRYELNADYNASKNIAHNLVKELQSGQKSSSGGAPSQCALASGTLNLNGEFNAFSVAEIEGESTDKPAK

SEQ ID NO: 48000 - protein, 229 aa, unknown
  TnpB Polypeptide
LPSNGQNVGIDLGITDFATLSNGEKVKSPKPLKKQLKRLRRLQQNLSRKQKGSKRREVARKKLARLHAKISDTRNDFLHKLSTKIIRENQTIVLEDLNVSGMVKNRKLARAISDLGWQYFRTMLEAKSVMYGRDFRVIDRWTPTSQTCSCCSFRGGKKELNVREWICLNCGTFHDRDINAAVNILVAGGLSETLNGRGEKVSLSAKKAHLGEASTLPAFQQLSIFDLLK

SEQ ID NO: 48001 - protein, 386 aa, unknown
  TnpB Polypeptide
MEKQYKFRIYPTKEQESQIQKNFGCVRFVFNHYLKMRIDSHQNEQKLMSLNECCRHMTNLKKQPNYEWLAEADDNALRYALRDLDFAYKAFFRAVKQKGSFTGHPKFKSKRETRQSYRSKNNIVRRSIDVYEKKIKLPKLGNVKCKVSKEVEGRILFATITQVPSGKYFVSVCCTEVEPTPLTKTKAATGIHTGIRTLASLSNGQRFENIRAFEKSRGKIARLQRQLSRKPKDSKNREKARLKLARAYEKAANQKNDFIHKLTTQLTRDYDLICVRDEPFADKIKQPWYAKYAPNAGCSTFVRQLEYKCNWYGKELIKVDSRHPSVQLCSACGHKNPETKLKRTSQKWTCPKCSAQHHRATNAAANILNEGIVRRGTPEVKPDESA

SEQ ID NO: 48002 - protein, 367 aa, unknown
  TnpB Polypeptide
LKRTVKLESDPLNKWKYHVLREVEEYQKKIVNEMIEIILSEALPTTKKKLHERFYSDYKEKYPFLPSRVIEGAYVVAGRIVKSFRERRKRGLTRKDKPEYKKVLITIPNMINWRFNRVFISVLTHKGWVDIPLRFTKQFTRYVYEGWMVSQELKLRLVGRKVLVWLTFEKEVEVETKDGNYISIDVNENNVTLVVFEGFRLRELRRYETGLGRIVMNYSLRREEITKGHSTKDELIKKKLRKLREKERKIDVLRKTVKRIVELARDLKAKVVVGKFSSKVKDKMEGNKTAKLRHRIHQWSVIKFVDMLKTQPIDVDEVSESYTSSISPFNDEKLKKRKQVVEKVIRVFNPYLMTALLTRVGVLEFSR

SEQ ID NO: 48003 - protein, 390 aa, unknown
  TnpB Polypeptide
MLKKVVWYMEKIMKGYIFRLYPNDKQIDLIEKSFGCSRYIYNYFLEKNKNYINSYQAIKEIPNLIKENNWLSKVDSCLLRCSIFNLEDSFKRYKNKLSSYPKFKSKIKSILSYRTNNITSTYKGKTYNSISIDLNKRIIKLPKLKEVKIRGYRNIKEINGRIINATIKRQANKYYVSICVEELITIPKIIPTKIIGIDLGIKDLIITSDGETIENKHIIEKYERKIKGLNRWLSRSKPGSKNRYKIIKKLQTVYKKIKNARKYLLHRISNKIVKENDVIVTEKLQIQEMVQNKNLSKQIYDASWHELIRQLEYKSKWKNKQFYQIETYYPSSQICNRCGYQNKKTKDLTIRKWECPNCTSNNERDINASINIMFEGMKLYMKKENELQVS

SEQ ID NO: 48004 - protein, 370 aa, unknown
  TnpB Polypeptide
  misc_feature (160)..(166): Xaa can be any naturally occurring amino acid
MHSKIRVVLIGAGNVTKHVVKGIYENVKPWHQSVGSYDVSDIEVVGAFDVDERKVGKSLRELYKTGPDVLIKPSVFFSDEISREMAANIKLVKTDETAFKNEIKKVGADQVINLINSGQQMASELIAKVSAEAGSSFINATPALIAQKERILSEFINRKXXXXXXXKILAKYSKRERNRAKKHQLEIARVIQSVAGVIGLEELSKQGMYTRSRLWNRMISRSDWRSISRILTKRISEAKVKELDPYGSSSYCSRCGRENKGLNGAVFECCRCGLRIDRQLNAAINLYMRLKFGYTTNWDGKKKSVELRMEGASQKEWWDNVVLLSLLGGCVLTGAERKTPYELVRELHEVVKPKLYAYDRYADAYLRAPT

SEQ ID NO: 48005 - protein, 422 aa, unknown
  TnpB Polypeptide
MQLAERHIIKSTEHRFAEIDELAFKSKNLYNAANYVIRQNFIYGWGYVNYNEMNRLMKFHEAYKALPAKVSQQILMVLDKNWKSFFEATKAYKADSSKFTGRPKLPKYKDKVKGRNLLVYTIQAISSKQLKKGIVKFSGTNLSINTKIEPDRIYQVRLVPKCDSYVIEVIYDEPESTASDDKFVASIDLGLNNLVALTSNQPGFTPLLINGRLLKSINQFYNKRKARLQSQLKGLRKSSPRIQRLTRCRHQKIDNYLHHTSRLIVDLLVKKQIGTLVIGKNAQWKTEINLGKQTNQNFVSIPHTRLIEMLEYKARLVGIKVLQQEESYTSQSNFLGLDSIPVYEKTDRNAVFTGKRIKRGLYRTSVGQLINSDVNGSYNILRKAIPNAFSNGIGSCVVQPRRVNPLKVQAKGEGLNASHVMS

SEQ ID NO: 48006 - protein, 416 aa, unknown
  TnpB Polypeptide
MEYSHRYPAYPTQKVAAGLDSHIDIHRQAYNYTLYEYENVDVDDIGSAYKHHYRLTDWKDEFPVFAEVNSKALQRTVTRFYQNLNGLSEQKQNGRKVGKLKWKSPQEFQSMTYSQSGFELKNTSGRRATLWLSKIGDIPIRYHREIPDEADIKEVTVKKESTSDWFVSFGLETDEADLPEKPPVDSLDASNSVGVDLGIQNYIHTSDGKIVDWIDLEDEYDRLRHEQRKLSRKEKGSNNYEKQRREVATVKRHIRRKVLDYQHKITTWLVREYDAVFVEDLDVKGMLEQSQNARNKQDAAWRQFITLLEYKADLYGCHVVQVEAPGTTKECAKCNVETAKPIWIREHSCPSCGLECDRDANAAMNVLKRGFSELGLGWPKDTPVETALPTDTHSVSAKRVIETGSPTLNEAAPAAE

SEQ ID NO: 48007 - protein, 397 aa, unknown
  TnpB Polypeptide
MQRAVKIRLLPTKEQEILFWKSAGTARWAYNYFLDANEQAYKKWLENGKSGKKSISEGEVRKYINNVLKKTTHTWLKEVGSNVMKQGVKDANLALQRYFKGISGKPKFKSRRKSKISFYVNYESLVRKPNGFHGEKIGFVKTATALPKISKDKKYANPHISFDGKHWYLSVGYEVEQEKVELTGESLGIDLGVKELAIVSNEDASRTKFYKNINKSAEVRRLEKKLRREQRKASRKLEANTKSRDKNRRPIWKRPLRECRNIQRQNNKIQLLHKRLTDIRTNYLHQTTVEIVKTKPSQIVMEDLNVKGMMKNKHLAEAIAKQKFYEFKRQIQYKAEMYGIKVVEVDRFYASSKTCSHCGHLKKDLKLSDRTYVCPVCGANLDRDLNAAINLANYKTA

SEQ ID NO: 48008 - protein, 415 aa, unknown
  TnpB Polypeptide
MNREKVYKKVNGKKNMVVRAYKFRLYPTKAQAKEMQTHLWLSKNLWNDGLELAKQLYEDYQKFPTRSTYQEISKNSGLHSQVAQDVFIRLYLALKAKIRRKKMGLKGGFPRFKSIDRVKSLHYPQSGFSLKERKLKVSPFGEINVKKHREVEGTIKTLTLKKESSDKWYAILTAETESVHTPKKEGEKVGIDLGLMTFATISNGEQIKKPKHMRIYEDRLADVQRDLSKKKLRSRNRRKAKLKVARVYAKVADIRKDWLHKTTNNLLSRYSMIALEDLDVQGIAEEHGKGVSDAGWSTFTNIISYKAESAGCEVVFVNPKNTSKDCSRCGICVPKELWERQHNCSSCGLSIDRDLNAAINILKRATLGTSIRSQDSSEHTLTATVGMTGSNACEDGTIVSSMKQEAVTSAQARLG

SEQ ID NO: 48009 - protein, 400 aa, Thermus sp.
MFCATKVYNGLMWHLRQELKEKGKVDLRRSTLNRTLKTLPRAKGYYSLSVQLTRDEVIQAYRSFFALKKNGGTEHHAPRFRPKSTLSPLKYVQSGFKLEGDRLTLSLGKGREDGVRQVSFRIHHRPGVEYERVREVSIIYDKGSGQFEARLVVEVKARGNHGQGRVAVDLGETVLLAAAFEDGTVLLYSGRFIKAARRYWQKVRARVKPPSQENPRMSRRFRQIARKESRQVGHLLHLATSHFIRECVQRGVKEIVIGNLTGIREGMDYGPRVNQRLHAWPYRKILHMLRYKAALVGITVRNDVEERGTSRTCHACGQVRKANRVHRGLYRCSCGWTAQADVNAALNIYERAFHVSPVKGSSGRVARPVVLSFRLGWHTVRHGRSPYLGEPKRKECLRAS

SEQ ID NO: 48010 - protein, 174 aa, Salmonella sp.
MPPGGTLFRAFAGLKDLFVTDTGFRSGNPRHTAKYAARLAPLQRRLSKKAKGSKNRARARLKVARLHAKIADCRQDALHKATRELINDNQVVCVESLKVENLIRNPSQFKATADAGWSELVRQLRYKGEWGGRSVVAIDQFFPSSKRCRCCGITMKKNAAGCSEMAVPGMRRRP

SEQ ID NO: 48011 - protein, 400 aa, unknown
  TnpB Polypeptide
VNRTYLYRLYPSRAQERVLFAWFWRCCEIYNAALQERQEAWRKQRVSISRIDQEKQVPVIRAERHEFESIPVAVLRGVLRRLDRAFTAFFRRCKSGEKPGFPRYRAARRWRTIEIDDLKKNPIVSGGKRVQIPLMGLVKFKQHRPLEGRPKVMRIVLKNGRWYVAITCTGVAPKPLPATGKFVGVDVGLTHFAVTSDGQFFENPRPLDSARLCLERAQRRVTRRKNLKSQRRRRAACLLARHHERVANIRRENCIRVARALVQQFDRIIVEDINIPALLRDHPERARAILDAGWATFIYWLYVKAESAGREVTKVNPAWTSCTCSECGWRGPRLPLTTRMFVCGSCGFSCDRDLNAARNILRLGTSPRGAAHQRRSAKSAANGGPGHARPLVTRIARSGS

SEQ ID NO: 48012 - protein, 330 aa, unknown
  TnpB Polypeptide
MASAVNYVWNYCNETSSYAIYRDYRFLSGFDLNNLTAGSSKELGISSTTIQEICSEYATRRKQFKKRKLRWRSYKRNLGWIPFKASAVRVIAGEARYHGVKLKFWNSREFPIGSKIKTGSFCQDSRNRWYVNLVLEIPETANNNAGLPAVGIDLGLKTLATLSDGTKVEAPRIFRRHEQALGMAQRARKKRRAKTIHAKIVNSRKDFLHKETTKLANKYKGFYVGNVSSKKLSRTKLAKSVSDASWANFKTLLEYKAIGLGKVFAEIDEKFSSVTCSVCFTRSGPSGLSALGVREWVCNSCGVVHDRDINAAENILRLGHETLIKGILGL

SEQ ID NO: 48013 - protein, 510 aa, unknown
  TnpB Polypeptide
MAKATTTIIQRLNYQPQHAAAFAANQALFNSVVAFYFDVIQAHEQILKLGSMDAMRALEQLTHATDKHPHPVMPLSEVCPDVPAMFRRAAINAALGSAKSFYGNLKRWRTRKEKAEARGKQFTDRPPVPPRTWKKSVSFYAGVWRQRTENSILLKVWTGSCWSWVKVRISGRELPEGYALGSPQLIQHGKEWRLHTPIEKAFEAPLKVEEQVKNQAETKICAVDLNLGEQIAVCTVQNAEGTILATRFLGGGDAITGFRKRQLGRIAQNRRKTGITALGEQDNVARFQKLRNRNDDEAHRISRRIVQFAVAQGASIIVFEHLGNLKPEKGKYSRRGNMKRAYWMKGRIFRYTKYKAWHERIITSRVNPRNTSRQCARCGGSVIRYAACGWHPQSGYTVGAPLVLCPVCQMRGHADRNASLNIGKRLLARYQPQTSSSPSQEKPRARRVRSGRVVKATGVIVSQDAQHQREPSLSQARHGDRHEHGTAQQETLWMDERPASLPTQLRLFNE

SEQ ID NO: 48014 - protein, 316 aa, Symploca sp.
MYKSNGKRSGKPRFKAKHRYRTFAFPRVKSEGLQANRVTLPKLGDIKYIKHRPIPEGCSVKRACVTKKADGFYITLTLEDKSVPDKPTIALKPTETNSIGIDAGLEYFAACSDGTMIEPPKFFRKSEDGLAKLQRKRDSRKKGSTATRKLNSRIAKLHQRIARQRKQWHFELANSLIDKASVLFVEDLKVSNMTRRNKPKQDADGKFLPNGQASKSGRNKSFADAGIAGFLTEVLPYKAEKAGRLVVKVNPAGTSQHCAMCLSRVPKELSDRWHECACGASMPRDLNSGILIKKVGFGVASLKKANPLAPEEKPTP

SEQ ID NO: 48015 - protein, 557 aa, Bacillus sp.
MKKTYFSQRVYKHTLPPGFVNEVSYVLKVFNRAKHVSFQTLVREKRWSRKLHDESLQTVLKKRFGLTDYYANSARQEATALFSAVTELQTLYLQQTDEKIKDIKKKLKSERSTLTRMRKIKESFVKGNPTFPKNSPFILQGSGIISLSLQKKTIIWLTTYSFEHRCLDRKIKHTKAKIGRLQHRLDRLRQKKDKLKEHIPSAVFGTKQLFKYQFTKEEFAENHEAWKKLFCAARNKRMMISGRKDAWCGNFVFQYNMKKQELSFTSMSGKVLTFPFVMFPYGQDIVNDVVSAQIACKQKKQYGKPITWSIEDHGVYYIVKCMADVEADYSINFSTSDGVIGVDCNYDHLAWANVSKDGNYLESGILAYSLEGKSSGAITKIIEAEAIRLVDLAVQKNKPLVLEKLDTTLSKTGNKYGSKKRNRRKSMFAYRKMMEAIRSRADKMGVEVIEVHPAYTSISGKWKYMRKFGISIHQAAAFTIGRRGLGYKEKVPTVLKTYMAQSNIHHWKQWSTWNKKLCIRTHALYTLFDVNRPHQGMELSSTWLTEEERNVLRRVLA

SEQ ID NO: 48016 - protein, 683 aa, unknown
  TnpB Polypeptide
MSGIANEVNEINKEATVNQAKTAKAELSKTTAATPRVIRNFTYELHDVEDIFTSKISFFLKELNKQLNALLNSNIYTENKEKLDKVLKSKGEFRKELLRLLKSTDFYQKYYFEAKVFGNKAKYFRTVIEEYRRILLSRLHRQTIIDMIVKNPTITYQEVFNKLCELNEQRSGSDYKFNWISKAEFNNIIKQLKNSTSDAGVAEVAKLTTTIDNLPSVSEVEANEVSVTQTIDTYAIDYSSEDDQISEFNLTDNDEYYLIEFKLKYSDYTTQSDSLLTYSCKVPKKQIKGLTTGYTKLKKFTRPRIFLNDNKLYISFNYELSVGSEAGAAQINRTDRKDSVDHTWQFKTMGIDIGVAKSATAAIMTTNMCWQVVEGGEASEQPAKTTLGSGEQWNSPADIKLVPAIDITKPVAISNELTISDKTKAVSEHIEILKNEQNHIYKKEQAIYDLLKLKQFDGNANFAEKLTSVNADELVNLAKAAQLGNDTASPLRSLDLPLLYKYQRLNKHRLHLRSKVSNLKKELSFLTARDMISHAIDNNVDLIALEKLSWISDEHHTTWDYNQIQQRIIHEANIYGIKVKKVSCAYSSAHNPLTLEKDEVDQNRTLIKCLFDRDYAAAIILARRGVKLGKRKLKLRPVSLSPASHINDSFQAVSCSIKPSLKYRQLKLCEQKSIMSVRYYSIL

SEQ ID NO: 48017 - protein, 387 aa, unknown
  TnpB Polypeptide
MRRLLKSFKTEINPTEEQKIKIHKTIGTCRYIYNFYLFHNKERYDVGERFMSGKSFSVWLNNEYLPGHPEYSWIRGVSSKSVKNAIENACTAFSRFFHHQSSFPRYKKKGRSDVKMYFVKNNPKDCLCERHRIKIPTLGWVRLKEKGYIPTSKDGYVIRSGAVSMKAGRYYVSALVDIPAPEADGNFTDGIGIDLGLKDFAVVSNGTVYRNINKTARIRKPEKQLRRAQRKLSRKYENLKKGESTQRANIRKQNLKVQKLHHRIENIRTDHINKTISEIVKTKPSHITIEDLNVSGMMKNRHLSKAAASQKFYEFRTKLKAKCAEYGIELRVADRWYPSSKTCHCCGCIKKDLKLSDRIYRCACGYIEDRDLNAALNLRDAETYEVA

SEQ ID NO: 48018 - protein, 500 aa, Lachnoclostridium sp.
LYVIRLSIKQTEYFDALADKRFALINKCHNIMVKRSIHLLNRLKHDKQYQSLLDAYHKADAGSKEAKAIGKQMNAYRESIGLSKSGLEAYIKVWQKQHSDHISSHQAQKEAQRVMSGVDKVIFGNGRQLHFRKLSQTTTLCSKSPNNGVAFDRESMTFRWMKDTFSLKPIDNDDLYMIQALYPDGTEPLSISYCEIKRMMFPNGWHYYLNIYVKGTVPQKHVIGTGKAGIDPGTSTMAVSAERKAILRELAPKTNDYAKRLKRTLKAMDRSRRDSNPDNYDSDGRPIKGRKVWHKSKRCKELCRKYQSLCRQKALYIRQSHCILANEVLEQADNIIVEHMDYRGLQHRSKNTERQDKATVINNRKGKRQVVYKYKRKKRFGKSLGNKAPSEFLTILKQKLDAADGQYNEIDTKAFKASQYNHADDTYTKVSLGTRFKVIDGMKVQRDLYSAFLIQHSNSTLDAPDRRACIIDFKTFVELQDNEIQYLKASGQTRPECFGF

SEQ ID NO: 48019 - protein, 399 aa, unknown
  TnpB Polypeptide
MKAYEYRIYPTSQQEEIFNQTLGLCRLYWNIVVFNKNQDHNMQIESYKQIFTKYKPEALEWSKEAACSIPLAQMWSDVRAAYTNFFKNCKGERKGKFSKPPKFKSKKNPKDSFRYSCSNCTPKIDENGLYLTKKLGYIDIRASCRFAQGKWKNITFKRTATGKWFVKICVEKKDEPKNNNKKIVAIDWNCRDEDFLVRSDGVKIKCPRYLQKSQKQLKHWQKIMSKRYQKSIETQSSNYEKAKRKVALLHEHVSWQRKDWLHKESRKLCDEFETVVIEDINLQTMAKMNHGTVIGDQGFGMFRDMLSYKGHLEKVNPKNTSKTCHVCGYVNPKVKVGVNYWKCPICGESHDRDINAALNILHKYVTSQSIVGWELTEITNADGEPRSSVKSENELTSTF

SEQ ID NO: 48020 - protein, 280 aa, Moorea sp.
MQRAFKTKLKLNNKQKTLMAQHAGYSRWLWNWALNLWKEAYKAGLKPSANKLKKFYTHHVKPQYTWQSTLSSRVYQFAFMHLGEAFSRFFQGIAQHPKFKKKGRNDSFTLDNCGKLMKFSGTRLKLPFLGWVSTYEPIPEIQTKRITISRVADYWYISLAYEFEPEYTPKSREYLGVDVGIKVLATCSDGTVFPNPRAYKQAQKKLTRLQRELSRKKVGSVNRKKTKLRLAKTHQHIANIRKDAIHKLTSWLCKNHAVIGLEDLNVSGMLKNHKERGCHC

SEQ ID NO: 48021 - protein, 377 aa, Lactobacillus sp.
MVLAGVKLRIYPNQVQQLKIKLNFGYNRFVWNQMLNMLIKRHENNPQAPLPNAFALNNLLPALKTEYPWLKAAESTSLQATNHDLITAYQRFFQSRHGFPKFKSRKFPKQSYQSWMGIKLIDERHLKLPKLGVVRCSGRQVAGKIKNVTIRLSATGKFYAILLVDTEIEQLAKTGKKVGIDLGVTDLMITSDGVKYPTIRFDKQLSQRKHYWEKRLARRRRQAQQVIAWEKHNRVLVPRDLGDFRNYQQAKRMAAKYAEKIANQRQNYLHHLTKKLVEQSDVIKIEDLKTKDLLKNHKLARAIANQAWRALRSQLAYKCEWYGKQLITVNPRKTSQVCSNCHYDDGHHALDIREWTCPNCGTNHDRDINAAKNILSA

SEQ ID NO: 48022 - protein, 479 aa, Salirhabdus sp.
MSLTYCRKIQVKFSKNDSFILDGQSKICNWFYNQLLTICKEDYETNNNSLRLLEGRNLRNYGVSLKNKYPFLNSVFSSVLKEASTRLLKAYKSYFNNNASYPKYRSWKKAWFSLVYDEPYKGWNILNNGRNISISLGNIPGLERKKGKKNPSVIGKLREKLQLDDGEIMKNLRICKEYGNQFFAIFTIERCSIKEIEFKKSMSLYRKNYNQAKLENKELPKKPKYVEEKVVIPTNLKWIALDPNHKNFFAGIDYKGDSIEFSNIKMIRYWDNIIDILKARRDLCEKKYRIRETQYLNTYTVHSPRWNRINDALNRAYNKRREQIKTALYSIAHSLYRKYDLVIIGDYTPSNKSASYSNMKRSMLNQGKIGEFRRILEWIAVKQKKYYLKIDEHNTTKKCCVCGDSEKKEPNIRTFICKNCGTEILRDINSSVNIAQKAGYILDTTIYKEKLNHFTYKGEATFGKKNSWIKNNNYLPRSG

SEQ ID NO: 48023 - protein, 396 aa, unknown
  TnpB Polypeptide
MKVVETLKVMGLPEESNELLKFLKAFRDYTQYIIDQIWNEKNLPSVKTLHRRFYHELRSKGFRAHHVKQIYYHARCVVKAVKRVKGNKPVSRKLTARIDKYDYKLDLENQELIVKVLGGREVKVKLVAPKERFIKYKNWDNYELVIKYDGSRFWICIEFRRKVEYYNARSVLAIDVNFDNVTIFIKNSKRVIKIKRFSFPLRKALTHRIWIERIQKRYPRQWKYIKGIREAIRKHGRKIRNTINDSCHKIAEKITNTALKHGSLIVVENLKNLRINNKRSTRFNKKLTLWAYHKLLSYIEYEYMEKGIPLVKVNPRRTSKLCPKCNGKLASIKGRILKCNNCGFIGDRDVIACLNLISRCGVLGVTLNAPDQMQTQEGMKENKNEGMVPIIKCHKT

SEQ ID NO: 48024 - protein, 301 aa, Crocosphaera sp.
MPAKVSQQVLMILDRNWISFKESNLAYKESPSKFKGRPALPGYKHKIKGRNVVVYTAQAIRKKQFKRGIINPSKTEIYLKTKVDTSNKTCSWRGNLAELPCSKIKQVRLVPRLNHYIIEVIYEADQQQYELEENRYASIDIGLNNLATLTFNQAGIKPLLINGRPLKSINQYYNKVKSELQSLLGENKSSQKLRKLCNKREFKINDYLHKASRLIIDTLINKKIGTLIIGHNTDWKQKINLGKRNNQNFIFIPYNKLIEMLSYKAEMVGIKVIFTEEYYTSKASFLDNDPIPVYQKGKKIK

SEQ ID NO: 48025 - protein, 308 aa, unknown
  TnpB Polypeptide
VWEELAEIPDAKRRFNAAEHLVHTTKKNPARFDFDLRFPKMPSYLRRAAIQHALGSVSSYETRMDLWEKSGEQAGKPRLAYENHAMPVFYRDVMYREEKEGKDEAYLKLYDGHDWKWFCVRLNHTDMEYLRRNWSGKKASAPTLEKRHHKYFLRFSYTEEVTLTKTPVKEQIICSVDLGINTDAVCTIMRADGTVLGRKFINHPSEKDRMYRTLGRIRRSQREHGSAQTQGRWAYTKRLNTELGKKTAGAIVRYAEENHADVIVFEYLEMQGKISGKKKQKLHLWRKRDIQRRCEHQAHRKRAFNVSY

SEQ ID NO: 48026 - protein, 446 aa, unknown
  TnpB Polypeptide
MLSIVPVNSVMQPPLSKSIIVAARGLPPLGGRGIVAYLLFLQKLCDMWYTLSMDRTIRMQLQPSNEQTEALHETVSQFTQVFNAVCRTGWQQGTGNAYTLHRLTYRDCKTVLPNLVSDLHIQAIHKASEAVRSAITRLKKGRKTQCPQSIACPPRYNLHTFKIYWDKGFISLSTSHGRMKIPFNLPEYAQYAAGYPTATADLIYRKGHFYLHTVIILTDVAFISNNHAIGVDLGVTRPAVTSDNRFHGNRHTKEVIKRIFRLRRELQAKGTKSAKRHLRSLAGHEQRFRRDCDHVLSASILNGIEPGTTIVVENLTNIRSRVKARRGEAKRRLHSWSFAQLKGFLEYKAEAIGCQVIAVDPRHTSQRCNRCGFTYRGNRRSQSDFLCRKCGFHLNADLQASRNIRDKYLVGWSTSPSDAPPSTGVSSHLPPVGSGRDKLPALAGSG

SEQ ID NO: 48027 - protein, 274 aa, unknown
  TnpB Polypeptide
MMLWISKKISKPQPYKPRDVIAVDINERKIVYGDDRINKEMDTKIGEAHRWKKLTENLQKKYSSPRYPAWRRRRGILNRIRSYHRKARNILEDWARKTSLEIVRLAKKLGYAIAREDLTVLINSLRKIKNKDHRKKLIIMGYKRLGKWIDWNAKKQGVPLAIVNPSGTSSECPKCGSKGLKEVDYRRLRCPRCGFEGDRDVIGKLNIRKRALKKLRINPPGGVLTTPTAPQMTDVNPNRWGTDEPPTKGQGNPRPFKAGRRSERETPSLRENSF

SEQ ID NO: 48028 - protein, 464 aa, Lactobacillus sp.
MLKLPKTTEYIRVRRYRLVATTDLVAKFERNIEVENKIYNYVLKYLEKTYGVKNLKRPYPTNKNAKLFLAKDVLIPKILKDLYGLSKWDGKKVGIHSQALRDEYLVSILTNFGEYRKNLISASKMSKQNKKDYQNNLHGNNPKHKSWYRKGSLNYLRPNQSKNCVSLPSNGQAKIISAHFIKIQDYGTIQVVENIKNMKNTKIVTTKIKRKANGQFELQIVFKTINERKGIVNMIGADWNMKNNKIWHTSDNDELYLSKNVSDKADKLEAEINKLKSQRDLITWLPQKSQRITKLNEDIRYLSSKRSHVLTAEYNRMAKELFTKNDLVAIENLNAKEMRKRNQINVKQNKAKNRKLAKIKPYEMGRLLIQMANRLGKTVILVDSYKTSQVEYGTKYQEKHDVNDRKWVSKHTGAIIERDLNASRNILAWALNPKEHIKYKESLKLYKEGKIKASIKPLNLITVN

SEQ ID NO: 48029 - protein, 191 aa, Marinithermofilum sp.
LGVKHLAVTSDEEYFDHPKYLRKTERKLKWLQRMVSRRKMGSNRWRKAALMLAKCHEYIANQRKDAAHKISRYLVDHYDWIAFEDLNIRGMVKNHHLAKSIVDAGWRMLVQFTAYKAEWAGKQLIAVDPRNTSQVCSECGRIVKKTLKERTHRCSCGYVVDRDVNAARNILHKAIGYVPEPRYGQLELNLF

SEQ ID NO: 48030 - protein, 420 aa, Coleofasciculus sp.
MRHQAIKVRLYPTTEQQVILAQHFGCSRWWWNHALNLCIETYQLTGKGLSQSALNAFLPKLKKQERTEWLSECYSQVLQATTLNLVTAYRNFFEGRAKYPRFKAKKNKQSIQYPQSVKVVDDCLKFPGRVGVVKAKIHRPIEGTIKTVTVSMTPSGKYFASILMELEGNNPPTNTDGKVAGIDLGLKDFAIVNDGCKTSKYANPKHLAKHERNLKRKQRKLDRKEKGSKSRNKARKRVAMVHERVSNVRQDYLHKLSRKLVDDNQVIVVESLNTKGMVRNHKLAKAISDVGWGMFVNFLSYKLEKEGKVLVEIDRWFPSSKLCSSCHYQVNEMPLEVRTWTCPNCGTHHDRDGNASANIRAEGIRMLRQAQQHLSVSGTGTAAVGVACAKRIGGEVRPKLGRKSKLRHSPMKSEAPASTK

SEQ ID NO: 48031 - protein, 430 aa, Coleofasciculus sp.
MLTFNYRYRIYPDAAQEQRLIEWMEICRRAYNYALGEIKDWCNSRKCLIDRCSRVHEYIIPAETPFPGEVRQLNNLPKAKKEFPKLKEVPSQVLQQTIKQLHKGWDYFKSRGFGFPRFKKVGQFKSLLFPQFKENPVTNLHVKLPKLGTIPINLHRPIPSGFTVKQVRILCKADKWYASINIQCNVSVPDPKPHGHPIGVDIGLEKFLATSDGVVVKPPKFLKKLQSKLRLLQRRLSRKQKRSKNHEKQRLKVARLHHHIDNIRKDFHFKQAHALCDAGDMVFMEDLDYRVSAKGMLGKQMLDGGFGQFRTITQYVCWKRGKFFGVVDARGTSQECPECKGEVKKDLSVRVHDCPHCGYKTDRDVASGQVIRNRGIELIGTAGLAEKETACAVDLPGVGENQPRQVAQSPELRQAQLPRSRRGVTRKSSK

SEQ ID NO: 48032 - protein, 401 aa, unknown
  TnpB Polypeptide
MQRTNVIQLMPSKRQKKILRECMLLSSSVYNQANFIVRQQFFSDEKVSSFFDLQKRVQNNDDYKMLGRSYALPRLQVYGETNSARFKLIKSKCQKRVGLPKYLKNRKTNTTIPSYLVVDGCQYSIKKNYVIIPLSRKMRKKYSPGKQFRVKYNGVLNHKGKQLRGQIKFKDGNFYFHQVVEVNNSKRVESNIQAGLDLGIKKLLTIYINNGEDKIIGNNRFYKQWVYYTKLIANKKSELAKVNRKSSNSLHRLFRIRKKWQDNLFNNLVAKMFRVLKKNNVSTLVVGDLKNIRDSKSKGRIVNQMINNYWSFDILLKKVDNKSEEFGIELVKETEEYTSRTCPICGDRSKSNCKDRIFICSYCGFVEHRDVIGARNILTKSMYGSLQSIHWNEVVPLEVSV

SEQ ID NO: 48033 - protein, 438 aa, unknown
  TnpB Polypeptide
VRIVAHGTVWFDELTEQRVLELMRAQSSASRSAYQAIHKHHLVGNDVKKYVKKNYMTLLNQRYIADAVSRVAAIENDKVVFGGRKLWDDLISGDIAAEEWRQQRNDQLYSRGDRTKDGNPNLRVVGDKLLVNDPENRGKWLEGKLFIPEKWKPSLACYEVRLLYLTGRFEVKVSWEELDPPKMQTHGGAIGVDINPDGVAVCGVSSDGNLLEHHYDKAQRIQFAEKGKRDHDVKELAKTVVAQAKQIGKQLVIEKLSFKQRKAARKFQRTKHNFLHRQITQAVKLRAVKEGVPVVEVNPACTSILGQLKYQKPFPLNRHTAAALVIARRGMGFLERRDFTCAPEDSENSRLNLEGRGFETALTWKAYSFLVACGLKKKSARLTASELAAGSRPATDSSTGETPVGESNSTTGRVGSVREEILSFFQGDERLPSRLGAG

SEQ ID NO: 48034 - protein, 441 aa, Clostridiales sp.
MRSVLSYAVEIRPLDFQIRDTVTIYRDAVSFLIDIVEKVWTGLSKLDGSLRRVNATEHLIHTTKKNLAKYPDFDIRFYKFPSYLRRGAISAAIGSVSSYHSNYQRWLDKGKNGNPPKLTLERDLCPCFYRVDMFKGDLGSDEACIKVFVHNDWVWRPIRLKHTDMQFLRRYWTGVNCSAPVLERKRGKWSLRFTFTQTVKLSETPIEGQRILSVDLGLNTDAVCTIMEADGTILGRKFIDFPGDKDRLSHELNRLKKFQRMHGSHNSKSRWRRIRSLNEELARKIGHAIADYAAGACCDAIVFEHLDMKGKIRGKSKRQKIHLWRKNGIQQVTETRAHRYGLHVYHVCARNTSRLAFDGSGYLVRDKNNHALSVFKNGKPYNCDLSASYNIGARYFVRELLKPLPETARSQIRANVPGAEHRTSCTYHTLLQTAEELRRLA

SEQ ID NO: 48035 - protein, 394 aa, unknown
  TnpB Polypeptide
MLLAHKIALDPNAEQRLYFVRAAGTARFAWNWALAEWKRQYKAGERPTEVSLRRQLNAIKREQFPWMYDVTKAAAQEAIIDLGSAFRAFFEKRCRYPRFKRKDDRASFCAANEVGTFRTNGKRIKLPVIGWVKMREAVRFTGPLKRATVSCEAGRWFVALQIETDDVKPVTQPEAEVGIDLGVSALATLSTGEIIVGPKSHAVALKQLRCASRAFSRKRRGSANARKAKARLARVQRCIANIRRDATHKLTTRVTKTFAVIGIEDLDVRGMLRNRRLARSIADGGFYELRRQIDYKARLYGARVIVVDRWYPSSKTCSCCGVTKETLALAERTFRCDDCSFEIARDINAARNLARLAASSAVSACGVERAGPIRKNRVKRSQKQEESPVLSQAA

SEQ ID NO: 48036 - protein, 224 aa, unknown
  TnpB Polypeptide
MLADKIRYYQEEKKMLKNTPAGYKKEYPWLKEVDSLALANVQLNLEGAFRKFFREPGVGFPHYKSKKHSRKSYTTNMVNGNICLQDRFLKLPKMQPVKIKLHRMIPEGWKLKSVTVSREPSGKYFASLLFDCENQTAEKRQAKKFLGIDFAMLGYKLEERGKYLIKVDRYFGSSKICSVCGHKKKELALSERTYLCECGNRMDRDVNAATNILEEGKRIYKKCV

SEQ ID NO: 48037 - protein, 479 aa, Clostridium sp.
MKAVLINETQEQKQIIDNMMLIFCTAVRYSFKRLLENKDKSDLEKIAAQKYNLNIRQAKDAVEAARQTIQSQKELVKMNHDDYDKKVKAIEKILNDKDKKLSDKKKNGLLSKLAKRQRKLDYWNEFIAANAIPSVIFGTKNMFLKRCKGLISNEEWKDCRNNRIYSRGDKSKKGNPNLRVIINNGMSFLEISTLEKTSTNRAIKIQVPVYLPQKLSKKTGKINGINYRQLFLNHLDTGEAYQVEMIKKNNKYYCHITFELPKTDVIYTGHNGVIGIDTNSNGFALAMIDNKGNYKWHSYLKQHELLYAKRNRRKNLCGELVKRVILLAKTCDCGIAIENLKFKNDEDVNSKFARIKNNFIYSKLLTMLESACYRESIELVKVHPAYTSKIGLYKYCHQYRMVVHNGAAMVIARRSYKFKERVPQILVDKYVENKYKDKFNYYNEWKKWSIIDKNIKKEGKVKRPDFWIANRKKLLRLTA

SEQ ID NO: 48038 - protein, 412 aa, Haladaptatus sp.
MKVRWTVQVKLEVTESDADLLHETIQQFRWAANYVVLNARNDDGYVETSKGKLNSRTYDDVRSETELHSNLVQAARSRAADALKSVVAKWKRGKNASLPYFSSPFLEYDKRSATFHDDHASLSTVGGRITADYVLPDDERETPHSEYLFSDDYETTGATLHYRDATDEFYLHVRTKADVNAPEPRENGTVLGVDLGVENIAVTSTGEFWSAAELDHWHREYEKRRASLQQCGSRDAHENMQAVGLKETGRFEQLLHRVSNELVEEADKNGCSHIAFEDLTDIRDRMSGANRLHAWAFRRLLSYVEYKAEERVISVQQVNPANTSRRCSSCGFTHEDNRSSQDTFECLKCSYANHADYNAAKNIGYRLLGKQTADEGGAPVGVRLNTGMMNANGVKTVPTLVRAGVHGECHGL

SEQ ID NO: 48039 - protein, 371 aa, unknown
  TnpB Polypeptide
MSRRTFKYRLYPNRRQREKLQATLEVCRELNNAALQERREAWSSHRKGIDYVEQAKQLPDIKAVREDVGAVHSQVLQDALRRIDKTFRAFFLRCQRGQVPGFPRFRSESRYDSFTYPQAGFKLSGRLSLSKIGDIKIKLHRAIQGQIKTLSLKRENGMWYACFSCMVEPEPLPANDRAVGLDVGLLSFVTWSDGQRMGNPRLFQKAQKRHRRAQRRVARREKFSKRWKKAVRLVAKIHRKVFNQRNDFQHQLSRKIVNNYGIIFVEDLNVKGLSRGRLAKSVQDAGWAAFFQKLSYKAESAGRRFASVDPRGTSQRCPCGEANPKRLSDREHVYLDCGLVTTRDHASAMEVLRLGLSLQPLTRGAVMLRLD

SEQ ID NO: 48040 - protein, 367 aa, unknown
  TnpB Polypeptide
MEYSYKFRIYPNAEQQTRIQKTFGCSRFVYNHFLAQRISEYKATGKSSTRFQQDKSLTVLKQEIAWLREPDKCALQNALKDLDTAYKNFFRSVKSGGKKGFPRFKSKRNRRKSYKTNSNIAISNSYVRLPKLGLVKCRISKEVKGRILSATVSQNPSGKYFVALCCTDVEVEPLPSTGAVVGLDMGIKSFAITSDGAEHPNHKFLAKSQKKLARLQRQLSRKSRGSNRREKARVRVARLYEKVTNQRSDTLHKLSTSLVRDYDLIAIEDLAPKNMVRNHKLARSISDASWGEFRRQLEYKAKWYGKQVVTVDRFYPSSQLCSSCGAQWHGTKDLSVREWTCPVCGTVHDRDHNAAVNILNEGLRLLA

SEQ ID NO: 48041 - protein, 597 aa, Streptomyces sp.
LVATATCTAFGGVVEGSGERVGQRLLYQRVSFLASLCQGLTGALVASRWDEDSLDVLAAGVDGQGRDLPCKGWMAMRRLDWAGDAVADEGVYVSDRVRRAAQEYAARTLRLALHRRTLVAAVLATWPADPARRTGAEWTALRALLPAGVSGAEIRNRTRQVRAHLAEHGKLPAGLCELEEPPQIAAQVLLAAMDRQQVTLERLGDTTARLWVKLPLCVTDGRPLIFDATAISAKLHRLRTHREHLAAKRDHYRALADGLGSPHLAWAELHRRAHVLEVEHVRVCDRIRRLNQALAWSAARWAVDQTTALGATVIYLEDLATLEARGRRRGNARLSGQVRGTVAEAIRHLAAKAGIAVVTVPARGTSALCPGCLRPLTHHPAPDRLDERGWTWACAHCHLSMDRDLAAARRIVSRGLLAQSHTTTDRTTGARTIRTVVEGPVHSVRRPKKTTRRLRRAHRQTAAPPRPSGPKTTPGKMRPTPARQSPARRSTTSRRTPDVRTVPATTPTGAVKRPAGHDTQTPTPHGRVPGHGVPVPSRPEPPPAGRVRLSRGTCRRRTSVAERTGFHHLHATEVHPLTPRFGPGTGDRTRPRRALKA

SEQ ID NO: 48042 - protein, 311 aa, Oceanobacillus sp.
LKEHYPFLKEVDSITLQKSVENLADAYQRYYRKQNKMPFFKSKKNKVQSYTTKQTNGNIAVLDHHIKLPKLGLVRFAKSREVDGQIMNATIRRNPSGKYFVSVLTETEVSELPKTNSSIGVDLGLKDFAILSDGMKYPNHRYFKSLEQKLMKAQRILSRRVIGSSNWKKQRVKVARIHEKIESKRTDFLHKTSTDIIKNHDVIGIESLQVSHMMKNKNNAKSIADVSWYQFKTMLKYKAEWYGKTVVEVSKTFPSSQLCSSCGYKNKDVKDLKLREWTCVCGAHHQRDINAGLNLRNEALRLLTAGTVGLA

SEQ ID NO: 48043 - protein, 403 aa, Cyanosarcina sp.
VQKAFKVTLIPSRNQEILINRTIGCARFVYNRFLARRKELYESEQKTLNYSGCSRELTQLKKEIEWLTEVDKFALQNSLRNLETAYKNFFADLKKPKQKRRSGFPKFKKKHGFKQSYKTNFTNGNIQLHDNYLKLPKLGWVRFHQSQEITGTLVNVTITRTTTGKYVASILCETEVEKYPHVDKSIGLDLGIKSYLVTSNSVEIENPKHYRRALKNIRKANKKLSRSVKGSNNRAKAKTKLAQVHERVANLRDDFLHKLSTRLIRDNSIICIEDLRVANMVKNHKLALSIADASWSKFVAMLEYKASWHDRIVQKVSPFFPSSQTCSCCDFVNPEVKDLSVREWNCLACNTHHLRDCTAAVNILREGLRLLTAAAGSTEALNACRDEVRLGDSQALVSEARIA

SEQ ID NO: 48044 - protein, 416 aa, Symploca sp.
MRTAYQYRLRPSRQQAAEIDRWLTMLCAQYNYLLADRFNWYEKNRSPVNACPLVCHLPELRINPDYYSQKKTLPQLKKDRPWYKDIYSQVLQDVVKRVKLTFERFLKGDSNGKRSGRPRFKPLSRYRTFTYPQIKQDCLQGKKINLPKLGKIKVIVHRPIPDGFKIKTVSISKKADGFYVTLSLEDKTIPEIKPDINLDSITGIDVGLKEFLTTSNGETVAIPQHYRKAQKRLRLIQKRVSRRQKGGSRRLKAIKLLSLQHQKVADKRKDFHFKTANQLLSQYDVIAHEDLNIKGLARTKLAKSVLDAGWSNFLSILTNKAEKAGLLVVPVSAHNTSLECSSCGEKVPKKLHIRWHNCPNCGCSLDRDHNAAINIKNRAVGHPVLKAQLMSDGIPGVTEKPTLTRSGSVGVCHCTS

SEQ ID NO: 48045 - protein, 405 aa, unknown
  TnpB Polypeptide
MWWRFSENVREGNVIKMVVRKVAQRIPFTPSKMQASLLEQCFGARRFAYNQQVEAFNTYDKETNPHPKYPSVADMKAANEWLRDSPIPSHALSNAIMDFRKTQAAYFRQAEYGKNRPRFASKSDAVQSFRNGLPIRRMDGNRYPLSKKLGSVRIRRRDRIRYPLEALSSWTVKRENGVYYLILLFNVDVQPKPTVNGKVGIDLGVKDFLTLSTGEKINYPDRLRQLEERVRWEQSKLSRRRKGSSNYRKQKAVVAKARAKVRHFREDFQHQLSHRLIEDNQFIGMENLAVQKMTRRAKKKLDENGKYAHNGQSRKRAMNRSILRNGLSGFVAKLAYKAQWYGRTFVQVDRFYPSSRLCHDCGHKYDELKLSEREWVCESCGASHDRDVNAALNILGEALRLSQVA

SEQ ID NO: 48046 - protein, 374 aa, unknown
  TnpB Polypeptide
MVLQMKKSFKYRLFVNKTQEAKLGEFLNSARFLYNCALEHRIVCWKQWRKSISLYDQTYTLKEIRTFDDGIKQLNFSASSNVLKNLDLAFQAFFRRVKQGEKPGFPRFKGADRFHSITFPAYGDGVKLKNGKLYIQNIGYVRIKLHRPIEGKIKTVTIKRQNGKFYAMFSCDEVPQNILPKSTKEIGIDVGIKSFAVMSDGKVIDNPKYLKQSETKIKVVQRKYSKKPSKTLRKKLVCLHTKVTNQRKDFQHKLSKQIIDEFGYIFIENLKPRNMVKGNFKVLNKYINDAAWSQFFGFLSYKAENAGRKLIKVNPKNTTQMCSGCGTIVPKDLSTRTHSCPDCGLQIDRDHNAAINILSRGRRVLLGKEAINLG

SEQ ID NO: 48047 - protein, 430 aa, unknown
  TnpB Polypeptide
MILTYCYRIKPSVEQEATMLYTLELLRRHWNYCLGQRLNWLKRTRCQIDRCSIISEPIGEIPSKVDYYTQQSDLKQTKVLFPDYKNIWSESQQVNLQRLNKAWERWLFPDKSGKRGGRPKFKKSGELRSFVYPRINCPKAGAYLNNGVLKLSKIGEMPVVLHRPIPEGFTLKTCTIVHKADGWYCCISMQDETVPEPIPLDEVKSAVGIDVGLKEFLTTSDGETVPIQQIYRKTQSHLAREQRKLARKEKGSNRSNRQKNKIARIHQRIGRIRENFHYNTAHKLVNNHDLIAVEDLNILGLARTKLSKSILDAAWGRFITILETVAVKCGVRVVKVSPYSTSQDCSRCGAKVPKTLSIRLHECHKCKLQMDRDENAARNILDRALNEVGLILSARGGLGDTQPVLALANVALASKREAFSGWDGVQLSLF

SEQ ID NO: 48048 - protein, 365 aa, unknown
  TnpB Polypeptide
VEKAYKFRIYPTKEQEIMFQKNFGCVRYVYNHYLEMRINKYKEDKSNMRYSQCSADLTQLKKSLVWLQDADSTSLQTALRSLDNAFLNFFSNKKFGYPKFKSKRKSRKSFTTKSASIKIVDNYINLPKVKLVKCKFSRKVEGKVLNATVSQSKSGKYYVSLCCRIENIPQFEPTNKSIGMDLGLKDFLITSDGTKFDNQKFLSKSERLLKRVQKKFSKSETNGKNHEKLRVRLAKRYERVSNQRKDYLHKLSTTLIKQYDIICLENLKVRNMVKNHRLAKSIQDVSWGEFVRMLQYKADWYGKYIQRVNTYYPSSQICSCCGYQNIDVKDLSVRSWVCPKCNRTHDRDINASINILNQGLKLLNA

SEQ ID NO: 48049 - protein, 174 aa, Bacillus sp.
MTPTGKYYVSILTEYEKEIVQREVETVVGLDFAMDQLYVSSEDERANYPKFYREMLDQLAKAQRVLSRRIKGSGRWNKQRIRVAKLHEKVANQRKNFLHHKSKELATHFDVVAIEDLNMKGISQALHFRKSVADNAWGMFTSFLAYKLNEQGKQLVKIDIFFTFPQKHVAVVEM

SEQ ID NO: 48050 - protein, 434 aa, unknown
  TnpB Polypeptide
MGSYEAVKVRLDPTPRQERLMASHAGAARFAYNAGLAHVKEALDSGEPPEWSHYGLLRWWNANKDALAVNRDTGVVWWSQNSKESYSMGLRDLAQGFSNWSKSRKGQRKGKRVGFPRFKSKNTTMRFAYSTGFTAPKASDPYGLKLPRIGRVHCMENAYRLVNGARFIRITVSRRAGCWYASLTVEREPVAKPAPKGGVVGVDLGVKNLATLSDGTVIPNPRALGASLKTLRKAQQALSRKVKGSARREKARERVARLHARVADVRADAINKATTMIAETYSVVCVEDLNVAGMVKNRHLARSVSDAALGEFRRQLEYKTARSGAVLRVVDRWFPSSKTCSNCGTVKAKLSLSERTFNCDMCGLSIDRDVNAAININVAGSAPETLNARGGDVRRTGLVSGNADLGEARTKRSPAGGVRLGAGLGNEAMQSSVS

SEQ ID NO: 48051 - protein, 412 aa, Nocardia sp.
LLWLTGVRTAYKVRAYPNVEQAMLLRRTFGCVRLVWNKTLADRQRRYTHEQKPTSYTETDAALSQWKKSAELAFLSEVSSVPLQQSLRHQHSAFAAFFKGVAKYPRFKNRNGRQSAHFTRSAFRIKDGSLWLAKTRSPLPIVWTWPDLDLANLNPTMVIVSQEPDGRWFVSFAVDRPDPAPAAVTGELVGVDLGVKDFAVLSTGERIANPRHMARYERGLRRHQRRLARTRRGSSNRSKQRVRVARKYARVRDARRDFLHKTSTALVRRFDTIAVEDLNVSGMVRNRRLAKSISELGWTEFRAMLEYKSERAGRRFVVIDRWYPSSKTCSTCGYLLAALSLGTRNWTCPGCGTWHDRDINAAKNILVAAGLAETRNACGGDVRPQGSSLRQSPLKQEIPDVSPGILALLGRE

SEQ ID NO: 48052 - protein, 367 aa, unknown
  TnpB Polypeptide
MNKTFRVRIYPNQEQKILIDNTFSYVRYVYNYMLKLKEKLYEYYKINLRYNNISKILTELKRHKPWLKEVDKCALQNAIKDLDFAFKMFFDGTGYPKFRSKKRGHNSYRTNQHLHLNQTMKMIKIPKVGWIKFRDKTKFEGLTKIYNITISKTSSGKYFASISAEVDITVFERTNQKCGIDLGIKDFCILNDGIKFDNPKFFVNTQKKLTKMQRKLYKKEFESNNYFKYKVKVARLQEYIANCRKDYLHKISIFLVKNYDIICAETLQVKNMMKNHKLAKAIQDVSWYEFCRQLEYKANWYGKEFVQINTYFASSQLCYDCGYQNKEIKNLDIREWDCPKCGEHHDRDTNAANNILRKGLKILNNPK

SEQ ID NO: 48053 - protein, 285 aa, Yersinia sp.
VKLDQDNSRLSLPKLGWISYRNSRQAVGEVKNVTVSQSCGKWYVSIQTEYEVSEPQHESTSMVGLDAGVARLATLSDGTVFEPVNSFKSNQNKLTRLQRVMSRKVKFSNNGKKAKSRVQNLHSRIANIRRDYLHKVSTTISKNHAMIVIEDLKVASMSKSAAGTVRQHGRNVRAKSGLNRSILAQGGYELRRQLEYKQLWRGGQVLAINPAYTSQKCACCGHTAKENRQSQSQFACLGCGYTENADINGARNILAAGHAALASGEMAVLGRSMKQEPTEASQTSV

SEQ ID NO: 48054 - protein, 344 aa, Yersinia sp.
MAKRITLSPSHPLTLSPSQPLQQSLKDLERGYKNFFQKRAAFPCFKKRGQNDAFRYPQGVKLDQTNSRISLPKLGWIRYRNSREVIGEVKNVTVSQSCGKWYVSIQTECEVADPAHNAESMVGLDTGITKLATLSDGTIYQPVNSFKSGQRKLAMLQRQLSRKAKFSANWQKQKRKIQRHHSHIANIRHDYLHKVTSEISKNHAMIVIEDLKVSNMSKSAKGTAEQHGRNVKAKSGLNRSILGQGWYQMRRQLEYKQLWRGGQVLAIPPAYTSQRCASCGHTAKENRLSQSRFECLECGYTENADINGARNILAAGHAVLACGGMAQSGRPLKQEPTEVIQAPV

SEQ ID NO: 48055 - protein, 379 aa, Nocardiopsis sp.
MQLRYNFRVYPNADQCTDLARAFGCSRVVYNDALRARETARAQGEAFPKTGELSTRLITQAKGTEERSWLGEVCSVILQQSLRDLDTAYRNFFASLKGKRKGPKVGRPRFKSRKDHRQSIRFTANARWKITDQGKLWLPKVGEVKVKWSRALPSAPSTVTVIKDAAGRYFASFVVETDDTPLRESADDVGIDLGLGHFAVLSDGTKVSNPRFLRRAEKKLRKAQKDLSRKREGSNNRARARVKVARARAGVADARREFHHQLSTRIVRENQAVFVEELCVKGLGRTRLAKSVHDAGWSAFVGMLEYKAQRYGRTFVKVGRFLPSSQTCSVCWVVDGPKPLHVRTWTCSGCATVHDRDVNASRVVLAAGRKLAPGREAES

SEQ ID NO: 48056 - protein, 197 aa, Nocardiopsis sp.
MPSVTDAARHRPFTAPQTLAGRRINRYRRRQQRLRQKLQAKGTRSATRLLKKRRRREARHAKDFNHRISKRIVAEAERTSRGIALEELTGILRRVRQRGPQRATLRSWSLHQLGRFITYKAKRAGVPVVSVDPAHSSRECAECSYTDKANRISQASFICRSCGVVAHADRNASRVLARRGRGVWDAGRTSHVPPDNP

SEQ ID NO: 48057 - protein, 415 aa, unknown
  TnpB Polypeptide
LYGTQKNQLRNLTSTQFEVLLKLCTLSKNLYNVALYTIRQYYFNEKKHLRYESNYHYCKDNENYKLLNTDIAQQTLKVVDRNFKSFFGLISKAKGGNYQFSQIKLPHYLPKDGYFALIIPRFKVKDGYFTIPMSAAFKKEYGELRLPFPDRLLTKTVKEIRIYPRYNGRFFEIEYIYLEEADPKQLNSQNVLAIDLGLDNLTTCTTNTGASFIIDGRYLKSINQWYNKENARLQSIKDKQSIKGTTKKQMLLTINRNYKVNDYLNKTARHIVSYCINNDIGNIVIGYNLDWKRNIDIGKKNNQKFVQIPHGNLRFKLQTLCERYNINYVEQEESYTSKASFLDNDLLPTFNADNPKKHSFSGNRISRGQYKDSTGRIINADCNGSLNILRKSNLIDLTVLQASGCLAQPLRIRLR

SEQ ID NO: 48058 - protein, 491 aa, Vulcanisaeta sp.
MLCRAVAVELEVPKELNKLLYSVESAYLGIVREVVEYAVVNNVLSAKQLQGLFYSKYRGEYQGLHAHLVIQAIRQASEIAKSFMERRRKGLVHKSYPEVRSVSIRFTEFTWSYDQFIKSIAPVRLELSLLGVRRVVWSRLHKRFWQYWWRVLTGEAELASTLTIKRRTNKWYAIFIFKLKPREEEPKSIIAFDINENTVTVNRIDLPSTVDKVAKWNKQYLTPQLYTIETNFGRLARRYGRVRNAIIERLKPGFALPNGNYVNVTNTREYRKQVRKLRERDRKVGRVRQIANELTKTPAIIVTEDLGDNPQESMINEIRRNETRHRIKQTPFKALERGSKLFRVSAYRNSRVCPIHFVRLERTNDWHIFYCPKGHYVNRDYASVMNMAWKTTPESWTKGVWWDLRKRMDWRECEGKSNPLIPYFIVQNTHALLKEFTASEESPAVLARGSPMNHHRMQDEGGGEETSQKGRRSEPQLEDVEDMVLVITVER

SEQ ID NO: 48059 - protein, 356 aa, Clostridiales sp.
MLKAYKFRLYPNKEQKEYFAKCFGCTRFIYNQMLADKIEYYKKTGEMLNNTPAQYKKEYPWLKEVDSLALANAQLNLNKAYRNFFRDKSVGFPKFKSKKNRQSYTTNNQNGTIYIEDKYIKLPKLKSKVKIKQHRKFTGLIKSCTISKTPTGKYFISILVDTEINQLSENNNKIGIDLGIKDFAITSNGDKYENPKWLRKSEKRLKKLQKDLSRKKKGSKNREKSRLKLAKAYEKLVNQRQDFLHKLSSKIINENQVIVLEDLKVKNMLKNHKLAKAISEVSWSEFRRQLEYKAEWYGREIIIAPSNYASSQICSSCGYKNPEVKNLALREWICPECSTHHNRDINAAKNLLKLAM

SEQ ID NO: 48060 - protein, 253 aa, unknown
  TnpB Polypeptide
MMEYSYKFRLYPNKEQEDLIQRTFGCARFVFNHYLAERIEMYKATGKSLNFFDQNKNLTSLKRQEETIWLKEVDKWALQNALRDLDAAYRNFFRRVKNGEKPGFPKFKSKHNHRQSYRSQCSNGNIKVFDKSVQLPKLGKVKCRVSKQVKGRILSATVSQNPSGKYFVAICCTDVEMERLPKTGATIGLDMGIKSFAVTSDGVEYLNHKYLAQSEKKLAKLQRQLSRKTKGSNRWNKARIKVARAHEHVANQR

SEQ ID NO: 48061 - protein, 422 aa, Spirochaetia sp.
VPIVRASRLYFGFANKGKRTTLLEFLAEYRSVVQTTIDHVWNTRITFNDKVLDVKNNELCVPHFIPASHYPEINTSLSARAVKCATTQAMSMVKAALKRRAKDLSWLSRLEGAPVPKTLVKRLERPLVKPSADHVKAELNSICATLTWGDETSFDGWLVLSSLGKAFGKINIPLNKNRHFNRLSRGRQLASFLISADGVDVRFAIEPETHMEASRVVGGDTGLRTVLTLSDGQTTPECDRHGHSFQSICHGLARKKKGSKSFSKAQAHRKNFIHWSLNQLNLSSITEIRLEKVRNINYGRRASRYMQAWTNADIQRKVMALAEEQNVSVKLQSSIYRSQRCSVCGLVRKANRKGKIYSCKGCGFVCDADLNASRNHEQNLPSVPDAFYRTKRNLGAGFYWTSGGCSNSSGVELAVPPSNNQA

SEQ ID NO: 48062 - protein, 393 aa, Thermococcus sp.
MPFETIKLTAKFKLKEIPNGLDGLFLTYREIVNFLISYAFENNVTSFKRLKKETYKSLRREYSELPSHYLYTACQMATSIYKSYRKRRRKGKAMGEPLFKKDVIMLDDHLFKLDLENRVIKISTPKGRLVLEFYPSKHHEKFRDWRVGQAWLVKNSKGVFINVVFSKEIEIGEPKAFIGIDLNENNVTLSLPNGEFVQIITHEKEIRTGYFVKRRKIQKKLRAGKKRKELLEKYGERERNRLNDLYHKLANKIVELAEKYGGIALEDLTEIRDSIRYSAEMNGRLHRWSFRKLQSIIEYKAKLKGIKVVFVNPAYTSSLCPVCGGKLSPNGGRVLNCSNCGFEADRDVVGSWNIRLKALKMWGVSVPPESPTMKMGVGKVSRNDIYKLYASYG

SEQ ID NO: 48063 - protein, 242 aa, Fervidobacterium sp.
VTWKQNGFKVVGRKLRLSLSKQTKDYLKSAHGIESEYVWIELPKTLSLDSVKIQQVELVPYQAFGNISYSLRIIYREPIQDFKGRPELNERKILAIDLGVSNFATCTDGIKSFIVDGRILLSKLRLVNKKTTKLKSVLVRQKLKTSKRLHRLHRYVQNYVNDFVHKASKGIVDYCVKNGVGVIVVGKLNHGITNIDIGSQNNQKLHQMPYGKFLQKLKYKAKAYGIQVIQIDEAYTSQSCSC

SEQ ID NO: 48064 - protein, 314 aa, unknown
  TnpB Polypeptide
MPEFTKTMKLHIHVSEEDAALLCELTERYAEACTEISKYVFDNGFPLNFMDIQKAMYDDIRKTFQLKSQMTISSFKTVTARYKTVQDQLEKKPYRYEDEHGEWRSIQRTLEWLQRPIVFSRPQADLVRGRDYSFTDDGKVLSLNTLGKRIKVTFDVPEYFQEYFDGTWKFGTGKVVSLLGEWYFHIPVTKYIKPPDTDSIRHVVGIDRGLRFLATVYDEKGQTLFFNGKEILAKRDVYNKVRAELQEKGTKSAKRVLKRISGRENRWMTDVNHQITKTLVDRYGPDTLFILEDLVDVSLMNRTCPAGQRNSATS

SEQ ID NO: 48065 - protein, 410 aa, unknown
  TnpB Polypeptide
MKLTNVVLVEGDYKTLEELAKITNGLWNKALYLVKEKWRHEHKFAFYAELCSRLKDDQLYNLLPSQTAQAVLQKLDGALRAYIKLRRNGRVARIPGYHRPKTAWIVPYKAQQIKCEDDALKLTLSEAYRKEKGLRWLTLKTYGRWHDGEVKYLELYPRNGRWFASRVVEVKEPPLTETNGEVSVDLGIVNLAATWNGEDAEIYKGGAVNSVLRYRNKEQAKLQGDLAAHGEKTSKKRRELCRRTTAQARHAIHSLTKTLVEKAAREQKGIVVGDLTGILDQKRGRTNQKLHQWMYRLMLSQLGYKCRLAGVPFRTRSERNTSRTCVACGVKHRGGRVHRGLYRCKLHGQYNADCGAAYNMNENVSPSPLLKGSGIGVVAALAQPAVVLWNGHRWLPRDETNPLNREEPTL

SEQ ID NO: 48066 - protein, 388 aa, unknown
  TnpB Polypeptide
MQKQVQLTVVGKVFKPNTRKLLLLNKCLTKYYELVKWHLQFNTTSKSTLHKHYKEAKAFGLNTALVQTARDKAVETLKSFRENRAEDSVLTLKKTSVRFDQRCYRLAKTENKMTPYWLTLSLGEERVVLPIVFGEREKLIEEALEGKWKFATVEMVKNEEWYAHFTLEKDVKLEDEPETVVAIDRGERNFAVAAAVSKENPKPMKGKFWKGADVKRTRGLYGHVRRNLQRKGRLGKVKSLRGKERRIVNQQLHQTANEIVAYAKQFTKPIIAMEDLTGIRKRFKKGKWLNKRFHSLPFRRLQVLVEYKALLQGIEVRYVAAKNTTKTCHRCGHVAPVNGRECRCRACGMVYNRDLNAAVNIAQRLTRELGWGSCDAPEPANVTERAKL

SEQ ID NO: 48067 - protein, 398 aa, unknown
  TnpB Polypeptide
MKRAYRFRLYPKEKQAETLEQALTLCRRLYNAGLEHRVTAYRSGQSVTYLQQQNELPAIKGEMPEYVSVHSQVLQETLKRLDRAYKAFFRRVAERRKGKNVKAGFPRFKGENRFDSVTYPQSGFRLLPNGHLQLSRIGEVRMFVHRRPKGKIKTLNVKRDRCGCWYAVLTVEKPAVRKRVRPAVGVDLGLRNLVALSNGEVLPAPKFLRKSEAKLKRLQRWTSRKKKGSGKRRKAILRLARGHRLVERQRTDLLHNLSHRLARCDVVFEKLNVAGMLKNHCLAKSIADASWGRLVKMTVYKAEEAGGRVVLVDPKYTSQECSVCHARVKIVLANRIFKCPCCGLVICRDINAARIVLQRVGRGTAEFTPVENAPLLTEQAHSTKREAPAFRLGRMSLL

SEQ ID NO: 48068 - protein, 431 aa, Deinococcus sp.
MKLTISAKLKLRHNPQQKAALDAVTLAYRDALNFASKKAFEMDKTSSQPKLHKETYPVIRERFGLGSQLACTVEKQVAATFKTQWTKLKQNLKAREAGQTKRRYKGLDAPPKFVSRTLEYQYGRDYSWKENQKVSVGTLNGRLVLEYEGYQKHLDLISQGVETGAAKLYYQKSKKQYYLIVALNLELPDPRPTDHPTVVGVDVGQRYHFVAQSNTGGTLFQAGGQARHTKDHFAHARKTLQRKGTRSATRRLVSLSGRERRFIANWNHSLSKRLLHRFPKSLIGLEDLTHIRERTEGRSHPKATQKVKASKRRRSQWSFAELQAFLSYKAPLMGCMTTRVHAHHTSQCCPKCGHCSKGNRPNAGLMMMCEVCGFQLHADLAAARNINLRTLLVRQDWMGTGALSVRPDVSYREVKAVYSELRWSTDTSLRL

SEQ ID NO: 48069 - protein, 207 aa, unknown
  TnpB Polypeptide
MPGKERRFTSPKMSVVVDSVFACPGIGCTRRPPSRRCCGTTIKLAIARLRAREADARKDWTEKTSTDLARRFDLIRVEDLQVANMTRSAKGTVAEPGHNVRAKAGLNREIMSSSWGLLTRQLQDKAPGRVEKVNPAYTSQRCSACGHVDRKSRESQASFQCTACGFACNADVNAARNIAAGHAVTARGRPGMPGRVNREPQLALLAT

SEQ ID NO: 48070 - protein, 381 aa, Halomonas sp.
MTKRAYKYRFYPTSEQAQLLAQTFGCVRFVYNAVLRWRTDAFYKEKVRVGYVAANARLTAMKKDADLSFLNDVSCVPLQQALRHQQTAFKNFFEGRARYPNFKSKRHRQSAEFTRSAFKYRDGQLFLAKCKEPLSIRWSRELPSDPTTVTVSKDSAGRYFVSCLCEFDPETLPVTSKMVGIDLGLKDLFVTSDGHRIGNPRHTAKYATRLAKAQRRLSKKRLGSANRAKAKKRVARIHAKISDCRMDLLHKLSRRLINENQVVCVESLKVKNMLRNPTLSKAISDAGWGEFVRQLEYKAQWAGRQLVKIDQWYPSTKRCSNCGHIKDALPLSVRVWICPACGVNHDRDINAARNIKAAGLAVLALGENVSGMEQVSVSSSR

SEQ ID NO: 48071 - protein, 367 aa, Eubacteriaceae sp.
MLKAYKYRIYPDNVQKVQIAKTFGCCRFVYNQTLAYRKERYEKEKRYVSKTDCNNYCNRELKKEYEWLRDVDKFALTNAIYNMDSAYQKFFKEHRGYPKFKSKHDNHKSYTTNFTNGNIAVDFEKGKVKLPKLKEVKAKLHRDFSGQIKSVTVSQVPSGKYYVSILVETEHGELPHTKKEIGLDLGIKNLCITSDGRKYENPKIIKKYEKKLAKLQRQLAHKEKGSSNYYKTKKKIALCHEKITNIRKDHLHRITHEIISENQVIVSENLRIKNMVKNHHLAKSIIDVSWYELTRQLEYKAKWNGRRYIKIDTYYASSQLCSVCGYQNRDIKNLSVRKWVCPKCGEMHDRDINAAKNILAEGLRQIA

SEQ ID NO: 48072 - protein, 385 aa, unknown
  TnpB Polypeptide
MLKSFQFRIYPTKNQEKQLNSVLLSCCNLYNYFLKQRIETYEKTGKGTTKFKQQKELPSLKKGDPFLQKIYSQISQEVLARLDKAYQNFFRRVREGIEDPGFPRYRNIKRYNSITYPQNNGSWKFKDSNKIKLSGIGIIKIINHRSLQGMPKTCTVKKNKLNQWFVIISCKDVPKNPLPKTNKEVGIDLGIKHYLTLSNDTKIEKENFLKKEENHLKNLQRKFSKEQKGTPKRRKFGKWICKIHNDVGNKKKDFFFKTANQLVKNYDTIYMEDLSIKNMLRKEKKDGKRSLRKNIQIASWNQFQSILSYKAEEADKKLVLIDPRNTSKECSKCGNIKDTLPLKTRIYSCTKCGLKLDRDFNASLNIKRLGSQSSSVLINAPNAPH

SEQ ID NO: 48073 - protein, 387 aa, unknown
  TnpB Polypeptide
MAKKRKRKQKRVRRTYKYQIREHPQNMRLGNMLDDLADVHNHFLRLENRYYRRYGKYAGRYRLQPHLTNLLKRTKKHWAWIPRDTLDTVIIRIHVSFERFFDIVGVGRPKYKKRGKYRSAKFQSGYLLEEGRVRLSFKAWNEPSHSFKFNKRWFSFHQHRDWKGHVRYIQILRDAVGTYWLYVVTDDTSKEVLPATGESVGADFGMKDAFLTLNTGEKLQSPQFLKQSLKELRTLNKALSRKVKGSNNWWRCLRQLTRLYRKVSNQRKDWHWKLATDLCMRFDLIATETLNLSGMKRLWGRKVSDLSFGQFVEILKFKCFKHNREFRQVGQWTPTTKPCSDCGYHNKNLSLSDRQWTCPECGSHHDRDVNAAINILRAACGPSVEQM

SEQ ID NO: 48074 - protein, 313 aa, unknown
  TnpB Polypeptide
VTDNPVVQFSGDWVIGVDVGINDYATVAIRDIKTGRIVHQTTLSHRVHSLWNSVRASERQVRALRRKAGRLLSQRQTRMSALDEAQLHREAASRKKRELAILAAQEIADLSHQWGNAVVAVEDLSWVANTMQNGRWNRGAFTQWLTHYVSQNGGWVVAVNAANTSQRCHMCGQRVTHPTHKLSVCPEHGVMDRDVNAAANIAARAVPRVAKARATRAKNRKLRPQTTLRTPPARASLKYPGRDRTKRKPTPKRKNHHPFSKEVILPSSPARAQATRLDASVLADQGTHDTLGTNKAALKQGNTTHKRRLCSPI

SEQ ID NO: 48075 - protein, 247 aa, unknown
  TnpB Polypeptide
MNEEKVIVPFRKKIDLTNPKDYIAIDVNESNITGVSSNPHVLRIEHGLRTVHTTYFEVRRRIQKLSKYKPITSKRLMEKYSGREKKKIHDLCHKIAKVIVDFAKEHGFGIIMEDLKGIRNRIRYNKNLNRRLHSWNFKKLQFFIEYKAKLNGIPVVYVNPYKTSSLCPRCGGKLAPNGQRLLKCKKCGYENDRDIIACLNMLRMRGVPVPPECLLMKLRKERNSSRRLNVTAYSLNHLEERTEITPD

SEQ ID NO: 48076 - protein, 399 aa, unknown
  TnpB Polypeptide
MKRVIKIQLETTEEQSQVLHETMYQFMKVFNMVCSVGYEQRTSNAYTLQKIMYRDCKCAFPHLVSDLHIQAIRKASETVKSVLELTKKGKKVTCPNANYCPPRYNIHAFKIYWDNKIVSLSTTRGRMHLPFKMPHYANYAVGNKTATADLIYYKGKFYFYVTINLPAVEFVSNGKAIGVDLGVTRPAVSSDNHFHGDKHMKEVIKRIFRLRRALQANGSKSAKRHLRCLADREQRFRRDCDHVISSSIVKGVEPGTTIVLENLTNIRNRVKVYHGEASRRLHSWSFLQLRTFLEYKAEGKGCRVVLIDPRKTSQRCSRCGYIYRGNRRSQSEFLCRKCGFHLNADLQASRNIRDKFLVGWSISPSDALLSTSVSSHPSVLGRDKPTINSPVVDLRGGGL

SEQ ID NO: 48077 - protein, 360 aa, Okeania sp.
MKSIRTKLKLNNQQKTLMAQHAGYSRWCYNWGLSLWNAAYIHGYKPNARKLREVFTNHTKPLYPWMKNLSSRVYQYAFINLGEAFKRFFQGLGKHPRFKKKGKHDSFTIDNCGKPIELNGWNHKLPFVGIVKTYEPVEATTKKITISRQGGDWYLSCSYEFTHSPTPKTTEVVGVDLGVKTLATLSTGVVFPGAKSYKKFESKLSKLQYLNRNKKIGSANWKKAQLKIAKLHTKVANIRKDVLHKLTTYLAKNHSIVSIEDLNVRGMLANHKLAKSIADQGFYEFRRQLEYKCEWYGSELVVVDRFFPSSKTCSNCGHVQDMPLNVRTYDCPECGLSIDRDLNASINLRDAVGLTVNACG

SEQ ID NO: 48078 - protein, 363 aa, Natronolimnobius sp.
MEDVIRTVKVKLDVPTERCDDLHQTKGQFLHCANTTADWAWKYPHDYCITSKQNAEKALYDRLRSETELTANLVQKGIRRAIEATKSGVARLKDGDTTSQPHFDTWSVVYDKRSATFHRDHVSLSTVNGRVECDYVIPTEPEGTPIGEYLLNEDYEFRMSTLQYDRSTESFYLHARMRRLERDEREQSTASSDAKHRTVLGVDLNVDGSLAVTSTGVFIGNADEMNHRSRAFEKTRGSLQQTGTRSAHLSIQSMKDREHRWMQDELHRASNQILEEARDHGCTHIAFENLTGIRDRMPGAKRFHAWAFRRLYHYVEYKAEMFGIGTEQVSPAYTSQRCSSCGFPTSLIGSQNTSSCVRSASTN

SEQ ID NO: 48079 - protein, 489 aa, unknown
  TnpB Polypeptide
MKTTIRGVILSFAQGEQMVLDKLMGDYSAAVRWAYKRLLEGTEVQKLRIMVQGKFLSNSRQANDAVYEAQATISSQRELLKLNHENAVAKVESIQKKLNKAKNPHKIENLTRKLDKWQRKLAYWQKFLETNTLPPVVFGTKELFHRRCKGLISKEEWKQARSNRYVSRGDSTKGGNLNARLSLKDDQLYLDIVTEAVKTEKSVRFNRMTAPVYLAQKRSKKTGVVNGRNYRQMMMDYLKTGKAYQVEIIRENNRYYVHVTIEEKEAESYSSTKGIIGVDTNPDGLGVAEVDYLGQYRGSYFLRQGEWTYARSNRRLNLMGEMAKEIVSRAKSKGKGLAVEDLKFRDDKSVSVKFNRITHGFVWSKFLQCVERRALREGVPLVKVKPPYTSVIGILKYQSQYGFSNHQAASYIIGRRALGYSEENVPVKFLKFLTTKELESFSKQTNWKQWSIVQKRVTKTINIIKRKEVKSLVSWQHIRKECLAKVTPA

SEQ ID NO: 48080 - protein, 463 aa, unknown
  TnpB Polypeptide
MQRRKATFKLYPNTSQQKTLEAWTRLHCELYNAGLQERIEAYRKVGKSISYYDQQNALPEIKAYRPEFIELGSHALQQTLRRLDLAMQAFFRRVKSGESPGFPRFKSAARFSGFSYPDSAGWKLFQQGSRGATLRLGSGKNAMMIRARGQHRFAEFQPNDVTITRRNGQWFASVTLRVSDEVCARERSGDQQRGVDFGITDWATFEDGTTIKNPRFMRKELPKLAELQRQRARKKKGSCRYKRLTKQLGQLHERIANLRRDFIHKQTTKLVETCAVIATEELKPKNMSGSAKGTAENPGKRVRQKAGLNREILSASFGMAHQMLAYKPEEAGTRLHLANTRQLKPSQRCCACWALTPKTLAERTHVCQHCGHTMPRDQNSAAVVLIDAHVIPERDTPGTGVAARSKPLARQRAKSRSKTRETPHYNRVSGLVGGEFMSNGTKTHANAAGCLLSNLSRDLADRC

SEQ ID NO: 48081 - protein, 351 aa, unknown
  TnpB Polypeptide
MANTKTLKVRIKDKHAPLLNQMARSVNFVWNYVNELSSRAIRERGQFLSEYDLHPYTKGAGKELGLHSHTLQCIGKEYVTRRKQFKKSRLNWRKSGGAKRSLGWIPVNTGAATWKNGQVYHAGHYFNVWDSYGLAQYKFRTASFNEDARGRWYFNVVVKVEAKPTAGTGAVGIDLGLKDAATASCGAKLESKHYRRLEGALGVAQRANKKARVKAIHAKIKNKRKDDIHQFSRQLVNANAAIFVGNVQPKPLTQTKMAKSVLDAGWGMLKTTLEYKCNHAGVVFEEVNEAYTTQVCSCCGCIGPNSPKGRAGLRIREWTCECGITHDRDINAARNILAAGHRRLAVGIPLL

SEQ ID NO: 48082 - protein, 442 aa, Ruminococcus sp.
MQIISSYGVELRKQNIPIRQTLEIYRSAVSYLIGIYVKVWEELAEIPDAKRRFNAAEHLVHTTKKNHACFDFDIRFPKMPSYLRRSAIQHALGTVSSYKTRLDLWEKTDGKSGKPKLVYENHAMPVFYRDVMYREGAEGKDEAYLKLYDGHDWKWSCVRLDHTDMEYLRKCWSGKKASAPTLEKRHQKYFLRFSYKEEVTLTKTPVKEQIICSVDLGINTDAVCTIMRADGTVLGRRFIDHPSEKDRMYRTLGRIRRFQREHGSAQTQGRWAYTKRLNTELGKKIAGAIVRYAEENHADVIVFEYLEMQGKISGKKKQKLHLWRKRDIQKCCEHQAHRKGMRVSRICAWNTSRLAYDGSGAVTRDWENHSLCTFQTGKRYNCDLSASYNIGARYFIRELLKSLPATERSLLEAKVPPVKRRTSCVYADLRKLHSEMERLKAA

SEQ ID NO: 48083 - protein, 422 aa, unknown
  TnpB Polypeptide
MEKRNAKIKNTKLKGIKIRLYPNKKQEKQFKQEVGNQRFIWNYFLDLSKTKYEILKENMYYSEMATMLPYLKKEIDFLKIGLAQSLQQTLRDLEQSYKNFYRNIKKGTVSKIIAGKISKGKKVNNIPCLPKFRKQGQDDSYRVPQNFKIVGNKIQIPKVGKVKFKGLRKIKKKERIKNITITCENGKWYCSLCVEFKPKKFKKTGKLIGLDVGSVRLYTRSDGKKRKSIRNLDNVKYLLIKIKSIQQQMSWKQECWKNKTNRKKLKKGEIISNSWLKLKVKLQKLHDKLKRIKIDHLHKISFNLVKRFDLIVVEDLKLKNMTKSSKGTIKKPGKMVPQKSGLNRNLLSNSLGLFFQMLEYKCNWYGKKFKKVDPKFTSQTCSKCGTKNKKSRESQSRFRCKSCGYKINADHNAAINILNLAV

SEQ ID NO: 48084 - protein, 413 aa, unknown
  TnpB Polypeptide
MTARRTILIELPKDKCNADYIRRLMALTNLAYRDYEVWAPDMLKYVQYQLYGSFKNFKGSLIFGTTPKRWFAETWVPLKALRIYGDNTRKGDKNAPVVLEFRSDVDFKRNVIRLRQVCRNEPRYTVEVPMPKWVVDRVKEGSDIKFAMIGLKNDKPYLALVAERTVVPYQPSGYRLIVDVNAWNNGVAYGIINPNNRIAEYSPLRPNLRLIDTWYHKAEDLHRKLGKLRRLRLDSTPEAKRLRRKIKALRRKVYAYLRDFAQKRAHELAIKALKLRALVIIDDMTEESRKELIEEKIPTGLRKIYLAETRRFIKLLITQLEWYGIPYEFKRLPSTICPICGHKLIQEKDRVMSCTNCGFKAPRDKVPMYWVIKHNSLIDWTVCYPSCSYLCSFVDPQIYDECMRDCVLNCERQ

SEQ ID NO: 48085 - protein, 602 aa, unknown
  TnpB Polypeptide
LGQASHRSGRRIGQGRAGDRGGPRVHQRVRGPRWQSPFIAGDARDVGRTRCVASDRAHREAGLHRSDYRGCRAGQGSSPRRRRRGHRCSGQRRGRRLGCPAAIGLALLGGAEVREQPSELKDDPAHDLPLLPRSESEQVSVLVRHAGASRFAFNQCLRMVKDALSASTSASDKVVPWSGFDLINAFNTWKKTDAAGRTFVVDTDGVIEIRVTGLAWRTEVCQQVFEEAAVDCGRALAAWADSRMGKRPGRRVGFPHFKKKNAAIPSCRVRNRHRNGIWHAIRVGEGRARSVTVPGLGVIRVHDDTRPLRRLLAKDRAKVHFATVSYRAGRWWVSLNVEASELHSAHRHPARPSSDHGGWVGVDRGLSAFLVAASADGRQLERVDDPPRALARGIQRQRRLARSLSRKQKGSRNRYRAAAKLSRHHHRVRNIRRHFLHRVSGELVKTHDRLVLEDLFIAGMMANHRHARAISDAAWGEFAKLVHYKQAWRGGMVAVADRWYPSSQICSLCQARNNELTLADRVFTCPEGHSLDRDLNAAINLASWGEERHRVGADTQSRVREPEARAPVKKARRRKGSGRHLALVGETGPSDAGTDVQAELSA

SEQ ID NO: 48086 - protein, 389 aa, unknown
  TnpB Polypeptide
VTSRKVSQRIPFTPSKKQAALLEQCFGARRFAYNQQVEAFNSYDKDTNPRPVYPGVTDMKNENEWLRDSPVPSHSLSNAIMDFRKMQSAYFRQAEYGKNRPRFASKNDSVQSFRNGRPMRHMDGNRYPLSKKLGSVRIRRRDRIRYPLESLSSWTVKRENGVYYLVLSFDVDVQPKPPVCGQVGIDAGVKDFLTLSTGEKINYPDRLRQLEERVRWEQRKLSRRVKGSSNYHKQKAIVAKAHAKLRHYRENFQHQVSHRLIEDNQFIGMETLAVQNMTRKAKKKMDANGKYAHNGQSAKRAMNRAILRNGWSGFVAKLAYKAQWYGRTLVQIDRFYPSSRLCHDCGHKYTGLRLSEREWLCESCGTSHDRDVNAALNILGEALRLSRTE

SEQ ID NO: 48087 - protein, 434 aa, unknown
  TnpB Polypeptide
MGSYEAVKVRLDPTPKQERRMVSHAGAARFAYNAGLAHVKEALENSEPADWSHYGLLRWWNANKDTLAVNSDTGVVWWGQNSKEAYNVALHGLARGLSNWSKSRKGKRKGKRVGFPKFKSKNTTMRFAYSTGFTAPKPSDPSGLKLPRIGRVHCMENVYKHLAGARLIRITVSRRAGHWYASLTVEREPITTQAPKRGAVGVDLGVKNLATLSDGTVIPNPRALGTRLKALRKAQKALSRKSEGSVRREKARESVARLYARVADVRADAINKATTMIARSYNTVCIEGLNVAGMVKNRHLARSLSDAALGEFRRQLEYKTARSGAVLRVVDRWFPSSKTCSNCGTVKAKLPLSERTFNCDACGLTIDRDLNAAINIKVAGSAPETLNARGEDVRRSDLVSGDADLCEARTKQSPAGGVRLGAGLGNEAMQPRIN

SEQ ID NO: 48088 - protein, 521 aa, unknown
  TnpB Polypeptide
MTQAQSRTYVTTTTNRWAVAFLNDAATLGYDAKIDSLKLLLEQTPPSKSKLNTKLQQNHDINKRQANSIIAYVEGAVKSAKVCRRNHLEQLQGKLKHTTEVIKNLEKKIKAHSDYLQAVEQVNRGEKKKVPKSLKPKYPDACPMRCPHHLTRYRQAQVKLHQKKRYAHKLKQKISNIKASPLHVNLGNKYTVEMVGSKDESYGNQICQLDLIGSELHIRVPYGLEKRYGKYIQFPIRLPKHGTDNLATAWYNKQALTYRFIQKSLTEWEIHITFDVEPAPRITAPVSWGAIGVDLNPNCIGWAMTDFDGNLDGFGQFKVNIQSQPKGRTEALLVDVVTQLTNLAREHKRPIVVEKLDFSDKKKRLRELNARARRMLSNFAYSKFLQLLLARCFKLGIQVIEVNPAYSSWIGLIKFMSTYGMNSATAAAFVLARRGMFLSERLPARTAYQGREPRKHVWSHWRLVAKLLKGSSRHSFYQPRLTVYSRLRSAADGESPDEPSSATVNPFGELREVGENPTGSR

SEQ ID NO: 48089 - protein, 405 aa, unknown
  TnpB Polypeptide
VWDESVKVLYQIFFLRENYYLCSMISYKYKLYRTPKTKHLDKMLREACFVWNHALALQKRYYRIYHKYIDANKMQKHFDKRFKRNLLHCHTRQEILQRLDTSYQRFFKHLAKRPPKYRKSKDFSSIVFKGNGGYSLNGNVLTINSIKKRFKFSLSRPYAGKVKTLTVKRNHIGEFFIVMVLDQSPQSIGKSHNGASVGIDFGLKKYMTLSDGQTVDNPQFLKSGLRQLQRKSRNLSKCVPGSHNRERKRLDLDRHHEKVVNQRNAFQWQLAHQLCQQYDRIFIEDLQLTGMSALWGRKMADLAHGEFVLKLQYVATKYGVTVHKIDRYYPSSKRCTCGYVNHGLQLHERTWQCPECGTVHKRDLLAAGNILRQGIAELESARKTRESERVPVRTRSYSRISLLQG

SEQ ID NO: 48090 - protein, 317 aa, Blautia sp.
  misc_feature (290)..(290): Xaa can be any naturally occurring amino acid
MPSYLRRSAIRHALGTVSSYKTRLDLWEKTDGKSGKPGLVYENHAMPVFYRDVMYREGAEGKDEAYLKLYDGHDWKWFCVRLEHTDMEYLRKYWSGKKASAPTLEKRHQKYFLRFSYKEEVTLTKTPVKEQIICSVDLGINTDAVCTIMRADGTVLGRKFIDHPSEKDRMYRTLGRIRRSQREYGSAQTQGIWAYTKRLNTELGKKIAGAIVRYAEENHADVIVFEYLEMQGKISGKKKQKLHLWRKRDIQRRCGHQAHRKGMRVSRICAWNTSRLAYDGSGAVIRDWEXEKMLVREKGICPDSGKETPEVFFAFFL

SEQ ID NO: 48091 - protein, 423 aa, Shigella sp.
  misc_feature (284)..(305): Xaa can be any naturally occurring amino acid
VKRLQAFKFQLRPGGQQECEMRRFAGACRFVFNRALARQNENHEAGNKYIPYGKMASWLVEWKNATETQWLKDSPSQPLQQSLKDLERAYKNFFRKRAAFPRFKKRGQNDVFRYPQGVKLDQENSRIFLPKLGWMRYRNSRQVTGVVKNVTVSQSCGTWYISIQTESEVSTPAHPSASMVGLDAGVAKLATLSDGTVFEPVNSFQKNQKKLARLQRQLSRKVKFSNNWQKQKRKIQRLHSCIANIRRDYLHKVTTAVSKNHAMIVIEDLKVSNMSKSAAGTVSXXXXXXXXXXXXXXXXXXXXXXPGRNVRAKSGLNRSILDQGWYEMHRQLEYKQLWRGGQVLAVPPAYTSQRCAYCGHTAKENRLSQSKFRCQVCGYTANADVNGARNILAAGHAVLACGEMVQSGRPLKQEPTEMIQATA

SEQ ID NO: 48092 - protein, 697 aa, unknown
  TnpB Polypeptide
MTGKYYKDSSQTKYLVESFILNSEDRVVSRKGVGRKPDPSFKRSSRQDSMLSSIVRETGKKVKDIDLRTLSLHFERYMQTVNLVLSKIYSSPKRAAQLGKELSEYNGRAYTLLRRERDLCYEHNQDIKDLVYERLHRNALEQAGRMLLADWSRRELFTSALKVLDASQDDTLTLLRRKHIPAFLIRKVRDSCESTKSNGAGYHYTMGVLRQLRLAMDRHVLDTLGIKIGWRARQRKKVASLLKSGSPEYQSAIDTIESQVKSWAKDGYPFRIPQLRSQSLDFSASTENSTGQGYWFTMDEERENEILLYLKLPPGIDGIQHEDSPYNAKTLTFRFLDWFPQSASSDRRRAEIARENGDAHRAEGLTFRAAKFEDMHQQLMNSIQFQHITHRLARSKQKRHTDSEEIMRLQERVKQLKSSRRSAPPRFLLRGHRVTLQIPFLSPNGSVSSAVLGEREYSTKAGADRGLLAPVALSVETETSFKDLLIRVDSLVEKRGRIRKHASQLTSELTRKKNNWDRKRSGQSYPAPILKRDRHVEALWKKVRRLDREIARQVASQTVWFCEEHRVKRLFFEDLRSFQAHAGSKDLSYNLSSNLWGRIIDTVRYMREALGHSKYSVWTVNPRYTSQTCHVCGEKGFRVEDETSTSERKGGEYFYCSKCDTHFLADVNAARNIMHVQDSSAVPGGTKDVCPNSSRLQ

SEQ ID NO: 48093 - protein, 389 aa, Deinococcus sp.
MQENTTQIRVYRYRLYPTKPQEVAMFETLRLTRTLYNAGLEQRIAAYRKQGKTVTAYDQQKELSALKAECPEYAGVYSHVLQDALDRLDKAYKGFFARVKRGDKAGFPRFKPRQRWNSFKFKEVWDKKKGQWLSPGKPVDEGRRINIPKIGAVKCKFHRPLEGVPKTLQIVLDVNEWYAVYTCEVPVQPLPETGSSVGVDVGTRYFTITSDGEFVHNPRHLGNALKKLRVQQRTVSRRKRGGNRRRKAALQVAKTHRKIRRSRQDFHHKTARKLVNEHDLIAHEDLKVSNMVQSNLSRSISDVGWSAFFDILRGKAESAGRVVVRVPPQYTSQRCHACGHTCRENRNNEMFRCVSCGHEDHADWNAAKNILGRAVPSALNGSGVAHAVV

SEQ ID NO: 48094 - protein, 240 aa, Deinococcus sp.
QNATEPGNIRIRLHRPLEGKVKTATITRDCGKWYVNYVCEVESAPLPATGNQMGVDVGTTYFCITSDGEFVGNPRHFQRSMKALRVGQRSLSRKKRSSNRHRKAKAAVAKLHRKVARQRLDFHHKTAAKLIRENDLVAHEDLNVSGMGKGNLARSIHDVGWGQFFSLLSFKAASAGRTVIAVDPRYTSQACSQCGHTCRENRVSQSQFVCQSCGHTANADLEHLTKRRNVFLASGASAKH

SEQ ID NO: 48095 - protein, 388 aa, Deinococcus sp.
MQIQTTMHLKTFRYRLRPTKAQEATLTEQLRLCRNLYNAALQERRDAYRKAKKTVTGYDQMKSLTEIKAALPEYAGVYSQVLQDVIKRLDKAFKAFFRRVKAGQTPGYPRFKGAGWYDSICYPQSGFSVSEKAAFFSKIGNIRIRLHRPLEGKVKTATITRDCGEWYVNYVCEVESAPLPATGNQVGVDVGTTYFCITSDGEFVENPRHFQRSMKALRVGQRSLSRKKRSSNRHRKAKAAVAKLHRKVARQRLDFHHKTAAKLIRENDLVAHENLNVSGMGKGNLARSIHDVGWGQFFSLLSFKAASAGRTVIAVDPRYTSQACSQCGHTCRENRVSQSRFVCQSCGHTANADLNAALNILARALPSVGNVDQQVMRSPRSPGIYSGE

SEQ ID NO: 48096 - protein, 388 aa, Deinococcus sp.
MPTTLRTYKYRLYPTRPQEAALFETLRLTRQLYNAALEQRIAAYRKQGKTITGYDQQRELIALKQECPEFRGVYSHVLQEPLERLEKAFKAFFSRLKRGDKAGFPRFKSAQRWDSFKFKEIWDRKRDRWLSPGRPSDDGKRINLPKIGAVKCKFHRPLEGTPKTLQIVLDVDQWYAIYTCEVDTKPFPACGSAIGLDVGTTHFAITSDGEFVDNPRPLGKTLRTFRIQQRTVARRKKGSKRRQKAVRVLARVHRRIRRARLDFHHKTARKLIDEHDVIAHEDLVVRNMVKSNLARSISDVGWSQFFSILAFKAEEAGRTVIRVNPQYTSQTCHQCGHRCKENRVSQARFKCVACGHQEHADVNAARNILRAGTRPSAHNGNEMSYAVV

SEQ ID NO: 48097 - protein, 429 aa, Deinococcus sp.
MKLTISAKLKLRHNAEQKAALDAVTLAYRDALNFASEKAFEMDKTSSQPKLHKETYPVLRERFGLGSQLACTVEKQVAATYKTQWTKLKQNVKAREADHTKRRYKGLDSAPKFVSRTLEYQYGRDYSWKEGQKVSVGTLSGRLVLECDGYQKHLDLIAQGVETGAAKLYYQRSKKQYYLIVALSIDVPDPQPADHPLVVGVDVGQRYHFVAQSNQGGTMFQAGGRARQVKDRFARARRTLQRKGTRSATRRLVALSGRERRFIANWNHSLSKELLTHFPKSLIGLEDLTNIRDRTEGRSNPKASRKVKASKRRRSQWSFQELQAFLSYKAPLMGCMATKVHAHHTSQCCPKCGHCSKGNRPNAGLMMVCEVCGYQVHADLAAARNINLRTLLVRQDWMSTGALSMRPDVSYDETKTRYLGLRWSTDTSA

SEQ ID NO: 48098 - protein, 435 aa, Deinococcus sp.
MRVTISAKLKLRHSPEQKAKLDAVSLAYRDALNFASEEAFKLDKTSSAPKLHAVTYKPLREKFGLGAQLACTVERQVAASYKTQWTKLKQNIKSREKGFTKKRYKGLDSAPKFVSRTLEYQYQRDYSWKKDGRVSIGTLDGRLVLEFDGHQKHLDYIQQGCETGAAKLYYQKSRKQYFLIVALNIELPDPQPTDHKNVVGVDVGQRYHFVATDKDGKSLFEKGAATGQRKDQFARTRKSLQRKGTRSATRRLVAVSGRERRFVADRNHVLSKMLLTRFPGSIFGLEDLTNIRDRTEGRSNPKASKQARKAKRRRSQWSFAELQTMLAYKAPLHGSLAVRVDANYTSQACHKCGHVSKDNRPGAGLEFVCEVCGHRGHADRVASVNIGLRTMLVRQDWMSTGVLSVRPDVSDVEVKAARLSRYAELRWNPDTSLAL

SEQ ID NO: 48099 - protein, 212 aa, Deinococcus sp.
VCIFRIGSKPFPACGSAIGLDVGTTHFAITSDGEFVDNPRPLGKTLRTFRIQQRTVARRKKGSKRRQKAVRVLARVHRRIRRARLDFHHKTARKLIDEHDVIAHEDLVVRNMVKSNLARSISDVGWSQFFSILAFKAEEAGRTVIRVNPQYTSQTCHQCGHRCKENRVSQARFKCVACGHQEHADVNAARNILRAGTRPSAHNGNEMSYAVV

SEQ ID NO: 48100 - protein, 192 aa, Deinococcus sp.
ERRFIADTNSSLASEILKTYPHAFIGVEELTGVHERTERRSRPNSSEKQRKANRRRARWSYAELLGFLAYKAPLHGSFVVKVDAHYTSQTCTRCGHCSKGNRPNSGLMFVCESCGYHLHSDLMGARNVGLRALLVRQDWASTGCLSCTPGRPQSADPQAGSAGRDVSDAEAKAARLSRYAELRWSPDTSPRL

SEQ ID NO: 48101 - protein, 386 aa, Deinococcus sp.
MTMGHKAFKYRLYPNAAQEKLLDSTLYLCRQLYNAGLEERRIAYRKCGVSVSYYEQKRSLTEIKADLPEYKGVHSQVLQDVVERLDKSFKGFFRRVKSGVKAGYPRFKGKFHYDSFTYPQAGKTGAMPLPDSGKVYLSKIGNVRCKYHRPLEGTVKTATAKREGDKWYIVFVCEVETQPLPTTGDVVGIDLGTNPNFLITSDGEFVEAPRHFNKAERKIGLLQRKAAKKKRGSRRHRELKRQIAAEHRRVANRRRDFHHKTARTLVNRHDAIFHEDLNIIGLARTRTAKGVLDAGWASFINILSLKAANAGRTVLGVDPKYTSQDCSRCGHRQKVKVGHAYVCANCGYDCHRDVNAAQNILNRGRDAAFCESVQSTALADQRSLAL

SEQ ID NO: 48102 - protein, 157 aa, unknown
  TnpB Polypeptide
MLFSVFCCAKKFKKGFCIRHQIGIIVCGYNRDFKRGLKLGKVTNQHFTQISLSYLRSTLKYLCERYGITYLEQEESYTSQASCLDLDDIPVYQPDAPYTGTFSGKRIRRGLYRFANGRTANADINGAANILRKSKQNFDFEGLCKGLLDSPLRIRLS

SEQ ID NO: 48103 - protein, 161 aa, Okeania sp.
MVKPKSFWYYEVSKTAPQYALRYLSVAWKRCFSKVSGQPKFKKKGRDDSFTLDGSISLGFNHIKLPRIGWIKTYEVLPDNVTPKSVTITKKADRWFVSFKIETEPQVTEKSVLLVGVDLGVKSLATLSTGEVFPGAKSYRNLEAKLSRLQYLNRHKVKFSL

SEQ ID NO: 48104 - protein, 509 aa, Caenispirillum sp.
MTEQVLPKKTHRCDLLPHAMNDGKAAAVRDLLRAWRNTATRIGAEQWRLFFESRAFDKRTKITYPDDPIGAARVQMVRYQVVGMLSSFVTNRANDYRDMVERSSLDKDTRHQLHVINRRKAWFSHKSVTVKDADAPIPDDIRRLARSIMRGVLKRHRKPSMRRINAVVDQRGVAWGPAETATGFPLWATLKTMERRLNAAGQPSKAFGEIHVPLLPYEHYLERPGRRCLGLQVNEADDGTITFGIITETTEEFAGSRGAYAPEKEVVSVDFGLRTMFATDDGDLFGRTWFEKLKRYDVEITALARAVQKAGRKPRHDPAYKAAVKRLRGFVKTEIGRVLNRIVAVKKPKALALEQLNFRSPDLSRRMNRILQNCGRSVIRAKLQDLFERFGITSEEVNPAYSSQECSACGYVDRRNRKQDTFKCLHCGHTAHADVDGARTVRSRRSRPIAQPYLTKAKVLDMLVTQFVERHPDGRVYTGAGPWQSNPYFAKVRRASQRPPDVVAAEPAL

SEQ ID NO: 48105 - protein, 489 aa, unknown
  TnpB Polypeptide
VPGVVPPGGGFLALDEPVGRYPTFFTTLGTISSSTPKSKGRKSRDGDEEIRTVRLRLLPNGAQEGKLQRIADATAKLWNELNYARLVQFRASGKVDFKGTGHEFYYKYNVVLSVNAGVVIQLNNQVWMSFFKLLKLHRQGKLPKFMGKPSPPSFWKDRLLGKRRLIILVRNDRYYIEPVNGGEGYLVLKDWHLRIRYAGRVKWSGKQGTLVIKLEDNRWFAYVPIEVGGKPAKSNPKGYVKGIYDRVQIENPKGSNKAFIDVGLNNLFAVVFNHTDTAILIKGSTIKAEYYWWKREVKTYQAVRDWLRNHGFESWRKYHAFYLHAIFKRRERLRHYYRTAIRFLARTLHEMGIGEVFVGYPYLVSQDDGNEFNTNVWWFAKIIKWLGEVLQEYGIRLNVVNEYGTSKQCSICNANHENGRVKRGLYVSQATGIKINADLNAARNIAKRIGYNTPIPKKILSYIVTTNGVKPLTPKEGQQPRPPRLTLPP

SEQ ID NO: 48106 - protein, 357 aa, unknown
  TnpB Polypeptide
MAIKIQHSIRTLRLKVKTEGYAWLNEAAIEVNDVWNFANATSYKAARPFAGPSKWLSAYDLDKLTAGATKHFERIGADTIQRINAEFATRRKQFKKAKLRWRPSRGSRRALGWLPFKASQLERKGKCLRFSGKAFRVFERELLENARWKCGCFAEDSVGDWWLCLPVDHAVAQVLAPKAEQRIAQAQRRGHKRQAKRLHRTAARRRKNALHKFSRTIVNEYQRIVVGDVSSLKLAKTRMAKSVLDAGWGLLKTYLQYKGQQAGRHVLIVSERNTTRECSNCKALTGPSGLDMLVVRTWVCRECGVTHDRDVNSARNIRSAGRRPPSVSGNESPPSVAEPSQTYNRCEAGISAIKAAA

SEQ ID NO: 48107 - protein, 357 aa, unknown; identical to SEQ ID NO: 48106
  TnpB Polypeptide

SEQ ID NO: 48108 - protein, 310 aa, Clostridioides sp.
VVVVEKAYKFRMYPNKKQQELINKTFGCCRFVYNKYLAKRIEVYKNDKETFTYKQCSSDLTNLKKELKWLKEPDKFSLQNALKDLENAYEKFFKEKAGFPKFKSKKINRFSYKTNFTNGNIMYCGQHIKLPKLGMVKIRDKQVPQGRILNATISKEPSGRYYVSLCCTDVDIEVFENTNNQIGLDLGIKEFCISSCGEFIENPKYLKKSLNKLAKLQRELSRKTIGSLNRNKARLKVARLQEHIANQRNDFLQKLSTKLIKENDIICIEDLQVKNMIKNHKLSRLISDVSWSEFIRQLEYKANWYGRQIV

SEQ ID NO: 48109 - protein, 457 aa, unknown
  TnpB Polypeptide
MHTSIVLQFRYTQSRSKEQSIVFEAVKVALDPTPAQERLMLSHAGAARFAYNAGLAHVKAALEAGEKLDWSFYSLQHWWNANKDTLAVSADGVPWWRENSKEAANSGLRALASALSNWSKSRKGKRKGRRVGFPKFKSKDRETPRFSYSTSGPGTGGLIKGDPKALWLPRIGRVHCMENVTARVDGVRVVRMAISRRAGRWYAALTVERDEPTMRQTPKGGAVGIDLGIKDLATLSDGTVIPNPHSLKTGERQLRRAQKALSRKTKGSKRRAKARERVARLHAHVANRRHDALNKLTTMLSRTYSDISIEDLNVAGMVKNHHLAKAISDASFFELRRQLEYKTVKTGARLHFVDRWYPSSKTCSNCGSVKAKLSLTERIYKCEHCGLAIDRDLNAAINIQVAGSAPETLNAHGGTVRRSDPSGRATLDPVKCEPSSGASRVRLGAGGRKTTLQAATN

SEQ ID NO: 48110 - protein, 346 aa, unknown
  TnpB Polypeptide
MILTYKIRHNRDFCEELRMAKQVADYAVRYRTFTSKDVKHIGLKSTIANQILRKYGRNKTIKKARNVNLIVPSQGIKADHEKRIIMVACLKLVLVYQFPEFEKVNQIEVDEEYAYVSVSVPEKEIVEEEYYLGVDLNATGHAAVVADPKSGKVWKLGKECQHVHKKYKNIRRKLQKRGKYAMVKKIRNRESRIVRDINHKMSRKIVEIAKTFGCGVKLEVLKGIRKNKKHAKSFNYSLNSWSFYQLRKFVEYKAKLLGIVVAYVEPAYTSKTCSRCGHIGDRNGKGFKCPYCGYVENADVNASFNIALRQTGVSQSDVERDMSEGSTDTPQEATARTMQTLEPHRL

SEQ ID NO: 48111 - protein, 312 aa, Roseburia sp.
ALRDCRLPHYLPSDGYTTLVIGFVRLEGNKLILPYSNSFKKTHKAVEITIPPILLDKKVKEIRIIPKADARFFEIQYIYEAECIQRNLNTTNALALDLGINNLVTGLSSKGETFIIDGRRLKSINQWFNKKNARLQSIKDKQHFGKKTTNRQKALARRRNNRINDYMNKTARKVIDYCINHDIGTLVVGYNETFQKDSNIGKRNNQTFVNIPSGLLRDKLEYLCELNGIILVMQEESYTSKASFWDKDVIPVYKSDDTEEHHFSGKRIHRGQYRTASGQVLNADVNGALNIMRKSRVVDVNILYSRGEVDTQ

SEQ ID NO: 48112 - protein, 412 aa, Euryarchaeota sp.
MVEVNRKITYRLYPTTKQESVLLEILRLHQQLYNAALEQRISAYRKQKVSLSYVDQAKELTKLRAEFPEYKSLNAQSEQVTLTRLDLAFQHFFRRVKLGEKKAGFPRFKSLNRYPGWGYKTHGDGWRFEMGNKLKHGQLRLSGVGQLRIRGEARNQGNAKTLEIQYKQGRWYASVTLATTPTRMSGTAAIGIDWGVETFATIASSDNSCTAVDNPRTLKKKLKLLKTKQRNLSKKTRGSNNRNKACQQVAKLHGKVANQRKEFLHQTTAKLVNTSSLIAVEQLNIKNMTTSGGSYKKGLNREILSTAPSGFHQMLKYKAEEAGVEWIEIPTKVVKPSQTCHMCGRQEKKSLATRWHSCPCGFFCSRDENAAKVILHWALFGRANGWEPARCGGETLVFPMKHETLSIAALAV

SEQ ID NO: 48113 - protein, 402 aa, Escherichia sp.
VKRLQAFKFQLRPSGQQEREMRRFAGACRFVFNRALALQNENHEAGNKYIPYGKMASWLVEWKNATETQWLKDSPSQPLQQSLKDLERAYKNFFQKRAAFPRFKKRGQNDAFRYPQGVKLDQENSRIFLPKLGWMRYRNSRQVTGVVKNVTVSQSCGKWYISIQTENEVSTPVHSSASMVGLDAGVAKLATLSDGTVFGPVNSFQKNQKTLARLQRQLSRKVKFSNNWQKQKRKIQRLHSCIANIRRDYLHKVTTTVSKNHAMIVIEDLKVSNMSKSAAGTVSQPGRNVRAKSGLNRSILDQGWYEMRRQLEYKQLWRGGQVLAVPPAYTSQRCACCGHTAKENRLSQSKFRCQACGYTANADVNGARNILAAGHAVLACGEMVQSGRSLKQEPTEMIQATA

SEQ ID NO: 48114 - protein, 354 aa, unknown
  TnpB Polypeptide
MAAVPSPILASTNKVESSEWFAGLKRKKTIGGRIPGFKSRHRGLGFVCWRNASKTGNAIFHKTGRKSGVVVITGMNPPRWVKPGEKAHWRVIIHVRVSQPIRPYTSVHVDWTHRGLVFVNMPLPLPRTGDGAIGLDRGCVHTLASSNGTFMDMPKPSKAESKRLKYLQRRMARQDHINEARGGKTAKFASKRRQRTLIEFNALQGRIIRRRNDWIEKTTTRLAQENILVAMEDLDVQAMTRRPKPRPDPAKPGQYLHNGAKAKAGLNRSILGNNWSRLMKRLQDKMDANGGKLVIVPAAYTSRTCHKCGHVAKKNRDSQAVFHCVECGYMANADVNAAMNILDRALRKTGGDTA

SEQ ID NO: 48115 - protein, 431 aa, unknown
  TnpB Polypeptide
MEVMKKMTVVRVERHIINKAHQFYQKVDALCLASKNLYNACVYTSRQSFFYGHGVPSWAKLDAMFRDNPLYKAMPAKVSQLVTKQVSDAWESYFKAMSAYRESSSKFTGCPKIPGYKDTETGRNLVKYNNQAYSKKLLKSQRVISPSMTQIKVPVKEGITPHNLLEIRLVPRFGHYVIEVVYETRVDEVSTPSESNAAAIDLGLDNLATIVFSDVRLKPLIINGKPLKAANQWWNKQKAKAFSLLPSCQHTSRRIENITQRRNNYVSNYMHNATSVIVKELQLRCVTKVAIGKNDHWKQGIKLGRRNNQNFVQIPYNKFIEQLTYKLEEVGIQAIVAEESYTSKSSMLDWDNIPIYSQVPKNQKPSFSGKRIKRAWYKSKDGTLIHADVNAAFNIGRKVVPMEFDCLKSIVLRDRGLLVVNPRRITPVCRT

SEQ ID NO: 48116 - protein, 407 aa, Gloeocapsa sp.
MFVLEFKARTPKPAQINSINEAIRTLQFVRNKVLRYWIDSKDNGKASLFRYNTALRKEYPFVEHLNSTACQVAVERVLIAVNKFFDNCKKKIKGRKGYPKFQKNNRSVEYKQSGWKLSEDKKKITFTDKKGIGTIILIGSRDLNYYQPEQIKRVRIIKRSDGYYIQFCINLDPRDTVKQLEPTKKTVGLDMGLKYFYADSNGEIVENPRFYREAEKRLKRLNRQKSKKFRQGKKQSHNYLKARNRYARKHLKVSRQREEFVKRVALRVVQSSDLIAYEDLKVKNMVKSKLAKSINDVAWTTFKRWLDYFGYKYGKATIAVPPHNTSQDCSNCGKKVQKSLSTRTHKCPHCGYEADRDVNAAINILKKGLSTLGRREAFKAWGDDTATLIEAILSEQVASMNQESPHF

SEQ ID NO: 48117 - protein, 387 aa, Lachnospiraceae sp.
MPDQKKNMQIKNSMKETRKRRSSMLCKVFECKVVSNKLNQKQKEQINQYFREAKWMRNYCVADVNDNARRNAHAVEIKVGDHFETRELQILGSQVRQDIFDGVKANLKTLASLKEKGRKVGALTFKPYCNSIPLRQFGTTYRIDGNYIKVQNITKPIYVRGMKQIPDNAEFANAKLVRKPSGLYFHITCYVPKTDDHHRTAGDIGIDFGIEHNLTLSNGDTFDIQVPEDKNIKRLSKKMNRAFHRNGEKKTKNHYKRVNAIRRAYERNANKRQDVANKVCHTLLYDYDFIGIQDEMIHNWHAGLFGKQVQHSAMGAIKARLKNSPKVFMVERSFPSTQMCPVCGRLTKHPLKKRSYDCPYCGYHHISRDQKSAQSILDYARRRALQS

SEQ ID NO: 48118 - protein, 375 aa, unknown
  TnpB Polypeptide
MKVTRSTKCSVRFATQKKRNELKTILTEYGRVVNIFIDYFWDKKFDKTQLLKPVVDVPKGSWLSARLRKVAAREALDMIFTSKERWRYKPSKLVKPVHKGRRMCVSCTIAELKGSKDAKEFDAWLHIASVGNKMIMDIPIRFHKHYNRLCIKGRRINYYIVTDYYVQFVFEVDMGSKRVGKKCLGVDTGINALASLSTGEQLGTDIKASIDRIKRCKQGGKGKDRARRALKQRIDEVAKEVITKDVDLIVVEALKKMGHNSKLRRRLSLNMRRSIGTWNWKYWLGRLEQRCEDNRVSFRTVSPCYTSQTCSCCGHVDRRNRDGEVFRCQSCGHTDNADVNASRNILSRFLTGPYGASYKQENMEKLACPVLSKFD

SEQ ID NO: 48119 - protein, 351 aa, unknown
  TnpB Polypeptide
MIVRILKLKLTKTQETTLNEWLWHLTGVYNWAIKKIEHDANDKIYHSPFDFGAMTANHSKRMEIPAHTLQSISSQACDAWQRCFKKLAKKPHLKGNRNKLKSIPFPDQIKAPKNNKIGIPGIGKVRYYKQDLPDARIKCGRIIKRASGWYLCLWLDTEHKFPVKQTDKAVGIDPGFDTLLTLSDGTKIENPRELQNGARRLAQAQRSGKKKIAARIRERQSNRRRDRNHKISRWLVENYATIYYSDDNFKAMAKRFGKSVSEAALNQLIGMMNYKGRIGGRKIVPINSFRTTMTCSTCGALTGPTGFAGLKVRYWVCSACGAHHDRDINSAKVVFNIGVGTTHERRLGNVA

SEQ ID NO: 48120 - protein, 387 aa, unknown
  TnpB Polypeptide
LRVPRERVDQITAGLSFPEENPAVYGGSESDNPKRFANDAMDGYSTLFRTIKSICLHRLYMAIQVTRTYIGSIQNQRQVQSGLDSLGDSASKIWNVARWTADRIWDETGKIPDVSVLKAYMKNQACWKDLNAQSSQKVIEELSDAFQSWFDLRQKDDTANPPGYRKHGDERPRSTVTFKEDGFKHDPDNNRVRLSKGSNLKGYWSDFLLCEYQTRPDVDLSEVNSVQNVRAVWNGDEWELHFVCKVKLKTNDSTGNEVAGIDLGITNIATVAFPDEYVLYPGNSIKQDKHYFKRSEYDTEGKNGPSNKSTWARRKLADRETHFSTFSQTPSSQSVSNVVLGLLAVSWPEDVRDSDWGRPATRNSTRGRSIASTSTSNTRAKNVESKY

SEQ ID NO: 48121 - protein, 212 aa, unknown
  TnpB Polypeptide
VENVQQVRAVWAGEEWELHFVCKVEIDVTDAPCDSTVGVDLGINNFAALAYEDGHSELYPLNCLKQDDYYFSKRIAQCDNSNSEQATRLNHKKSARRTHYFHTLSKHIVQRCVDEEIGTIVVGDLSGIREGEEISESKDWGAHGNLDLHSWAFDRFTDLLEYKAEMEGITVEPVSSGTPRSRVRAVVGNERRTVLNADCMSAMSAVQWRTQT

SEQ ID NO: 48122 - protein, 383 aa, unknown
  TnpB Polypeptide
MLANKFRLYPNKEQTDKLEFALDTCRRAYNMMLGELRDQVVIDRNMIQAILPDLKICEPRFREVYSKTLQYECYRLFSNLSALKVLKGNHKKVGRLRFKGKGWFKTINYNQSGFSLEDNKLHLSKIGDIKIKVHREVNGNIKQIQIKKEIDRWYAIIITDEKKQIICGNKVVGIDLGINNYLVDSEGNKIENPKILEQNLSKLKHLQKDLSRKKKGSSNRKKARIRLSKLHLKITNQRTDFLHKITTKLIKECKIIVMENLDIKQMSQQKYFNAKNMMDASWGKFAQLLDFKAENAGCQIVKIDPRNTSKICSQCGHIQDMSLYKRTYECAECGFVIDRDYNSAINILNKLAGQELSCVEKSVNTPLEQTSSMKQEALTSTEC

SEQ ID NO: 48123 - protein, 405 aa, unknown
  TnpB Polypeptide
MLKTYSLKHRLNVREFLYAYIAILNSMIKDIWETIEWEEIPIKGKKQKRLIPHYKKDKVMKSILRDRYLENWEYANHWVDSALKTAYSILGSWKKNYIKGRRKRNYPVVKRPFARIKQTMMKLEGDKLRITIKPYEYLYIDLSKRYFKLGSRIGEPILTPTHIHLPVEVDINLCPEENKNIRLGWDSNKMSLDGFSPKTGWMVIDIKELHTAHIACDNKRRRINRIAAKKLKAGKRLKAKYSQREKNRIEQILHRITNKLSSMGSKHGFEDLDKKGMFKKSKKWNRELSSTDWKTIVKHMDYKSSVELVPPYNTSKDCSRCGCVNKDLNGVIFRCVNKECGLKINRQPNAAINIYLKMEGLSHDVGWFDENVVSGFTQTGAEWKETNELVRSLYDTMKPQFYGVL

SEQ ID NO: 48124 - protein, 400 aa, Escherichia sp.
  misc_feature (242)..(295): Xaa can be any naturally occurring amino acid
VKRLQAFKFQLRPGGQQEREMRRFAGACRFVFNRALALQNENHEAGNKYIPYGKMASWLVEWKNATETQWLKDAPSQPLQQSLKELERAYKNFFRKRAAFPRFKKRGQNDAFRYPQGVKLDQENSRIFLPKLGWMRYLNSRQVTGVVKNVTVSQSCGKWYISIQTESEVSTPVHPSASMVGLDAGVAKLATLSDGTVFEPVNSFQKNQKKLARLQRQLSRKVKFSNNWQKQKRKIQRLHSCXXXXXXXXXXXXXXXXXXXXXXXXXXXXXXXXXXXXXXXXXXXXXXXXXXXXXXSILDQGWYEMRRQLEYKQLWRGGQVLAVPPAYTSQRCACCGHTAKENRLSQSKFRCQVCGYTANADVNGARNILAAGHAVLACGEMVQSGRSLKQEPTEMIQATA

SEQ ID NO: 48125 - protein, 389 aa, Photorhabdus sp.
MLRATKVRIYPTPEQATFLNAQFGAVRFAYNKALHIKKQAYHRHGVSLSPRKDLKPLLAMAKKSRKYAWLKESDSIALQQSVINLDVAFSNFFNPKLKACFPTFKSKHGRQSSYHCVGVKILDSAIKIPKLPPIEARLHREIKGELKSITLSRTPTGKYYASILCDDGPEAPAKPTRITHVTGLDMGLSHYAIKSGGDKIANPRHLINASRNLRRKQKALSRKKKGSANRQKARRHLAGVHERVANTRADFQHKLSRAIIDESQAVIVETLKTANMMKNHRLARAIGDAGWHSFITKLEYKAAEAGVHIVKLDQGFASSKTCHCCGHKMPEMPLHKRIWQCPECGVEHDRDINAAINIQRKGIQELQAAGLVVSAHGGQRKSVVQTVAA

SEQ ID NO: 48126 - protein, 293 aa, unknown
  TnpB Polypeptide
LIPGRCTTDLDDFDWDKDASILEFGVGDILADKYGFECQERVTLEVRGNPPWDGDEARLELVYDEPADTLRVKHPVRIRPDRMHAQRLDDFTHTLQQENTTHAAAIDGGANNTLAIVTTTGDPAVYHTHPEFERFRALSELIAELQSELLEDQYTSKRIQHVYDECGRRRDHSYDAAVKHAAEWLLERNVDTVYVGDLINVLETHWNAEVNERTHTFWSHRQLVDRLELTLGDVGITVGQVSEVDSSSECPECGSDEVSRDADVFRCHDCDLAAHSDVVGAWNLLQSEIGPMA

SEQ ID NO: 48127 - protein, 492 aa, Mycolicibacter sp.
LHVSVLSVAYAMLAVMTRHTTFKFCLDPTVEQIDVLARHAGAARFAFNQCLRMVKTALNDRKSNSNIEVPWTGFDLINVFNAWKKTEAAGRVFTVDAAGVAELDVTGLSWRTEVCQQVFEGAAVDLGKGLKAWSDARAGKRKGRRVGFPRFKKKTRTIPSFRLRNKHPKSRRAAIRVGEDGRPRSLTLPGIGQIAVHDDTRRLRRLLAKDRAEILFATVTEHAGRWWLSLNVEAADIHPAHHHQPRDAADSGGWVGVDRGLSAFVVAATSGGTEVARITDAPKALATGMARQRRLAKSLSRKQKGSHNRSDAAVRLARHHHRIANRRKHFLHQVSNQLVKTHDRLVIEDLNTAGMLTNHRLARSISDAGWTEFARQLIYKQSWRGGQVTVADRWYPSSQLCSICGDRRTDLSLADREFICTAGHCLDRDANAAVNLARWGQTHHHSPRSPDPQAGGRATNARRQDGSDRHPSCAGETSLVEAGTDVHAAPAA

SEQ ID NO: 48128 - protein, 404 aa, Cyanobacteria sp.
MFVIEYKVKAKKTQYTAIDEAIRTTQFIRNKALRYWEDNHGATKYDLNKQCKLLAEEFEWAKKLNSQARQSAAERAWSAISRFFDNCKKKVAGKKGYPKYQKNNRSVEYKTTGWKLDPNTKKHITFTDGNGIGRVKLVGSRDIFFYSKEQIRRVRLVRRADGYYCQFGINIDVKEDLEPTQQAIGLDVGLADFYTDSNGHKEPNPCFLRKGEEELKRCQRRLSRKQKGSSNRNKARQRLAKKHLRISRQRLEHAKRLARCVIRSNDLVAYEDLQVRNLVKNHNLAKSISDVGWYQFRVWLEYFGKKFGKVTVAVPPQYTSQKCSNCGQIVKKALSTRTHTCVCGTTLDRDKNAAINILREELRTTGHVGTAGLDPENAWGDLTATVVGQVQSQQVESSAELVSS

SEQ ID NO: 48129 - protein, 410 aa, unknown
  TnpB Polypeptide
MQRAILLQTEATSAKQRVLSAFEQAATAEVNRLLSERGNYKRFNDFWRGIGSDSKRLTGFNIQVVCDLARSTWRKQKGCERVDGVTVKFNLPRNCKTFKTKEFTFVELGLVPKRRVAVPIRKNRNWERFNNLLAAGWKCKTFGLTPNLELVVYLSKNEDEVPRRKNVLGVDVNSKCFALSIISPKGKVLKQTYLGKDIWARRRKIFERKSLLRSYADRGDPSAQKKLDRAKHGEHNFVKNRVGEVIRDITNLALNYDADVAIENLKRFSSKGKRFNRQVMRIPFYTFRMNLEQRCFDKGIALNIVDSWHTSKWCPHCGAVGKGHDGANYSLFRCKECGLVVNSDRKASLAVAVKSLLERGSSPNQITSLSLSGRRVPVNGLLRCPNAIGNNVAVQLDSQLNGKPTSFSCG

SEQ ID NO: 48130 - protein, 371 aa, unknown
  TnpB Polypeptide
MCLLEQFRQMLNDCIRIGLAENMTSMKSLSLKAYHPLGKYDVYSQYRLTAISAATGILRNYRKAKRDGRQVKGPYAHRLWLTTCYGFKVRDGELMLPLRAREHITIPLSTHVQETVESFTVRSVTLTEDRVSLTYAQDVEEIKPDGFVGIDCNLDNVTTAASDGTVTFLDLSEATQVKRVYREVHSHFKRNDVRIRRRISGKYGRKQRDKVQQILHRASRQIVEDAKAKRYGIVMEKLTGIRKLYRKGNGQGRNYRARMNSWSYAELQRQIEYKARWLGLPVIPVPPRGTSSRCSICDHKMKAEENRMLRCPSCGYVVDRDVNAAKNILAKGALRFGAVAPAFEAMVQEPACAVLLKVDAGELAKAGLPPT

SEQ ID NO: 48131 - protein, 541 aa, unknown
  TnpB Polypeptide
LTDDLHRCAATATGKVGGRPERTPPELLADVRIVLLPHEATGHAFQAVHQRRHRHLWGVVHQQVHMIVLAVAFHQFRLEVAANLREDAAQVVENGFGEHATPRFRHEDQMDVHHKYTVPPVSNVLVSSHRPNYTMGVIRRQAYRYELLPDGDQRRRMRRFAGSCRFVFNKALALQKQRYEHGEKKLGYAGLCKRLTEWRHRGDTAWLSDAPVHPLQQSLKDLGRAYANFFARRASFPRFKKKGRDDGFRYPDPKQIKLDQANSRIFLPRLGWLRYRNSREVLGTVRNVTVRLSGGKWYFSVQTEREVEQPVHPSGSMVGIDMGIVRFATLSDGTVFEPLHSFRKHRHRLARYQRAMSRKRKFSNNWKKAKAKVQKIHTLIANARRDYLHKATTTISQNHAIVCIEDLQVRNLSKSAAGSREKPGRNVRAKSGRNRSILDQGWFEFRRQLEYKQAWGGGSVIAVPPRNTSRTCPACRQVSADNRPTQVRFACVECGFEEIADLVGAFNILAAGHAVIACGEPVHSGRSGKQEPTEATQAVSA

SEQ ID NO: 48132 - protein, 239 aa, Blautia sp.
TPVKEQTICSVDLGINTDAVCTIMRPDGTILGRKFINFPSDKDRMYRVLGRIRRFQREHGSRQVQGRWAYAKRLNTELGKKIAREIVFYASENRADVIVFEYLEMKGKLSGKKKQKLQMWRKRDIQKRCGQQAHRKGIRISRICAWNTSRLAFDGSGKIDRDIQDHRLCTFQNGKRYNCDLSASYNIGARYFIREILKPLPATERSLLEAKVPAVKSRTSCVYADLRDLISEMELRKAA

SEQ ID NO: 48133 - protein, 155 aa, Nitrospirae sp.
MLPVIGNPYYENIKGTRRSFCQINLTEDDEITVSFIKDVPRLEYIPITPKFALDLGLVYLFASDKGDLFGRQFYEVLQRYDALISKLTSNRQRQGFPIRNKRYRKLIHNLRQYMKNEINRVLNRTIELYKPAEIVVERLNFQNANLSRRMNRLLS

SEQ ID NO: 48134 - protein, 369 aa, unknown
  TnpB Polypeptide
MLKAYKYRLYPNKEQEVLIQKTFGCCRFVYNQTLAHRKEIYETKKESMSKIDCNNWKNKTLKVNYEWLKEVDKFALDNAIINMDSAYQKFFNEHAGYPKFKSKRDHRKSYKTNYTNGNIEVSFGNNKIKLPKLKWVNAKIHREFIGKIKSVTISQVPSGKYFVSVLVETEHIPMKYTDDKVGIDLGIKDLLITSDGERIDNLKLIKKYEKKLAKEQRKLAHKTKGSKNYQKQRIKLARVYEKIKNIRLDNLHRISHQLISENQVIVSEDLAVSNMVKNHNLAKAIFDCGWYELTRQLAYKAEWNNRIYIKIGRYVPSSQTCSVCGYVNRDIKDLSVREWICPECGTKHDRDVNAAINILNEGLRLLEAA

SEQ ID NO: 48135 - protein, 386 aa, Proteobacteria sp.
VIQRQGYHYRLKTTPALRRSLAQYAGACRFVWNKVLALNAGRYLAGIPRLNYCEAAWWLTQWRHSEDYGWLAAVSIHALQHCLRDLERAYTNCFAGRTAPPRFRKKFLADSFRFPTDFHVDGHRLKLPKIGWMRFWKSREIEGAIKNVTIRRDGNHWTVAFQTERAVDTPVHPSTSAIGIDLGIATFAALSDGTLYPPLNAYRRLQATLAKAQQRAATKVKFSKNWQKCQTVTRRIQATIARCRKDFLHKLSTTISTNHAVLVVEDLQIGNMSRSAQGKGEEPGRNVAQKAGLNKAILDQGWGMFRQMLAYKQAWRGGAVLAVNPRYTSQTCPQCGCVSKLHRPQQALFSCIDCGYTSHADVNAAQNILALGQRERLNAFALRTSR

SEQ ID NO: 48136 - protein, 365 aa, Proteobacteria sp.
MKLVANLKLMPTPSQHAALLDTLATANRACTWLAGQAWDTQTFGQFALHTLAYHPCREQFLLAAQMVVRCIAKVADAYKLDTKTRRRFRRYAAQPYDDRIFRFRSATEVSLWSTAGRLAIPYQCGARQRALLVYRKGEVDLMYLKGVFYLAVVCDVLEPEELGLESILGVDFGIVNLAVDSDGTVYSGDVMEQKRQRFTTRRAGLPRHPTRAARRTLRQLAGKQARVQANTHHVLAKRLVDTAQRSAAGRALEDLTGIRTRVKARRQQRPRHAHWGFAQLRQFVTDKAARAGVPILLVDPRDTSQQCHHCGHGARAHRVAHERFSCHRCGYTTSADFNAAQNIKHRAAVNRHMVAQPRQLRLALA

SEQ ID NO: 48137 - protein, 489 aa, Streptomyces sp.
LGGKFTSKWTWLSSPLTSTSSHSRSPHTDRMISSMRRRWASVNTLCRTLVTKTRWTRIADVQCRPVLIFCNPPITHVCTVVVMQLRYRFRLYPNAVQQAALARAFGCARVVFNDAVRAREDARAAGQPFPTAADLSKKLVTQAKITPERSWLGEVSAVVLQQSLRDAERAYRNFFASLGGTRRGPRLGAPRFKSRKDHRQSIRFTANARWNITGSGRLNLPKIGAVKVRWSRALPATPSSVTVVKDAAGRFFASFVIDTDPAADAARMPETETTIGIDLGLTHFAVLSDGTKIDSPRFLRRAEKKLKKAQRELSRKQKGSKNRAEARLKVARAHAKVADARREFHHQLSTKLISENQGIAVEDLAVKALARTRLAKSVHDAGWAQFINMLIYKAERYGRTLITIGRFEPTSQVCSICGTKDGPKPLNVRGWTCAACDTRHDRDTNAALNIRQAAGLAVSACGAPVSPEPVLAQREETGSHGLPTRHRAA

SEQ ID NO: 48138 - protein, 575 aa, Burkholderia sp.
VADGVRLNVLTTGSSKELGVHSGTVNATCEQYAKSRSQHRRPYLRYRGRKSLGWVPLKGRDLKREGDAFRFAGHTFRVFSSRPLPDGKIKDGTNFAQDARGNWFLNIVIEIPDVQARPIRSGVGIDLGLKDFVTLSTGEKLPSDRCGRRAAEKLAKAQRARKHKRHIAKLHAKVANARADFQHKLALDLVRRFDYIAVGNVSAAKLARTRMAKSVYDASWSSFRNRLRYKAIAHGATFEEVDESGSTQSCSACGSKASTTRPKGIAGLRIREWKCSNCGVEHDRDINAALNILRCGRASPGVGITSHLGRRGRQGSTLHYQDRGTGFSYLWDAAMWAPQIDALSRKYRVIVPDLWGHGASGALPEGTQTLDDLAAHASALLDALEIERCAVVGLSVGGMWGARLALREPQRVRSLVLMDASLEAEPDATRLRYFGMLDAIAAAGRIAPPLLDAIVPLFFRPDVNLADPVPTAFRDALANLPADRLRQSIVPLGRLIFGRPDTLSALAGLDAERTLLMCGAGDMARPPSETVKMAGVIGCAHALVPDAGHISNLENPAFVTRALLDWFDGQRLPSN

SEQ ID NO: 48139 - protein, 391 aa, Moorea sp.
MEMVNTVLTIVCKIQPTPEQADKIEATLEGFADACAYTNNAVKPSITSKNAIQAQVYQYIRETYDLSANLAVRVCGRVAANRKTVKHKNKPVSKFSPTSADYDSRIFSYREKEQTVSLTLVGGRERFLLEIGNYQIGKLKGRKPTSAQLCKHRDGQYYIHIQIKNKAPKPQKTKKVIGVDLGRTDIAVTSENHSFSGKQVNEIRDKFARVRKQIQHKASKGTRSSRRKCRQLQKRLSGKERRFQTWVNHNVSKAIVESAKSQGAVIALEDLTGIRERTNLQPRSKTEKRRSNNWAFYQLREFIQYKALEAGVKVIFVNPRYTSQTCHQCLHIHPIKGKSYRSRKRYKCGACGWNGDADFNGSMMIKLLGQSVTLPGGSYLSCSLTDIVQGY

SEQ ID NO: 48140 - protein, 421 aa, Moorea sp.
MEFKAVLKEPQELAINEAIRTARFVRNKVLRYWMDNKGVGRKELYRYNTQLRNEFKFVKDLNSHACQASVENVERAIKRFFDNCKKKVPGKKGYPRFKKHSRSVEYKQSGWKLSPDKKSIKFIDKKGIGQVKLKGTWDLWRFDQKLIKRVRIVQRADGYYIQFCVKVDNSVRVRAASALPKAWPTALRLEATGFTVGLDVGLKEFYTDSDGHSEPNPRFYRSGEKRLRFYQRRVSRKKKGSANRKKAINRLGRTHLKISRQREEHAKRLARCVIRSNDLVAYEDLRVKNLVKNHCLAKSINDAGWYQFREWLEYFGQKFGRITVAVNPAYTSQNCSNCGEVVKKSLSTRTHACKCGCRLDRDVPSEPLREHNAAKNILTRALSTVGHTGTYQNAWGDLSSTLSGSGLVEQDGSMSQESPGF

SEQ ID NO: 48141 - protein, 406 aa, Herbidospora sp.
MYPDAQQRVALAHAFGCARVVFNDALRTRQEAREQGLPYISDGDLSKQVITRAKATPERAWLGQVSAVILQQALADLNMAYRNFFASMVGIRKGPKVASPKFRSKKDARQAVRFTKNARFTVTESGRLRLPKIGDVPVRWSRSLPSEPSSVTVIKDSAGRYFASFVVDAADRPLPETDSEIGIDLGLTHFAVTSDGRKVSNPRILRRAARKLRKANKALSRKQNASANRAKAKLKVAKAYAKMTDTRRDWAHKLSTTLIRENQTVYVEDLAVSGLARTKLATSVHDAGWSQFTAMLEYKAARYGRHFARIDRWFPSSKLCSTCGTIATSMPLASRSWMCGCGVTHDRDINAAINILAAGQAERRNDCGARPGPGHVPAPREEAVTRRKSHVRQAGMDVNAPGLRST

SEQ ID NO: 48142 - protein, 381 aa, Dichelobacter sp.
MQILKAFKFELMPNGAQIRKMKQFCGCSRFVFNRALAYQNEQYEADKSFKFSYAKIANLLPKWKKELVWLKDCHSQVLQQSLKDLESSFKNFFAKRADFPQFKKKGEKDSFRFPQGGKLEQQNNRVYLPKIDWVRYRNSRNVFGEVKNVTVSQKCGKWFVSIQTEFETEKTPTPKGGEIGVDMGIVRFATLSDGQYFEPINAFKASKGKLAKLQKRFKHKTKFSKNWQKLKAKISRLHHKISNIRKNHLHQISSQISKNHAIVYIEDLQVANMSKSAKGNTVQHGKNVAVKSGLNRAILDQSWYEFRRQLDYKLLWNGGHLIAVPPQNTSRCCPNCGHTAKDNRQTQANFECVKCGYQNNADVVGAINVLKRGQEILAAQQ

SEQ ID NO: 48143 - protein, 393 aa, unknown
  TnpB Polypeptide
VIQLLKAVKVRLYPTPEQELALVKSFGCVRWYWNFALNACIQHYQETGKSLKLATYKGMLPQLKKEYLWLKEDCYSSVLQCVAINLDRAYKNFFKGQAKFPRFKSKHHKQSIQYPQSVTVKDEYLKVPKIGEVKAVFHREVTGKIKTVTISKSPTDKYFASILCEVEVTDVKQLGDQIIGIDLGLKDFAIVHDGERVTKYANPKHLNRHQKNLALKQKKLSRKTKGSKSRKKFRKNVAKVYERIANSRQDFLHKLSRKLVDESQVIVVENLNVKGMVKNRLLSKSISDVGWGMFVNFMDYKLRQKSAKLIEVDRFFPSSKTCSCCGHIVDSLLLNIREWDCLNCKTHHDCDSNAALNIRNEGIRIIHFGGGNPVSAEGACLRPDNRDGERASG

SEQ ID NO: 48144 - protein, 453 aa, Lentzea sp.
MVTVIQAYRFALDPTAGQQVALRSHCGAQRYAFNWGLARIKANLSQRAAEKTYDLPDDQLTPSLSWSAYNLRKDWNQAKNIVAAWWGENSKEAYSSGLANLATALGNWAGSTKGTRKGSRLGFPRFKGRRSGVSCRFTTGAFGLADDRRYVKLPRIGLVRTHESTRKLARHVERGTARIRSATVSYRAGRWFVSFSVEITRSDPAPARPRNAVGVDVGVKSLAVLSSGETIPNPRHLETALRELRRLQRQAARRVSPDRRTQRRPSARWRRTQARVARLHTAVANARRDCLHKLSTRLVRTHGTIVVEDLNVAGMMRNRRLARHIAGVGMAELRRQIEYKAQWAGVHVHVADRWYPSSKTCSGCGVVKAKLRLSERTFRCDECDLVCDRDLNAARNLAALVHRETSSPSCGATQNEPAGNPRKTRATRATGTATGRPAPTGTGQRRRRKATAA

SEQ ID NO: 48145 - protein, 775 aa, Escherichia sp.
  misc_feature (341)..(341): Xaa can be any naturally occurring amino acid
MSTGLRFTLEVDGLPPDAFAVVSFHLNQSLSSLFSLDLSLVSQQFLSLEFAQVLDKMAYLTIWQGDEVQRRVKGVVTWFELGENDKNQMLYSMKVHPPLWRAGLRQNFRIFQNEDIKSILGTMLQENGVTEWSPLFSEPHPSREFCVQYGETDYDFLCRMAAEEGIFFYEEHAYKSTDQSLVLCDTVRHLPESFEIPWNPNTRTEVSTLCISQFRYSAQIRPSSVVTKDYTFKRPGWPGRFDQEGQYQDYQRTQYEVYDYPGRFKGAHGQNFARWQMDGWRNNAEVARGTSRSPEIWPGRRIVLTGHPQANLNREWQVVASELHGEQPQAVPGRQGAGTAXGDKDQVNMHQENTMLPRRISVSLFIDQSIIWPVKRLQAFKFQLRPGGQQEREMRRFAGACRFVFNHALALQNENHEAGNKYIPYGKMASWLVEWKNATETQWLKDSPSQPLQQSLKDLERAYKNFFRKRAAFPRFKKRGQNDAFRYPQGVKLDQENSRIFLPKLGWMRYRNSRQVTGVVKNVTVSQSCGKWYISIQTESEVSTPVHPSASMVGLDAGVAKLATLSDGTVFEPVNSFQKNQKTLARLQRQLSRKVKFSNNWQKQKRKIQRLHSRIAYIRRDYLHKVTTTVSKNHAMIVIEDLKVSNMSKSAAGTVSQPGRNVRAKSGLNRSILDQGWYEMRRQLAYKQLWRGGQVLAVPPAYTSQRCACCGHTAKENRLSQSKFRCQVCGYTANADVNGARNILAAGHAVLACGGMVQSGRPLKQEPTEMIQATA

SEQ ID NO: 48146 - protein, 375 aa, unknown
  TnpB Polypeptide
MHDMELMLKLKLFEPRKGKKMLIEETIRQFKDCVNDWIQALHQLGEKPTRTAVHRFAYKRLRQKYPKLHTDVLQEAMDLAIQIYRSWLNNPNKGEEIPKFDKDCIYFEGRCVKFDRHFISLPLVGKRVWLPTHVPARFKQYLQYKHGRVILKKVKGEYYVYVSVDVPEPEPYEPRGWFGVDIGIRHIIVVSDAEGKVNWFLNDAIGWKKNLECRISGLQRLKDKKIKKGVWRVLKRFSGRIRNYQSYINHCIAKELVLMAKMWKYGIAIENLKGLRRGKVGRRHRKRLHKWAYRDLINKIVYKAKLHGVPVVFVNPKGTSRTCSRCGSKGVVKGRMFVCKKCGLKLDRDLNAARNIALRAPPRAEARGFRAEVVL

SEQ ID NO: 48147 - protein, 535 aa, unknown
  TnpB Polypeptide
MRGRRIDGSGRSRRFGASVDAPQVGVDLAGDVALQAAHDLGLGLSFGATPLDVGLGARIGPHPHEDDPPQGVIRLPVTAGVETTANDLARRRRYRCHPAQLRPGCLRAQPFGVVPGCDQQDRGGVRPDAEQLEQCATASRDQHDDQLVEPGHLMSEEFRPPTELTKRHGGGIADVVTGPRALRRGLGDEPGDAVTAKAFPQVIGAGRHHTPELVDRRCLVSSDRALGDEQRADRLYVSVASLGQCTSSAGLNGATSADRVKRIGFALAAALLAVRSIHLDDGDARALHVASEAGPVGPGPFHPDANHGTEITQPGQQRLVARRCRRELLDAEQPAHFVEGGRYVHVQMGIHSARDGMALYDGHRHPFPCVGWHAPTGWPDPGCRASLQDRRIRPPRLVGAGESWEPGRRIDSKRETTKRQVLRKSGREPRAPDRTGPTRTAVGCPIRGTSTSSLEEAGREVITVNPRHTSQRCFCCGHVAAENRDRQKFLCVSCGYKEHAELNAARNIWLYAFEWGELVRILGGFGRDGQVTPPA

SEQ ID NO: 48148 - protein, 535 aa, unknown; identical to SEQ ID NO: 48147
  TnpB Polypeptide

SEQ ID NO: 48149 - protein, 345 aa, unknown
  TnpB Polypeptide
VAKAPLEHEESPFQVRPVPVLNRSFELRPDFGPFGITVCRGTLTRLDEAFQGFFRRLKAGGAPGYPRFRSVTRFCSLSWSDLNGSKLKEGPRRLYIKGVGDVKLNYHRPLRGIPKTLTVRKKGRHLEATVFCSEVPKKELASTGKAIGIDLGVSVLVCTSDGTFYDNPRHRRELASALGSAQRERSRHTRGSHRYRQATMNAARLKQKEANRRKDTLHKASRHLVDNYDLIVHEDLKVSNMSRSAKGTLESPGRNVAAKSGLNDAIMDSSWARLIAMITYKAILLCLSRGDFAVVGKDAGVADRPGMGHSTPRAGSYEVTLQHSVKRPRERPTDRFEASRCAAGG

SEQ ID NO: 48150 - protein, 345 aa, unknown; identical to SEQ ID NO: 48149
  TnpB Polypeptide

SEQ ID NO: 48151 - protein, 377 aa, unknown
  TnpB Polypeptide
MIQKAFKYRIFPTNTQQEAIAQTFGCCRFIYNNGLAEKVRVYEESGKSVSCHDLIKRLPDLKHEFPWLKDTYSQALQMSLRNLDNAFTKFFKKTGGFPKFKSRKNNNQSCQFPQGVKVNFEDKTIYFPKIGHIRLKLSGNTRTFDGKMKTVTLRQTPSGKYFVSILVEIDQEFPKKPTITLETTVGVDVGLKTFATLSTGEKIEHPKALKKSLRKLKRLQQQVARKKKGSSNRSKARKCLAKLHEHVSNQRKDFLHKVSHQLTSENQAATIAMEDLHVAGMIKNHNLAQAIADSAWSTFDQFVHYKCEWRGKNHLHIGRFEPSSKLCSVCGYINTGLTLKDREWMCPQCNTTHDRDVNAAVNIQKFAVHPQNLVGVT

SEQ ID NO: 48152 - protein, 342 aa, Lachnospiraceae sp.
MGRWKSKNRHKYLLQYHIIFVCKYRKKLLMSKQISDDIKQFSYEICQKHKSIIRYMETDKDHIHYMIETDPTMSISKIVNLMKSYTTNITNGNITVDFESNRVKLPKLKDVTAKLHRNFSGQIKSATISQVPSGKYYVSILVETEHMELPHTNQNTGIDLGIKELCITSDGKKYKNPKIIRKYEKKLIKLQRQLAHKEKRSQNYYKIKKKIALCHEKITNTRKDYLHKISHEIISENQVIVSENLQIKNMVKNHHLAKAISDVSWYELTRQLEYKAKWNGRKYIKIDTFYASSQICSVCGYQNTETKDLSVRKWECPVCVVKHDRDINAAKNILAEGLRQIA

SEQ ID NO: 48153 - protein, 388 aa, unknown
  TnpB Polypeptide
MWKACDELCFKSKNLYNYANYIQRQNFIKGEKIVIYKDLTKALKTHEPFKELGSNSSQHTLKMLDRAWKSFFVSIKDYSKNPNKYLGKPKLPKYKEKNGRYVCILTNWQSQIKNGYLYFAFKPLKPYNNLFKTNIIGKHMQTRIIPKGSCYVLEIVYEIDVPNVTIESKNIIGIDLGLNNFATLTNNVGALPIIINGKGIKSYNQYWNKQKAKISSDLKKRHNQNWSNKLERLTQKRNNKMEYYMHCTSKYVIDYCIAIGCDTIVVGHNKKWKQNSEMNKKVNQEFIQIPYENFINKLKYKCENQGIIFVETEESYTSGTNFLDNELPIVENYIKKRRIHRGLFKSNNGMLINADVNGSLQIIKKVFPNAFVNGIVGVDLHPIRVNVG

SEQ ID NO: 48154 - protein, 378 aa, unknown
  TnpB Polypeptide
VSAHEISEVVSIYLESFRLGYAGYSYRELRQIHSEYNSQIDSNALYDAKTFRRIILKTHNYPKRLNPKPLLRQQDFRINGNEVSIVYKPRERLKLKVFPSEKQIVLMNEANQKGARIVERDGKYFLNLVLEKDVVLPDWRECETVIGVDIGINYIAVCSALTKDGKFTNPLFFRGGEWKHLCDRKRKITCSKEFKHLTRRQHEILHTVSKHIVEYAKSFPKPIIVMEKLGNFKNNSWNKRWNFLLGNWARRKLQQMIEYKAKWEGIPVAYINPAYTSLYCHYCGSKGKRNGIVFKCSNCSREYNADANAAMNLAKRFRQLLDEPKAMIGERSQADMRSAWEGNTYLPRQTHIQPENGKEMNRMRVTRTVTLPLGVGGG

SEQ ID NO: 48155 - protein, 407 aa, Streptomyces sp.
MQLRYAFRVYPDAGQRIALARAFGCARVVFNDAIRARGEARKAGRPFQTAAVLSRTLITEAKRTAERSWLGEVSAVVLQQSLRDAETAYRNFFASLKGTRKGPRVGSPRFKSRKDNRQSIRFTANARWNITDSGRLNLPKIGAVKVKWSRTLPTIPTSVTVTEDAAGRYFASFVVDTDPAADQTRMPTTDRTVGIDLGLTHFAVLSDGTKIDSPRFLRRAEKKLKKAQRELSRKQKGSKNRAKARLKVARAHTKVADARREFHHQLSTKLISENQGIAVEDLSVAGLARTRLAKSVHDAGWSSFVGMLKYKAQRYGRALVTIGRFEPTSQICSTCGVKDGPKPLHVREWTCTACGSIHDRDHNAAINVRQAAGLAASACGAPVRPGAIPAQREEAGSHGFPTEPRAA

SEQ ID NO: 48156 - protein, 402 aa, Escherichia sp.
VKRLQAFKFQLRPGGQQEREMRRFAGACRFVFNRALALQNENHEAGNKYIPYGKMASWLVEWKNATETQWLKDSPSQPLQQSLKDLERAYKNFFQKRAAFPRFKKRGQNDAFRYPQGVKLDQENSRIFLPKLGWMRYRNSRQVTGVVKNVTVSQSCGKWYISIQTESEVSTPVHPSASMVGLDAGVAKLATLSDGTVFEPVNSFQKNQKTLARLQRQLSRKVKFSNNWQKQKRKIQRLHSCIANIRRDYLHKVTTTVSKNHAMIVIEDLKVSNMSKSAAGTVSQPGRNVRAKSGLNRTILDQGWYEMRRQLEYKQLWRGGQVLAVPPAYTSQRCACCGHTAKENRLSQSQFRCQVCGYTANADVNGARNILAAGHAVLACGEMVQSGRPLKQEPTEMIQATA

SEQ ID NO: 48157 - protein, 410 aa, Moorea sp.
VEKSWFSTTLKVAHNQKSQPIFYPSFRSFLAESTNNKITVQKSKKIRLFLKTEQRQLINRWFGVSRYVFNKTVEILKDGNIKANWKAIKTDIINNLPEWCKSVPYQIKSIAIKDACTGVREAKKKYNLTGVVNRVRFRSRKNPVQSCYIPKSAVSAKGIYPTKLGELTFAERLPDHICDCRLTSTNGNYYLVVPYKTTRNKAENQGRIVALDPGVRTFVTFFSENSVGKIGDGDFSRIQRLCAHLDALISKISKSRGKQKRRRRKAARRMTIKIQNLINELHHKTARFLVDNFDVILLPSFETSQMSKRQERKIRSKTVRNLLSFAHYRFKQFLKHKAFETGKLVVDVCEAYTSKTVSWTGELVKIGGSKIIKSQIDGKKMDRDINGARGIFLRALVDTPWVNDHLALAG

SEQ ID NO: 48158 - protein, 415 aa, Moorea sp.
MRTAYQYRLRLTKSQELEIERWLDMLRHQYNYLLADRFNWYEQNRCSINSCPLTCYLPELRNNPDYFSQKKTLPQLKNDRHWYKAIHANVLQDCVKRVDLAFKRYLKGDSNGKRSGRPRFKSRNSYKSLTFSAFSKNPIQGNKLNLPKFGWVKMVYHRPVPDGFKIKTATVTRKADGYYVTLSLQDDTVPEVLPIEQVSNPVGIDMGLKAFLVKSDGSEVPIPKYYRKAQKRLKKIQKVVSRSKKGSSNRKKAVGKLGKAHKKVADTRKDFHFKTAKSLLDNHDLVAHEKLNIKGLARTKLAKSVLDAGWGQFLSILSSKAVRVAWPTAINAGLVTVAVNPRNTSQNCSNCGTKVPKKLKDRIHSCHSCGYTEDRDVNAAKNVLKLAVGHPVGNKAYRVSVRAAEAKADTSRWSW

SEQ ID NO: 48159 - protein, 315 aa, Salmonella sp.
HAAWKRCFDKKLAAKAPVWKRKNKGRDSIRFVNFEKYCRLENRRVKLPSGLGWVKFRQSQRVNGKIKNATISQLAGQWYISFQVEVETAEPNHTSTTIVGLDAGVTKLATLSDGTVYQPVNSFKASQRKLATLQRQLSRKVKFSSNWQKQKRKVQRLHSHIANIRRDYLHKVTSEISKNHAMIVIEDLKVSNMSKSAKGTAEQHGRNVKAKSGLNRSILDQGWYEMRRQLEYKQLWRGGQVLAVPPAYTSQRCACCGHTAKENRLSQSKFVCQACGYTANADVNGARNILAAGHAVLACGGMVQSGCPSETGTRR

SEQ ID NO: 48160 - protein, 300 aa, unknown
  TnpB Polypeptide
MDKLHLKKFFDHESAFPKFKKKGRSDVKMYFVKNNPKDCRCERHRVNIPSLGWVRIKEKGYIPTTKEGYTIKSGHVSMKAGRYYVSALIEIPDNKTADPSNEGIGIDLGLKDFAIVSNGKTYKNINKSARLKKLEKRLVREQRCLSRKYENLKKGESTQRANIQKQKLKVQKLHHKIDNIRTDYINKTIAEIVKTKPSYITIEDLNVSEMMKNKHLSRAVASQKFYEFRIKLKAKSKENGIELRVADRWYPSSKICHCCGTIKKDLKLSDRTFRCHCGYVEDRDFNAALNLRDVKTYKIA

SEQ ID NO: 48161 - protein, 526 aa, Thermus sp.
MGRAAERQPKTYTGLEALLVFPKHEDHKDTVDLMRRFSSAFRTAYHRLLEGWDRKTLKREEGFLCTWFGLNTRYADDALLKAQSLISSLKERGEDPRKVVFGGRKLHGELSRFSRSNRPLYREKKAEWKEKRQGNLYARGDKTKSGNLNLRLVIQDGALWLRINLVDRYAWALVKTSHPRLQELLGRVYAGEPYNVELNLRKGKVYASFSWEEELPPLSINKGRGVLALDINSDPYHIALAVVNPDGNLRRYLTLSLEEVDKAPNRGAKEILLWNIAHQVVGIAVEEEVAIATERLKYLPKGRRGDGSGKDFRRKAHRFAYRSLLRKVHTLARKRGVQSLQVNPSDTSTIGMLKYAPLLSLSKDVAAAYVIGRRALGFKEEIPKGLKVLLQDTSFHQHAQHFYGERIAQLQDKYRRERNPYLKRRLGRELKETKGALAMILSSQGELGSPTGSTNGRNPQGNNPWRALRVGTFLPLLGRRVPRDLSPLKPILMGSWEGWKGGLGPHPGGGPAITKASPREEVGSGG

SEQ ID NO: 48162 - protein, 542 aa, Thermus sp.
MGKAAEKQPKTYTGLEALLVFPNHEDHKDTVDLMRRFSSALRYGYQRLLEGKDRKALKREDGLLCNLFRLNTRYADDALLKAQSLISSLKERGEDPRKVVCKIAPTGLTGGRKLHQELSRFSRSNRPLYREKKAEWEERRKGMLYARGDKTKGGNLNLRLVIGNGSLCLRINLVDRYAHALVKTSHPRLQELLGRVYAGDPYNVELSLRKGKVYALFSWEEELPPLRVTKEQGILALDINSDPYHLALAIVNPDGNLRRYLTLSLEEVDKAPNRGAKEILLWQIAHQVVGIAMEEEVAIATERLKHLPKGRRGDGSGRHFRRKAHRFAYRSLLKKVHTLARRKGIQSLEVNPKDTSTIGMLKYAPLLSLSKDVAAAYVIGRRALGFKEEIPKNLRALLGDSTFHQHARRFYGERIAELQDKYRRERNPYLKRRLGRELKEAKRALAMILSSQGEPGSPKGSTNGRNPQGNNPWRALRVGTFLPLLGRRVPRDLSPLKPILLGSWEGWKGGSGPHPQGMGFAHDGGGPAAMKTSPREEVGSGG

SEQ ID NO: 48163 - protein, 416 aa, Halobacteriales sp.
MEVRRTAVVKLDVSDEQRDALHRTAEQYLYCANRTADYCWSDASYTKCKINKRNVRDALYDDLRDETELHSQLVQAAIRRAVEAVKGVVERWKKGQRVSRPTFTAETVDYDIRSATFYRHKASLSTVEGRVELSFILPADSPTPYEQYVLSGDYEFRESTLRYDAVTDEFYLHISTRRTSGGDTEVSADTGHHDQTVLGIDLGVNSLAVASTGTFWQGDEYDHWIREFEKRRGEMQQRGTQAAHKALLRLGKREEAWRKQYIHTVANELVTEAVEHDCGVIVFEDLTDIRERLPHAKWHHIWAFRRLYEYVSYKAPERGVSVEQVEPNHTSTRCSRTDCGFTHDDNRHGEHFECQKCGYEVNADYNAAKNIGLRYARKRRHRLRSSPTSGSGDAEVDLRMNGGTLNDKSYQPIAGD

SEQ ID NO: 48164 - protein, 372 aa, Chloroflexi sp.
MIRSHKIRLNPTPEQEIYFRKAAGTKRFVYNWGLDRWKWAKSQGVAIYGMMAAKKEFNALKQEQFPWVYDVAKDVMEGAFQDLGTALKNYFDSKSGKRKGAKVGFPKFKSKRSSHQSFRLNNDKFRVDGHTIRIPKLGEVNMAEALRFSGKIMGAVVSRSADWWFVSIQVEIDKPEPIVFEKESTGVDVGIKALATLSDGSEFENQKPLRSQINRLRKLSRSLSRRQQGSNRWWKAKRKLERFHLTVANRRLDAQHKASHAIAATYAFIGLEELHIKGMLKNRRLSLAISDVGLGEFARQVCYKSDAFGGVTVKIGRFFASSKLCSDCGYVNKELTLSDRKWTCQGCGVLHPRDWNAAKNIEQEALRLVVAR

SEQ ID NO: 48165 - protein, 410 aa, unknown
  TnpB Polypeptide
MVISYNAVLKFPNTETETRYKEILEAEKDCYNYLSQIFSRIDFKHHRLSRYDVQSEYYKELREQFPLLSSQMVLKAILEAVGNWTTCIANEKNNFEPPIKKNLSMVLDKRLYNNLTHNAVDLTVPGFKRVRCTFDSYKQLSKLFELYKPQNCNIFYRKGQFYLTIQFDVPELEHTEGEALGVDRGIRRIVTCSDGTGWINRDFNRERRKLRYLRRCLKSKNTKSAKRHLKKLSRTEQNRSKNEVHRVVNWLLAKDYTTYVLEDLSKIKKCTSKKTIKIDGKHTEIKRKKHNNRFGQVPLKEIQTTLEYKAPLLGKEVVTVEPAYTSRLDYRGLLEGKRLGTRYYASDGELLDADSNGACNIVLRHRPDSIVVKPTYGSMVFSGRPMSTGQSWLQLVQTVATTSSHPKGCA

SEQ ID NO: 48166 - protein, 347 aa, unknown
  TnpB Polypeptide
MVKAALRRRKLDLEIRQKCIEAGKAIPKRVAYRLDHKPSMPRTAKANAEINSICCSVQDGEHTTFSIWVELKSMFSCDEYARGYSIQIPLKRTKMDDKWRAGEHEILPSILLSDNAIHIRYRRPVPECKGERITGLDQGVRRMLTASDGTVIPDDGHGFKHVLRKIARKRRGSKAYQRALKERANYVFHSIKQVDWSVYKLINLERHFDIKRGRKTSRMLTAFSNPQIRNALYMRTTEELGVPLQEVDNVCNSLRCPMDGWVHVKNRPKKGVVFRCCKCGYIDDADKVGAINANLHANGLPDCSHALVFTWKLHKKFGFFWTNEGFFDEKGNPISVVGSSQSPTGLK

SEQ ID NO: 48167 - protein, 411 aa, unknown
  TnpB Polypeptide
LRAYKYRIYPTDEQKVLFAKTFGSCRFVYNWVLDLKIEAYKQEKRSVAYKEVQERMVNELKKENRWLVEVNSQSLLNSIRDLGTAYKNFFRDTHAVGFPRFKSRKDRQSFQCPQHCSVDFGKETISIPKAKGIPAVLHRRFKGTVKTVTVSMTPSGRYFASVLVDTALQELKPSEPVRESAIGIDLGIKSLAVCSDGRTFDNPKNLQKSLDRLKLLQKRLSRKQKASANRNKARIRVARLQEHIANCRKDNLHEITHALTHDSQVRTLCMEDLNVKGMQRNHHLAQAAGDASFGMFLTMLEYKCRWYGVNLVKIDRFATSSKTCGQCGYVYKGLKLSERSWTCPECGTHHDRDFNAACNIKEFGLKAPPTERGKVKPVDCPTVDNRPRVLKSRGRKKQEKRGNISLRSSCL

SEQ ID NO: 48168 - protein, 417 aa, Lactobacillus sp.
MKKMKDLSYHYGLKMRIYPSTQQKQLIKINSDISRTVYNKLIAIDRELYQLNRVKLPLDVVTNRIDELKKRKNPKNLSNHFKYMDNKLLDRQVISTAKQTYQNAWNMYKKVHTAGTPKFHKKGYVEKYQTSAHYGKKAEMNVFDATGVKFLDMQHIQLPKLGRIRISGSHRRLLDRKQDIKIGTVTISKTIDDKYFVSMQLGSDTPFVAKKRTTGFQVGVDLNTENFLTSSNGDQIANPRYYRTIKGKLAKAQRKLSRRQLRAKKDGRNLRNAKNYQKQRLVVAKLQARVRRQRNNFLHKVSTALINNHDLVVAENLRGKNMLKNHALAMSISDVGWRTFLQMMEYKASLYGRTFITVDPKNTTQICSDCGFIMGKDGSSKLTLADRKWTCPNCHKHHIRDWNAAKNILAKGLAKVA

SEQ ID NO: 48169 - protein, 542 aa, Chloroflexi sp.
MELGRAGLCLHHRAAVSRGLCSFFGRRGRSDAGRPEVEVLEGISSDMKVVRGYKTELDLNHKQITDCKKHAGAARYAYNWGLKRKQEVYQAEGRSITAMELHRELNQLKQTDLPWMYEVSKAVPQEALRDLDKAMRNFFRRVQLKKEGKWKGPPGYPTFKTKRQGLGSFRLTGSIHIYEKAIELPRLGQLRLKECGYVPRSSVNILAATISEEAGRWFVSVQVEEEVPDPPAATGEPIGADVGINRLAQCSNGRVVENPKALRSELKRLKRLHRRLSRKTKGSKNRAKARMKLARKYARIAHVRRDALHKGTSLLTRAALSPEKRAARKAEIAASLPEPKAKVKPRKGKKIQPAETPSLPEQVARKIKKKQMKQRLRQATPANAHVRPAVVVLEDLNVDGMKRNRKLALSISDVGLGEFRRQMTYKTTWQGEILLLADRWFPSTKMCSRCGNVKEEMDLSERLYVCENPACGLVIDRDVNAALNLAALTKPTSQPGPYREFLGKGETPVERGALADLSQDGSVKLPSTKQEPDTKYGLSING

SEQ ID NO: 48170 - protein, 415 aa, Chloroflexi sp.
  misc_feature (415)..(415): Xaa can be any naturally occurring amino acid
MKVVRGYKTELDLNHKQITDCKKHAGAARYAYNWGLKRKQEVYQAEGRSITAMELHRELNQLKQTDLPWMYEVSKAVPQEALRDLDKAMRNFFRRVQLKKEGKWKGPPGYPTFKTKRQGLGSFRLTGSIHIYEKAIELPRLGQLRLKECGYVPRSSVNILAATISEEAGRWFVSVQVEEEVPDPPAATGEPIGADVGINRLAQCSNGRVVENPKALRSELKRLKRLHRRLSRKTKGSKNRAKARMKLARKYARIAHVRRDALHKGTSLLTRAALSPEKRAARKAEIAASLPEPKAKVKPRKGKKIQPAETPSLPEQVARKIKKKQMKQRLRQATPANAHVRPAVVVLEDLNVDGMKRNRKLALSISDVGLGEFRRQMTYKTTWQGEILLLADRWFPSTKMCSRCGNVKEEMDLSX

SEQ ID NO: 48171 - protein, 391 aa, Halomonas sp.
MLKAAKIRIYPTTEQAAFLNRQFGSVRFVYNTGLRIMSHRYKRHGQSLNAKHDIKKLLPVAKKSRQYGWLKDADSMALQQSCINLDQAFQRFFDPKQKAGYPRFKSKRGKQSSYHCVGVKVGDGWIKVPKLGPIKAKVHRKVEGRLKSITLTRTVTGKHYASLLFDIEQAAPEPIQSVEGSKVIGLDVGLSHLTIDSNGRKTANPRFLKQAQQNLKRKQQALSRTKKGSANRAKARLLVAKAHERLANARHDFQHKLSRQIVDDNQVVIVETLKVRNMMKNARLAKHIGDASWHALTVKLHYKAKEQGKHLVKIDPWFASSKTCHACQYKVDEMALSIRSWECPTCHTQHDRDINAALNIKHQGIIQLKAEGLSVSAHGGLRKSGMSPAAA

SEQ ID NO: 48172 - protein, 499 aa, Halophilic sp.
MYYAYKYRLKPSDAHREELDRHRDICRQLYNHMLYRLNEYRENHGELPSMTTLRSELPDLKTWWDDLSDVYSKVLQTVVERLFDNLKGLSTLKENGYGVGQLKWKPPREFRSFTYSQSGFKLDKKGGQTVLSPSKLADIPIRLHRAIPDDAQLKQVTVKKEPTGEWFATFGVEMDREPPELPKNPDQCVGIDVGILKYTHDTDGHAVESIDLSDERDRLEREQRKLSRKQHGSNNWEKQRRRVAECHANLRRKRRDFLHKLSNYYAREYDLVAVEDLNVKGMMESPSNSRNTASAAWRTFLSLLEYKCEREGTHFVAVEPAGTTKECASCGVSTEKPLWVREHSCPSCGFTADRDWNAAWNILSRGANQVGAGRSESPPVETALPTGTTTVPAQRVIEAGSPPLKERAASAASEQGRVVHRATTHCDLPPLRALPHGCLFVVTTTVTDNGPRARSSSAASVAGTRQLSFSACRMYQEALSGEPEALVTFCLVCEVQRNC

SEQ ID NO: 48173 - protein, 414 aa, Halophilic sp.
MYYAYKYRLKPSDAHREELDRHRDICRQLYNHMLYRLNEYRENHGELPSMTTLRSELPDLKTWWDDLSDVYSKVLQTVVERLFDNLKGLSTLKENGYGVGQLKWKPPREFRSFTYSQSGFKLDKKGGQTVLSPSKLADIPIRLHRAIPDDAQLKQVTVKKEPTGEWFATFGVEMDREPPELPKNPDQCVGIDVGILKYTHDTDGHAVESIDLSDERDRLEREQRKLSRKQHGSNNWEKQRRRVAECHANLRRKRRDFLHKLSNYYAREYDLVAVEDLNVKGMMESPSNSRNTASAAWRTFLSLLEYKCEREGTHFVAVEPAGTTKECASCGVSTEKPLWVREHSCPSCGFTADRDWNAAWNILSRGANQVGAGRSESPPVETALPTGTTTVPAQRVIEAGSPPLKERAASAASE

SEQ ID NO: 48174 - protein, 414 aa, Halophilic sp.
LPTLPRYSKLLIKIDGPVIQMAWEVTRTVRVRLDVPDDRKSDLHATNSKFQYCANHTADWAWRYPDEDCVTSKSEAEAAIYDDLREEPDYLHANLVQKAIKRATDDIDNCVDKLADGENTSKPEYDTFSIVYDKRAATYYRNKVSLATVNDRVECEYDLPENPNGTPHGECLLNDDYSFSTSTVHYDSEADEFYLNAVMEWELDVASPEKAEDSNVLGVDCNVNDHIAVTSTGDFVGNADSLNHQRREFEKHRASLQQTGTRSAHLTYQRIGDSSVAGAKTTSTSVRKQSWRRRVATSVRTSRSRTWNGFESGLTTGRSSSSGRSTRSRRWSSTRPKSTVSWWTRCIRSTRASSVRSVGIRWRRTATTSTSRALTVGTRRMRTITRRRMWRGNSRFNSSGGRSPLLEGRSVSTP

SEQ ID NO: 48175 - protein, 177 aa, Okeania sp.
LKKTHACIDLGLLYYAVTSDGEFIEVPKFFRFSEHRLSKLQVRLARKQKHSRAWKILKRKIAGVHQLIARQLIARQRLDWQFKLAYHLFSDVSVIFVGLLQISNLVRRCKAKLGDNGQFLPNGQSAKSGLNKSLQDAAFGQFVQLLEYVAWKLGKKIITRRPKGYISTLLGMFEKSL

SEQ ID NO: 48176 - protein, 514 aa, Oceanobacillus sp.
MGKSNTPSYALELELDVNKKDVAILEKKMRIAKNIYNSCLGYALKRLAELRSDKEYRKLVKDKKAKGRMKRLKEIEQSHGYSEYQLHDFVKPIQAKYKKNIGSFEAQKLASRAFHTVEKLKFRQAKHVHFKRLEDDMSVENKSNGTGLRFDGEFLLWGEQTQVSKKNPVSQPKKGALKLRGLVKPNDLYAQESLCDRTKYCRVIMREIRGIKRFFVQLVQEGFPPVKRDKDTGFEKHPVDKSDKRVGIDIGPSTIATVSEEKVQLVELAENCIMDAKELRHIERRMDRSKHASNPDNYNEDGTIKRGNKLPWNFSKRYMSLKAKRKDIHRKFVAKRKQAHETLANDVLFQGSDVRVETMRFQSLQKKVKKTTRNKKNGRINRKKRYGKSLLNHAPAKLITILDRKLGYQGKSAKKIDTYATKASQFNHVTGDYTKKQLNERWNDILGFPVQRDIYSAFLIGNTKDSLDTVDVGLCNIQWDDFLELHNREIARIQQSTSKTLYWFVKPDKTKRLP

SEQ ID NO: 48177 - protein, 374 aa, Desulfotomaculum sp.
MSKNMSSPKGIRNYKFRIHPNKEQERKLTNWLATCRIIYNSALADRKNYYERNSKGLTRIAQQETLKADKAKRPQVKKVHSQVAQEVLFRVERAYNNFFRRVQAGEKPGYPRYKGPGQYKSLTFTQFGDGLGASFQNDKLKLSKIGLVKIDLHREIYGKAKTCTIKHEQSGKWYAIITVEEYPVLYSPNWQSIGLDVGIKEFAVLSNGEKIANPKHLQKSERKLKTLQRSLARKKKGSKNRARVRLKLAKQHEKVRNQRKDFHHQLSNQLVWKYGKIIVEDLQITNMVKNHSLAKSISDAGWGEFISMLTYKAESAGRVLEKVPPHGTTQECSRCGNIVKKSLSVRIHACPHCGLVLDRDHNAAINIVHKTKAS

SEQ ID NO: 48178 - protein, 152 aa, Bacillus sp.
MKNNVQSYTTKQTNENISIVGNKIKLPKLGLVRFAKTREVKGRIVNATVRRNPSGRYFVSLLVETEVQELPKTQSHIGMNVGLKDFAILSDGTTYKNPKFFRSLEEKLVKVQHVLSRRTKGSSRWNKQQVKIARIHEYMTNARKDYLDKVST

SEQ ID NO: 48179 - protein, 260 aa, Bacillus sp.
MEVKGMMINKAYKFRIYLNKAQAPLINKTIGCSRFVFNHFLFLWDNAYKEAGKGLTYGTCSAKLPAMKKEFVWLKEVDSIAIQSSVRNLADAYTRFFKKQNNAPRFKSKKNNVQSYTTKQTNENIAVVGNKMKLPKLGLVRFARSREVKGRIVNATVRRNPSGRYFVSLLIETEVQELPKTQSHIGMDVGLKDFAILSDGTTYKNPKFFRSLEEKLAKAQHVLSRRTKGSSRWNKQRVKVARIHEYMTNARKDYLDKVST

SEQ ID NO: 48180 - protein, 402 aa, Escherichia sp.
VKRLQAFKFQLRPGGQQEREMRRFAGACRFVFNRALARQNENHEVGNKYIPYGKMASWLVEWKNATETQWLKDSPSQPLQQSLKDLERAYKNFFRKRAAFPRFKKRGQNDVFRYPQGVKLDQENSRIFLPKLGWMRYRNSRQVTGVVKNVTVSQSCGKWYISIQTESEVSTPAHPSASMVGLDAGVAKLATLSDGTVFEPVNSFQKNQKTLARLQRQLSRKVKFSNNWQKQKRKIQRLHSCIANIRRDYLHKVTTAVSKNHAMIVIEDLKVSNMSKSAAGTVSQPGRNVRAKSGLNRSILDQGWYEMHRQLEYKQLWRGGQVLAVPPAYTSQRCAYCGHTAKENRLSQSKFRCQVCGYTANADVNGARNILAAGHAVLACGEMVQSGRPLKQEPTEMIQATA

SEQ ID NO: 48181 - protein, 441 aa, unknown
  TnpB Polypeptide
MKIYTTYKVKIKGFNHIFKDTISIYREAVDDLLTVCYDNWDKISQLNGNRKLSLVEHLVHRTKDNPHPAYDFDSKFYKLPSYLRRGAINEAIGKIASYTSNLDNWKKECKGKKPSFPKAGYVYPCMYRSVMFRTVDKYTAQVKVYIRNTWDWITVSLRRSDMDYIYKHCNDRKMCAPTLQKRGKEWFLDFPFEEETKLTNENVFEQTIVAVDLGINTAATISVIRSDGTIIGRHFCKLPKETDRLTHSVNRIKKAQQYGNSKTPRLWARAKGINHDIACKTANYIMDISTMYNADVIVFEHLDKKGKVRGSKKQKLKMWRSQEVQSIVTDKAHRLGMRISHICAWGTSKLAYDGSGAVLRGKYGGFDTYELCKFKNGKTYNCDLSASYNIGSRYFVREILKSLPVRERLALEAKVSQAARRSTCTLSTLISLNAELMSLSA

SEQ ID NO: 48182 - protein, 536 aa, unknown
  TnpB Polypeptide
MAKARRRKDTQFETSMTKSVFLYGNPNNGKYKIIADMQNKFTQMVNEYIRLLAENKDFTLQIVKNDKKDGDIRKFEKSIRSESANSAFSQNAFDMAVTHLSNRMDNIRQDMYAAEQNIFTASKVLFSMSVDSRAKSEMLNAVKQIAANTKKDKTFYEDCINTLNTMSDDEFTFKQSEFMDMYTGLSMEYRTPELKRAQMPLDSRLMKIETSTDTVMPYVIKISDALHKNAERIVIPINTSRHSLNKIKSRKMAGTVMASIDENGMLQIGWSYESKVKKPRISYVVGVDVGISDTLHTSDDKAIGSMSPVIGFYQDTVEKSFASLSDMRNKKRCISHYIRRHKNLPEDVRRSLIEKMDKLDQMIQKADAPYRKKRHYYEMLDHEIKSSVGEYMKSINPETLTVLEKLDIKEFSKSRKSNGMMSTFARGKLQKKLMETLNWYGYDFKEVVPDYTSQTCPVCSHLEKENRNGKSFKCKCCGYEADADYVGSLNIKARADDQEILDVCEKYKYKHDEMQKHLKMVYKSRNDEYKTATGSK

SEQ ID NO: 48183 - protein, 326 aa, Microcystis sp.
MQSSLPEWVKETPCHIRQNAIFDAHQAYNASKDCQFRSCHASRQTMKFNHSNFAQGKWYPSVTKGLEFESSEPIPLKNAYATQLIKSKSGEWFAVFLNEVEQEVENSHNNLISLDPGVRTFLTGFDGQKFIEIGAKDMGKINRLCSYLDDLMSRISQSKGHQKSQMRKAASRLRTRLRNLVDECHKQTAHYLTKNYGMILLPTFETSEMTKKNKRKIRTKTARQMLTWSHYRFKQVLKNKAELSGCQVVDVTEEFTSKTCTKCGHVHQKLGGSKVFKCPECGHTLNRDFNGALGIMLKALSDTTFTVVKNGNAIVAQYSDIPCCTA

SEQ ID NO: 48184 - protein, 181 aa, unknown
  TnpB Polypeptide
MRYRAKSERSLRKNQKKLSRMAERAKQEHRSLSTSCNYQKQRQKLASIHRKVERQRAEYLHVLPKQEVENQDFIAAEDLKVRNMLKNHRLAKAIADASWRKFLTMLQYKGILYGKTVVLVPPRNTTQTCSQCGYVMKGEERLALSDREWTCPNCRAVHKRDTNAAQNILSRGLQLAAMATS

SEQ ID NO: 48185 - protein, 438 aa, unknown
  TnpB Polypeptide
MNETCESIGLTKNGLEKYASVMQRRYKKNISSHQVQAEVAHIVKGVDAVLFGNGKDVHYKKESDFHTIPGKSLSGVTIRFDQNNEKRQIDCYIKWNGLKIPVKYDISKPDMPDEKNYINESLSIGVIKYCEIERLWFKSGWHYYVKLYMTENAPKKITPGKSTMGIDEGPSTMAAVSESSVFLEELSPKCKDYNKQIVSLQRKIDKSTRLTNPDRFNEDGTAKKKTKDLPPWKFSKACQRNKATVRELYRRKAEYTKCQHETLLNSMIKDSSIFINEPMDFKALAKKSRETKRLDKASVIKNADGTEKTVYKYKRKKRFGKSITDRSPSFLIARLKQKCEQYSMIYLETDKWKYKASQYNHVLDDYIKTALSERFKNIGAITVQRDLYSAFLQSCMDTVEKPDRKKCIQLFDNFVKMQNGLITEMKASGKSYPACFGF

SEQ ID NO: 48186 - protein, 419 aa, unknown
  TnpB Polypeptide
MRRKKKETENQIPTIIRAHKIRIYPNKHNQEVFQKYYDYQRSIWNRAIDERNAQYKIYKEMKATGLYTQKELNKNYFPHTNNLRKKMKKFDWEYNFHCRVRDVQFDNLCQAWDNFFNPNMPNHKKPKYKKKKDVETNKTLSLRGVRTKGKWLLSPKSRYSKPEYRFTKIKMAQELRFNGRVVDDFTVSVKNNKWYVTITVETPLEEKVAISKQSTGIDVNVGSIDYLKNDGLNKEYDKFYLLPKSLLRQYDKIKYYSRVISKKRNKNPYYKYSKSYKEAITKLNNAYTKAYNIQEANLNNIVKYFFDNYNRIVIEDLDVNSMKMNKRLCKSLHRNAFGRFKQKMISKAEEYNVEFILANRYFPSTQTCSECGYVKTGDEKLFLWGDKYGNDHDTYVCYHCGTIQDRTENAILNLNHYGK

SEQ ID NO: 48187 - protein, 340 aa, Frankia sp.
  misc_feature (134)..(134): Xaa can be any naturally occurring amino acid
  misc_feature (312)..(312): Xaa can be any naturally occurring amino acid
  misc_feature (334)..(334): Xaa can be any naturally occurring amino acid
LKNFTDSRKGKRKGRQVGFPRFKKRGKARDSFRYTTGAYGPADDRHVKLPRIGRVKVHEPMDTLTDRLADGRARLLGATVSPTACRWFVSFTVEVELAVPAGPTRRQRTGGTVGVDLGVKHLAVFSTGETVENXKHLAGSLRRLRTASRAYARSKPGSAGRRKHAARIARIHGRIAHQRRDGLHKLTTRLAQSHEVVVVEDLHVAGMVRNRRLARAVSDTGMAEVRRQLAYKTAWYGSTLIIADRWYPSSKTCSGCGWRNPSLPLSDRMFTCPSCGLVADRDLNAAVNLRNLVAASTSETRNARGADRKTRXSGQVAAKREPGTATADQTGSAXPQGEAA

SEQ ID NO: 48188 - protein, 414 aa, unknown
  TnpB Polypeptide
MLRAVKIRLYPNKEQATMINKLLGCCRVVYNQCLNRKIESYKNGGKTENLSTLSKFIHHELLKDDNFIYLKEHNTKVFNQTLRDMLSAYKNFFERHSGYPKFKSKHDNKQSCRFAFDAISRRNDYTTYHLSLANIKNIKFRCNEKYTQYLQKHHDNIRHATLTKLPCGEYYLSILVDGDLTRKVKETDAAVGIDLGIKDFVITSDGEVFENLHFKKSQSNKINRLQRQLSKKQKGSNNRNKVRVRLAKLYKKINDKKQYYLHAISNSLIDENQVICMEDLNVKGMVKNHNLAESISEMNFGEFRRMLEYKAKWYNRKIVFVSRFYPSSKTCHNCGYINKALKLSDRQWVCPQCGELIERDYNAALNILDEGLRIIGCSTPEFTLVDYPTVDDRLSNEILKSSGRLKQEAKNGQV

SEQ ID NO: 48189 - protein, 438 aa, unknown
  TnpB Polypeptide
MLVVKTVKVPVHYGITTRKLSILDSLTARTTYGIWLWSKLFKEHKLKGAYADRRLFHAGVKEQVKLSGAMTQCCFDTAAWMWWSYREAHKAWRMEAAIAGREGDIKWLRKLLRREPQPPLMNGMQGKVPIWFDSRIGSIEKAKHLKLCSYVARISTLRRGVKLTIPLNPAKYHLDALEQDTVKSFQLVKRHGKYYVHVKVEYEVPTQPVYAVRGIDLGVKRSMASVMLRPNQPLRSSDFTILQDGLKRDQVNRLEKRIAELQQARKWEPLKRIRHKRLRVSEYYDRLAAKQVATTSQNALVVVGHPKGIKYENFKGNGKARLRRTLAHWTYGRQIRYIQEECAKLGIPSEAPNERWSSRTCHRCGSRHTERISQSVFHCWNCELIYNADFNGGINIGSPFLPVATTRRATDDLAYARNEQAREIVACEPRSPHPFMVG

SEQ ID NO: 48190 - protein, 396 aa, unknown
  TnpB Polypeptide
VTKSKKIEIFPTVKQRAIFHRWFGTSRYVYNESVFALDAKDTPKNFKGLVPIVFDQLPEWHVETPRQIKVGAVMDACQAVSNAKIKAKTTGERQKVKFRSRKNPRQTLYLRADSLKKNGFYVRLLGQMKMPEPLPAKPQGTGKVSERDTDAEVKDSQLIMENGRYFLCVSYVEKKKTREPSGRIVALDPGVRDFMTFFFEDRFGWLGMQCINRIQRLCQHCDNLYSRATQEKRPLRRALRKAANKIKVKIRNLINELHKKVAHFLVTNFDIILLPTFETKQMTKRGGRKLSKKSVRQMLTLSHYRFKVFLKQKAKEYGVQVVDVCEAYTSKTVSWTGELITNLGGSRVIKSSEGHRMDRDLNGARGIFVKTVARALTVRPCTVNLGASKSLISSAT

SEQ ID NO: 48191 - protein, 415 aa, Halorhabdus sp.
VADDYVRRTSITRLAVDDEQRELLEETITEWKRGCQIATDMAWEVCQTKSAVQSLAYDALRERTKLGSQHAVLATHQAAEAVTGCIERQSKGQQATKPTFTAPTVTYDARTMTLFDDDTVSLATTEDRIRCPLALPDADDGYQRQYFDSDAWAVTESTLTARDGEFFVHLGFRRHRNDVERDTAEDGTVLGVDLGIENLAVTSTAFFFSGRESTHNLHEFERVRGELQQTGTRSAHRTIAQRGRRQRRYVRDVLHHASKAIVDEARRYGCDVIAFEDLTDIRQRTGASWGHLWAFRTLYEQVEYKAEVLGISVKQVESNYTSKRCAECGFTGDENRPSRNQFRCQQCGTAANADYNAAKNVGLRYVRRGQQSSRRTGDSQLALKSGTITPNDGFTAYPNGFEAEFTDNSHRSQVG

SEQ ID NO: 48192 - protein, 464 aa, unknown
  TnpB Polypeptide
LNTIKSVWVKQRWNAIPPSATVGKSPSPKKSEKHSASNQGRESNSPSNGWSNTHERHVSLSRLTRRRHRQRSVASHRTPPTDSQPRRPRLLRPRTGRPSECLRPTQQSHRLETAVACVQGRVSPRRPTNRLADPQGHQEPSRKTGQGLQRRTAQVARQWRTSVGHVSVRRLRRGLNTGQDGYATLRLSKIGTIRIRVHRDLPPTEEIKRVVLKKETTDEWFACLVHEKPDDDLPEKSKIDDLSATDRVGVDLGIQSYIHTSDNLAVDTLDLSDEYDRYAREQRKLDRKEHGSNNWEKQRQKVAKAKRRIKRKVLDYQHKLTTWLVREYDMVAVEDLDVKPMLETSQSAKNKQDAAWSRFLTLLEYKAELHGTHVVKVEPAGTTKECSRCGVETDKPIWVREHSCPACGHEEDRDLNAAKNILSRGRTQLGAGHSESRPVQTALPVFTPSRVDAKRVVEAGSPEA

SEQ ID NO: 48193 - protein, 218 aa, Nonomuraea sp.
EPLPATGAVNGIDMGVASLVTTSDGEHVANPRHLAVSADRLAAAQQDLARKKRGSKRRRKAAARVAALHSTVRRQRLDGAHKAALRLVREYDVIVHEALNVAGMTRRATPKPEDDGGYLPNGGSAKSGLNRSIHDAGWGVFLTILSHKAESAGRELIAVNPANTSRTCSRCGHCAKENRLTQAVFRCTACGHTAHADVNAAKNILRAGLALRDAAEAA

SEQ ID NO: 48194 - protein, 271 aa, Metallosphaera sp.
LKSKGNKVTLSFKYRAYPTPEIERKLINTMEIEAKVYNKLLDYITERRRQGMKATQFDTQKLLKDMDEKHEMYSKALQMVNNVLWYNIKVLSELKRNEKKVGKLRYRKAFKIVWYNQSGFKLRGDKLHLSKIGEIKLLLHRPVQGEVKGVILKRSKTNKWYAIFQVEQEKQPLERTGRAVGIDLGIEKFVTTSNGVVIENPKLLDRREERIKLLQRRLSRKRRGSRNYEKARLKLAMAYERLENTLKDYIHKITTWLVKDHDVIVVEKLNT

SEQ ID NO: 48195 - protein, 558 aa, unknown
  TnpB Polypeptide
VEVIDAARRWAVWLRWSGLDVGGDCQHGGMAGKRSLRRISDPVVAAAPAAVRIRTRIRVTEAESAALTAIGDFLGSVYRGELARRIRCGVLDRDGRAAWRAERKRAITAVSSSRWAGAITRAAEDQYQLGMRGLAAHVSDLGDAVEVLAERCALRPGEWAPESADEPLSRRRGRQRVRGYRSAAERFTKTRRLAVLRERLAAADQALAAGRPSMVVGGKRLWRSRNHLDAAEMTEQQWRQRWDAVRMFLTADGESGKPGGNETIRVDERSRLRLKVPAALVEQLGTHLQIAAPVRFSHRGAEWADRVAARRAVRYDISCDPDRGRWYLDASWTITPERAPELDELRAGRVLGVDLNADHLAACVLDSAGNPIGEPTTIPVAISGLSASRRDGRVRATITALLDHAEQQHCRAVVVENLDFADARATGRETLGRGARGKTLRRTVAGIPTRRFRVRLTAMAARRGIGVIGVDAAYTSKWGAQHWRTPLQQQTSDPAAVTRHHGAAVAIGRRGLGLAIRRRPAGTRTGQRTGTGTPPARPGHHPGHGGRRGSSGPPTHPP

SEQ ID NO: 48196 - protein, 375 aa, Marinospirillum sp.
MLKAYKYRLYPNREQRVLIEKHFGCTRFVYNWALGLQNDYYKANGKSLSRGAIQSQLVAMKKTADYEWLKEVNSQSLLNALLNVHTAFTNFFKARAKFPRFKSKKIPQRSYQCPQHCTVNFEQGLINLPKLKGIKAVFSREFVGKIKTVTVSKTATGQYYASLLVDNKETLPTPTTIEPSLTLGIDLGINHLLNFSDGSKVDNPRHLAKASQRLAIQQKIFARKQAASKGYQKQKRVVARIHEKVRNSRLDLQHKITHRLIHENQATSYALEDLAVKNMVKNRKLAKSISDVGWGQFVTLLTYKASWYGKNILKVNRFFASSKVCSHCQHKLDKLPLSERDWTCLRCYTHHDRDLNASINIRQQALADLAGLASV

SEQ ID NO: 48197 - protein, 386 aa, Actinomadura sp.
VLLVQLRYNYRVYPTPGLREALVRAFGCARVVFNDGLRLRRAAREAGEGYISDAELSRRVITEAKAMPERVWLGEVSAVVLQQALADLNAAYRGFFDSLSGKRKGRKVAPPRFRSRKDDRQAIRFTRNSKFKILGNGRLRLPKIGDVQVRWSRGLPSDPSSVTVIRDAAGRYFASFVVQTTDEPLPGSGSEVGIDLGLAHFAVLSDGSKVTAPRFLRRAARKLRRLQQDLSRKQRGSSNRTKAVKRVARAHARVADARRDWQHKLSTAIIRDNQAVYVEDLCVAGLGRTRLAKSVHDAGWAQFVAMLEYKAARYGRIFGRVDRWFPSSKLCSACGTLAESMPLNVRAWECPCGASHDRDVNAAINILAAGRADRLNACGGTISPAA

SEQ ID NO: 48198 - protein, 372 aa, unknown
  TnpB Polypeptide
MKLTLLVKLLPTSEQAKALLETMETFNKACNEIAEVAFQHRTANKFRLQRLVYYSIRHKYGLSAQLTIRAISKVAEAYKQDKKVKPIFRKYGAIVYDQRILSWKGVDRVSILTLKGRQVIPVKYGAYQAGRLNRIRGQADLILRNRVFYLAVVVDIPEPPIYNAKDWVGVDLGIKNIAVDSDGEVWSGGHLNGLRKRHTKLRAKLQSKGTKSAKRLLKKRSGKEARFARNVNHIISKRLVAKAKGTERGIALEDLKGIRSRITVRKPQRRIQHSWNFYQLRQFIIYKAKLAGVPVKIVDPKNTSRTCPNCGFISKANRKGERFHCVNCGFVGSADHVAALNIRGRAAVSQPNVSGSFEHPIVPPQGQARMGS

SEQ ID NO: 48199 - protein, 461 aa, Escherichia sp.
  misc_feature (64)..(64): Xaa can be any naturally occurring amino acid
  misc_feature (301)..(301): Xaa can be any naturally occurring amino acid
VKRLQAFKFQLRPGGQQEREMRRFAGACRFVFNRALALQNENHEAGNKYIPYGKMASWLVEWKXLERAYKNFFRKRAAFPRFKKRGQNDAFRYPQGVKLDQENSRIFLPKLGWMRYLNSRQVTGVVKNVTVSQSCGKWYISIQTESEVSTPVHPSASMVGLDAGVAKLATLSDGTVFEPVNSFQKNQKKLARLQRQLSRKVKFSNNWQKQKRKIQRLHSCTANIRRDYLHKVTTTVSKNHAMIVIEDLKVSNMSKSAAGTVSQPGRNVRAKSGLNRSILDQGWYEMRRQLEYKQLWRGGQXANIRRDYLHKVTTTVSKNHAMIVIEDLKVSNMSKSAAGTVSQPGRNVRAKSGLNRSILDQGWYEMRRQLEYKQLWRGGQVLAVPPAYTSQRCACCGHTAKKNRLSQSKFRCQVCGYTANADVNGARNILAAGHAVLACGEMVQSGRSLKQEPTEMIQATA

SEQ ID NO: 48200 - protein, 292 aa, Methanosarcina sp.
MLNQHLQNSLEKKQDFLSSNLRKIQYNLIRCHNIQHYTVDFNRNVIKLPKIVEVKAVLHRQFEGTMKTATISRSSTGKYFISILVDDGKELPAKQKVSESTAIGIDVGIKDFAILSTGEKVENPKYLKNSLKRMKCLQKRVSRKDKGSKNRDKARLLLSKIHEKISNQRNDFQHQLSSKLIRENQAIALETLNVKGMVKNHCLAQSIEDAGWSSFVTKLEYKAEWAGKTILRIGRFESSSKICNVCGYHNGNLTLKDREWICPDCKTKHDRDINAAINIKKFSLQDQNLIVI

SEQ ID NO: 48201 - protein, 423 aa, unknown
  TnpB Polypeptide
MLLTYQYKLNPNSEQAATMALWGELLRRHWNYALGQRLDWLNRTRSPVDRCSLVLEPIGEIPRRVDYYTQASELRATKELFPEYKNIYADCQQQNLMRLDKAWKRWLVPDKNGKRGGRPRFKKWGDICSFTFPRVNALKAGAHLTGNRLKLSRIGEIEVVLHRPIPDGFILRQATLISKADGWYVGFSLEDGTVPEVLPVNEIKSAVGIDVGLEKFLATSDGQAVRIPQFYRKSQQQLARQQRQLARMEKGSSNYQRQANKVARLHLHIARQRKDFHYQVAHWLCSLYDLIAFEDLNIKGLARTRLAKSILDAAWGAFLNILQAVAVKRGKWAKEGNARGTSIECSSCGERVEKTLKDRVHNCPNCGLVIDRDVNSGINILNRVKRTLGLAFAGCGGYSDTSPVNQQLSFVNLRSPRYIALSN

SEQ ID NO: 48202 - protein, 371 aa, Mycobacterium sp.
MDLDRACREHGTFGVRWRSARRWSPSFRFPEGNKMAVEKLNRRHSRVKLPKLGWVKFRQTRSLDGETIRSATLSREGQHWYVSLLVEDAAEKPATHAAPRSAVGVDRGVVVAVATSDGELLDRAFVTTGEQRRTVALQRTLSRAAKGSANRNKTCAALAKVRARERRRRLDFCQKTAHQLAQNNAVVVLEKLPAKNMTRRAQPVPDPNNPGSFLPNGAAAKSGLNKAILSKGWYRFEQALRSVSRYTGTEVVKVPAAFTSQRCSACGHVDPKSRESQAVFRCTHCSRPAEHADINAAKNILAAGLAVTACRESAVPSGAAETPTQEPAGNREELLLQPGLTGWNPPGFSRGEERQETPQQGEAFQTTFACP

SEQ ID NO: 48203 - protein, 209 aa, Limnoraphis sp.
VENKQLKFERILAELDKVFNKKRPKALRSSRRRCRQFLARLSGRERRFQAWQNHTISYRLVQYAKANNQFISLEDLTGIRERTNKKPRSKTERRKSNSWAFDQLRQFLGYKSIKEGVGLVFVNPAYTSQTCHQCLHIHPIKGKSYRNGKNFSCGNCGWRGDADLNGAKNIEQLGRSVNTPVGSSYLRCDLSYDSSGLLKAANSAAGGWQ

SEQ ID NO: 48204 - protein, 402 aa, Streptomyces sp.
LIRAYKFLLRPTVRQEQALRDMLRDHCSLYNGALQERRDAYRHSSKTSIKYGEQSAQLKAIRACDPERQGRWSFSSQQATLRRLDKAFQAFFRRTKAGQTPGYPRFKGVGHFDTVVFPKDGDGCRWDSTPHDIQTRVRLQGIGHIRVHQHRPVKGSVKTVGVKREGRRWYVILACDQVPAEPLPATGSIVGIDMGTVHFFTDSGGSHKENPRFLESMAKELAAAQQHLATFPKCTKRRTKKHRAAARKVAKIHVKIRRQRLDHHHKTANELIRDHDVVGHEQLNTAGMTKAPAPRPDPEQNGAFLPNGAAAKAGLNRSILDAGWGLFFGILANKAESAGRRVIPVNARNTSRTCPECGHVSAENRITQAKFECTACGFAANADHVGALNVLHRAGLVLCAEA

SEQ ID NO: 48205 - protein, 376 aa, unknown
  TnpB Polypeptide
MIRAIKTRLYPTIEQEQKLWQSAGTARFIYNWVIARQEENYKNGDKFISNNTLRKEITQLKKDKFGWLNEVSNNIAKQAVKDACDAYFKFFKSLSDKPRFKSRKKSVPKFYNDTSKLKVKHNRVLLEKIGWVKIKPNQLPVSPYKYSNPRVRFDGKYWYLSVGIEFEIPKEELELTEETIGIDVGIKDLAICSNGKVFKNINKTSSVKKLEKKLRRLQRSVSRKYEMNKKGKEYVKTSNIVKLEKEIKLIYRRLKNIRVNHLHQTTNAIVKTKPSKIVVETLNIKGMMKNKHLSKAIASQKLYEFKRQLKYKSEWYGIEFAEADPWYPSSKLCSGCGHKKERLSLSERTYVCEACGLKIDRDLNASINLSKYESVA

SEQ ID NO: 48206 - protein, 373 aa, unknown
  TnpB Polypeptide
VHRTIKIKLTNISFEQQQKLFELLSISALVYNECIDWCFENQSLSKSKIQKELYHKQRKLYSVFPPSLLQTVRDVAIGNVRQTKFKFKPKKTNNYTINFDVRTMKLRGNLLEFSTLEKRFKTLISFPKWCENYVKNGICKSGKLTYDKKKNQFWFHLVFKIIDPNLKEIGEIVGLDRGLVNLVTTSNGKIYDAKKVRKQQRKYLYLRRKLSSKGTRSSKRLLKKLSGREKRFSRDYNHCLSKELANDPNVKIYVIENLKGISKNRHKGKKFNKKLSSWTFFQFETFLTYKCIENGIKVEKVCPKYTSQTCHHCGHIDKKNRNKEQFCCLKCGHKDHADVNAAKNIRRKYVQKLSTAGNKLISHTDKIMKIIYV

SEQ ID NO: 48207 - protein, 280 aa, unknown
  TnpB Polypeptide
MAKPKKLMGIQQNQLHCDVDTQAILTYLCEESNNLYNCGVYWARQIFFKTNRIVSKYDPIYAVGGNIHAQAMPSVAAQQTLLSVSEAFKSFRELRQLFFRGELDQKPKPPDYRDSGGLFKVSFPNIGAGKPTLENGMIRFPLGLQVKRWFGLKEFFLPLPKNLDFGKVKEFTILPKNGAFHLECSYAMERIETKLDLNQALAIDLGTSSNLMACVDTLGHSFLVDSRQAKAMNQLYNKRVANRKEGKAQDYWDGVLDRLTLKRNHQMRDMVNNTKLRSKV

SEQ ID NO: 48208 - protein, 325 aa, Natronomonas sp.
MAIEVTRTYAGSIQNHRQVCDGLDSLGDSGSKIWNVARWTADRIWEETDEIPDGGTLKAYMKAQECWKDLNAQSSQKVIEELSHAFQSWFDLRHKDDKSNPPGYRKHGDTRPKSTVTFKADGFKHDSENNRVRLSKGKNLKDHRSDFLLCEYQTRPDVDLSEVNSVQTVRAVWNGDEWELHFVCKVEVETLDSAGDGVAGIDLGITNIATVAFPDEYVLYPGNSLKEDKHYFTRTEYDTEGENGPSEQSMWARRKLAARETHFYHTLTDTIITERVERGVGTLAVSWPEDVRESDWGKDRQQEVALVGVRPHLSVPPVQRRDSRS

SEQ ID NO: 48209 - protein, 362 aa, unknown
  TnpB Polypeptide
METIKFCVKSVISPKDKALQILQKEFKNYKKVLIPRVQKAVRAVVKDRNVKVYSQQKWMLDKKITEYVKNLPFHPIAFHNQSVWLERTEKGYFYIHFKTKQEEKEAVCYLRVPTKYHNQIEKACGKDNPVLGQVELIEDNKYGWINVHIILRLPKPEPYKPKGWVGVDIGWNKLATSILATANPHLHFTNPTVHGKDFKTRIIQLKYLLKDYARKGNAWKKWDFRLKQTVKYMVGTVAKEIVTKAEKHKAGVAMEDLTFQSQTKRWLIPRYKLMVAVKTLCERKGIRFKLVSPRNTSITCPKCGYINAENRNGERFTCRECGYQADADISAAMNIATIAMGFTPVAKEVRLYAEASGDVATP

SEQ ID NO: 48210 - protein, 273 aa, Halorubrum sp.
MEVRRTVPVKLDVADSDADLLHETISEFLWAANYVVDHAWQDEYKTTSKAQLQRETYDDVRAETRLQANLVQNARNKAADAVQSVVARWKQGDYAGKPRFSAPTLVYDKRCATFNDDHATLSTVEGRITARYVLPDEDRETPHSEYLFNDDYEVTGAELHYRDGEFYLHVRTKADMESETADDGTAEHSTVLGVDLGIEHVAVTSTGTFWNGAELNHWHREFEKRRGSLQQVGRGPPTKPSSQSDVPRRGATTTSYTPSRKNSSQKPSNTTVT

SEQ ID NO: 48211 - protein, 386 aa, Chloroflexi sp.
IRLNPTPEQAVYFAKAAGTARFVWNWALAEWNRQYEAAEKPTAFKLKKQFNEIRREQFPWTWDVSKNASDQPCLDLGKAFTAFFEGLKSGKRKGRPKFKSKKRSKASFYLAHDQFELGDHRIWIPKLGWVNMAEKLRFKGKVTGARITKTAEWWFVSLTVEMVDEMPEKRAAAVGVDVGLNRLATLSTGEGYENQAFLRTALKKLRQANKRLHRRVKGSKNREKARRQLARLHYRMTCLRDDVLHKLSTHLAECYAIVGIEDLNLKGLLKNRKLARSFSDAALGKLLDLLASKVEQRGGQIIKVGRFFPSSKTCHSCGWKWEAMELSDRVFRCQNKSCASFQVAQDRDHNAALCILFEALRLIGLIDQAVDGIGSDDDVNLAADVG

SEQ ID NO: 48212 - protein, 444 aa, unknown
  TnpB Polypeptide
MTTTNTPDDAATTERPKLIRTYRTRAYLSRAGHIQFDEVLAQQCLLYNAALEERTTAWRRHQKRIPFAEQSRELTEIRKDFPGIEGALDRRVLIGTLRRLDRAFDSFHRRVQTGEAPGYPRFKSVGRWKTLEMYSGAARCVRVNGDTGKGFVRIKGLPKLRFKDRRVPSGIQPLQIRISRKPNGVYLYFVFDHLEVKSPVERAKNPIGIKAGRGGVRWGLSDGSTIERRRVDNSVNRRLQRKMARQKLGSRSRDKTVAQLGKHHHREQVRNRNELHRMTAELVKKYDFFAIEDLSLQEIVWSPRGMPGYSGQTVRTKANINRAILEQTWGEFAQLLTYKAEGAGMEVVRIDPAYTSVTCSRCGVAQFDVSLQERNRAHFRCPDCGNVLNRSVNAAKNILARGLAEPASSAGESVIAGRASTKQLTSEQSDVRPENCVGGGDNAI

SEQ ID NO: 48213 - protein, 405 aa, unknown
  TnpB Polypeptide
MKNLEERQKIKNSLIETRERRKNQSIKVIELKVNCHQTSKETFKKMDFVFTQAKWIVNEMIRLGETQNFFDYNYLEHKEVTHLDKDGNEIKSKIELPSILHRGIVNQKKQDITNESKAKKKGIKVGKLKYKKEINSIDILTGPWLKIRDNSHITIPGFANLKVYGLDQLKKYNEYELANAKFIRKASGFYIHISVCIPKETKVPKKNYKEVGLDFGIKDNIITSDGEKFNCKVPESDYLKFLQKQLKRKQKGSKRYYKLLNQIQKEYEHLSNKKTDEANKLIHYLTKNYDIIYFQDEQISKWKKFNFGKQIQSSYLGRVKAKLVSLENDRSFKISKWSPTTKFCPNCGCLNKIGLEERTYHCNCGYSYDRDIHAAKNVKLFGSTKRAECLEQASVETLAPTALGS

SEQ ID NO: 48214 - protein, 542 aa, Hydrogenophilales sp.
MRFSRRTWMAGDFKGNPARSHPPVRQHPACHRLVPIVREHRVWNRVALHQRAYSMLRATTPLSSQMCCNAIFSVCKAYKAQKTLGRIRKDAPVPEIRFDRASVHFDKRTYSLRGEAVSLNTLSGRMVVPLRLGDHQRRILESGAPNEAELIFRKGRWYFNLVVESGEVEPVASGQVMGVDVGEINLAAVSTGKVFGGGKLSHERNKYLATRRRLQSNGSRSARQKLRQVSGKESRRVRHINHETSKAIVADAKAAGVAKIVMGGLTHIRDRIQAGKRTRARLHRWAFRQLQAFVEYKARAARLAVSASGSMIPAAVPRPAARVARPWAAVSANGSSFSSSGGVPWLGRAREASLGSFRPGLLRHVQERIPGADRSVEPVVLEILGDDLLQPVVFRVRPQMRIEPAQTVGRRAAQGGAQHALGGVQNFELGEQLFGLTPRRVGVEQRGAVALLSCGGGDKFDDGLVGNANRIAGNAFTQQLRCDLLFVRKAWIETVDENVGVNEACHARTIPPVSSPDCRLTPARGAGCGCARAGAWKPNRST

SEQ ID NO: 48215 - protein, 416 aa, unknown
  TnpB Polypeptide
MEYSHRYHAYPTQEIAAELEHHIDIHRQAYNYTLYEYENVNADNIGSAYKHHYRLPDWKDEFFVFSEVNSKALQRTVTRFYQNLDGLSEQKQNGRTVGKLNWKSPSEFQSMTYSQSGFELKNTSGRRATLWLSKIGDIQIRYHRDIPDEAAIKEVTVKKETTGEWFVCFGLEIDEANLPEKSPVETLNTTNSVGIDLGILNYIHTSDGKTVDWLDLEDEYDRLSREQRKLSRKEKGSNNYEKQRQKVAKVKRHIRRKVLDYQHKLTTWLVREYDAVFVEDLDVKGMLQSDGNARNKQVAAWRQFITLLEYKGELYGTHVVQVEAAGTTKECAKCGVETAKPVWVREHSCPGCGFECDRDANAAMNVLQRGFSELGLGWPESTPVETALPTDTTRVSAKRVVETGSPTLNEATPVAE

SEQ ID NO: 48216 - protein, 447 aa, unknown
  TnpB Polypeptide
MGRETARALIAPKEDSRLLAFSLSGISPRRLEQSVLSLQYAVETHRALTFQVRWQDAQLDWLLSEFRLLVNESIRVALREDIRSRARLVRAAYEDLSRRHIVYKQYIPSAFDVALGVLKAHRRRLRRGRRSSVPYMRQLMLKAENQSYRLDRETGRLRIPIRGTEGMQLHLPLSEWHRSFLRDSGWGLGSLTVVPGKVVLVVRREGAKPYEPEGAIALDTNEDSMDGVFASGDHMVQSVLPLGGVRQIQEIHFRRRRRLARKKAHDRRVMRRLLNREGRREGNRVRLRLHRVSKSVVRFAKETRSAIVLEDLTLHGAGGRSRRMNRRLSSWPRGEIHRQIEYKAALAGVPVIKVNPAWTSKTCPVCGARRRDRVGKEFVCLMCDWEMDRQINAGLNILKTALASNEALARAVRFQPGALRHDVVSPLYDLFRRGMGAREEPSGVESR

SEQ ID NO: 48217 - protein, 181 aa, Clostridium sp.
MTFKNINKTRVVKQLEKRLRRLQRRVSRKYLKNKEGSKFVKTSNIIKIEKQIKLLYRKLANIRSNYNHQVTNKIVKTKPSRVVMEILNIKGMMKNKHLSKAISKQCLYEFKKQMQYKCEFNGIEFIEAYKWYPSSKTCSKCGHVKPKLSLSERTYICEEWGLVIDRDYNASINLSRYELVG

SEQ ID NO: 48218 - protein, 443 aa, unknown
  TnpB Polypeptide
MRRSTRTQDDETWRVAVIPVRLSGADRRRAHEACHKAALLWNFLLAETRAYWDEHGSDPSDKELRHRLYEKQPDLRDGLHAHTIQGVLDGMNDAVATYRENRRQGNMDAHAPHRAKNYRPLDFTAGYGWRPANDGKHIALSFGRNHKRILVRMPNISDPKTNAPVPVERWGAMRLCWDRNKRQWSLHVSVPTSRPPQGDPSNVAAIDEGIINPMAVAVETDDAYEILVVNGRHARAVKHYRNTRIASLQEKLSRCVKGSKRWRKLDAKRRRIESKTSDALRNADHQTTRKVSDFIQEHDAGRIVAGDVRGIEQNTRKNETRRVRNRKDQRRRLSQWSRGRQESLLAHKTGMTIEHIDESWSSKTCPACQTRNHPNGRGYHCRNCGFTCNRDAVGAINILIRAKNGSYQPMDTNKTVHVKYLRATPIFQPEERREHGVIPGTGA

SEQ ID NO: 48219 - protein, 373 aa, unknown
  TnpB Polypeptide
VILSYKYRLFTNRAQTESLNEMLGDFCGLYNACLQQRIEAWERAGKGLGFVDQANELKACRTAEPDLARWSFSAEQQVIRRLQKSFDAFFKRIKRGDKPGFPRFRASSRFHSADFRVGDGLTIRKSNRLTVVGVPGEIKVKWHRELPSKPKSAILTRSLGKWYIVFHVEVECADAVDGQSVGIDLGLTDLVAMSTGETVARPNFTKVHTKGLRRRQRELARARRGSKRRAKTRRRLAVYQRNVASRRRDFTHKLSADLVKRFGKIAFEDLNIKGLARGMLAKHVNDALWAQIIAFTTYKAEKAGGVVVCVDPRGTSQTCPDCGQIAKKLLSQRMHICDCGCRMLRDVASGIVIHDRAFGHGACPRTPSQRVAA

SEQ ID NO: 48220 - protein, 372 aa, Paenibacillus sp.
MIVTVTAKIKIKPDESQIQSLLATIRAYRQGCNFVSSVVYGTRELKLPALHQITYRNLRSKIGLRSQMAQSVMKTVMARYKTNQSNGHDWVQVQFKKPEYDLVWNRDYSLTANRFSVNTLQGRIKISYEAKGMEQYFDGSWMFGTAKLVHKRGKWFLHIPMSKEVSLPKPEDVKQIAGVDLGINFVAAVYDNEGATTFFPGRAMKRKRANYKRLRRQLQRKQTPSARRRLKQIGQRETRWMTDVNHQVSKALVARYGANTLFVLEDLKGVRQATEKARVKDRYVAVSWAFHQLRKMVEYKAQLAGSIVIAVSPAHTSQACPKCGRTAKANRNKRKHHFCCKTCGYQSNDDRIAAMNLTAQGQKYLCEGAGAA

SEQ ID NO: 48221 - protein, 404 aa, Escherichia sp.
MKRLQAFKFQLRPGGQQEREMRRFAGACRFVFNRALALQNENHEAGNKYIPYPRMASWLVEWKNATETQWLKDAPSQPLQQSLKDLERAYKNFFQKRAAFPRFKKRGQNDAFRYPQGVKLDQESSRIFLPKLGWMRYRNSRQVTGVVKNVTVSQSCGKWYISIQTESEVSTPVHPSVSMVGLDAGVAKLATLSDGTIFDPVNSFQKNQKTLARLQRQLSRKVRFSNNWQKQKRKIQQLHSRIANIRRDYLHKVTTTVSKNHAMIVIEDLKVSNMSRSAAGTVSQPGRNVRAKSGLNRSILDQGWYEMRRQLEYKQLWRGGQVLAVPPAYTSQRCACCGHTAKENRLTQSKFVCQACGYTANADVNGARNILAAGHAVLACGGMVQSGRPLKQEPTEMIQATACT

SEQ ID NO: 48222 - protein, 370 aa, unknown
  TnpB Polypeptide
VNKISVKYRLYPSHAQQRTLDETLAVCRDVYNSLVHERTVCYATQGNSPTLYQQQKAMTAWKPNNAELKTVHSQVLQNVAVRAELAFQAFFRRVKAGEEPGYPRLKGKGQYDSITYPQEGYSVGQNTVTLSKIGKVKAKIHHPCPGTIKTCTVRKNGEKWYACFSCEYEAVPLPPCDESVGIDVGLKTFAALSNGEFIENPRFFRKEEKALAKAQRKSDKVKDEYGSKERKAAKKVVRRVHERVRNRRHNFVHQQSRRLVNRFGIISVEKLNVKGMAQNHCLAKSISDASWTQFRNSLTMKAESAGRLVVAVNPAYTSQDCSACGYRAKKRLSERWHHCPMCGLRLDRDTNAAVNIKNSANALGQQCVAN

SEQ ID NO: 48223 - protein, 429 aa, Streptomyces sp.
MPRFRMYPTSEQAGIMLEHCAYARYVWNLAVEQHAHWRTGRKPAPSFAEQCRQLTEARRENAWLRAGNADVQQQALKDFARAKSAQFASGFGEPTWRRKYRHEGFRVIGTDRVPECNEDGSPKLNARTGRQVMGRLVVAQKLNRRWAQAKVPGCGWVRFRLTRAELPRAKTFRVTFRNGQWHVAFAVIPQPVDGPGTGETVGIDRGVTITAALSDGRKLNCPQLTTKERARIRKHQRRAARAPKNSPRKTAEYAKAAKLRAREANRGKDWCEKTSTMLARTYDLIRFEKLNIKNMTASAGGMVEQPGHKVRQKAGLNRAVLAQGWGLLRQRTEHKAPGRVEDVPAPYTSLRCSACGWIDKKSRKSQADFECVSCGFTCNADTNAAANVAAGQGGIPRPRRSACAGGTTTATGRASVREPQPARVGIPLS

SEQ ID NO: 48224 - protein, 390 aa, Escherichia sp.
  misc_feature (182)..(185): Xaa can be any naturally occurring amino acid
  misc_feature (209)..(309): Xaa can be any naturally occurring amino acid
VKRLQAFKFQLRPGGQQECEMRRFAGACRFVFNRALARQNENHEAGNKYIPYGKMASWLVEWKNATETQWLKDSPSQPLQQSLKDLERAYKNFFRKRAAFPRFKKRGQNDAFRYPQGVKLDQENSRIFLPKLGWMRYRNSRQVTGVVKNVTVSQSCGKWYISIQTENEVSTPVHPSALMVGXXXXSGTSVFRQKVKYPLRLTLQHQWSXXXXXXXXXXXXXXXXXXXXXXXXXXXXXXXXXXXXXXXXXXXXXXXXXXXXXXXXXXXXXXXXXXXXXXXXXXXXXXXXXXXXXXXXXXXXXXXXXXXXXVLAVPPAYTSQRCACCGHTAKENRLSQSKFRCQACGYTANADVNGARNILAAGHAVLACGEMVQSGRPLKQEPTEMIQATA

SEQ ID NO: 48225 - protein, 370 aa, Clostridiales sp.
MEYSYKFRIYPTPAQIQQIQSTFGCCRFVWNHYLALRKELYEQEGRMINYNACSGDMTQLKKTLSWLKEVDATALQSSLRDLDMAYQNFFRRVKQGQKPGYPRFKSKRNHRQSYKSKCTRTNIKVLDGAVQLPKLGLVKCRVSKEVKGRILSATISQNPSGKYFVSICCTDIEIKPMPPTGAAVGIDVGIKAFAITSDGVSYPNHKYLAKSQKKLAKLQRQLSRKSKGSNRWEKARLQVARLHEHITNQRQDAAHKLSTQMIRENDIICIEDLAPKNMVRNHRLAKSIYDAGWGEFRRQLQYKAAWYEKEVVTIDRFFPSSQLCSCCGYRNANTKDLSVREWICPQCGAQHDRDINAAKNILNEGLRLLA

SEQ ID NO: 48226 - protein, 460 aa, Okeania sp.
MYSCQQVLVAQNPELIAILTFLCEQSHKLTNIGIYYGRQLFFKSHKTLGKFDLEKAYKHNYHYKVLYSQAAQQILRTVAESFRSYYGLIIAYSSGKISDRPRIPKYRKKEGMATVSYPKQALKLKDNQIRVPLGNTCKRWFGVDNFLIPMPSIRAFSTLKELRILPRNRCFTQEFVYEKEIVVKPQLNQENVLGIDHGLNNWLTCVSNVGTSLIVDGKHPPLWFPSREGIGVGWYNKQVSTIKENQPLGFWSNKLAAITEKRNRQIPDGINKAARIVINHCLKKSIGTIVFGWNKGQKNQIELGKKSNSEFVPILTARLKERIAHLCSEYGIIFIETEESYTSIASFLDGDCLHNYGEKPNDCKPKSFRQAFLGHATQTLFMSRSETGKRIKRGLYRSSNNWLINADCNEAANIITKVSRKLGLNLSRLCRGTAEIVPRECISAKNRRSNMDLRCCVVSA

SEQ ID NO: 48227 - protein, 444 aa, Okeania sp.
MGRTHPINLQILLFAPDSKVDVIITIIEVMLIVMRTAYQYKLKPNKEQVSTIELWLDLLRRQYNYRLGERFSWWEENRCPVNACPLVMPIPQLRDNPNYYSQKRDLVNTKDKFPSYKLIHSKVLQDCRKQVKLAFDRWFKAEKNKQKLGKPRFNGIGCYRSFTYPQIKLDCIEENQINLPKIGKVKLIQHRPIPEGFIIKTVTISRKADGYYVTLSLEDKSVPALTSKVKPTLKNTLGIDMGLKEFLVTSEGELVPIPQYYRKSQQRLKTLQKRLYRKKKGSKRWLKAVKAVAKQHKKVADKRKDFHFKTANELLLKAEVIAHENLNIKGLAKTRLSKSINDAGWGKFLTILTVKAGNAGQKTIGIGVNPKNTSQDCSNCGKKVDKELNIRTHSCPYCGIVIDRDLNAAINIKNRAVGHSVLKARGVRRGTGTGKREAQTIASA

SEQ ID NO: 48228 - protein, 439 aa, unknown
  TnpB Polypeptide
MKTGYSIRTWRMRLFCPQPIWLDRTEEYFQNVVEFYYDLLQKHEELWNDSLFDIQRSLELLTVAGRDGREPVNPLPMGKVPVYLRRAAINKASATVKSILGKAEEPNSRKAVSQKAQEKPQVKPKKTPKEATKETPQRISQKTSQEELEQPLEFPDTVESKVTFFKGMYSDLTDESIRLKLWNGEKWVWIDCRLKGRSFPADSQLMSPTLVKEEKFYMLNIPVKQETSDARTAKERMAAGTRLCSVRFTNTDTFAMSCILDEKGNQVAVYASKGGREYGHRCKLLMEKIQRSRKNTDNDNCPQPNRKYYMHLKNLSEHYAHQVSRQIVDFCKKNQAGILVLPEYDSNYSKMVMIKSGNFSPLHLSSRIRSYLQYKAWAEGMLVLEARTDGLKDKCSVCGGKIRRKGNEFICENGHQGNRFLNDARNLGRKCQASFYKSR

SEQ ID NO: 48229 - protein, 459 aa, unknown
  TnpB Polypeptide
VIKLKRSKDTFKLNCQYRIVPDKQQVYQLNEWLYKLCRIHNLMLEERFNWWEFNRNSVNACPIFITHLPELKDQPTYYSQKRATHWSRETYKYLYEGVHSQVIQEAIKRVEDTFNRFIKGDLNGKRSGKPRFKSVRRYRTFTIPQLKPDCLSVTTNPHRRKNGGTRRDIAYISLPKVGQVKLIYHRPIPEGFTIKAALVSRRADGWYICLTLEDKSVPSLKSPEIEATQENSLGLDVGLEKFWTASDGEIELIQQHYRKSESKLVKLANRKDKKPHKSAQARKLAKKISKHHQRLQRKRKQFHYESATKLVSRDEQVFFVEDIKPGNLSRKNKPKQDENGKYIPNGQSAKSGLNKSINDAGWGQFLSIIAYKAAKAGKSVVKVKPHNTSQICSCCNRLVEKDLSVRIHHCLCGLILDRDWNAAINIKRVGLGIFPTIKRRKRRSKAATKEAYTVPLGSV

SEQ ID NO: 48230 - protein, 406 aa, Nostoc sp.
MIVYEAKAEATKEQLLKVNEALRTALFVRNSCLRYWIDGHAKTGYDLNKYTKVLSDNPGFPWVSKLNSTARQAMAERTWAAISRFFDNCKNKVLGKKGFPRFRKLQTRASVEYKQSGWSLSECRNYITFTDKFGIGTMRLRGTRDLNYYQINQIKRVRIVRRSDGIYIQFCIDHERKEQLEPTGKSLALDLGLNHFYTDSDGNKVENPRFLRKFEKALKKAQRRFFRCAKGSKNRAKARNRLGRKHLKLQRQRQDWCVKKALSVIKSADFVAYEQLQVRNMIKNRKLAKSISDASWSIFTQWLKYFGKVYGRVVVAVSPAYTTIDCSNCGHQVYKTLSTRTHSCPNCSYTACRDYNASRNILNKGLELFKNTAGQAGIYAFGESDLCLEKATSQSKSSQRKRKVSQ

SEQ ID NO: 48231 - protein, 430 aa, Nostoc sp.
MYLTQKNQIRELNKSEFVALRELCRLSKNLYNVGLYTVRQYFFQERKHLRYESAYHLCKTNENYKFLNTDIAQQTLKVVDRTFKSFYGLISAFKSGSYQQKVKLPNYLPKDGYFLLIIPRIVIKDAKFRIPMSNAFRKQFGEVWIPFPKRLDINQIKEVRIHPKYNARYFEVEFISEIEPEPIELKTDDALSIDLGVDNLAACVDTNGASFLVDGKPIKAINQWFNKRNAQLQSVKDKQGIKSITNQQVKLLAKRNSQVRDYLNKTARFIVNHCIQNQIANLIVGYNPGIKQEINIGGRNNQNFVQIPFHSLRFKLKAMCQRYGLKYIEQEESYTSKASAVDGDEIPVYNADNPKEYQFSGKRIKRGLYRTKNGHLVNSDLNGSLNIGIKSKHKGFTRVSRAALTQPRRINLLKLEKWRATALASLGTTS

SEQ ID NO: 48232 - protein, 413 aa, Nostoc sp.
MANKRITFRLYPSKEQANKMHYWRRLHKDLYNSCVEHRKTSYKKFGKSVDYFAQQNCLPDFKEEWVEYKELGSHALQDTVKRVDFAFKRFFKLKSGYPKFKSSRYYKGWTYPCNSGWKACTNGKNGYLKISNLGNVKMRGQARDWGKTKTCTIIFKQGKWYASITVDCIPNRPQTDTGAIGLDFGTHHAIADSNGNTIENPRFVKTAQIKINFMAKTSRRKRPPSKGVKASRRWRKANKAIAKIQSKVARQRQDWQHKLATQIVKSNSLVATETLNLKGMTRKAKKGSKRKHQKTGLNRSLLDVGIGNLKDLIKYKVTEVGGFYIEIPTKKVKPSQTCPHCGHQKKKSLADRVHHCEKCGYQCDRDVAAAMVILNYAKGMERASLDADESTSTWCGSFKQVAQLKHQKRASQA

SEQ ID NO: 48233 - protein, 423 aa, Nostoc sp.
MIIYEFKCKGKEKQYRAIDETIRTSQFIQNKCLRYWMDNKKIGRYDLNKYCAVLAQEFPFADELNSMARQSAAERSWSAISRFYDNCKKKIKGKKGFPKFKKNCRSVEYKTSGWQLSPNRKAITFRDKKGIGTLKLKGTYDLNYYDIKQIKRVRLVRRADGYYAQFAIDEAARCGGSPRCSDCRVDVRIETQPTKKAVGLDLGLNHFIADSNGNLELSPKFYRKAEKQLNRANRKKSKKFSKERKKAKARQSNNYRKARNRYARKHLKVSRQRKEYCKKLAYSVVHSNDVIVYEDLNVKGMIKNRHLSKSISDAGWSTFRQWLEYFGYKYGKITIAVPPYNTSQNCSNCGKKVKKSLSTRTHVCGHCNYVEDRDINASINILRLGLSTLGHSGTHAWGETPSWAIGVNLSSNGDSLNQESPEF

SEQ ID NO: 48234 - protein, 353 aa, Nostoc sp.
VLVLEYKIKGTKSQYQSIDEAIRTTQFIRNKAIRYWMDAPKEALMNKVALNNYSTALRKEFKFVEELNSMACQSATERAWSAIDRFYGNCKSKVQGKKGYPRFQRDNRSVEYKTSGWSLHPTKRRITFTDKKGIGEVKLLGKWDIHTYPVKSIKRVRLVRKADGYYCQFAIKTEPLSESRIADGEIGLDVGLEYFYSDSDGYHEPNPRFLRKAETSIKHAQRQIYKKEKGKNKRRKARQKYARKHLKVSRQRSEHAKRIARNVCKVNALVVYEDLRVKNMVKNHCLAKSINDVSWGLFRRWLEYFAIKFQTKLVAVNPRMIPFHEKSDTDVNPKILATSKFFNCELRIANCEL

SEQ ID NO: 48235 - protein, 225 aa, Nostoc sp.
VTKQGYAQFCIAVDREIKVEPSKKVIGLDVGLNHFYTDSNGEKVENPRFLRKSEKALKRLQKRVSKKFRKGKPQSNNYKKARNKLARKHLKVSRQRKDFAVKLARCVIQSHDVVVYEDLQVRNMLKNHKLAKSISDASWYQFRCWLEYFGKVYGKITIAAPPHWTSQNCSNCGETVVKTLSTRTHECPHCGTVLDRDENAALNILAKGLSTAGHFGTHAWGENDL

SEQ ID NO: 48236 - protein, 369 aa, Nostoc sp.
MTQTISVSCKLQVPPELRQEIDVTLKAFAEACNQILEVAKRENVRNTTKLHHLTYREVRATTGLKANHACQAIRRVVGNLKATKQVHQFKPSSISLDARVFTYREADQHVGITLLNQRVWLPLSIGNYQLALLRGKNPTSATLVKRRNGDYYIQIAVDLPTDPTGKTPKVVGVDLGRRDLAHTSTGKSWNGEQIQKVRNHFAKVRASLQSKGTKGAKRLLKRLSGKERRFQKWLNHSISRQLVNEAKSINAAIAFEDLTGIRQRAKVKGSEQRRQHHNWAFYQLRMFTNYKAAIAGIPVILIRPEYTSKTCHHCLHIGKRNAKSFSCENCGWHGDADFNAANVISLLGLSVMQPEQSVLSCALQGSKLG

SEQ ID NO: 48237 - protein, 411 aa, Nostoc sp.
MYLGGKQVFNLTYEFKLKPTQAQVTVFEQWLEQCRRVWNYALSERKDWYKSRSCPVNACSIRSEYIMPADAPRPTIASQCKSLTKARNEIPALGEVQSQVLQQVLRAVEGAFVSMWERNHGFPRFKKPGRMRSFVFPQLGVNPVQGNRVKLPKIGWVKFRQSRPIPEGCTIKQARVVKRVSGWYVMLTLQWDVSVPQILPHGDMIGVDVGLTNFVATSNGLTVKRPKFFVDAERKLKLLQQRVSRKKLGSNNWRKAQRKVAKLHEYIANRRKDWHWKLAHQLCDGVGAVFVEDLNLTGLARAMLGKHCLDASWGQFFNISEQCCFKRGVFFMKVDSRKTSQICPNCGHETGKKDLSERTHHCSNCGYVTDRDVAAAQVVLSRGCAAVGHTVKMLSEGKVVGLPLMKESPSL

SEQ ID NO: 48238 - protein, 407 aa, unknown
  TnpB Polypeptide
VIKTYALSHTLQLDAFFRSYLKTLNAMLTEIWEHIQWQSVPIQGKTQHRLLPTLPDYSFKKLMRDIYMRDWIYAKHWVDSALKTAFSILKSWKKNYINGTRKRHKPVVSRQFVRVKQTLMKLEGDHLRITIKPREFVYIDLTKRHFKLQGKLGEPILTKDKIYLPLKHSDLVAESNSDQNPSNIGWDFNLYSIDGFAPETGWIKLETKPLHTLHIASFERRRRLQKKASKSQKVKGILTKNKRRERNRAKNAAHTLANSIIALGRCNGFEDLAKEGMYKKYRIWNRKIARTDWRKIATIAGYKAKNILVDPYHTSKECSRCGWINKDLKGALFECQKCGLRIDRQLNAAINIYLKMGGLPHTRHWFDAQVLGRFTSTGVKRKDFNELARSLYDVMRPQLYVNPLRTT

SEQ ID NO: 48239 - protein, 353 aa, unknown
  TnpB Polypeptide
LKYFKLALRFKEKLKWHVKQGRLEIIYDEGRRSWYAHIPVEVEDEEKVKGNLRASVDLGIVNLATVYVEDGTWYVFKGGVLSQYEYYNRRISKVQKVLTKYKQSRSRKLKLLYDKRRRFLRHSLNSMVRKIMEELKEKGISEVVIGYPKEISRNHGNKLIVNFWNYSYVIKRFEEVGEELGMRVVKVDESYTSKTCSLCGEAHESGRIKRGLFKCPRVGKVINADLNGAINILHIPESLRSTDRGISVVRDRSNGLKTQPVIYRWTNGMEWVETPTSYEVVKMKAVNHKPMIRPKGTLALPGGEEVRKNILPIVKKESSLFIISRFFAYLAILKLSFKYSLSPNNMQVLLIGK

SEQ ID NO: 48240 - protein, 441 aa, Ignisphaera sp.
VLKTLKRTVKLESDPLNEWKYHVLKGVEEYQRLIVNEMIDVIISEGLPTTRKKLHERFYSHYKEKYPFLPSRVIEGAYVVASRIVKSFRKRKKKGLTRKDKPEYKRVMITIPNTINWRFNKVSVSVLTHKGWVEIPLRVTNQIIHYLYEGWRVSQELKLRLVGRKILFWLTFEKEVEVETKEGNYISIDVNENNVTVAIFDGFKFRELRRYETGLGRIVVNYSLRREKITKGNSTKDELVKKKLSRLREKERKIDVLRKSVKRITDLARSLNAKVIVGKFSLRAKEKMEGDKNAKLRHRIHQWSVIKFTELLKAQPIDVEELSEAYTSSINPFNGEKLKKRRQVVEKVVKVFNPYLMTGTAHEGRGIKVFKVNARYLESGEVLWERDSIAPLNLAKKVDGRVVVFPSTSPNDLRVTVYDPLRGVPVAELEVIKSKEKLRHG

SEQ ID NO: 48241 - protein, 176 aa, Bacillus sp.
PIRALLIDKENRNFNLLKHKLGTLRITKKSNKWIAQISVTTPTPQKTGFKVMGVDLGLKVPAVAVTDDGKVRFFGNGRQNKYKKRKFRSVRKALGKKKKLNAIRSSKNKEQRWMKDQDHKVSRAIVNFAKENEISVIRLEQLANIRQTTRTSRKNEKNLHTWSFYRLSHLLSTRPS

SEQ ID NO: 48242 - protein, 283 aa, unknown
  TnpB Polypeptide
LGGRQRFKLAIGNYQRGLLKGQEPKTATLLKRQNGTYYLNIQLEFQPELPQETDWVLGVDLGRTDIAVSSEGDKYSGKQITKIRDHYAKLRSVLQHKAAKGTRSSRRRCREIQKRLSGKEERFQAHTNHLISYRLVQKAKTQKQVIALEDLTGIRERTNELPMTKTERRRSNSWSFYQLRFFLTYKCIKFGVKLVLVNPAYTSRTCHKCLHIHHEQGKSYRSGKSFRCGHCSWSGDADLNGAINISALGQLINLPGGSSTLFCSLQDVVLRAAENPNFSRQAG

SEQ ID NO: 48243 - protein, 406 aa, unknown
  TnpB Polypeptide
LGMNMRAYRYRIYPTEKQVSTLTNQMILAKAVYNTLLDEAKQHYKATGKSFTRNMMNMRLTKLKKEHPEFNSLHSQAIQNISDRVWKAYRNFFRRVKEKQKGKRIKVGFPRVKKFVVSLTYPQSGFKLSGAHLSLSKTGRLPIVLHRPIESKVKTLTIKCSKSMEWYATFTAESEGGSFMPNEKSAVGIDLGLSNYATLSDGSVIQNMRFSKQNIARARRLQRQISRKVKGSRNRRKAVLKLARFSNHIAQQRHDFLHKLSRQLVNSYGLIAYEKLSIGNMMKNHGLAGAIQDAGWGGFASMLGYKAEKAGCRAVEVNPKNTSTTCSNCGAKHLMPLWKRTYECEKCGLKIGRDLNSAKVILARGLDTAGRAGIYACGEAASTFERSRASSFVEAGTTCERNVHAQ

SEQ ID NO: 48244 - protein, 399 aa, Streptomyces sp.
MIRAYKFLMRPTVGQTIALVEMLRDHCSLYNGALQERRDAYRHASKTSIKYGTQSAQLKEIRAFDTERQGRWSFSGQQATLRRLDKAFAAFFRRAKSGGTPGYPRFRGVNWFDTVDFPKDGDGCRWDSTPHDPVTRVRFQGVGHVKVNQHRPVVGKVKTVSVKREGRKWFVLLTAEQTQPEPLPATGGVVGIDMGLANFLADSEGRFVSNPRHGRTAAAKLEAAQQALSRCKRGSKRRREAVQKVAALHRKVRRQRLDHAHKTALDLVRAHDFIAHEDLKIRNMRAAPAPEPDPDRPGAFLPNGAAAKAGLNRSISDAGWGVFLTILHAKAESAGREVIAVNPRNTSRTCPECGHTAKENRPTQEKFHCVSCGHTAHADTVAAVNVLRAGLVHRNANQA

SEQ ID NO: 48245 - protein, 379 aa, unknown
  TnpB Polypeptide
MQCNKYSAIIWNACVSADQESRKEHNKSLTRSELQFMMKKSVPHILANSINMVIFKYITARDAMWKSIKAKHENSTKVKLPYKEKKYFNTGWTHQNIKIYKEKGILTLSKPVLADDQKNYTRQKPIKCHLKIIPDNIVEIELVYQNGLKLAIKTKQENDNVLIQSNNESAIDLGEIHSITSIDNNENAIIITGRKLREIKQLRNKHLGKLKSRQSKCTKGSRQYKKYSRAIWKLKYTIDKKILDIVHKTTKLYLDYCIKNNIRKVYYGDLDSCTRNTKEEKRGSKKTRQKLSQWNYGLIVLQLTNKLTRYGIQLVKVKEYYTSKKCPVCKTLNSPKGRNYKCDCGYSIHRDVNGAINILNDNSQYEIHRYDNLKYLQIT

SEQ ID NO: 48246 - protein, 363 aa, Eubacteriaceae sp.
MNKSFRFAIYPNETQKTLISKTFGCVRFIYNKMLTDRILHYNLTGEILKNTPAQYKAKFDWLREVDSLALCNAQLNLNRAYQYFFKNKEMGFPRFKSKRNNRQSYTTNLVNGNIRLEKDRLVLPKLGGVKIRVHRSIPKEYKLKSVTISRSPSGKYHASILFEYQSNIPVIKPKTFIGLSHSTNELIITSEGLKAEYPAYYQKSLEKLKKAQRKLSRCQKGSRNRNKERIKVARLHEKVANQRKDFLHKLSRQITNGADMVCVEVLNKKDKGLQGYYKNDVPIIGYSMLLKMIDYKLKEQGKHLVRINDRFNTSNQCSKCGEINDHLPLHRHSFQCIECGLEMDWSHNACINLREEGKRQLLA

SEQ ID NO: 48247 - protein, 233 aa, unknown
  TnpB Polypeptide
VSRDSAGRWFVSILVEERIRPLAPNGDAVGVDAGISALVTLSTGKKVTNPRHERADRRRLARAQRALARKAKGSANHAKARLKVARIHARIADRRQDHLHKLTTRLVRETQTVAIEDLTVRNLMKNRRLARAISDASWREMRAMLEYKAAWYGRELLVVDRWFPSSKLCSACGTLQHSLPLHVREWRCACGAVHDRDVNAAKNILAAGLAERRNACGAGVRPQRESSRAGGRR

SEQ ID NO: 48248 - protein, 381 aa, Halomonas sp.
MTKRAYKYRLYPTPEQEQLLTRTFGCVRFVYNAVLRYRTDAFYERREKIGYVAANAELSRMKKAEDTGFLNEVSSVPLQQCLRHQQTAFKNFFEGRAKYPTFKSKRHRQSAEFTRSAFKYRDGKLYLAKSKTPLDIRWSRELPGEPSTVTVSKDSAGRYFVSCLCEFDPETLPVTPKMVGIDLGLKDLFVTSDGHRIGNPRHTARYAARLARAQRRLSKKKLGSANRAKARQKVAKIHAKISDCRQDNLHKLSRRLINENQVICVESLKVKNMLRNPTLAKSISDAGWGEFVRQLAYKAEWAERSLVAIDQWYPSSKRCSGCGHVVDSLPLKVREWECPECTVKHDRDINAAVNIKAAGLAVLAPGENVSGMEQVSVSSSR

SEQ ID NO: 48249 - protein, 546 aa, unknown
  TnpB Polypeptide
MTEQAGTTNSMVISYKYGLMAPVDWDQDCDEELARQIALWNRLVEIENIYRRHVQALEDADTDVMSWKTKRSLLENERRSLLEEQGSNRRALPSDQAAAEPGGATTPTDRLAEVNIGLDDARRFARVANREHLRLLNVERYKSVKEARQASGLFWSNYNAVIDRYEVARRHTSKKGVSMRLHVHNGSGHVTNQIQGGISFHDLEAGTHSQVRIGPRPPGMKHKCGASLTATVHRRGGVRRTVTWPIILHRRPPEGSIVKSVVVRRHRRSDRWVWSAVFVCVCAANFSRQTGSRIAVNIGWRRTPDGIRVASVLSEHDAEARYVIFPERLIQGARLCNNDSSERDTDLRAMVDLIRGINFNETPSTLAYIGQVVKELDQCTPTNLAHLVAEWRAFDQNWQPDILALLEEWARRDRRRWHNREERRAWITDARKYYYQQEIQTLFNGASEILINAHNMSRTAQISEHRVPPPAAQARFVVAPSIFRRILMDHARKEGIKITVLNRHHDTCVSCRNRLLSVRRADLWWRCNTCGNIFDQDEHYCRLLLS

SEQ ID NO: 48250 - protein, 379 aa, Lachnospiraceae sp.
MEQITITAKIQVSTSVSAKILLDNTMSVYRDACNYVSDYVFRTHDLKQFSLNKVLYSTLREKFGLKSQMAQSVFKTVIARYKTILENENKWIKPSFKKPQYDLVWNRDYSLTQNCFSVNTLDGRVKLPYFAKGMEKYFDHTIYKFGTAKLVNKHGKYFLHIPVTYEVSESSLSEICNVVGIDRGINFVITTYDSKHKSGFVSGKSIKQKRANYSKLRKELQMRQTPSARRRIKAIGQRENRWMQDVNHCVSKALVESNPKHTLFVLEDLSGVRNATERVRTKDRYVSVSWSFFDLEQKLIYKAKQNQSTVIKVNPRYTSQCCSMCGHIEKFNRDKKIHLFTCKNCGYKSNDDRIGAMNLYRMGINYLENSQVPDTVTSE

SEQ ID NO: 48251 - protein, 374 aa, Bacillus sp.
VNIITTITAKIQIYVSDKQAESLKITANAYRKACNWLSKYIFETKTLNQVKLNNLYYKQLRNLFGLKSQMAQSVMKTVIARYKSAKSNGNEWSLIEFKLPEYDLVWNRDYSLTQNQFSLNTLDGRLRLNYERKAMKKYFNGTWKFGTAKLVNKYNKWFLHIPMTKDFPEPDHINVNNIVGIDLGINFLATTYDSQGKTTFYSGKIVKHKRGAFKATRKQLQKKQTPSARKKLKQIGSRENCYITDVNHRITKALIDKYPRGTIFVLEDLKGVRSATEKVRVKNRYISVSWASYQFRQMLEYKTKMNGQKVIIVDPKYTSQTCPKCGHVEKANRNKKLHTFKCKNCQYQSNDDRIGAMNLHRKGIEYIGVVTTGV

SEQ ID NO: 48252 - protein, 340 aa, unknown
  TnpB Polypeptide
MTNYYLKTRVYELFPSKTMKAVLDRNCDYRRYCWNQALALWNDLYFAHQIYDKIRYTTFTPKENKKTHQIKIIKKDVHLNPSPSWRLVRDKLVEDKEDWQFNYSAHLLQLAVQDLGKAWNNFFDKAQPDWGKPRFKSKREVRQGFKSDQAKVINGELVLEKPKGLKQEWEAIGLSEKPLDYPTGVMSIYRESGRYFVSIPYKIPKNEFKAKASTGRVTGVDLNVGHFNYIAGDERILPQKLEYTYEKIKHYQRLLARKRKVNGRKESTKSNNYLKTRTKLQVAYKRATNIQNDLLQKFTAKLTNDYDAIVVENLDVKKMMMSHVASKGMHRSMFGKFRQS

SEQ ID NO: 48253 - protein, 156 aa, Ruminococcaceae sp.
MEKESSNYEKQKIRINLIHEKIGNQRRDYLHKESRKIANFYDLVGVEDLNMQAMSQALRFGKTVHDTGWGMFRQFLEYKLAEQGKYFIKINKWYASSKKCSTPNCEYQNKKLTMDIREWDCPECGAHHDRDVNAAINIRDEAVRLYEERKRSAEGA

SEQ ID NO: 48254 - protein, 287 aa, Streptomyces sp.
VGRDLHVARVHRRWGVVNIPKLGRVRFRWTRDLPGARLIKDALGWHIVFRTVHEVSVSMRGLEADSHVGIDRGIAVPLALSDGDTYVHGPWLDEKEEARLLCTQQRAEHRKQYRKPGRRCSKKLSTAYDQIRDLRARAKRRVLDWQHKTTSVIAKKYALVSVEELHIMNMVRSAKGTLGTPGVNVAQKSGRNRAIAGEAWGRTVELLAYKIDDQGGILISVPAPGTSLRCSECGVVTTGSRESQARFVCRNPECGWTGNADFNASRNIDQAGLVLASAAGRAVVRQT

SEQ ID NO: 48255 - protein, 471 aa, unknown
  TnpB Polypeptide
MKRTVKIKANCSNNEDEILLIGTIQKNIKNYVWSRYSGIGSLLKQSGWTIRDELIQQNLLSKRITKTFSRAAVEKSASIIKTNWIITRKKVKRAIAQNENLTKDDKHYLYLCLKHTPTLYSILNYKKIDYNIDYLKDLKVDVHRLNNLLRRYVRRYKTKSHTNKTNVIIDSNIYKFNSNNKNFSFTGKKKNSRIEITLIGTIPKLKGTLELVKNQKTNQYYLHVPLDRIISKKEMTAESEMLGLDVGITDLITLSNGSVYGANSAELFYTLSDNLVNKNRSRLFSYKRELEQRILIEKDDIKKSLLELKLKNLNENNLGPKKRISKISKYKSRIVSHINCELNKMVKEEDIEEIVREDLNWVSKKKNVSKKQQNRFSTWSKGILLERLSVKLAEKGIKETIVNPAYTSQVCCKCNHLGIRKGKEFKCSNCNLSIDADFNASINTKKRKFIKEINIDTPYKEVKKYYENISV

SEQ ID NO: 48256 - protein, 421 aa, unknown
  TnpB Polypeptide
MIIRQGFKFRLDTSGTQSARLRVLCGHARFVWNQALAKCNEAADTESEYVPRYETMAKWVTAWKREPETEWLKEAYTDNLQQKLKDLDAAWQRHFKKVNDAQRPRFKKKGKSRDSVRFVNFNKYCRIENRRVKLPAGLGWMRFRKSREIVGTIKNCTVGFEGGHWFISFQTEREVPEPVHPSTSMVGVDMGVARFLTLSDGTFVEPVSAFKKNQAKLAKAQRALARKVKFSANWHKQKAKINRLHIRIANIRRDTLHKTSTEISKNHAMIVIEDLKVGNMSRSARGDRENPGVSVKAKSSLNRSILDQGWYEFRRQLEYKQGFRGGEVLAVPAHHTSQTCPACQHVSSENRTSQARFQCVQCGFNEHADLVGAINVKARGHRVLACGEAGLPDSVKQEPVRNREEVVPSAAHAASGIPHRY

SEQ ID NO: 48257 - protein, 282 aa, Cyanobacteria sp.
VQFSVKVERQEEVSPASRSLGLDVGIASFYTESEGNKVDNPRHLRRSEKALKRLQRRVSKKFLLGQPQSNNYKKAKKKLGRKHLKVTRQRKDFAVKSARCVVTSSDVVAYEDLSVANLAKNRRLAKSVSDAAWSQFTQYFQYFGECFGKIVIAVPPEYTSQDCFVCGTRVRKSLPVRTHQCPKCRTILDRNHNAAINILIKALRLVGIETTNTVGHTEFQAWGEETAFSSGESLKWKVASANQESNDSGYCLKSLECQLVRVLLYVSSSSLEPLKRWARLRE

SEQ ID NO: 48258 - protein, 417 aa, unknown
  TnpB Polypeptide
MMIRVFTYRLTPTLAQAQNFARTAGSCRWVYNGALAIRERLYRETGKALSYSALCKWLSWNRNRADLPWLSESPSVAQQQALRDLADAYSRFFKGQNRRPTFKRKGRARESFRVTKYGVRVERLSKSVGRIRLPGVGWVRLRYSRPLDARICNATIYRRAGRWYVSVCCEADTEPAPANASGGVVGLDMGIARTITTSDGATYQAPAQDRVRLRRLQKSLSLKQGPVKGKRRASKNWRKALARLQRFKAREADKLRDFHHQTTTALIRENQAIVVEELVVSRMTRRARGKGRASKAGLNRSILAQGWSAFRQMLEQKGAHAGVTVVAVPPAYTSQTCHHCGYTACENRKSQAVFACVSCGHRANADVNAARNILKAAGLAVSACGDVVRPRPVAASVALCRLASVKQEPNGSQLCLF

SEQ ID NO: 48259 - protein, 393 aa, Halococcus sp.
MDEHRNIYRQAYNHFLYRLNHADGRTLMRDLRDELPELKKWWTDLKEVHSRALQRVAERLDNNLSRLAKMKEKGRKVGQLKWKAPSEYRSFTYSQSGFELKNTSGRTAVLRLSKIGEISIRYHRELSDDATIKEIHVKKERTGEWFASLVVDDGEPTPEPPKNPDECVGIDVGILKYVHDSDGFAVGSLDLSDERERLEREQRKLSRKEHGSANYKRQRRRVAECHADLKRKRRDFLHRLSNYYATEYDFVAMEDLNVAGMMQFKSNSRNRASAAWGTFLRMLEYKCEREGTHFVAVNPAGTTKECSRCGIKTEKPLWVREHSCPACGFEADRDENAAYNVLARGLKDVGVVHPERTPVETALPVSTASVDAKRVVEAGSPALKERTASAVSE

SEQ ID NO: 48260 - protein, 405 aa, Halococcus sp.
VADDYVRRTAITRLSVTGEQRDALETTITDWKRGCQIATNLAWGKCNTRSDVQPLAYDTVREDTDLSSQHAILATHQAAQAITGCIARRSKGRKASKPEFTAPTVKYDTRTMTLFDDQTVSLTTTDSRVRVDLVLPEDPDGYQRQYLDGDGWEPTESTLTARDGDFFLHIGFRRYRNDTERSTDTTENGTVLGVDLGVENIAVTSTARFFPGGELTHHFDRFEGVRGSLQRTGTRSAHRTLKIASGRQERHSRDVLHQTANGIIAEAINHDCSTIVFENLTNIRENIPEARWQHRWAFSQLVGYVEYKAEAVGVAVETVPPENTSKRCSRIGCGFTVDENRPSREHFRCQKCDHEANADYNAARNIGLRYVRRGRQSSRRTGDGQLALKSGTLTPKRGFTAYATA

SEQ ID NO: 48261 - protein, 490 aa, unknown
  TnpB Polypeptide
MVFVYTIGLKPTNQEKEQLNKRFKQAKSVYNLTLKELLKRNNKMKKDPLYKKAYKLPKGSERNEILKDLDKVYGLEGKFTGGKIASEFRKTLNLEDYLYSTICQKLGFRAWLAFSKMKFANGANRVNFSEQINSLISGYSDQGIYLDGDFICFGIKRKKKTLIKIKINFKRDQYEDEVFKNKLLYWQLIRKKINGKENYYLQAVMDGIAPGTGLEGGRGSVGIDIGTSTIAVSSEVQTELEELFPDEKRFERACEIARLNRSLERKRRATNPENYNEDGTIKAGKKTWKYSPRYKRDLKNLSELKRKEGLSRNLAHRTLAKKIVSYGDRFVVEEMNFMSLSKRAKETKVNEKTGKFQSKKRFGSTIGHRAPGLLIAFIQERAEKEGKTFIKADTRSVKASQLDHTTGEYIKVSLSTRTKKVDNFKVQRDLYSAFLLQHVKDDKKTVDLELCSKNFERFLSNQERTMRELETSLSSTGKTDFFKDEFLKVV

SEQ ID NO: 48262 - protein, 282 aa, unknown
  TnpB Polypeptide
MIQKAYKFRFYPTPEQEILLVRILGCIHLIYNKALATRTQAWHEHPERVSYKQTSAILTSWKKQEYLSFLPEVSSVVLQQSLRYLKTASNNLFSGHTKYPNSKKKRNVGSATFTKSAFKCKDGQVYLAKYAEQLYIRWSRQLLLGCIPSTIVISDANWGELVKQLEYKAQWYSRTLIKIDRYFPSSKRYSNCIHIVEKLSLNIRQWDCPECASHHDRYLNASINFLATGEAVSVWVATVRPEESKSRRASTMKQKALNIDELGIFRCLVGSASGECQSPYVK

SEQ ID NO: 48263 - protein, 184 aa, Lactobacillus sp.
LGVFFILITLSGYLLNGKIKGMQSKRYMKARNKLQAAYARAKNIQNDLMQKFTTKLVSEYDSIVIEDLSVKGMLMSHVASKGMHRSMFGRFRQILTYKCEWYGKKLIVANKLYPSTQRCAACGLVKKGDEKITLRGNKKHGTKHNEFVCYNPNCRNYNKKVDRDENAMLNLIILVKHPELNKAL

SEQ ID NO: 48264 - protein, 275 aa, unknown
  TnpB Polypeptide
LPGSCLCPASFTLHACQHDAAQDWLARQQELLLPVPYFLVTFTLPGALRAVAFQHQALVYDLLVEGVLGIDLGVTNIAVDSDGDIHSGQAINNVRYRHRRLRKKLQQRRTLDSRRRLRSLAGQEARFAKHVNHTISKGIVAKAQRTKRAIAVEDLTHIRTRIGARKSQRVTLHTWSFAQLQAFIVCKALRRGIPVHRVDPRNTSRTCPACGHIAKANRKTQAAFVCLLCGFAGLADRIAAENIRVLGRALVSAPHCSDADGIGSARAKPKPFRPG

SEQ ID NO: 48265 - protein, 453 aa, Thermoplasmata sp.
VHPRRSLVFPLPTNLPCSIAHVPRIDHFPTVRDEPGAIPTPVRRLMEDFRLLVNECLREVLTAGVTSHRRISRYARMRALETRVTGGIGLAASQIALSLAAGHRRRLRQGIARRTPYVRTPFVRVPAKCFHFDLDTGKLRLSLRRGEWTSFTIPVSNYHRQVLSQLDHRVTQVHIGLHRVVVIYAKTPEEPYAPTSLVALDTNESSLDGVRVTSEGATFVRVLFPEVREIQARHFGRRRYLGRKKAHDRRVSRLLLSREGWRERHRVRSQLHNITRSIIDRLATDHSALALEDLTGMSGPRRRVGGSRSHSVPRSRVLRRRLSSWPRSELHRQLAYKAQDRGVPVLWLSPYRTSRTCPRCGEVSEHRRRVGTRFDCAKCGWSLDRQLNAGLNLGVTALRRTAGLGGLRLDPDALLDDVVRPLYPTGNDRWARVERTGREAISSGTPPNGSAPD

SEQ ID NO: 48266 - protein, 396 aa, unknown
  TnpB Polypeptide
VPALINEEMMIQKAYKTELDPNDRQRTRLQYLADARMFMFNVGLREWQRQYKNGEKPSAYGLKRQFTEAKRTIYADLYDWSLVPFPVQGAAFGDLGDAFKHFFRRIKAGETPGYPRIKRYPGGFALKNTRIEHDRVRLTSIGWVRLKERGYLPTTDGGLTFGTYAALSQRAGRWFVSVHVQEDAPELKDRHATVIGVDFGIKALATCSNGRVFENPKPLIAAQRRLRRLNKELSRRKKGGANWGKTKAVLAKAHKRVADIRSHTLHQVSDYLTQEVRPACIVIEDLNVRGMVQNHSLARAISDVGFGELRRQIEYKAGWLDIDVLIADRWYPSSKTCSRCGAIKSGLTLSDRTYVCDCGLTLDRDLNAALNLAALGQNRQTGGDSPAEMGCSNASL

SEQ ID NO: 48267 - protein, 546 aa, unknown
  TnpB Polypeptide
MVIDSKYTKIFKSNGLTRQKYDELVGFALMLRDHKNLVSEYVNSNLEHYLEYSKLDFLKEMRATYKDAIPSSFDVQLYTQVFNCYQNKFEAIRKHLDFEVVRFVGFEFYKRDTKKNKKGDLKKVVTEKSKTPLTICLTYLARYGNENTLDYIAKQLETCDEKKREFYNNILRCCEKFGFERLFELALRKRNRIIKRYSEYPIEFKSLSFGGRCRKTRIIDYNKKFGSVINSFVSLSGIGRKSFDIPVKFNKDWHGSMRDYSKTNPDYEYVLTFNEKYHQVNINLCKDGERYIPEAGDNVVGIDVNCKHNLFSLSNETTYDYNRQLVKDFCKLSLVVDELKKDKNYTIGKRKQQKLDTLKMKMLKSEQQLISGMCKELMMDGVNHIVMEDLDNGFGRCYVKDKDNEDINYNRKVKFLGLSSLKQEVEHIARKYGIALSTVQASYTSKMCPICGCIADENRPNQETFECIECGHEDNADVNAAINIRNRVAVTVLQQKLLKQRDNKSFEPKRLKREKVKEILLSFRRDLLKNAGSECNKSMMNTFDYV

SEQ ID NO: 48268 - protein, 413 aa, Pleurocapsa sp.
MLTLTYEYKLEPTAEQISYIENTLDVCRSVWNFALLNRKDWCKSRKSAINACSIERELIMSVDEPFPNYHVQAKQLTEAKKNNNFLKSANAQVLQQTLRTLDRAWDDMKARGFGFPRFKNKYRLRSFVFPQLNKKPISVDSIKLPGLKEIRWRMSRPIPDGFVPKQARIVRKASGYFVMLSLQLNIDVPNPFPHGHPRGLDLGYDKFVATSDGQEIKRPRFLKTLQYKLKLLSRRLKNKQKGSNNRHRLNQKIARLHQRISDTRKDWHFKLSHQLVQDSGMIFVEEINFVSWQKGILSKHSADAGFGQFVNILEWVCWKTDTYFAKVNKDGTSQTCPNCGAHTGKKPLDVRIHHCNECNYHTTRDIAASQEIRNRGVTAVGQTVLENVCGLKATGSISHDVLVGGGRSRKLAS

SEQ ID NO: 48269 - protein, 400 aa, Pleurocapsa sp.
MKQVLTIVCKLNPSNEVIQKIESTLKAFANACNYANQTVKPTITSKTTIQSLVYQTIRKEFDLSANLAVRACARVGANRKTAKQKKKPVKEFKPTSADYDARIFAFREKDWTVSLTLVGGREHIPIVTSNYQIGKLKGRKPTSAQLCKYNDGKYYIHIQLKDDAPKPIKANNVIGIDLGRTDLAYTSQDKKWSGKDIKDVRDKYSRLRASSQKKASKGTRSSRRRCRQLLKLLSGKERRFQRHINHVISKTVVADALQANSIIALEDLTGIREDTNQQPRTKTERRRSNSWAFFQLRQFIEYKGITQGVETYIVPPAYSSKSCHKCLHLGLRSGKKFKCANSACKWSGDADQNASRVLAIIGGVVSLLRGSDSLSCTWDSGLLKHSTDGGVRKPRHFSAG

SEQ ID NO: 48270 - protein, 401 aa, Pleurocapsa sp.
MRNVVKVRLYPTLEQKLSLAKAFGSCRFIWNYCLAENNRIYKETGKGISAIAMKKWIPQLKKKEDTEWLKETYSQCLQSSVINLGIAFKNFFEKRGGYPRFKSRYGKQSLQYPQNVKVIDTGLYFPKMGKVKANLHRLFDGELKTVTISKTKTNKYYASLLFDDGLPEVNPSSNGKVLGIDLGISSYCITSDGSKYDNPRHFKKHEANLKRKQRKLSRKQKGSNSRNKARRLVARAHEKIGNARQDFWHKLSRKLVDKSQVIVCEDLNIKGLVRNHKLAKAINDCGWGMFLNFLEYKCQKEGKVFLQIDRFFPSSKTCNHCLNVVDSLPLDIRTWDCPSCHAQGIDRDVNAARNCRDEGIRILSCGTRDTANGGNVRQRRGRKSTVLDAVAHGANPAARVE

SEQ ID NO: 48271 - protein, 373 aa, Pleurocapsa sp.
MKTYKFKLYQHQRNKYLHYSINASASIYNHCIALHKRYYKMFGKHLNQYRLMKHIAKLRKRKKYWKQVGSQAVQDIIQRIEKAYKLFFKQHQKGTRPPNFKKRRKYKSFTLKQAGYKFLSENKIKIGNKLFKFSLSRKIEGKIKTLTVKRNSLGELFLLVVTDYQQEYIPVVTGKSAGWDFGLKTFLTGSDGTKIKSPLFFNRLRNKLKAANRSLSRKKKGSHNWYRAKDHLNRIYEEISNQRRDWFWKLANKLTNEYDVLIFEDLNLDGMKRLWGRKVSDLSWASFLEVLETVAANKGKLVHYIDRFYPSSKTCSCCSYINQELSLKDREWTCIECNTSLDRDKNAAINIQRVGASTLKLGDVRQVQPAISA

SEQ ID NO: 48272 - protein, 405 aa, Pleurocapsa sp.
MTKQYSILVEMLNLTYNYKIQPTTKQIEIIEHNLDVCRAVWNHALYVRKLWYNSRSCKVNQCSLFHEYIVEPFDYPNYHTQSAELTKAKKANAFLKSGNAQAMQQTLRKLDRAFNDMKSKGMGFPRYKNKARSFNILGKISVEDKYLKMPLLKLIKFRKSRDIPEGFKIKQVQIIKKASGYYANLMIELDVDIVKPIPHGHAIGIDAGIESMISTSDGLVLTRPSFLDKALRKIKLLQKKLKNKKKGSNKWKQLNHRIALLHEAVANRRKEYHFNLAYQLCDGVGMIFVEDINFVLWSRGLFGKQSLDMGLGQFFKILEYVCLKTDTYFAKVNKDFTSQICSNCGTHTGKKDLSVRIHSCPECGYVQNRDVAAAEVVRNRGLENIAVGTTVIKQPSDGVLAGASA

SEQ ID NO: 48273 - protein, 225 aa, Pleurocapsa sp.
LPFGRGIGIDIGLESFLVTSDNFRVEPALFFRELQSRLKVLQRKVSRKKKRSKNWEKAQLKVARVHHQISNTRKNFHFQTSHLLCDMADMIFVEDINFKMTARGFLGKQMLDGGFGQFRDLLSWVCWKRGKYFQQVDHKYTSQICPECNAHTGKKQLTQRVHNCPECGYSTTRDHASGRVILQRGLKSVPTDCREWKLSGSGVLSGISYLDKCRSRNANLRELEA

SEQ ID NO: 48274 - protein, 256 aa, Pleurocapsa sp.
LPDGCEPSTVTVKLDPSGRWFVSMLVDDYTIETLPPTKKKVGIDVGVSSLLSTSDGEKIANPKHFNRLYQKLASAQKELSRKTKGSLNRHKARLKVAKIHAQIKDARTDFLHKLTTRLIQENSVIAIEDLAIRNMVKNHKLSRSISDAAWGKMFRQLEYKCDWYGRKLVKIDRFFPSSKRCNHCGFVVDKMPLDIRTWDCPSCGTKGIDRDINAGKNILAAGLAVIVCGADIRPDRHSSKGQLRKTRKGRKQKPKS

SEQ ID NO: 48275 - protein, 253 aa, Pleurocapsa sp.
VTIIKDCSGRYFASFVVEVEQPVSPVTEQSVGIDLGLTYFAILSSGEKVENPRLHKKMLRKIQKANRRLSKATKGLSRMEESERRKRRKHRLAKLHAKVKDQRTDFIHKLTTRLVRENQALAVEDLNVAGMVKNRKLSRAISDAGWSKFKTTLAAKCDKYGRHLTIVDRWFPSSQKCSCCGESEGKKELDVREWECLFCNTIHDRDINAAENLNRWAGGQSDQYINGRGSKCQTTVVAVCVEPSTTPKQLTLF

SEQ ID NO: 48276 - protein, 441 aa, Pleurocapsa sp.
MVKQNIRTDKWSIVATQKQKELLQNTVSEFRCLVRCLIGVVQTHWSTIGRLEANKQIPAVERLIHATAKNPEIKYRYFGTRFHKFPSYYRRGAIQFAIGQVSSFVTRYREWQSGIRKRKDALPPRLNTDCRTYPPLYKNQCIRFADDNNSAEIKVFTGSDWLWITVGVTGHRQRHLNPDNQRQSPYLIVNEQKCHLSVPFQIKNAKLKEKDSVLSIDLGINTTATASIVNFDGTVSHREFIHPGRDIDRRDKRLKRVSRKASLTGKLCKGFTRGLYRKAGNINREIGQKVSARLVKIAKQYGVKYIVFEHLKGWRPRGGKRKSTLRQRFHSWLHRRIVELTQMKWSELGGQVQFVYPRGTSSNAFDGSGKVKRSSKNYELAVFSSGKKYNCDLSASYNIGARFILKLMGGNSPQDEQGKSSCSSPRSWVTLSMLWSCRPTL

SEQ ID NO: 48277 - protein, 406 aa, Pleurocapsa sp.
MKARYQYRIYPRPTQIEPLAKAFGCARVVWNDALWVYKKAFREGLPRPKDVDKQVITQAKKTEERSWLAEVSNIVLQQSYRDLCTAWNNYFSSLKGKRKGKPVGKPKLKKKQSRQSIRFRIGGFSVHSQSVKLAKIGHIPIVFSRPLPSEPSSVTIIKDCSGRYFASFVVEVEQPVSPVTEQSVGIDLGLTYFAILSSGEKVENPRLHKKMLRKIQKANRRLSKATKGLSRMEESERRKRRKHRLAKLHAKVKDQRTDFIHKLTTRLVRENQALAVEDLNVAGMVKNRKLSRAISDAGWSKFKTTLAAKCDKYGRHLTIVDRWFPSSQKCSCCGESEGKKELDVREWECLFCNTIHDRDINAAENLNRWAGGQSDQYINGRGSKCQTTVVAVCVEPSTTPKQLTLF

SEQ ID NO: 48278 - protein, 373 aa, Pleurocapsa sp.
MKTYKFKLYRHKKNKYLHYSINASASIYNHCIALHKRYYKMFGKHLNQFRLMKHIAKLRKRIKYWQQVGSQAVQDVIQRIEKAYQIFFKQHQKGTRPPNFKKCRKYKSFTLKQAGYKFIFNNKIKIGKQVFKFSLSRKIKGKVKTLTVKRNNLGELFLLVVTDYQQEHIPIVTGKNAGWDFGLKTFLTSSDSKSIESPLFFSQLRNKLKAANRSLSRKKKGSSNWYRAKDHLNRVYEQISHKRRDWFWKLANQLTDEYDVLIFEDLNLDGMKRLWGRKVSDLSLATFLEILETVATNKGKLVHYIDRFFPSSKTCSCCGYVNQKLSLQEREWTCLQCNTTLDRDANAAINIQRVGASTLKLGDVRQSQTAISV

SEQ ID NO: 48279 - protein, 422 aa, Pleurocapsa sp.
MILNYTYRFYPDAAQQERLLEWLETCRICYNYALREIKDYIGSRKCAVDRCSLESEYIMPPNYPFPGYGQQQNNLPAAKKKFPRLKEVPSQVLQTNIRRLHDAWDFFRDRGYGFPRWKKYGQLKSILFPQFKTNPVTGYHVKLPKLGLVLINLHRPIPDGFVVKQVRVLKKAKGWYAVIAIGSDIEIPDPVFHGHCIGVDVGLLSYCATSDGFVEPGRKFFKTLYSRLKVLQHRLSKKQRGSSNYEKARNKVEAMHNHIAFVRKNYQFNLAHKLCNMADTIFLEDIDFRIMAKGFLGKHTLDAAFGQFRQILKYVGKRRNVFVDEIDHRGSSQTCPNCRIEVKKELEDRMHSCPECLYETDRDIASAQELCNRGIEKHSTQGLWGKEIDCQVGLSGAFCLDKWRKSDERPRGGFLRLGTREV

SEQ ID NO: 48280 - protein, 418 aa, Pleurocapsa sp.
MATKRIAFRLYPSASQNQKLHYWRRLHKDLYNACVSHRKTQYKQFDRSINYFDQQNCLPKFKECWIEYQELGSHALQATVKRVDYAFQRFFKLKSGYPQFKSSRRYKGWTYPCKAGWKAYTSGKNGYLKLSNLGNIQMRGQAKDWGTPKTCTILFKQDKWYASITVDCIPSRTVTNTGAVGLDFGTHHAVSFSDGTIIDNPRFIKQSQGKINHLAKQSRRKRAPNYKKRIKPSRRWKKANKTVSKIQSKVARQRQDWQHKVASEIVSGNSFVATEKLNLKNLTKKAKKGSKRKKQKTGLNRSLLDVGIGNLKDLIKYKVTEAGGIYVEIPTRKVAPSQTCPGCGIKRKKDLSERFHVCDCGIQQPLDRDVAAAQIMLNYARGKELASTVAESPSSISCGNMRQLGALKRRKQLSQRSG

SEQ ID NO: 48281 - protein, 459 aa, Pleurocapsa sp.
LIYNYQYRLRPNTEQKLVLNNWFRICRYWYNHQLGERFDWWERNRSYTDRCPLICHLPELKDKPEFYGQKKQLPVIKKDLLVIGWSGELLDFSSVPSQTLQEVCDRVKKAFARYISGDKNKKRSGRPRFKNTARFKSMVFEGAKLHSCSVGGKWLYIVLPKIGVVNIRHHRPIPNGAKLKSVQVIKKADGWYINLRLLDNSIPDYEPDIIPTWDNTLGMDAVLHKSDYLATSEGVKLPSLKSLRISKSKLAKVSRRKNALKKGSKARRKLAKKEAKLHSSIARARKDHAYNTANALLATGKKVFFHEKLNLKGLMKRNQPKSDGNGHYVPNGQSAKSGLALSWTDAAFAQFFNILKYKAEKAGALVQEVNPAYTSQLLSYKDEFVFTDSSIREYWDEEFKLLIDRDINAGINIKRVGLGLFPTIKRRKGNRVTINSVTNSTLKEVLTILRGFQKPAFCR

SEQ ID NO: 48282 - protein, 378 aa, Petrotoga sp.
MLKTYKFRLYPTNEQIHKLNEHFGHTRFVYNLFLEFVNNAYKNTKTSMVNYNIWCKILTVLKRSEKYHWLKEVNAQSLQQSIKDLESGFKRFFKKQAKHPKFKKKSSRQSFRVPQHIQLYENENNDKYGIIFLPKFKEGIKVRVHRKIDPNAKIKNCTFIKTTTGKYFVSITFEVEGSYPERYIDYENSIGMDMGLKDSVVLSDGTKYPAPKVLSKYERKLKHAYKKFSSKEQGSKNWDKAKLEVAKVHEKIKNTREDFLHKLTKEISENQADVFVVETLNIRGMLKNHHLAKSISDSGWYQFKTFLKYKAERLGKKVIEIGMFEPSSKTCSVCGYKNGGLKLSDREWICPECGTKHDRDINAAVNIRKSGLEQLATV

SEQ ID NO: 48283 - protein, 386 aa, unknown
  TnpB Polypeptide
MLVQRGYKYRILPTKEQEESLLQCGGNARFLWNYALKTNQDYYKETGKFKFYHELAVSLPKLKEEYTFLKESFSQSLQMVLRQFDKALKDSFKKEKGFPSFKKKMLLNDSFTCPQKWRLGKGFVFIPKIGEVKWTKHRAMKGKPKAITISQDGDKWYCSVLCEYTIPDKAKECDNIVGCDVGLKEFAILSDGTVISNPRHTKKYENKLAKEQRKLSKKQKGSKNRFKQRLKVRKIHNKIRDIRKDFLHKTSNSIAKNYDGIFVEDLNIKGMMKNHCLAKSIGDVSWSEFNRQLEYKCKWSFKYYLKIDRFFPSSKTCSNCGYVQEMPLSKRIFDCPNCGISIDRDLNASLNIRNIGINTLGHSGINACGDSSLELSLKQEKECLEN

SEQ ID NO: 48284 - protein, 395 aa, unknown
  TnpB Polypeptide
MAISYKYRIYPDKATQQKLAEALDACRWLYNKLLEKMNDAREKGYKLRTYETQNMIPSMKLENPKLNLVYSKALQMVNYTLHSNIAALAALKRKGYKVGPLRFKGKDWYKTINYNQSGFKIDQDHSVLHLSKIGDIKIKLHRKIEGSVKAVLIKKSGKAWYAIVQIGPEPNMPDPETRSVGIDVGLKSFAVDTDSNSVDNPRFAEKAAIKVKNIQRRLSRAKKGSNNRQKLRDKLDKANERINSQRNDFLHKLSRHYVNNYDIICVEDLDVKGLKEKGNNKGMHRNIHDASWSRFIFMLSYKAESAGRKLIKVDPRNTTQRCSACGSIAKKELSDRIHECLYCGFSCDRDYNASRNILITGMEQPVAPIEPKPLHRISVMQVLAMKWEAAPFRAW

SEQ ID NO: 48285 - protein, 409 aa, unknown
  TnpB Polypeptide
LSVVRVKISGVARYRLEPSSEQLPLLGEHCRHARLVWNLAVEQFNCYDPAKGPAPGYVDQARQLTEARAEFAWLRAGAQMVQQQALRDFDRARRNFFAGTHRRPTWRKQGRHEGFRIVAISTGHVRRLNRSHGVVWIPKVGWVRFRWSRQVPSAVSYRVTLDRAGRWHVAFAARPDPIPAPDNQAVVGVDRGVAVAAALSTGELLTCPGLRPGEAQRLLRLQRSLARSKRGSNRRSRIKTAIGRLNAREVDRRRNWVERTSTDLARRFDVIRVEDLHIRAMTRTARGTVEEPGRNVAAKAGLNRGILTSGWGQLVTRLEHKARGRVEKINPAYTSQTCSVCGIVDAKARESQAVFACRSCRYTDHADVNAARNIAQRTIAAGRAVTARGDLGTSRSTKREPHPAHLLSA

SEQ ID NO: 48286 - protein, 418 aa, Cyanobacteria sp.
MNYCYRIYPNASQEQTMLHWLEISRKVYNYALREIKDWVNSRKCSLDYCSLEREYIIGADKPFPTYYSQQNALPKAKKEFPILGEAPSQVLQTTIRRLHDAWNYFQERGFGFPRFKKFGQMKSMLFPQFKTNPITGLQISLPKVGKMPINLHRPIPEGFAVKQARVLRKANRWEVVVTIESDVSIPDAQPHGNALGIDLGLEKFLTTSELEFIARPRFLTSLYRQMELLQRKYARTKKGSKNREKARIKVAKFHNHIASVRKDWQFKLANHLCTKVGIGMVFVEDLNLKAMSRGMLRKHTLDAAFGQFLNLLEWVAKKHQIYFLRVNPNGTSQTCPKCGTHTGKKELSERVHKCDVCGYETDRDHAASEVIRLRGLELSTQGLCGIENACAVGLPGTKETPSRSEAKPRKGKTRNAQQ

SEQ ID NO: 48287 - protein, 384 aa, unknown
  TnpB Polypeptide
MVKTMQTTQYKLFRAPRLRHLKRHTNTARQIWNYFLSWQRTRHSLGLPYMNVHAMSREFTILRNAHPDLFESWRDIDSWAARDILLRLHRAYERFFTYCKQRAKGGKPRKVRPPKFKSWRKPYSFTMSPSGHKFDEDTVRILGRHYRFNLSRPIRGNVKTVTVKFDALGDAYLTVVTDNVVSEITPKTGKAAGFDFGIKTMFTSSDGTKHESPEFYKRGSNQIAQAHRAHSKKKRGSNNRERARLELARAHRKISRQRDNHHWHLAKHLVLTHDVLVFETLTFEGMKRLWGRKVSDIAPYAFHLKLQHQAKKHDKQVVYIDRWEPTSKTCSTCGQLNALIDLKTRHWQCQGCTSKHDRDVNAAINILRVGTSTLAESACQTGES

SEQ ID NO: 48288 - protein, 479 aa, unknown
  TnpB Polypeptide
LQPNGIIKVRILPTLKQQMVFKRWLGGSNYTYNHALHDIKRKKVSPYFNQLVVSYANDCDRYGNRKLPEFLSFTPTEIRKAALNDLVAAYDAAKTNRQLGNIGHYEVDYRRKKKQRCCFSISIPHDSIQFYIDEKYSDEYKVDLCPTKMKECMTNTLRKGKTKIKSILDECRLLQKEIDISDFYPINPEKNDYKNINTRIDFIDKKLKQNVFPKEMNKKPNFKPNVNTSIRVARLSRPGRNKSLDRLINSSQLNYNCRLCYKYGFWYLHIPYIRTSYPEPKIDNQDIVALDPGFKTFQTYFSSSGKYGKYQHDERRLKRICSMLDYYNWSKTNWHKPKYVRYKTDKLYRKQQHLVDEMHRQIIQDLTSQYNWIFLPSFETQDMLVGKSYNKKHREAKRHAYQLSHFKFKTRLINRCEQLENCKLLVVSEAYTTKTCTCCGWIWESMTTKDRIFNCKECNLKMDRDIHAARNILIRNLTG

SEQ ID NO: 48289 - protein, 480 aa, unknown
  TnpB Polypeptide
LGEVLDGIKQDAELVARYALKELTEQNLALVTYFDGIKPAEAGRRMGLFLPDHVKKRFRSGASRLEKMFQEQVVTALRSWATRSGVVNQTYTGYVSAGWRRTVRDSKPLSMQPRLALSAADKQYRRMSVTPERIILDMVAQGQWITLHFPTPPQLFEDGCEPGVPDIWIDDQNRVMFGFHGTTDPGRPEFSSRYVVGVDVGVTNPAAYVVWDTEKKEVAERSLLGQRARSLSNKIKRGARQVASLKRQGRDEEAASHRVHLSNRRKEMSILVAQEITDAAWRYDNALVVFEDLSHIKNTMMFGRWFRGEVHRRTRDMVEADGGRVMKVNASYTSRKCHICQSDLDVSDYSQPCCSACGITHHRDLNAAANIAQRANHRKACQTRSKHTTKMKRVRRSKCHVKSLKHPGTKNRPTPKAPQNQKKTPTHPSLSSREVSKGMCPAESRVSAVDHNEWFQTTSGTTNPKENQSTNSVDWFYPKE

SEQ ID NO: 48290 - protein, 193 aa, unknown
  TnpB Polypeptide
VPLPPSDESVGIDVGLRTFAALSNGEFIENPRFFRKEETALAKAQRKFDKVKDKHGSNSEAGCSPRSGASPRGRKSQERKQTKKVVRRVHERIKNRRHNFVHQQSRKLVNWFGLISVEKLNVKNMLNNHCLAKSISDASWTQFRNTLTMKAESAGRLVIAVNPAERYRNPKMIYAQGLLSIAGRVQQKAFPTG

SEQ ID NO: 48291 - protein, 499 aa, Lactobacillus sp.
LAFKKFQNRNEIRRLINRQNAIQKRAVAMINHGADKGDLYQKLNQRIGVKRKMSQATINVMMDIFRNEHITAIPDKSFVVFARTTLNVHDGEPQELLLQLNKLDSYTLLLEPKQSSEKIFSTPKRGWLMTLRDDGWILMLPGQNPNQGIRLRLPEEAENNATSNAKSNATSTKSKTSAKAKPANNLKSAGQKHNKATSNKPQKSYAKAASQENSHQHKPEKAASHVTHPQAASATSKTTSSAYSTASSYPTSAAAADFSQISVASHAEPVSGPREADELIKKLIESQQHFRVVGLDYGKINVISATDGSDDFLQVPGSVISKHILDYQHEIRQLQRQTQTLDDDVELTRLSYMLKRYVLKSCRKIVNQLIAHYGDNVIYVTELHPSLDVNKTPNIILSPDYFYKALFTILFELVGQSAAIIQVPNNETSIICPQCGFTSSTNRQKERHTFKCLNCGFVSNDDQTAAINIRQRGLRYISNLTKSMNFNVPTTTTAAINQE

SEQ ID NO: 48292 - protein, 382 aa, Desulfosporosinus sp.
LSERTVKSLTAKLEKRQRRLDYWTAFLTSKTFPPVIFGTKEMFLRRCKGLITKQEWNDCRNNRIYSRGDKSKGGNPNLRVVFKDGVSFLEISTLEKTVKNRAVKVLIPIYLPEKISKKTGNVNGIPYRKMFMDSLERGEAYQVELIKRDDEYYAHITFEELEAKVSYTGHVNMIGIDTNPDGFALTKIDTFGNYRGHTYLKQHELTFCRSNRRTNLCGELVAQAVDYALVRQCGVAAEDLKFKDDRDVSSKLARVSSPFVYRALLMMLERSCLRNGVEFVKVKPQYTSKIGLYKYCHQYGLDVHNGAALVIARRSYEFKETVPKLLEEILVPKKKLIAFKKMNEWSKWSEITRQITKLFKKRKEVNTPGLWLVRRKELLGIA

SEQ ID NO: 48293 - protein, 407 aa, unknown
  TnpB Polypeptide
VHYAHLANNVYNQGLYRVRQALFDGHWMTYGQLNTSLKQSKEQRDCMLYSSMHSVHLTQQVLKLVAQNMESWRKARKAYAKNPSKFTGCPRLPKYLKKGGMTSFVVDNQTAKLRQPDKKTGRRFVEIPVLNNFKIELQHLETDKIQQVRIIPKNGCFVVEVVYKTNQTINYKPDNHRYLTIDPGLDNAFTLATNVPGIQPVIINGQPLKAINQYYNKRRAKLSQILDLANLPKTSHRLDRLDFYRNQKVMAFAHEASKRIVKFALSHELNTIIIGKNKGQKRSINMGKRNNQNFIGIPHQKIIEMIKYKANLVGIAVIQHNEAYTSQTSFLDGEAPVNSNGNKARKRRGLSPAKRRIKRGLFRSNNGTLINADVNGALQILRKVVPNAFADGIEGIGLCPVKLNLSF

SEQ ID NO: 48294 - protein, 307 aa, unknown
  TnpB Polypeptide
MRCFAGSCRFVFNKALALQKQMHENGEKQLNYAGLCKLLTEWRNGSETPWLKDAPTHPLQQALKNVERAYTNFFAKRAEFPRFKKKGLRESFRYPDPKQIKVDQANSRIFLPKLGWMRYRNSRMVLGAVKNVTVSWHNSKWFVSIQTEREVEVPTPQGEAIGIDMGIVRFATLSDGSSFAPLNCFRHHETALRKAQQAMSRKTKFSSNWRKAKKKVQRLHARIANVRNDFLHKLSTEISKSHAIVCVEGLQVSNMSRSAAGTQEAPGTNIRAKSGLNKSILDQGWFEFRRQLDYIAPSEAWKRGISS

SEQ ID NO: 48295 - protein, 307 aa, unknown; identical to SEQ ID NO: 48294
  TnpB Polypeptide

SEQ ID NO: 48296 - protein, 271 aa, unknown
  TnpB Polypeptide
  misc_feature (7)..(9): Xaa can be any naturally occurring amino acid
  misc_feature (28)..(31): Xaa can be any naturally occurring amino acid
  misc_feature (264)..(267): Xaa can be any naturally occurring amino acid
VASVLAXXXNIAMEDLSVKEMAEGSPKXXXXNGEKDRRERIRLGMIGIVKFSNPFIIDGKCKTATVYRKRIGNHYEWFVTIAYAVEDLMKDTEFMDPTMAKKDAGLDLGLENLVTMSDGTVIPNDRTYRKKERELANAQRMLSECEKGTPDYYKRLGKLSHKYKKTRNHRKDMFHKISRELSVRYGNIAMEDLSVKEMAEDSSKGMRKSYRDAGWNTFTRMTVYKVEETGHTVTFVDPAYTSQICSSCGTLVPKDLSVRVHKCXXXXHSRG

SEQ ID NO: 48297 - protein, 446 aa, unknown
  TnpB Polypeptide
MRKNKERRRFQMEKKKVKKKKDRSKIVTLCEKHIIKKGHMYYERCDELSFLAKNLYNATLYEQRQSFFQKAFKNYYVVNKEFAKANQVDYRALPAKVSKDVQKLPDRAFKSFFALKKLEAEGKYDKEIKIPKYLDKKKGRMTVPYEKGAVSTVEEGYVSLSQSGIKVPTKIDKDKIVGARIVPKRDHYVIEILYDKVKVQEKEEYNRVAFIDPGMNNLMTVTSNVFNPIIYNGRKIKSINQLANKNIAKRQERMAKMNLKVKKTLGEREIQRLNVDRSKGTKAIWTKRELRIKDNFHKITRHLVDYLVENNIDTVIFGYNKGQKQEINLGKKTNQNFVYIPFATLRHMLKYKCDLVGIKYIEQEEAYTSKCSFVDREVFKKKKKYQGERIERGLYKTSTGKEINADVNGSLNIGRKYLEKQKIYNDKMHNELLLHMNNPKRITITQ

SEQ ID NO: 48298 - protein, 230 aa, unknown
  TnpB Polypeptide
MELPAVRGGLDLADVALFHQTVHLVGCVVRGDAHEGGELVHRRPPQRHDALHAEGLHRGETGFPVLKPAEDLLIKVQLEFGVYFVKSLMQHGASPSCGMKKSKLSIPILTEKGKSSPDGGGTVFPYRPLWVFSAFVQNPQSGKNMMWNHKLALHIADTSWGEIRRQLTCKADWYGKELIVIDRFFPSSQTWLPQQGGQRPQCSALGVPGMRGAPRPRHQCGTEYSQRRAQ

SEQ ID NO: 48299 - protein, 152 aa, unknown
  TnpB Polypeptide
LYHLIKDSNNHNKAKLHLSKIHETISSQRNYFQHKLSFRLVSENQAISLETLNVKGMQKNRCLAQAIFDTVWHSFVTTLTYKTEWLVKTILKIGQFEPSSKICNVYGYHNSNLTLKDRAWICPDCKTNHDRDINAAINIKKFSLQDQNLIGI

SEQ ID NO: 48300 - protein, 152 aa, unknown; identical to SEQ ID NO: 48299
  TnpB Polypeptide

SEQ ID NO: 48301 - protein, 408 aa, Oscillatoriales sp.
MKLVERHIITKKHHFWSEIDHKAFLSKNLFNLANYHYRQHFFQQNQKLNFNQLYHQLSQTIDYKALPTKVSKQIIRRLDSAWTSYFKALKAWQKHPEKFLGKPKIPRYKHKTKGRNILPYSHESISKKALKKGICQLSMSEIQIPTSVEEIIEARIVPKSSCYVVEIVYEKAEETTNYQQIAGIDLGVNNLMAVTTNQTGLRPLLIKGRPLKAINTFYNKQRSCLQSELKIKQNQTQSQRLKKLTHKRNCRVDNYLHTASKIVIDWCTEHQIGILVIGHNPTWKQEINLGKRNNQQFVSIPHYRLIEMLTYKAKLKGIKVVITEESYTSQASAVDGDALPKYGGKKPVFQGKRIARGLYKTAKGKLLNADVNGSFNIIRKVIPDVLDQGIKGQPFDPVVLDPLRMTGL

SEQ ID NO: 48302 - protein, 447 aa, Serpentinicella sp.
MKAKNYLNNNALISIKGGENVLYNEKIEVFFSKEDSLILDGQSKICNWLYNQLLQATKDDYENGNSLKLLSGRNLRNYSTKMKDVNKFLYSVHSSPLKNTALRLKDAYERFFKGQNEYPKFRSWKKYWFSLYYDEPNKGFKVDGQSLKISLGKAVVFDKKGKEKGKQVSVTGELKESLVLPKGAKIKTFRLCKQQGDRFYAIFTIEAIEPNKKEEKSWIAIDQNHKNFFVAIDNTGRTFEFLKLYQTKYWDEKIDLLKSKRDLCLKKAKEHTTIHGNKYYTSSKRYHRINKALNKAYNTRREQIKSIMYQIAHFIAKNYDHVIIGNYVPSKNTAKYKTMHRSMLNQAHIGEFRKILEWVMLKSGKHFSLVDEKDTTKICSMCGHKEKKPPNIREFTCSNCDTFMLRDVNSAVNMANKVSLTPMSFDNIDKINKVGVFNFKRYSLMVV

SEQ ID NO: 48303 - protein, 426 aa, Moorella sp.
VINLARKKNSNNGMPMQTLTAKAKVVNLCDRDALLLGLLGFAATKLWNGANHHRRSVWNETGKIPGFAEQCRELKANRWYKLLPSQSSQEILGEQDDSYRSWFSHRKNGNKNAHPPGFRKKDSLSTVTFKQNAFEMLPGNRVKLKLPKTYARQEILLEYQLPPDVTLGKVQQVKLVYEPKTGDWYLHITHKVMIKYSEIGNIMSLDLGIVNIIAGLITDGFSFIVPGGELLALDRYFQKEKAKCTKSTSRKCVRLNAKWGRQRSHYLHVLTKWLVNLAIAHDVSTILVGELKGIRAGKDWGDVGNQKLHAWPFSKIISLLTYKAALAGIRVIKVSEKSTSTTCPVCSRRTKKARVYRGLFVHCGLALNADLVGAYNILQRYLREAGLTLPDRPGVVGALARPAVNLFVWRKTTPEGREQGTFKQAA

SEQ ID NO: 48304 - protein, 373 aa, unknown
  TnpB Polypeptide
MKQTLLVKLASSPEEHQAILQTMEQFNEACNTVAEVAFTLGTANKFRLQKAVYQDIREKFGLSAQLTIRAISKVAEAYKRDLSIKPTFKPHSAVVYDQRILSWKGLDRISILTLDGRQIISIRLGSYQEARIDRKVRQSDLILRDGVFYLAVVVDAPEPTPDDPTGTLGVDLGVVNLAVDSDGEFYSGKAIDNVRERIDTLKSALQSKHTKSAKRHLKKLSGRESRFRRSVNHVVSKRLVSKAKDTHRQIALEDLGGIGDSTVRHGQRRRHKSWAFFQLRSFIEYKAKLAGVMVKLVDPRNTSRTCPQCGFVSKSNRKSQSLFSCQQCGFASNADLVGATNISRKAPVNEPIVSPVLMGGWAGTSSPALAVSG

SEQ ID NO: 48305 - protein, 382 aa, unknown
  TnpB Polypeptide
MIVYEFKLKGKEVQFRIVDEMIRTARFVRNMALRYWMDNRNVKLYDLNKYCAVLAKQFEWAKKLNYQGRQASAERTAFAIQRFFANCKANKPGKKGYPQFQKNNRSVEYKTTGWKLADDRKYIKFIDGFAAGEFKLVGTHDLHFYQIEQIKRVRVGRRSDGYYAQFCIDAERRIESVPTKHNIGIDVGLLDFYTDSDGNKVDNPRHLRKSEKALKRQQRRVSKKKKGSNNRKKAIKKLGRKHLKVSRQRKDFALKLARCVVHFLDVVAYEDLKVRNMVKNRRLAKSISDAGWSQFFEWLQYFGLVFGKIVVAVPPHYTSQECSRCSKIVKKALSQRTHICQCGCVLDRDENAALNILAKALKQYPGALENFNALQDRPTSTC

SEQ ID NO: 48306 - protein, 341 aa, unknown
  TnpB Polypeptide
MILTIKIKHCTDLTAELEKAKQVALYALKSKSRSSKDVKHIGLKSAISNQILKKYSSNKKIKTVNRVKLAVPNQSIRVNEKELIIPCLDLIIPTDFFRYKFTKINQIELDKTYAYITGEIKEPELIKQDKHIGVDLNTTGHCAVIGIPHTGKIIKLGKKALHIHTKYKNIRKTLQSQKKYRKLNQTKRRESNIVRDLNHKMSKKIVLTAKENNCSIKLENLKGIRNNKKQARSFKYSLSSWSYFQLRSFIEYKAKKFGVYVGLVAPAYTSKKCSKCGTIGMRKGKSFMCPQCGHVDHADANAAFNIAVWPLIDPLHTERDVCKGSTDAPQCGVVISSRKAA

SEQ ID NO: 48307 - protein, 443 aa, unknown
  TnpB Polypeptide
MMTKKVKKRIYKNRSNILTLTERHVIRENHVFFDECDRLSLKAKNLYNATLYVQRQSFFNPDVKFINYYGVNKEFTDNNQFDYRALPAKVSKQVQMLVDKSFKSYFTLLKKKNKGEYDKPVKIPRYLDTTKGRFVVPYPKDAISLKTDGFVKLSKTDISIPTRIDKDLIVGVRIVPKGNHYIIEVLYDVVTPNIEVDYSRVAFIDPGLNNLMTVTSNVFNPILYNGRPVKSINQLANKNASKRQSLRTLWKPNARTENKHRIQQVVFPRLERDNSKLTKLIWSKRSNRINDYFHKVTTNLMNHLVLHDIKTVIIGHNIGQKQDIDLGKFTNQNFVNIPFTKLISMLEYKCQLVGINFVVSEESYTSICSFVDREEICKHKEYFGNRVERGLFETSSGLLINADVNGSLNIGRKYLESIGEYSNELQNQLLNYMVNPKKLTISI

SEQ ID NO: 48308 - protein, 392 aa, unknown
  TnpB Polypeptide
MVLKGRKLRLYPNKAQDAQLRQMCGNERFVWNSLNGMLVNRYNNNKHLYNDGIPKEKRKHIMLSAYDMNYLLPRLKEEYSFLEQSDSSALQVVSATLNQAYRNYFKNPEHFGLPKFKKRDRYNLSYTGKSTVDIVAKRYIRLPKLGYIKTSKTGCLKDVKIKRYTVERDSTMCWYVTFQIEEDVVQFAKTGKAIGLDLGLNDMVATSDNFKSGRFNEQSLEKRIRSQQRKYSKRRHRAKSTIKQSTDSLHIYDFKNVEKARVTKAKLQKHLANKRNDFLQKLSTELVKNYDVIVIEDLSSKNLMKNHKLARAIGNASWYKFRMMLEYKCEWHGKELMVVPPHYTSQECSNCNHNDGNKPLDIREWTCSNCGTHHDRDINAAKNILNKGLATV

SEQ ID NO: 48309 - protein, 286 aa, unknown
  TnpB Polypeptide
MLKAYKYRIYPNNEQKIQIAKTFGCCRFVYNQTLAYRKEVYEKEKKSVSKTDCNNYCNRQLKKEYEWLKEVDKFALTNAIYNMDAAYQKFFKEHAGYPKFKSKHDNHKSYTTNFTNGNITVDFGCNRVKLPKLKGIKAKLHRNFIGQIKSATISQVPSGKYYVSILVETEHVELPHINQNTGIDLGIKELCITSAGKKYENPKIIRKYEKKLVKLQRQLAHKEKRSQNYYKTKKKIALCHEKITNTRKDYLHKTSHEIISENQVIVSEEFADKKHGKKSPFGKVYK

SEQ ID NO: 48310 - protein, 412 aa, unknown
  TnpB Polypeptide
MGRLALTAAVGGSGYLAGMSRFRLLPTPAQQVAMLEHCRHARFVWNLAVEQQQMWQPGRRAPGYNKQSAQLTEIRTEYDWLAAGSQTVQQQALRDFAQAMRNFFAGTHRRPSWRKAGVHEGFRQVGLKPRHVEKLTRRYGRVWVPKVGWIRFRWTRAVPREVKSYRVTRDRADRWHVAFAHVPDAIAGPADGSVIGVDRGVAVSAALSTGELLHTPSLTPGEQIRLRRLQQHLARAKRGSNRRQRTKVAIARIKAHESDRRRDWVEKTTTDLARRFDTIRVEELDVRAMTRSARGTVEHPGVGVAQKRGLNRAISRQGWGQLVARLNHKAAGRLQRVPAAYTSQRCSACGHVAPENRKNQAVFACVACKAGPCNADVNAARNIAAGRAVPAQGDLAAERSVNCEPQLSSPAA

SEQ ID NO: 48311 - protein, 181 aa, Erysipelotrichaceae sp.
  misc_feature (2)..(2): Xaa can be any naturally occurring amino acid
LXLTAKLKKVEKQLKREQRCLSRKYESLKKRNKNEGGKATRQNIREQVVKVQGLHHKIENIRTDYINKSVNEMVKTKPSYITIEDLNISGMMKNRHLSKAVASQKFYEFRAKLGAKCREYGIELRIVDRWYASSKLCHECGCIKKDLKLSDREYVCECGYHADRDYNASLNLRDAISYKVA

SEQ ID NO: 48312 - protein, 427 aa, Rhodococcus sp.
VSDLNAMICRIGLWGPVRTLFGAVVVKVKRIVMIKLVVTDEQAAALKQTLLTCNAAADFVSDVAQQSSDRRAFTLHHSVYTQVKLLGLSAQPAVRVIKKVSDAYTARTANLKAGNYGRPGSKRYAGVADTAVRFRPLAAQPFDDRCLSWQLDSSTVSIWTVSGRMKGVSFVCAPWQRTLLADRKGESDLVFRDGSFYLYATVDQTAPAPVVPVKDPVDGWLGVDLGIVNLAVTTDDDPKSLDVRWSGGAVTARRKKNQVMRTALQKVGTKSAKRKLKTRRRKEQRFATDINHQLSKNIVAGAQRTDRGIAIEDLSGIRDRVRLAKKQRAQVHSWAYSQLRDFVEDKAEMAGVPVQVINPRNTSRTCSKCGYCDEKNRRSQARFECRECGWAGHADHNASVNIAALGHEKYWAAQSTVPIAATALASS

SEQ ID NO: 48313 - protein, 245 aa, Staphylococcus sp.
MRVINGYGYIDIDEIIDKVSHLKREDIRNINIPNSTLYGYKRDPNKLFNAKFNHIIAIAQYIQQNTIYIGMDIGGKNYIATSTIDRSKTYIDKSKEIEHILKKYDNRINHKKYDDIVAYSKLKTSLTNHISKNIKDIVKRNQTKTVYVLGEVPNYRNSIISLIFDLTYNVLQRKIKQEDEIILINERHTSILCPECGYKDKKNRTKSNGFQCKNCEFQHDNNDIVAASNIANRAYKKGYFKYGEI

SEQ ID NO: 48314 - protein, 472 aa, Kribbella sp.
VRRGRGGGVLAGTSGRTLSTGPGSTTVRCCPVPRDTRAERSLELSRGSLKPGDEPRLPPFRDRGLSVPFDWVDGVSRFRMYPTPVQQAALLEQCRQARYVWNLALEQWSMWRRDRGPTPGYVQQCRQLTEARTAFGWLRAGSQTVQQQALRDFDQAVKNLHAGTHRRPTWRKTGLHEGLRIVGSQATRLVKLNRKWARVLVPKVGWVRFRLSRPVPDAKSYRVTRDRAGRWHVAFAVVPPPIPAPGAGEVVGVDRGVTVSAALSTGELLTCPALSDREQARLKHLQRRLARCRPGSNRRRRAKTAIATLLARAGDRRKDWVEKTSTDLARRFDVIRVEDLRVAQMTRRPKPRPDPERLGRYLPNRRRAKAGLNRGILANGWGLLVQRLEHKAAGRVEKVSAAYTSQTCSACGHRESGNRENQAIFRCVACGHRANADVNAAVNIAAGRAVSARRETPVRVSSKREPQHATSA

SEQ ID NO: 48315 - protein, 463 aa, unknown
  TnpB Polypeptide
LITIKLKYKTDEQSSTRIKEYRRQYSSVFNVYFNRVQENILTSNQIRNLKLNNIELIGSAFKNSALIEARTLLKIHKSKKGNSKNLIFGGRKSFLDRIKGNISREELRERRLQKLCCVGQTEKRGNVMFSIQEDFNILFKPTRKEHIRLEVLDSQKKRYSRELKAIYIKSFLEKKYPITYHLDSEFVYLTFDETILKNENRELEVIPNRVMALDLNPNYIGWSIVDWKSSSEFKVIKSGIYNFKNLNDKEKEFKDLKLNSSHPKRKYLSNKRRTEVFEVSKNLINKALYYKCQIFSVEDLNIQSKDSGLGKNFNKLVNNQWIRTDLVSNLEKRCNIFGVKFIKSKPEYSSFIGNFLYRSLNLPDMILASIEIGRRAFEFYNQYVSKKFEIRKNIVRPSLVDFRTLYLKSLEEFELQPVYKDLIELYYFFKKSKMLYRLSLDKFNLEFSSCFSIKSQLSHISFR

SEQ ID NO: 48316 - protein, 463 aa, unknown
  TnpB Polypeptide
LITIKLKYKTDEESSTRIKEYRRQYSSVFKVYFNRLQEGMASKEILHLELNNTELVSSAFKGSALTEARTLLKAWESKKSQDKNHLIFGGRKSFLDRIKGNISKEELQERRLQKLCCVGQAEKRGNIMFSIQEDFNILFKPTRKEHIVLEVLDSQKKRYSRELKAIYIKSFLEKKYPITYHLDNDFVYLSFDEIILKNENKELETISNRVMALDLNPNYIGWSIVDWKSSSEFKVIKSGIYNFKNLNDKEKEFKDLKLNSSHPKRKYLSNKRRTEVFEVSKNLINKALYYKCQIFSIEDLNIQSKDSGLGKNFNKLVNNQWIRTDLVSNLEKRCNIFGIKFLKVKPEYSSFIGNFLYRSLNLPDMILASIEIGRRAFEFYNQYITKKFEIRKNIVRPSLVDFRTLYLKSLEEFELQPVYKDLIELYYFFKKSKMLYRLSLDKFCLEFSSCFSIKSQLSHISFD

SEQ ID NO: 48317 - protein, 483 aa, unknown
  TnpB Polypeptide
MITMQAKLTFPSKEDEQAVADLMRRWSSCVRFAYNRLLEGSSRNTLKRELQGVFNLNSRYVDDAIMKAKSVLESCRERDENPSKVIFGGRSLFDKLKKRHINGKAYKKLRQEWQERRKGNLYSRGDRSKKGNLNTRIEVDENGVRLRINVGERKYAYARIQAGWKKGNSREGLLEAISTCGEAYSVELKLKNGKVYAYFTIEEDFPEVVVTKENGVIGIDINAYPDHIAWAEADVNGQLVSYGKIPMPHLASGNSNKREYYRWQYAREVVRLAEEKGKAIVIERLDIRDKGKRRDFSGRKLRRIRHNFSYRSLLDKVKILAQRKGIQVIEVNPAYTSVIGLLKYTPQYMISKDVAASYVIARRGLGLKEQIPDGYMAILERLDADELEKLKGHVKKTVKNKQLRKKRLKEIDRVKKWIQSLESEPGEESRPLGGTSLGACSGSYGLWRVLKVAVVTPLSPERVLRDVSALRRVMYSGQVGRPG

SEQ ID NO: 48318 - protein, 330 aa, Actinomadura sp.
MKLAVQVRLLPTAVQAAALAESLHANLRAGNLGRPGSKRRTRAKGKPIVFRPEAAQPFDLRNLSIAPDAGTVSIWTTRGRCKDIAFACSTRTRKTLAESPRGESDLLHRDGKWLLLVTVDVPEEPLNADPGGFVGVDLGIANIATTSSGYRAAGRGLNRHRARQAALRRKLQHKRTKAAKRVLKRQRRRERRRATDVNHCVSKRIVAEAERTGYGIALEDLTGIRSRVRHRRPQRAAFHSWAFAQLASFICYKAHRAGIPVVFVDPAHTSQRCADCGHCSRRNRVSQALFVCRGCGVVAHADLNASRNIAHRAVAAWDAGRQSSAPAPDP

SEQ ID NO: 48319 - protein, 448 aa, unknown
  TnpB Polypeptide
MAYKSFSATPRLVKDLKGREVDLSQATSLLIKDIKTLSELVEYQIHADALNIRDEVKDLREEKPTVKASKIGELLEYKLPKMSFASGRSGRSRFERMFQSLLIREVSSWIARSDVVAEVSNKRISAGWKRTADNAIPSDLSLIMPLSAAGDDKYVKLCNNPLVDGYVELELVIDGQWHVLEFTFDKERFAGAKKVCLPNVRIKNENSVVFDFSVEYDNQYPLISSRYVIGVDVGIVQPATVSVVDTSSGEIVHSITLSRRVHSLANSVKKSEKQKVQLRKQGRDSEAVLHRKSASRKKRELAVLMGQEVAEISATYGNALVVVEDLSWVRNTMQNGRWNRGEVVKWVTHYVEINGGRVYKVNPFNTSQNCHLCHKKGELLESERLFLCTNTECLNIGVLIDRDVNAGGEIAHRVVGKTLNKTVATRKASSKKYNFPKQKFVALELGNR

SEQ ID NO: 48320 - protein, 261 aa, unknown
  TnpB Polypeptide
MTIHRAHQVELIVNEKQELYMKKAVGCARFAFNWALNEWKQEYEAYKKDPSLPKPSQYSIRRKLNAVKREQFPWMMEVTKCAVQMAIIQLGQAFSNFWKNPEHFKYPKFKKKYVSDSFTISNDQFEVKGSRIRIPKLGWVRMREPLRFKGAKLLWATVSRRGKRWYVSLVCELTDLSHLKPAKNQGTVGVDLGVKSLAVLSNHKKFEALQPLKKSLSKLRRLQRKLARSKKGGKNRLKLVLEIGELHRKVFLNIGRMLCIS

SEQ ID NO: 48321 - protein, 523 aa, Firmicutes sp.
VKAKPKATRKRTSQKRAKAFTGVHALLVFPSGEDHKATLDLMRRFSAAARYAYNRLLEGQTREALKRENGPLRIFFGLNTRYADDAVMKAQAVLDSARERGENPRKVVFGGRRLFETLRRRHLSGKPLKELKREWKEKRQGLLYSRGDKTKGGNLNLRLLVKEGALWLRINLGDGGYAHSLIQTKHPNLSTLLQRVYASLPYNVELSLKDGKVYATFTWEEEPAPLVATKENGVLALDVNSDPYHLALALVSPDGNLKRHLTLSLEEVDRAPNKGAKELLLWKIAHQVVSLAEEHGVAVATERLRYLRKSRRGDGSGRAFRRKQHRFAYASLLRKVHSLARKRGVQVVEVNPQDTSTIGMLKYAPQLSLSKDVAAAYVIGRRALGFKEKLPKGYGKLLRDERFRGHVQGFYASKVQELQAKKAQERNPLPEAQAFPGDREGEAPPLLAFKPSGLAGEPRGVHRGKEPSWRQSLEGPEGRPLPSPPRARGAPRPLPAEGLPSPGSVGGVEGRLRSSSWWRAEVR

SEQ ID NO: 48322 - protein, 456 aa, Halobiforma sp.
VTELTKTLELKLVDPNVHKRQKLRETGDAYQQALQAAFAAGCDTQSATNDVVVEYDLSGYAKNALKKYVPQLCGNSYDADELHDDHPVRFTNEGLQLDHQPQNAIEWYVKIPHHEDYHLWIPARANPEQRDWLEAVYADDAEMGESRLFERDGTWYLHVTATRDVEDQSEASADERTPIGVDIGEASLVTVCHRDDSGSPVRPHLWADDGKAVRRLRKTYFTAKRRLQQRGSERIAESYGDSLWDQIDDVFHRVTSEVVEYAESVENPVLVLEDLTYIRENMDYGEYMNRRLHGWGFAKLHAQIRYKAAEKGISVETVNPRNTSKACHACGEHGYRPRQATFRCSNDGCWVGEYQADVNGAINIADRYRSGESHRRSDRSSRQKAGDDVEKNRRFFDHWKSSISKNSATDGVVRESEALSSSRKALCAFRTTSLTGPQDSQADAENQQTTLGTYAS

SEQ ID NO: 48323 - protein, 413 aa, Halobiforma sp.
VTGDEYQRRTAITRVSVSSSQSELLERTISEWLEACNIASRMAWGTCDCASAVQRLAYDRIREETELGSQHAVLATHHVARAIKSGIERRKDGKHATRPEFTSESMTFDARTMTVFEEEEEVSLATCDSHSRVRARLELPDDDGYQYQYLEDDEWELTESTLHYRDGDWFLHLGFRTPKRTDPPIENGTVLGVDLGVAEIAVTSTAQFFSAGELSHARREFERVRYGLQAQGTRNAYRTLERVSARESEYIKHALHDVANGIVDEARGHGCDGIVFEELDGIRDRLPEADWHSEWAFDTLYEYVKYKARAAGLFVDTTSPRNTSRRCPECGFVHENNRTSRDQFECQECGCRGHADYIAAKNVADTYLSRGQQTSRERGVGQYALKSGTMTPNGTYTPYPNGSEDESTDKSNP

SEQ ID NO: 48324 - protein, 490 aa, Faecalitalea sp.
MKKKKKLQPPFQKAVLCKPENVPLCSSGRIDLAIPENRIIYDFLKGYSGTYNSLLHWTFRQVMNQTFRTEGELKKTIMKKGGLKARAANAILREAKTEYHSAIEIKNSQIEDHNQKIRELTEEIKDLEIKKEELNSEVENWSRPPKKAVKKLHRIKAKLWSRKNRLHRYRQTLRRLEKEVQTGKFSYCFGSRKLARQQWTLEYPNSPFSTHRQWLKAWRDHRSRHTYFLGSSDETCGCQLIQGTWTGSGDLFEFRVRSPFAGDQSTIAFTVRIPWQSDLIDWHQKNSSISYVFVFRKNGSLYIHPQIEEEARDAAETKGCLGMDINAGFLAVAEIDELGNYIQSEDIYYDDFSLDADTAMKQILAGIYKRAKEKSLSIAIEDVSFKKKKAKNHGKRMNHILHDFPYRKYREYNERKASRSGVPLHIVSAAYTSRIGKEKYMEKLGISGHQAAAYVIGRRALGFREVFVSEKKKINRNHIPDYQTAVITAV

SEQ ID NO: 48325 - protein, 413 aa, unknown
  TnpB Polypeptide
VSSLSTLLALKSVTQSYLPTPEIQRIFGIFHRMVNDCIDIGLSYNVTALKRLSTLSWPQRSKYECPSYYKACAVSRASGILAARKKSLIRGKSTKNPYSLKPQITACRGFKINDGVLRIPVGKGDFQYILLTKHMVCVLSDPTLTVRSFTLTPSSLSLCISREVAQIECTDTIGVDRNLRNLTVGNRDRVTQYNLSEGVRIAEMTRDVVRSFKRNDFRIRKKIASKYGRRRRNRIEHLLHNTTKRIVSEALQSKHAIVLENIEGIQGLYRRGNGQGPRFRDRMNRWNFHEAQRQLEYKARWVGLPVIHLSRTQTRGTSKTCPQCGERLQEDRKIVRKLWCQKCSVMMDRDVVAAVNISRHGRLRFDRSRAQDGLEGRAVEAVRGNPTPTVILRVDALKSRNRLSTEDLAEPEP

SEQ ID NO: 48326 - protein, 465 aa, Nocardioides sp.
LSVPTGTIRGMPVAAGRTADAALVSHTGVALTRATTFRFTLDVTSEQHQRLLAHAGASRLAFNHHLARVKANLDQRAAERTYGVPEEDLTPALSWSKVSFINHMNAWKDGRAVDAPVNHDGSRGLPWRGEVSTDVFETASVHAAQALANWAASRNGARAGRVVGFPRFKSRHKTTPAFRLRAKYPEGAAPPVRPTGPKAMRFPKLGELGVRESTRRLRRLLQQGRFHAYAAAFRYERGRWVVSVTGVAAPFHPARRTTTGRHRARVGVDLGVKTLALAADEHGNLRGTWEGVKALHTAQARLKLANQRYSRTKRDSNGRKKAARRLGKLHARVAAVRKALLHQITADLAKGYACLVVEDLNTAGMLANRRLARVVSDAAFAELRRQLEYKSSWYGTELVIADRWFPSSKTCSGCGSIKADLTLADRTYRCDSCGLAIDRDVNAAINLARYTEPPPRSSPPQHVAA

SEQ ID NO: 48327 - protein, 375 aa, unknown
  TnpB Polypeptide
MQCNKYSAIIWNNCVIADQKSREENNKSLTRSELQFMMKKTVPHILANSINMVIFKYITARDAMFKSIKAKHENSNKVKLPYKEKEFYNTGWTSQNIRVYKDKNYLTLAKPLLSNNHKQKPMKCHMKNIPDNIVEIELIYRNSLYLLIKTKQENDNVLIQSNNEASIDLGEIHSITSIDNNENAIIITGRKLREIKQLRNKHLGKLKSRRSKCVKGSRQYKKYSRAIRKIVFKTKNKIINLTHKITKLYLDYCLENNINKVYYGDLDNCTRNTKKEKRGGKFVHQKLNEWNYGQLTQELINKLSRYGIQLVKVKEYYTSKKCPICGQLNTPKGRNYVCNCGYIMHRDVNGAINILNDNSNFKIHKYKSLKYLQIT

SEQ ID NO: 48328 - protein, 455 aa, unknown
  TnpB Polypeptide
MASDIENIYLLKIWSLGKIYAIIYIQEHFAYESSKGKNRMYLTVKQQVKHLSKEDYLTIKELCHTAKNLANEAIYNVRQYYFTEGEFLKYEKNYVLLKNSPNYKALNSNMAQQILKEVDGSFKAFFGLLKLAKQGKYAFKDCKLPHYLPKDGYTTLVIGFVRLNGNKLILPFSNSFRKTHKIIEITIPPVLLDKKVKEIRIIPKANARFFEIQYIYEAECVQRNLNTDNALALDLGINNLVTAVSSNGKSFIIDGRRLKSINQWFNKENTRLQSIKDKQHFGKKTTSRQKAIARDRNNKVNDYMNKAARKVIDYCINNDIGTLVVGYNETFQCSSHMGKQNNQNFVNIPYGQLRSKLEYLCELNGIIFVKQEESYTSKSSFWDKDDIPVYNTDNPKEYQFSGNRVHRGLYKTADGRTFNADVNGALNIMQKSSVVDMNILYGRGEVDTPVRIRIA

SEQ ID NO: 48329 - protein, 614 aa, Streptomyces sp.
MAANLLAAHWNATDVNALASGVDGEGRAMPSKAWMALRRLGWTVAPAEGLRVSDRIVRMAQEQAGRTLRAVKWRADLTTGVLQTWPAEPGRRTPPEWDAVREAVPGGRHLPSSVITARTRQIAAFIHRQGLLPADVFELEATPQSARMLLLSACDRQQATIARGDDPGQALLRLQLPTRPDPRCYRDWTWVACPLTLPPTTPPDALLHLPTLHVRHGALRADLAYTHAVPKAQRTGHTVALGVDWGLNTLLSAGTVRVNDSGQITALGSGGSFRAAGVLAKQHRLRRESERLHAKFDHYQRLIAHRVEHPLAGKLEALGREMRHVSRRRSNLNDALAWSAARWAVDQAIAAGATVIYIEDLRSMEARGMGRTLNTRLSQQVRGQIVDRMRHLAVEVGMAVVAVPARGTSRYCPRCLVPLRHRKAPDRPTAPGWKWALCPNADCGWQGDRDTGAWQRIAARGLTHQVKTVTDRTTGEMVIHNVVDPLEAAAVVAPATTQTHRGDRTKIGPTRHRTTRPAPRRRRAPSPTRPTGQVGQRPEGHAHTGWRWLPRAAHRHQGVTTISTPGTGQHRPRGAALGAGFHLHAHASPPQWARPTSDTSSRRIAQLIRNVGVG

SEQ ID NO: 48330 - protein, 543 aa, Streptomyces sp.
MGGLREVAEPFVASGSTGVAIRARLKRLTPQDETVLRLVGAHLGSLASQDLAARCRDGLEHCAETWTTRKRELTCVSSSRWAGAITKASHDQWALARRCHRAHLQSLQAGIATIRYRLSLPIGERGSKSAPGGYRSRKEWHAKSRRLAALEDRLERERADLEAGRVHVVRGGKRLARARHNLHAAQLTETAWRQRWEAARWFLQADGESGKRYGNETIRVTPGGEVSIKLPAPLAELANAPHGRYVLATRVAFPHRGTEWADRVEANRAVAYRIRLDTARGRWYLTASWQIPPAPMIPLEAALAQGVIGVDTNADHLAAWRLDTCGNPIGQPRRFFYDLTGTAQHRDAQVRHALTRLLHWARACGVRAIAIEDLDFAAEKTREKHGRNKKFRQLISGMPTARLRARLTSMADATGIAIIAVDPAYTSQWGAQHWQKPLTTKTRKTTRHDAAALAIGRRAQGHPIRRRTAPPRTHQSDGCGHRTVQAASATPRREEPRPRIPGPRTRSVRAGCGANVGNQNAQHRSGRSADHGFWQQDSLPLSF

SEQ ID NO: 48331 - protein, 460 aa, Clostridiales sp.
MIKSKSNLRKGACGMKIDSTYSVKIKHYNHIFKDTLSLYRDAVDFLIDVCLNEWDHLSAINGNLLQQQYVERLCHETAYNQDPKYRTFDKKFYKFPSYLRRGAIHEAIGKVSSYKSGLTNWESVDTKTRGKKPSYPRAGYGYPCMYKTVMYEQTDRYEARMKVFIRNTWDWITVELRRSDMDYIYRYCKTRKQCAPTLQKRGKEWFLDFPFEEKVTLTNTDVSNQTIVAVDLGINTAATVSVMRSDSTILGRYFCKLPKETDHLTHSINRIKKAQQHGNRNMPRLWAKAKGVNDDIAVKTASFLMDIAVLHNADVIVFEHLDRRGRKRGSKKQKLHMWRSQYVQSMIEHKAHRLGMRISRICAWGTSRLAFDGSGSVLRGKDADLDSYSVCRFQSGKVYNCDLSASYNIGSRYFVRERLKSLPARERLALEAKVPGVAKRSTCTFSTLIRLNAELTSLVA

SEQ ID NO: 48332 - protein, 536 aa, Butyrivibrio sp.
MTDYEYGRILNKFHKLSDRHIIVAETDMPYSDVLKVVALSDKIRKAGNELVGLMRRNHDQLMRTKRYRKLLSLYGSTENIAKRKILADQLNEMQKSYNVTWDCCRKSMIPIGKKYGIDAIFALTKAEDVWRGMEKCLYGSGKTIHFSKFGELPCIRAKQISRGIPISVKDNRLQFKLGKKAFGIQIADRFQMDEVNAVLSYLNEPEIMDKKAVDTLLEDAYCIDTYRPCYATLVPQMIRGKYRVYLHLTIEGKAKPKYDKYGNPRHKYGKGMIGADIGTQTVAYTSDTEVGLKNLSERGDSIQTSERKERLIYRAMDRSRRATNPQNYNEDGTVKKGRKIWKYSNHYKKMKVRHSELCRINAVNRQLAINEDANHLRSLGEIIVTEPKNAGKLMKRSKETTKNDKGKFNKKKRFGKSVKNRCPGGFQTTLERKFKATGGTYIEVPNNYRASQYDHTADDYIKKKLSDRLYKLHDGTEVQRDWYSSFLLYCYEPKTQNIDKDKCAKTFEAQYNKEKTLITWIKAYKIKILNSGINVA

SEQ ID NO: 48333 - protein, 503 aa, Acidimicrobiaceae sp.
VLASTIVARAHTERLGRSRRLRSQSMSRRYAAPEGQIIQAFTFALDPTSTQVAQINRFFGARRMAFNWTVEQLKCDLEHYRTTGESIGPPSFYSLGKRWNAQKNNVCLNTHTGEVWWPEVSKEVFADGVRGATDAYLRWQKSRTGQIAGRPVGFPRFKKRGRDRDRFTFTTGTMRLEADRRHLTLPVLGTLRTHENTRRIERLVWLDRAKVLSVTVSRQGDRVIAAVRVAVARPQRATVAQPDSVVGIDVGVRRLATVATRDEVIGELANPRALERRLGELRRLQRQRCRRTRGSRQYRATTTKIARLHAEVAHLRHHTIHVFTTDLAKTHGVLVVEDLDVASLLQQKGLPGARSRRRGLSDAALGEIRRQLRYKCPWYGSTLIEANRFFPSSKTCHDCGYVQTIGWSEHWTCEECSSSHQRDDNAAINLARWVSLGSVGAPVKRGAEHQTESHLAAGEDTRKGSPTLVGPNNSVRSAARADSLECTHAATVFKREFPHYHGR

SEQ ID NO: 48334 - protein, 290 aa, unknown
  TnpB Polypeptide
MTWLLFFPEMIQNTAGPSVMSEGIDRFIPASLGFQNMFDEFAGCAFPAFKVGTAKLVSLNNEWYMHIPMTKTAADELDIAKPTHVVGIDRGLRFIVSTYDEKGKTSFVSGKDIMAKRQKFADVRAKLQSKGTKSAKRALKRLSGRENRWMSDVNHQISKTLVQTYGAGTLFVLEDLTGVSFSDENLTRDSKSNRDLRSWTFYQLEQFLTYKAHEAGSEVIKVSAGYTSQRCPKCGRIHKENRNHKTHEYICDSCGYRSNDDRVGAMNIYTLGTMYVSGDTNPRFGVRKVN

SEQ ID NO: 48335 - protein, 177 aa, Streptomyces sp.
LATTSTGYQAAGRDLNRHRKHHGDLRAKLQRKGTKSAKRLLKKSNRRERRHVSSTNHIIAKTIVTEAERTSAGIALEDLGGIRQRVRLRKPQRITLHSWAFAQLGEFIAYKARRAGVVHVDPAYTSQTCCECGHVDKKNRVDQALFICLNCGGHCPRGPKRFPQHRPTWRRGVECGA

SEQ ID NO: 48336 - protein, 379 aa, unknown
  TnpB Polypeptide
MISYKYKLYRTDKTKHLDKMLREAAFVWNHALALQKRYYRMYHKYIGCARMKAHFVKRISRNLLHSQSVQEILERLDDAYKRFFKHLAARPPKFRRAKDFSSIVFKQGGYSLNGNVLTINRISKRYRFSLSRPYDGKVKTLTVKRSPLGEYFIIMVLDKAPVSLEKTHNGASVGIDFGLKTYMTMSDGTTVKNPQFLKATLSRVQRASRKLSKTASDSHHRQARRKELNHILQRIVNQRNEFQWQLAHHLCRQYDRIFIEDLQLTGMSALWGRKMSDLAHGEFVRKLQYVATKYGVTVHKIDRFYPSSKTCTCGYVNKQLRLKDRQWTCPECGAVHSRDLLAAQNILRQGIAELESTSKTPSARRAHVRLHPRISRIHA

SEQ ID NO: 48337 - protein, 475 aa, unknown
  TnpB Polypeptide
MATIQISHKIEIASPSNKFKTYCRKAFGISRLAYNWALGRILEQRAQAKAYAYKITAIVAPINKAPVLIVKPATRTKKKITYPKIDVMALKKEFNAIKKKEFPYCMEVTKYAAQQPFLNLKKALKAYFESYKKGSTRKVGFPKFKKKSATSGSFYIGGDQVVIKEKQTNCKSKDSNIKVSENKQYLKIPNFGWVKLTEKIRSNGHINSCVISQQGERFYASFNMEIEEDEYKRTHKGNEANTEHTIVGIDVGLKAFITTDAGLFIQAPKPLKRLEQRLKRAQRVLSRRVHPKAKGDTNTKCSNRYKKQRLYVSKLQRRIANIRKDYSHKVSSLLIRHYQYLSLESLRVQNMMKNHKLAKAISDVGFSAFKAQLLYKAQYNHRVVFEADPFFPSSKLCSNCGAIHKHLTLADRTYICPSCGFTIDRDINAAINLKAKMKQTLIGGVTTEFMRVDPHRLSEDLAINQVKAMAYEARI

SEQ ID NO: 48338 - protein, 382 aa, unknown
  TnpB Polypeptide
MFRAIKIRLYPNKQQEQDINKILGCYRFVYNHMLALKQQEYDDNKINLSLCDLSKYFHGTLRKSKDYSWLKEQNTQVMKQSIRQMLTAYDRFFKLHTGFPKFKSKKDKQSALFPLNAISKRNKFEQRKITLNQSFKGIKFRCSDLYFKRLQTYKNNIRIATMSKTKSGNYFLSILIDIPQSEIVKFKQTGESVGIDLGVKDFVITSDGEVFENKHFFKKQENKINKLQKQLSRKVKGSNNRDKARIKLAKAYERLVNQRENYIHSVVNELLKYYDTIYMEDLNVNGMLKNHKLAKAIQEVGFYRFKSVLLDKSVNNGKRVVFVDRFYPSSKTCSCCGSIYKGLTLNDREWRCPSCGKIHDRDLNAAMNILTEGKKILASSNK

SEQ ID NO: 48339 - protein, 373 aa, Spirochaetales sp.
MKTYKIKLLPTKKQEELMWKHVGCCRFIWNWGLEIQKGEYSSNGKKLSSFDLTKKLTSLKKEEKYVWLREVSNASLIVALRDLDKAYSNFFRGAGFPKFKSKKKSKPNYPLKNDRTYFTEEFVTIEKLGKVKYQTNYNIPLGKEVKLYNPRISYINKKWILTVGFECESQEPELTDKSMGIDLGVKVLCSVAFSGENIVIDNINKTINMKRKQKKLKRLQHKVSRKYHQNGSFKKTSNILKAEEQIRELSYHISMTRRNYIHQATHKFVSMRPYRVVMEDLNVSGMMKNKHLSKAIQEQCFYEFIRQMKYKCEWNSIEFIQVDRFYPSSKTCSCCGTINSNLKLGDRIYVCPECGLVIDRDYNAAINLMKYVV

SEQ ID NO: 48340 - protein, 339 aa, Actinopolyspora sp.
LDNWHTSRTGKRAGKRVGFPRFRSKRHRLSCRFSTGSFGLSESDRRHVQLPRIGLVRTHESTRKLARHVERGTARIRSATVSLQRGRWHVSFSVEITKTEPTPATTGGEVGVDLGVKHLAVLSTGESIANPKHLDAAQRELRRWQRQAARRQGPDKRTKQKPSNRWRTTQARIAKLHTAVANARRDGLHKLSTRLVAEFDTVVVEDLHVAGMVRNRRLARAVSDVGMGELRRQLDYTTTWSGRQLVVADRGYPSSKTCNDCGAVTAKLRLSERTFTCDHCGYRTDRDLNAARNLADLTSSPSCGATKNEPAGNPHKTSPAGSGYRHGKTPTQRAGANAA

SEQ ID NO: 48341 - protein, 201 aa, Okeania sp.
VINGRPLKSINQYYNKVKSSLQSQLKENQSSKRLKKLCNKREFKINDYLHKSSRLIINTLINQKIGTLIIGHNEEWKQKINLGKRNNQNFVSVPYNKLIEMLSYKAKMVGIDVIITEESYTSASSFIDNDLIPVYLEGEKNHVTFSGKRVKRGLYCTASKRLINELCERFFEHNEKSSSLLFLTMGSEGVVVHPVRVTPAK

SEQ ID NO: 48342 - protein, 373 aa, Streptomyces sp.
VHVVRGGKRLLNTRHHLEAAGLGEAECRRRWMAERRFLQADGEAGKRHGNETLRVTPDGEVSLKLPAPLAHLANAPHGRYVLAARVSFAHRGEQWADRVTANRAVAYRIHEDTGRGRWYLTASWTLPPVQTIPLATARARGVVGVDTNADHLAAWRLDAHGNPVGEPLRFAYDLTGTASHRDAQVRHALIRLLHWARRHGLAIAVEDLDFQAEKTREKHGRRKRFRNLISGMPVARLRARLVSMAAELGIPVIAVDPAYTSRWGAQHWQQPLTSNKRRTTRHDAAAVAIGRRALGHPIRRRTAPPRTHQSDGCGHRTVQAVSVAPGREGHRPRISGPRTRSVPPGRGANAVDQNAQHRPGRSAEHETWQQDSQ

SEQ ID NO: 48343 - protein, 409 aa, Nonomuraea sp.
MAIRRSATKRQGLPSVVQLRLTPTPDQADALTAAVRVCNQAATVISRLAWQQRVFTVLNLHRLAYHPVRTQVVGLGAQAAIRAIARVAGAYANRRATKKRAHIFRPHGAIPYDARLMSWNRDARAVSLWTPRGRVTLPYTGRLEALKAIDTLPIGEADLICRRGIWLLQVAVTLPKPAVREPVNGFIGVDQGVANLAVTSDGVVLPGLALSGTISFNGHVRALRQRRHGQRRRLQKKGTPAARRVLRRLSGREHRMMTDLNHQISKYVVREAERTGRGIALEDLQGIRGRARAHRLQRRTLHSWAFAQQIAFTRYKAARAGIAFVLVDPAYTSQACPECGYVSRANRPARGRFSCTRCGLAGHADHIAARNIAARGVAGWAVVNQPHATGFPSARRDRESKPSASACGS

SEQ ID NO: 48344 - protein, 194 aa, unknown
  TnpB Polypeptide
ESFATLSNGVKIANPRFFREEEHELARVQRKLSKAPKGTPERKKALKVVERVHERIANKRYEFAHRISNQLVNRYGLIAFEDLNIKGMMHNHNLAKSIGDVAWNMLVTLTSYKAASAGSMVVLVDPRNTSKMCSRCGILVQKDLSERVHNCTQCGLSMDRDWNAAINILRLGLQSVGIQSVQARPFSRAGVVTG

SEQ ID NO: 48345 - protein, 420 aa, Lactobacillus sp.
MGQTMAQLPYHYGVKLRIFPSTEQKRLIKRNSDASRFIYNEMNGMNRELYQLKQVKIPIALVQQRIQTLKQRLKHPATGISNLHGWLNNPELDSLMKANAIKNYHNAWKLFHKVHQAGTPAFHKRRTEQTYQSACLYAKKVKMTNMLTGSVRLLDPRHIQIPKLGRLRFKGCPAKLLQNAQTIRIGTVTLSMDATGRYYVSLQLASEQPFVANFDQSILGQVGIDLNLSNFLTDSMGNVVANPRYYRSMRGKLAKAQRKLSRRATRARKDHRILRKSANYQRQRLVVANLQRKVANQRHNFLQLLSTTLIKNHDLVVAEELRSKNMLRNHALAMSIADAGWRTFLGMLAYKADLYDRKFVTVSPRNTTQTCSHCQFVMGTEGTHKLTLKDRDWTCPRCQTRHVRDWNAAKNILAKGLAGA

SEQ ID NO: 48346 - protein, 644 aa, Nonomuraea sp.
MACARVLLRGGVEEQTGEVVSAAVLADRVGWCGELVCSMTAGLLAEHWTMADVALLASGMDTGGRRLPSTAWMALRRLGWTADAPEGFKVNDRIVRMAQEQAGRLLRSARWRAEVTSGVLATWPADPGKRTAGEWDAVRAAIPGGRDLPAGIIKARTRQIATFLRDKGRLPTDVCELENAPRAARMLLLAACDRQQATIQRSESDPRRALLRLQLPTRPDPRSYADWTWVACPITLPPTVPADAVLHLPTLRLHGGRVRAELAFTHPVPAARRAGHTIALGVDWGLTTLLSAGAVRLGADGQLTTLGAGAQFRAAGVLAKQHRLRRNGESLHAKTGHYQRLTDGRAPDPALPGKQAMLTEEIRHISARRTNLNHALAWAAARWVVDQAIAARSTVIYLEDLRSLEAGGMGRTLNTRLSQQVRGQIADHIRHLAAEVGIAVVTVPARNTSKHCPHCLSVLRHCKAPDKPHMAGWKWAICPGCGWQGDRDHGAWRRIAARGLIHQAKTAVNRAAGVMTIGSVMDTLEARAVITLPTRKTSRTDRSKTGPTRRRTPRPAPRRRRAPSPARPAGRAGQRPEGPVPTDRMRLPRAAHRHQGGQAISTPTKRHRPRGAALGAGFHLHAHATPPRWAPPTPDATTGTGSLS

SEQ ID NO: 48347 - protein, 372 aa, unknown
  TnpB Polypeptide
MAEARNEHHSVLTLRQRIKDKHAKYLRMLAFETNQVWNYCNELSYKVFQRERRFMSGYDLQKYTNGASKEGFQLHSQTIQAIAAEYATRRKQHKKVKLAWRKSGGIRRSLGWIPFKASGISYANGQIRYGKVWLSLWDSHGLKDYDLGPGTLSEDARGRWYINICATPKQKRMQQLALFDDSTGIDLGLDDFAATSDGAVIEAQKHYRKWEAQLASAQRANKKGRVRAIHAKIAHRRKDFHHKLSTRLVGSYGALFVGNVNACALAQTNQAKSVLDAGWSAFRTMLQYKCDVAGVWFEEVNEAYSTQTCSCCNKRTGPKGLEGLGIRAWACSECRTVHHRDINAAKNILAAGHGRLAGGIFALTAQAAALQG

SEQ ID NO: 48348 - protein, 364 aa, unknown
  TnpB Polypeptide
LIDFDTIGGKSNKNGARFDLDAMYVNWLGLSLKCYLPKSENSLSYVWESLKGKISYCNIKRLMFSSGWRYYAEIVVSGAAPTRVSIGTSTMGIDPGVSTIAGVSEDACVLEELAPNAIQYEKKIQKISQSMDRSRRISNPNKYNENGTINRSNRDPWKYSKNYVKMRRLLKALYRKKHAYIIDSHRELCNKLITIARYFPVEKMHFQALQKKAKETRRQEKKTEVKQKDGTVKVIQKYKRKKRFGRSINRRAPARFLLELERKLEAVGGVYAEVDTKEFKASQYNHVTDTYEKIPLSQREKEIGNRKVQRDLYSAFLIRNADLDFKHPDREKCEYEFEHFADMQDQLILKMKENGLSMRQCFGF

SEQ ID NO: 48349 - protein, 391 aa, unknown
  TnpB Polypeptide
MMLKAFKYKINPTNEQTILLNKHIGSSRFVYNLALETKNSAYVGNKVNLSCFALHKQLTELKTECEWLKEINSQSLQQSITNLDKAYTAFFKGQNSFPKFKKKSNGGSFNIPQNVILENNKLIIPKFKKGIDIVLHRPIKGEIRQATISRTPTGKYFVSILCETGDVIKTKLTIKEETTIGIDLGIKTFIVVSNGKEYDNPKFLRKAQSKLKYIQRKYSKKKGKRTKQKLAVLHEKVANQRKDFLHKVSSELINNHDSIAIETLQVSNMLKNHTLAQAIQDAGWGMFVTMLEYKAKWQGKNIMKIGTFEPSSKTCSCCGHINKELTLKDREWTCKGCGTLLNRDVNAAINIKNFALRNYLSGTDRKNQGKLPTLVGALTLEAHPIASGVGG

SEQ ID NO: 48350 - protein, 446 aa, Acidimicrobiaceae sp.
VTRPASPTTLTRAYAYALDPTPEQVSSLRSHVGGSRFVYNALLGLVKANWDENRQRKDAGEEVAKEDYLGTRHLDLQKLWYEKRDELAPWWPENGSSTYNYACLNLSKAFTNSRAGRSKFPTFKKRGSVSSVSFMSTAVRLVDSHHLRISRVGEIKTYESTRKMYRHIERGTGRILAATTSERGAKWTVSFTVEVQRALPPTRAPERVIGVDVGLSTLYTGATPTGEHVLDVANPHHYVAAEKTLTSAQRIASRRQGPRRGVAASNRWKRAQQRVQRIHSGVANARRNLIHETTMKLAKNYDLIVVEDLNVMGMLKNHALAKHIQDASWGEFVRQLEYKTKWYGSTLVKANRFYPSSKTCSQCETVKAKLSLDERVFCCEACGLTLDRDVNAAINLARMGLAGTNSVTGRGGEVSPEQQKLAATAHPDEASTEPSSDVDGVGDTSV

SEQ ID NO: 48351 - protein, 330 aa, Ignisphaera sp.
VRALSEGGYDHLLEFLKLYRNALQMVVDRVWSINDKFSKKKLHRLFYNSLASMGFRAHHAKEIYIYAGSLVDSAMSNGGRKPVLRRLSTRIDRYDYKLDLDNMTLTLKLHSDHEVKLKLVTSRDRVEKFRGWSNCEVVVKYEDGEFWVSVYFRRAIKPVKPRTVMAIDLDFDNITLAIFTLDGRLVKLKRFKTQYRKILTHRIWVERVQRRYPRSWRFIKGVRKAIDRHGEKIKNISWVYAHKVGDLVAELASKHSSIIVLEDLDKLRENNKRGREFNKRLGLWFYRRIQFCIEYEARERNIEVVKINPRGTSSKCPRCGKKLFEDGIGC

SEQ ID NO: 48352 - protein, 319 aa, unknown
  TnpB Polypeptide
VKKNDVYAELALKDRIKFVRIKREWMKNKFVYYAQLVLEGIPPKKYNSEEIKDKSPAPKRVGIDIGTSTIAVCSETKVILTELAPSVVELDPKIRRIQRSMDRSKRATNPLKYKEDGTINRSNKDRWLFSKRYMNRKAQLKELHRLNRAKRKQDHEKLSTIILSLGDVIFVETMNFKGLQRRAKETTVNEKGRFNKKKRFGRTISNRAPSMLLDMIERKLKYNGRSLKRVNTSLIKASQYNHVTNTYEKKELHERWNDFGFCKIQRDLYSAFLIMNCKENLNEIDRDLCMQKFEQFRSMHDSEIQRLKMKEKTPISMGI

SEQ ID NO: 48353 - protein, 250 aa, Anaerosalibacter sp.
LCEHRRIPYGEGVKYINPRVSFDGLSWWISVGIEYPDNIEIPTNKGIGIDLGIEKLAVVSDGTVYKNINKNKRIKKLEKKKKRLQRKISRKYEMNKIKTKGGECRYEKTKNIIKLENQLKKLNQRLTNIRHNYLHQITTEIIKRKPSFIVVEDLNVTGMMKNKHLSKAIGQQRFHEFTRQLQYKSEWNNIKFIVADRFFPSSKTCSQCGSYKKDLKLSDRKYICSYCCGSILDRDYNASLNLKNYGQELV

SEQ ID NO: 48354 - protein, 437 aa, Halothece sp.
MLTLSYEFKLEPNQLQIDMIEQTLDVCRTVWNYALRERKDWINSRKCSVNACSLEQEYIIPANEPYPSYSRQAKNLTEAKKDSERLKSVNAQVLQQVLRTLDRAFADMKSRGFGFPRFKSKYRLRSYLIPQLKGQVLKGNQVKLPQLGWVKFRKSREIPDGFKVKQARVISKASGYFVMLSLQLDVEVPQPFPHGHPRGLDLGFDKFVATSDGLEVKRPRFLESLQRKLKLLQRRLKNKKKGSNNRQKLNRKIARVHQRISDLRKDWHFKLAHQLCDGAGMIFVEDINFRSWQRGMLSKHAADAGFGQFVNILQWVCWKRDVYFAKVDKDGTSQECSQCGTHTGKKTLDVRVHHCPECGYVGSRDVVSAEVIRNRGVTELAEVLSDLGQGLDIKEIACGGDLTGAKVFLSLSKETLPSQEPETGNLVARLGISRHSA

SEQ ID NO: 48355 - protein, 475 aa, unknown
  TnpB Polypeptide
MPRKRPPDAPRVVYRTARCGLRATRGQRRRLWGLLRSTGDVWCCLLEVNSWRRHRQDAPLTGYQELCRELARSGPGTFGELDVTGARSVLRRYSDAWFAAAKRRKAGDASARFPRRRRGLVPVRWYAGTFRLEDRVLRLPTARDSAPLVVRLDRDPPYPADQVRSVTLVCEAGRLQVEVTAEVPVAAYAGGQAPDPGRVAGIDLGIIHPYAAAGPDGQQLLVSGRAIRAERRQHLREARTRSRAAARRAPKPGQRGSRRWRQHRRRQRIAEERHRRLVRQAQHEAAKTVITWAVSHKIGTLAVGDPRGVLGLNAGRRHNQRVRAWRIGHLIRALTDKAEAAGITLALIDERGTSSTCPGCARRVPKPAGRNFTCPHCGRAGHRDLVAAANIATRAGGGTIPSADAAGITHRRAGTHLPGVHPARRDPRRRLHHGPPHGPLAGTGPPRTPVTWRAGSRSPHREEPEIHRSIYGRLH

SEQ ID NO: 48356 - protein, 386 aa, Serratia sp.
MKRATKVGLYPTAEQEKFLNAQFGAVRFAYNKALYISRHRYQRHGVSVSVKHDLKPLLAVGKRSRRYHWLKDYDSLALQQAVINLDTAFGHFFKRRARFPTFKRKHGKQSSYHPNGKVFTDAIQLPKMAPIKAVIHRDIIGKVSSITISRGATGKYYAAILCDDGLAAPAKPALITRVTGCDLGLSHYLIQSNGEKIANPRPLERGSRNLRRKQKSLSRKIKGSANRVKVRLLVAKCHEHVANSRADFQHKLSRTLVDENQAVIVETLKAANMMKNHRLARHIADASWAGFVIKLEYKSEQAGKHLIKVDQWFASSKICHFCGYKMAEMPLTKRIWSCPACGIEHDRDTNAAINIQRKGITDLQAAGLVVFAHGGRRKSVIPTVAA

SEQ ID NO: 48357 - protein, 244 aa, unknown
  TnpB Polypeptide
VRNPGLVAAPRFFRKAEQKNQELSKSKRRKRSPNFKKKVKASRRWKKTQKLVSKLSRKVANQRQNFVHQETTRIISGNSTVVTEKLEVKNMSAKAKKGKRKKQKAGLNKSILDVGMGMIRDALKAKLSDIGGLFVEVPTRKVRPSQTCPKCGHQEKKTLDQRTHVCNNCGYTQQRDIAAAEVMLLWYSNNLPGLGTSLLDVDDSSSTSNTSKRKNAGSMKQLGQKKRQKSQLTDGDVETPSSTK

SEQ ID NO: 48358 - protein, 507 aa, unknown
  TnpB Polypeptide
LRAKATTTIRQVLTYQPSHGAWFAATQALFNQVTAFYFEVALANLPILALSNREALTALERLTHATEKNPHPVMPLSVIAEDIPAMFRRAAIHAALGSARSFHTHLSKWRKRKEQALTRGKKFTERPPVPPRTWNKSATLYAGMWKERTASSIVLKVWTGSCWSWLKVRITGRDLPTDGTELGSPQLVRHGEHWWVHTPVDRKFSRPANIEHQVTTQGATKLCAVDLNLGEHLAVCTIQTVEGSILATRFIGGGTAIAGFRKQLLGRIARNRARTGIIAAGEQDNAALWRKIRARDEQVAHLVSRHIVQFAQEHGATILVFEHLSTLEPTKGKYSRRGNRKRAFWMKGRIFQYAKYKAWNERIITTRVNPRNTSRACARCWAQVVRYAQGAVTEGYTPGAPLVLCPACGMRGHADRNASLRIGQQLIARYPSQEKPHAPVLSRTAERLAKAGGVGGSQDAKSFEQPSIAPASRHGASNGHGTAHKGKRRRMGTPSLSIPPQLRLPRE

SEQ ID NO: 48359 - protein, 402 aa, Oscillochloris sp.
MTRTIQTTYRYHLTPTGAQEIVLNQFAGARRFVWNWALHRKKSHYQQTGETLSYHDLAGELTRLKQQPETAWLREMDSQSLQQQTLRDLDSAYQHFFRRVKRGEKHKGFPRFKSRKTDTPRFRIPQRVVLHADAVSVPKIGMIRAVIHRPREGVTKGATFTREPSGHWFVCIVTEQQAAPRTERPVQTHVGVDVGLKSLAVFSTGETIANPRWYRTQSRKLRRAQQALNRTVKGSHNRGKARVVVARLHQKIRNQRSDFLHKLSTDLVRHFDLVSIEDLSVRGLAKTKLATSVLDAGWGMFRAMREYKADRNDTHVVAIGRFFPSSKMCGACGWIHDLTLAIREWDCLNPECGVHHDRDLNAARNIDHEGMRLCELRVAAGHAETQNACGDSVSPTVVVGTG

SEQ ID NO: 48360 - protein, 380 aa, unknown
  TnpB Polypeptide
MLYPNNKQLTKLFQYAGASRFAYNWTLAKQQENHKNGGKFISDNELRKEFTQLKKTEEYKWLNNISNNVTKQAIKDACISYKRFFKGQCKFPRFKSKKKSRPSFYQDNIKIKFSETHVKLEGFSSSKKQNKQRLNWIKLAEKNRIPTNYKYSNPRLTFDGINWSISVSVEYEENYNIPTNQGIGIDLGIKELAICSYRKVYKNINKTKKIKKLEKKKRRLQHQISKKYEINKEGRSYKKTSNIIKSEKKLLKINHRLTNMRCNYLHQTTTEIISREPMFIVLENLNVVGMMKNKHLSKAIQQQCFYEFYRQIQYKSLWNNIKFIEADKWYPSSKTCSECGSIKKQLKLSDRTYICDDCGSVIDRDLNASINLMKYGRSIA

SEQ ID NO: 48361 - protein, 413 aa, unknown
  TnpB Polypeptide
MEKKYKALKIRIYPNVAQTTQINKTLGCSRFIFNQMLYERKSFYEENKDDTRKVYEYKYKTEKEYKQEFEWLKEADSQALQQSRIDLSNAYSNFFKSLKGKRKDGKVGFPKFKRKKLACSYRSCIINNNIDISFENKKVKLPKIGWVNFRDKRINFPGVIKAATVSRTLTGKYFVSLRYEYSAETKVKNITNPNKVIGLDMSLQNFYVDNKGNSPDYQRNTRKYELELEQAQRNLSRKKLYSKNWYKAKFVVSKIYEKITNSRKDFTRKLVTNLVNKYDAICIETLSLKEMSQNLKLGKSVHDLGYAEFVSKLKQKAEETGSIIIEADKWFASSKLCNVCGYKNKDLQLSDRNWTCPKCATTHNRDTNAGLNLQKLGLKIISLGQTNVEKMLDDEAFANSQFSLKQEAHRLQA

SEQ ID NO: 48362 - protein, 480 aa, Calothrix sp.
MKTSYQYKIKPTKEQEKKIDKILEMLRCQYNYLLAQRFDWYEMNRCPIDRCPLICHLPELKEQPNYYAQKASLVQLKVDRPWYKDIHSQVLQEVPKKVELAFDRWLKGDVNGKKSGRPRFKGKGQYKTFIYTQFKQHHFVNNKITLSKIGDVKVIVHRPIPDGFDIKTVSVTKKADGYYVTLSLDDKTVPTVKPDFNPDNIIGIDVGLIDFYVASDGSRIAAPKHLRKAERRLKSAQRKVSRRKKGSNRRKKAIQKLGKQHKKVADTRRDFHFKTAKSLLDKYDVVAVEKLNIKGLVKTRLAKSINDAGWSKFITILSNKAENAGLKVIAVKPNGTSQECSSCGHIVKKPLSQRMHNCPVCHASLCRDLNAAINIKNRGAHGLKAQSMSGLGVAEKPTLTAKQKCRRCHLKNSEFIQKISPQACHLTISPIESAKIANHQDNCTDAMNRVSLSLMDKAIRHNCSRHKGFAHICSVKIRAC

SEQ ID NO: 48363 - protein, 356 aa, unknown
  TnpB Polypeptide
MLRAYKYRIYPTKEQEEYLSKVFGCVRFVYNKMLSDKIEYYKQTGKMLKTTPAQYKKEYPFLKEVDSLALANAQLNLEKAYKNFFRNKSVGFPKFKKKKGCQSYTTNNQNGTVNIENGYLKVPKLKTKIKIKQHRQFEGIIKSVTISKTPTKKYYASILVETEIKELPKADKKVGIDLGLKEFAILSDGTKIENPKWLRRTEKRIKKLQRDLSRKQKGSKNYEKNRQKLAKLHEKITNQRRDFLHKLSSKIIHENQVIVLEDLKVKNMQQNRKLAKAISEVSWHEFRRMLEYKAKWYGREVVIAPSNYPSSQLCSICGYKYEEVKNLALREWTCPKCGMHHDRDINASKNLLKLVI

SEQ ID NO: 48364 - protein, 238 aa, Anabaena sp.
VRLVRRADGYYAQFAIDVNIRVETQPTQQVVGLDLGLNYFIADSKGNVEECPKFYRKSEKQLNRANRKKSKKFSKEKKKAKQRQSNNYHKARNRYARKHLKVSRQRKEYCKRLAYSVIQSHDLVAYEDLNVKGLVRNRHLAKSISDAGWYTFRQWLEYFGHKYGKVTVAVPPHHTSQNCSHCGEKVKKSLSTRTHVCPHCGYVQDRDINAAINILRLGLSTVGHTGTYAWGETVRFVG

SEQ ID NO: 48365 - protein, 397 aa, Moorea sp.
MIILEFKAYGKKQQYQAIEEAIRTVKFVRNSCLRLWIDNKGINKYDLNKYCKVLAKEFPFTNALNSTARQAAAERTWSSIARFYDNCKKSVPGKKGFPRFQKHCRSVEYKQSGWKLSPDKKSITFTDKKGIGKLKLKGTWDLWRFDKKQIKRVRIVKRADGYYVQFCIAVDNNEALKPTGNTVGLDVGLKDFYTDSDGNAESNPRFYRKGEQRLKFYQRRVSRKKKGSANRKKAINRLGRHHLRISRQREEHAKRLARCVIRSNDLVAYEDLRVRNLVKNHCLAKSINDAGWYQFRKWLEHFGTKFGRVTVAVNPAYTSQNCSQCGEVVKKSLSTRTHTCKCGCQLDRDHNAAINILEKALGTVGHTGTWIIDPNAHGELSSTLPDSGLGEQDSSLK

SEQ ID NO: 48366 - protein, 319 aa, Streptomyces sp.
LKRNFSLREHTYGEIKVRWGLGAQAAQHVIKKTCDAYATLKANLRAGNLGKPGSKRYRRATEKPVAFRPEGAQPFDDRMLSWQVPERRISIWTVCGRVKEVAFTASPAQMAGRELNRIRVRERKLRAKLQKKNTPSAKRRLKKRRRKEARRAKDINHKIAKHVVAEAERTGRGLALEDLTGIRERVRLRKPGGTSHALKAVGEGHPLHWSFAQLGSFIAYKARRAGVLVVYVDPAYTSRACAECGHIDRANRVSRAWFACRSCGFVDHADRNGSRNIRARAWELWRRGAQSTAPDPPPESGRHRSRAQPGTSRSRPRPK

SEQ ID NO: 48367 - protein, 469 aa, Streptomyces sp.
VKVTRIAYSHGLNAGKFEQLVEQATRLGRVRSLVWRRYGSLAGVGVSDRTIRDQWMKDGTADSFGVLANAWKETVRDAVADIKAGREAAKASVRQAVWRRISDKAERKRLFTVLRRDEWMTDPLLSRLMRQHWRHGRNHTVNQIVVRSDQYRTFTLAVGGDVWLTVPSLVCRKTIAIPLGTSVPPTGTLRLILRDGRVEVHHQFDAATLKSSRRSCGTSKLGVDKGYSEVLTDSEGNRHGEVLGDLLRAESDFLATKNARRAKIRAVAERAREAGEQAKADRITANNLGTSKRDRRHRVFAGKVRSVTFTAVHQVVDKAKHIVAEDLTRPFAPREKLGKNTNRRLAAWTKGVTAEALDSVSERRGSALTLVNAAYTSQVAPCCRVLGRRKGDRLHCTRCGAVWQADHAAAINVLERDGDPDITLHTSHTRVKQLIQERADRRRTRLPVQDSSTLVRRAKNPIRAAALNE

SEQ ID NO: 48368 - protein, 407 aa, Streptomyces sp.
MQLRYAFRLYPEPGQRAALARAFGCARVVFNDAVRAREDARKADRPFPKAGELSTRLITEAKRTAERSWLGEVSAVVLQQSLRDAETAYRNFFASLKGTRKGPRMGPPRFKSRKDARQSIRFTANARWSITGSGRLNLPKIGPVKVKWSRTLPATPSSVTVIKDVAGRFFASFVIDTDPAADAARMPDTDQTIGIDLGLTHFAVLSDGTKIDSPRFLRRAEKRLKKAQRELSRKRKGFTNREKARLKVARAHAKVTDARREFHHQLSTRLISENQGIAVEDLSVAGLARTKLAKSVHDASWSSFIGMLQYKAERYGRALVKIGRFEPTSQTCSTCGVKDGPKPLNVRAWTCAACGAVHDRDHNAAINVKTAAGLAVSACGAPVRPGAIPAQREETGSHGFPTEPRAA

SEQ ID NO: 48369 - protein, 242 aa, Frankia sp.
VRRAFKFLLRPTARQAAALSVMLGDHRAPYNAALQERRDAWRHPSKTMIRYGDQSAQLKEIRACDPDQGRWSFSSQQATLRRKAVAKVAALHGAVRRQRLDLAHKVAVGLVREHDLIAVEALRVTNMTRRARPKPDPDQSGAFLPNGQAAKSGLNKSILDAGWGVFLAVLRAKAESAGRVVVEVNPANTSRTCAVCGHCHADNRRTQAAFTCVACGHAAHADVNAAVNILRVGLARQADEAA

SEQ ID NO: 48370 - protein, 442 aa, unknown
  TnpB Polypeptide
MQTVSSYGVELRKQNIPIRQTLEIYRQAVSYLTEIYEQVWAELKMIPEAKKRFNAAEHLIHTTKKNHAHFDFDIRFPKMPSYLRRAAIQHALGSVSSYESRMEQWEAAGELSGKPNFTCENHAMPVFYRDVMYREGTEGKDEAYLKLYDGHDWRWFRVCLSHTDMEYLRRNWYGKKASAPTLEKRHHKYFLRFSYTEEVALTQTPVREQIICSVDLGINTDAVCTIMRADGTVLGRKFIDFPSEKDRMYRTLGRIRRFQREHGSAQAGERWAYTRRLNIELSRKIAGAVAEYAWENHADVIVFEYLEMNGKISGSKRQKLQLWRKRDIQKRCEHQAHRKGMRISRICAWNTSRLAYDGSGIVLRDWRNHSLCAFQTGKRYNCDLSASYNIGARYFIRELLKPLPATERSLLEAKVPAVKRRTSCVYADLRELSSEMGLLMAA

SEQ ID NO: 48371 - protein, 369 aa, unknown
  TnpB Polypeptide
MKLIRSTKCSLKFSTQKKKNDLSIILEEYSKVVNIFINYFWLNPDKATKGELLKPVVDIPETWLSARLRKVAAREGIDMINASKLRWKEKAVIPVHKGDRMYVSCTIADLVPSKDSTFDAWLHLASIGNKMIIDLPIKYHKHFNNYNNIGKRLNSYLITKNYVQFSFEIVTLPKKEGKKCIGIDTGINAMASLNNGNQYGLGIKDCIERVKRCKQGSKGQGVARRALKQRIDEIAKEILIKETPDLIVVERLKNMGNKSKAKRLLAKSIRRSIGTWNWKYWLKRLEAQCEINRISFRSVAPYYTSTTCPVCGQSDRGNRNGELFLCLNCGHTDNADINAGKNILNRFLTGQYGVCYKEMNEVQKCVSLF

SEQ ID NO: 48372 - protein, 286 aa, Sulfolobus sp.
MRLFPNGHQQRKLRKLADLSARLWNEVNYERRQQFFQQKKVDFKGTWDKYYKKYKDELKVNAQAVLQKNNETWLSFFSLLKQKPPFINHVTPPGYWKEEGKRKLILVIRQDRYEVDEEKHTLFLKDWKMEIPFEGRLRWFGVQGRLEIHVEGNKFYAHIPVDVGRINAKKSGKSMKDSLIIHGLRSKIQVEKPKGEKVASVDLGINMLATVVVDDGTILFYRGSVVKSDYFYFQKKIAELDKLKSEAEKVNELNAREKVLREKLFFKLHRRLVHYYRTLASHLAKY

SEQ ID NO: 48373 - protein, 372 aa, Sulfolobus sp.
MSSPVKGSNSKRPHEGIEIQSTVTFRISPSAGLLSLVSRYGKALDFVMDWLKKNKPAKNIIKQVHHAVYQQLREKFNLPSKVAQDCYRNAVTIYNGWRKNPVRGKFPKIKRFSVWLTPKLSYRLDLDNMKVNITSVDDLQIIGYPRNYTLYKDWEIREARLLIRDDKVFLKVTFRKVTQSPVASGGVAVDVNMENLTVGNDKGHVIISTRLDDAKHFKSLAEGLQKKYGNKVNTVKRIHNRYVTFYRRATRILEDFAKKTGKWVVDIAKMYNASAIFIEDLNNMIKNVDKLAKPFRDKLYLMQYRRVQYWIEWEAIKHGLKVVKVPAFYTSCRCPKCKGEMKEYAYRQFRCVLCGYEDDRDVIAVMNLYGIL

SEQ ID NO: 48374 - protein, 378 aa, Sulfolobus sp.
MRPHEGFEIQSTITFRISPSAGLLSLVSQYGKALNFVMDWLKKNKPAKNIIKQVHDALYQQLREKFNLPSKVAQDCYRNAVTIYNSWRKNPRRGNFPKIKHFSVWLTPSLSYRLDLDKMKVNITSVGDLSIIGYPRNYALYKDWEIREARLKIVNDKAFLKVTFLKQIQPPTASGGVAVDVNMENLTVGNDKEHVIISTRLDDAKHFKSLAEGLQKKYGNKTFTVKRIHKRYLAFHRKAKRILEDFVKKTGKWVVEVAKSYGASAVFIEDLNNMIKNVDKLAKPFRDKLYLMQYRRVQYWIEWQAIKHGLKVVKVPAFYTSTRCPKCKGEMKEYAYRQFRCVLCGYENDRDVIAVMNLYGRGSLILSTAGQVRVSTES

SEQ ID NO: 48375 - protein, 403 aa, Sulfolobus sp.
MVSKSFLNYLFIHALVSSQVKGSNSKLPHEGIEIQSTVTFRISPSAGLLYLVSRYGKALDFVMDWLKKNKPAKNIVKQIHHAVYQQLREKFNLPGRIAQDCYRNAVTIYNGWRKNPKQGNFPKIKRFSVWLTHSLSYRLDLEKMKVNITSVGDLSIIGYPRNYALYKDWEIREARLKIVNDKVFLKVTFRKVTQPPVASDGVAVDVNMENLTVGNDKEHVIISTRLDDAKHYKSLAEGLQKKYGNKVNTVKRIRERYLSFHRKAKRVLEDFAKKAGKWVVDIAKMYNASAIFIEDLNNMIKNVDKLAKPFHDKLYLMQYRRVQYWIEWQAIKSGLKVVKVPAFYTSTRCPKCKGEMKEYAYRQFRCVLCGYEDDRDVIAVMNLYGRGSLSLLTAGQVRVSTES

SEQ ID NO: 48376 - protein, 455 aa, Sulfolobus sp.
MTLPSGELPKDEEREPITPAIPEGSVRTVVMRLFPNGHQQRKLSKLADSSAKLWNEVNYERRQQFFQEKKVDLKNTWKKYYEKYKKVLGVNTQAVLQKNNEAWSSFFSLLKQKPPFVDHVSVPGYWKEGGKRKLILVIRQDRYEVDEEKHTLFLKDWKIEIPFEGRLRWFGAQGRLEIHIEGNKFYAHIPVDVGRITAKKSGKPMKDSLIIHGERERIQVEKPKGEKVASIDLGVNMLATVVVNDGTILFYRGSLIKSDYFYFQKKIAELDKLRSEVEKIQEGKAREEVLRERKRLFAKLYRRLLHYYRTLASHLAKSLWDLGVSTVYLGYPYFISQDKGNKFTVNIWSYGKLIDAVVNRLYEYGIKTFLVVEYNTSRFCAYHGVKVDRRPRGVVNCPFGHKLHSDVNGALNIMKLGVKKIIDVLKKPLSFLVTSNGVSPLKGSNALDPSRILAL

SEQ ID NO: 48377 - protein, 372 aa, Sulfolobus sp.
MSSQVKGSNSKHPHEGIEIRSTITFRISPSAGLLYLVSQYGKALDFVMDWLKKNKPAKNIIKQVHDALYQQLREKFNLPSKVTEDCYRNAIAVYNSWRKNPKQGKFPKIKRFSVWLTPKLSYRLDLEKMKVNITSVGDLSIIGYPRNYTLYKDWEIREARLKIVDDKAFLKVTFLKEIQPPVASGGVAVDVNMENLTVGNDKEHVIIPTRLDDAKHYKSLAEGLQKKYGNKVNTVKRIHNRYVTFHRRATRILEDFAKKTGKWVVEIAKMYNVSTIFIEDLNNMIKNVDKLAKPFRDKLYLMQYRRVQYWIEWQAIKHGLKVVKVPAFYTSTRCPKCKGEMKEYAYRQFRCVSCGYENDRDVVAVMNLYGIL

SEQ ID NO: 48378 - protein, 273 aa, Sulfolobus sp.
MEELIEAKILNYGKLKEIHKQILFIREYSKIVKGGPPPSNIPRELYYQATSSSNKIRYGPLRIIGNTSPYRIPEVDALVSSTRRSPPLYAIAEFSDDVRVFLAYEKPKSIVGIDIGVRHLITVVSIREDNLWKVRYWGNDVITEEMIKVIGDPQGVSEIRTIKGKIGNIIRDVVSFIQDLNPKVVAIEDLEYFESKIGSALRTVEKELESHLYRKGVKFRKLPPYYTSKICSNCGFRRGEVMGPLFVCPSCGYKADRDFNAAYNLALQCKYTC

SEQ ID NO: 48379 - protein, 424 aa, Okeania sp.
MYLTQKNKIRNLSSQEFKALRQLCRLSKNMYNVGLYSVRQFYFAEGGYLRYESNYHYCKDNENYQLLQTDIAQQTLKVVDRSFKSFFNLIQKAKEGNYRFEQIRLPRYLNKEGYFPLIIPRIKVRNGYFNIPMSRKFKAEYGAVKIPFPERLVGKNLKEVRIIPRYDARFFEVEFITEVESQQIVKSDNALAIDLGLDNLATCVSNTGSSFILDGRKLKSINQWYNKEHSRIQSIKDKQGIKDLTKKQVSITVNRNNKVRDYLNKAARYLINWCSENKIFTIVVGVNHRIKQSINLGKKTNQKFVQIPHHNFRFKLKAMCDRYGLTYIEQEESYTSKASFLDGDRIPVYNANNPNEYSFSGKRVKRGLYKTKQNKLINADCNGAANIGVKSNLNGFTPDRLEASLAMPLRVKFDVDLSRQICDP

SEQ ID NO: 48380 - protein, 353 aa, Bacillus sp.
  misc_feature (272)..(342): Xaa can be any naturally occurring amino acid
MMINKAYKFRIYPNKSQAALINKTIGCSRFVFNHFLSLWDHAYKETGKGMTYGTCSAKLPTLKKEFVWLKEVDSIAIQSSVRNLADAYTRFFKKQNSAPCFKSKKNNIQSYTTKQTNENIAVIGNKIKLPKLGLVRFAKSREVKGRILNATVRRNPSGRYFVSLLVETEVQELPKTHSCIGIDVGLKDFAILSDGTIYKNPKFFRFLEEKLAKAQRVLSRRTKGSSRWDKQRIKVAKIHEYISNARKDYLEKISTEIIKNHDVIGIEDLQVXXXXXXXXXXXXXXXXXXXXXXXXXXXXXXXXXXXXXXXXXXXXXXXXXXXXXXXXXXXXXXXXXXXXXXXVVGIKIKTLKI

SEQ ID NO: 48381 - protein, 227 aa, unknown
  TnpB Polypeptide
MQKILSVWKVTIEHTPTGKYFAVLNVDFEPQPMSNKGGKIGIDVGIKEFYSDSNGNVIYNPKYLEKSMRKLMREQRKLSRKEKGSTNRNKQRVKVALVHEKITNQRNDFLQKQSTILIRENQTICIEDLKVKNMMRNHKLAQHIGSASWSKFFDMLSYKSVWYGNDIVKVPTMYPSSQTCSCCGFKNPLVKNLAIRKWECPECHTKHARDTNASINILNKGLQMQSA

SEQ ID NO: 48382 - protein, 395 aa, Moorea sp.
MDLKYYNEEPYDAKVSRTVLKTSQKRRLFDLVQQNVERGIKKFFDNCKNQVPGKKGYPRFKKHSRSVEYKQSGWKLSPDKKSIKFTDKKGIGKVKLKGKWDLWRFDQKLIKRVRIVQRADGYYVQFCVKVDNHEQLEATGFTVGLDVGLKEFYTDSYGHTEPNPRFYRKGEKRLKFYQRRVSRKKKGSANRKKAINRLGKTHLKISRQRKEHAKRLVRSYRKIVEPYYKRFNPFMQSRTPIKAPLSKVSSPARCVIRSNDLVAYEDLRVKNLVKNHCLAKSINDAGWYQFREWLEYFGKKFGRITVAVNPAYTSQNCSSCGEVVRKSLSTRTHTCKCGCQLDRDHNAAKNILTRALGTVGHTGTLINAWGEDTSTLLGSGLGEQVTSLNQESPGF

SEQ ID NO: 48383 - protein, 263 aa, unknown
  TnpB Polypeptide
VAKLKEEDGRCYIQFVNNPDRFEIGKASLYGNLKYVKTEVKPMYGKYYILITFDDKIAEVEVPENPKRILGLDPGVNKFFGVANNFVGVPFVMNGRAVKSANQRFNKKRAKLISSVTKGSDSKSSVKYSKQLNILSQRRESFLRDYFYKCAWYICRYAKAADVDVIVMGHNDGQKQEIDIKDNVNQNFVFIPYTKFITILKTVASKCGIAVVIREESYTSQASLLDMDDIPTYKKGENKKYAFSGKMDSSWPLQVKERDSFER

SEQ ID NO: 48384 - protein, 497 aa, unknown
  TnpB Polypeptide
MENVRRAVAVELEDPPPELYAVAEAYRRIVEEAAVYVAERGTLEREKYNELYRRFRELHPHLPAQLVQQAINQGVEVGKSFLEARRDGRVHKPRPEVRRVSIRFAKDSWSYRKTAASAAPVRLALSLPGGRREVWIKPHRRFWLYWWKALRGEAELASTLMLKRRRGRWYAIFVFDVQPRGKPPAEVVTFDVNENTVAVARVSLLATVDAVARWNRQYLDPAVYSVRTDFGRLAKRYEAVRSAKLEELRGKYPFAGRDGEERAQNVADTREFRRFAGRLRERRRKEARVRQIARDVTRDPAVIVTEDLGKNPQEGMIGVEEKKAKRTELRHRIKQTPFRKLVRAVEDKAAERGSVVVYVSPYRNSKVCPIHFAKLRDNGDWHILRCPHGHAVDRDAAAVLNMLWKTAPTGWVKGVWWDAKEVGKRLKKERGLVPKELAKRKNPLVPWPVVRAVWASLALLKAGDKWPAMLARAASMTPARGAYEGGARAPPRGAPAL

SEQ ID NO: 48385 - protein, 520 aa, Lactobacillus sp.
MKRSSKPIKSYSKTVRAYSLKLDEDTYTKLDQLFINYGKCRNMFLNQYCGISHMLDVKQYRKLRDQIKGSKQNKKYVAKYNFLDKHWCYALSDACANINSMWSNLANQIRRVVQANEAIDKDERHLIYYLLSIRELWYYALTNNQAVLLDLSHGLQKHLAELEEAVTPKQRKHAYSYLSRLTRRYKYTPRKHHSLNKSMTYDESMYKFTGNQLEELAISSPVSRKRFSLKLTSPWHYRLNGNLQIILDRDKKRLEIHKVIKVRQKKEYQAGTKLGIDKGLATLVSCSSGREYGKGFSQFTRPEIEQESQYLARRNPYYGYRYQLKKKLNQLKNANIPKQIIKKKQLTRQLNKLNANNIGHKRKDKRHASYHACLESKINHAIKTMIKLETPSLIVKEDLTFTKEKIAKKGSKYERQVRRNLSSWTKGILNERLEYYCQQYGIDFKDVNPAYTSQYCPNCGRHFIVRFGKHNEKTLCPNCGEMDCNIAASKNILARATDKEITLYKPYKKVKAILDQRIAS

SEQ ID NO: 48386 - protein, 364 aa, Lactobacillus sp.
MLAMMNERYQNNKALPFLGKFKLNYLLKPLKKEYPFLKNSDSSSLQVVNEFLTQSWKNFFQDKTGQIGKPRFHSRKYLKKSYTGKSIIKTAGKRYLKIPKLGYVKTSKNGVLQNTKIKRYTVLLEPTGKYYLSLQVEISEPEKYSLTDKQVGIDVGVADLAILSNGLKYPSFNSSYFEKKAKIWQKKYSRRRHLVKLLVLQNKNKRVLCPRSLESFANWQKAQKSKAKYQAKAANQRRDYLHKLTTHLVKQYDVIATEDLKTKNLQKNHHLAKSIANASWRMFRQMLEYKCEWYGKKLIAVDPKNTSRICSKCGYNSGAKPLEIREWTCSKCQTKHDRDINAAVNILHKGSTKLSGQGLAMVTS

SEQ ID NO: 48387 - protein, 210 aa, Oscillatoriales sp.
MLVFEFKAYGKSNQFKAVGEAIRTAKFVRNSCLRYWMDNKKVGKNDLNKYCAVLARDFLFADELNSMARQASAERAWSSISRFYDNCKKNIPGKKGYPQFQRDCHSVEYKTSGWKLADDRKSINFTDKKGIGRLKLKGTRDLHFYQISQIKRVRLVKRADGVYVQFCVDVDRQENTEPSGTTIGLDVGLKEYYTDSNGTTVENLPVYEKR

SEQ ID NO: 48388 - protein, 406 aa, unknown
  TnpB Polypeptide
MILVEQHQYSKNSKYYKELDNLCFLAKNLYNVTLYHVRKHYFDTKEYLKYTDINKMSNDLFPNDYQALPRKVAQQVQKLVDHNFKSFFAHLKVKKSGERINIPDYLDKTYGRQVLTYTDQAISQNNRNVEKGYIKLSGVSFKIKTKVERVSFARIVPRKNYIVVELGYERSEFSESQRNERFASIDIGVNNLASVTSNVFRPIIINGRPLKSINQYYNKTIANNMSRHQRWTNRMYAINRKRNNKIKDYMHKSSTYVVNQLVENRVDTLVIGHSNGWKQDTHMRKDTTQNFVQIPFNMFISMLQYKCALVGIKVIIQEESYTSKCSFLDQDYIPTYSIDDDLFSPSGYRESRGMYKSKKFGNINADINGSLNILRKYLTKQEAWNEEIFSDCVEVCSTPSVFTVKL

SEQ ID NO: 48389 - protein, 300 aa, Okeania sp.
MIIYEFKVKAKPEQYKAIYEAIKTSQFIQNKCLRYWMDNKGVSKYDLNKYCKILAKEFKFASELNSMARQSAAERAWSAIARFYDNCKKKIKGKKGYPQFKKHCRSVEYKTSGWKLSENRKAITFSDKKDIGTLKLKGTYDLNYYQLNQIKRVRLVKRTDGYYAQFAIQIDLKIESQPTGKAVGLDVGIKYFLTDSDGNTIENPQFYRKSEKQLNRANRQKSKKYKKGAKPQSNNYHKARCRYARKHLRVSRQRKEYAKRVAYCVIQSNDLIAYVDAERRAEGRLECERYGKKSTFKQIN

SEQ ID NO: 48390 - protein, 557 aa, Streptomyces sp.
MAGLREVATPFVADGPAGVAIRSSLKGLTGQDEKVLRLTGGLLGSLASRDLKARCAAGLDRGSDQWARRKRALTDQSSSRWAGSITKATHDQCALAQRGQLAYIQYLQAGIDMIARRLSLPVGAKGSKGSPGGYRSRKEWFAKSRRLRLLQDRLGRERADRDAGRVRVVRGGRKLLRNRHNLQATRLTEAQWRVRWEAERWFLQADGESGKRYGNETMRVSPDGEVSIRLPAPLAGLANAPHGRYVLACRVGFRHRGQQWADRIAANRAVAYRIHFDVERGRWYLTASWQIPPVRTVPLEAARSGGLIGVDTNADHLAAWRLDAHGNPVGEPRRFDYDLSGRAPYRDAQVRHALIRLLHWAKRHRLAIAIEDLDFQAEKTREKHGRRKRFRQLVSGMPVGRLRGRLVSMAAELGITVVAVDPAYTSRWGAQHWQRPLTTKTRKTTRHDAAAVAIGRRALGRPIRRRTQPPPPHRSDVVGHRTVQAASGIPEREETRPRIPGPRTRSIGAGRGAKAGDQCAHNRSGHTAEHEFCHQDSPRSVSRNGWSGGRRRPAGMD

SEQ ID NO: 48391 - protein, 260 aa, Escherichia sp.
MVYRDLREHTPLGSQMCCNVIFSVCKAYKSQKERGHIHKAKAVPTIRFNGTSVHFDKKTYSLRDNSLSLYAHSLGKLFGGEQLRDERDRHLALRRRLQSNGSQSAKQKLRQVSGKEMRRVKQTNHETSKVIVAAAAEAGIGTIILEDLTHIRDRIKAGKRVRSRLHRWAWRQLQTFIEYKARAVGIMVKYVNPAYSSQSCSCCGCLGKRHKHRFECPHCGFRAHSDLNASRNLAWIGETAVLPRASVNTPDVGSPSLAPQ

SEQ ID NO: 48392 - protein, 565 aa, unknown
  TnpB Polypeptide
MSSLERTLVRQFEMPNETDRVSLDRMCSSYGFVASKFLFAFQTRELRGEVRDFRAFRNKLVAALSKKPVEFNQRLADLRTNGKAAEANLLTLLRELKETSGPHLQVRHWKLALEETSKMALTHWKSVIAEAKKKLAHTLKHFNDQDRHYACWLLCGVNRQFFELLDGRIPVPNPEVSFDRNYCLSYDRPLSSKALRSIAGVVRRTVNKVRRDSVCYPRTQAFHNRIDFDASCYTVRSTEDAQFLELMSLQPGKRISLRLKGRSKIRGTLQLIRDTAGTYSLRVYVPQQCEEKRKTGTVIGIDLGYTEMMATSEQELLGTDLGKYFSEIADKRGKNSEGRNRMHALFRSLLKKTSKDNLAKAERIRKHNLGRKKQRARYIRDIGVIKTVVNRELNFLFTRKTNPVKAIVVEDLSARMKAHFCKKWNRWLSGWMRGYLQERIRYKAKKHGIEVNPAHSSRECPRCHCTDKKNRRGDVFKCSYCGYHEHADLVAALNILGRLGDKEIRKGMSPSRVKAVLDGRHVGWKLLNDTVTDRTSDEARVVDESPRSASSKSELRSGVQVCTAS

SEQ ID NO: 48393 - protein, 387 aa, unknown
  TnpB Polypeptide
MWKLLKSFKTEINPSEEQKVKIHKTIGTCRFIYNFYLAHNKELYDKGEKFMSGKSFSVWLNNEYLPQNPDKLWIKEVSSKSVKHSIENGCIAFTRFFKHQSAFPNFKKKGKSDVKMYFVKNNPKDCRCERHRINIPSLGWVRIKEKGYIPTTKDGYVIKSGTVSMKADRYYVSVLVEILNNKIANNSNAGIGIDLGLKDFAIVSNGKTYKNINKSARLKKLEKQLIREQRSLSRKYENLKKGESTQRANIQKQKLKVQKLHHKIDNIRTDYINKTIAEMVKTKPSYITIEDLNVSGMMKNKHLSKAVASQKFYEFRIKLQAKCNENGIELRVVDRWYPSSKTCHCCGAIKKDLKLSDRIFKCDCGYSEDRDFNAALNLRDATTYEIA

SEQ ID NO: 48394 - protein, 406 aa, unknown
  TnpB Polypeptide
LHVDGIVKENTMIRSKKIKLLPTSLQKKLLQKWNNHHRYTYNKAISIINEDPVEPAFRNYYKTFGNENDISYCIKTSSKTYYSKLELRNLITPAEASSRIKWILETPKSIRESAVFEAKKNEKSAISNLKNGNIKHFTLTYKSKKKKSWSYKISHDSLKTYNNKSIGIYESSSGMRIKCTEKIDSISSDSEIYYDGLNYFIIIPYEKSIKESEYTNWFIAMDPGIRKFQVGYSPDENEHIIFGNRSSLNIYDKLLYVDYLTSKRCKMKTEKRKRILDKLRLRILNLQKELHYKISNFLCKNYENIYIPKLTKGNDIIKKNVRKINKSTVRKMVLLGHCKFIDRLKAKAEEFTKTKINIITEEYTSQQCLNCRNLTKTCNEMYVCKHCNDKIDRDVLGSVNILLKNW

SEQ ID NO: 48395 - protein, 387 aa, unknown
  TnpB Polypeptide
MRKLLKSFKTEINPTEEQKAKIRKTIGTCRYIYNFYLAHNKELYNKGEKFMSSNQFRVWLNNEYLPKHPECFWIKEAYSKAVTQAVNNGQAAFIRFFKHQSSFPRFKKKNRSDVKMYFVKNNPKDCRCQRHRINIPSLGWVRIKEKGYIPTTKDGYVIKSGTVSIKADRYYVSVLVELPDNKTADNSNEGIGIDLGLKDFATVSNGKTYKNINKSAKLKKLEKQLIREQRSLSRKYENLQKGESTQRANIQKQKLKVQKLHHRIDHIRTDYINKTIAEIVKTKPSYITIEDLNVKGMMKNRHLSKAVASQKFYEFRIKLQAKCNENGMELRVANRWYPSSKTCHCCKNIRKDLKLSDRIFKCACGYIEDRDFNAALNLRDAMTYEVA

SEQ ID NO: 48396 - protein, 448 aa, unknown
  TnpB Polypeptide
MLLSHRIRLDATPAQCDYFARAAGTARRVWNWALAEWQRQVARGLRPDAMALKKQFNAIKYAHLDWLDTDGRPWLRTIHRDAHAQPFANLKKAWSRYFAARKAGQPAKPPRFKKKGRCHDSFYVANDKFRVEGKSAVLPKVGPVALAEALRFPGKILGASVSRQADHWFLAIQVEMPDEIAQRPRTGDGVVGVDLGVSAAATLSTGEKIAAPRPLRAALRRLRIRARRQSRKMQAAKAAAGISGSIPKGTYLSRSANQVKGARRLARLHARISRVRADFTHKLTTRLCRENQAVAIEDLHVKGMLANARLARSIADVGFYEIRRQLQYKALRYGTAIVLADRWYPSSKLCSACGQKNAALALAERTWICSCTVQHDRDVNAAINLQRLATGVLAARTALPVASPAATSGTVVGMDSAAGGEVTPVRYEHGHQDGSGQEEDAAHFCARF

SEQ ID NO: 48397 - protein, 369 aa, unknown
  TnpB Polypeptide
MLLCKKIKIEVSDRDAEALEFMQAKCRGLYNWWVMRLRNGERWNLERAKKSLRASKQYDPELRYVYGKLLAEVYFRLDKAMQAFFRRVAAGEKKPGFPRFKPRHQFFTLCYPAMYLEVQGDTITLPTGGGHSWGPKGYPNIVAHLTETPPDHFHEVAVSRDARGNYCCSFVYEDTGQNDQYGRNKPGKKQKKRKTRPMRNDGIVAFDLGIKTLATGFNDQGRFYHIGGFKGYRWYNKQLDKLRSKRDRCEKKSRWYLHLSRVYKRVAEQKRRKQRDCLHKASHHIAHRLAQRAVVIGDLSQRQMVIKKQEHEIPKDRNKRRIRNRLVYNDWGLYGFVQMLEYKCLRFGKALSIISERDTTETCHVCTGS

SEQ ID NO: 48398 - protein, 416 aa, unknown
  TnpB Polypeptide
VSYPVRGEEPAIIEALKVRALPEGSCDKLLEFLRLYRDAVQMVVDRVWGIDEGLSKKRLHRLFYDDLVNLGFRAHHAKEVYMYAKSLVESARGNSGRKPVLRKLSARIDKYDYKLDLDSMALTLKLHNSYEVRLRLIAPRERVEKFRGWSNYELVVKYDGKSFWVSIYLRRTVKTVKPRTVTTIDLNFDNVTLAVFTLDGRPLKLKRFKTPHRRVLTHRIWIERIQKRYPRSWRFIKGVRRAIERHGKRIRNISWDYAHKLGDLVAKLALKYCSLIVFEDLEKLRENGKRDKRLNKRLGLWFYRRMQFCIEYEARERNLEAVKVDPRGTSSKCPRCGGRLVECGYRVLRCRRCGFVGDRDVIATVNLYRKYVFKYSRCGVLGVALNAPKPDEDPSGVRGNRYEAMTISIFMNLYES

SEQ ID NO: 48399 - protein, 416 aa, unknown
  TnpB Polypeptide
MHYTYKYHLDPTASHREQLDFYRDTCRQLYNHALREFNKIPESAGTLTQRVRQVRDQLPDLKDWWDDLTDLYSTVTQAAVMRIERSVKALSGLKQQGYKMGSLNWKAPQDFRSFSYVQKGFEFDRKDGHTVLSLKKLADIPVVKHREIPDTETVKEVTLKKEATGEWFACVTVDSKETPEKPGNPERCIGIDVGILKYAHDTDGRTIGSLGLSDDRERLQREQRKLSRKEHGSHNWEQQRQKVAECHQKMKRKRRDFLHKLSNYYASQYDLVAVEDLHIKSMLESPGNSRNTASAAWDTFTTLLAYKCKREGTHFVEVDPAGTTKECASCGVATDKPLWVREHSCPACGFEMDRDANAALNILSRGFEQRGVVHSESPPVETALPLFTSSESSDVVDGKRVVESGSPSLTESRVSG

SEQ ID NO: 48400 - protein, 387 aa, unknown
  TnpB Polypeptide
MVEANRTVILPLETPLSDEDKRFHQTIEKYQHCRDRASEYCWENPTQPDDIVSSKRAVEDALSHDLREETDGLHANLVQKAIKDVTSAMDSVTKAWERGERISKPTWKASGSWVMTYDTRAGTFSKHDATFATTGSTVTLDYQTPANLDENPYDKYVLSSEWEQTTSKLVYRHGQYWLHLAVKRDVSDQHWTTQAGTEVSNAPTEDTSRVLGVDLTVKGWTAVTSAGGFHGNADYLNHRRTEYEQLRGELHQTGTRSAYLRLQERSGTESAWFDEYAHLVSNAIIEDAVDTRSTHIAFEKLDGIRKRMSNLPKYQQWMFGRVQEYVESKAAEYGISVVYVNPQNTSNGCSHTDCQTVSESNRSHKRFECSSVVGRGTRIIMQHETVD

SEQ ID NO: 48401 - protein, 332 aa, unknown
  TnpB Polypeptide
  misc_feature (23)..(29): Xaa can be any naturally occurring amino acid
MEVRRTAPVKLDVPDQRREDFHXXXXXXXFYRNKVSLSTVKGRVECGFELPSDSPTPYEEYVLSEDFEFRASTLQYDAIDDEFYFHITTRKFDADGSDSEITEVSVDTEHQTVLGIDLGVNSLAVASTGRFWNADDYDHWCREFEKRRGEMQQRGTQAAHNALLRLGKREAAWRKQYIHTVANEIVTEAVEHDCDVIVFEDLTDIRERLPQAKWHHIWAFRQLFEYVEYKAPERGIIVEQVESNHTSQRCSRMDCGFTHDDNRSGEQFCCLNCEYEVNADYNAAKNVGIRYARKQKHRLRSSPTSGSGDALVDVRVNGGMLNGESHQPIAGD

SEQ ID NO: 48402 - protein, 273 aa, unknown
  TnpB Polypeptide
VTHETHRIASKADADTIVGVDVNEDCIALAAMHRDGSVKDSVVFEYPSVKEQRHEFFTKRKRMQKAKQTAFETVIQTEERDYVQDCLHKVSRSVIEWVSQFSNPVIVFEDLKDMRDSIDYGTRMNRRLHSLPFAALQDMVSYKASWDGIPSDEVDPEYTSQRCPRTECQHTARANRHKKRFKCRKCEFQDHADRKAAVCVVQNWFEAQDDENVPSLETLPRVKKVRRAASGRGGATDSHGRVLRSGVYRHGTSAQPEMGAREELKSVTSAVQE

SEQ ID NO: 48403 - protein, 406 aa, unknown
  TnpB Polypeptide
  misc_feature (384)..(390): Xaa can be any naturally occurring amino acid
MQMTWDVTRTVRVRLDVPDDRKSDLHATNKKFTYCANRTADWAWRYPDENCVTSKSEAENALYDDLRKETDELHANLVQKAIKRATDDIDNCVGRLAHSENTSKPEYETFSIVYDKRAATYYRDKVSLATVNGRVECEYDLPDNPERTPHGEYLLNDSYSVSTSTVHYDSKTDEFYLHAAMETEIDVNSPEKAEDSNVRGVDCNVDDHIAATSTGRFIGNADSLNHQRREFEKRRASLQQTGTHSAHNTLQCIGDRFGRWSDDYLHQCSKELVAEANRHECTHIAFEDLEQIRERISDGKKFQQWAFNALQTRVEYKAERRGIVVETVEPAYTSQQCSKCGCTLEDNRDDQQFNCLDCEYTANADYNAAKNSARKLSVTLQQGXXXXXXXYPPAHASSACVHCREF

SEQ ID NO: 48404 - protein, 419 aa, unknown
  TnpB Polypeptide
MHYAYRYRLHPTEAQRETLEYHLDTCRQLYNHALTKFEQIPESSGTLKQRVRQVRDRLPELKDWWDDLNDLYSTVSQTAVMRIEDSVTAVSQLKQNGYNVGSLNWKAPREYQSFTYTQSGFEFDKKNGQTVLSLSKLADIPIIRHREIPDTVTIKSVTVKKERTGEWYASFAVDDKEEPAKPDDPQKCIGIDVGILKYAQDTDGRAVGFPDLQDNRDRLRREQRALSRKEHGSSNWEEQRQTVAECHQTLRRKRHDFLHKLSNYYATQYELVAVEDLDVMSMLKSSGNSRNTALAAWDTFTTFLEYKCKREGTYFVEVEPSGTTKQCASCGVRTDKPLWVREHSCPACGFKMDRDANAAINILSRGFKKRGLGQSEETPVETALPLFTSSGSVDVMDGKRVIETGSPTLRERTAKAVSE

SEQ ID NO: 48405 - protein, 418 aa, unknown
  TnpB Polypeptide
MHYAYRYRLHPTEAQRETLNFHRDTCRQLYNHALTEFEQIPQSAGTLTQRVRQVRDQLPDLKDWWDDLTELYSTVAQAAVMRIEDAIEALSELKTKGYDVGSLNWKSPREYRSFTYVQKGFEFDKKNGQTVLSLKTLADIPLSYHREIPDDLTVKEVSIKQERTGEWDASFAVDDKEEPAKPENPARCVGIDVGILKYAHDTDGCAVGSLDLQHEQERLKREQRSLSRKQHGSNNWEKQRLKVAKRHQKVRRKRHDFLHKLSNYYATEYDMVAVEDLDVKPMLESTGNSQNTASAAWDTFTTLLEYKCKREGTHFVEVDPAGTTKQCASCGVGSDKPLWVREHSCPACGFEMDRDANAAINILFRGFEKLGLGQSEETTPVETALPLFTSSDGADVVDGKRVVETGSPTLKEAATAAE

SEQ ID NO: 48406 - protein, 236 aa, unknown
  TnpB Polypeptide
LRRQIQLGTKQQVSTSVSVILLLSRTVLKRLNCILATVSKKIACCDNSSGDEALRLHRKWLERRTHFFHSLAKHIVERCVEKEVGQIKVGDLEGIREDENGQSKNWGRHGNLDLHGWAFDRFTSILEYKAKASGVEVVRVSERDTSKTCCICGEKDESQRIERGLYVCESCDAAFNPDVNGAENIRVGIAEEESNSESASSLDGDRSNGWLAQPEVSLHDLSSGFQPRNQVGDSKP

SEQ ID NO: 48407 - protein, 410 aa, unknown
  TnpB Polypeptide
  misc_feature (371)..(403): Xaa can be any naturally occurring amino acid
MCYYMNMRLTRIAKIKLNISPEIIKPTIEAYTQAFNYVCKTGWQDGDTNGVSLHHKTYRETKKHLPSQLAVSARMKATEALKSIKTRLKKGQKATCPKSEQSSIRLDARGYNIWFNRGEISILTVNGRKRFPITIPEYFKRYLDWRRGSADLFLRGKSVFLHIVFEKDIPDPEPTGKIVGIDCGIRKIAVTSDNKFFNGGEIRKVSNRYEKLRSVLQSCGSKSAKRHLRRVSGKENRFRRDANHKITKQVVRSIPEGTTIVLEKLKGIRQQARLRKKQRGELHKWNFSQFQQFLIYKAEAEGIAVRYVNARYTSQKCSRCGYISRSNRMSQSLFRCKQCGFSLNADLNACRNVRQNYLDAICHPGRAIVNXXXXXXXXXXXXXXXXXXXXXXXXXXXXXXXXXAYRSESL

SEQ ID NO: 48408 - protein, 402 aa, unknown
  TnpB Polypeptide
MLIRKAYKYKLKTTPEIEQKLVHFSGHTRFVWNKVLALCLSRLEDKQNLLWYNEAAYWLTLWKSSDDFGFLKDCHSQVLQQKLKDLDKAFRDGFDKNQPLKRLPVFKKKHQSNSFRYVQGFKIDNKRLYLPKIGWVGFFKSQDIQGKPKNITISKHADGWYASVQVELDITPASNARSAIGLDLGIKQFVTTSDAKQITPVNASKRYADRLSKLQRQLANKQRFSQNWRKQRVKVGKLHLKIKNSRHDFQHKTSTALSKNHALIVIEDLRVVNMSKSAKGTIEQPGRNVKAKAGLNKAILDQGWSEFVRQLEYKSLWQGHQVHQVNPRYTSQQCHACGHTEKANRPSQSSFECKRCHHKANADVNAAKNILAAGLAVLACGEAALAASVKQEPQLTKQLVAA

SEQ ID NO: 48409 - protein, 453 aa, unknown
  TnpB Polypeptide
MFDALQVPIPALESKANSTSSTVRQAYVFALDPTTEQADFLRSHIGGSRFCYNALLSLVKANWDDNLARKNAGIDVSPEEWFGTSHFNLRSLWAEHRDELAPWWGANGWSTYNDASQRLSRAFTNWRQGRAKFPVFKTKGPGGSVRFANTAVRLADSHHVVVSRIGEIKTYESTRKLYRHLERSTGRILAATVSERCGRWSISFDVDVERNIPAMRLPVRIIGIDVGLSTLYTGATPEGEPILTVPNPRHFVSSQHRLAVAKRVESRRQGPRNGVAPSNRWQRAHSRVQKIHSEIANSRRNLIHQTTTHLAKQFDVIVIEDLNIAGMLKNHSLAKHISDASWGEFFRQLQYKTQWYGSALVIVDRFYPSTKTCARCGTVKAKLPLSMREFACDMCGHRINRDLNAATNLARMGMAGTRSVIGRGGEVRPEQRIRDARAHPDEALTEALTSVSA

SEQ ID NO: 48410 - protein, 529 aa, unknown
  TnpB Polypeptide
VQKNETHPTEDKSKKGVSSLMAKATKTIIHPLSYKSAHSPYFVATKTLFNQIAAFYFEVITLHERVLDLSSKEALTALEKLTHTTSANPHPAMPLSDAIVADIPAMFRRAAIHAALGSAHSFYSHLEKWRQQKENARAKGKKSTIRPPVPPRRWNKSVTLYAGQWKGRTKKSIMLKLWTGSSWAWIKCGIRGQKIPDQWDVASPTLVQDGGHWKLHTAIQKKFTAPAKGAQQVTSGSETRICSVDLNISKHLAVCTILTVEGTVVATRFIAGGKPLHGLRKRQLGRVARNRSKTGIIAEGELDNAALWAKIRALDEDSAHQVSYRIVQFAKEHQASVLVFEHLGHFKPQKGKYSKRGNEKRSYWLRGKIFTYSKYKAWNERIVTCRVSPRNTSRECARCGALVARYDAKHPAEGYTPGAPLVYCPQCHTHGNSDRNASILIGKRLLARYQTSSSQTTSQEKPPTPLATERSVKAEGVRRSQAAKRRSRPSIDQARHGRTNAQGTAQDALNGMVKSVSGIAHPLRLFNES

SEQ ID NO: 48411 - protein, 398 aa, Chthonomonas sp.
MLIAHRIALDPNNVQATYFAKAAGTARKAYNWALEQWQKQYEAHRANPALPKPNQRALRRQLNAIKREQFPWMLEVTKCAPQMAIIQLGQAFQNFFAGRARYPQFRKKGRDDRFTLTKDPFSLDGCRIRIPHLGWVRMRESLRFAGRIMSATISRVADKWFVSITVDTPDHPHLPKAESQGAVGVDLGVSALATLSTGEVIPGPKPHKALMGRLRRLSRSLSRKPKGSVNRAKAKAKQAKLHARIAAIRQDALHKLTTSLTRRFHPIAMENLNVCGILKNRHLARSIADMGFFELRRQLEYKAAMRGGQVVVADRFYASSKTCSACGHKLETLPLSVREWTCPKCGVIHDRDVNAAINLKNMAVSSTVSACGEEGSDPTRKRRVKPASVKQEVSFIPV

SEQ ID NO: 48412 - protein, 386 aa, Chthonomonas sp.
MITTKTYKFRLDPTRQQEQEFLRFAGCRRFVWNWALARKQAVYKETGKTLGYNALASELVALKKQPETAFFKECHSQALQQTLRDWDKAFVCFFEKRTKFPRFKSRKRTAHALRIPQNVTVVEDRVSVPKVGLGKARLHRQMQGTIKSATIKQEPNGHWYVCFISHIELPDVEPVWDAPVGIDVGLESFFTLDNGEKVKPPKFYRKAERKLKRLQRAVSRSQKTSRRRCKRKKVLAVYHARVRNQRNDWLHKISSKLISRYDTLCIEDWNLKGLVKTKLAKSFTDASLGAFVRMLVDKAEWNRCRIVKVDRFFPSSQTCHPCNHRQHLELSDRQWTCGGCGVIHDRDPNAAINLLLEGMRILAVGSPESQNDKGGNVRLAKVSSSR

SEQ ID NO: 48413 - protein, 572 aa, Streptomyces sp.
VDGVRELTAPFVVPGPLAMTIRTRLRVSPGDAAVLTEVGTFLGSLASRDLAVRSRQGLGHDAASWATRKRALTEVSSARWAGSITRATHDQWALARRGQADEMAWLRGQTAQIEARLARPLGAKADKRAGLARGYATRAEWHAKSRRLRLLRDRSAAVDADLRAGRVRVVRGGRRLARLRHHPVAEGANHGEWAGRWRAARMFLSADGESGKRWGNETIRVTGSGEVSIRLPAALAHLANAPHGRYALDAAVVFTHRADEWQDRIAANRAVAYRIHHDPVRDRWYVTASWQRAAAPAVPLRAALARGVVGVDMNDDHLAVWRLDAQGNPVGEPRRFRYDLSGSASHRDAQIRHALTRLLHYTRRCGAGAIAVEELHFAAGTSRELGGVSKRFRRLVSRFPTTRFRARLVSMAAEQNVAIVAVDPAYTSRWGAQHWQRPLTTATRETTRHDAAAVAIGRRALGYSIRRRAVPPPYDRRDRTGHRTVQAGPDPWEREGPRPRLPGPRTRSVPPGGDAKAGDQRAQDHCGHAAERGACWHESAPPFGPQGLRPGPEHGLRHGPGGRVGCRPVPGA

SEQ ID NO: 48414 - protein, 381 aa, Leptolyngbyaceae sp.
MTQTISVSCKLQVPVELRPEIDATLQAFADACNQILDVAKQENCCNVTRLHHLTYYNVRSATGLKANHACQAIRRVVGNLKATKQVHKFRPTSLSLDARVFAYRESDQHVGITLMNMRVWLPLSIGNYQLALLRGQKPTAATLVKRHNGDYYIQIAVDLPTEPTGKTPKVIGVDLGRRDIATTSTGKAWNGGQPQATRDRYSRVRANVQRKRTRSARKLLRRLSGREQRFQKWVNHNISKRLVEEAKQTGAAIAFEDLTNIRHSLNQKPRNKTERRRTNNWAFYSLRLFTGYKAAIAGVPIVLVPPAYTSQTCHNCLHIGERSNKLFKCPHCGFSGDADHNAALVISLLGAALVNQPEVPFLSCNLPDLNRDKAASARRCG

SEQ ID NO: 48415 - protein, 402 aa, Cyanobacteria sp.
MLKAVKVRIYPTDAQQVHLAQAFGCCRWVWNQSLAIMSQTYKQTGRGVSAMDMKKLLPVWKKEYEWLSECYSQCLQQSVLNLGTAFGNFFDGRTGYPTFKNRYGRQSIQYPANVKILGESEIKFPGKLGTMKAKIHRDCVGKLKTVTVSKMPDGRYYASLLFDDRTTKQESSSEGKAVGIDLGLIDFAVTSDGSKFNNPKHLKKHECNLKRKQRKLARKRDKTTNKRRKAKLALAKVHSKISRVREDFLHKLSRKIVNENQVIVVEDLAVKNMVKNHNLAKSISDAGWGMFQTMLKYKAEQDGKIYLEISRFFPSSHLCNATLLPIPKMDLSVRSFLCPHCKVHHDRDVNAAINIRNEGLRILALGTSASALGGNVRPKRYGRKSTTAEAIADELGSQLRTA

SEQ ID NO: 48416 - protein, 430 aa, Cyanobacteria sp.
MIAAYGYMHYNSITAIISPMRTAHQYRLRLTKQQQATIDQWLELARRQYNYRLAERFNWYEQNRCDVNACPLICHLPELKDSPNFYSQKRDLVNSKKLFPEYKEIPSHTLQDVIARVEKTFDRWLKGDCNGKKSGKPRFKGVGRFRSIVFPDPVKSEHIESRFIQLPKLGKLKMILHRPIPDGFKVKTAAIIKKVDGYYITLSLQDSSVPVLTSDAPALENTIGIDVGLKSFLVDDLGDKVQIPQHYRKAEKRLKRLQRSLSRTKKGSNRRKKAIKRVGKAHLKVANQRKDFHYKTAKKLLSQGKHAAHEKLNIKGLAKSRLAKSVNDAGWGQFLQILSIKAERAGLLAIAVNPNGTSQGCSNCGHKVKKELSDRWHSCSSCGCELDRDHNAAINIKHRAVGHSVLKAHLTSEAIAGVNEKPTLYCTQSA

SEQ ID NO: 48417 - protein, 418 aa, unknown
  TnpB Polypeptide
MKKKKDKGKKNASVMRRYEYRIYPLPSQVGLFVRTFGCVRFVYNKLLRERIDFYEQTGKSAIGTPAHLKSEFPWLAEVDSLALCNAQIALQSAFSNFFEDESAGFPRFKSKKNPVKTYTTNCVNNNIEIVRCADAPTRKQWKLKLPKVGLVNIVYHRHIPKHWSIKAVTIKMSPSGQFYASVLCDTKEATPPLKHVEEISDERIVGLDYSMPELYVSSDGETPGNRRFFRTDEKKIAREKRKASKCKKGSNNRKKIQRRVARMEQRVADRRKNFIHQESRRIANSFDIVCVEDIDMKNMSKALNFGKSVCDNGWGMFRNVLAYKLAEKGGRLVKVDRYYPSSKLCSVCGHKKDSLELSERIFVCKHCDAEMDRDVNAAINIRQEGVRIALLYPDGMPEKKKRTKKISENKPENKETAA

SEQ ID NO: 48418 - protein, 416 aa, unknown
  TnpB Polypeptide
MERINVANGTSSKYVSQGWKRTVSASPPSYGEAYINLGAVDRSYAVIENEPAADGEIVLKMVIQGEWYRLVFDFGNTRFPEGKVTLPLVKVENNQPVFIFTVATDNPVVQFSGDYVIGVDAGINNYATVVVRNTKTEQIVYQSTLSQRVHSLWNSVRASERQVRALWKKAEHLLYQRQARMSALDEAQLHREASSRKKRELAIIAAQEIADLSHLWGNAVVAVEDLGWISNTMRNGRWNRGELINWVTHYVSQNGGWAVAVNSAKTSQVCHACGARVVHPTHRVSVCPLHGVMDRDVNAAANIAARAVPRVEKARKTRAKNRKLKPQVALRTPPARASLKYPGRDRTKHTATPKRKKNHQPTPKEVILPISPARVQATCLVTTVLADRGAHGTPETRKAAHKQGNTAYKRKLCNLI

SEQ ID NO: 48419 - protein, 471 aa, unknown
  TnpB Polypeptide
MNKVTRIIASKNLNAGKYRALQEQAKLLGKIRKEVWHRFGSIRGVGASHRQIRGIWVKTRDFRPLAAKAWKETLRDTLDDVKLYEESAKEKARKAIAKRIKNEVERKNLYRLLKSDGWVRDKYLCCLMRKYKKHGKTQVNNQIIIEFGVYKQFIGRDGNTWLKIPSLNRSKMLCIPLNCNVQLKGALRLILDNGKIFVHHTINPKHFAPCGDQIVGVDKGYTEALADSKGNFHGNGFGDIMTTGTQKRHFRGQARNKLHQLAKKTKNRKARNIQKFNLGRIKLEHYNYCQRAQLRSKAFEAAHRAVDIAQEIRAEDLSKSMSSSKRWKKYNRMLSAWARGFLSEALESVTKARGSRLRLVNAAYTSQADSNTGRLKGRRVGDKFYHANGEVSHADTNAAVNIEHRADDSEISLYTPYKEVKAILLNRSTAIGGVSSAKGNCPSRTPVTRRKRTLTESELPKNETIQDCPGF

SEQ ID NO: 48420 - protein, 359 aa, unknown
  TnpB Polypeptide
VQVKRAYKFRAYPTRPQEGRAVHLLADHCDLYNAALEERREAWRMRQARITYGTQSAQLKEIRRGDQDGQGRHSFTAQQQTLRRLNVVFAAFYKRAQEGRAGYPRFKSHSRFDQVMFVAGDGAGWQPAAGGRWARARFQAVGDVKVRQHRAIRGIVKTLQLKREHRRWYVIVVAESEPVPLPSTGREVGIDMGVTRFLTTSDGEIVANPEFLKVSADLIAGLQRRMMLIRQCNRIGVERLKTANMTGRPKPKPAPGQPGAFLANGAAAKAGLNKAVLDAGWAQFTHILAGKAEEAGRRVILVNPAGTSIGCHQCGARCTRPRRDTVVRPVHGPMDADVNGARNVYARAGLGSGQAAHAA

SEQ ID NO: 48421 - protein, 424 aa, unknown
  TnpB Polypeptide
MQTVRIYRLEQLSATLFRRLKAAQMEAAQVWNLCMETHKQARMSHTHWPGDNELHQATKGRFALHSQSVQAVFRAFLANIDTTRQLRTEHPQMHMKYPWRTKRFYPVQWPAQAVSKEKGRVVLPMGKGRPSIVLPIQLPENSGACTLVWNSGFELHVCVEAPQAKEAPGEKQATVDLGEIHLAAVTTNTGHALIVTGRGIRSLKRQRNQQLGKLAQKQSRCKKHSRRWKRLQCTKHKVSRRSLRRVRAMRHKATRQVIDFCIEQQVGTLFIGNPHGVRNRDNGRHHNQRMSLWEYGKDIDYLTHKAKQAHISCFTGSERGPSSQCPRCGHTQKPKGRNWACRACGFTGHRDLVGSVNMHQLAFGSQVLFPRSFTYLRPGLSRSSSRADTPRSCLNELAAQPRIADTVSSETGYPVGVAQKPVSL

SEQ ID NO: 48422 - protein, 412 aa, unknown
  TnpB Polypeptide
MKIAYQYRLKPTTSQSAQMENWLEMLCSQYNYRLAQRFNWYDETRCRIDACPLVCSILPVEEIFKGIPVNRIGNQGYVDWKALQKGNLPQTKVERPWYKDIHSQVLQDCILRLDKTFERFIFGDKNGKRSGRPRSKSRSRYRSFTYPQIKQDCIEGNRISLAKIGDVKIVLHRPLPDGFKIKTATVIHKADGWYVTLSLQDDTVPILLPDIDFSKVVGIDVGLKDFLVTSDEHVVPIPQFARQSERRRKVLNKSLSRKKRKGTKRRQSSGRKLSKHYQKVARQRKDFHYNTAKRLLNNYDVIAHEDLNIKGLAKTRWSKSILDAGWGNFIEIVSRKAENAGKMTVAVNPNGTTQNCSNCGVKVPKTLKDRVHSCICGLEIGRDLNAAINIKKLGAGLPLSKAQRLLSASRIG

SEQ ID NO: 48423 - protein, 374 aa, Phormidium sp.
MKTLKFKLYNHKRNHHLKCIVNASGTIYNHCIALHRRYYRMWGKHLNCSKLQKHIAKLRKRNPSWKTVDAQAVQDICQRIEKAYQLFFKHRDKGVRPPGFKKVKKYKSFTLKQNNYKFLGENRVKICGRVYQFWKSREIEGKIKTVTVKRTPLGEMCMFVTVDAPSEPTVKVETGKSAGFDFGLKMFLTTSEGFSIDAPLFFKQSLREIQKANRELSRKQKSSNKRERARKNLVRRHEDIVHRREDWFWKLAHWLTDRFDVLYFETLNLKAMQRLWGRKVSDLGFRSFLKILEWVAQKKGKVVAYIDRWFPSSKTCSGCGYVLDELDLSVRRWRCPSCGSKNDRDENAAINIKQVGASTCGRGKVSQAQPAFTV

SEQ ID NO: 48424 - protein, 264 aa, unknown
  TnpB Polypeptide
LKEFGYIPEKISSVTISMKNGRYYISCLCKEEKDEQIALSNESIGIDFGLKNQFVTEDRTIPSINHSLSIKKLEQRLRREQRRLSRKVKANMIKKAYYQKGVKKGQLKSFQWAKPLSECKNIQKQKRKVSKIHERLTRIRTDYNRKALLSLVLERKPSSITIENLSVRNLMKNRHLSAPIMKAQWYQSRLYLENLCNRLGIELRVVDRFYPSSKLCSTCGFKYKDLRLKERFWTCSNCGSNHDRDRNAAINLGQCKIYTVLTKV

SEQ ID NO: 48425 - protein, 432 aa, unknown
  TnpB Polypeptide
MFEAVKVRLDPTPRQERLMASHAGAARFAYNAGLAHVKDALENGEPADLSHYALRRWWNANKDELAVNRDTGVVWWDQNSKEAYSGGLRSLAQGFSNWSKSRKGQRKGKRVGFPKFKSKNTAMRFAYSTGFTAPKASDPYGLKLPRIGRVHCLENVYRLLAGARLIRINVSRRAGNWYASLTVERESTAKPAPKGGAVGVDLGVKHLATLSDGTVVPNPRALGTRLKALRKAQQALSRKVKGSARREKAKERVAKLHARVADVRADAINKATTMIAETYSVVCVEDLNVAGMVKNRHLARSVSDASLSEFRRQLEYKTARSGAALRVVDRWFPSSKTCSNCGVVKAKLSLSERVFDCDACGLSIDRDLNAAVNIQVAGSAPETLNARGGDVKRTNSLLGNVVPCEARTKRAQKSVVRLGAGLGNEAVQPRLN

SEQ ID NO: 48426 - protein, 390 aa, unknown
  TnpB Polypeptide
MVVRKVAQRIPFTPSKTQAALLEQCFGARRFAYNQQVEAFNAYDKDTNPRPSYPSVADMKAANEWLRDSPIPSSALSNAIMDFRKSQASYFRQAEYGKNRPRFASKSDAVQSFRNGLPIRRMDGNRFPLSKKLGSVRIRRRDRIRYPLESLSSWTVKRENGVYYLVLLFNVDVQPKPPVDGQVGIDLGVKDFLTLSTGEKINYPDRLRQLEEKARWEQRRLSRRVKGSSNYRKQKATVAKAYAKVCHCRENFQHQVSHRLIEDNQFIGMETLAVRNMTRKVKKRVDANGKFTRNGQSRKRAMNRAILRNGWSSFVDKITYKAQWYGRTLVQVDRFYPSSRLCNNCGHKYDGLLLLEREWVCESCGVLHDRDVNAALNILGEALRINQARE

SEQ ID NO: 48427 - protein, 582 aa, unknown
  TnpB Polypeptide
MPSYGEDYVNLGAVDRAYARIENNPFSDGEIVLRMVIQGAWYRLIFDFDNKRFTEGKVTLPVIKVQDGAPVFIFTVVTDNPVVQFSGDYTIGVDVGITDYATVVVRSVATGRIVHETTLSQRVHSLWNSVRASERQVKYLRKKAAATLGDRQARMAALDEARFHREAASRKKRELAILAAQEIAYLSYVWDNAVVAVEDLSWIVNTMQNGRWNRGALVQWLAHYVSQNGGWVVSVNPANTSQQCHVCGQRVTHPTRKLSVCPEHGVLDRDINAAANVAARAVSRVVKARMTRAKNRKLRSQAPLRTPIARNSLKNTGRNRMKSKPTPKRKNNRRVSKGVNLPLCPARAQASHLEASVLADQDTRVTLGTNTAALKQDTSMTYDRRLYNPVGYAKYLSVMLGDTSDGPGVRAAVYYSGCELRCEGCWSPQTWNPRIGHDMTAAKRREIVAYLERPEVAGLSLLGGDPFHPLNAADATALCALVRNRFGWDGERTIWAWTGYTFDELLEREHARMLLPMLDVLVDGPFILGERDLNLPFMGSRNQRVVDVQATLAGRRDGSLGVGEVVVLDEWMRAPEPPTVDA

SEQ ID NO: 48428 - protein, 492 aa, Tolypothrix sp.
MYGCQQTLIHAPPDVQAIIEYLCTESNKVWNCSVYYARQIYFKTSRVIKRAEICAEMVRSKNKHFGAMYVSSAQQTCNNVAEAFKSFQELTKLWKRGELQDKPSLPKYRKTGLFTVTYPKRWLKLTDDGIRIPLGNQVKTWFGIDAIYLPMPSNLKWEDIKELRILPRNRCFYAEFVYPVEKEEKGLLAGSKGDSSDGDSTPPEREQLDRSGGIRPMFRSAPRQESGVISPCSFSPCPLPLVEDIKSQLSANKVLGIDHGIDNWLTCVSNIGTSFIVDGKHLKSLNQWYNKRVASLKENKEQGFWSKQLAAITEKRNRQMRDAVNKAARLVISHCLENSIGRIVFGWNQGQKDNANMGRKANQKFVQIPTAKLKERIIQLCQQYGIDFVETEEANTSAASFVDGDSLPKYGEKPEGWKSSGKRVKRGLFRTANNWYINADTNGAANIVSKVAATLGINLSGVSRGALTTPLRVHLWTLKNPPTFCLNKRSEI

SEQ ID NO: 48429 - protein, 460 aa, Tolypothrix sp.
MEANKSVATRRMTFRLYPNKQIEQFLRYHRKLHKDLYNAAVYNRFTQYQKFNQSVSYFEQQNSLPAFKEVWTEYKEINSQALQATLKRVDYAFERWFKGLGKRPRFKSIRHYSGWTYPAKSGYSVESNGENGYLNLSKIGRIQMRGQAKYWGIPTTCTIVFRNGKWYASITVDVLDQTLKPDILPIGAIGIDLGCNSALSITDCENHQQIEAPKFLRNAEQLIKKASKSKRRKQSPNRKKKIKASRRWKKAQAKVSKITRKVANQRQNWVHQIASEIVSGNSFVATEKLEVKNMTSKAKKGKRKKQKVGLNKSILDVGFGMLRSTIKYKVEQIGGVFVEVPTKKVKPSQTCPKCGHQHKKTLDIRVHNCAVCGYQQDRDIAAAEVMLYWAKGSHFVAGVPPVVESGVNLTELGTSFVDAESSSSTANTRSSAGSMRQLGAKKRQKSKSTGLVSETQTSTK

SEQ ID NO: 48430 - protein, 392 aa, unknown
  TnpB Polypeptide
VKHAYKLRAYPTRPQEGRAVRLLADHCELYNAALQERREAWRRHHRSISYGDQSAQLKAIRAADPDGQGRHSCTAQQQTLRRLNASFGAFLKRARRSKGKARRVGYPRFKPYQRFDQVLFVAGNGAKWQPADAGRWAHASFQAVGRVKVNRHRPVVGRVKTLQLKREGRRWFVILAADIEAVPLPATGRSVGVDLGVARFLTTSDGEIIANPRFLDAAQQRIVDLQRRKARTRPGSGNRSRLRRTLAKEWRTLRNQRRDFHHKTARGLVDTCDSLALEHLRVAAMTATAAGTVEAPGRNVAAKAGLNRSILDAGWSQFTSILVAKAASAGRRVILVHPAYTSIDCHTCGTRCTRSRQEIVVCPVHGELDADLNGARNLAARAGLGSGQATAA

SEQ ID NO: 48431 - protein, 339 aa, unknown
  TnpB Polypeptide
MPTVCLRFRFRENGKVAALMDACGAIQQKAINFAWENKKTATFTIIKALYPSLKAQYPHLHTAWLQSAVRSGATVVHSFKNRKRKGRVKAERPYIKRPFVYVSKPLLKVRWDGSTLTVTFPVSPRDKEPVVLSFRPHHRYSRLLDEWEAGRAELGEPTLTCTSLSLPLKFPEVKPYEPQAVLGIDSNEATLTVSDGVVREVREIDTSLVARVSRDHERRARKGTRGKRNPRAKQKVAARHGRRRREKVAEFWHHTALLLIALAVVAQAALVLEDLQGIKGRLAQGAMSRRLRQRLLSFWSIRAFHRILAEKAAWYGVPVIFVDPSNTSRTCPVCGRVNK

SEQ ID NO: 48432 - protein, 533 aa, unknown
  TnpB Polypeptide
VERRSGLSADLISEPFVVAPPAGARVKVRLRPSPADEAVVWAVGEHLGGLAGADLAWRCRRGPAPDQRAVRKRTLTGQSSSRWAGSITRTSNDQWQRARANLTDRRVALRRAARTLQRRLAVPVGQRRGRVRGYATRAERFAKQGRLQHLQAALAEVESRLAAGRVSVCRGGRRLAKQRHTLDQAGLTEQQWRVRWQAERLFLTADGDAEYPLGNGTIMVHPVEQWCELRLPAALVHLSNTPGRAPTYRLACPVVFTHRGDEWAAQAATGAVRYDITFDPPKGRWCLAASWRLPAVQPPSLQALRRDRALGVDLNADHLAAWVLDRSGNPVGKPHTIPLDLDGQPASTRDGRLRAAITAVLRLAADLGCRSILVENLDFADARHLGRETLGRGRRGKRFRRIVAGIPTRAFRTLLAGMAANRGLWIIAVDPGWTSVWGRRYWQQPLQQSTKRSVTVSGHHAAAVVIGRRGLGLRARRRPGVPGHDRRIVAGELPARPDHQRLGREGPGPPGGQRAAAAPRKTRPAEQNRPATR

SEQ ID NO: 48433 - protein, 473 aa, unknown
  TnpB Polypeptide
MKKRKKRAKKGEPQTITKAVTHIRLEATNAVKLTALDALASVYLELTQQYVTLFCTDELPNGFRAPCFLTPLSERWHRNAIQQAAGIAKSWRSNRANAYQGYLDALADYQEQKADGTLEEGVKEPEWREWNVPILRQPCIQANANVVKLEEAEDSAFDYWIKVSTLDKSHPLLIPVKLADYHIDALTDPETGKRRKINSSVTLNKRDEDWWLTLTYDETVAVQTPPDAPVIGIDVGIANFVTTSDGKTYGSFNGRLRERQKRDREKRRRKAKLRKCLEKKGTPKEKLPSTTSRTGQRLIRYVRQSINQAVNLCFDDPNHEGCQFAYEQLSVASMRHKARAMNAYMRASNLAHIPDQISWNATKRGVLATHVKSAYSSQECHVCHYVDRKNRPHQQTFCCRVCGHTAHADSNASENIASRLGDLELRACQNRQEVKILLMSRHEQWKQKFGYSVVVPPVQLGLWARSEASTDVG

SEQ ID NO: 48434 - protein, 705 aa, Catenibacterium sp.
  misc_feature (388)..(416): Xaa can be any naturally occurring amino acid
MISDKEHNRLLKQFHKLSDRHILAVETDMPYSDTLKVVALSDKIRKAGNELVGLMRKNYNQLMRTKRYRKLLFLYGDSKDKDKRKTYAEQLNEMQKAYNITWEYCRTSMIPIGKKYGVDAVFALTKAEDIWRGMEKCLYGNGNVLHFSKYGELPCIRAKQINRGIPISVTDNKLHFKLGKTVFGIQINDRFQQDEVDAVLSYLAESEILDDRAVNTLIKDGYCIDTYRPCYATLVPRMIRGKYRVYLHLTIEGKAKPKYDRFGNLRHKFGKGIIGADIGTQTVAYTSDTEVGLKNLSERGNSIQTSERKERLLHRAMDRSRRATNPQNYNDDGTVKKGSKTWIYSNHYKKLKEKHSELCRINAINRQLAINEDANHLRSLGDVFITEXXXXXXXXXXXXXXXXXXXXXXXXXXXXXLTIEGKAKQKYDKHGSPRHKYGKGMIGADIGTQTVAYTSDTEVGLKNLSERGNSIQTSERKERLLYRAMDRSRRATNSQNYNDDGTVKKGRKTWRYSNHYKKLKEKHSELCRINTINRQLAINEDANHLRSLGDIFVTEPKNAGRLMRRAKETTVNSKGKFNRKKRFGRSIKNRCPSGFQTAVEQKFKVSGGIYIEVSNDYRASQYDHTIDEYIKKKLSDRMYKLQDGTEVQRDWYSSFLLYCYDYKTKDIDKNKCISEFDKCYNKEKALIEWIKANEIKVLNSGIKIA

SEQ ID NO: 48435 - protein, 404 aa, Tolypothrix sp.
MIIYESKLEGTKNQYERLDNAIRTGLFVRNSIIRAWMDGLVKSRNDAYKYCKVLADNAEFPWARLLNSQARQAHAERAWASIERFYRNCASKVKEKKGFPNFKKQLLRASVEYKVSGWKLSEDRRNLEFTDGFKAGSFKLWGTRNLHYYQLDQIKRVRVVRRHDGYYAQFLIDHKREENKKLTQRQIGLDVGLSNFYTDSFGEKIDNPRFLRKDERKVKRLQRRLSKTQKHSRNRAKARNKLGRAHLKVSRRRNDWVCKLAQCVIQSNDLVAIENLKVRNMIKSHCLAKSISDAAWYRFREWLEYFGIVYGVPVIAVNPSYTSQDCSNCGETVVKTLSTRTHKCPRCGYVADRDENAALNILKLALKQLANTVGRTELEVSGEIPLCLNAETQSSKGTRRKRKT

SEQ ID NO: 48436 - protein, 388 aa, unknown
  TnpB Polypeptide
MQKLVKARYRIRIKPSKKQYKQILQFAGCSRYIYNHLLEINKALYSKNLKGLTTSEMELEIRKLKEDFAWIRECDASALQQSRINLQRAYSNYFKGKTNVYNQKYGEPKFKSRRDEIKYRTPYNNGGANVINKKLKLPKIGYILIKSKNIPVYKKLTSVTIIIEPSGKVYASLAVEKFITLKSQTGNVVGIDLGLESFLSSSDGIKIPPFHYAKNSYNKIASMDRKLSKMRDKLKKANNDYRTASNYQVYKKKVAKYKTHIANQRKDALHKLTTELVTKYDCIIVENLNVKAMCKNSKLAYAIHDASWSMFVSMLEYKCDWYGKIFHKINRFQPTSTICSSCGVKHKDIVNSLAVREWVCPDCGTKHDRDINAAINILIVGIDELFLV

SEQ ID NO: 48437 - protein, 388 aa, Pyrobaculum sp.
MKSYRTLVLKYPLERLPPETVVQLLKAQEEFRRWAKEWARSGGKTPAPEQRPLKYFAKEFLQAAKALEWLREHVIKHGFKPPLVFNAQLRINNERDVSCGVFVDLPKRELRIRKWSGRRGNTIALPLSRKNIEWILERVSENAKLALAMVRIGRSRRNSAVALYVALVFRREVALMTPRRLLLLDLNALHNGVVWAAVEERRILQRGVLRPHIYKIIRLQREISQLDSLCAKKGNPRTCRQAASTKSRLRRILRQWEDGTAKKIVQLALRYKAAIVADVPDDKSIRELKESRYSAERKVFLNFGRLRRRIRGLAEWHGVPYREERLYSTICPVCGAKMEEEPDRRVKCQCGFTAHRDEVPHHVDHEEVQRADPNPLFFRPHLSNSRRS

SEQ ID NO: 48438 - protein, 402 aa, Planktothrix sp.
MLWVVKVRLYPDVQQQQSLGQAFGSCRWLWNYCLNLTNQTYKETGFGLSGYEVKKIIPQLKKEYEWLSLTYAQCLQQVCLNLGVAFNNFFEKRAKYPRFKSKHGKQSIQYPQNVKVGVNYLRLPKIGDVTAVIHRSIEGKVKTVTVSKNCSNQYFAAILFDDGKEKPSTSREGKAIGIDLGLTHFAVTSDGSKFDNPRILNKYEKNLKVKQQQLFRKQKGSNKRIKARKKVSRVHRKITNCREDFLHKLSRRIVNENQVICVENLSIKGMMQNHKLSKAIHQVGWGMFCTMLKYKAEREGKVYREVDRFFASSKTCHVCLNQVSSLPLNIRFWTCENCETKHDRDINAAINLRDEGLRILTSGTGDKACRPDVSLSKGGRKKSTTTLSVGQEAHTLPQGQCG

SEQ ID NO: 48439 - protein, 140 aa, Crocosphaera sp.
LLKLDVRDITPQLEPTKKCVGLDMGLKYLYADSDNNVVEPPKYYRKAEKRLNKLNKRKSKKFRRGQKQSNNYIKARRKYAKGHLKVSRQREELAKRLALRLIQSNDLIAYEDLKVKNLVRNKKLAKSINDAGWSQPAKMD

SEQ ID NO: 48440 - protein, 492 aa, unknown
  TnpB Polypeptide
MKRNRGIRYRFYPTDEQVKVLNSMFAARRVYWNIILEMYNERCAYNRTVEKPEDKIPYVLCTGGRKPGTTPMPNNEVYHVSKAVEYANAKAEDGKDYSWLLNHKGVCECTITDLHKSWNRFYDYLKDLSQGKRPNKVGAPRAKKRRDVNSVTLRNTQLIADGKKMIDWKRGLVQTPGMRKLGLCKCVLHRRFKGNIKYSTITKENDGKWYISLSIEEEVPEVKLPTNVKPENVVGIDLGLKTEAVTANAVDGDDSFHNINPTRLMEELNYLDKKIRRIQRAMTRCIVTMTREGAESRIMTVTEMNKREQENRKAFSGYHKTYSNGYNKLLEKKNKIEAHIRRKRDDYNHNITNAIVSDPNVELIGMEDLAVQEMMMRNKTKVEHGIKVKENDGKIVKPRRKMAKHLGDLALADITRMIEYKAAQRGKGFCKVDRYYPSSKTCSKCGHKYTGLTLYQRTWVCPECGGKLKRDANAAKNIAKEALKIYNEQQSV

SEQ ID NO: 48441 - protein, 506 aa, unknown
  TnpB Polypeptide
MNSLIFLLKDSQKFHNLVKIWHIIHVRKIYTGGERMAKRKSKHDDFITMCEKNKKLYTLATTSTPSCNLYDVIDRNFVISEKSTSHKKSSSRRIAKPDTVFIAYRFRGYPTEEQESLLKQNIGAARFIWNRMLSDYDLMWKELGFTIPMTPADYKNVSGMEWLRDMDSSNLANVQLHLEKARNDYFSGDKGKPRFKKKNICTDSYTTNYTNNNIRIEDDGIRLPKIAGPIHLSMHRSITPGGTLKNVTITHEPDGKWYFSIAFEYPAEEVEPSTGLQNFFETGNRDSVSGIGLDMSVPFLYIDSTGKRPSYELNGREVRFLKQYRKLEKRIAREQRKRSKMVKDSNNYNKQCQKIARLHAKAKHRRDDFLHQIAVRLVRGYDLIAIEYLNMAVMKKCLNLGKSVSDIGWGKFTQILEELCNKFGKLLIRVDRWYPSSKTCSHCGYINKDLKLEDRVYVCPECGHVMSRDKNAATNILEESFRILEENMLRPAVEGYKKPSLLTTIV

SEQ ID NO: 48442 - protein, 432 aa, unknown
  TnpB Polypeptide
MLKGIKIRLYLNNDQQLTINKLLGSYRFIYNSCLSYKITNYETDKKNTSLSDLGHYFHQDLRNEYEWLKEHNTKVLKQSIINLEQAYKNFFRGVKDRSKVGFPKFKSKHDVQKVRFPQEAIASKTFDEENSKLNLTTIIRGLKFECSDRDKQYLYKNKAGIKSITIIKNKCGQYYATILIDGDLLRTVNEPVRQSIGIDLGIKTLLTLSNGETIDNPRWINSNEKKLKKLHKQLSKKQKGSNNRAKAKRKLAKAHEQIKNKKQDYLHNITTKIVSENKVIILEDLNVSGMMKNHKLAKAIQELGLYEMRRQIEYKAQWYGREVIFVSRWFPSSKKCSCCGNIKHDLKLSDREYVCENCGLIIDRDENASINIEVEGIRLYNELIGQRMSESSDEKQRKLEDYPTMDDKDENPLKSSGRMIQEVKELVMSNIV

SEQ ID NO: 48443 - protein, 389 aa, Okeania sp.
LCKENENYQLLATDCGQQTLKSVDKCFKAFFKLLLMKKEGVYQQRINLPRYLPKDGFFPLIIPIRARHDFAKDNWKFKIPTSRKYTRDHGSVYIRVPPNLREYRIKEIRILPKQKGKFLDAAFVYEYNEEQINVDKDEAISIDLGLNNLATIVSSTDESFIIDGRWLKSKNQWFNKCRAKLSSHKYRQGIRHHTKQEAWLSYRRKNQVNDYLNKAARYIVDFCVSRKIGTIVVGYNPTLKQETKLGKRNNQTAVAPLVETPRPHCLNFVQIPIFTLCGKLKSLCERYGLNYVEQEESYTSIASSLDRDKMPVYNADNPVKKSFSGRGIKRGLYQTKDGHLINADANGSLGIGLKSKHQLSFERVSRVCLTQPVRVNILQESPTIATLGA

SEQ ID NO: 48444 - protein, 360 aa, Aureibacillus sp.
MSKQNKAYKFRLYPTKEQEVMIRKTFGCVRFVYNKMLAERMETYERLKEDKEELKKVKHPTPAKYKNEYEWLKEVDSLALANAQLNISRAYKAFFSGIARFPKFKSKRHKQSYTTNVVNGNIQLLDGHIKLPKLKKVKIKQHRKIPENCKIKSCTLSMTSSGKYYISILTEYEKEIERKKIEKVVGLDFAMNGLFVDSEGEKANYPRFYRQTLAKLAKEQRKLSRKKKGSSNGHKQRIRVATIHEKVANQRKNFLHHKSKELASTYDAVVIEDLDMKGMSQALRFGKSIADNGWGMFTSFLQYKLNEQGKHLIKIDKWYPSTKTCSSCGDTQPMPLGIKTYVCSCGLHLARDYNAALNIK

SEQ ID NO: 48445 - protein, 402 aa, Escherichia sp.
VERLQAFKFQLRPGGQQEREMRRFAGACRFVFNRALARQNENHEAGNKYIPYGKMASWLVEWKNATETKWLKDSPSQPLQQSLKDLERAYKNFFQNRAAFPRFKKRGQNDAFRYPQGVKLDQENSRIFLPKLGWMRYRNSRQVTGVVKNVTVSQSCGKWYISIQTESEVSTPVHPSASMVGLDAGVAKLATLSDGTVFEPVNSFQKNQKTLARLQRQLSRRVKFSNNWQKQKRKIQRLHSRIANIRRDYLHKVTTTVSKNHAMIVIEDLKVSNMSKSAAGTVSQPGRNVRAKSGLNRSILDQGWYEMRRQLEYKQLWRGGQVLAVPPAYTSQRCACCGHTAKENRLSQSKFRCQVCGYTANADVNGARNILAAGHAVLACGEMVQSGRSLKQEPTEMIQATA

SEQ ID NO: 48446 - protein, 373 aa, unknown
  TnpB Polypeptide
MKRIFKFRIFPTKGQKSKLNKTLEGCKLAYNLCLQTRIDEYIYNNKTLSLYDTFRLAKDWKKNDPLINIVHAHIIQQVCERVDLAFKAFWRRCKSGENPGYPRFKSEDRYKSFTFTNSDRGFKLIDNKTLKISGIGNVRIKKHRAIPGTIKRLTVKREASGFWFANFHIEIDEGKALPVSDRAIGIDVGIESFATLSNGEVIENPRFLKQDRKRLKKLVKQLCQSSIGSERRAKKTKAHAKVWNKIGNRRNNFAHQTSRRLVERFGIICVEDLDIKNMVSDGINDFLNEATYDVAWGNFLAMINYKAEEAGRVFVQVDPRGTSQDCSQCGQKVFKDLKVRIHDCPHCGLKIHRDLNAAINILRRGLASLADAV

SEQ ID NO: 48447 - protein, 251 aa, Nonomuraea sp.
VSIWTSAGRLKGVAFTGSAGQLALLAAHRRGESDLICRDGMWFLYATVEVADRPLSEPDGFVGVDLGIANIATTSDGVRHCGKGLNAVRHRHRRLRRRLQAKRTKSAKRLLKRRRRREARFAANVNHVIAKSIVTEATRTGRGIALEDLQGIRERVRLRKPQRVTLHSWSFYQLGAFIAYKAVRAGVAVIAVDAAYTSQQCSHCGHVDRRNRPDQATFSCTSCGFAEHADVNAARNIASRGETGWAVSHAA

SEQ ID NO: 48448 - protein, 388 aa, Romboutsia sp.
MIKAIKVRLYPTRYQEELMFKSAGVARFSYNWGLAFLNNYYKENNRSLSINELRKEFTKLRNDIEYSWLKEVSSEIPQQALKDLGESFKKFFRKESAYPKFKKKGKCETSFFHLNNKFVVENNKIKLEKIGYVKMKDEGRLPVGNYKKDKIKVLNPRIKHNGKFWYLSLALEVEDKTKEELINVSVGVDLGIKDLAIVSNIDKPFKNINKSKEVKRLNKKLKRLQRQVSRKYDMLKSETYFKKGEKLTKTQNIIKLENKIKLVHKRISDIRLNYIHQTTNTIVKTKPCRVVVEDLNVRGLMKNKHLSKAISEQCLNKFITILEYKCKWNGIEFVKADRFFPSSKMCSCCGTIKKDLKLKDRTYICPKCNLVIDRDKNASINLANYQLA

SEQ ID NO: 48449 - protein, 370 aa, unknown
  TnpB Polypeptide
MMKIFREMVNHCIKIGLENNVTTLKKLSLLSYNQLKEYDIPSYYKLNAISQAGGRLAQMKRSIKKGKKVRSPFVNKPYLVSCYGFKINGMLLSIPVGNRKYINIVLNRHTVSELSKQGIEPRSFVITPNSLSISVRKEIEEIKCSSVIGIDRNLRNVTIATPSETIMYKANKLLSIKENTMHVIASFRRNDRRVKNKFYSQKKNRRIRRVQQFLHKISKDIVQRAVQSKSMIILEDIKGIRKLYRKGNGQGNKYRRKLNSWSFYELQRQVQYKASWEGIPVRFVDPKRTSQLCPICGERLQEDRFQHRKLWCNNCGKSMDRDVVASMNIAHKGWSRFCHPGGLSDEAMKRNVENFQPLILGVDGSKLQHG

SEQ ID NO: 48450 - protein, 450 aa, unknown
  TnpB Polypeptide
MNKALKIRIFPTTQQEQLLLQTFGCCRLVFNEHLQERNEFYIDNIIPLKSKGASQKEINETYKLLKYSDLKQKYSFLKDVEACVLQQATRDCDVAFQNFFKSNKGQIKGERRGFPKFKSRKDNNQSYRTVQPSKKALNLATMTLKLPKIGEVKFANKCEHKWFRENKQKEIKSITVSKSASNRYYASILYEIPDKKVQLKDEKQAIGLDFSPAELYVDSNGESGLVYGYRPQKIAAKKKLTKLQRKFAKKQMVKKVCEDGITRKVSSNNREKARIKLARCEEQIANRRRDFIEKETLRLVRAYDKVVVEDLNLKGISKFLRNAHNMNDTSWATFVSRLQQKGQDYGCQIVKADRWFPSSQLCHVCHYQKKDLKLSDRRWTCPKCGTNHVRDVNAAINLKHYVPKELRDFRSAEAVESLASQALFNSGTSLEQPKKQKRYAVRRTKKVLGL

SEQ ID NO: 48451 - protein, 472 aa, unknown
  TnpB Polypeptide
MSYLDIFRPIIKFRYTNNYHQKKDCTYNYQKLLLALFHKNCSRRPPNLLSGGIKSSKRFKYLNIFCFLMAELVKNLELSLLEPTKIKQEQLDKLYFEYLACAKETFNFWQSNKGITQNILHQSTYKQFRLKYKLPAQLIIRARGIVWNRRKLCDKIKRLPLQFDLRCFKYGKTERGTSFFAFSGIKKGKMVAFPLAKNRLFQRFESHISDGWTFASCQLVKRDKWILQVCVRKEFICKENGNTMGIDINANCLALTILNKDRKVLRQLYLGQDIQHKRRKLEIRKAKLRGIYDKTFSNRALKSLKRIRKAEFNFIRTRYFQISNQIVKLANQFNVSHIAIEDIKDLKVGRKLGNSKGRKSNKIINKIPYFKFRQSLTIIATQQQINVIAVNPYHTSKLCSRCGALNKISSNYRTYRCKSCGLVINRDRNASVNICKLLLERETNSAKISSSQHSSSPLAVNRELLSCDFVIK

SEQ ID NO: 48452 - protein, 416 aa, unknown
  TnpB Polypeptide
MKKALRQNLRGLDKKEYKILRSLCHLSKNLYNETLYETKQHFSKNGEYLNYYNAWKKLKHSKNYELLPSQVAQQTMKNVDKAFQVFFKLIEKKREGKYNGRINPPNYLDKDGFFILDFPNQMFQIKKGYLRIGVPKQFRKKFNYDKEEIKIPFTYNEVREKDIKRLQILPISNAEYFEYRIVYETETEPIKTKKGTWLAIDLGVSNLATCIDYSGHSFIIDGRKLKSRNRWYNKEKAKLQSIRNKQGEKGTTKKMTKLSKDRNNHIHDYLNKTVHKIIEYCEKHKIEKIIVGDGKGWKQEVNLGKQNNQTFMAIPFDKLKQKLKNKCEYHEIQFKLVDEAYTSKCSALDNEEVGKHKRYKGKRIKRGLFKTSNGTLINADVNGALNIARKEVGKLETLRGVESSGTVAVPQRIRVH

SEQ ID NO: 48453 - protein, 367 aa, unknown
  TnpB Polypeptide
VLKSYKFRLYPNKEQELLIQKTFGCVRFVYNQCLAYKIDKYKTEEVSLSKIDVNNYKNHTLKAEYEWLKEVDKFALDNAVINLDSAYQKFFREHKGFPKFKSKKNNRKSYKTNITCSNIEVDFDNRKIKLPKIKWVKARGIRRFEGKIKSATISQSASGKYYCSVLVEQEDCKLLDKTNCNVGIDLGIKDFAITSDGQKISNPKYLVKSEKKIVKLQRKLSRKSKGSNNHNKARIKLARAWDKVINQRTDFLQKLSTELIRKYDVICLEDLNVAGMVKNHCLAKSISDCSWGEFVGILQYKADWYGRTISKIDRFYPSSQTCSCCGCVNPETKDLSVREWTCPDCGATHDRDINAAKNILKQGLLAV

SEQ ID NO: 48454 - protein, 400 aa, Actinomadura sp.
MRMAYKCRAYPDSEQAALFGRTFGCVRLVWNKTLAERRRAWNSDGKNTTYKQTDAELTAWKKTSELAFLSEVSSVPLQQALRHQHAAFANFFAGRARYPRFKNRTGHQSAHYTRSAFRFKDGQLRMAKTTAPLQFVWSFDEGDLAGLNPTMVVISREPDGRWYVTFAVDTGAPEPLPPTGHAIGIDLGVKDFAVTSDGERIANPRHLERKAANLARYQRRMARKQPGSANRRKAKNKVARSHRKVRNARRDFLHRASTTLVRQADTIVIEDLAVAGMVKNRSLARAISDCGWGEFRRQLEYKAGRAGRVLIVVDRWYPSSKTCSACGHLLAELSLSTRAWSCPNCRARHDRDFNAAKNILAAGRAVAGADPGDVCGADVRRQGPSLPQSAAKQKHPRREP

SEQ ID NO: 48455 - protein, 386 aa, unknown
  TnpB Polypeptide
MRKLLKSFKTEINPTEEQKVRIRKTIGTCRFIYNFYLAHNKELHESGKKFMSSSQFRVWLNNEFLPSHPEYSWIKEAYSKSVTQAVNNGQTAFKRFFDHKSAFPKFKKKGRSDVKMYFVKNNPKDCRCERHRLNIPTLGWVRIKEKGYIPTTKDGWKIKSGTVSIKAGRYYVSVLVEIPDAKIANNSNDGIGIDLGLKDLAIVSNGKTYKNINKSARVKKLEKKLRREQRCLSRKYENLKKGESTQKNIQKQKLKVQRLHHKIDNIRTDYINKSIAEIVKTKPSYITIENLNVSGMMKNRHLSKAVASQKFYEFRTKLKAKCDENGIELRVVDRWYPSSKICHCCGAIKKDLKLSDRIYRCDCGYVEDRDFNAALNLRDALTYEVA

SEQ ID NO: 48456 - protein, 406 aa, Anabaena sp.
MLVFEFKVYGKSVQLTAIDDAIRTAQFVRNSCIRLWMDVQGTGKNDLQKYCAVLAANFPFANELNSMARQASAERAWSSIARFYDNCKKNIPGLKGYPQFQKDCRSVEYKTSGWQLADDRKSITFTDKKGIGRLKIKGTRDLHFYQINQIKRVRLVKRADGYYCQFCIDVNRQENIEPTGNTIGLDVGLKEYYTDSNGVIVENPKFLREGEKVLKRSQRRVSRKVKGSKNRGKARQILGKRHLKISRKRKDHAVKLARCVVQSNDLISYEDLRIKNLVKNHCLAKSINDASWYQFRVWLEYFGKVFKRVTVAVNPQYTSQECSSCGEIVKKTLSTRTHACKCGCVMDRDENAARNILSRGLGTVGHTGTFALDASNALGDKASTCAGEILYEQVISSIKESQCLYI

SEQ ID NO: 48457 - protein, 402 aa, Escherichia sp.
VKRLQAFKFQLRPGDQQECEMRRFAGACRFVFNRALALQNENHEAGNKYIPYGKMASWLVEWKNATETQWLKDSPSQPLQQSLKDLERAYKNFFRKRAAFPRFKKRGQNDAFRYPQGVKLDQENSRIFLPKLGWMRYRNSRQVTGVVKNVTVSQSCGKWYISIQTESEVSTPAHPSASMVGLDAGVAKLATLSDGTVFEPVNSFQKNQKTLARLQRQLSRKVKFSNNWQKQKRKIQRLHSCIANIRRDYLHKVTTAVSKNHAMIVIEDLKVSNMSKSAAGTVSQPGRNVRAKSGLNRSILDQGWYEMRRQLEYKQLWRGGQVLAVPPAYTSQRCACCGHTAKENRLSQSQFRCQVCGYTANADVNGARNILAAGHAVLACGEMVQSGRSLKQEPTEMIQATA

SEQ ID NO: 48458 - protein, 415 aa, unknown
  TnpB Polypeptide
MDVRRTAVVKLDLSDEQRDALHRTAKQYLYCANRAADYCWSDTSYTECRTNKRQVRDALYSELREETDLQAQLVQAAIKRAVEAVKACVERWKKGQRVSCPTFTAETIDYDARSATFYRNKVSLATVEGRVEPSFVLPADSPTPYERYVLSGDYEFRESTVRYDAVDDEFYIQLSMRRIDGDAEVSEDSGHPDQTVLGIDLGVNSLAVSSTGRFWQGDDYDHWCREFEKRRSEMQQRGTQAAHNALLRLGKREEAWRKQYIHTVANEIVAEAVENDCDVIVFEDLTDIRERLPQAKWHHVWAFRRLYEYVSYKAPEQGVSVEEVEPNYTSQRCSRTDCGFTHEDNRHGAQFCCQKCGYEVNADYNGAKNIGLRYARKQTHRLRSSPTSGSGDAEVDLRVNGGTLNGESHRPIAGD

SEQ ID NO: 48459 - protein, 409 aa, unknown
  TnpB Polypeptide
VDGEEYQMKIQRAYKTELDPNNVQRTALLKHAGCARFAYNWGLNRVKEEISKPNAMQLHRELNAVKEAEFPWMYEVSKCAMQEALRDLQKGFQNFFRGCKEKLKIGFPKFKSKSKGIGGFRLTGTINVEDKRIQLPRLGWLRLKEHGYIPTDKHILSATVSEQAGRWFVSVLVNEEIVRQETTGEILGIDLGIKTMATCSDGTKYENPKALAQYEKKLKRLQRHMMKHQDKGSNRRKKTQRVIAKIWMKIANIRKDAVQKATSEIVKTKRPALIMLENLNVKGMVKNHCLAKSVHDATMRQFRTTIKYKQTWAGWETGYADRWYASSKTCSDCGAVKEDLTLGDRIFVCPNAACGLVKDRDWNAAISIGKYTPSSGGINGRGDAKVHAARQVGVDETTIRETAICGSFI

SEQ ID NO: 48460 - protein, 313 aa, unknown
  TnpB Polypeptide
MRRPQAGVHQFLRAPGPLPPLQEPEEGHGRFRIPQRVILSGGSVHIPKIGAVKVRQSQQVEGVTKSATFKRDACGHWFVSLVAETETPDIPLPAPAPERTVGVDLGLKDAVVTSDDERAPAPRFYRAAQRKLRRAQRALSRRQKGSKNRAKARQRVARVHQAIAAKRNDFCHKLTTSLVRDHDAVCIEDLNVRGLARTKLATSILDASLGTIRRQLVYKGAWNYVHVVAVDRFYPSSRLCYDCGYKHDGLTLSDRTWACPSCGVLVDRDLNAARNIKRKGLRILHVADGLSETKNVCRQDVRPPMAAALAIPA

SEQ ID NO: 48461 - protein, 444 aa, unknown
  TnpB Polypeptide
MSIIRSDRLKIHADSTAQRDALDSTLALYRRFVRDLMTVAFTHWPLIGPVDGKRVVPVMEQLIHPTGKRPNVRYRYFQNRYYKFPSYLRRVAINDAVGQVRSFMSRYGGWLDGERRHSHARPPTLTASTKTFPSLYGGQCIKLNTDATQAFIKVFHRNDWIWMSFRLSGKLRYRGKGSAKSPMLTFSGKDWGLSLPEQFEPEKPAKIPNRVLAVDVGINTAATWAVVDDQGTVYARGFLKRTDKDREHRLMQRIRSKARKHTRHGTRIPRGFCRRDHLRLKRLADNEAHQISRKLLDLAHRHECQAVVAENLKGWRPKAGSKRTPMKARFHRWFHRMLVNRIQSRAQVSGLRSALVYARGTSSQAFDGSGTVKRDTSNYSMCTFTTGKHYHADLNAAYNIAARGLVYFQGGRRESAAGANQQKSGRTLRTPVTLSSLWSTPKAA

SEQ ID NO: 48462 - protein, 881 aa, Acidobacteria sp.
MHMQGKHAGSTVPKVLAFVHRPDHHASMERRQAFRFELMPKGEQPRQMSRSAGCARYVYNQALALKKERYEKQEKLTRFQLDKMLVEWKQETPWPSEAPAHALQQALLDLDRAYTKFFRKRAQFPKFHKKGVRDSFRESDPKCIKLDQVNRRIQLPKLGWVRYRKSREVLGEIPSVTVSLSAGQWFVSISTRREVEPPLHPSTSSVGLDWGVARFYTLSDGEYEDQLQPLKRFLPKLAKLERRLAGKKKWSSNWKKAKAKITKLHSKIAHIRKDFVHKASHDISKNHAVVFVEDLAVKNMSASARGTKAKPGKRVGQKSGFNRSILDASPFELRRQLAYKTQWKGGLLVPVPPQNTSRKCPRCGHTAAENRKTQTKFECFECGFSANADWVGAINIKEAGLASLACSSSSHARNASCQEPPRAWYARAYRACRNPLRSRRGGCQQSGIFGARARRAHTQNGRGNRGPGEYSMRDIAIVGGGQSGLQLALGLLQNNYKVTVVSNRTPEQIFNGRVTSSQFMFHDSLQNERDLGINSWEKKCPITEGIAFTIPGPNKTRALFWEAKLDHYGQSIDQRVKFAGWMKEFAKRGGDLVIKDAAPQDVDQVSKSHDMVIVAAGKGEINRMFERDAEKSPYDQPMRALALTYVKNMVPRKPFTAVSFNLIPGVGEYFVFPALTTTGPCEIMVFEGVPGGPMDCWNDVKTPEQHLAKSKWILETFMPLEADRCHKVELTDDNGILVGRFPPTVRKPICKLPSGRLAFGMADVVVTNDPITGQGSNTASKAAAIYLEQIVKRGNKAFDAQWMQQTFDIFWDYARWVVEWTNSLLIPPAPQILQLMGAATQVPSLAGKIANGFNNPPDYSPWWFDPAEADKLIKHVSAAAV

SEQ ID NO: 48463 - protein, 423 aa, Halogeometricum sp.
VEYRRTAVIKLDTPKGANPILHETVEQFKHCANTASEWCWHGRRQIPVESGCQPETRGVSSDDDGYHVTSKAKAEQALYDQLRNETDPTANLVQKGIRRAVEAVKSGVERLKRGERTSRPYFSADSTVYDKRSATFHRDHVSLSTVDGRIECDYILPDDSEKPPTKYVSDEDFEFRMAHLQYRDGDWYLHASMRKVEESDDPESDSKHRTVLGVDLGVNNLAVASTGRFWSADEFNHWRREYEKRRGALQQCGSRHAHENIESVGRKETGRFEIYLHSVANELIEEAVEHDCSHIVFEDLTHIRENIPKATWQHVWAFRRLYEYVEYKAEEYGVEAVQVDPRNTSKRCSTCGFTHSDNRSGEAFCCQKCGYENHADYNASKNIGLQYLRRRQNADDGGASVDVRLNRGTLNVNGKYSSTALGS

SEQ ID NO: 48464 - protein, 381 aa, unknown
  TnpB Polypeptide
MTKRAYKYRFYPTPEQEQLLARTFGCVRFVYNSALRYRTDAFSERKEKVGYTAANAHLSKMKKAEETAFLCEVSSVPLQQCLRHQQTAFNNFFEGRAKYPVFKSKRDRQSAEFTRSAFKYLEGQLFMAKSKVPLAIRWSRVLPSEPSTLTVSKDAAGRYFVSCLCEFTAAPLAITPRMVGIDLGLKDLFVTSEGHRTDNPRHTAKYAIQLARAQRVLSKKKLGSRNRVKARKRVAGIHAKISDCRMDSLHKLSRRLINDNQVICVESLKVKNMVRNRRLAKSISDAGWGEFVRQLEYKSEWAGRQVARIDQWYPSSRRCSGCGHDVGHLPLSIRAWDCPSCEVRHDRDINAAINIKAAGLAVLALGESVSGMGHVPVSCSR

SEQ ID NO: 48465 - protein, 353 aa, unknown
  TnpB Polypeptide
MKATKTLRVRVRDKHVPLLKQMARQVNFVWNYLNELSQRSIKERRIFLSEYDFHPYTKGAGKTLGLHSQTLQVIAGEYVTRRKQFKKTKLNWRKSGGSRRSLGWIPINTAAACWKAGQVYHNGHFFKVWDSYGLAGYRFRSANFSEDARGRWYFNVVVDAGAQASNGQDAIGIDLGLKTVATCSDASVLNNARFYRDLEPALAIAQRAGNKARTRAIHAKIANRRKGALHKFSRALVERCGLIVVGDVSSQKLTKTNMAKSVLDAGWGQLKAMLAYKCDHAGIVFKEIGEAYTTQTCSCCGALPDSRPRGIAGLGIREWTCCDCGAVHDRDVNAARNILAVGLDRLAGEKVAA

SEQ ID NO: 48466 - protein, 402 aa, unknown
  TnpB Polypeptide
MERRQAFQFELLPNGEQQRQMSRSAGCARYVYNKALALKKERYLKKEKLTRFQLDKMLVEWKRETPWLSEAPSHALQQAILDLDRAYTNFFKRRAKFPKFHKKGIGDAFRESDPQCIKLDQVNSRMQLPKIGWVRYRNSREVLGEIRSVTVSLSVGKWFVSISTRREVEPPWHPSTSSVGLDWGVARFYTLSNGEYRDQLQPLKEFLPKLAKLQRRLARKKKFSSNWKRAKAKITKLHRKIARIRKDFVHKSSNNISKNHAVVFVEDLQVKNMSRSAKGGRAKPGTKVRQKSGLNRSILDASPFELRRQLEYKTQWNGGLLVPVSPRNTSRKCPACQHTSAESRKTQTKFVCVECGFSANADWVGAVNIKEAGLASLACSSSSHAANASCQEPTEGIVCASV

SEQ ID NO: 48467 - protein, 420 aa, Acidilobales sp.
MKRTSIIELVVDKNSEEKLKLLCSLSSKLWNEVNYARRRMFFEKKGVDLKTTYKKYYEKYKILIGSATTQQILNKNDEAWKSFFKLLKLKKESRLPPFIMKINPPGYKKKNNKRSLWTVLRKDQYKIEGNRLVLKGLGAIGKIEVRYKGLIHLKGEQGRLEIHYDPDRKKWHAHISFEILEKAVRGVWTNVPKKPRGDLVAGIDIGINNLMAIYVENSLTKLVNGRPLKAISHYWRSRIAEYQSMLNKYGLKTSRRLRSIYSKWRRQIKSYVDSRVRQAIERLYDVGVSIIKIGYPKYITQENGDFNNVHVWTYGYLLKRIHEVAEEYGIAVAYVNEAYSSSKCPIHKEKCGKRVKRGLFKCTRQNKIFNADLVGAFNILITPSPERDRGNRPKTRPGIEPSRRGDVIPNLPALSGTFAL

SEQ ID NO: 48468 - protein, 375 aa, Lachnospiraceae sp.
MANKAYVYAIYPNKEQAELCQKTFGCCRFVYNQMLSVQQERYKNGEKHLSKLAANNYCTQHLKKDFLFLKEVDKFALTNAIFHLADGFDRFFKKQGGYPKYKNKHKAKKTYTTNFTNNNIEICDDYVKLPKLGKVKAKIHRKPNKAWKLKSATITQNRDNTYQVSILFEYETEELYVPVTSKSTLGLDYKSDGLYVDSNGNDCDMPHYLRLSQDKLAKSQRKMRHKTIGSNNYRKQQKKIAKIHRHIANQRKDFLHKKSTEIANQYTCICIENLNMRSMANKGFGNGKATLDNGYGMFVSFLGYKLKDRGGYLIKVDKWFPSSQLCHWCGYRNENLKDLKIRKWDCPHCGHKGIDRDWNAAINIKAEGLRILESA

SEQ ID NO: 48469 - protein, 484 aa, Streptomyces sp.
VKKFQPQSGFVVQAFRFALDPNASQERALRSHCGAARAAYNWAVGWVTASWWQRKAEETYGVAEAEQTQWRPWSLPSLRKAFNAAKHTDPRFAGWWEENSKEAYSTGLANASAAFDNYAKSKNGKRKGARMGPPRFKSKRKARMSCRFTTGTIRVDADGRHVTLPRLGTLRTHEPTDKLLTRVQAGTARILSATVRHERGRWFASFQVEVKRDHERVTRPDTAVGIDLGVKTLAVMADSTGEIRTVPNPCHYDQALKQMRRASRTVSRRQGPDRRTGRKPSKRWEKANAARNKVHHRAANLRADALHKLTTAVTAEYGTVVVEDLNVAGMLKNRRLARRIADAGFGEIRRQLDYKTRQRHATRMIVADRWYPSSKTCSGCGAVKAKLPLHIRTYECDACGLVIDRDDNAALNLAALAAACTTGTGVAGDQDTPVVSKPRGADRKTRATRTRRKTSAGRAGGATLPHHRQTETRDRPQAKALTLW

SEQ ID NO: 48470 - protein, 446 aa, unknown
  TnpB Polypeptide
MRVVKRSARTKDGETWRVAIVPIHLSGADYRRAHEACHKAASLWNFFLASIHEYWKENETDPTEKEMRHFLYEQRPDLRDGLHAHTVQLILGDLMDAVSTYRSNRDSGDKNARAPHREKNYRPLEFTAGFGWRVTPDGRRIALSFGKGHKRIALPLPEIADPKTGEILPSERWGSMQLCWDRNARKWSLHISVPTPKPPQGNPDIIAAIDEGIINPMTVAIETEDSYDVLVVNGRHARAVKHYRNTRIATLQEKLSRCVKGSKRWRKLNAKRKRIEAMTDSALHNANHQTTRKVADFMQAHDAGRIVTGDVRGIEKSTRKDEAKRVMNTKNQRRRLSQWSRGRQETLLEHKTGMTIEHIDESWSSKTCPACQTRNHPNGRGYHCHNCGFTCNRDAVGAINILIRAENGSYQPMDTNKTVHVKYLRATPIFQPKTGVEHGVIPGTGA

SEQ ID NO: 48471 - protein, 353 aa, unknown
  TnpB Polypeptide
LEENQGIRLPARSVLGPVATVAATFAGGVQELLRQDGRLSPVQIQEERRSRHLCRIRVHLGLGQTGIDFGEDAGASARPLVAHTAEESPAVHRHRVPGPVRTLACEHPRRRGSETSTRLPKQGRRRFGHRTLRHPQHREKIPNPRHLNRYQKKLEQAQQTLSRKQKGSNNHRKARLKVAKAYAKVKDCRSDFLHKLSTRLIRENQAVVIEDLAVENLTRRCAPKPDPEHPAVTFQRASGENRSQQEHTRHGLETVPHDARIQGPMVRAPAYGHRPLVPVQPDLLHLRIQQRQETIEHPPMGLSQMRNPPRPGHQRRQKHPIRRTGGTRLRGPSNRRRDTSVGGEQVSTGRSLP

SEQ ID NO: 48472 - protein, 407 aa, Streptomyces sp.
VKRGFKFRFYPTPEQAAELARTFGCVRKVFNMALDARSRAWTLEHRRVSYVETSAMLTEWKRTEELDFLAQVSSVPLQQSLRHLQTAYTAFFDKRARHPRFKSKKRSRDSAEYTRSAFRFHNGELTLAKMREPLAVVWSRPLPEDTEPSTVTVSRDRAGRWFVSLLVESAVSPGPATDATVGLDAGLTSLLTLSTGEKITNPKFERKDRARLGQAQRELSRKAQNSRNREKARLKVTRIHARITDRRRDFLHKLTTRLVRENQTIVIEDLTVRSLPGNRTLARAISDASWTELRSLLEYKCAWYGRELIAIDRFFPSSRTCSTCGLIHDELPLSVRRWTCAGCGTQHDRDHNAAKTILAAGLAVSACGAGVRPQRSSSGRAVGDEAGSVVVRTTAGPSPRGEAEVNR

SEQ ID NO: 48473 - protein, 235 aa, unknown
  TnpB Polypeptide
MREPLRIVWSRPLPEGAQPSTVTVSRDAAGRWFVSILVEEKIRPLPPVESSVGVDAGISALVTLSTGEKITNPGHERRDRRKLAKAQRALARKQKGSKNREKARLKVARIYARITDRRRDFLHKLTTRLVRENQTVVIEDLTVRNMLRNHSLARAISDASWREFRSMLEYKCAWYGRELLVVDRWFPSSKLCSACGTLQEKMPLNVRTWQCACGAAHDRDVNAARNILAAGLAER

SEQ ID NO: 48474 - protein, 454 aa, unknown
  TnpB Polypeptide
MVEANRTVVIPLNVPEESKADFHHTILPYAYCQQETVDHCWPANPKQPSDLKTSKQDAENALYSQLRNKTDEQLTANLVQKAIKDATSAISSCKTSWENGDRISKPDFYHRDMPGYTMTYDKRAATYNRYEASFSTVNGRVTCRYELPRELEGTPYGDYVLDRRWSFGTSKLVFDGQRFWLHAVMKRQFGDDPVYTPETDTGGSDTHNEDTHRVLGVDLNVDGATAVTSTGQFYGNADALNAYRDGQERLRGELQQTGTRSAHLRFQERRGTEWRYYDQYAHYIANAIKQEALRVRATHVAFEELTRIRKRISNLPKFQQWLFKKVRKYTRYKLERYGVTVDTVKPNYTSQRCSHTDCDCVAEDNRDGKHFECVECGYTVNSDYNAAKNIGFRYLSAELASPASHKRSSGQATRQLALMSGTLTPSGNFAATDWVSTDKPHPQQASGGSSARAQ

SEQ ID NO: 48475 - protein, 404 aa, unknown
  TnpB Polypeptide
MYLVEKHKIKSSNKYFNRLCELAKISNNLYNQSYYWLRYSLENFGEWYNYYDLDKFMKQYVRVITPEYGNYGQLPAKVAQQTLKTVTQNMKSYVKSIKDWKKNRGKYRGMPKLPRFRKSNDMYILIFTNQSARLKSDNVIYFPKQLDGFTIELREDSIEKIQQVRIIPKGLYFIVEIVYEVPNHPLQETNERVAGIDLGLSNLATLVFDDFSRPVLYNGKPLKSVNHYFNDKVSEYKSILDKTQKDQGTSRKLKQLYNKRNDIMDNCLHQISRHIVNLLVEKGITKLIVGKNAGQKQKNKMKNFVQVPVFRLLDYLRYKCERVGIEFIVIDESYTSGTSYMDGEEPINEQYNLKRRISRGVFITNNGKRVNADVNSAYQILKKAEINVPYQGQTTIFNPIKITI

SEQ ID NO: 48476 - protein, 347 aa, Tissierella sp.
MCILSKNLYNVGLYNIRQYYFNNNKHLDYICKENENYKLLNSNISQQILKEVDSTMKSFFGLIKLAKLGQYNYKDIRLSKYLEKEGFFSIIIGQIRIKLNGILDIPMSPVFKRQYGKVSIKVPDNLLNKNIKEIRIIPKYRARYFEAQYCYEISESKEELDKNKALAIDLGLDNLCTCSTNQGDSFIIDGKRLKSINQWANKQNSKLQSIKDKISIKGTTKKQAILWRKRNNQVNDYINKTCSYIIKYCIDNDIGNIVIGYNKNIQKGINIGKKNNQNFVNLPIGDIANKLEYLSKRNNINYIKQEESYTSKSDFLANDDLPKLNQDNPKKHTSSGKRITRGQYKSS

SEQ ID NO: 48477 - protein, 358 aa, Thermoprotei sp.
LVNGADVVRYVTVTGRLVPLTPEDYMKLARLARDFRRAVVYATRMIAKRLDRSEVLRELRGMLNKAYGDSAYKVAKALVEGAKFNGGDPRCIEVKRLFIVSEGEASRLGNRNVRLESTDTVKIKYPYDGSWLTFRACFGEEYLPLVRELVELARARKASYGGRIIFRSGRVYLHLSIPVELYLKHFRRGEARGNLVAGFDLNSDRINMVIVDRYGRIRDIKTAWFPEVTSHGFPRNKAKARRLEALAKLLEYAYYHSVGTVVFENLLAIKHRRYTKSPSANRKITRFAKRELLQHAIISAMKYGFKVLLTDPRGTTRSRGHDEIMRRHGLDRHAASAYLIALRGTEGYRKYNLRFQPT

SEQ ID NO: 48478 - protein, 427 aa, unknown
  TnpB Polypeptide
MIKTIKVPISFNPEVLKDQAFRYAQVFNHIVSFGLENGISNAVELHHKTYYTFANREGFLPSQLIISARTKAAESIRGWLTAKRKREKQILKQQEKIVKGKHIRKLLQSISRPVSKGILAVRYDARSFNIDFKTKIISFSSINGRQRISFNANPYYAQYYSGKVCSADLCWSKKNKQFFFHVVLEFSDPILSEPSKVLGVDLGLNNLAVSSDGQFYMKHSVRGHISKLRGLKSRLQSKGTPSATRHLRAVSQKEHRFRRDVNHCMTKQIVRSAMVGGYDTIAIENLKDIRQQSREFQKSFRARLNSWPFDQFRQFLTYKALSSGIGLVAVDSRYTSQRCSRCGHVYKPQRNGNEFHCVSCGYQNHADLNAAFNISKNCLPEVQIKETPGPEWQACSDRAKVQLAYCDGGATAMPHGRPPQAHDFSRG

SEQ ID NO: 48479 - protein, 371 aa, unknown
  TnpB Polypeptide
MRKTFKYRLYPTRLQITKMNNILELTRWVYNETLALRKNAWESEKKSISLYDTAGHLPEWKFKKPELKTVHSQIFQNAQIRVDLAFKAFWKRCKQGQKPGFPRFKGKGWYDSFTYPQSGFRLHQDGVYLSKIDRVKIVLHRPIEGKIKTCTVKRTPTGKWFVYFSCIIETPEPLPKTGKIVGIDLGLITYVQCSDGSKIDKPRFFNLEQESLAQAKRRENITFKAKHKRVLAMIHERIKNKREDFCHKTSKKLVDKYDFIAHEDLNVKNLLEKKENSKNISDAAWSTLIQYTTAKAESAGRVVIAVDARGTSQRCSQCGTDVPKTIEIRVHRCPHCGFKTGRDLNSALEILRLGMESVERPSRCRKAIALV

SEQ ID NO: 48480 - protein, 557 aa, unknown
  TnpB Polypeptide
MARTKGVTVAVKVPILWNTMTHRRQQRLRQIVGRDTRAIRAFIGVIEHYEKTLLTGPNKNHISDTELDKLTITTARVDPRYSRRPVVPHDMKARFPRISSSELVECRQTAISMYESYLQVRSKRGVKAVPPTRAGPCRRLPRWIFSQRFKLVQNRTCVARWWLNLRDSLDSASRGHGYHDRLLIPLGVAPFHENQLKRGEVKALQLITNTNRQWWAAFAVRVHLPDKPRNDLPPAVLGIDLGIERAACTVLATPTKVRETRYFGQSHKAETITKYDYLVAEVQKEMDTRRNNGQDWDDLARKLREMRSKREHVAIEYDKVLVRQLIDHIVELSRNYTLYVALGRLKGIRNSAQRGNFKGRKFRGMVHRWAFARIGASLQHGLAQLGWPVNGTNARFRVVPENWTSIMCWKCGSKGKRPKQNYFVCPACGHRTNADRNGAINIAGRLIMLTESVHSVRGLGKWADSVSAGKRSRPKARGRALPGKSLLPSSSVVSHSGESAAVRYVQMDLRVLGDEDGMSDHDPAAVRTVETLSAAGDDTPADRQEKEVRSVGGTKSQ

SEQ ID NO: 48481 - protein, 189 aa, unknown
  TnpB Polypeptide
IRTRISSKDGRRRTARTGHLLHNATKKIVALAVQRRTAIVLENIEGIRSLYQKGNGQGSKYRGRMNGWSFGEAQRQIEFKARWAGLPVVCLSRRETRGSSLACPRCGERHQSDKRLKRKLWCGNCRIVMDRDQVAAVNLARRGRVRFARSRPPILLEAQGGAGEAMKGNPTPTVIPGVDAPKLTQQTKS

SEQ ID NO: 48482 - protein, 366 aa, unknown
  TnpB Polypeptide
MVAKFRNKNRMNRQPENTVLLTEKVRIPHDLCPFVAKFLVLCHTEAQNMLLDREKSSTKDYPGLPSVVAKGLINKYQRNHKCREILHISVPISGDCGRQVKLENNCRIRVPALFGKQVIEIQPRHEIIGDIRSVEIFKKKRVLYLSYTYCVRKADLAVEGLVGVDRNYKGNVAVLANLKTGEVRKFGPSAGDLAKNFRDRRAKLQRKLVARNSKKARAKNALKRLSRKQQNRVRDINHKVSRGIVDYATEHCCAIVLEDLGTVRKSKIRRSVQKAQWSYFQLETFIKYKAALRGVPVVYVNPRNTSRTCSKCGEINLPVGKKYKCTECGHFDHRDANAAFNIAKAVLFRWQAEDLRASSVGHADGP

SEQ ID NO: 48483 - protein, 370 aa, Okeania sp.
MKSIRTKLKVNNKQKTILAKHAGIARHAYNWGLETCISEYKETKKRPSAITLHKRLVAEVKSQNPWYYEVSKCAPQQALRDLERAFKNFLTIPKRGFPKFKKKGKKDSFYLEGSIKIIQGNYIKLPRIGIVKTYEILPSCRVKNVRISKRAGDWYISFKYECQPKPTPKSGCDPASPTGASGQTPRRRQAQGNADQERECAPSKRAIIGVDVGINTLATCSDGTIFANVKAYRQAKKRLTRYQRRVNKKERGSKNRAKAVKKLAKAHKKVADIRADALHKLTTWLAKNHSNIVIEDLNVSGMLKNHKLASAIADCGFYEFKRQLSYKCDWYGSKLVIADRFYPSSQLCSHCGQKQKMPLHKRTYVSAALR

SEQ ID NO: 48484 - protein, 371 aa, Lactobacillus sp.
MKQAIDALCDYRRYCWNEGLALWNDMYEESKLMDNKKLRPNEYKVRNELVANKQDWQYRLSARCLQLAISDLGKAWKNFFDKAQPDWSMPKFKSKKTPRQGFKTDRAKIVNGKLRLDKPRGVSGWTDIRISGAKPLDGELKVISIYRENGKYWASLPFETSVDTKSKTGQSTAIDVNVSHFNYPDGQINVLPVKLQKLYKRIKHYQRQLARKRITNGKMATQSNNYMKTRAKLQRDYRKVVNIQSDLLQKFTTKLVTDYDQIVIEDLAVKKMMMDHVASKGMQRSLFSKFRQILTYKCDWYGKKLILANRCYPSTQRCSQCGHLKTGVDKITLAGNQKHRTKHNEYICYECGLVMDRDENAVMNLLRLAAA

SEQ ID NO: 48485 - protein, 318 aa, unknown
  TnpB Polypeptide
MLLSHRTSVKIRPEYSNIIGHMCYAASKLWNICNYERHHYKELGLEKYPDWYYQKKTHKGNLWYKQLPSQTAQETCKQLDKAWKSFYVLKKTGGIKDPNPPRFKQGNIPVTYMQMGIRHEKGSDQLRLSLPKDLKSYMEETYGIHDKFLYLENKIFRNMDHIKQLRIYPPENGKCDLIVIYEMEEPEQLSQNGHYLSIDPGLHNLMTCYDSGNGRAFILGRKYLSLERYFHKEIARVQSVWYAQQSERGIKYPKTSEHIQRLYRKKQNAVKDYLHKVTRWIAEYCKKEDIRCMETVCLAADVFEEFFLTHGLEKRISK

SEQ ID NO: 48486 - protein, 390 aa, unknown
  TnpB Polypeptide
MEKRYKFRIYPSKEQERVIHVNFNCSRFIYNHYLAKQIETYKEKGTYTGLFDVSKTLPQLKRTSGYEWLSEAVAEALSYALCDLDNAFKMFFKRVKQGDVAPGFPKFKHKKSSFQSYRCKNKIPKAPKMAHAISVGENKIRLPKLGWVDCRVSKQIEGRILSATVLQAPSGKYFVSLYCTEVECTSLPQTNSSVGLHLGIENLAVSSDGERFENHRYLERSQEKLNRLQKRLARKSSGSSNYEKARKKLARGYEKIINQKTDNLHKLTTGLVRNNDTICVRDEQVAEKQRNRIYSKQLADAGWGEFVRMLSYKSQWYGKELVKIPKTSPSAQLCSKCGYKHKGLKPYHYEWDCPKCGEHHDRRVNAAANVLSEGLKIRPGRSEFMSAEEA

SEQ ID NO: 48487 - protein, 526 aa, Marivita sp.
MKRCDHLPICDTNPGKIRALREVLRAFRRAAPDMAADQWQRFYQTGRFNKMVSAEAEARSARLSRSKAAIGAARMQMLRYQVVGQLESFIENRANDFRDAVAKSSVDDATRHQLLTVNKMHAWFRSEPVFMGKSKTKPGILIEDDVRHLARSIMRAVLSHHRRPRFHRLNPWIDQRQATIGKAETAGHAPMWVGIRGMCPEIGKNGRPKKTQGTIQVPLQSYAWFENRGGEIAKTVQLIERGADRGRPGEIVIAVVSNMEKPFGESQMAYQPLCEELSLDFGLSAMFATPDGDLLGRSWFDQMKKHDDRIAGLARRLQKQGIRPNQSARYRARVAAFRGFLKTEIGRVLNRLIQMKRPAHVVIEKLDFRAPGLSKRLNRILARSGRKVIREKLQDLEERFGITFTEVNPAYSSQTCSGCGFVAKTNRRSQSKFSCHACGHEINADVNAARNLESGRSAFDRTARITKAESLRLTVERHLERITTGDRVISAKVLGSPYYRTAAAALDTLLARKLRPPDVVADVSAG

SEQ ID NO: 48488 - protein, 348 aa, unknown
  TnpB Polypeptide
VVSTTAGIKNALPYLNEEDVDSLAVDNAVRNYRTAWKNQKERHTGAPTFKKKSYEQSYQTNAHYYKNSLGHEVSNVRFEDTSHVILPKLGRVRIGGSPKLIRSLINRDADTRIGTITISRDSAGEYWASFQIASEKPFRNELKKTGSKVGIDLNLLELTNDSNGDSAANMRYYKNSADKLTKAQHKLSRMQEHAKKDGRPLRASRNYQKQRLKVAKIHRTVSRQREDYLHNLSKQKVESQDFIAAEDLKVRNLLKNHCLAGAITDAGWRKFLTMLQYKAELYGKTVILVPPRNTTQTCSVCGYTLKEDEKLTLSDREWICPSCGTHHNRDTNAAKNILERGLQIASQS

SEQ ID NO: 48489 - protein, 403 aa, unknown
  TnpB Polypeptide
MLLAHKIRLTPTKTQRTFFAQCVGGSRFAYNWALSEWQQQYAAGEQPHDVPLRQLLNGIKGEQFPWMRAVPKTIPQQAIKNLGTAFHRFFTKLGAYPKREKKHQHDSARLDNGPVKKGADAVQVKGKKIRIPKLGWVRMTEPVRFAGQMKSCTLSRTADDWFVSLMIDTAPPVPTKKAKGAVVGGDLGVKAMATLSTGETIEGPKAHKAKLARLKRLDRVMARRKKGSANRRKAAQQRAKCHQQVANIRADFIHKLTTDLSRTYETIGIEDLHVKGLVQNHHLARAISDMGFHEFRRQLTYKVAREGGTLVVAPRFYPSSKTCAACQYKLAELPLAVREWTCPSCEVSHDRDHNAALNLKCLAGSSPVSACGDLSAGHRPLVMVKLASVKQEANASIPRGIEG

SEQ ID NO: 48490 - protein, 327 aa, unknown
  TnpB Polypeptide
LKGKARKAKPRIKRRFAKCKITLMKVDYREKSIRVTMKPHEYLEVSWRGAWFEKRVEGWLVGEVTLKDDKIIIPFKSYKVIKVMDVIGWDSNELELTGYTPRTGFIHLDLRPLQSMKIVYERKKAIAQSKGKRGLYEKYVRRERNRVRDFTNKLASQLTRTFPNTLHVFKDLEKDDMIGKSRVGRTRRKRNARTPWKTIHRRIGGKALTARVPARNTTRTCSRCRFKVRDLREQEFKCPRCGFRMNRQKNAAINIRRRYLEGGGRKHRMRGFPHRDELEDSMKVELWAEVTQSGQRLMTWWGCEKPHMKPMKPRASRRPHIKQYKPP

SEQ ID NO: 48491 - protein, 603 aa, Nocardia sp.
VERPDQGRLRLHRGPDRQLRGPRRAHHHLRQGCPGRHRRPPGHHARGHHRAEQARGPPGRRSPRHGRGPARGHQEPRDLRGPGRHRAHRRAPGDGSGHHRARAGPLQAAGRAALGRAGVRRPVVLAAQARSGRLRDRDAAARLRRDPHGPARRQRRGQRPSLRRVALRLQPGHLRRGRHLRPVAGQGLRADPRPVLQGRGASGPQQQVATIDGVTHQRVTVSRMGDRVVKRAYKYRFYPTPEQAEQLAKTFGCVRYVYNRALAERSRAWTREQRRVSYAESDKMLTGWKRDPETEWLTEPSKGPLQATLRNLQRAFDQFWRKQTGYPKFKKKGKSKDSATYFSNCFTYRDGRITLAKQSEPLDIRWSRPLPEGAVPSQVTVSRDSAGRHHIAILVEETIHEHAPTDVTVGVDAGITSLYTFSTGEKVSNPRYEKLDRTRLAKAQRVLAKKQRGSNNRAKARLKVARIHAQISDRRRDHLHKLSTRVVRENQVITIEDLSVRNMVRNHNLARAISDASWSQFRSMLEYKADWYGRTVVAVDRFYPSSKTCSTCGRIADRLPLDIREWTCPCGAVHDRDVNAAKNIQAAGLAVLACGDGVRPSRS

SEQ ID NO: 48492 - protein, 385 aa, unknown
  TnpB Polypeptide
MLTYKYKLYKNRKDNAVLHAIIDSHAEVWNHYAALQRRYYRRYGGYITYNRMSSHCTKLKKLEKYSSWKLLPSQSIQNLLKRLDQGYQLFFKNQALRKKGGKRRVGIPKFKSMKKYKSFTLLYAGFKFHNNGRIDIKGITYKYHNKERVAEGKVKLVTIKRNKLGELFFFVVTDHIRLEDQDLTGNEAGFDFGLKTFLVGSDGRVIKRKEFLKLELRRLRQLSKIHSRTRKGKRDKDPSKRVAPSKNRERARLNLARLHEKITNKRDDRDKKLARKMAMYYDTIVLEDLNLDGMKKLWGRKISDLGFGLFIKHLESMCNIYGSDLIFISRWFPSTKTCNTCKTVNRLITLNDREWICPSCRTTHDRDSNASKNIYEEGMKLRSKD

SEQ ID NO: 48493 - protein, 338 aa, Vulcanisaeta sp.
MRGLTAQIVRVVPRGEYLLTLKAQGTLMEGSIEELREELYLTRRATQYIIDALWELDKLPTVNQLHQMFYNMLRSQGFRAHQAKQIYKYALAVVKSARENGGSKPILRKLSARLDKYDATVDLENMTVLARMRNRVFRIRLLHNKEYIGKFIGREWYEVIISIDEQGRIWVSIPFGWEYDPYETKRLISLDINLKKIVIYNGRNIRRVDTRFIEALHLKHLAEGVQKRHSYAWRRNGKWLDIIRTLHRRSRNIVIDWCRKFAKYIVLKAKKLGYAIVLEDLEKLWFKASQKSSNLSDKLSRFAYRKLQQAIITKAIEYNVPVAFVNPRNTSSTCKMWS

SEQ ID NO: 48494 - protein, 348 aa, Anaerolineae sp.
VFGIHRFVKRVKGRSSRILQQEFDWLASRLPTLWTNSYFVATVGGAPLAIRTFQYRLYPTKAQEKALQLQLEVSRHVYNMALEERRLAWELEEKSMGKREGYLLAKQYKKTFPQSKTVHSHVLQAAIEDLDRAFHAFFRRVKAGEEPGYPRFKSHKRWHRMGFKQYGSGFKVEGRRLKISGVGRIKVRWHRPHQGEIRTCRVVRKAGRWYVRNQHKDFFDKLVYELVHTYDVIAIEDLKIRNMVKNHPLSKSILDAGWGYFKKRLIDKAADAGRSIVLIDPAYTSKSCSNCGALFEGLTLAHRWVECECGLSLDRDHNAALNILKRAGRVREPERSGLPQTWLRSPRL

SEQ ID NO: 48495 - protein, 367 aa, Paenibacillus sp.
MLIKKAYKFRIYPSKEQEILIARTIGCSRFVFNHFLAKWNETYKETGKGLTYNSCSSELPHLKKEFPWLKEVDSIAIQSSVKNLADAYSRFFRKQNDAPRFKSKRNKVQSYTTKQTNGNIAMEGNKIKLPKLGLVKFAKSQEVEGRILNATVRSNSSGKYFVSILVETEVNPLPKTNKEVGIDVGLKDFAVLSNGEVFENPKFLRKLEKKLACEQRKLSRRKKGLSNWKKQRFKVARLHERIVNARTDYLQKISTHIVKNHDVIAIEDLQVSNMLKNHKLAKAISEVSWHQFRTMLEYKAKWFGRIIIAVGKTFASSQLCSCCGYQNKDVKNLNLREWECPSCNTHHQRDLNASQNILAEGKRLLSV

SEQ ID NO: 48496 - protein, 418 aa, unknown
  TnpB Polypeptide
MLLSKKTSIKVSREYANLIGHMCYAASKLWNVCNYERQHYKETGIEQYPDWYYQKKTHKEDLWYKQLPSQTAQEVCKLLDKAWKSFYALKRSGGIETPRPPRFKQESIPITYMQMGIVHERDTDRVRLSLPKTLKKYMEETYQIHENFLYLENKIFRGMDQIKQLRIYPPEKGNCKIIVVYEIPDQEELPQNGHELSIDLGLHNLMTCYDSGNGKTFILGRKYLALERYFHKEIARVQAQWYGQQSGKGVKHPVTSKHIRKLYKRKQDSVTDYLHKVTRYLAEYCREQGITCVVAGDIRNIRREKDLGHRTNQKFHSLPYNRIYIMLEYKLKRYGIRFIKQEESYTSQCSPLSPKVGKRYAEPSKRKERGLYRDGNRTYNADAVGAYNILRKYHSVSGVKRELSVTGLKTPEIIKVAV

SEQ ID NO: 48497 - protein, 368 aa, Thermoactinospora sp.
VAQIVKRAYKYRFYPIPEQAEELARTFGCVRFVYNRMLQERTRAYTLHGRRVSYVETSATLTAWKRTPELAFLSEVSSVPLQQALRHLQTAFANFFARRAKYPAFKSRKKSRASAEYTRSAFRWREGELTLAKMETPLAIVWSRPLPDGAEPSTVTVSRDAAGRWFVSILVEETIAPLPPSENAVGLDAGITTLATLSTGEKIVNPRHERRDRRRLAKAHRALARTEQGSANRAKAKLRVARVYARIADRRRDFLHKVTTRLARENQVIAVEDLTVRNMVKNRNLARAISDASWREFRSMLEYKAAWYGRDLVVVDRWFPSSKLCSACGALQRSLPLNVREWACACGATHDRDVNAAKNILAAGLAER

SEQ ID NO: 48498 - protein, 478 aa, Streptomyces sp.
MVGLAVELHRLALEVRADRPRDLLHPHQVIVREHVVPELCHEDHVRMHHEAQWRPVLISCISPTTQVRTVALMQLRYSFRLYPNHAQRGALARAFGCARVVFNDAVRAREDARAVGGPFPKAGELSTRLITQAKQTEARSWLGEVSAVVLQQSLRDAETAYKNFFASLKGERKGPKLGAPRFKSRKDARQSIRFTANARWSVTDSGRLSLPKIGPVKVKWSRILPTTPTSVTVIKDAAGRYFASFVIDTDPAADAARTPDSDQSVGIDLGLTHFAILDDGTKIDSPRFLRRAEKKLKKAQRELSRKQKGSKNREKARLKVARAHAQVADARREFHHQLSTKLIRENQAIGVEDLAVNALARTPLAKSVHDAGWSQFVAMLVYKADRYGRTLIKIGRFVPTSQTCSHCDHVEGPKPLHIREWTCPACGALLDRDINSARNVKKAAGLAESACGAPIRPESVLAQRNEAGSHGFPPKASA

SEQ ID NO: 48499 - protein, 383 aa, unknown
  TnpB Polypeptide
MIKTRSFKLKLSHHDFKLVQNHSIESAKCWNDIIKIAKDYYDINKKWISKFDIQPLIKGQYELHSETVQGLTDIFNANRQTIAQLRRNGDKKAKYPYKEKRFFMIPFKTHAIKQTETNLRLTLHSKCYLNILISNLPKIRTVQLVWNNGYHLFYTFDEPIIVTNKTKTCGIDLGEIHSIAMATEDGDSLIISNRLGRSIKRYRNKKLGSFSKAIHRCTKYSRKYRKLVNSKNKMKTKTKNQLRNLYHQTTRKAIDFAVSNNIGKIVCGNPKGVEKNTKKNKTNSSKNRQKLSQAEFGTLKQYLKYKAESKGIIFSLVNESYTSQTCPACSKRKKPTGRNYSCECGFKAHRDIVGAFNILRKKYQCELVDFVMSYRHPIKVSYY

SEQ ID NO: 48500 - protein, 394 aa, Okeania sp.
MIVYEFKVKGKPQQYQAIDEAIRTGQFVRNSCLRYWMDHRGLGRKELYRYNTELRSMYPFVQDLNSHACQASVERCWSAIARFFDNCKKHLPGKKGYPRFKKHSRSVEYKTSGWKLLDPKHIEFTDKKGIGRLKLIGTWDLGFYPVEKIKRVRLVRRSDGYYCQFCISVDVHVETLPTKRNVGLDVGLKEFYTDSDGNTEPNPRFYRKSEKRMKFYQRRVSRKHKGSANRQRAINKLSRIHLKISRQREEHAKRVARCVVHSNDVVAYEDLRIKNLVKNHCLAKSINDAGWYQFRKWLEYYGHKFGKVTVAVNPAYTSQNCSSCGTTVKKSLSTRTHVCRCGCKLDRDHNAAINILNSALSTMGHIGTWIDDPNASGDSGATEVGEILSQQPGS

SEQ ID NO: 48501 - protein, 356 aa, unknown
  TnpB Polypeptide
MLYRGEILELNPNRRQTTYFRKACGVARLAYNWGLEEWTRQYQAGGKPNHRVLDKQFNALKRERFPFVTEVTKCAAQIALQQLGAAFANFFRGTAKAPKFRKRGVQDRFSLANNVVKLRSDAVYISKLGWVRLKHAPRFAGRLLNAKVFTRGEHWFISLGWELPDLKPLVPTEKSVGVDLGIKHFATLSNGEKIANPRHLRRNLKRLKRLSRAYSRKQVKSSNQRKARTTLSRLHYRIACLRKDFLHKTTTALLKRFGVVAIEDLNVAGLLKNHKLAQAISDVGFYEFKSQLLYKAEQFGRVIKQVERFFASSKICSVCGYKQAEMPLKIRHWQCVCGAIHDRDINAARNILHHAI

SEQ ID NO: 48502 - protein, 300 aa, Streptomyces sp.
LAARHQVLADEIGHVSNRRTRLNDALAWSAARWTVDQAVAAGASVIYVEDLRSMEARGMGRTLNTRLSQQIRGRITDRMRHVAAEAGIAVVTVPARNTSRLCPRCLAPLRHRKAPDRPTTAGWKWALCPDRAGCGWQGDRDHGAWRRIAARGLTHQTRTVADRTSGAMAIRSVADSLETRAVVTPTTPTTSRKDRSKTGPTRPRTTRPAPRRRRAPSPTRPTGPAGKRPEGHAPTDRHRLPRAAHRHQNVNTTSTPTTGRHRPRGAALGAGFHLHAHASPPRWETIQPIPHLTDHTRSPS

SEQ ID NO: 48503 - protein, 395 aa, Brasilonema sp.
MSQPYYNEYPTSPTDQPTPGLAHFLGDKCVTSIKTKLKLTSSQKILMSKHAGISRFTYNWGLATWKALYESGYQPNHLTLKKFFNNEVKPVLTWIKEKGICQKITEFAFDNLGKAFKNFFQKRADYPKFKRKGRNESFTINAGGKPINLGGKRIKLPTIGWVSTYESLPHTTTTKLTISKSAGDWYISCSYEISPEITKKEHEYVGVDVGIKTLATLSTGVIFFNPKAFKKAQKTLTRLQRQLSRKVRGSHRYKKQKLRISKLHRRIANIRKDATHKATTFICKNHAVVALEDLNTSGMLKNHRLAGAVSDANFYEFRRQVEYKVIRYGGTVVFVDRFYPSSKTCSNCGEIREISLSERVYVCQKCQHTQDRDLNASKNLQKYARMVKPCLDVKG

SEQ ID NO: 48504 - protein, 657 aa, unknown
  TnpB Polypeptide
MAPDPGDGTYTVHCAVKRLIPDAAHVEVLQDAAVRVNRATARATELLNLYVRDRLEHHGGTGLESIFKQNWLLEAYYAVTTSRANAKVNPAIAAVAAQYMQGAEKPDRTGLTQCLTYECINLAAVGSTNVWFHFRKRMLKHVQTAHALDDAAYKQLSKDQKRQRRLALLQAADDLCRPLAEDFRSPAELHDWIGTEHQRLGIDAAVGTWDGKPLLYHLKAHPERFLKAVYLMSKDRVAAERGAFALFPLRQTLIPRHIRVDKKVLDHLLGLKMLHKQKKERCAATGRTPGSGRAAKRDRDDPTLIAEKQEVFGAVFDLRGAKVRRRHHFDYSFTTDGVSAHLLMRNPKKATKQGKRKRDGEAEVLPTEIPTRGRWSIDALKHASRNRLDDLHVVGIDPGKRELIHAVDADADARSTPSVRYTLAERRRDLRTRQREAEVRHTKPSVAAAAERELSLHNSKAPSLEGFAAYVQRRHELLVQVPEWEAFYAEVDHRHGRHKSFLKTQASEAKLYKKLQGMHDKNDKRQLVLAYGAWGLTAGPQMCNKGNPPAIGAGLMKKLDRRFVVVPTPEHFTSKTCVACGGLCGAHPTLRTKKDKEIRGLRVCQHEGCGLYQNRDRTGAINIGRQLRRLLRGDGPLHSMTDEELEFQRLNVCLACD

SEQ ID NO: 48505 - protein, 573 aa, unknown
  TnpB Polypeptide
VSGLRPIAGAFVAAAPAGARVRARLRVSGQDEAVLWAAGMHLGSLAGRDLAARCAEGRLDAKGRAGSRARRKKALTAQSSSRWAGAITRTSEDQVRLAGRNLRAERNTLQARVRKIEARLPVRAGGKAGRVRGYATPAERHAKAIRLQVLQARLARVDRRLEAGKVPVVRGGKALLRKRSNLAAAGLTQEQWRQQWASARVFLTADGEKDKAWGNETIRWHPGEGWLEIKLPVPLAHLANRPHGRYRLSCPVAFAYRGDEVAAQAASGAVRYDISHDPARGRWYIDASWKAAPAPAPSLDELRAALVLAVDLNHGHLAAWAVTPDGNPAGPPVTIPIDLAGLPSATRDGRLRAAISSLTRLARQLGCRAVVIEDLDFADAREQGRERAGSRPSRGRRGRGFRRLVSGIPAGKFRDRLVQMTSNAGLAVIVVDPAYTSRWGREHWLDPLQDHSSPVPASGHHAAAVVIGRRALGHRARRRTGVTGGGQRTSCRRATPGAPVARQTTRNGRPREAQRQPPRWRKTATANRTSPPDQATQDRSGPPVTQDHLLLAQQERCSPVARRLSLLSCNRGE

SEQ ID NO: 48506 - protein, 470 aa, Cyanobacteria sp.
LLTNYVYKLKPSITQSSKMEQWISMLRMHYNWCLGDRISQYNQQFIQGEYSDLRTKAPASPLTCFVSKNGATGEPWKDTKNSKNPRRSAGDIQITALPQLKTARPWYAGIDSTVLQQNVKRLDIAYKNFFEGRGFPKFKNRSNFTSFTYAMGVKTEGSKIYLPKLGWMRFYNSRDIPDGFTIKAATIRQRQDGYYVSLRIEDKAVPNVVARSLTEVRSVVGCDLGISKLVHLSDGYQFANPKFGNNKKTKRFLKIRQRRVSRKVKCSKNRKKASQKVGRLHKKIADKRQAYQWWVANAVASRRVDAIALEDLNVSGMLRRCRVKKDSESGRFLPNGQSRKVGLNRAISDAAWNELILKIEYLAAKQGKVAISVNPKHSSTECRSCGHVDGSNRDGEKFICSACGFFAHADISAAKTIRDRALGMVRGDSAKPAGNTAKRPKQCKEKSPCPSDSGGEPGNLGSKDIKTVMS

SEQ ID NO: 48507 - protein, 398 aa, unknown
  TnpB Polypeptide
MKQVLTVSCKLNISPEQAVKVDATLQAFCDACIYVNQEVPEKLTNELAMQSLVYHDVRARFGLSSQLAIHAVRRVSGNRKTAKSKGETVKEFRPTSATYDARTFSFREKDWTVSLTMLGKRERFTLHIGNFQRGKLKEQTPKTATLTKNRQGEYYLMIQLESHPEPPEKTDKVLGVDLGRTDIAVTSDGDSFSGKEITKVRDHHSDLRSKLQQKATRGTRSTRRRVRRLLQRLSGREQRFQKHTNHVISHRIIQYARANKQVIALEDLTGIRERTNEMPRTKTERRRSNSWAFYQLRQFLGYKAIKFSVKLILVDPRYTSQTCHNCLHIHPVQGKSYRSGKKFACGHCGWVGDADLNGAKNIANNGAFINTPGGSGLACSLSEHVLGLLKTPSAYAVG

SEQ ID NO: 48508 - protein, 412 aa, unknown
  TnpB Polypeptide
MRSQKLRLKLTKEQERLAWWYSKVSRNFWNLLVDIDKRNNKGEFDDILKENGNKTYHSKFYDREVYQLNQSDYLKLAKIVAAKNYEEDKELWSWYYQPNHSFIYHFLSRELVKVRKQNKGRLNFRSINKIQPNFNVTCCISSDKKRPSRIYLKDNGKLQIPTIGDVRFGSVRADFNLSCKKQVANISFDGKYWYLSYTEDVKSQVTELPDYTDGVGVDLGIKTLATVSDGTVIPNIKTFRRVRILNKRLKRLQHKVSRKYHINKCNKHNKTKNILKLERQIKLIHRSLRNIRINHIRKFVSDLVKKQPQFIAIEDLNVKGMMKNKYLAKDVADCSFYTIREQLIRKAKERFIAIRLVDRFYPSSKTCSNCGNYNKDLKLSQRVYHCSNCQERIDRDFNASLNIAKTDRYVLA

SEQ ID NO: 48509 - protein, 447 aa, unknown
  TnpB Polypeptide
MNPMKITSSYAMKLTGDLKSLENSIRIYREALRFIIPIVDAHWDELMDFEYTKQRMTHTEKLIHSTDENQARYNFDEEFPKFPSYLRRAVLNLALGIVSSYRSNLANWEKDPKGQAPQLSFNHYAYPAYYKNNLFRNFDPVKQTVELKVFKNGDWVYETYKLKTSDCTYYQTYLTGKKQNVPIIQKKGRRFYATFSYEEEVQLVKEESISKICAVDLGLNTDATCTIMGQDGTVYARTFISFSKEHDRLDTQIGRIKRNQKRGSRHNKRLWRSVAGISQDIADKTVQAILDFGNEHGVDVFVLEYLDFKGKNIVKRAHFWRYKRIYKVLAQRAHQYGLRIARVNARYTSRLAFDGSGWSKRGREIAPETPYALMEFPNGKTYNADLNASYNIGARYFIRHLLKTVMATQRLALEAKVPQVAKRSTCTLSDLINLRSEFVALASKTQA

SEQ ID NO: 48510 - protein, 443 aa, unknown
  TnpB Polypeptide
MQKLKLTIVAQLHERNNRCLIDYVEASRREYGKALRETFYAIKRGGIDKSKYNTYLQHKYGISRRTAHAIISDAQGRFNALKELKEYEKKQLERKIKHLESTVIPKLVEQRNQNSTKLRDGAYVLLVQQRNLRLRVVSKKAKLNRLKQKLNVLRYQLETGRLKLCFGTKRLLKQDYKKFIEQRDSQMTFIGAKEETACNHNLQLTYNRRSNQFLVRLRKDFGGYKSAKGEDRYVYGKVYFNHHKGQLVSILRSKNSPLSYKIVKRKNRYYLHCIFEFQVGNEGIVTRSSYGTIGLDFNKGFVTLSETNQYGHLVRTQFIPYRFNSGNKNKTDLQVIANNVVKLALQTGKDVCIENLDFRIKKAKTESKIGKKYNEMLHSLAYREFSEAVESASYRNRVGLNKVNPAWTSWLAEKLYCKPMKLNIHTGASYVIARRGQGYKDAA

SEQ ID NO: 48511 - protein, 562 aa, Verrucomicrobia sp.
MKAVCTKIKDLQFYPELDNIGAWYGDAERRIWQAIHVERQPVKTVKRDEVKENMTGRQFNSIRIDLEGKKQGLIEGLKRREEDLQCSIERYLEKIEAETKKFGIPAKSRIAHFKAHQFKRRVNTLTHRILEVHAELDAVAPSICFGSRELFYQQFNWQVHGFASFAAWQAAWKEARSHHFYLVGTGKGKGGVSEVGGNQSCTLTLKNYDHANQVLEGTLRLRLPKCQETEATTYLNFEVSFSYNAQHLYNALLTEQPITYQWIKKGNRWHVHALVEEWKVPIISSRKHGGLGVDVNPLHLALGCISHDGNFLWVEDLAYNFKGLKKEARKALMGLMIKDIVLRAHRLKLPVIVEQLDFKAQKRELKSAGYNRMLSSFAYHQFHAMIRSTAATLGVEVIAINPRNTTTIGIVKFEGYGISKDQGAAIAIARRGLGFSERVRGRLVTALPLPAPKQLGRDKSRHVLASWSRLRWGLKLTRKGWQLSGTSRKVKALRDKPVGCRVRKQGRDAGSLSLKVPLTIGSLDQPSGDQVNLASDGLSCPSSDGLRCPYQVGNAVRPARSS

SEQ ID NO: 48512 - protein, 279 aa, unknown
  TnpB Polypeptide
LDAKFRAFSFEWSGEICSLYIGTGEDLIFRLLESTLDCAGSELKSKYGPHLCKSEILSEIIKKGKNIAALDIGEHAVFSVCLYNAHKNEFIIRQIGKFRRVDASALLEQNFGIYQRNGTGEDEFSAVFIDGLKERAEELCDYYIANSVKENVGSLVALLKINNIKEVGIEDAMLDRLCLRSIKRSSDGRLRTYEKDNRSQERFFRILIQTLIQELDKSGIVFVRVSAANTSNYCSECGKLINGADKRGRIFKCSACGAEMDRDVNASLNILNNLVTTTP

SEQ ID NO: 48513 - protein, 511 aa, Mycobacterium sp.
VARGTGRCWRSPLSIRLSLLSRWVAVARFEVLEGWTAQAYRFALDPTPTQVRALASHAGGARFAHNHMLALVKAVMDQRAAERSYDIDEAQLTPVLGWSLPALRKVWNQRKASYAPWWGVNSKEAYNTGLDGLARGLDAWSKSRKGERKGPVIGFPRFKSARVPKSVRFTTGTIRIEADRRHVTLPRLGAVRTHESTRKLARRIEAGTARILSATVRQDSAGRWHCALQTIVEAKTRPAHARRSAHPVVGVDVGVKADALLVVATPDGLEVERIAAPKSLTAAQARLRALQRRAARQHGPYDPASRTKQRPSKRWRRTQARIGRTHAHAAAMRRDVLHKATTALAQSHDVVVAETLNAAGMRAKGGTRKRGLNLALADAALAEVRRMLSYKSRWYGSTLVEADRYFPSSKTCTACGRRKSNLTLADRIFECDGCGMRIDRDLGAAINLARLGVPTSLGEQSPAGSGPVAGRGATRETDPAPAGDAAGDETSTPQRHPVDQTGTASPQGEAA

SEQ ID NO: 48514 - protein, 384 aa, unknown
  TnpB Polypeptide
MAYKAYRFRLWTNANQERELSIMLETHRRLYNDALAQRQWFYDEWQISRSYEDQSGWFKEEREKNVWFARLNFTSAQGTLRRLDKAFSNFFRRVKAGEAPGYPRFKGADRFNSILFPKHGNGIKFTGNRLRVQYVGTIRVCLHREVEGTIKTISLKREGDKWFVVVTCEVPEPPKVGNILPAVGIDVGLTHFATTSEGEKIENPHFLKDALPELRRAQRGLSRKKKGGRNRKKAKRRVRRLHARVANLRHEHRHKVSNDLISSYGKIAVERLNVQGMVRNPRLARAISDVGWSAFVAVLTHKAERAGGEVKQVSPNYTSQECSACGVNVPKDLHVRVHRCGCGLVLDRDHNAAINILNRAWPGTGQLSVTPPLSRVLKEAVCFS

SEQ ID NO: 48515 - protein, 423 aa, Thermus sp.
MWVNQAFRFELSPNAAQRRALAQHIGAARFAYNWGLERCQKALEERKRLPSAAKLHREWNRWKRENAPWWTEVSKCAPQEAFRDLERALKNWKAKRARFPRFKRKKSLDDNKARLTGTIKVFSRQVQLPRIGLVKTKERTDKLVGLIEAKRARILSATVSREADRWYVSLTCEVERPDPNPKEVGSEDDVVGVDLGLSSFAALSDGTKIDPPKPLAKKLRLLKRRSKQLSRKQKGSNKSEKAALALARLHRKIKNLRRDFLHRLTTCLARTKPVVVVEDLNVKGLSRGWLSRSVADAGWGTFLRMLEYKAKWYGATLIVAPRSFPSTRLCSRCGHLHGKIPLSQRVFRCTACGLEIDRDLNAALNLKAYGLAHLTGPTASSAGSHACGDPSGGGTALLGWSTSHGSMKQEVAHRHRPVEGRNR

SEQ ID NO: 48516 - protein, 400 aa, unknown
  TnpB Polypeptide
MVFKRFNYRLYPNKEQTVLIEKHFGCNRWVYNWALRTKMEAYTTNKVTLSKYDLGKQLTQVKKELPWLCVVDAHSLQTSLEHLDQAYTRFFRTKTGFPNFKKKHSNNQSYTVNQSIHIKYGKVKITKLGWLRIHKDTRIIDGPIKQATIIRVPSGKYYVSVLFETATECVEPLSIVPETTIGIDLGLTSFITTSNGLKMEPCKALIQHESKLKKQQRWMARKQRGSKNHQKQRIKVAKIHEKVANTRSNFLHNITRQLTSDNQTVGTIVLEDLAVRSMMKSKFLAKSIGDASWTMFTNQLAYKSQWYGVNLLRIGRYEPSSKLCSKCGVLNQELTLKDRTWTCQNCQTFHDRDINAALNIKHIGLADQNRVGWSSPELTLGETRTLVRSKNQEHQAFAAG

SEQ ID NO: 48517 - protein, 339 aa, unknown
  TnpB Polypeptide
MSKPNVPNALIKSSAWKQVLYKEASSIVRSALNRTHDRTYKRYKKLYAKCISAGKHQWFTSKRFSELNINYWKRTKVTIKNVSIPLDQRLVDVESGNHFDWFVCVTLPIDDVRNKRDKYKHIRIPIKNHKHGLKYLSWKRNLTVKLTPGFLHFSYEKEEPAKKTFGKTLGIDLGYNKLITTNEGTFYGSELKALYTRLSNKKRGSKNYIQLLQHKKCEVNRVTKSLLGENLHTLYCEDLKELRKSSRLASTQLNKQQYFTYAQVLAKLESLSQTEGFQMVRVNPAYTSQTCSKCGEIHKESRSGECFKCISCGMVMDADINAAINILYRGAYGLPATES

SEQ ID NO: 48518 - protein, 379 aa, unknown
  TnpB Polypeptide
MKIVRGYKTELDPTSEQYTLLCQCAGISRFAYNYGLARKQEAYKNGEKTPYAIGLQKELTARKHDDLPWMNDVSKWIVQNSLRDLDTAFDNFYRKCALKNIGQWKGKCGYPKFKSKHKGRGSFRLDCPITVHDKSVRLPKLGLIQLKEHEYIPTWGVKVLSATVSEKAGRWFVSVQVEEEHADPIPATGPAIGIDVGIKTLATVSTGDIFDNPKALRSRLKALKRASRKHSKKQKGSNNRKKVQRKLAKLHMRIANIRKDTLHKVTSAIVAKTKSQASRPSIIVLEDLHIQGMLKNRKLSKAISDVGLGEFKRQLLYKSAQAGIEVKQVSRWFPSSKTCSSCGTVKEELGLDERVYVCTECGYIADRDYNAARILAQAA

SEQ ID NO: 48519 - protein, 410 aa, Streptomyces sp.
VIVMQLRYAFRLYPDTGQQRALARAFGCARVVFNDAVRAREDARAAGQPFPGAGELSTRLITEAKRTVERSWLGEVSAVVLQQSLRDAEAAYRNFFASLKGTRKGPKAGAPRFKSRRDARQSIRFTANARWNITDSGRLNLPKIGAVKVKWSRTLPTAPTSVTVIKDSAGRFFASFVIDTDPAADANRMPQSDRSIGIDLGLTHFAVLSTGEKIDSPRFLRRAEKKLKKAQKNLSRKQKGSKNRAKARLKVARAHTEVTDARKEFHHQLSTRLISENQGIAVESLSVAGLARTRLAKSVHDAGWTAFVNMLEYKAERYGRTLVRIGRFEPTSQTCSTCGVKDGPKPLNVREWTCTVCGTLHDRDHNAAINVKTAAGLAVTACGAPIRPEPVLAQREETGSHGFPTEPRAA

SEQ ID NO: 48520 - protein, 621 aa, Leptolyngbya sp.
MTSQHYQTRTLKIEFHPKPQQRQLLYGMMRSSAMIYNLLIDHLAYKQSAYKQAREEYPDQPAWEVDPYVDIRRKGWADELIITLITQQSSIYPRQLVNKPAKQGKDKGKERLVVATEKNAKPDYGIPAQSKVVLTQDFEANIASYFTHRKNGDTNAQLPRRYKGLHTLFFTNQLVKRSGDRLILGAKPYVLKLRVPELLNISIDGDVKITRSRSGRFCLHITRKLPVEPNPELIEVAAVDFGQKRAMVLALKDGTTATISGKNICALKRERDGRYRGINRKRSRVLKGQIRQYLSPDEKATYRELQERDNERQRQGLKRRGSDIKYAFRIIRQRRKDLGLKKRSRREMRLLRSQHKAADYYRVRLTYANHCVTRAAVNWCVENKVGKVYVGDLKTLPKTRKKGKRRIKQVGRNNLWEMPTQVKYLDEKLLLAGGEGTETASEARSSQVCPNCGRRHKPRNRVYYCNPRKGGCGWLGDRDGVGGCNFLSSVLYGACGAIKPAQNRTLRLAPAIRQGLRMPTPDGSAVCEPAEDSAKGYKSSDLQESAVVADSVAPRTDRNPATSGKTQARGGMGVLATSDPSELVTPVVSSQLAKTGVDRPKRRSLKRLPEDHIQLELWESE

SEQ ID NO: 48521 - protein, 402 aa, unknown
  TnpB Polypeptide
MRKIHRSYKFRLCPNKSQIDLLSRHFGCARFVYNYFLNQRIEQYRLTGKSDNYYEQSKALTALKKKDETSWLKEVSAQTLQFAIRCLEVAYINFFNKRAKFPKFKSKHSKNSFTVPQYAHISDNRLFIRKFKEGIKCHVHREIKGKIGKVTVSKTPSGKYFVSVFTEEEYETPLEKTNKSVGLDMGLKDFIVTSEGETFENNRYTRKYERKLAMAQRHLSRKKKGSKGFENQRLKVARLHEKISDSRTDYLHKCSISLVRRYDTICIEDLNVKGMIRNHHLSKSIADVSWRSFVTMLTYKADWNGKEVVKIDRYFPSSQTCNVCGYVNKETKDLSIRDWECPVCHTHHNRDVNAAINILHLGLNKNISAGTVDYTDGEDVRADLSIGQSPVKSEANESLAHR

SEQ ID NO: 48522 - protein, 422 aa, Thermococcus sp.
MKRTVTVKLQPSKEQAKILHQLADTGAKVWNRVNYLRRQQYFQEQIVDFNKTEKTAYEEFKREIGSATVQQICRKNAEAWRSFFSLLRKKRNGELPNWLKPKPPNYLKEDGMRKPLIVLRNDQYKIEGNKLILKGLGKFRRLEIQFKGRIHLKGKQGRLEITYDDVKRKWYAYLSFTVEEKLEGGEWVKLPRTSKGSLSAGIDLGVNNLMAVYVENGESFLVNGRPLKSIDFYWRRRIAEYQSKLNKSGAKKSRKLKRMHEKAKLQAKHYLNTAVRQTVRKLYDLGVSKIVIGYPKGIARNSDKGSKQNFLLSHVWRFNYVIKRLTEVAEEYGIRVLVVNEAFTSKTCPVCGKPHDGARFVRGLYSCPATGLVFNADLVGAFNILKRVVKTITPNLSGLYAQRRGNWPKTRPEGLKTTLSWV

SEQ ID NO: 48523 - protein, 424 aa, Thermococcus sp.
MKRSVTVKLQPSKEQAKILHQLADTGAKVWNRVNYLRIQQYFKEQIVDFNSTEKTVYEEFKREIGSATVQQIARKNSEAWRSFFSLLRKKRNGELPNWLKPKPPNYLKEDGRRKPLIVLRNDQYKIEGNKLILKGFGKFKRLEIQFKGRIHLKGKQGRLEITYDPVKRKWYAHLSVTVEEKLEGENWIKLPRTPKGSLSAGIDLGVNNLMAVYVENGESFLVNGRPLKSIDFYWRRKIAEYQSKLNKSGAKTSRKLKRMHEKSKLQARHYINTVVRQTVKKLYELGVSKIVVGYPKGIARNSDKGKRQNFILSHVWRFNYVIKRLTEVAEEYGIRVLVVNEAFTSKTCPVCGKPHEGARFVRGLFKCPATGLVFNADLVGAFNILKKIVKTITPNLGGLYAQRRGNWPKARPEGFEDPLFSGFE

SEQ ID NO: 48524 - protein, 363 aa, unknown
  TnpB Polypeptide
MTYHPLTHKCRIYPHPIQIKKFEIALDACQFLYNNLLKQYKNDYENNNVPKNIKEYLSDLCEQNQKTYKSISKLDASTIKDVSNSIIRAIKLTQNPGNLKEKTQNRKVKSFLINNNTNIQLKGNILHLDNYGKFKLYYGKTIRYCKVISYRVLYQNTKWYILITIRSDNIEIFPKTGKKVGLDLGINNILTLSNGKKYSPPEISKTNEKIDKLNTKLSSKKRGSRKHNEIIEKINILYNHRRNTINDHFHKITTQLVKEYDIIAMENLDIHNMLKDRRYSKGIFHSNWYKLLNMLKYKCELYGKIFIQVNRRFPSTKLCNNCGYKYEDITIDVRMWECPECGEIHDRDVNAAKNILQKALIDN

SEQ ID NO: 48525 - protein, 430 aa, unknown
  TnpB Polypeptide
VLDNELSQINPERGETSMQLVEQHCIDKKDPRYAVIDEAAFQSKNLYNAALYEMRQAFIHQGIYLSYEQMDTRMQSHEAYKGLPAKVSQQVLRQLAAAWKAFREAKAAYEEDPSKFTGRPKLPKYKHKTEGRNILVYTIQALSKPGLRDGLIQASRLPVTIKTEHTVVDQVRMVPRHGHYVVEVLYSKEPVQADVDPSFCVGIDLGVTNLAAIASNREGFVPRLVNGRPLKAWNQWYNKHMKELKKKLPKEDREKVTKQMQRITTTRNRRINHYLHTASKRVIDLLVEQGVGTVIIGKNPLWKQEAGMGRRNNQNFVSIPHARFIDMITYKAALVGIGVEVREESYTSKASFLDLDPIPDYQANDETVHVFSGKRIGRRNRLYRTKDGHIICADMNGAYNILRKSRPDAFADAAAKGVAGYVVHPVRLAV

SEQ ID NO: 48526 - protein, 406 aa, Catelliglobosispora sp.
LRYYYRIYPTPVQRDRLARAFGCARVAFNDGLRARQQAHEAGLPYISDGALSKALTEAKQSPAQAWLGEVSAVVLQQALADLNVAYRNFFKSMTGKHKGRNIAPPRFRSRKDNRQAIRFTSNARFKVLDNGRLRLPKIGDVEVVWSRPLPCAASSVTVIADAAGRYLVSFVVDVDTKPLPPRDSDVGIDLGLVHFVVLSNGTKVASPRFLRRAAHKLRKAQQNLARKTKGSNNRKKARRAVAKAHARVADTRRDWLHKLSTTIIRDNQAVYLEDLCVAGLGRTRMAKSVYDAGWAMFVNMLEYKAARAGCTLAKVDRFFPSTRTCSACGRLGEKLPLSVREWVCPCGVSHDRDINAALNVRAAGRADLNDRGAQVRPVVMLAQRGEAVIHPDAVCYTRSVEGISVL

SEQ ID NO: 48527 - protein, 464 aa, Catelliglobosispora sp.
MMAVMQAYRFALDPSPAQARDLQRHAGAARYAFNWALAAVKANIGQRVAERSYGVADQDLTPAVGWNLPALRRAWNQAKPAAAPWWPQCSKEAFNTGLDAMARALRNWADSKSGKRQGKRVGFPRFKSKRNTTPSTRFTTGVIRVEADRHHVTLPRLGTIKTHESTRKLARRLEAGTARILSATVRYQAGRWFCSFTVEVTRPQRRPARPYEVIGVDLGVKSLAVLSNGHVIDNPRHLVAGLRRLRRLSRRAARQIGPHDTKANVRRTASKNWADTRRALGRAHARVSNLRRDSLHKLTTTLAATYGTIVIEDLNVAGMAKNRLLARAIHDAGFGEIRRQLDYKTRWHGGTLIVASRWFPSSKTCSDCGATKPKLRLSERVYTCENCGLVLDRDLNAARNLAALAAQHNVAGSGPETSNARRANQKTPSVGQVALKREPGTATADQTGTVHAQARTASHGISQD

SEQ ID NO: 48528 - protein, 419 aa, Catelliglobosispora sp.
VQLRYNFRLYPTVSQKDALARAFGCARVVFNDGLRARQEAREAGRPYLSDGDLSKRVITRAKATPERAWLGEVSSVVLQQALADLNTSYRNFFASISGKRKGCKVGPPRFRSRKDNRQAIRFTKNSRFKVLDNGRLRLPKVGDLTVRWSRKLPADPSSATVILDAADRYFVSFVVEMADGESLPATDSEVGIDLGLTHFAVLSDGTRVAAPKFLRRAARKLKLLQQNLSRKQRGSQNRKKAVVKVAKAHAKVADTRRDWQHKLSTRIIRDNQAVYVEDLCVVGLGRTRLARSVHDAGWSSFTAMLEYKAARYGRTFGKIGRFVPTSQTCSACGRLDGPKPLSVRSWTCICGVTHDRDVNAAMNVLAQGRWDNSNDRGAQVRPAAMAAQRSEAVIHPNSARPPRAAWRESPSHGAERTSR

SEQ ID NO: 48529 - protein, 386 aa, Mycobacterium sp.
VKLVVQVKLLPTPEQAAALTDTLHQVNTAANHVSAVAFNRFGLRGRELPLRTLCYGTLKADGLGAQAALHVIKRVVDAYSTLRGNIRNGRLGGPASKRRRKAESKPIVFRPDAAHTFDDRCLSWQLDASTVSIWTVAGRCKNLRFACSPDQAKTLAAHRKGESDLVHRDGKWFLLATCDILEPDVYEPTDWVGVDRGIINLATTSDGDNHQGRRLSRYRRWQARKRAELQAKRTRASARLPKKRARREARHARHVNHKISKQVVAVAARTGRGIALEDLSGIRGRVTVPRDQRARLSSWPFHQLGAFIAYKARRTGVPFIEVDPAYTSQRCPRCGHTARNNRPTRDHFMCRRCGLAGLADVVAGVNVRDRARSAWVFVNMPQPAPT

SEQ ID NO: 48530 - protein, 269 aa, unknown
  TnpB Polypeptide
MIRYRLHPTPAQEAMLRDHCGHARTRENLAVEQHAHWHPGRRSAPGYLEQCRQLTAARAEYPWLAAGSQTVQQQALRDFAQAMTAFFDPGNPAGRPTWRKAGRDEGFRITGRRGRQWEVRRVSRKVGQVWVPKAGWVRFRWSRAVPAGVKSYRVTMDRAGRWHVAFAAVPEPVPAPGTGEVVGIDRGVAVSAALSTGGLLHCPALTGRERIRLRRLQRRLARAKRRRSSKSSRANSTCSRSSLGSGPPATGRPGSPPTARRSSAAVRAA

SEQ ID NO: 48531 - protein, 383 aa, unknown
  TnpB Polypeptide
MYKYRLYPSKKQLELLFESFNICKTIYNELLKLSIDEYKITGRTLRCYNYNKYLTGKHKELHSQVKQNVSDRVHKSFQNFFRRAKDPICKKKGFPRFKSSIHSITYPQSGFKFVSERRLYVSKIGNIPIVLHRIPKGKIKTMTIKRNKAGQWFVIFASEINIKPIKHKSKEQVGIDVGLERFATISNGITIDNPRHIKKAEERLKRLQRNVGRKIKESKNMQKAIHILAIQHLKVANQRKDFLHKTSRMLINNYSFISIENLSINGMVQNRHLAKHINDASWGDFIRMLEYKAVTSGSRLVKVDPRNTSKICSKCGAIADMPLNQRQFNCPACGFVCHRDLNASINILKVGRDSPEPNARGHGVRPSHLKAVVDETGTTQGNI

SEQ ID NO: 48532 - protein, 432 aa, Lentzea sp.
LCSHRPPLELPASEPGRRLTDHFSTGTLLVVRTAYRCRAYPTAEQAAVLNRTFGCVRLVWNKTLSERSRRYRIDGARTSYRETDAALTTWKRSDELAFLSEVSSVPLQQTLRHQHSAFLHFFSGRSRYPRFKSRTGYQSAHYTRSAFRMRDGVVTLAKTDVPLRFTWSFARVEVATLDPTMVVVSREPDGRWYVTFAVDAETPAPAEPVSHGVGVDLGLTNFLVTSDNERIAAPQHLARKARNLARYQRRLARCRPGSSNRLKAKVRVARAHRKIRHARQDFLHRTSTALVRCADVIAIEDLNIAGMVRNRRLSRAISDAGWGEFRRQLQYKCERAGRVLVVIDRWFPSSKTCSTCGHLLTELKLSARHWTCPGCRTRHDRDLNAAKNILAAGRAVARDNSGDACGADVRRQGPSLPRSAVKQEPRVVRHGA

SEQ ID NO: 48533 - protein, 370 aa, Acidobacteria sp.
MLRTFRYRLKPTRHQAKVLGEWLAVSCELYNAALEERRGAWKVAGKSIGLYDQFKSLTEIRAFSSDVASIPVDIAREPLRRVDRAFQAFFRRVKAGQKPGYPRFRSRDRYNSLAFSLAKASEEAITVPKLGCVRFKAHRKLRGRVKSASLVRSPTGKTWSVSLVSDLGQAPEKQPVSSAVGIDVGLSIFASLSDGQQIENPRWLKQSEEELAAKQRILAPKRKGSNNRRQARRNVARCYEKIRNRRNNFCHHVSKWLVATYDLIAFEALSIQGMTKDGNFSKSIIDAAWGILLRQISYKAEEAGRYAVAVDPRGTSQLCSGCGEAVPKSLWERTHRCPRCELVLDRDHNAARNILALGRSAAGLIEPRKG

SEQ ID NO: 48534 - protein, 446 aa, Halobacteriales sp.
MKRANQFNVHPCFNKEHEVFVRWLDASASLWNETNYARRQAFLEDDESVWDADTGSLEGKYKGILSSSVAQQIIRKNSEAWRSFFSSNEKYHAGKIDEKPSPPGYWGNEDDGRVLRTYVRNDQYTIEYGERSRLEVPIGSELKDELGLNRNQRLRVEVAGDPKWSGEQGRLELVYDELADTFRAFQPVTVPDSRLDSPLASEEAALDVGANNLVACTVSTGQQLLYDGRDLFEQFRETTERIAYYQSLLKNQRTSSNRIDRLYRKRTNRRDHAQDSLVRDLVERLYDEGVSTLYVGDIKGVLSAHWSAVVNEKTHNFWAYRRLINRLEDVCEEYGITVDEESEAWTSQECPECGEREETIRHEESLTCSCGFEGHADLVASKSFLRQQTNVVGPMARPVYLKWNNHEWRDDHSPPSIAVEITANEEYTDQSTAVSGKVASVEPQND

SEQ ID NO: 48535 - protein, 472 aa, Proteobacteria sp.
MLTGIRLKANPNNYQKLILSQWMGCARSVWNSKCDENRYYSAFALKYCPIGSYAPIDKTYSHFKNDELSPWLSNCPSKIMANSACSWFDTYQEFMKGRCGKPKRKKKDSGGSIYLTRDLFRFEVCEDGVRRLFIGAQRNNIGYLSLKLHKDFKEPKSIYVKKRHDSYWVSFCYDDGMEEDGILSQSDHLKYLSQCSEEFLQKHLIGIDRGVVKPIQAGEKTFDFTKDQKRNKAKSERYIKSYQRRMARQSKGSKRRHKTKIKLSKSFEHVANIRADFCHKASRELVDQNDARVFILEDLKTSQMTKRAKAKTDEAGKWLKNGGSAKSGLNKAILDKGWHKFEEFLKYKANKAGKAWFKVPAHHTSQECNACSYTHPGNRKSQESFVCGSCGHAENADAQAAKVIKKRAIGLIVNAGSALSERGVLLSGTGRGAAIKTKRTKIRGASGNETSKKKRLDSKVSPSDLVLEAPPL

SEQ ID NO: 48536 - protein, 278 aa, Verrucomicrobium sp.
VAFVSETDASLEKLSPEVEQPWRETRRILRSMDRSRRATNPGNYDTAGRVKRGVKRWVRSEHYKRRRRDLAETERRLAAARKTAHGNLANRILAQGKTIKGEKLCYSSFQKNFGRSVKVRAPGMWVERIRRKAESAAAADSSEIDPRKTRLSQFDHTTGHYVKKPLSLRTHVFGDGRTEPVQRDLYSAFLAKCFEKDFLDISRVGKSWPGAEPLPRRAMSRVKKPASREGLSRPHVRNVRAGRPSKGKMGSGCPRSRSGEAGDAVAQARAPESRISIL

SEQ ID NO: 48537 - protein, 346 aa, Verrucomicrobium sp.
  misc_feature (101)..(101): Xaa can be any naturally occurring amino acid
  misc_feature (125)..(125): Xaa can be any naturally occurring amino acid
  misc_feature (130)..(131): Xaa can be any naturally occurring amino acid
LVLPLRLDPKDKRGWQRIALEARTKYVRILRRTIRCRMRWYAQLLQEGLAPQVRPAGEDVVGYDLGPSTVAFVSETDASLEKLCPEVEQPWRETRRILRSXDRSRRATNPANYDAKGCVKRGPKXWVRSXXYKRRRRDLAETERRLAAARKTAHGNLANRILAQGKIIQGERLCYRSFQKNFGRSVKVRAPGMLVERIRRKAESAGGGFIEIDPWKTRLSQFDHTTGHYVKKPLSLRTHVFGDGRTEPVQRDLYSAFLAKCSEKDFLDISRVRKAWPGAEPLLRRAMSRVKEPASREGLSRPHVKNVRAGRPSKGKMGSGCPSSRSGEAGDAVAQARAPESRISIL

SEQ ID NO: 48538 - protein, 329 aa, Verrucomicrobium sp.
VLEGVRFAYGQEAILQALSASRLVTAQTKTGKLVRKREGSAMSYRFVRDRKGWRVFASVEARPVLLRTIRLAGAIGVDINEDHLALAETDRFGNLVGIRRIGLNLYGKGEEQAKAVIGDACREIARACTESGKPFVIERLDLRKRKAELESVDSVLARSLSSFAYAKAISMLKATSFRAGVEVIEVDPAYTSVIGAVNYARRHGIGSHQGAAYAVARRGLGLSERPSVREAIVPTRNGGHVTFALSARNRTKHVWSFWAGVRNRLKAAHAAHARSGGNQKPPAPLSPKARALGATRTLPAKPRHANRRQHCSADALDDLPWQGNGCLWF

SEQ ID NO: 48539 - protein, 520 aa, Verrucomicrobium sp.
MRAKTPSFIAEFPLRTTAEDEAILSKRLDAARQIYNASLGEAMRRLALMRQSKDWQRASKMPKTVMEERSGKRIGNKARSRLFRETQERFGFTRDSIQKFAESCRDACLIGDHLGSHDTQTTSLRAFQAVQQYAFGIRGRPRFKSARRFHSVEGKGDSVIRFRKEPVPAIHCAGLVLPLRLDPKDKRGWQGIALEARTKYVRVVRRTIRGRARWYCQIIQEGLSPQVRPMREGVVGYDPAPSTVAFVSDTDASLERLCPEVEQPWKEARRILLSLDRSRRATNPGNYDTEGRVNRGTKRWIRSERHKRRLRDLAETERRLTAAPKTAHGNLANRILAQGKIIQGEKLCYRSLQKNFGRSVKVRAPGIWVERIRRKAESAGGGLIEIDPRKTRLSQFDHTTGQYVKKPLSQRMHVFGGGRTEPVQRDLYSAFLAKCSEKDFLDIRQVRKAWPGAEPLLRRAMSRGKEPARREGLSRPHVLGVRAGRPSKGKMGSGCPRSRSSEAGEAVAQARAPESWIPIP

SEQ ID NO: 48540 - protein, 551 aa, Verrucomicrobium sp.
MRAGVPRNELKRSFLLRFGLTARQFNAIRIELEGKIASIQERRPEWIEETKGRIKRAEEAIGRLEEKKPGSSLLHQKKRRLAILRTKLETLLADQESGQVRLCFGSRRLFRKQFALEESGYVDHAAWKKDWQTERSSQFLVLGSKDETAGNQSCQAVAEPDGSLRLRLRLPDGLGGPSKHLVLEGVRFAYGQEAILQALSASRLVTAQTKTGKLVRKREGSAVSYRFVRDRSGWRVFVSVEAQPVALVTRRLAGAVGLDINEDHLAVAETERFGNLVRIRRLGLNLYGKSEEQAKAIIGNACREIVRACTESGKPLVIERLDLCKRKVELESVDPVRARSLSSFSYAKAISMLKAASFRAGVEVIEVNPAYTSVIGAVNHARRHGIGSHQGAAYAVARRGLGLSERPSVREAIDCLPRLCPRKRGHWALPGLCRRNPGTRTVGSTVRPASWTIYPGRGMIVYGFRNGGSQVIKKGCDHGTKAVPMDDLVDQAFLVEELRSLKAVGKLLVRGFPDDPGSRKTDHGLGFGENDVSQGSEACRHSRHRRVGQNR

SEQ ID NO: 48541 - protein, 254 aa, Verrucomicrobium sp.
VLQCHLFGLQGVQGTQGNRADSERHAGSGNQLPARHVHFDKRTYALKKNAVSLYTLGGRVIVPMRLGEHQRRILSFGRPKEAELVFRKGNWYFNLVVESDDKEPIASGPVMGVDVGENNLAAHSLGGIFGGGRLCDRRDRHLALRRRLQSNGSRSAKQKLRQVSGKERRHVTHVNHETSKAIVREALEAGVAKIMMEDLTHIRDRIQGWQAHARKIASLGLPAAPTLCRVQGEIGRHRGRIRRSGLHEPNLLVL

SEQ ID NO: 48542 - protein, 366 aa, Verrucomicrobium sp.
SSQFFVLGSKDETAGNQSCQAVAPDGSLRLRLRLPDGLGGPSRHLVLEGVRFAYGQEAILQALSASRIVTAQTKTGKLVREREGSAVSYRFVRDRSGWRVFASVEAQPVALVTRRLAGAVGLDINEDHLAVAETERFGNLVRIRRLGLNLYGRSEEQAKAAIGDACREIVRACTESGKPLVIERLDLCKRKVELESVDPVRARSLSSFSYAKAISMLKAASFRAGVEVIEVNPAYTSVIGAVNHARRHGIGSHQGAAYAVARRGLGLSERPSVREAIVPTRNGGYVTFVLPVRNRTKHVWSFWAGVRKRLKAAHAAHARSGANRLPPAPLSPKARALGATRALPAEPRHANRRQHCSAGVLDDLPW

SEQ ID NO: 48543 - protein, 303 aa, Verrucomicrobium sp.
MPLFSVCKAYKALKVTGAGFRKDTPVPAISFQRASVHFDKRTYALKKNAVSLYTLGGRVIVPMRLGEHQRRILSFGRPKEAELVFRKGNWYFNLVVESDDKEPIASGPVMGVDVGENNLAAHSLGGIFGAGRLCDRRDRHLALRRRLQSNGSRSAKQKLRQVSGKERRQRHSCDTRERARAHRTGGALEAGVSKITMEDLTHIRDRIKAGKRMRGRLHRWAFRQLQRFVEYKAKSAGIAVEYVDPAYTSQTCSSCKQLGRRHEASFLVCPHCGLRAHSDLNASPESCPDWRNGGSAKGGRKHA

SEQ ID NO: 48544 - protein, 320 aa, Verrucomicrobium sp.
  misc_feature (120)..(120): Xaa can be any naturally occurring amino acid
  misc_feature (122)..(122): Xaa can be any naturally occurring amino acid
MMRTASIKLDASPEQEGALAALQSDFANACQRLSAVVREHRVWNRVALHQRTYSDLRSSTPLGSQMCCNAIFSVCKAYKALKVTGRIPKDTPVPAISFQRASVHFDKRTYALKKNAVSLXTXGGRVIVPMRLGEHQRRILSFGRPKEAELVFRKGNWYFNLVVESDDKEPIASSPVMGVDVGENNLAAHSLGGIFGGGRLCDRRDRHLALRRRLQSNGSRSAKQKLRQVSGKERRHVTHVNHETSKAIVREALEAGVSKITMEDLTHIRDRIKAGKRMRGRLHRWAFRQLQRFVEYKAKSAGIRGRIRRSGLHEPNLLVL

SEQ ID NO: 48545 - protein, 492 aa, Verrucomicrobium sp.
  misc_feature (275)..(275): Xaa can be any naturally occurring amino acid
MRAKTPSYIAEFPSRTTAADEVALSKRLAAARQIYNASLGEALRRLALMRQSKDWQHACRMPKTVMDEQSGKRIANKERSSRFRKTQERFGFTRDSIQKFAEACRDACSIGDHLGSHDTRTASLRAFQAVQGYAFDVRGRPRFKPASRFHSVEGKGDALIRFRKEPVPAIHWAGLVLPLRLDPKDKRGWQRIALEARTKYVRILRRTIRGRMRWYAQLVQEGLAPQVRPAGEDVVGYDLGPSTVAFVSETDASLEKLCPEVEQPWRETRRILRSXDRSRRATNPANYDAKGCVKRGPKRWVRSERYKRRRRDLAETERRLAAARKTAHGNLANRILAQGKTIKGEKLCYSSFQKNFGRKVKVRAPGMWVEKIRRKAESAGGGFIEIDPRKTRLSQFDHTTGHYVKKPLSLRTHVFGDGRTEPVQRDLYSAFLVRREKGASSSGEGVISTRQLLLQPEAFGAAAGGDAGGRSLWRKRPGERASEQAGPKGSER

SEQ ID NO: 48546 - protein, 362 aa, Verrucomicrobium sp.
  misc_feature (60)..(93): Xaa can be any naturally occurring amino acid
  misc_feature (214)..(214): Xaa can be any naturally occurring amino acid
  misc_feature (218)..(218): Xaa can be any naturally occurring amino acid
MSAKTISPAHSLGGIFGGGRLCDRRDRHLALRRRLQSNGSRSAKQKLRQVSGKERRHVTXXXXXXXXXXXXXXXXXXXXXXXXXXXXXXXXXXKNAVSLYTLGGRVIVPMRLGEHQRRILSSGRPKEAELVFRKGNWYFNLVVESDDKESIASGPVMGVDVGENNLAAHSLGGIFGGGRLCDRRDRHLALRRRLQSNGSRSAKQKLRQVSGKEXRHVXHVNHETSKAIVREALEAGVAKIMMEDLTHIRDRIKAGKRMRGRLHRWTFRQLQRFVEYKAKSAGIAVEYVDPAYTSQTCSSCKQLGRRTKHRFACPHCGLRAHSDLNASRNLARIGGTMVPPRAAVSTPNVGGADVGNHVCASR

SEQ ID NO: 48547 - protein, 266 aa, Verrucomicrobium sp.
VFASVEVKPVSVVTRRLAGAVGIDITEDHLAVAETDRSGLLVEIRRIGLNLYGKSEEQAKAAIGDACQEIVRACTEAGKPLVIERLNLRKRRAELEAVDPVRARARSSFAYAKTIAMLKAASFRAGVEGIEVDPAYTSVIGAVNHARRHGIGSHQGAAYAVARRGLGLSERPSVREAVVPTRNGRLTLTFAPLPARNRTKHVWSFWAGVRKRLKAAHARSGGNRLSPAPLSPKARALGATRTLPAKLRHANRRQRCSADVLDDLPW

SEQ ID NO: 48548 - protein, 281 aa, Verrucomicrobium sp.
MPSRFTPWVDASSFRCVLGNTSGASSPPAGRRRRNWSFAKATGISTSSVVESDRQGADSHPAPGNGEWMSGRKQISRAHIVWWGMFGSGRLCDRRATRPLALRRRPPVRQGQPKRQNREASAGSPARRGRHGHPHVNPRDGARAIVRGGARGRKLPRSSMERDLTHIRDRIKAGKRMRGRLHRWAFRQLQRFVEYKAKSAGIAVEYVDPAYTSQTCSSCKQLGRRTKHRFVCPHCGLRAHSDLNASRNLARIGGTAVPPRAAVSTPNVGGADVGNHVCASR

SEQ ID NO: 48549 - protein, 520 aa, Verrucomicrobium sp.
MRAKTPSFIAEFPLRTTAADEVALSKRLAAARQIYNASLGEALRRLALMRQSKDWQHACRMPKTVMDEQSGKRIANKERSSRFRKTQERFGFTRDSIQKFAEACRDACSIGDHLGSHDTRTASLRAFQAVQGYAFGVRGRPRFKPASRFHSVEGKGDALIRFRKEPVPAIHWAGLVLPLRLDPKDKRGCQRIALEARTKYVRILRRTIRCRIRWYAQLLQEGLAPQVRPAGEDVVGYDLGPSTVAFVSETDASLEKLCPEVEQPWRETRRILRSLDRSRRATNPANYDAKGCVKRGPKRWVRSERYKRRRRDLSETERKLAVARKTAHGNLANRILAQGKTIKGEKLCYSSFQKNFGRSVKVRAPGMWVERIRRKAESAGGGLIEIDPRKTRLSQFDHTTGQYAKKPLSLRTHVFGDGRTEPVQRDLYSAFLAKCSEKDLLDISRVGKSWPGAEPLLRRAMSRVKEPASREGLSRPHVKNVRAGRPSKGKMGSGCPRSRSGEAGDAVAQARAPESRISIL

SEQ ID NO: 48550 - protein, 542 aa, Verrucomicrobium sp.
MSKLPVFTYQTRLTLNPEQASCLDAYAALHGLAQRSLFAKMRAGVPLNELKRSFLRRFGLTARQFNAIRIELEGKIASIQERRPELIEEAKGWIERAEEAIGRLKEKKPGSSLLHQKKRRLAILRTKLDALISDQESGQVRLCFGSRRLFRKQFALEENGYASHAAWKKDWQSERSSQFFVLGSKDETAGNQSCQAAVAPDGSLRLRLRLSDGLGGPSKHMVLEGVRFVYGQEAILQALSASRIVTAQTKTGKLVRKREGSAVSYRFVRDRKGWRVFVSVEAQPVALVTRRLAGAVGLDINEDHLAVAETERFGNLVRIRRLGLNLYGKSEEQAKAIIGDACREIVRACTESGKPLVIERLDLCKRKVELESVDPVRARSLSSFSYAKAISMPKAASFRAGVEVIEVNPAYTSVIGAVNHARRHGIGSHQGAAYAVARRGLGLSERPTVREAVVPTRNGGHVTFVLPVRNRTKHVWSSWAGVRKRLKAPHAAHARSGGNRLPPDPLSPKARALGATRALPAEPRHANRRQHCSAGVLDDLPW

SEQ ID NO: 48551 - protein, 382 aa, Verrucomicrobium sp.
MMRTASIKLDASPEQRAALAALQSDFANACQRLSAVVREHRVWNRVALHQRTYSDLRSSTPLGSQMCCNAIFSVCKAYKALKVTGRIPKDTPVPAISFQRASVHFDKRTYALKKNAVSLYTLGGRVIVPMRLGEHQRRILSFGRPKEAELVFRKGNWYFNLVVESDDKEPIASGPVMGVDVGENNLAAHSLGGIFGGGRLCDRRDRHLALRRRLQSNGSRSAKQKLRQVSGKERRHVTHVNHETSKAIVREALEAGVAKIMMEDLTHIRDRIKAGKRMRGRLHRWAFRQLQRFVEYKAKSAGIAVEYVDPAYTSQTCSSCKQLGRRTKHRFACPHCGLRAHSDLNASRNLARIGGTMVPPRAAVSTSNVGGADVGNHVCASR

SEQ ID NO: 48552 - protein, 548 aa, Verrucomicrobium sp.
MSKLPVFTYQTRLSVTPEQASCLDAYAALHGLAQRTLFAKMRAGVPLNELKRSFLRRFGLTARQFNAIRVELEGKIASIQERRPELIEETKGRLKRAEEAIGRLEKKEPGSSLLHQKKRRLAILRTKLDALLADQESGQVRLCFGFRRLFRRQFSLEESGYVDHAAWKKDWQTERSSQFFVLGSKDETAGNQSCQAVAEPDGSLRLRLRLPDGLGGPSKHLVLEGVRFAYGQEAILQALLSASRIVTGTTKTGKLVRKREGSAVSYRFVRDRKGWRVFASVEVKPVSVVTRRLAVAVGIDINEDHLALAETDRFGNLVEIRRIGLNLYGKSEEQAKAAIGDACREIVRACTESGKPLVIQQLDLRKRRAELEAVDSVRARSLSSFSYAKAISMLKAASFRAGVEGIEVNPANTSVIGAVNHAHRHGISSHQGAAYAVARRGLGLSERPSVREAIVPTCNGRLTLTFALPARNRTKPVWSFWAGVRKRLKAAHAAHARSGGNRLSPAPLSPKARALGATRTLPAKLRHANRRQHCSAVVVDDLPWLRNG

SEQ ID NO: 48553 - protein, 382 aa, Escherichia sp.
MRRFAGACRFVFNRALALQNENHEAGNKYIPYGKMASWLVEWKNATETQWLKDSPSQPLQQSLKDLERAYKNFFRKRAAFPRFKKRGQNDAFRYPQGVKLDQENSRIFLPKLGWMRYRNSRQVTGVVKNVTVSQSCGKWYISIQTESEVSTPVHPSASMVGLDAGVAKLATLSDGTVFEPVNSFQKNQKTLARLQRQLSRKVKFSNNWQKQKRKIQRLHSRIANIRRDYLHKVTTTVSKNHAMIVIEDLKVSNMSKSAAGTVSLPGRNVRAKSGLNRSILDQGWYEIRRQLEYKQLWRGGQVLAVPPAYTSQRCACCGHTAKENRLSQSQFRCQVCGYTANADVNGARNILAAGHAVLACGEMVQSGRPLKQEPTEMIQATA

SEQ ID NO: 48554 - protein, 344 aa, unknown
  TnpB Polypeptide
QQGQAAGYRKENYYDDEGRRVHEEHPRSTVTWKQKGIRHDQKNNRVRLSKSANHKDHRRAREYILVEYETRPEVTVENLQQVRAVYDSAKERWELHLVCTEGIETPTAPGSETAGIDLGVSNFAAVTYSIKDADLYSGNRLKQDGYYFAKEIAKCDDSGGERATRLHEKWSERRTHFFHSLAKHIVQRCVEKGVGRINVGDLDGVREDKNGAAKNWGRHGNLDLHGWAFDRFTRILEYKTKVEGIEINAVSERDTSKTCSVCGREDDSQRVERGLYVCEACDAAFNADLNVAENIRHNISGKEGNSESPGIEDRSTGWLAQPAVHVYDLSCGFQPQTEVVDCKP

SEQ ID NO: 48555 - protein, 361 aa, unknown
  TnpB Polypeptide
MLKAYKYRIYPNEEQRTYLARTFGCTRFVYNQILAERIKAYEENKDLDIKQSKYPTPAQYKIEYPWLKEVDSLALANAQLNLNKAYKSFFRDKSVGFPKFKKKNNTNSYTTNNQNGTVYIENGYIKLPKLKPMIKLKQHRGFTGLIKSCTVSQVPSGRYYISILVECENYHLPKVDKKIGVDMGLKEFAICSDGYKEPNPKHLRKSEKRLAKLQKDLSRKQKGSNNRSKARLKVAKMHEKIANQRRDFLNKLSIKLIRENQSIVIEDLRVKNMLQNHKLAKAISEVSWSEFRRMLEYKAGWYGREIIVAPSNYASSQLCSECGYKNAKVKNLALREWICPQCGTHHDRDINASKNLLKLAI

SEQ ID NO: 48556 - protein, 363 aa, Klebsiella sp.
MNIQTKTLSVRVKDKHAALLRQMAWEVNQVFNLANEITSAAYSNAGAFGAQIPRWLSAYDVQKQTAGLRKEKGYLIDSASIQEVIASHGKARKQFKRAKLRWRISGGAKRSLGWIPFKTGFAKWEKGQVKFAGKLFSVWDSYGLNGFKLRAGSFSEDSRGRWYFNAAVDYEVQPTEGTQAVGIDLGLKDTATASNGEKLTAGRFYRDLESALGKAQRANKKRRVKAIHAKIKNRRKDALHKFSTAIVNANAAIFVGDVSSRKLVKTKMAKSVLDAGWAMLKTQLEYKAIARSVVFEIVNENYSTQACSCCGCISANSPKGRAGLRIREWTCDECGASHDRDINAAKNILAAGHRRLAVGIPAL

SEQ ID NO: 48557 - protein, 423 aa, unknown
  TnpB Polypeptide
MYSIPVSDPRVSELITWYLRALQRAIDIIWDNTEWKYRLPKIERRKRKQIVIIPYKLKVPELPKDKSFKKRLRDDLLQNCPYARHWVDAVIRTAYSIMESWRKRYLRGRARKVKPRVRRRFARCKITLMRVDYGEKRIRITVKPGEYIEVSWGGRWFTRRVEGWSVGEVVLKDDGVLIPFKSTRAIEVRDVVAWDSNELSLDGFSSRVGFIRVDLKPLQSMKIVYERKKRVAQSRGLKDVYEKYVARERNRERDFVNKLASGLTRLLPNTTHVFEDLEKEELVSRRETPKSRRKRNARTPWKIIQRKISERAVVAKVSPRNTSRTCPRCGYVVKTQVGRVFKCPRCGFELDRQKLASVNIYLKYLRMRGFPHSDDPEEAVKGELWVGVTPSGRSPVTWIPVKRDPKGSEAKGRGLGIKRYQAL

SEQ ID NO: 48558 - protein, 391 aa, unknown
  TnpB Polypeptide
MLRRYRYRLYPTEDQKTLIAQHLGCCRFVYNWALARKNQAYHDEGISLSKYDLINQLPTLKAELPWLKEVNAQSLQQSIIHLFRAFTNFFEGRAEEPTFKEKHALEQAFTVPQSYTVDFKRGTVKLPKIGLIKVKYHRTFTGTMKSATVIRTSTGRYFLSIVVEDGRKPPKPADPVLDQTVGIDLGLAHYAVLSTGERVENPRNLRNAQQRLAVLQRRLARKQKGSKNRNKARLKVARCHQKIADQRRDFQHQLSSRLVRENQALAVESLNVDGMVKNHSLARSISDAGWGTFLSMLAYKCQEAGKTLLQIGVFEPSSKTCSVCGYRKADLTLKDREWTCPDCGTTHDRDPNAAINVKQFALAGAERAEEPVDPLPVGRGMKQEAPCASGG

SEQ ID NO: 48559 - protein, 399 aa, unknown
  TnpB Polypeptide
MLYSVTVKARYRFRLYPSEKQAREFARIFGACRYVYNWGLRLRIDAYYNDGCSIGYDETSACLTKLKQKPDHAWLYEISSVPVQQSLRHLQTAFVNFFEKRSGYPAFKKKTGDQSAEYTRSGFRWDGHDLVVAGLGRLKVRWSRDFKSTPTTITISKDGAERYFVTLCLDEDVQKLPAVHKAVGIDLGITALATLSTGEKIGNPRPLQHLEKQLAKAQRDMSRKKKGSNRKAVQRLRVARLHARVADARADYLHKVTTDLVRRFDVIAVEDLNVQGMTKNHSLARALSDAALGEFLSMLRYKCEWYGRELRTADRFYPSSKRCFGCGHVLEELPLDIREWDCPECGKRHDRDVNAAKNILAAGQAATARGGKVRLKRGRPRKSISRGSANHPESLHKAS

SEQ ID NO: 48560 - protein, 237 aa, unknown
  TnpB Polypeptide
VRFRRYRFSKRYEKLRSELAEMLRLCAATRKREHGEVCNRLLGHAGHIIVEDNSYKAFQKGRFGKAIGRHAPAALYAQLASKAESAGLLVEVVSPKKLKPSQHNLLTDTFVKHELWERRVRLGEDDDERWIDRDAAACLNLLYADIENQTYAPERIREAVLAGVTAWLDAGVVVIQAREGITEREFGRFRRRGIPSLTVQGLRQQGFRGRSDSKSGATPRRKASTVSKPSHFSGEVV

SEQ ID NO: 48561 - protein, 252 aa, unknown
  TnpB Polypeptide
MHSTTPQEVIAVHGKSRRQFKSNKLRWCISGGKYLSLGWAPFKSYAARWVNGQVRFAGHFFRVWDSYGLSRYTSRAGNFSEDTRDCWYFNIVVEAPVKPVTGTNAIGIDLGLKETATCTDELRLECKSRFREIESQLGMPQRMKKRNRVKVLHASINNRRKDYNHKFSTKLIRENSAIFTGNESSAKLAQVHFKCRLASALVFFPELTKIAISFCCPEVNFGRRPPILPSRLAVSKPVFVAFPQHFPLKLSK

SEQ ID NO: 48562 - protein, 425 aa, unknown
  TnpB Polypeptide
MRLMKRRSYKYRIYPNKTQIQLLNRFFGSKRFVWNSCLVWRSNIYKEYSESVTGIDFSRELTELKKLESYSWLKDTPTTVYSQALRDQDTAFRKFFKEGAGYPRFKSRHQLQFIRFQLDQRVIVKYYKAGELLKIPGLGQIKVRWTRVPEGLPKMVTVSKDSAGRYFVSMAVEEDIQSLSAVGKTVGIDLGINQVMTLSDGAQFDNPRHLLKKKVQLKGLQQRLARQQKGSNRRLKTKFRIAKLHTRIADERHAYIHQITRRMINDNQVIMIEDLNVSGLSRSSKGTLDNPGKKVKQKSGLNRSILDVSFGEITRQLDYKSDWYGRTLIKVDRFFPSSKLCSTPGCDYKAEKLTLKIRTWTCPQCGVVHDRDINAAKNIEIEGLTQLAPVGTKGPQLRDAGGEGVYPMAVSPRSLDQPNACLEQV

SEQ ID NO: 48563 - protein, 314 aa, Catellatospora sp.
VIVYQAYRFALDPNATQMAALASHAGASRKAFNWALGLVKAQLDQRAAEKTYGLTDDLLTPITDHARHGPVVGVDVGIKHLAVLSTGDVIDNPRHLAGGAKHLRRLSRRVSPDRRTGREASKRWQKANADRSRAYARVANLRRDGLHKLTTALAADYATIVVEGLNVAGMVRNRRLAKAVSDCGFATIRAMLGYKTTWNGGRLVTAGRWCPSSKTCSDCGEVKTKLPLRVRTFVCDACAMVLDRDLNAARNLARLVEREAGTGVARDPEPRGFNGRGADRRTPLAGQVAVKRPPRPGTVGRQRPTADRELTFAH

SEQ ID NO: 48564 - protein, 386 aa, Catellatospora sp.
VPAGVRGGRGRPRPWPERVHGIAQRRPWGSPGWVPQVQVQKRAPLSFRIRCRTSDKGRANIRVGDHSPRTVTLPGLGTLTVRADTRRLRRMLAKGRAKIVSATVGHRGGRWTVSLTCEAADLHDAVRHQLDASGTGWVGVDRGPAAFVVAGQADGTEVARVDDWPRPSRAGMARQRRLARAVTRKQRGSRNRAAARLGRHHARVAAIRRRFLHRVSNELVKTHDRLAIETLTITGMLTDRRLAAAVADAAWGELGRQLSYKQQWRGGDLTPVDRWYPSTKTRAPCRTVAPAMPLKQRTFVCGACGYQADRDLNAAVNLAIWAEQHHAQIRDLHAGGPVTNARRGEGSGPRTRAGETSPDDAGTAPTPPRARRGRPRGALSHNSTEL

SEQ ID NO: 48565 - protein, 414 aa, unknown
  TnpB Polypeptide
MLKALKIRLYPNKTQATQFNKLLGCYRFVYNKCLDKKIKSYKEDKTSESLTTLGHYFHGELTKYEEYSWLNEQNTKVLKQSIRDMLDAYSHFFKEHKGFPKFKSKHDDKLSCRFPLEAISKRNDYSTYKLSLANIHDIHFRCSDEYVKYLVKNKEGIRSATLSKTCTGEFYLSILVDGDFRKKLKYTEDSVGIDLGIKDFIVTSEGECFENLHFKKSESNKLKRLQRQLSKKQKGSNNRNKARIKLAKENEKIRNRKLNYLHDITNQLLDENQIIAMEDLNVKGMLKNHKLAESISEMNFGEFRRMLEYKCLWYGRDLVFVDRFYPSSKTCNHCGYINKNLKLSDRQWICPECGSLIERDYNAALNIKEEGIRIIGSRTPEYTLVENPPMDDKVEIPLKSSDSLKQEVEIHNFL

SEQ ID NO: 48566 - protein, 283 aa, unknown
  TnpB Polypeptide
VFVKAVRVKLRTNNTTAAALADTMSRFNAACNAYHQTRTEFGLPSQLTVRAIAKVCDTYKTDRSQCHTFGPRGAVVFDARCFKMQGVSSASLTTTQGRHSFSLAHGGKQREQLSQGTTGEADLLFADGNYYLSIAVKFPDPPKADTSGGILGVDMGIVELATDSEGQSFSGEALTNIRDRASGFNKTMRWQMGNWAFADLAAKVVYKAGEVGLPVVFVDPRNTSRTCSVCGHCDKANRKRQASFQCLSCGFCANADKNASKNIEARAELSERLMFRSNPALLA

SEQ ID NO: 48567 - protein, 503 aa, Streptomyces sp.
VLVGCGEGIFEAGGCRVGGKFRSRPGCVMQAYKFALDPNAGQEQALRSHCGAARAAFNWAVSWVTASWWQRKAEASYGIVEEELTPWRPWSLPLLRKEFNRVKTTDPRFAGWWQENSKEAYNTGLANAASAFDNYAKSKQGKRKGARVGVPRRKPKRKARPACRFTTGTIRVERDGRHVTLPRLGTIRTHEPTAKLLVRIQAGTARILSVTVRHERGHWFVSLQVETAREITRVDRPDTAVGIDLGVKHLAVLADSSGEIRYEPNPKYLDGALKLLRVHSRRASRRQGPDRRTGQKPSKRWEKANAERNKIHHRVANLRTDALHKLTTRVRAEYGTVVVEDLNVAGMLRNQRLARRVADAGFGEIRRQLTYKGRRNACPTIVANRWYPSSKTCSNCGAVKAKLPLHVRVFTCDACGLVLDRDENAARNLVALAAACTTGTGVAGDQDTPRVSKPRGADRKTRRQRPDRNTGRGGRAGGASLPHQRRKETGDRRQDTEAPPALR

SEQ ID NO: 48568 - protein, 385 aa, Thermofilum sp.
VLDASRGVLRVPSVNIAIMLRPSLVRAVMEDVERFGNVKLTLQLTAKGRLRLVAHRAVKQAWWNGNDRLAVIALDVNSNHGLYLLAFTFDSKARLLAQRVFKPPNTTLLRLLAALMRSYSKVKSWSEAIQRFKQRRDVRGMQREGRGSAVEEALRLAEKLRARLNLTPERAERIARQASRKVKKLNDDWIRGVLKEMRGLVRKLRDQGYTVVFVADVPRAESLKGSGLQRTLLKVAKRLENLALYEGARWFEPENNVSGRQCPRCGTWGVEVRRRYYRCSKCGLVYGRDWTAAFNAAKLFLRACRAEKHIEALHSWLQSHKTALTPAGPGPSSPGSPSRGGPGVPRAVRGGDVPASPRAEGRPAGAAPARGPMTLAGPQKGEGGR

SEQ ID NO: 48569 - protein, 472 aa, Thermofilum sp.
MSGESKRNGNREGKNNKGLVDSYRVWRVKTSREERLRLQRLYVRLSSAVRQACRVLEERYGDAFRGEPEKFGNELVEEASRISGLPKNILNYAAEWCRVVREARRESKKRVRFTPPPVPLSVKIIEGSRRLHGKGGAATVLDASKKELRIPSAGIVIKMKPSSIRAVLEDVQRFRDVKLTLQLTARGRLRLAAHRETKPAWWSGNTKLAIVAVDVNSNHGLYLMAFTFDSEVRLMAQRVFKPPNTTMLRLLAAVMRSYSKVKSWGEAVERFRERRDVEELQRGGRGSAVEGALRLAERLRARLNLTPERAERVARQASRKMKRVNEDWIRSTLKEVRSLIRKLRDQGYTVVLVADVPRAESLKGSGLQRTLLRVAERLENLATYEGARWFDPENNVSGKRCPVCGSHGVELGKRYYRCPRCNVTYGRDWAACANAAKLFLKACDAEKQLEALSSWLRTSKALVHGAPRNIAK

SEQ ID NO: 48570 - protein, 535 aa, Thermofilum sp.
VGLKRRKGPGPQQLPGGGSVSWEGRGKSEKLVDAYRVWEVKTNREKRQRLQRLYVRLSSAVKQACKELRKGHGDAFRREPERFSEELAGEASKIAGLPKGLFWYAIEWRGMVAEARRKSKRRSGFTPPPVPLLVKVVGNGETLHGATNALAVLDTSRNELRVPSASIAIRLKPSLTRAVLEDVDRFSDIKLTLQLTAKGRLRLVAHRKVKQVRWGGDVKLAIVAVDMNSSHGLYLMAFAFDSEAKLVSQRVFKPPNTALLRLLAALMTSYSKVKCWDEAVKRFKEERGFEELRRAGYAVKEALRIAERLRAKLNLTPERAERIARQALRKVKKVNEDWVRATLKELRTLVRKLRDQGYTVVFVADVPRAESLRGSQLQRTLLRVAERLENMAWYEGAKWFEPENNVSGRRCPICGREGVEVQRRYYRCPKCNVAYGRDWTATFNASKLYLKACRAEKHLEALQSWLQSHKTALTPAGPGPSSPGSPSRGGPGVPRAARGGDVPAATRAEGRLARRPPRKGRPMTLGGPRISEGGR

SEQ ID NO: 48571 - protein, 177 aa, Thermofilum sp.
IKELQRAAAKSKSPGAWATSRCAIKKAYRRRRAALLSAVAEVAKELRGKNAIVFIDVPFDESLRNSGLQRTLRSFARRLENALGFHGIPVIERTLPSKRCPLCGGKLEEVRKRGRTRVMKCRECGVEFERDSVPALHVLKLFIEEAEVEELAERLAKRSASMLLLFGQTRARYMSVK

SEQ ID NO: 48572 - protein, 463 aa, Shigella sp.
  misc_feature (106)..(106): Xaa can be any naturally occurring amino acid
MKISRLGEAPDYRFSLANERTFLAWIRTALGFLAAGVGLDQLAPDFATPVIRELLALLLCLFSGGLAMYGYLRWLRNEKAMRLKEDLPYTNSLLIISLILMVVAVXGNKYIPYGKMASWLVEWKNATETQWLKDAPSQPLQQSLKDLERAYKNFFQNRAAFPRFKKRGQNDVFRYPQGVKLDQENSRIFLPKLGWMRYRNSRQVTGVVKNVTVSQSCGKWYISIQTESEVSTPVHPSASMVGLDAGVAKLATLSDGTVFEPVNSFQKNQKKLARLQRQLSRKVKFSNNWQKQKRKIQRLHSCIANIRRDYLHKVTTAVSKNHAMIVIEDLKVSNMSKSAAGTVSQPGRNVRAKSGLNRSILDQGWYEMHRQLEYKQLWRGGQVLAVPPAYTSQRCAYCGHTAKENRLSQSKFRCQVCGYTANADVNGARNILAAGHAVLACGEMVQSGRPLKQEPTEMIQATA

SEQ ID NO: 48573 - protein, 524 aa, Sutterella sp.
MTSPSFILELPIKVNDSESRMILRKFEFARQLHNATLGTALGQLQQMRQDPQWKKACTLPKGKERSELFRNLDRQYRLTEYDLHTVIAKHRERSGRKDQLGINETQKIATRVYQSIRRYQLGLGGRPRFKSISRGLHSIEGKTNVTGLKFNLQKSVLSWCKHDYRVIIDAKDDYIQRALQKEDGTGYKKIKYCRLVRKTIKNRERFFLQVLLEGTAPVKHIYAPDSERLSIDPGPQAIAVFSEQFAGKIQIAPTAKVNEAVIRRMQRSMDRSLRQNNEEAYESNGTLKKGVKLKQTKSYKMRVAQLSDYHRRVAATRRCEHGQLANLLLSLAGDIRIEKNHWKAFQRGHFGKSLGKSGASSFIERLKSKAESAGLKVSEVKPYTLKLSQYDPYTETYRKKALSERWHQLGSSSEWIQRDVLSALLLQCADIEKEKHIPTKIIETLEGAKQLLRDAGYIVDKPSSNGDHCDRPFASEPKAQTPEEVRLEIFCGVGDSRLPLLLRNGSRQKANEKAHVRSKETFSL

SEQ ID NO: 48574 - protein, 427 aa, Acrocarpospora sp.
MVMSGQGTVKRQRGHKARLELTRDQSALLDEQASAAITIWNCLHAYWTHFPGRRPTLAQADQAIRQARTDVPFLAALPAQAAQAVLKTYRQAWENFFNPDHPAKRPTFKSKKNRPRLAVDVPQVRNMRILRLSAKWGQVTLPMVGRVRFRWTKDLPGVGKNSPAGKVTGARMVKDAFGWSIVFRTETLVAPASAHQGPRVGIDRGITVALALSDGTMREHGSWLSDGEREHLRRLEKKSARQRTSRPKKTRPSGRERRTYDQIARLRAKAKRRAVDWQHQTTTELAGTFAVIKVEELSILNMVKSAKGTIEAPGRNVAQKAGLNRSISGQAWGRTVTLLEYKTTDRGGQVIKVPAPGTSQTCHRCDHRDPASRNGTVFACVNPACGWVGHADTNAAININNADGSAVSGRGDLGVTRSVKRQPSRAA

SEQ ID NO: 48575 - protein, 443 aa, Lyngbya sp.
MYGCQQVLLKPDKELSAILEFLCRQAHSLTNMGIYYARQLYLKAKRYVGKYDLEKLYKNNLHYKVFHSQAAQQILRSVYESFVSYKKLVKAYREGGLENKPRLPKYRKFGGLALVSYPGQALKLRDGQIRIPLGKQVKCWFGLDSFYLPMPSNMNLANVKELRILPRNKCFYAEFVYKKEIQASEVDKQNVLGIDPGLNNWLTCVSNVGISFIIDGKHIKSMNRWYNKQVSTIKEGKSPGFWNNKLAFITEKRNRQVRDGINKAARLVINYCLKNQIGTIVFGWNKGHKKEIEIGQKNNSEFVPIPTARLKDRIEQLCLECGIQFIETEESYTSKASFLDGDYLPKYGEKPEDWKPSGKRTKRGLYRVCSKWWYINADCNGAANILRKVSRMLGLDLSRLSRGVLTRPHRIKLWSANKIKTWKDSASASPETTLLESPSEALL

SEQ ID NO: 48576 - protein, 498 aa, unknown
  TnpB Polypeptide
MGGMKASGKQVRCRYSVKRCVEAQRKMKDAEKNEVIAKAYRYRAYPTPEQQKMSLGQLELCRRIYNCSIQERKEHYKATGKGLNYQDQQDRLPEYKEEHPEYKAVHSQVLQDVLRRVDRAYVNFFEGRARYPKFKKYGGYRSVTYPQITQENIGRNSILLPKIGRVRIVKHRPLKGKPKTLTFVHSKSGEWFVAVTAEQKSRRCLGEPKLSFRSPAGADSGLIKYVYLSDGSSVDNPRFIAKHQKRIIKAQRKLSRKKRKVKKTVLVNEAFKVVERPSDNWLKARQVLAKRWRDYVNAKEDWQWKLAGTLVEKYDFIGYEDLPIGNMLKNHNLARSIQDAAWGGFWSKVESKAVTAASTVTQKVPAQYTTQECSKCHFRHKVALSERTFQCPSCGHIDDRDHNASDTVLQKALKVYYEKIGMDMPESTPVEIEPLPPNAKMMEASSISESGNKFSMRRQNPEFASADGDGKTTHREAHTLQRWEDVTKRLSGASPFFG

SEQ ID NO: 48577 - protein, 515 aa, Cyanobacteria sp.
LAKSKTSTFVTELPLIVDSLQEKQLLSRFQAARQLYNACLNEAMARMNLVRNSKAYQLAKQIDRQSKKARSDAFNAARRAYRYSDYDIQAYATIVSNRSKWIAQLIDSNTQQTLATRAFRSSLIVLFNRAKNVRYKVPSRFKSIEGKTVKQGVRWKDNQLVWGFLKLLPIIDKNNPVIQHGLNSPVKYVRLLWRELNGKRRWYVQLVNEGMPYQKEKNYVADGVIGLDLNISNIAALGDNKAGLLPFADKVPTYERDIKALQRQLQRSQRCSNPENYEPDFSSRLGRKSVVKKGKSKKGKRQWKKSKTYSSIARKKRELERRKSAYAKSQNRRIVNEILRHGKHIKTENVSVRSWQKRYGKAISAKSPGFVQSELARKAERAGGSFIKFYTQKTALSQTHLTGERIKKKLSERVHFEQTGFVMHRDLFSAYLGRFVNEEGVLLLYLAVEQWERSEPILHEAWKDFQINRERLGESESRQSHSPSERFSAELGNVDQIAIFERKVNSNSWPDSSSL

SEQ ID NO: 48578 - protein, 419 aa, unknown
  TnpB Polypeptide
MSTTVTKTLQATFAPPTAHKQSKLTDLLETYRDGLQAAFDAGASTMSAVSDIVTPYDLPYQAKAALCNYVPQLHKTYNAKELDDDHPIRLTNQAAEFDHSDDRDYEFTWWVPQPGRGTNFWIPLRINPEQEALWHDLVSEDAKAGEIRLQKHRQNWVLHVTVEYPVEELTTDGDATYVGLDIGETALITGCALKGGSPTNPFVCSGSRAKQLRKEMHTTLKRLQERDAAEWRIDERFDHYQNALTDIVEKASRQAVEYARQYEHPVLVMEDLTYIRESLDYGEYMNRRLHSWAFARLRGRIEDKATEAGIPVEYVNPEYTSRTCHSCYRLGRRDSQAEFQCLHEDCHVSTFQADINAAANIARRVDPWGESVPLDKAGHNDSPRDGSGCDTATTHREKSETPSQMTLTEYDESKPSASD

SEQ ID NO: 48579 - protein, 390 aa, unknown
  TnpB Polypeptide
MKSYKFRIYPNKNQETALIFTLNTCRHLYNDALAQRKHQAELNRLYDYFQVFPWGTPDWINYYDQEAELVRNKTKYQKRAYSQVLQNVLRRVERSFKNFFNGAGYPRFQGRNRYDSFTFPQSGFKITDDGKLKLSKIGEIRIFQHREIEGKIKTCTIKRDVDSWYVSFSVEMYAQQPLEPTGQIVGVDVGLKSLVTLSNGNQIEPPKYFRQSEKKLAKAQKGLSRKKKGSSNRNKQRTEVARIHRHIRNQRKDFAHKVSRGLVDAYDVIVFEKLQIKNMIKNHHLSKSIMDAGWYQLIEYTKYKAEYAGKIVKRVDPKRTSMECSVCGYIQKMPLSQRTYDCPVCGLELDRDHNAAINILHKSVPTDSGDFKPVGDGLLGLSMKQEALLL

SEQ ID NO: 48580 - protein, 416 aa, Halomicrobium sp.
MAIEVTRTYIGSIQNHRQVCNGLDSLGESASKIWNVARWTVDRIWDATGTIPDEGPLKSYMKNQSCWKDLNAQSSQKVIEELSDAFQSWFDLRQNDPAANPPGYRKHGDTRPRSTVTFKADGFKHDPENNRVRLSKGSNLKESWSDFILCEYQTRPGVDLAGVNKVQNVRAVWTGDEWELHFVCNVELETTDSADDEVAGIDLGITNIATVAFPDEYVLYPGNSLKQDEHYFTRAEYATEGENGPSAKSMWARGKLADRETHFYHTLTDTITTECVERSVGTLVVSWPEDVRESNWGKTGNKKLHSWAFDRIYQYLEYKGEMRGVEVLKENEWNTSKTCSRCSDDTKSNRVERGLYVCSSCELVANADCNGAENMRQKITPSPHGEDRSNGCVAQPSVHLFDRESGTFKTREQVVS

SEQ ID NO: 48581 - protein, 406 aa, unknown
  TnpB Polypeptide
MAELTLTMRARLLPTPEQQTRLAALCSTFADCCNDVADHIDKTRTLSQKKINKAIYHQLREAHGLLAQMTQSAIRRVIANYKAIHTRINNLREENKNGETRGGKKRKIPEYYGIKPQYAPNGCDLLWNRDYSYSQRTEMFSLPVMDGRIKVKAEWKNVPDQYRLGRFGTARLIRSRDKWYLLIPVTIQTPDVTEHPKTIVGVDLGIRFLATSYDGEHTTFHDGKEVKHRRGRYKTLRKELQQRGTRSARKRLKAIGSRENRWMTDVNHQVSKALVNQYGRDTLFALEDLEGIRNATERVRMRQRYVQVSWAFSQLRSFIGYKAARNGQATVAVDPAYTSQTCPRCGHVSAGNRDKRNHIFICRNCGYRSNDDRIGAMNLRHKGYDLIVMQYDANMIDVAGVQPTIP

SEQ ID NO: 48582 - protein, 420 aa, unknown
  TnpB Polypeptide
MTLDEVGIAERNKRIGESRKVTKLRRKHQVCRAFTCKIDYWKLKAEQREALSQLFLDAKRLYNDCVTSEDVFSYTPARVVNVRMKDGSFRQRELARIGVQTMQGVIQQAKDNIRGLSKLKEKGYKVGGLKPVKCFNSIPLKQPGRTYRLNGNYIHVERIPGVMHLTGVKQLKGWEIGPAKLLRKASGYYVAFSCFKDKMEYDEGKTYNPPPAIPIGGVDAGLKDEITESDGTKTTRRYPDTTKLRYWQRRMSKRDRNTNNWREANRQYRKEQDRLKAQRKHAAIEEARRLTGKYATLVIQDEQIHSWNKREGYARGGRKIHAGILGRLYATLKQRPNVIVLDKWQPTTSWCRYCGRRTPCPVSQRTFTCMYCGAQEDRDQHAALNMPVLQEQPLTHVDLRKPRDIPIGPYLGNARTRNAR

SEQ ID NO: 48583 - protein, 416 aa, unknown
  TnpB Polypeptide
MQRTFKTRLRVNNKTEPLLRQWAGVSRLAYNVCLDMWDTEYRNGGKPNRYGIRKRFNSIKGEKYPFVTEVSKWVYDYATRDLERAFRNFFAGRAGHPRFHKRGVNDSFTVNGGVVKIDGKWLTLPKGLRLRMCESFRYRDSATKICEATVTRRADMWLVSISCEVPDSTGESQADGVVGIDMGIKSLATCSDGLVIPNPRTLIDRERRKRHLQRALSRKQRGSRNREKAKRRLARYEYHTACKRLDWIHKATRTIADRNRVCFVEGLNVSGMLKNHRLARRLLDCGFRMFRSILSYKTDVRCIDRWYPSSQLCSNCGQRRPMPLSERVYRCDSCGLVMDRDMNAALNILNVGMANYPELMPVEGGTSRTPSSVAAQGRSMKQESTIRPTRKSRSEQEWKGRMNDEGCVRWSERRYP

SEQ ID NO: 48584 - protein, 380 aa, Escherichia sp.
  misc_feature (224)..(224): Xaa can be any naturally occurring amino acid
VKRLQAFKFQLRPLERAYKNFFRKRAAFPRFKKRGQNDAFRYPQGVKLDQENSRIFLPKLGWMRYRNSRQVTGVVKNVTASQSCGKWYISIQTENEVSTPVHPSALMVGLDAGVAKLATLSDGTVFGPVNSFQKNQKTLARLQRQLSRKVKFSNNWQKQKRKIQRLHSCIANICRDYLHKVTTTVSKNHAMIVIEDLKVSNMSKSAAGTVSQPGRNVRAKSGLXRDYLHKVTTTVSKNHAMIVIEDLKVSNMSKSAAGTVSQPGRNVRAKSGLNRSILDQGWYEMRRQLEYKQLWRGGQVLAVPPAYTSQRCACCGHTAKENRLSQSKFRCQACGYTANADVNGARNILAAGHAVLACGEMVQSGRPLKQEPTEMIQATA

SEQ ID NO: 48585 - protein, 421 aa, unknown
  TnpB Polypeptide
MPAGGEGVLTLSIGMRVSPEPAGIELLRRYNVALNYAINKILRLDLRSIGSVHNALYRELREWFGLPSRTAIDCYRDALANANAWRNNPRRGRKPRVRKLSMLLHPGSGYRIEDGYVEIIGGIKLRIIGWDRRYDGYENGEARLVYRGGKMMLWISKKIPRPEPYQPRDVIAIDINEGKIVYGDDRINKERDTEIDEAHRWKLLAESLQKRYSSPRYPAWRRRKAILNRIRSYHRKARNILEDWARKTSLRIVGLAKRLEYAVAREDLTGLINSLRKIKNKDHRTKLIIMGYKRLGKWIDWNAKKQGVPLAIINPNGTSSKCPKCDSKGLVEIGYRRLRCPRCKFEADRDVIGKLNIRKRALKKLRINPPGGVLAPLTAPQMTDVNPNRWGEPMNRPQRGGGTPALSRRGGGQLYLLCRGT

SEQ ID NO: 48586 - protein, 333 aa, unknown
  TnpB Polypeptide
LRIRYVGRIRWEGRQGRLEIIYVNGRWFALVPIEVGVEPPKSNKRGYVKPNYKDKKSRIVNPRSIRQKDPIVDREAFIDMGFNNLFAVTISDGSAMLIKGGTIKSEYYWWKREIAKYQSIRDVLRRLGVLTWIYYHEKYLDAMYKRDERLRHLYITAIRFLADDLYRRGVRKLYIGYPIMLSQNNGNEYNTNIWWYRKIVLWIVDIFMEYGIEVEIFPEDYTSGECSICGNKHKNGRKHRGLYECKKTGKKINADINATLNIARRLGYRVRVSRKIESYLVTHSGVKPLIPLQGANTRDPSIETPPLKGGGGVISNLMKPEPLVKYINHLSLD

SEQ ID NO: 48587 - protein, 326 aa, unknown
  TnpB Polypeptide
VIRSITLIYSDSQDWRLREGAIEVRTHRGWIRIGYRNNKHLHRYLYNNWKPSSELRLKLTDGKILVYLTLTKEFEVSYNPDNSVAVDINENNVTLAVFIDRRLHEIYRIETNIGRIVIAYSERRKRIAENRSTRDRVARKALRKLREGERKEDIIYKTAGIIEEIAKRYNAVLVVGNAHRGKSRMASNARKRLRHRIHQWCVSKLVEILNNKPLHVVEESEAYPPSRDPSSGKPIKRYTPSVTRIALRGGRRVKVIKIQLRQARLSNGLAMDRDVIGAINIGLKYLSSDGSPVAFPSTGTHEARAKLVVPSLGATPLTELKIFTSI

SEQ ID NO: 48588 - protein, 352 aa, unknown
  TnpB Polypeptide
MKFTKTLKVRVRDKHANLLNQMARQVNFVWNYINDLSHRSIKERRVFFSEYDLHPYTKGAGKELGLHSQTLQVIAGEYVTRRKQFKKSKLNWRKSGGSRRSLGWVPINTGAASWKNGQIYHNGHYFKVWDSYGLANYRFRSASFSEDSRGRWYFNVVVDVQAKPSMGQDQIGIDLGLKTTATCSDGSLLENGRFYRDLEPALAVAQRAGKKARVRAIHAKMANRRKDALHKFSRALVERCSLISVGDVSPQKLVKTTMAKSVLDAGWGQLKTMLAYKCDHAGVVFMEVNESYTTQTCSCCGSLPDSRPRGIAGLGIREWTCDCGAVHDRDVNAARNILAVGLDRLAGEKVAA

SEQ ID NO: 48589 - protein, 454 aa, unknown
  TnpB Polypeptide
LIQQKLKFEVNEFNGFEFYKRDTKNHKKGDLKRVIIKKKQTLLSNCLTYLARYGNEGIIDYIKDNLDNCDDKKREFYNNILRCCGKFGFERLYKLALAKRKRIIKQYVNKPIKFKSLSFGGKSRKKYIVDFNKRFGSVINSFISLSGFDRKSFDIPIKYHKAYHGNMRDYRKVFNNYEYVITFDEKTHQVKVNLCKDGERYIPEPNGKTIGIDVNCKHNLFSLSNETTYDYDRKLVNDYCKLLRNIDVLKSKDNGYIIGKRKQQKLNKLKEKVIKFEQQTISTMCKDLKSNGFGHIVMEDLDNSFGKCYVSDKDNENINYNRKVKFLGLSSLKGEVEHIARKYDIAVSTVHSSYTSKMCPMCGCIDDGNRLNQENFKCVECGHKDNADFNAAKNIRNRVLVTVLREKLLKQLDNGAYEPRNVNRAKVKDVLLTFRRNLQEFARSECIEGGVTTF

SEQ ID NO: 48590 - protein, 194 aa, Ruminococcaceae sp.
MNKAYKFRIYPNAEQSIIFAKTFGSCRFVFNRYLGKRIEIYKTDGKTMNYYECAKDLTGLKKEAEYDWLKEVDSIALQASLENLDTAYQNFFRRVKHGETLGFPKFKSKRNNQLSYTTKTVNSNIKIKDNHITLPKVGAVKIKLHRSVPENYILKSVTVSKTPSGKYYASILFEYEKVIIPVEMRNPLGFTICI

SEQ ID NO: 48591 - protein, 377 aa, unknown
  TnpB Polypeptide
MVNINQIDCAKEKLSGYKIREKFSELRNKEGKFQWLTQQHIPIKAINETFNIFDRAYRKGCYHIAKNKDGAPIKMANGKIWYVLHSHPKRKDTSLNVPRYGYPEASGRVYFKDSKHVCLSKLPNMKCSWTYDDVLPTGTNSAKLIKNPHVIFDHGFWYLCFAMEVEIEPIPLNNFKVGVDVGLKQLAVISYDTSTKHKAFDNVNKSARIKRRERRKKHLQRKLSRSKLKNGERKDCETGGMRKKRDSINKIEKKLTNIRDDHIHKVTREIVDLRPKEIILENLRIKNMLKNKHLTPAIQAVKWWFFRYCLTYKAQALGIIVTLADTFFPSSKMCCCCGHVNRSLKLSDRVFECPLCHIRIDRDLNAARNLEQYSSSS

SEQ ID NO: 48592 - protein, 398 aa, unknown
  TnpB Polypeptide
MRVLATVKVKVVAPDPNSQYKLIQFLKAFRDWTQYVIDRIWLDERIPSIKELHYRFYRPLREQGFRAHHCHKIERRAREVIKATKKNSGSKPVLKKLTARLDKWDYKLYLNSKVLRVAVLSNEWVELKLKWYSYLDKYFNGEWRLKEILVSYRDGEIWVYFTFEKEVIMKKPKTVMGIDINFNNITYTVVDINGNLVSMSIIPFNGLKRALGHRIIAEKTQRKYPRKWRYVRRIREAIRKHGRRARNILTDSCHYISRRSVEIAKEYKALIVLEDLSKLRTRANGSKKFNKKLSLWTYHRIQTYIHYKALIEGIPTVYVNPRNTSKSSPIGGELEFINYRWVKLPNAYIVTRDIVASWNLALRGLNSLTRDVGLCGYVEAPKAPEGDEFPNPMKGKLV

SEQ ID NO: 48593 - protein, 320 aa, unknown
  TnpB Polypeptide
LPAAVECDEPVDTRFRQGESSYFRKARYEKNRPRFASRNDNIQSFRNCAPIRHMEGNRYLLSRKLGSVRIRKRDRLRYPIENLSSWTVKRENQTYYLTLLFDVDIQPMPKAEGRVGIDLGVKDLITLSTGEKIGYGDRLKKLETDVIRQQRMLSHRMKGSNRYRKQRLRLEHAYVRLRHYRENMRHQLSHRLIEENQLVGLETLAVRNMVRKVKPKKSPDGRYMRNGQNCKRTLNRLIHRASWSGFVSKLVYKAEWYGRTLIQVGRFYPSSKLCHECGWKYKELKLSEREWTCRNCGTRHDRDVNAALNILAEAERLAAS

SEQ ID NO: 48594 - protein, 407 aa, Streptomyces sp.
MQLRYTFRMYPNAVQRAALAKAFGCARVVFNDAVRAREDARRAEQPYPTAGALSRKLITEAKRTVERSWLREVSAVVLQQALRDADTAYRNFFASIRGVRKGRKVGAPRFKSRKDARQSIRFTANARWNITDSGRLCLPKVGAVKVKWSRTLPSTPSSVTVVKDAADRYFCSFVVGTDPSADAVRMPAGDSAVGIDLGLNHFAVLSDGTKIASPRFLRRAEKKLRKAQRELSRKRKGSRNREKARLKVARAHAKVADARHEFHHRLSTRLISENQGIAVEDLSVAGLARTRLAKSIHDAGWSSFVGMLEYKAKRYGRAFVRIGRFEPTSQTCHVCGALDGPKPLHVREWTCQICGTLHDRDVNAAINVKTAAGLAVSARGAQVRPGAVPAQREEAGSHGFPAGVRAA

SEQ ID NO: 48595 - protein, 426 aa, Tepidimonas sp.
MHRFSSSMTSRAKSKPRREPINQSSGTRHFARTSGTARFAYNWALAEWQRQYEAWKADNSLPKPSQAALRRQLNAIKRERFPWMLEVTKCAPQMAIIQLGQAFQNFFAGRAKYPKFRKKGVHDRFTLTNDQFSVEGCRIRIPNLGWVRMRESLRFAGKIMSATISRVADRWFVSIVVDTEDPPKRRPENEPRDKSHVPGEYQGAVGVDLGVSALATLSTAEVIPGPKPHKALLSRLRRLSRSLSRKQKGSRNRQKAKAKLARLHARIAHIRLDALHKLTTALARRFHTIGIEDLSVRGMLANRHLARSIADMGFFEFRRQLEYKAAMRGGQVAVADRFYASSKTCSACGEKLYDLPLSVREWTCPSCGVVHDRDVNAAVNLKNMAVSSLVAACGEEGDGSGRKTGVKPASMKQEVSSGLAQQSLFV

SEQ ID NO: 48596 - protein, 431 aa, Bacillus sp.
  misc_feature (332)..(424): Xaa can be any naturally occurring amino acid
MNDIQRLAYQKKLEKEKLKPKEEQKEIKCNLFSEPNFEKPYVDYNFLDALFKAMIQNDYRAMPTQCSQSIMKGLFQNWKSFFASLKDYKKNPNKYAGMPRIPKYIRSSEKEILYTNQDCIIKNGRFLKFPKTKLQLNIGKLGFTEGKLKQARVIPKYNEYVVELVIDVPSEQQIIEENARYMSIDLGIDNLATIVTNTGMKPVLVKGKHVKSINQYYNKMKSHFTSILRNGKQTNEGPFTSKRIEKLHQKRYLKIKDVFHKVSHHIVKLAQEEEVCKIVIGQNKSWKQETNMGKRNSQSFCHIPHNLLIQMITYKANAVGIQVVVTEESYTXXXXXXXXXXXXXXXXXXXXXXXXXXXXXXXXXXXXXXXXXXXXXXXXXXXXXXXXXXXXXXXXXXXXXXXXXXXXXXXXXXXXXXXXXXXXXLSGGVFI

SEQ ID NO: 48597 - protein, 284 aa, unknown
  TnpB Polypeptide
VVGMIVAKKIRLLPTKEQEILFFKSAGTARWAYNFFLEQTEKYYNENKKPLKEGDVRKLITALKKDSHKWLGEVSANVPKQAVKDGDTARHNWLTGKCGKPEYKSRHKSKLSFYVNYESLTKTDIGFQGEKIGEIKTVEPLPKIKRGKKYSNPRISYDGKNWFLSVGYEIKQKKVPLTNVSLGIDLGIKDLAICSDGAVYKNINKTKEVRRLKKKLRREQRKLSRKLLANTESYTSKRKPIYKTALKDMKNIQKQNKKIRSIYKKLTDIRNNYRGIWMNRGRDR

SEQ ID NO: 48598 - protein, 432 aa, unknown
  TnpB Polypeptide
MYGCQQNLITPNNDLKAILEFICSVAHKLTNCGIYYSRQLYLKTRKFVGKFDLINEYKTNGHYQALYSQAAQQTLISVAESFKSFQELDKKFKRGELTDKPRLPKYRKKGGLALIAYPSQALKLVDGNIRVPLGNTVKRWFGVDSFTLPMPSNLEFKDIKELRILPRNQCFYAEFVIKQPSAPHYDIDPLNALAIDPGINNWLSCLSNIGTSFLVDGLKLKSLNQFYNKQVSTLKEGKPQGYWDQQLAHITEKRNRQMRDAVNKAAKLVINHCLNHRIGTIVFGWNTGQRQEANLGKTTQTFVQIPTAKLKCRIEQLCEYYGIRFVETEESYTSKASFLDNDFLPTYGEKPTQWKPSGKRVHRGMYRTGSGKFINADLNGAANILRKVEVQLGLNLAKACRAFLTVPPRLLIWNTKAVKRTGVALAHLLASA

SEQ ID NO: 48599 - protein, 443 aa, unknown
  TnpB Polypeptide
VADDYVRRTAITRLQLTGEQRDLLEETISEWKHGCQIATDMAWGKCSAKSDVQPLAYDDVRDQTDLGSQHTVLATHQAAQAITGCIERRSKGKRVSKPTFTAPTVKYDTRTMTLFDDDTVSLSTTENRVRCELALPDADDGYQRQYLGSDEWSVTESTLTTREGDYFLHIGFRRPRNDTERNTAEDGTVLGVDLGIENLAVTSTAYFFSGRELTHNLREFEKVRAGLQQTGTRSAHRTLEQSSGRELRYIRDVLHRASNAIITEAIRYECDLIAFEDLTHIRDRTDASWGHKWAFRTLYGQVEYKAEVVGVSVKQVGPAYTSTRCAECGFTAEENRRSRNDFHCKKCDSEANADYNAVAGLRPAGSKVASRLCDGEEYRDAVRPSRPTVVSADGQQSTCPEVRNGDAERRIYRPLGRVRGRVHGQAPRYPSEPIRVIEVGWGS

SEQ ID NO: 48600 - protein, 393 aa, unknown
  TnpB Polypeptide
VKVNHRFRFYPTASQEHALAKLFGCVRWAYNRALEYRSRTFKETGKGPSYGECSAAFFQWKRAPEHAFLREVSCVPLQQSLRHLEQAYANFFAGRARYPHFRSKRDKQSAEFTRSAFNWDQQNRNLSLAKIGRLRIRWSRVIKTAPSTVTITKDSAGRYFVTLTIDESRASLPGNQAAVGIDLGLKTLAVLSSGEKIEPLKPLNKALRKLRRAGRILSRRKNGSGRRARQRLKVARLHARIADTRKDFLDKTTTDLVRRFSAITIEDLNVRGMMGNRRLARAIADAGFGEFRRMLTYKCAWSGRKLEVVDRFEPTTKRCAKCQRIIPSLQLSARTWTCQGCGAVLDRDLNAATNILAAGHAATARGGSVRRSSVSAGDRNSRRSVNQPALCKS

SEQ ID NO: 48601 - protein, 366 aa, unknown
  TnpB Polypeptide
MKLSAQVKLLPTPEQHKSLELTLQQTNAASQYVSDYAWNTHTWRQYDLHKALYYELKERFDLTAQVVVRLLAKVADAYKLDHKHKRTFKPIGAMAYDDRILHWYVDKSEVSIWTASGRARIPFVRGERQRALLASRQGESDLILFRGNFYLSATCEVQEPDPIDIEGALGVDLGIVNIAVDSDGEVHSSSQVNNVRHRHRRLRAKLQRKGTKSSRRRLHKLAGKEARFAKWVNHGISKHLVAKAVDTKRAIAIEELGGISQRVTVRKSRRATLHSWSFAQLRGFIEYKAKLRGIPVFTVDPRNTSRTCPACGHIAKANRRNQSTFLCVVCGFSGLADHIAAGNIASRAAVNRPNVSTTLRVNESPV

SEQ ID NO: 48602 - protein, 542 aa, Lachnospiraceae sp.
MAKARHKKITEYQTSMTKAVFLFGSPNTGKRELLKKIQLYYTDLVNRDIEILSDHPDLTMELVKNDKKASGVRVLEKSIRPAGVNSAFCQNAFDCAFTKLANRLDAIRIDMYAENQTIFTQSKVLYAMSITGRSQEEMAAAMDDLAARVKQKESRAFYQKQAVNLRGMTTDEFLFAQKEFSDSYLSCCLSFAVPHVKREQVSLDSRLMRLEVSTDTTYPYVICITNPFAKGERITVPIQCSRDGLRRMKQYKVSKTVHYTLWGKDKIRVQASFEKKLQAPNPQKYIGVDTGMHDCFYCSDGRSIGTMRQVIAYYKDVVEPSFAGLSDLRNKKAKILHFLRKHPNLPKEVRLKLLQKVDRLEKMIRTANLPYRKKSRYYAWLSEEVSADVRQYIEKTGCDTLTVLERLDIKEFHKSRRINGELSVFARGLLQKKLMSELNWNGMAFLEVEPDYSSQTCPVCGHIDAKSRNGKQFRCTLCGHTDDADHNASVILKNRATDQEFLDVCEKYKYDHNGRQAAIRAIGKKRSDAWAKANFKKMKATA

SEQ ID NO: 48603 - protein, 434 aa, Agathobacter sp.
MSEVHTVQRVERHLIKKTSKDFKVLDELCFNAKNLYNFTNYIVRQAFTGHKELIPEYEDLITNERFISEYDLVKRFANQNQQDYRSMVSAWSAQQVVYQVFENWKSWFKVLKAYKRDPSSFTGCPKMPGYKDKKNGRSMLVVNKTKPNKDGSISLTKTLKLKIRTKLKSFQQIRVIHNGYYIMVEIVYKKELNFAKNENANSIMSIDLGVNNLASITSDNGMSYIVNGRNLKSINQFYNKKLAKLQQVYSKQKIRTGSVRQRLELKRKNKIDDYFHKASLLISELAVKNQIKYVVVGLNKGWKNEPKMGKANKQNFIQIPFDRFISMLRYKLEERNIKLVTSEESFTSKCSFLDDEDICFHQKYKGQRIKRGLFKSGIGKCLNADINGSLNILRKLDLGKIDVFEKIFRPTKIKDIERNLVSLRVNNSLITSRG

SEQ ID NO: 48604 - protein, 510 aa, unknown
  TnpB Polypeptide
MYELPIIDSRGQKPYSHRKEGKQMHSATQICVKPGSEFYPYFDTIAALCNNLRNAALYRTRQVLTMVEKPFDKLTANELEVYNEIAYALPAMGDKFKMPVKGKQFLSVDFLEALMRATNNPDFMAKGLPKQTAQQVLKEVAKNMKGFYASVREHKKDPASFTGKVKLPRYGEKGGRHTIVFTNQDCVIYEIKSKPGFHEVKFPEIKKRLYIADMPLRGRLKQITVKPNHGNYIVSLVFDDEKETPVTRPPHRMVGIDLGVDNTAAITNNLGLPCLLFKGGVLKSINQLYNKKMAAIQSEQTKGTDKKFVMTKKTHSLCVWRNNRIEDTINKIGSSIVAWCCDNDVDTIVIGHNTHWKQNANMGKKNNQTFVQLPLYKLILNITYRAERCGIRVINREESYTSKASFLDNDAIPTYGKNDEEYKFSGKRIKRGLYKAADGTVINADLNGSANILRKEFPDAFASHQPDFGNVIVIRHPDLENAKNNHKKQLAEPKTISKSKTKRLKAKGKM

SEQ ID NO: 48605 - protein, 373 aa, unknown
  TnpB Polypeptide
MITYKYRLYPNKTQRQLLVNTLESCRVLYNCALEQRKTAYKQFKISLNYNTQAKELKTLKKYVSEYKEIYSQVLQNVLLRLDDAFKKFFDRVKSGEKPGYPRFKGRGWYDSFTYPQSGFSLSDNRKGNQKLRLSKIGKVTVRLHRAIKGNIKTCMIKRELDKWHVCFACETKPEILPKTYKDAGIDVGIEKFAALSDGALIKNPQFLRESEAKLKYEQRKLSRKKKGSNSRKKQKHKLAKLHCKIKNRRNNFLHIESRKLVRSYDVIVFEDLRIKNMVKNHYLAKSISDASWAKFIKYVSYKAESAGKKVIFVNPRNTSQICSGCGAIVKKSLSVRVHKCPSCGLEIDRDVNAAINILRAGTAPGGATALAGH

SEQ ID NO: 48606 - protein, 267 aa, unknown
  TnpB Polypeptide
MFKTNIKDKLMQIRFIPKGADYILEIVYETDIPEINQHNQKIAGIDIGVNNLATVSNNIGLKSFIINGRPLKSMNQYYNKKKAQLQSDLKIKHNKNWSNKLKILTTKRNNKITDYIHKSSKYIIDWCIKNNINTLIIGKNKNWKQESKMSKKVNQNFIQIPYQMFINQLEYKCQNKAINFILTEESYTSGTSFLDNELPIKDNYNKERRKYRGLFISNNGIKINADLNGSYQIIKKVAPNAFSNGVEGVCLHPIRVNFDSNKSNRNI

SEQ ID NO: 48607 - protein, 537 aa, Moorea sp.
MGTMGRSDGKRLQEELDFLIEKAYSGSAQDIQNIIDFVNSQCAIAESVVPNKETTSLGKSPTSTPSSRKQKSSKTLVQDSTTRGKDLKPYWSESCAEISSRLLLPVETDSPDADLNSLSTWSVSTVEKSWFSTNLKVVQNPSKPQIFSPSFMSSHAVSTESENMGRKSKKMRLFLNPEQRTLVRQWFGVSRYVFNKTIKILQVGKVKANWKAIKTDILNDLPEWCKVVPYQIKSIAIKDACTAVREAKKKYKKTSQINRVRFRSRKNPIQSCYIPKSAVSVAGIYHTKLGKITYTEGLPDDICDCRLTSNNGKYYLVVPYKVTKNKTENQGRVVALDPGVRTFITFFSETSVGKIGDRDFSRIQRLCQHLDNLMSRISKSKGGQKRRMRKAARRMVIKIQNLINELHHKTARFLVDNFDVILLPTFETAQMSKKGSRKIRSKTVRNLLNFAHYRFKEFLRHKTQETGKTVIDVCEAYTSKTVSWTGELINIGGSKTIRSKVDGRTMDRDINGARGIFLRALGDTPWLRNQLALVNQN

SEQ ID NO: 48608 - protein, 393 aa, unknown
  TnpB Polypeptide
MDVRRTIPLSIPLDQDLIGLAKEFTRFCSDISSIAFNNGKPLHSVPLHQLVYRQIKTSLLSQMKCSAIRKVAGAYGSAKSNKHKVTKPFVFKKNVATLLFGREFSFKKDGTISISTLSGRKRFAFSVPNYAINDFKNAKSYDSLTVLGNGKVSLCITLSVPDPVGLIPTGIDLGMKNALVASTITDTLFISGSKLQIKNRRKRQLRSRLQKKLALHKANNHSTRSVRRLLKRLGRSHRNRNVTFCKESAAKLCAWVPKDSVLVFEDLNFKQQSKKNYKQRKGTRRKLSQFFYNAMMNACKNRAERDGFAIALVNPAYTSQKCRMCGSIGTRFGSKFSCLCGHAEHADINASHNIRSIYAALRDSGAKSTAPCSGNGTIEAQAKPVRKYKLRTV

SEQ ID NO: 48609 - protein, 281 aa, Halorubrum sp.
MTGFDCPTLSLSTATAVSFPMFSVGADTQRTHSKVPQLTTTYNAGDLHDDHPVRFTNEGLRLDHKPENTIEWYVKIPHHEDYYLWMPAQPNPEQRDWLEALNAGDAEMGGGRLFEREGTWFLHATATRDVEETSEVSAEERTPIGVDIGEASLVTVCHRDSHGSPTAPELWADEGKTVRQLPKSYFTAKRRLQTRGSERIVESFGGDLWKQIDDVFHRVTREVVEYAESVKNPVLVLEDLTYIRESMDYGEFMNRRLHGWGCDKHRRPLPQRREPFERTQG

SEQ ID NO: 48610 - protein, 423 aa, Richelia sp.
MSNYGCQQALIKPNIELQAILEFLGEESALLANCGTYYARQLYFKTGKIPSKYDLHKLFKENIHFQAMYSHVAQQCLTTVAESFKSYLGLLKALKAGKINQRPKLPGYRKGGLVLATFPRADVKLKDEMLRFPLGSKVKAWFGLDAFYLPMPSNLEYKDIVEVRILPRNQCFYAEFVYKMKDAPRYYLNKNRVLGIDPGLNNWLTCVSNVGTSFIIDGKHLKSMNQYYNKRVSALKENKPQGFWSKQLAHITEKRNRQVRDAVNKAARIVINHCVRNHIATVVFGWNIGQRQNINLGKKTNQKFVQIPTARLKDRIAQLCEYYGIQFIETEESYTSKASFLDDDMLPTIGAKPEGWQPSGKRVNRGLYRTALGYKVNADCNGASNIIRKVSMKLGLVLSGICRGSLIAPLKIRLWTLKESPAL

SEQ ID NO: 48611 - protein, 153 aa, Cylindrospermopsis sp.
LGFNYLAGFVQRWVKSKIKLARHHARIANQRKDTLHKLTTYLCKNHAKIVVEDLNVSGMLSNHKLAQSIADCGLYELKRQLEYKAKKFGCQIIIADRFYPSSKTCSHCGHKKDSLSLSERIYRCENCGLEIDRDLNAAIMLSRLAKACKSTEG

SEQ ID NO: 48612 - protein, 307 aa, unknown
  TnpB Polypeptide
MTEHCRHARYVWNLAVEQQQHWQPGRRAPGYNDQCAQLTAARAEHDWLAAGSQTVQQQALRDFAQAMRNFFGGTHRRPTWRAAGRHEGFRQVGVKPHHIERLNRRFGRVWIPKVGWVRFRLSRPVPEGVRSYRVTCDRAGRWHIAFAHIPDPIAGPREGSVLGIDRGVAVSAALSTGELLQAPGLSRGEARRLKVLQQRLARAARGSNRRAQTKLAIAKLRARETDRRKDWVEKVTTDIARRFDTIRIEALDVHAMTRSARGTVEQPGQRVAQKRGLNRGISRSGWGLLAARLQHKAYGRVEQVPAA

SEQ ID NO: 48613 - protein, 256 aa, Lactobacillus sp.
VSEEPLSDEFGVVSYFKEKGRYYVAIPYKIKAEDVKLPDKTGKATAVDVNVGHFDYTGGRVNVLPKKLDRTYKKIKHYQRQLAKKQVKNGEAACESENYLKTKAKLQACYRKASNIQNDLMHKFTTELVNDYDKIVIENLSVKGMLMSHVASKGVHRSMFGKFKQILTYKCDWYGKELILANKLYPSTQRCAACGNVKKGDDKITLYGNKKHGTKHNEYVCYNEKCPNYNKVVDRDKNAMLSLLALTEHPELNHAL

SEQ ID NO: 48614 - protein, 538 aa, Streptomyces sp.
LAASFVVPGPTGVAIRDRLRVTDRDAAVLREVGAFLGSLAAGDLADRCRQGLEYDAASWAVRKRELTSWSSSRWAGSITKATHDQWALARRGQAAYIAWLRGQIAQIEARLARPLGAKASKREGLLRGYASRGEWHAKSRRLHALTDRLAAVEADWNAGRVRVVRGGRRLANTRHHLDDAELSREAWRAQWEAARIFLAADGESGKRFGNETIRITGTGQLSIKLPAELANLANAAHGRYVLDAVVQFKHRGEEWLDRIAANRAVAYRIHHDPVRGRWYVTASWQRATVPVLPLQTALARGTVGVDMNDDHLAAWHLDIHGNPVGEPRRFFYDLSGGAAHRDAQIRHALTRLLHYARRCGVAAIAVEDLDFTADKTREKHGRNKRFRRLISRFPTAKLTARLASMAAEQDVAIVAVDPAYTSRWGAQHWQKPLATPHRETTRHDAASIAIGRRALGHPIRRRTAPPRTHQSDGCGHRTVQARPGIRWREEPRPPATDRAPTVPSPSGMRKRATSLPNTVRGSATEQQSWQQGSVPLSV

SEQ ID NO: 48615 - protein, 247 aa, unknown
  TnpB Polypeptide
MENGAQFCVKVDRQENLERASRSLGLDVGLSSFYTDSEGNKVDNPRYLRKSEKAIKRLQRRVSKKFKKGFPQSNNYKKAKQKLGRKHLKVQRQRRDFAVKLARCVVTSTDVVAYEDLKVENLVLNRSSAKSISDAAWSQFTSYLQYFGKVFGRIVIAVPADYTSADCSVCGTRVRKSLSIRTHECPKCRTVLDRDQNAAVNILVKALRLAGIEITNTVGQTEFQAWGDETAFISGESLSWKVLSKNQ

SEQ ID NO: 48616 - protein, 474 aa, Mycolicibacterium sp.
MARHTTFRFCLDPTIEQDEVLARHAGASRFAFNQCLRIVKTALTHRRTAPGTEVPWTGFDLINTFNAWKKTEAAGRVFTVDTAGDIEVVVTGLSWRGQVCQQVFEEAAVDLGNGLAAWSDSRSGKRKGRRVGFPRFKKKTGAIPSFRLRNKHSKGRPAAIRIGDNDRPRSVTLPGIGAVAVHDDTRRLRRMLAKGRAKILFATISHHGGRWWIALNVEAADLHPTQQHPTRRTDDASGWVGVDRGLSAFLVASTADGTEVARIDDAPKALATGLKHQRRLSKSLSRKKKGSRHRKDAAARLGRHHHRVANVRRHFLHQVSNELVKTHDRIVIEDLNVAGMLANHRLARAISDAGWAEFARLVRYKQAWRGGQLIEADRWYPSSQLCSICGQRRTDLTLADRVFTCPNGHVIDRDGNAATNLARWPHTHPTDPRTPKQRGRATKARRRDGADQHPRVGETSPKDAGTNVHTAPAA

SEQ ID NO: 48617 - protein, 540 aa, Bacillus sp.
MSTSKKKERKTTIFGVLINMTEQMKQEVNQCMFDYSFMFRFSFKRLVEIEREHELDEDRKKAIQQLEKDVSSRTGYPIRVAKDAVADANELLTARHTLMVEYHELWKERYENTKAKYERFKQNPNVNHRSFHMLGLQNKMERQLKQIQFYEQHILQHTFPSIVFGGRKNFEELQKGNLSKEKWNELRNGRMSSRGDATKGGNPNLRVLETEEGFALQMISNRKVINGKKFYYEKTLIPLYIATKCSKKTRKLNGRKYPEVMKRALESGKAYQVEILKRDGQYHVRITVSEEKPIVQEKINGYLAVDTNIDGLALCLMNEKGFPTKFTWLGEGGLQYYPTHKRENVIWELAHQVVWPCVEQKLALVMEDLAFIHSKDVSKKVRRKSHQFCYRKLLECMETLCIRYGVKQVQVKPQFTSVIGRLKYQTRFRVNVHSAAALVIGRRAIPGLRETVPKKLLCVLTKKQLETFHEQNEWKQWSTMQKQATKLLKKQGAAFYQWHDYKKRVYQTLVTPKARKTKSSNKKRETKASFDTIIVHPIAE

SEQ ID NO: 48618 - protein, 396 aa, Bacillus sp.
MKIHKGYKFRIYPTEEQRVLIHKTLGCCRYIWNLALGSQKKKDAYWHITENMVQNGQLLENQWKSDFFNASKEQKELTELKKQLEWLKEADSTALQNSLQDLGESFKQYYQKKKGKPKFKSKKNEVHSYTSKCNYSKSGPTIRIEQNRFMKIPKLGLIEFVSTQQVKGRILSATVSMNVTGKYFISLLTEQEIEFVQPSLFQVGIDVGLKDFATFSDGAKIENPKWLRKLEDKLIKAQQVLSRRKYNSSNWNKQHKKVAKIHEKIVNARTDFLHKITSSLVHENQVICIEDLRVKNMLKNGKLAKAISEVSWFEFRRMLEYKCKWYGKTLVVVGSNFASTQLCSCCGYKNPEVKNLGVRKWTCSECNTIHDRDVNAAKNILAEGLRIFVDGQSMIA

SEQ ID NO: 48619 - protein, 422 aa, Holophagaceae sp.
VIRVHKIALDPNREQATYFAKACGTARFAWNWALGEWRAEYRQGGQPSEGALRKKLNTIKRTEFPWMLEVSKTAPQEAIKQLGTAFKRFFRKESGYPKFKRKGERDSYQADNGPGTFQCDTRRIKLPVIGWVRMREELRFQGKLQSVTVSRTADRWFVAVAVDGEVPRTEDRPQAVCGVDLGVKALATVSDGNVVEGPKAHRYYLKKLRRLNRAMARKIEAAKEAMGLKGKAIPKGVRIPASSNRKKAAEKLARLHARIANIRQDSIHKLTTDLVARFAVIGIEDLNVRGMMANERLARSIADMGFHEFRRQLDYKAKLHGSRIVLAPRFFPSSKTCSACGHILKDLKLQTREWDCPACGAHHDRDHNAARNLAAYAAAQATTTASSAGSHACGEIGSGLRPKAKVKPNSLKQEPSIRFAQI

SEQ ID NO: 48620 - protein, 507 aa, Actinomadura sp.
MSDHAADEKKKRKGFQVRPGYVVQAYMFALDPGVEVEDRLRSHCGAARAAYNWAVGHVLAAWAQRSAEASYGISEDERTPWRSWSLPPLRKTFNAVKRTDPRFAGWWAGNSKEAYTTGLAHAAAAFDSYAASRRGERAGPKVGVPRFKAKRRARLSCRFTTGTIRVESDRRHVTLPRLGTIRTHENTRRLQRRLANGTARIMSATVSYRRGRWQVAFQVEVQHRTSTPHRPEATAGVDLGVATLAVVADTDGNVHHIPHPRHLNSELTRLRRASRTASRRQGPDRRTGRQPSRRWRKADAERTRIHHRVANLRTDAIHKLTTSLAAEYGTVVVEDLNVAGMLKNRRLARSVADAGFGRIRRQLAYKTAWCGGRLVVADRWFPSSKTCSRCGVAKAKLPLSARTFTCETCGLSLDRDHNAAVNLAALAVCSTGTGVAGDRDAAASKPRRADRKTRTTAGTTRDRRGGPVAQNPHQAGRKRETVAKTPSPGCGDTGTDLPRGNARDAEP

SEQ ID NO: 48621 - protein, 378 aa, unknown
  TnpB Polypeptide
LERRAPNSGSRLPYQLFEALLRTASLEGTESLVEGNALSGSPTVAEGSDGRLPEVLQRSDGFPKKHKKFVTTDSFRFPQGFKIDEGRRQIYLPSIGWVKYKRSRFIQGKAKNVTVSRQADGWYVSIQTEYEMEPPKHAGDTVGIDMGCVRFCTLSDGTFFEPCGALKKALKKLARMQRRLARMQKFGKNWRKQKAAIARLHQHIANVRRDFIEKVSLEICKNHAEIFREDLKIKNMTASAKGTVEEPGTRVAQKSGLNRSILDQGWGMFFSKLDWKALRLGGHVHTVPPQNTSRTCPICGCVSKDNRKTQALFKCVSCGHQGNADVVAAINIKERGRSSLACGESERNAQAQVNLGRSKKPAPNQQQESTEVISSASC

SEQ ID NO: 48622 - protein, 245 aa, unknown
  TnpB Polypeptide
VRWDWTYSLTLLHSRERLETALGDYQKGRLKGQAPTSATLVKRRDGTFFLHVQLKRTAPAPSTPTGTLGVDLGRRRVAVDSDAKPYEATEVNRLRAHYPKVRRSLQRKGTKEAKRLLRRLSGREQRHMRAINHCISKQLIETAQTTQRRIALEDLTGIRQRTRVRKPQRYGHHSWSFYQLRQFVAYKAQAAGVPLVLSRTTGLPHQSCLSRKSHPRQCHQARCSAGLTGRSPSEAPWCGTHGPCR

SEQ ID NO: 48623 - protein, 325 aa, Campylobacter sp.
MIISHKIELIPNNKAKTYFKKAFGCSRLAYNWGLAKWQEYYKQGIKKTYLDLKKEFNAIKKEQFPFVYEVSKYATQQPFTHLNLAFNKFFRDLKQGKLSYPKFKKKKDNQGSFYLGGDIIKFSTKNNKTYLKIPNLGKVRLREKLRFNGTINSATISQKANKYYASFSIEISDDEFHQTHKQALDSHQALGIDMGLNSFVSLSNGLNIQAPKPLDKLTRKLIKVSRQLSKKRHPKTKGDSTKKSNNYKKQSIKLGKLHTKITNIRSDFLHKLTTILIRHYAYFGIENLNIQGMMKNHHLAKAISDVSFYEFKRMLTYKAGLITAK

SEQ ID NO: 48624 - protein, 244 aa, Escherichia sp.
  misc_feature (108)..(108): Xaa can be any naturally occurring amino acid
  misc_feature (177)..(177): Xaa can be any naturally occurring amino acid
  misc_feature (207)..(207): Xaa can be any naturally occurring amino acid
  misc_feature (238)..(238): Xaa can be any naturally occurring amino acid
VKRLQAFKFQLRPGGQQECEMRRFAGACRFVFNRALARQNENHEAGNKYIPYGKMASWLVEWKNATETQWLKDSPSQPLQQSLKDLERAYKNFFHAFPRFKKRGQNDXFRYPQGVKLDQENSRIFLPKLGWMRYRNSRQVTGVVKNVTVSQSCGKWYISIQTESEVSTPVHPSASMXGLDAGVAKLATLSDGTVFEPVNSFQKNQKXLARLQRQLSRKVKFSNNWQKQKRKIQRLHSXSGQNQV

SEQ ID NO: 48625 - protein, 422 aa, unknown
  TnpB Polypeptide
MKKGNVYRIYPNNEQRTLLEQHFGATRFIYNHSLLIKNLMYKRFHINVTEIDLNNNLSSLKETFPWLKDINSQSLQQANRNLLTGFKNLFEGNGSFPTRKKKKNNHFSFQVPQNYQINLTSSKIYLPKIGWLKIVIHRDFLSKEFIENNLVIKEIDGEKILDQKLNREFNVLKTLTVSRTSAGRYHVSILIEDNKPYPEPVEFDERTTVGIDVGIKSFAVLSTGEVIENPKFMKRSLKKLITLQKSVSRKPNDSKNRRKAVVKLSKHHQLIANQRNDFQHKVSMRLISENQALVLEDLNVKGMVRNHCLAQSISDVGWSEFIRKLTYKAEWFGKTILKIGRFDASSKLCNVCGYKFRELTLDIREWKCPSCKTLHDRDFNASINIKKIALDNLNTVGTTGRAYGLTDISQRKEVGSPHFNGR

SEQ ID NO: 48626 - protein, 260 aa, unknown
  TnpB Polypeptide
LKYTGYSITLALRIGVIIIRQRAKDFPYTTAGNSQGRQKTYIVSEGYSLSGPAERFFRIDRSFQAFFRKFKEGSGKAGYPRYKVEGQCNAGLLAFAVLSDGTVINNPKHLRKAEKKLIRKQRRLSTKEKGSKNRMKARKKVAKAHRKVRNQRADFHHKIPRAMVSKYGCIAVEDLNIKGMVKNHHLAKSISDAGWGQFQNYLAYKAENAGCRVENVAPHHTSINCSRCGERVYKTLGDRIHTCPFCGLVLDRDHNAAINI

SEQ ID NO: 48627 - protein, 394 aa, unknown
  TnpB Polypeptide
MCYGRPGLIRTFQYRIYPTKSQRKTMESTIETSRRFYNDCLAERKEAYELRGESIGKYQQLKKVKVLKNTNPYAKCIHSHVLQVAVADLDKAFQAFFRRVKAGETPGYPRFKGKNRFDSIGFKEYGNGFKIDGRRLKLSGIGRVAVRWHRPIEGEIKTLRISRKVRHWYASFACEMEEKPLPKTGNAIGIDVGIRSLLATSNGELIENPKWYQENQVKLRLLQRRVTRRKKGGNNRRKAVQILQKHHEHIANQRKDYINKIVVGIITRNDLIAIEELQINNMVKNHNLSKSILDGGWGYFAQRLSYKAVEAGREVVRVNPAYTSKSCSGCGTIFEDLDLSVRWINCDCGLSLNRDVNAAINILKRALALNRDGQSRWEITWAIEPSVSQEATAL

SEQ ID NO: 48628 - protein, 390 aa, unknown
  TnpB Polypeptide
MIIQRSIPITLEKSTDLLETIEEFNRYQKEISEDCFNEGTTKNALALHKSVYHSVDSQLTAQLKCSAIRLVAGAYASAKSNKRPATRPFIFRRKRALFLIGKRGRDVSFTKCGKLSISTIEGRKKVGFKIPEAFQADFSNATRIDSLNIGLDGKGFLCISLQVKYPKAIIPVGIDLGIRNALVASTKQNTLVISGNELFRKRKSIRKTRARIQSKKSSKKELGKDTRSVRRVLKSLARKQRNKTKTFCREAASQLCKWVPENAVLVFEDLKIKRSSKKEHIRKGTRRKLNSFCYNLMIQSVTNRAERDGLAIAFVNPAYTSQICNQCGLIGDRNGSRFSCSSCSHHDCADRNASLNILSRFAVLRGRAHLSMCAEAQASTMGKPPALAVG

SEQ ID NO: 48629 - protein, 400 aa, unknown
  TnpB Polypeptide
MIKSFKYRLNPTKSQIVQMEKTFGCCRYIYNWALDRKIKAYQESKKSLSAIDLCKELTLLKQKEDHLWLKEVSNESLQQSIRCLDSAFTKFFREHTGFPKFKSKHHDKSTFKNIGSVKIDFENSKIKIPILGWVKFYKNRSFEGKIGTITVSKSSTGKYYVSVLVKDGNSLPEKNPITPSTSVGIDVGLKDFAVLSNGQVFQNPKYLEKLSKRLACLQRRLSRKKKGSNRYKKAKLAVAICHERIRNRRQDFLHKVSKRIISENQTVIIEDLNVEGMLKNHCLAKGISSVSWNEFFRMLQYKAEWNGVNLIRIGRFEPSSKMCSCGYINKDLKLSDRKWACPCCGSENDRDFLAAQNIKKFGLEKQNLLSQENISPVVNRAEDAELPTLVGTVKRQIISV

SEQ ID NO: 48630 - protein, 400 aa, unknown
  TnpB Polypeptide
MKIINRTYRFRIYPNALQIELLAKHFGCTRFVYNYFLNQRQEQYREKGVSDNYYAQAKILTKLKKQEETVWLKEVNSQTLQFALRNLEAAYTNFFQKRTSFPKYHSKKNKNTFTVPQFATIEDGKLWLPKFKSGISIRLHREIRGKMGKVSVTKTTTGKYFVSVFTTEEYQELTPTNASVGVDLGLKDLLTTSGGEIFKNNRYIRKYEHKLAVAQKHLARKKKGSNEYEKQRLKVAKLYEKVSNCRQDYLHKCSYSLIKSYDVICIEDLNVVGMLKNHKLAKSIADVSWGSFIAMLTYKAAWNNKQVVKIDRFFPSSQTCNVCGYHNSETKNLKIREWVCPSCGTHHNRDVNAAINILKLGLNNISVGTTDYTDGEDVRPNHLKGQSSVKSEIHKSLICG

SEQ ID NO: 48631 - protein, 200 aa, Microcystis sp.
LPSQSSDGKAIGIDLGLNHFAINSNGSKYDNPRHLAKHQRNLKRKQQKLSRKKKGSNNRQKARDKVAKVHSKISRCREDFLHKLSRKIVNENQVIAVENLNVKAMVRNHNLAKVISDCSWGMFCTMLKYKAEWQGKTYIEVDRFFPSSKTCHVCLNQVSSLSLDVRIWTCEHCQTIHDRDINAAINIRDESLRFLSLGKA

SEQ ID NO: 48632 - protein, 606 aa, unknown
  TnpB Polypeptide
VKPDHIHVFVDVPQTAASCDVVRTFKDISAIELFKAFPQLIQFYAGCGILWSRGYFVSTVIKIILRSRKMITDKEHKRHLKQFHKLSDRHILAAETDMSSSDIQKVVKLSNKIRKAGNELVGLMRKNYNQLMRTKRYRKLLFLYGNSKDKAKRKTYAKQLNEMQKAYNITWEYCRTSMIPIGKKYGVDAVFALTKAEDIWRGIEKCLYGNGNAIHFSKYGELPCIRAKQINRGIPISVTDNKLHFKLGRMVFGIQVNDRFQQNEVDDVLSYLDESEILDDRAVSILIKDGYCIDTYRPCYATLVPRMIRGKYRVYLHLTIEGKAKPKYDKHGSPRHKFGKGIIGADIGTQTVAYTSDTEVGLKNLSERGNSIQTSERKERLLYRAMDRSRRATNPQNYNDDGTVKKGRKTWKYSNHYKKLKTKHSELCRINAINRQLAINEDANHLRSLGDVFITEPKNAGRLMRRAKETTVNSKGKFNRKKRFGRSIKNRCPSGFQTAVEQKFKVSGGIYIEVSNDYRASQYDHTVDDYIKKKLSDRMYKLQDGTEVQRDWYSSFLLYCYDYRTQDIDKNKCISEFDKCYSKEKALIEWIKVNEIKVLNSGIKIA

SEQ ID NO: 48633 - protein, 353 aa, unknown
  TnpB Polypeptide
  misc_feature (9)..(15): Xaa can be any naturally occurring amino acid
MIAWLRDVXXXXXXXNNTAQLVVQKSLEAMENYYEYDDYNQPSHTKDGAYPLRSNYEEGYNLFLEDDSIRYRISAKPYNPVKGTLQGSLDAIERLRTAIESETWRVGTAEAMKRNRNYELHINITHTEAEVRDKQDSRTVVGVDINEDCVALAVLHEDDIVDSVVIDYPEIKEERHRYFTIRKRMQNAGKSSFDRAFEQQEDRFVHDQLHKVSRQVVEWVSRFEKPVIVFEDLKEMRDGIDYGTRMNRRLHSLPFRKLRKFVTYKTAFQGIPPDEINPEYTSQACSLTECEHTTRANRNKKRFKCVACGRQDHADRNAAINIAKKGLEKPDRDVPALKNSPTCGRCDGRHRAV

SEQ ID NO: 48634 - protein, 419 aa, unknown
  TnpB Polypeptide
MLTRRITFRLYPKPAQEAQLFEWRRLHAYLYNSALADRKDSYQKRGEQVDYFDQQNRLPAFKETWQEYKELGSHALQATLKRVDFAFQRFFKGLGGYPRFQSIRNYSGWTYPCKAGWKAHTIGDSGYLDLSNLGQIQMRGKARTWGTPSTCTIVYRHGKWFASITVKCEPIRSTGEGAVGLDFGCLTAVAMSDGTMIENPRFMASTQAKIRKASKQKRRKQAPNFKQKIKASKRWKKAAKKVAALQRKSANQRQDWIHKQAAEIVSRNSLVATEKLNLKGMTSKAKKGKRTRQKSGLNRSILDVGMGMFRKALEYKLAESGGVFVEVPTQKVKPSQTCPNCGHQEKKDLSQRVHQCSQCGCTEDRDVAAAKVMLNWALGLGTSLTNADQPSSTSDARFTGSLKQLAEMKRQKLSTQRSS

SEQ ID NO: 48635 - protein, 437 aa, Natronomonas sp.
MLEVHRTHRAKIRNHSQVEDSLDRHGWSASKLWNVANYHSRQEWEDTGEIPDHGDLKDELKGHNKYKGLHSQSSQRVLEELAEAFNSWYGKRKSDSRSNPPGYRRKNYYDTEGRRVHEEHPRSTVTWKQNGIKHDTTNNRVRLSKGANHKEHPKAWEYILVEYETRPDVEVENIQQVRAVYNGDRWELHLVCKDEIETPNAPGNESAGVDLGICNFAAVAYSTEEAELYPGNRLKQDGYYFPKEIAKCDDSGGQEATRLHAKWSERRTHFFHSLAKHIVERCVENSVGHINIGKLADVRKDDNGESKNWGKHGNLDLHGWAFDRFSNILTYKAKVEGIEVVEVSERDTSKTCCVCGREDDSQRVERGLYVCESCNAAFNADVNGAENIRLDINQSNSESSPNFGEDRSTGWLAQPEVYLHDLSSGFQPQAQVIDCKP

SEQ ID NO: 48636 - protein, 428 aa, Natronomonas sp.
MKYSPRYQLFPDEQQQEQLNWTVDVVRQVYNDALNRFNDVPESDGTLNQRVRSVRDELPSMKDWWDDLNDVYSTVLQNAVVRIEQNIESLHGLKNQGYDVGELKWKAPRDFQSFTYNKKGFELDKKSGPPGRGELTLKKIAGETITVPIRLHRDIPDHDSIQQLTLKQESTGEWYASFTITTEPPAKPDVTEIDASDCVGIDLGINTFIHDSDGREIDRLDLSDDRERLEREQRSLSRKTEGSNNYEKQRKRVASVHARMNTKKRDFKHKLAHFYTTTYDAVFLEDLNVADLMQSSGSSRNTAEVGWRDLITIFEHHGEKNGCYVETVHSGGTTKQCASCGVSTEKPLWVREHSCPACGFSTDRDLNAAANVLSRGLQQLGVGHSEATPAETATAVATDGGDASVSVDASGVVESGSPALTETVSTVE

SEQ ID NO: 48637 - protein, 389 aa, unknown
  TnpB Polypeptide
MKRLKRAYKIEINPTQNQKSKIHQTIGVSRFIYNFYIAHNIEIYEKEGRFVSGMDFSKWLNNEYIPNNQDMKWIKEVSSKATKQAIMNGDKSFRDFFKKAKGFPKFKKKKNQDVKAYFPKNNKKDWTLERHRVKIPTLGWVRLKEFGYIPTNSIVKSGTVSQKANKYYVSILVEENDIKPSKSTNEGIGIDVGLKEFAICSDGSKFKNINKTSVVKKVEKKLKREQKKLSRKCESLKIRNKIEEGRATRQNIQKQVVKVQKLHQRLNNIRTDYINKTVSSIVKQKPSYITIEDLNVKGMMKNKHLSKAISSQKFFEFKTKLMSKCKQNNIELRIVDRFYPSSKTCSQCGKIKKDLKLSDRIYRCDCGLTIDRDLNASINLKNAKKFKTA

SEQ ID NO: 48638 - protein, 198 aa, unknown
  TnpB Polypeptide
VDFIGNFVNGLKSYLTSSDGETIESPEFFKTNIQKIKKANKQLSSKKKGSNNRKKALKNLQRLHINISNKRNDFEWKLAHHLCKNNSFIAIEDLDIASMKKIWGGKVSDLSFSSFVDKLEQIALKYNTIVQKVGRYYASSKTCSCGVVNKELKLSDREWACQSCGQVHDRDVLASNNILTEGIRLYRTKSKTNSELAF

SEQ ID NO: 48639 - protein, 378 aa, unknown
  TnpB Polypeptide
MHRSFKYRLYPSKEQIDALDQTLETHRHLYNSALAWREGLYETGKMSVKYSEQSARLTAVRTKDEHLSQVNFSSCQHTLRRLNTAFQNFFRRVKEGDKPGYPRFKGIGRFDSVRFTYADGCRIKGRQLALQFIGAVKVKWHREVPEDARIMSATVSRKSGEWYVSFSCELPDVDIIPSLNPPVGIDLGLKSFLVTSNGEFVDAPRLFRKAQKKLRIAQRALARKKKGSNHRKKAVRRVAKLHHHIGNQRRDFHHKTARKLVTQYGFITHEDLNVKGLSRGMLAKSVNDAGWGNFLSILRFKAECAGVEVVGVNPAYTTQACHSCGCIPAKKVLLKDRVYHCDSCGLVMDRDINASLNILSAGTRLSGVNVEVVISCVA

SEQ ID NO: 48640 - protein, 350 aa, unknown
  TnpB Polypeptide
MSEEAGQKRVVKTGGIKNPQPPRYKNKGATIRYLNNGFLINDGIIRLAIPKLQKEYLFEKHCISADFLYIPIPDEYKNFEGNPKIIEIIPLGGEKYKVNMIVELPKKEYKPDNGVYMAVDLGINNLITCYISTGKSYIISGRQLLSINRYFDKKTGYYQSIAYAQQYAMGSKYPKVTKRIKQLYSKRSRQVEHLLHAAAKKVIDFALDENVSRIIIGDIEKIRESSKMSRVNNQKLHKWPYSRIKQMLIYKAEDKGIETEMQEESYTSQCSPYAAKITEEYAQKDNRKHRGLYETEGKVLNADCVGAYNILRKYLCRIGKPSPAVVGLDTPMMYRWDSSKGFISNQKLVI

SEQ ID NO: 48641 - protein, 566 aa, unknown
  TnpB Polypeptide
MKFRDVKECKGIYGLSRMALINHEKKGPIKPLTEKKSESNFITVECLLAFDKDEDKGRVLALMRKFSSMVRFAYKRLLDGAERKELKKLLSRKYGINTRYSDDAILWAQQTLDSCIEREQNPKKLVFGSRELFEQLKKKHLTGKRRDELRQKWVERRYGILQSRGDKSKEGNLNLRLVNLNNRWHLRINLGNGEYVWAKVVRSATRKTDKWISFISSLEHAEKTADWFPYTVRLKLRNGKIYAQFSREEKFPEVAITKDNGVIGIDINAYPFHLALVHTAKDGNLEKYERLSLDKLLEGSSDKREYLSWQTAHQVVEIAKRERKAIVVENLEKLPKGKRGDGMPKLRQKLQKWVYKALLQKIEIVAKRNGIQVIKVNPAYTSIIGKLKYAPLYNIDKDTAGAYVIGRRGLGFKERLPKNYRELLKDAEFLSYAIAKIEDKIAKLKQEIREEKNEYKRNRLKSVLWKTRKELDTLLGYFRGSGESESAAQQTVDRKMERVRGRGQALQKSWQVLSVALAFSCLESFRDLSPLKRVILTRDWVGAAQQKGLVPLPGQGTTVLNMYSYV

SEQ ID NO: 48642 - protein, 401 aa, unknown
  TnpB Polypeptide
MKVLIYGQTYVIIRLSKGDGLMNTYKAYKLRIYPTDFQRELLEKTFGCTRYIYNNFLAERKNKYEESKTRISVYEQLKELTDLKKEKEWLREIDSCALQACVYNLDDAFQKFFKGNGYPRFRVKGVHESFRTNNTLNSYKNKKYESIRIDFKKRIITLPKLKEVKFRGYRKDKKMVGKIKSATISEYASKYFVSILVEMPFVKYSLKPTTIVGLDLGIKDFIVTSNGEKLKNEVKINEKRLKGLQKWLSRCKPGSKNRYKVKLKIQRLYLKIRNARKHMIYKLANKIIRENDIIAIENLDVKSMYQVHKIAKHLKNIPISEFIRVLKYKSKWLGKKVIEINKYYPSSQSCNRCGFKNEEVKDLSVRKWTCPRCGLIHDRDITASINIMFEGLKIYMKESII

SEQ ID NO: 48643 - protein, 291 aa, unknown
  TnpB Polypeptide
LEKAYKNFFRDPKVGFPRFKSKHHSKNSYTTNVVNGNILVEDNRIRLPKLKWISMKKHREPAENCCLKSVTVSMEPSGKYFASLLYEGYSCENQAADEDYSNAKILGIDYAMQGMAVFSEEIELEKTGFFRRNEKRLAREQRKLSRCVKESRNYVRQKKKVARCHEKIRNQRRDYLHKLSRRITDQYDIVAVEDIDMKAMGQCLHFGKSVQDNGYGMFRNMLDYKLAWKGKELIKTDRFFPSSKKCSKCGKIKKELGLSERVYRCTCGNEMDRDRNAAINIREEARRMLAV

SEQ ID NO: 48644 - protein, 414 aa, unknown
  TnpB Polypeptide
MKHQIKAIRKKIKQIREKNRYDRRLRGLYSRLSSVQNKLNVLRFKPIVFGTKQLFRQRILDKISRDEFRMRRDSSFCCVGKKQGVNLNLKVLPNMILKVRTFSKEKGKKWLIIPFTVNYTQEKWFTEILGLELYQVEVVRRFINGNIRYFAHISYEIPEVEPQYSFENGAVGLDMNYNFVSLCNVDKKGNFKSYHEVFFRNLHSYRKNKRVDYVSYKMDKVVNYCINKQKGLVIEDLYFDQEFSYGKKRNRKLSNFKTTALDLLERKCIKRGVAIKKVHPAYTSLIGKYKYSCSRNISVHILASYVIARKGLGFKEELPPIYKWLLAQVGDIIKPRLKPSSPYYNWSKLHGFFKHSGITSFKTSEVMEKALQMKYVLNSVTSEQPDNLKAGFSPAGKVDDWNKFWNFIEIPNFL

SEQ ID NO: 48645 - protein, 451 aa, Haloferax sp.
MWRTNQKLMKRTNTFEVVPLSDADEVLLRRLLDASAALWNEINYERREHYADSDADVWDISEYRGRYGGTLGASTVQQIERKNREAWRSFFALQKKGEANGKPGYWGNAEDGRELRTYIRNTSYSVEWGEYSRLEILVGQDLKEEYGLGYRERLRLEVRGEPNWKEYDKQGRLELFWDETAQTFRAFQPVTVDNSRLAHPLADETAALDIGANNLVACTTTTGTQLLYEGCDLFERFRETTREIARLQSLLDDGRYSSHRIRSLYRRRTRRRDHAQDALARDLIERLHDEGVSTVYVGALTDVLDTHWSVEANAKTHNFWAFQQFINRLACTAEEYGILVEVRSEAWTSQECPNCGSTDRTTRHRDTLTCPCGFEGHADLTASETFLRRHQNSERFDWRTRHAVSRQRQADVARPMARPVRLKWNDHDWSESPRSCSNEERTNPQVASVGR

SEQ ID NO: 48646 - protein, 276 aa, Cyanobacteria sp.
VEYKTTGWKLSDDRKYINFTDKCGIGKLKLIGKYDLHYYQIEQIKRVRIVRRSDGYYVQFVIQAERNLDIKPTGKAIGLDVGLSAFYTDSQGRAVENPRHLRKSDKALKRCSRRVSKKNIGSNNRQRAIKRLGRKHLKVSRQRKDFAVKTALCVVKSHDFVAFEKLQIRNMVSQCGLGVSPSRASGVRNRHLAKSISDAAWSQFTEWLEYSGKVYGRVVVGVPPQYTSQNCSACGETVKKSLSIRTHICQCGCILDRECDSLWRNPNEGGFQASVG

SEQ ID NO: 48647 - protein, 387 aa, unknown
  TnpB Polypeptide
MSIRTIALTLKPNAAEATALARLQEAFNAACNHISGVAWEAQEFNKVRLQRLCYGDVRTWFGLMAQHTVRAIAVVAASYQTDKERRHEFRADAAVVLDTPRLYRVKHNRASITTLDGRIKVELGIGGHQRQMLKDAVKLAEADMIRDRKGRWRLMVSAHYADPPTMDTTGVLGVDLGRRDIAVTSDGTSFSGQRVTAIRDRYTRVRRSIQKQASKGTRSTRRRARAVGKRIAGREHRFQRDTNHIVSKHIVGQAVASKQAIACEDLTGIRERTNRQPRNKTERRRSNSWAFHQLRLFLTYKCQAVGVPFVLVNPAFTSQMCHVCLHMGDRSGKRFCCCNPACAWRGDADENGARNIARLGAIVLRPGGPALCCSYQPDARATASPVF

SEQ ID NO: 48648 - protein, 436 aa, unknown
  TnpB Polypeptide
MGRVPGRRYPAHDPRVRARRDGQQTVKAHRAYQYRLYPNATQTKALDWTLDRCRELYNAALEERREAYRMGGANISRFDQQRQLPGVKDVRPEYKRIDAQVLQDVTRRLNLTFEAFFRRVAEFKRLKATGIKAERKVGFPRFKSKYRYNSLTFSQTGWKLPALDSGRLYITSIGHLKLKWSRPIDGTIKTVTIKRDAEQWYVTFSCEVEIPDAPPAHDKPAVGIDLGLEYFATLSTGEHIENPRHYRKAQAVIAKRQQAFEHKKKRVKLKDGTYRYGKNRAKAGIALKKAHRHVANQRRDLHHKTARMIVDTYGAVAVESLSIDNTTRRPAPIKNDDGTYAPNGAAAKAGLNKSINDAGWGNFLSILTDKAASAGCVIVKVNPVGTSQVCSRCGVKVPKALDVRWHDCPHCGLSIQRDENAALNILMRAGLVRSAA

SEQ ID NO: 48649 - protein, 357 aa, Baia sp.
VIKSYKFKIEPTKTQIEQIEATLNLCRWLYNTALEQRKFAYRHRNISVSYNMQQNELPQLKKELPDFKQVQSQVLQDVLRRLDKAFKAFFRRIKAGQKAGYPRFQGKRRYDSFTYPQSGFSLENKYLKLSKIGNVRIKCHRQIEGKIKTCSIIRKNGRYYACFSCEVEIRAYSTGKQVGVDLGVRHLAITSEREFFEHPKYLRKSEHKLKRLQRIVSRRKKGSNRRSKAVSLLSRMHEYIANQRKDTAHKISRHLVDHYDLIEFEDLNIQGMVQNHNLAKSIVDAGWNQLVQFTTYKAGYAGKHVIQVNPHNTSQACSECGQIVKKTLKDRTHQCSCGYVEDRDINAARNILKRAIA

SEQ ID NO: 48650 - protein, 417 aa, unknown
  TnpB Polypeptide
MLRAYKYRIYPTEEQKVLFAKTFGCCRFVYNWALNLKIEAYKQEKKSIGNVEMTNRMRSELKMEYEWLGEVNSQALQSALRNLDTAYKNFFRDTHTVGFPKFKNRKSKQSFQCPQHCSVDFVKGTITIPKAKDIPAVLHRKFKGMVKTVTVSMTHSGKYFASVLVDTAIQELPASAIQGDTTLGIDLGIKSLAVCSDGRTFDNPKNLQRSLDRLKLLQKRLSRKQKGSTNRNKARIHVARLRERIANCRKDNLHKITYALMHDSQVRTICMEDLNVKGMQRNHHLAQAVGDASFGTILTLLEYKCSWYGVDLIKIDRFAPSSKTCGKCGYVYKGLKLSERSWTCPECGTHHDRDFNAACNIKEFGLKALPSERGDVKPVDCPLVDDRPRVLKSNDRKKQEKRGGIGISEAAKSLVWR

SEQ ID NO: 48651 - protein, 400 aa, Haematospirillum sp.
MITAHRIALDPNNVQATYLARAAGTARFAYNWALAEWGRQYAAWKEDNTLPKPSQYALRKQLNAVKREQFPWMLEVTKNAPQMAIIQLGEAFRNFFAGRARYPKFRKKGVHDRFTLTNDQFTIDGSHIRIPHLGRVRMREALRFTGKIMSATVSRVADRWFVSLAVETPEEPCLPHAENQGAVGVDLGVSALATLSTGDSLPGPKPHKAALNRLRRLSRSLSRKQKGSSNRRKARQKLARLHARISNIRTDALHKLTTALVRRFHLIGIEDLNVRGMMRNRHLARAIADMSFHAFRRQLEYKMARRGGRVVVADRWFASSKTCSCCGHKLESLPLATRAWVCPVCRTQHDRDVNAAINLRHLAVSSTVSACGEESSGLGRKTKAKLASGKQEASSRFTHI

SEQ ID NO: 48652 - protein, 418 aa, Natrialba sp.
MAMEYSHRYLTYPTQQVAAELERHIDIHRQAYNYTRYEYEHVDADDIGSAYKHHYRLPDWKDEFSVFSEVNSKALQRTVTRFYQNLDGLSEQKQNGHKVGKLKWKSPKKFQSMTYSQSGFDLKNTSGRHATLWLSKIGDIPLRYHRDIPNEADIKEVTVKKETTGEWFVSFGLETDDADLPEKPALDELDSSNSVGIDLGILNYIHTSDGTTVDCLDLEDEYERLRREQRTLSRKQKGSNNYEKQRREVATVKRHIHRKVLDYQHKITTWLVHEYDAVFVEDLDVKGMLEDSHNARNKQDAAWRQFITLLEYKADLYGCHVVQVEARGTTKECASCGMETAKPIWVREHSCPSCGFECNRDANAAMNVLQRGFSELGLGWPEDTPVETVLPTDTTSVSAKRVIEAGSLEVDRESKALS

SEQ ID NO: 48653 - protein, 522 aa, unknown
  TnpB Polypeptide
VLQVPSPGAHWPGQGPVRGVDPGQGRRARLGHRGPGRPARPGTTVRQTGPDRIPGLCGQPVQGLHLPVSAVGVSAPAVETAHVVVPVILRGVSGRGQRDRGRPVHRHAVRTPVAQGHGGPVVRQSFKFLLRPTAKQATALSEMLADHCSLYNGALQERRDAYRHVSKTTIRYVDQSAQLKDIRGFDPERQGRWSFSSQQATLRRLDKAFVAFFRRVKAKRTAGYPRFRGVGWFDTVEFPKDGDGCRWDSTPHDPVTRVRLQGVGHVRVHRHRPVTGTVKTVSVKREGTRWYVILSCVDVPAQPLPATGRTVGIDLGIAHFLTTSDGAHVPNPRHGRKAADRLAAAQRALSRCKRGSRRRRKAVGKVADLHGVVRRQRLDHAHKNALDLVRAYDEIAHEDLRITNMVRVPKPKPDPDRPGVFALNGATAKAGLNRSIHDAGWGVFLGILAHKADSAGRRLIPVDPRDTSRTCPNCGHVAKENRVTQADFECVACGHAANADVVGALNVAYRAGLVLRETAPAA

SEQ ID NO: 48654 - protein, 376 aa, Nocardiopsis sp.
  misc_feature (292)..(292): Xaa can be any naturally occurring amino acid
VVSTIVVQLKLTPSPEQAAALEATLHTVNEQANRVSRIAHSEGAHRNYALRKLVYADVRAAGVGSQAAQHVVKKVADAYTTFKANLKAGNYGKPGSKRRKRVEEKPIVFRSDAAQPYDQRNLSFCVDARTISLWTVRGRLKDVPFACSPDAAKALGEHKRGESDLLYRDGVWFLSVTLTVPDDEEYDPEGFLGVDLGIVNIATTSDGRVMAGRKLNRYRGRQQRLRQKLQAKGTTSAKRVLKRQRRRESRVAKDANHCISKRIVAEAERTSRGIALEDLSGIRQRVRLRKPXLGSFIVYKARRAGVPVVFVDPAYTSQTCSWCDHREKGNRISQDSFVCRSCGVVAHADRNASRNIAHRGGVVWNAGRKSHVPPGS

SEQ ID NO: 48655 - protein, 390 aa, Scytonema sp.
MRTSYQYKLKPNKEQREKIDKTLEMLRYQYNYLLAQRFDWYEQNRCSIDRCPLICHLPDLKENPNYSTQKASLVQLKKDRPWYKEIHSQVLQEVPKKVEITFDRWLKGDCNGKKSGRPRFKGQGQYKTFTYPSFKRHHLTNNKITLSKIGDIKVTVHRPIPDGFDIKTASITKKADGYYVTLSLDDKTVPTIKPDFDSDNIVGIDVGLIDFLVTSDNERIIAPKFLRSSERKLKSAQRRVSRRKKGSIRRKKAIKKLGSQHKKVADTRKDFHFKTAKTLLNRYDVVAVEKLNIKGLTKTRLGKSVNDAGWGQFINILSNKAENAGLKVIAVNPNGTSQECSSCGHKVKKPLSQRMHNCPLCHASLCRDLNAAINIKNRGASGLKAQSMSS

SEQ ID NO: 48656 - protein, 344 aa, Escherichia sp.
VKRLQAFKFQLRPGGQQECEMRRFAGACRFVFNRALARQNENHEAGNKYIPYGKMASWLVEWKNATETQWLKDSPSQPLQQSLKDLERAYKNFFQNRAAFPRFKKRGQNDVFRYPQGVKLDQENSRIFLPKLGWMRYRNSRQVTGVVKNVTVSQSCGKWYISIQTESEVSTPVHPSASMVGLDAGVAKLATLSDGTVFEPVNSFQKNQKTLARLQRQLSRKVKFSNNWQKQKRKIQRLHSCIANIRRDYLHKVTTTVSKNHAMIVIEDLKVSNMSKSAAGTVSQPGRNVRAKSGLNRSILDQGWYEMRRQLEYKQLWRGGQVLAVPPAYTSQRCACCGHTAKEN

SEQ ID NO: 48657 - protein, 478 aa, Hoyosella sp.
MAEKFEVPGGWVLQAYQYALDPTDAQAVTLESHAGGARFAWNTMLRAVKANLSQREAEKSYGITDADLTPSMVWSFQSLRNDFNKRKHQVAVREDGTPWWAENSKEAYANACKNLAEALKNWSDSRKGTRKGPRVGFPSFKSKRSTRAFAFTTGTIRVEPDRHHVTLPRLGTLRVHESTRKLARRLEHRAARILKATVRFERGRWLVSFTCVVERAASRPAHVKRLAPVVGVDVGVKDLIVAATPDGREVLRVQAPKEFTHASRKLRALQRKAARQHGPWNAATQTKQEPSNAWTRTQAAIAKQHVRVANLRRDRLHKLTTLLAQSFDVIGTETLAVKNMMAAGGARKKGLNRSIADAGLGEFSRQLDYKTTWYSSALVKADRWYPSSKTCSGCGSVKAKLSLSDRLYVCDNEDCGLNITGIDRDLNAAINLARYARAEQSACFDNGGADRKTTASVALVAMKPESNNGSASPKSEAA

SEQ ID NO: 48658 - protein, 436 aa, unknown
  TnpB Polypeptide
MYSIPISDPRIRELITWYLRTLQKAIDIIWENIDWRYRFPRIERRKRRQVVIIPSKFKVPELPKSKSFKRKLRDDLLQNCPYARHWVDAVIRTAYSIMESWRKRYLKGGARRVKPRVEKRFARCKITLMKVDYREKRIRITIKPGEYIEVSWSSRWFAKRVKGWRVGEVVLKDDRVLIPFKSTRIIKVRGVVAWDSNELSLDGFSPDIGFIRVDLKPLQSMKIVYEMKKRVAQSKGLKEIYEKYVARERNRERDFVNKLVNGLTRLFPNTIHVFENLEKDDLISKKRVRKSRRKRNARTPWKIIQKKISERTVVVKVSPKNTSRTCPQCGCVVKTQVGRLFKCPRCGFELDRQKLASINIYLKHLRMRGLPHSNDLEKAVKGELWVGVTPSGWSPMIWIPVKGILRAVKPRVESLVSNNIKLYENQTPSPKIIFYT

SEQ ID NO: 48659 - protein, 404 aa, unknown
  TnpB Polypeptide
MLRAFKTEVELTEQQKQIFARTVGVMRFVKNLYIDRNKEVYKSEHRFVTAYEFSVWLNNVYLAENPDKQWIKDVYQKAVKQAIINTEAGFKRFFKGLGKYPKYASKSKQDTKYYFVRNGKDQPIKASRVSIQVPVMGWVFIKEKGYIPVKGIRSGTIQQRGGRYYISVLVDVDLPNKQDSAAQSDGLGLDFGIKSPVMDSNGTGMFDIEKTKRVQFLEKKLKRERRRLSRMWKANVKDKQYYTSGKKKGRLKSFSYKRPLRECRNYQKQRKVVQTILLSLYNIRLNAQRQKVSEWVRAKPAYIAIEDLNVKGMLKNRHLARSVTKRNFYRLRMLLTQKCTEYGVQLRIVNRWYPSSKTCHNCGYYKADLKLSDRAFDCPECGAKLDRDYNAALNLRDTKDYTVM

SEQ ID NO: 48660 - protein, 392 aa, unknown
  TnpB Polypeptide
MAKYHRTYQHRAYTSRSGYARITEVLRESARLYNASLEEWRWAYRAGVSVSLYSQYRELTAVRAEDEFWGGISIQVGRGVLRRAERARQAFYRRVKAGEKPGYPRFKSSRRWHTIELAGVTASMVKARGNYSAVRIKGLPEIKLRKGLVLPDGDLKALTVTLRGRRLFVNMTYEVELAALPASDAAVGIDMGVSDRLALSNGQAVGRRRKPNTRLKRAQQRLSRCRKGSNRWRKRRAVLSNQQHRERVRNRLECHRFTTELVRRFGLIAVENLQIKNMTASAKGTIEEPGRNVAAKSGLNRSITEQTWGLIRSQLHYKAAWAGRELVVVDPMFTSQRCSGCGAVSAANRQGKHYNCTGCGMAEDADVNAALNILNSALAGRRWPDSRLPAAS

SEQ ID NO: 48661 - protein, 282 aa, Nocardiopsis sp.
VWSASGGPRTYPWASTPTPPTVSPVPGWYGRPMAGTWCYGCAPRSRSPHPLSARGVGIDRGVAKPLALSDGTFREHGPWMTMGEAERLRRLERRAARQRRHRTSGQPSSNRLRRTYDQIAGVRAKAKRRVLDWQHKVTYALAEEFGVVGVEDLHITSMVRSARGTMEAPGTNVGQKAGLNRAIVGQAWGRTVTLLEYKLADRGGHLVRVPAPYTSRRCSACQAITEGNRESQDRFVCKAPGCGDNAAHADTNAARNIEHLTKQQAPQDIVGARTWSPCHQAG

SEQ ID NO: 48662 - protein, 363 aa, unknown
  TnpB Polypeptide
VNKAFKVRIYPNKEQQILIDKTFGCTRYVYNYMLNLKLKLYENFNITLSFHSMCKVLTELKRHREWLKDADAVALVQCLKDLDVAYQKFFKGNGYPKFKSKKQGKNSYRTYKNIHLDIDSRRVKIPKVGWIRFRDKSNFKGLTKINNITLSKTFSGKYFVSISAEVDIATFEKTNQNCGVDLGLKDFCILNDGTKFENPEFLVHNEKRIRLLQKSLSRKIYGSKNYEKARLKLAKFHEYITNCRKDYLHKISLYLVKNYDIICAETLQIKNMVKNHKLAKSISDVSWYEFCRQLEYKCLWYGKKFVQISIYFASSQICSNCGYKNLDVKNLNVREWNCPNCGTIHDRDINASTNILHEGLRLV

SEQ ID NO: 48663 - protein, 383 aa, unknown
  TnpB Polypeptide
MKLTLKIKLLPTDEQANLLLDTMREANTVCNAMSDVAWEKKIFNNFKLHHEVYHPYKATFKLSSQILVRCIAKVADAYKLDRKTKRQFRPLGSIGYDSRIMTYKSESLVSLWCIGGRQKINFICHNMKYFPYIKGEADLVYKKGKFYLFQTVDVPEEDVKDVEEFIGVDFGLTDIIVTSDGVKHSADGLNAYREHRQKVRSSIQAKADTSKRSTKRNCRKLSKRLQGKERTHSSIVNHTIAKSIIFSAKESGKGVAIEDLTNIRFTSKRRNKKFRTKLGKWSFNQLRSYIEYKGILYGVPVVIVDPRYTSQTCNVCKHIGKRTNKHFKCNNCGNDTDADVNASINIATLGRAVNHVERSNDMCCSIAHVYSGLKPIPSLCVGG

SEQ ID NO: 48664 - protein, 427 aa, unknown
  TnpB Polypeptide
MLVIRGYKYELNINNKERTVLTKCAGTARFAWNWGLANRNQRYQTQTGVARYTDAMKQNKELNRLKRTEFPWMYEVSKCIPQEVLRNLDRAYQNFFTNTRKRKQKRTQQFVGFPKFKKKGRCKDSFRLTGTIKLFLGDKLVQLPRLGKLRLKERPNLPTSARILNVTISRTADRWYIAFAVKEEQSDPKPNKGPLVALDTGLSVFAALSSGIPISRPKFLLQQARKQRRLSKAHSRKQKGSHNKRKSALRLGRFYRRITNQRQNFLHQTSTYLAKNHSVIVLEDLHIKGLMQNRKLSKYWADLSHGLFQRILEYKTVWYGSTVIKIDRWFPSSKLCSNCLYYRRDLPLSTRIFHCPLCGLELDRDQNAAFNVANYYWIYQFRLFPVAESSAETLNACGEVVRPASKQAHVEEAGRTAPTKAGKKSYS

SEQ ID NO: 48665 - protein, 444 aa, Nostocales sp.
VIFLYKCQPNLIKPDKSLKAILEFICSQSHKLTNCGIYYARQIYFKTGKIIKKFDLINEYKNNKHYQVLHSQAAQQTLLSVFESFKSFKALNSKYRKGELQEQPRLPKYRKPPGLAAISYPKQALKLVEGQIQIPLGTTINRWFNLKNFLLPISSNLNFDDIKELRIVPRNRCFYVEFVYQTSETQKQQVSPDRCLGIDTGIGNWLTCVSNVGTSFIIDGRHLKSVNQFYNKQIANIKQNKYQGFWSKRLAAITEKRNRRMRDAVNKAARLVIDHCLKQGIGTLVFGWNKGQRQEVNLGTKTNQTFVQIPTAKVKNRISQLCEQYGIEFVETEESYTSKASFLDHDFLPKYGDAARSWGFPPGVTAEPRSGEKPVTWKESGKRVKRGLYRTANNFYVNADANAAANILRKVKATLGLNLDGVYRGALTTPLRVRFWAASESPCL

SEQ ID NO: 48666 - protein, 569 aa, unknown
  TnpB Polypeptide
LPNWAWLNPAFQKNPITNSWFNVKSYDNIDPAFRAEPWELLRTALVLPEPVVKPAPTNPKAKPKTQPKVSAKPRDKRQKKAPFDLNATVSQLNASAKASNPNKAPTVPIKVRTRKKPPPKPPDPVVSKAAKPKAVKPSKPPPVGVKKIKLYPTEEQAGLLRRWFGTARWTYNRALNTVKEHNAPVQKKILRAACVDNSLWANEQSLAWVSETPYDIRDEAMIDVIKAYKSNFAKNTGKKFELKYRSRKRQTHDSIVIHLKHWFKGIIHRKYWVGDPIKASEPLPETLAYDARLLWNMRLNEFYLCVPRAAEMRRDNQAPPRSTIIALDPGLRTFQTTYSPDGRTLEFGRDSKVNPTGKTNKKGNGGISRIMRLCLHLDKLQSKWSQPDVRHRKRYTMKRAGARIRKKIQDLMLDIHHKTAKFLCENYQVILVPLFETKHMVCRLKERLGKRNGSKTARMMMTWSHYRFRQILLNKAKEYPWCQVLVVNEAYTSKTCGQCGFVHYKLKSAKVFKCPRCKVEVDRDVNGARNILLRFLSTDTRSSGFRAQIFNATPSGVLGACTRLPPRGV

SEQ ID NO: 48667 - protein, 794 aa, unknown
  TnpB Polypeptide
MSGKPKLIVFSDQVEVDWGSLDPASPSPSPDAQLPPQDPSPRRRTLPKKKPRQPKKTANSKDKSPKREKPSHRSAVIPSPHGAAVAETPDGAAVADATTAEKVSDPKQEPYYHVIKTNLANIVTVHTDPCIIVDAVERVHKLAVHIFQFSKLYFMYLLDAGQELPKINGHLFTTIAKVIAENSRGAKSARVSEATGQLKVHLLDFHIKHYRDTMTAEPLSTLNLKTPLDYVGVHMTTVYENNVKMHYYEHLTLFLQSVYPVSPSASKEEKAAVNWLIRQRRKFVMNGAGLYPYVPETEKNMEKQESVYPEPLSENDPLLWHLEYLLPNRPIAKGKVNYDMKMPGRWQDYLGCMVYMMKYVESLGRKIYQVFPLRSDMIPKHIRLDTNSILELLLSRAETKRIGSKPYYHDHLTEEKDFLWERFFKTDMRCFCPPRLSGPWRFHHQIETDGVSVSILCISKTAGKLASKLSSEESKFAPKQAHRQSSTEYLDQLQDKSKLQGLKVVGIDPGKSDLLYCASATGERTADTFRYSQKQRNAERKSKKFRRKREKLTKITLVKGKSAEQWQAELSQLNKKTLDFEAFKAYLAKKNELNFKLFDFYARPVFRKLKWYEHINQQRSEAKMLNRFEKKFGPPEKTLVVFGDWCENGHMKHSEPTKGKGFRQLFRRRGYREWLVNEYGTSKQCYNCQHAQGVNKKFLYVDKRKPWKSELKNALSAMDEDSKQVLCHGLLRCESCKMPWNRDLNAALNIQRAALASLAGERRPAYLRRPEKEEDNTDDAHTFGGEETCILAHD

SEQ ID NO: 48668 - protein, 446 aa, unknown
  TnpB Polypeptide
METIKFCVKGIISPKDKALQILQKELKNYKNALIPKIQNAVRKVVKDRVFQVYAQQKWMLDKKITGYIKNLPFHPMTFHNQSVRLEKTEEGQFYIHFKTRQEEKEAVCHLQIPMKYRSQVEKACGEDNPVLGQVELIEDNKYGWINVHITLRLPKPEPYEPKGWIGVDVGFCKLATSILAVPYVEARSIGHISSPLKGVTESPSSEALSSIAFNQQHKADGNTPNQGYKNRLNTIIIKFSNPTIHGKDYKTRIIQLKYLLKDYARKGKGWKKWNFRLKQTVKYAVGTVAKEIIAKAEKHKAGVAMENLTFQSQTKRWLIPRYKLMVAIKTYCERKGIPFKTVPPRNTSITCPKCRYVDAENRDGERFTCRRCGYQADADISAAMNIAHLAIYEEVEHLNSRKSAIAIGFTPMVKEARLHAETSGDVATPLSTNEPMTFIRTGANPV

SEQ ID NO: 48669 - protein, 368 aa, unknown
  TnpB Polypeptide
LLSQDAILFQTCGSQHALGSVSSYQTRLEQWKAEGQKTGKPYLKSEQYAMPVFYHDVMYRENTEEKDAAFLKLYDGHDWKWFAVRLKHTDMEYLRKHWSGKKASAPTLEKKHDKYFLRFTYAEEVSLSRTPVKEQTICSVDLGINTDAVCTIMRPDGTILGRKFINFPSDKDRMYRVLGRIRRFQREHGSRQVQGRWAYAKRLNTELGKKIAREIVFYASENRADVIVFEYLEMKGKLSGKKKQKLQMWRKRDIQKRCGQQAHRKGIRISRICAWNTSRLAFDGSGKIDRDIQDHRLCTFQNGKRYNCDLSASYNIGARYFIREILKPLPATERSLLEAKVPAVKRRTSCVYADLRDLISEMELQKAA

SEQ ID NO: 48670 - protein, 384 aa, unknown
  TnpB Polypeptide
MRRAYKFRAYPTRRQEQHARALLEAHRQLYNAALEERREAWRHGVTVRYGDQSAQLTEIRRADPAGQGRWSFTSQQQTLRRLDRAFQAFFDRVRAGGPAGYPRFKSAARWDSVDFVDGDGARWRDPEGRWARAYFQGVGQVKVSAHREVVGRVKTLRCKREGRRWYVIVVAERSPVPLPATGRQVGLDVGVARFATTSDGQVVPNPRFLAASAGALGAAQRVVAGCRPGSGNRRRAKQKVAKLHRKIANQRRDFHHQTARRLVDTCDVIAVEGLEIPNMTRSASGTVQEPGRNVAAKAGLNRSILDAGWGQFLVILLAKAEGAGRQVITVNPWRTSITCHRCGAQCARPRQDTVVCPAHGGMDADVNAACNILTRAGLGSGRAA

SEQ ID NO: 48671 - protein, 248 aa, Bacillus sp.
MVNGKSTRLKVRALLIDKYNRNFELLKHKLGTLRITKKSAKWIAQISVTIPTNEKMGTKILGVDLGLKVPAVAITDDDKVRFFGNGRQNKFMKRKFRSVRKKLGEAKKLNALRQLDDKEQRWMQDQDHKVSRGIVDFATDNNISVIRLEQLTNIRQTARTSRKNEKNLHTWSFHRLAQFIEYKATLVGIKVEYVNPSYTSQTCPKCSGKNKAQDRKYKCQCGFEKHRDIVGAMNIRYATVVGGNSQSA

SEQ ID NO: 48672 - protein, 378 aa, Bacillus sp.
MEVNQIMMNKAYKFRIYPNQAQAILIKKTIGCSRFVFNHFLSLWDNAYKETGKGLTYGTCSAKLPAMKKELVWLKEVDSIAMQSSVRNLADAYTRFFKKQNSAPRFKSKKNNVQSYTTKQTNENIAVVGNKIKLPKLGLVRFAKSREVEGRIVNATVRRNPSGRYFVSLLVETEVQGLSKTSSYIGMDVGLKDFAILSDGTIYKNPKFFRSLEEKLAKAQRVLSRRMKGSSRWNKQRVKVAKIHEYISNARKDYLDKISTEIIKNHDVIGIEDLQVSNMLKNHKLAKAISEVSWSQFRSMLEYKAKWYGKQVIVVSKTFASSQLCSCCGYQNKDVKNLNLREWDCPSCRANHDRDINASINLKNEAIRLLTARTAGLA

SEQ ID NO: 48673 - protein, 153 aa, Halomonas sp.
AKAHERLANTRADFQHKLSRQLIDDNQAVVVETLKVKNMLKNRKLAKHIADASWYGLIQKLAYKAEAQGKHLVKIDQWFASTKTCAGCGHKVDKMPLSIRTWDCPGCGTKGIDRDINAAINIRQQGIIKLRAEGLSVPANGGMRKSGHASVAA

SEQ ID NO: 48674 - protein, 233 aa, Halomonas sp.
LSPSPPISRITVLVKGKVIKSINAKYNKDKAALAKKDKKRHIRSKVGKRHARIHDYFHKVSHWIVSECVRTCTGKLVIGKNLGWKQGVNIGRVNNQKFTAIPHAKLIDMIQYKAEEQGIEVVLMNEAYTSKASALDLDPIPDYDEARKQKPTFSGRRVKRGLYRIASRQRINADVNGSANIMRKEIGDEWISDHLRAGKGVVDTPMTITHIDARLSLEACQRASETTSNGVAA

SEQ ID NO: 48675 - protein, 415 aa, unknown
  TnpB Polypeptide
LYRAVKVRIYPTPQQSQKLSQVMGCARWWWNYALNLCNETYQETGKGLSQVALNKVLPKLKKSPGIAWLKECYSQVLQSTTLNLTKAFKNFFDKRAKYPRFKSYHGKQSCQYPQNCEVVDNGVKIPQVGVIKASIHRLFDGQLKTVTITKTPTGKYYASLLFDTEQETPKVVITGKVIGIDLGLKDFCVTHDSNKTSKYANPKHLKKHEKNLARKQAKLARKKKGSKSREKARKLVAKVHERISNARQDFLHKLSRRIVDDNQVVVVENLNVKGMVRNHNLAKAISDVGWGMFVNFLDYKLEQKGGLLVEIDRWFPSSKTCSNCLYQMSEMPLDIREWICPSCGTHHDRDENASKNIRAEGIRQLALSQVEGLLVLGTRTAAEEGEIRPKGGRKSVLRHSPVSSEAPTSTKRSSE

SEQ ID NO: 48676 - protein, 386 aa, Butyricicoccus sp.
MRELLKSFKTEINPTAEQKVKINKTIGTCRFVYNFYLDHNKALHNKGEKFMTGKSFSVWLNNEYIPNNPDKAWIKEAYSKAVKKSIENGCIAFTRFFKHQSAFPNFKKKGKSDVKMYFVKNNPKDCRCERHRLNIPTLGWVRIKEKGYIPTTKDGWRIRSGTISIKAGRYYVSVLIEVPDVKNTNNNSKGIGIDLGLKDFAIISNGKIYKNINKSARVKKLENKLRREQRCFSRKYENLKKGESTQKNIQKQELKVQRLHHKIVNIRTDYINKTIAEIVKTKPSYITIEDLNVSGMMKNKHLSKAVASQKFYEFRTKLKAKCDENGIELRIVNRWYPSSKICHCCGAIKKDLKLSDRIYRCGCGYVEDRDFNAALNLRDALTYEIA

SEQ ID NO: 48677 - protein, 395 aa, unknown
  TnpB Polypeptide
MYITKRKVKHKRTQQLDALARESGRCYSKVVSLVRKTFKKKGFWLSKGVIQKYMRHKKYTLHSQSVQACADSYFDCLKSFFQVRKSDPEAKPPKRTRKYFKVRWKSGAIRLKNGQLILSNGKGQDPVILENISEKPKYVEMHFKKGHYYFALVYKVDVPLKQETGPTVSVDMGEIHPIVSFNGERTTLYNGRFVRSIKRYREKIKTNFQAKMDRCEKRSRKWFRLLKAKRRTLEKLDAQLQDAEHKITSRFISDCQRAKADTIVIGDLNGIRKNIKYGKKVNQKLHQWAFSRIADKVRYKAELAGIKVVSESEAYTSQTCPKCGHRKKPSNRNYHCKHCDFKYHRDGVGAINLHRKVSGVINTPVSRDPGSPLGVRFNWHLSRLGLNPRKPAISK

SEQ ID NO: 48678 - protein, 417 aa, unknown
  TnpB Polypeptide
MYLTVKQQVKHLTKEEYNTLRELCRISKNLTNQAIYNVKQYYLQEKQYLRYESNYYELKNSKNYKLLNSNMAQQILKDVDSMFKSFFALIKLAKQGKYNFKHIRLPKYLHKNGYSNLIISQIRIKNDNILTIPFSNTFKKKHETKIHIKIPKVLENKKIKEIQIIPKFNARFFEIQYIYEVQEKNINLNKNNALAIDLGINNLCTCVTNTGKSFIIDGRKLKSINQFYNKRNAKLQSIKDKQNIKEQTKQQYLISRKRKNRVDDYINKTCKYIINFCLFNDIGNLVIGYNQSFQNKTNLGKKNNQIFTQLPFGKIREKLEYLCKIYNINYVLQEESYTSKASFFDRDDLPIYNADNPQEYTFSGKRIKRGLYKTKNNYLFNADCNGALNILRKSKVVDLNILYNRGELDTPKRIRIV

SEQ ID NO: 48679 - protein, 209 aa, unknown
  TnpB Polypeptide
LPACCSTVKTKQRRKDRRKKFLGMDFAMHGMCVFSTGERAGYPMFYRNAEKKLAREQRKLSRCEKGSRNYQKQKKKVALYHEKIKNQRKDFQHKLSHSLAEDYDAVCVEDLNLKGIAGGLHFGKGIQDNGYGQFLSMLGYKLEERGKYLIKVDRYFASSKICSVCGHKKKELALSERIYLCECGNRMDRDVNAAVNILKEGKRIYKKCA

SEQ ID NO: 48680 - protein, 280 aa, unknown
  TnpB Polypeptide
MELKETTSSMVKAHGKRTHLKIKGLPTLTVRPTGLPSSDQLKTLSITRRHRRLYVNLTYRVDTVDLPKTHQSVGIDLGIIDRLVCSDGLVYPRRKSHVDQIKRIQRRLSRCKKGSRLFRKRKHVLSNLHERERIRNRNACHRITTQIVKHNDVIVMEDLKIINMKKSAKGTRDKPGRQVKQKSGLNREISYQSWGLLQVQMAYKAEEAGRLFLKIDPRHTSQSCSVCGMVDPSSRKGKRYGCTSCGQVMDADLNASINLLNRGLATLPGGTIPGAVARAA

SEQ ID NO: 48681 - protein, 383 aa, unknown
  TnpB Polypeptide
MFGRPTTACQGPRRWHCAASSMPSSANNSRGCSKSTKCAPQMAIIQLGDAFRNFFAGRARYPQFRKKGVHDRFTLTNDQFSVDGCRIRIPSLGWVRMREPLRFSGKIMSATVSRVADRWFVSIAVDTTDDSHLPKAENQGLRSDTSPAQQGKDVVGVDLGVSALATLSTGETVTGPKPHKALFDRLRRLSRSLSRKRKGSANRAKAKAKLALLHARIANIRLDALHKLTTDLTRRFHTIGIEDLIVRGMVKNRHLARSIADMGFAEFRRQLQYKATMHGGLVVVADRFYPSSKTCSACGHVLAALPLSVRAWTCPECGARHDRDINAAINLKNMVVSSTVMRQPCEAGSGCDACGEEGAGRRRKTTAKPASVKQEVSSRFSQN

SEQ ID NO: 48682 - protein, 405 aa, unknown
  TnpB Polypeptide
VEPPAERSAHLFIEKKNKKTVGIQTRAFKFRIYPTKQQEKHLLYHIHLSKELWNSLLAKNKEKYWEEDRFLSKSEMQLMIKKSDLYSQTAQVLSHRLHNAIRKKTDAKKQGITCGFPRFKSFDRMKSLNYPQFGFFLGQKLKVTPFGEICIVKHRQMEGRIKTLTLKRESSGKWFAIFCAEKEKQAPEQHTGPAVGLDLGLTNFAALSDGTMVKNPHHFGKWAKKLGVAQRRLSAKKKGGKNRLRAKLKVAKLSEKVANSRLDFLQKTAKKLLSSYSFIALEKLRIQDMAQQKYGKWINDASWGMFTNILGYKAEEAGCQLVFVDPKNTTKECSACGTLVEKTLQQRQHVCPNCGLKIDRDTNASINILNRATAGIAGSNACGDGEKRTPSLKQEAQAFGQGVIH

SEQ ID NO: 48683 - protein, 390 aa, unknown
  TnpB Polypeptide
MNRAHRIRLYPNKTQARLLETSCNVSRFAYNWGLERWQIYYKCGLKLTPNNIKKDFIRLADKLFPWIRGAGKSTYEQAFNDVRFAFKCFFRRVKAGQKPGYPRFKSKRLSRWSFYVANDRIRFYDKRVSIPKVGRVKMAELLRFNGKIMSATVSMEAGQWFMSFSVELPDLPKREVRSALGIDVGISKSLTCSDGRAFQSPKPLKRHTKKLRRLQRSFSRRAKGSKRRKKKQQEIARLWQHIRNVQGDFLHKVTSKLCNENQVIAVEDLNVKGMLKNHKLAKAVSSQCFGMIRQMLEYKAQHFVKVDRFFPSSQLCSICGSKQKMPLHRRLYKCPCGYEADRDWNAALNIVRQALSEFTLVDRKALTRLNKRVKLCLAEARTETVRFSSF

SEQ ID NO: 48684 - protein, 411 aa, Halococcus sp.
MYYAYKYRLEPSDTHREELDRHRDICRQLYNHALYRFNQIPEDAGTLNQRVRSIRDELPSLKDWWGGLSDVYSTVLQTAVMRIEQNIKGLSKLKENGYGVGRLKWKPPRAFRSFTYSQSGFKLDKKGGQTVLSLSKLADIPIRLHRAIPDDATVKQVTLKKEPTGEWFATFGVEFDRAPPEPPTGPEKVVGIDVGILKYAHDTDGAAVESLDLTDERERLEREQRALSRKEHGSANYDRQRRRVAECHADLKRKRRDFLHKLSNYYAREYDLVAVEDLNVRGMLESPSNSRNTASAAWRTFLSMLEYKCEREGTHYVPVEPAGTTKECAACGVSSDKPLWVREHACPSCGFTADRDANAAWNILSRGLERIGVGHPESTPVETALPVDTAVSAKRVIEAGSSALNERVSAK

SEQ ID NO: 48685 - protein, 285 aa, Halococcus sp.
MTATATKTLEATLVTPTTGKERGLQRTVANYRRALRKSFGARATTQAAVNDVVTPYTLTSYAKDALKSYVPKLRDTYGASELADDHPVRFTNRGFRLDHSADREAEFCWYVPQAGRGNGFWMPLHINPEQRGLWFGLLDGDLSAGEFRLQERRTRWVLHVIVEREVPEPGKMDEPTHVGFDIGESKLLAGCACRDDGTPVRPMFVDGGRARHLRKEMYTTLKRFKSAMPPSGAPTNGPTTTRTRSPTSLRRHPGGPSSTPSPSSTRLSPSKTSRTSANGSIMARI

SEQ ID NO: 48686 - protein, 501 aa, unknown
  TnpB Polypeptide
MKVRRVEQRLIQRKDKSYKELDSLCFRSKKLYNDVLHVNRQIFFSNLRKEKRIRKKYKNSPLLEEKLSKFKKNRPKLLSYIELASVFKTHPSYLALPAKVSQHVLKLADQAWISYFEHLKVKKPDEWISPPNYKGSIDQDREDGRQVLFYTYQAISYSELKKGKIKLSGTNLVFRSKVAKLATKHPDKYKINGVRLVPHLDYIMLEVVYTMEVEPASDLDPRRIAAIDLGINNLATVVFNFCKEPVIFNGKPVKSLNRYYNKLIAKARSELERVKGDRKVTRSEGQKQKQDVQHPERNVPVQNVKQKTSHHIRSLYRRRKAKINHFLHNVSQDIVQLLVENQVSTLFIGYNVGWKQGLNLGSKMNQKFAYIPFLTLINMIKYKAEAKGVTVLLQEESYTSKASYLDFDQLPTYQKGVKHKGIFSGKRVKRGLYKTKEGILVNADVNGALNIMRKGLYFLKTGELNPSMIKVIRRDKQRILAFVVKPVMAEMPYEATSNRIL

SEQ ID NO: 48687 - protein, 424 aa, Moorea sp.
MRIAYQYRLKLTKEQRGKIDHWLSMLCSQYNYLLADRFNWYEQNRCPVNACPLVCHLPKLRNNPDYYSQKKTLPNLKKTHPWYKDIHSQVLQDVVKRVKLAFERFIKGDSNGKRSGKPRFKKQHRYRTFTYPQMKEWCLEGNLINLPKIGKIKVVLHRPIPVREASATPNGFKIKTASVTKKCDGYYLILSLEDKTIPEIKPDINPDLIVGIDVGLKEFLTTSDGQSVEIPQYYRKAQKRLRVIQKRVSRRKKGGSNRLKAIKQLGLQHKKVADKRKDFHFKTANYLLSKYDVVAHEKLNVKGLSRSRLAKSVLDAGWSSFLTILTSKAVRVAWPTALNAGLLTVPVSPKNTSQNCSNCGKKVPKKLHVRWHDCPHCGCSLDRDHNAAINIKNRAAGQSVLKAQRLLRDARIGWEAYTEPARSV

SEQ ID NO: 48688 - protein, 390 aa, unknown
  TnpB Polypeptide
MLKHKAYKFRIYPTKEQEILIAKTIGCSRFVFNHFLAKWDETYKGTGKGLSYCSCSKEIPVLKQEFDWLKEVDSHSLQSSVKHLIDAYDRFFKKQNKRPRFKSKRNPVQSYKTNIQGKSQLPEVSILGNMLKLPRLKWVRFANSRQVVGRILNATIRRNASGKYFVSLLVEQEIHELPKTGSSIGVDVGLKHFAILSDGMVYQNDRYFQTLEKKLAREQRKLSRRQRMALAKKVKLSEARNYQKQKRKVARIHEKIANKQTDFLHKVSTEIVKNHDVIGIETLQVKNMQKNRRLSKSISEVSWSTFFLMLEYKAGWYGKTIVKVGKTFASSQLCSGCGHQHKDVKYLGLREWTCPNCGIHHDRDVNAGLNLKKEAERILASSTVRTTGLA

SEQ ID NO: 48689 - protein, 367 aa, unknown
  TnpB Polypeptide
MKLTAQLQLQPTPAQAQELRATLLAANAACDALSSMAWEHQEFGKYGLQKLGYHAVKEATKLTAQVVIRCISKVADAYKLDRKVKREFKPLGSIAYDDRILRYKLDKGTVSIWTVAGRMEIPFVCGDKQRALLATRQGESDLCVVKGKWFLLATCEVEEPETVAPDGVLGVDFGIVEIAVTSEGQSYSGEKVKALRRKTREYRRRLQKCGTKSAKRRLKKAAKRQARFVKDTNHCISKALVKEAAQTKKALALEDLTGIRERSNGLNREMRWQMGNWAFAQLRAFCQYKARKAGVALVVIDPRNTSRACAECGHCEKANRKSQKKFLCVKCGHSQNADANAARNIALRGTVNCPFVSNPGSGTSPLR

SEQ ID NO: 48690 - protein, 347 aa, Bacillus sp.
  misc_feature (308)..(311): Xaa can be any naturally occurring amino acid
  misc_feature (347)..(347): Xaa can be any naturally occurring amino acid
MTKENPSNYKTLQIWIKKGHRMYSYFQECCHNAKNMYNTTNFYIRQVYTELTQEKELQPLQKEVLDNIHKNIGKMNDTQLLAYQKKLEKEKLKPKEEQKEITCNLFSEPNFEKPYVDYNFLDALFKVMIQNDYRALPTQCSQSIMKGLFQNWKSFFTSLKDYKKNPNKYAGTPRVPKYIRSSEKEILYTNQDCIIKNGRFLKFPKTKLQLNIGKLGFTEGKLKQVRVIPKYNEYVVELVIDVPSEQQIIEENARYMSIDLGIDNLATIVTNTGMKPVLVKGKHVKSINQYYNKMKSHFTSILRNGKQXXXXNMGKRNNQSFCHIPHSLLIQMITYKANAVGIQVVVX

SEQ ID NO: 48691 - protein, 376 aa, Microcoleus sp.
VLNKEYAQPKERKSQMQLTERHIIKSTEHRFAQIDELAFKSKNLYNAANYVIRQSFLYGWGYVNYNEMNRLMKSHEAYKALPAKVSQQILMVLDKNWKSFFEAIKNYKTAPSKFTGRPKLPKYKDKAKGRNLLVYTIQAISSKQLKKGIIKLSGTEFSLKTKVNTEHICQVRLVPKCDSYVVEVIYDKPESTCSNTNFVASIDLGLDNLVALTSNQSGFIPLLINGRPLKSINQFYNKRSSRLQSHLKGNRRTSPRIQRLTRCRNQKVDNYLHHASRHIIDLLTAKQIGTLVIGKNAQWKTEIDLGKQTNQNFVSIPHSRLIEMLEYKARLVGIKVIVQEESYTSRANFLGLDSIPVYGKTEKQPVFTGKRIKRGL

SEQ ID NO: 48692 - protein, 508 aa, unknown
  TnpB Polypeptide
MPSKTVVSRTYPRVPYAAFSKSGDPLDLDEVLDGIRKDAELSAHYALRELTEQNLALVTYFDRYKPAEAGRRMGLFLPSEVKKRLRSGSSRLERMFREQVVVNLRSWTTRAGVASGNYTGYVSAGWRRTVKDSKPRALQPRLALSATDKGYHKNFSVTPERISLDMVVQGQWVTLHFPTPPQLLEPGCEPGVPDVWVDKNNRVMFGFHGTTDPGRPEFSSRYVIGVDVGVANPAAYVVWDTEKKQVVERSLLGQRSRSLSNKIKRGARQVASLKRKGKDKEAVSHREHLSNRRKELSILIAQEVADAAWKYDNALVVFEDLSHIKNTMKFGRWFRGEVYRRTRDMIEADGGRVLKVNAAYTSRKCHACQSNLDMQNYSQPHCTTCGVTHHRDINAAANIAQKVNHAKACQTRKRHATKTKRVRRSKCHVKPLKHPGTKNRPTPKAPQNKPKTDVPAAPSKEVSKGMCPAESRVSAVDHLEWFQTTSGTTIPTRDLPIGNTIDTVYLKE

SEQ ID NO: 48693 - protein, 453 aa, Paeniglutamicibacter sp.
MESGRRNYRFRVYPTPGQAAALERQGHAARALWNLLHAAWEANGFRVGLDWYTQEIKNIRKDAEYIWFADLPAQAAQAVWKDYFQAWRNCWNPEHPAKAPVFKKRHTRMGVDIPQASHFKPTRINDKYITVNVPLAGKIRVRLHRKVDFTQVTGAHLNRDGLGWHITLRTKTGPIIKPTAHKRAAIGIDRGVTVPLALSDGTNFWHPDFTTATERTTLLRLERRLARQETRRKKTNARTSNRQRRTREAISAINSRQTRRRKDFLDTASRKITTDYALVVLEELDIGNLTARAKPKPDPKKPGVWLPNNAAAKTGLNRSILNEGWGGFRRMITYKAAEHGGQIVTVDARYTSQTCANCRTRGIRESQAKFRCTTSTCHMFGITVNADTNAAEEIETRGTELASSDTTVATAPPAPTTVSIPPAKVPIESPPSVIGNSHLHQLHLEVHERYLRH

SEQ ID NO: 48694 - protein, 387 aa, Thermus sp.
VQTLTLRCTLKPTPEQAAALEKTVHLFTQACNHTLWVARERREFRRFKLHHLVYKDLRGMGLSANLAVQVVARVGRRQGNRAKAYRPTSCAFDQRTLSLRGEAVSLSTVSGRMRVPMKLGEYQRQVLGKAVSVQGGVLVRGSKGRWHIYLTLRVEVPEPPQGGGKVVGVDLGQRALATLSTGVQFSGGPLKGKRLHYLRKRAEIRSKLDRPSLRTRGVKRLWARLGGREARFVNHTLHTLARRIVDSLEPGDTLAIEDLTGLRGRTRRRGPEERYLHELWPYARFRSFLEYKARLRGIRVVAVDPKHTSQECPRCGHTARENRKTQSLFRCVACGFQHNADWVAATNIARRAGSTGMGRCKPAPILRVSSPHRPPSESPSQNTLVLG

SEQ ID NO: 48695 - protein, 354 aa, Escherichia sp.
  misc_feature (308)..(341): Xaa can be any naturally occurring amino acid
VKRLQAFKFQLRPGDQQECEMRRFAGACRFVFNRALALQNENHEAGNKYIPYGKMASWLVEWKNATETQWLKDSPSQPLQQSLKDLERAYKNFFRKRAAFPRFKKRGQNDAFRYPQGVKLDQENSRIFLPKLGWMRYRNSRQVTGVVKNVTVSQSCGKWYISIQTESEVSTPVHPSASMVGLDAGVAKLATLSDGTVFEPVNSFQKNQKTLARLQRQLSRKVKFSNNWQKQKRKIQRLHSRIANIRRDYLHKVTTTVSKNHAMIVIEDLKVSNMSKSAAGTVSQPGRNVRAKSGLNRSILDQGWYEMXXXXXXXXXXXXXXXXXXXXXXXXXXXXXXXXXXNSQDSTKRLCSNT

SEQ ID NO: 48696 - protein, 420 aa, unknown
  TnpB Polypeptide
MEFAVQSNVIRHLSKEQYQTLRELCQLSNNLYNVALYNIRQYFFNQKLFLTYESNYHECKDNENYTMLQAGVAQQTLKVADRSFKSFFNLLKKCKTGDYRYHDVKIPHYRKKGGYFNLILSTNAISVKNGYFKLPISREYRKAHPNMEDILIPYPDRLNDAELKEVRICPYDNGRYFKIQYVYHWYKEEVNVNPANIMAIDLGVENLATCTSNVGTPFIMDGRKLKSINQYWNKEKARLQSIAMKQGQRTTHRINHITAKRNNQVKDIIKKSARYIINNCIEHQIGTLIVGYNKDFKRSVNIGKVNNQNFVQIPLGDFRQQLEFLCWTYSIEYIEQEEGYTSKSSFIDNDILPEYKAEQPYLGRFSGKRIYRGLYQSADGTVINADVNGSANIGRKCKQNFTIEELSSGLLTSPKRIRVI

SEQ ID NO: 48697 - protein, 348 aa, unknown
  TnpB Polypeptide
MIRKSTVNLKHANRGKLENLRTIAEEYVRIVNLFIDILWQQKQFSGSFVKDTTIESWISARLKQAAAKQALSIVKSQRKKKKKHKPTLNRLALELDSRFIAISQDINHFDIWLKFSSIGNKIIINLPSQKHYHFNKLIHDGWVIKKSARLRINENGYFIDIYFQKQTPDLRGSGKNLAIDIGYKKLIVSSDNKRYGDDKIYDKISRKKQGSKAFKRALIERDEKVNVACKKLPLNNIKTLYAEDLKDVKKKSKGKIRKKFNNKLQRWTYPKVLEKLAMICEERGVEFVKVPPRYTSQRCSRCGVIRKSNRQGEVYKCACGNVMDADYNASLNILHLGEYGLQAFKQVL

SEQ ID NO: 48698 - protein, 395 aa, unknown
  TnpB Polypeptide
MSRYRLRPSPAQEAVLLGHCAHARYVWNLCVEQESHWRPGRAKMPGFAGRCRQLSEARAAQPWLAAGSVIVQQQAIRDHDQAMRNYYAGTHRRPSWRKADRDEGFRIVHLKPCDVRRLNRNTGEMRIPKAGWVRFRWSRQVPQDAKSFRVTRDRAGRWHVAFAVIPESVPAPGTGEVAGIDRGVAVSAALSTGELLHAPGLTARERKRLRRLQRKLARARRGSNRRARVRLAIARLKARQRDRRTDWAEKTSTDIAGRFDVIRVEDLKIKNMTRSARGTPAEPGRNVRAKAGLNRGILGSGWGLLVRRLQDKAPGRVEKVRPAYTSQRCSACGHIAAGSRESQALFRCVACGYTSNADVNAARNIAAGHAVTARGGFRAAGPANCEPQPVLLPSA

SEQ ID NO: 48699 - protein, 408 aa, Symploca sp.
VIVLEFKAKGKVTQYTAIDEAIKTTQFVRNKCLRYWMDNKGVGQKDLYRLSTALRAEFSFVKTLNSSACQASVERAYSSIARFYNNCKKAVPGKKGYPRFKKNCRSVEYKTSGWKLSPTRKQVTFNDKKGIGRLKLKGTWDLNYYQLEQIKRVRIVRRADGYYVQFLIKTDKTEILEPTGNTVGLDVGLKEFYTDSNGETQVNPRFYRVGEKRMKFHQRRVFRKKKGSANRKKAIKKLSRTHLKISRQRQEHAKRVARCVIQSNDLVAYEDLRIKNLVKNHCLAKSINDAGWYQFRKWLEYFGVKLGRITVAVNPAYTSQNCSSCGIVVKKSLSTRTHVCRYGAVLDRNHNAAINILKEALSTAGHAGNWILDPNAMPRFAHHAPQTGNFASTVLGENLSQQAELMNE

SEQ ID NO: 48700 - protein, 362 aa, Desmospora sp.
MWRNKKQGGDKMPTITLRLELFKPTEAKQTMYRQMTAINTEFATWLLLHPEVNQATSKIFKEFSSDPFPSAVVNQTIREVKSQKKKQRAKTFRKMWCCFNNQNFKVEKSGDFYTVSFPTLEKRIGVPVVTRPFQQAWLEKIVQGSVKLGAAKLYQKKRKWYMALPLTWEVEATTKKKVMGIDLGLRYLAVSSVGTQSLFFKGSPCAFVRRFFFSRRRKLGKNKKLQAIRQSKNKESRWMKNLNHQISRQLVNFAITHGVGTIRMEDLTDIRNRAQSKREPGRSMHSWSFYQLKAFIRYKAEMAGIRFEEVNPEYTSQTCKCGHREKRNRQGLRFQCKKCGYDCHADLNGAINIGKAISGLAP

SEQ ID NO: 48701 - protein, 382 aa, Microcoleus sp.
VRLLTNYIYKLRPNQTQVLKMSAWVNMLRSHYNWCLNDRITQYSQQFIQGDYCDIRTYGEVSPLTCFVSKSGATGNPWKEDKFDREGKARNPRISAADIQITALPELKIARPWYAQIDSTVLQQNVKRLDTAYKNFFEGRGFPRFKNHSNFTSFTYVMGVKLKGNKIYLPKLGWMRFHNSRSIPDGFTIKACTVRKRQNGWYISIRIEDKAVPEYSAKLLSDHPKVIGCDLGITKLVHLSDGHQIENPKFATNKKAKWTLKIRQRRVSRKVKGSKNRKKAAIRVGRFHQKIGNKRQAHQWKVADKIVSRNVDVIALEDLNISGMMRRSKVKNDNGRFLKNGQSRKKGLNRSISDAGWGELILKIEYLAVKQGKIAIKINPKH

SEQ ID NO: 48702 - protein, 350 aa, Rugamonas sp.
MILVYRYRVKSLNGLLNKQSRACSFVWNYCNDRQKDALRFGRRWHTGFDLNKLTQGCSKELGLHSGTVNAVCEQYAKSRSQKRRPYLRYRGKKNLGWVPLKGRELKREGNAFRFAGNTFRVFNCRALPEGKIKDGTNFSQDSRGNWFLNIVIDVTVDPAQARQPVRGVGIDLGLKDFATLSTGEKIDAQRIYRNMEQALAVAQRAKKKRRVRAIHAKVANRRNDFQHKLSNRIVSEFDYIAVGNVGAAGLAKTNMAKSVLDAGWSSFRSKLAYKAVKHGAWFEEVNESFTTQTCSSCGILPDSRPKGIAGLGIREWQCSNCGCVHDRDTNAALNILRRGRATLAVGIPVL

SEQ ID NO: 48703 - protein, 413 aa, unknown
  TnpB Polypeptide
MKRVCKIRFYPNQTQKVKINNILGCCRYVSNLYIEYNQERYTKTGEFITGYEFSRIITKLKKNEPRFMWLNEISTKVIKDSIMNTEKAFKKFFRKTAGYPKFKSRKRLKNESFFFIRDNISFETYEKNIIRIPILGKIRITERKYLPSISQVSSGRVIKENNKYYVMFIYNINSASIKLNSFGIGCDIGIKTYLTMFDGVNIVSFRHFKEYENYKYIQQKIARLQQLLSKKVEYNYGRLLNQYFDKHHSEPNEKQKNIMKGESYCTSGVRKLRRKINKLYEKGRNIRKDYIDKLVYKLVARIKPSFITIEDLSISNMIEGKGQHNLHRYISESSFYYFRTHLFSKIEEFGNSIELRIANKYFASSKKCSNCGNKLKTLRLSDRVYRCPECGLEIDRDVNAAINLHDLSKYTIA

SEQ ID NO: 48704 - protein, 400 aa, unknown
  TnpB Polypeptide
MYRAYKFRLYPTPEQQIALAKSFGCCRWFWNYSLNLCQETYKATGKGLARGAIQGLLPSLKKEYPWLTDAYSQCLQYVALNLSTAYKNFFDKRAGLPKFKSKHGRQSITYPQKVKLEGDYLKLPGKVGSIYCQQDREVVGQFITTTISQNTDGKYYVSIIVDDGKATPEPITKGKAVGIDLGLTHFCITSDGSKFDKPRHTEGHAKNLKKKQQSLARKQKGSNKRAKAKRLVARVHSKISLVREDFLHKLSRKIVNENQVIVVENLAVKNMVKNHNLAKAISDCGWGQFCTMLKYKAEWSGKTYIEVDRFFASSKTCSVCLHKVDSLPLDIRSWICTHCQTHHDRDINAAINIRNEALRILALGTSATANGGNVSQPGKASVLLDAVPDEVGNPIRLAVG

SEQ ID NO: 48705 - protein, 434 aa, Paraburkholderia sp.
VIFLAIELDQFRLEVGADAGKDAVQVAEHFPGEHFPAVFGNEDQMDMHQKNAVSSAPDIVVGAHRPNYTIRMHRLQAFKYELMPTGEQRRDMLRFAGACRFVFNKALALLKERYEQGEKKLGYAGLCRLLTEWRNGPQTPWLRDAPTHPLQQTLEDLERAYSNFFARRADFPRFKKKGQGDSFRYPDPKQVKLDQANSPIFLPKLGWLRYRNSRDVPRTLRQVTVSASGGKWYVSIQTGRDVDQPLPQATSAVGIDMGITRFATMSDGNDLAPLNSFRRHEARLRRAQRAMSRKTKFSSNWKKAKARVQRIHSRIGNARRDYLHKATITISQNHAMVCIEDLQVRNMSRSAAGNTGQPGKNVRAKSGLNKSILNQGWFEFRRQLDYKLVWNGGYLIAVPPQNTSRTCSYKDVKIGYATKKISSAESEKVLSDAS

SEQ ID NO: 48706 - protein, 413 aa, unknown
  TnpB Polypeptide
LPDDADLRATLAAFRDVQNAVTDNAFNGGKPLAAVPLQRVVYGRVKGTLNSQMTITALRLVVGAYTTALKGRNRRLKAEARRKTRFEKRGWTYTPRQIKPLGVCRFERMAAMFLVGVRGRDADVRADGTLSIWTIGGRKRLPYEVVPAHRALFDAAKEIDSVTVIGRHGHLYGRVALTLDARDPKGVVPVGIDLGETNALVAVDADGRELFVSGLATKVKNKRTMQTTKLVQKKMTTRKAEKRDTYSVRRLLKRLSGRRSRRTRDFARVTAKLLVEWAPADAVLVFEDLHISRPEKGLTRGVALRRRLSLWQHAAIRNAAQSKAQMAGIAVTFANSAYTSKNCSRCGLRGVRRCHSFTCPHCGHAQHADLNAAVNIRQRFVQSRLDAAPSVAAEALSPSSEGDEGKLNCFSSG

SEQ ID NO: 48707 - protein, 375 aa, Escherichia sp.
MDLKRTRWVRRLEDGSYTIESNSNLNKQKLLCDICGIAAKCPIYETRIKLDKAGVNFHLNSCIRYVPLLAFRKPIIGLDAPYFNTLRSGVTWRDRLSPENHGSLAGWMRYRNSRQVTGVVKNVTVSQSCGKWYISIQTESEVSTPVHPSASMVGLDAGVAKLATLSDGTVFEPVNSFQKNQKTLARLQRQLSRKVKFSNNWQKQKRKIQRLHSRIANIRRDYLHKVTTTVSKNHAMIVIEDLKVSNMSKSAAGTVSQPGRNVRAKSGLNRSILDQGWYEMRRQLEYKQLWSGGQVLAVPPAYTSQRCACCGHTAKENRLSQSKFRCQVCGYTANADVNGARNILAAGHAVLACGEMVQSGRSLKQEPTEMIQATA

SEQ ID NO: 48708 - protein, 455 aa, unknown
  TnpB Polypeptide
  misc_feature (159)..(159): Xaa can be any naturally occurring amino acid
MQQIITAKLKLLATPEQHHALRQTQLAYRDALNYVSKYAFEHGKTSSEKRLHEGTYYEIRARFKLPSEMTNNVLRQVGVTFKGLWTKTRKNAEHRRNKITKKRFKGLDKPPKYVSPTVTYNFGYDYGFKSEQQVSIRTLERRVIIPYQGYEKHIALIRXGATFKGARLWYDERGKQFYLLVALELDIVDPAPDVQQTIVGVDVGQRYLATTATMTEKQYFLPGKAVRAKADHYARLQKRLQRKGTRSATRRLRSVSGRERRFKLDVNHVIAKTIVKQHPQAFIGLEDLTGIRERTKRRKRRRKGKKILPLTPKQRRANRHVSKWAFAELHDMIMYQATLTGSIAIKVDADYTSQACPLCGYTDEKNRPGHGLLFICQNKQCQYQLRTDRPYTLHADLVGARNIAMRAFCVRQDWMQTGQLSVVPGSECGPDASDSELKAAKRSRLERYADLRWES

SEQ ID NO: 48709 - protein, 399 aa, unknown
  TnpB Polypeptide
MTDIFVLVKQAIHHFVLYSLYRTRQGVCKMTKHKAYKFRLYPTAEQKHLFSKTFGCSRFIWNRMLNDKQEHYQKTKENLMTTPAQYKNEFPWLKEVDSLALANVQLQLQKAYKSFFQSGFGFPKFKKKFDKQSYTTNNQKGSVRIEDGKIKLPKIGWVKIKMHRQFIGFIKSATISMTPTGNYHVSILCETEILALPKSNSKVGIDLGITDFAILSTGEKFENNRFLSKLSKKLAKEQKKLSKRALIAKKEGRKLSESKNYQKQRIQVAKIHEQIANRRNDYLNKVSTKIIKNHDVICLEDLSSKNMMKNHKLAKALGDVSWSAFVSKLQYKADWYGRTLVKIDKWFPSSQICSDCGFQDGKKDLDVREWQCSHCGTFHDRDINAAINIKLEGLAILAK

SEQ ID NO: 48710 - protein, 373 aa, unknown
  TnpB Polypeptide
MAEKTYKFRLYPNLEQEILINKTFGSCRYVYNYYLNKRIELYKENKQSMSYNACSADLTMLKQQLPWLREVDKFALQNALRDLDRAYQNFFREIKKGNKNQGFPRFKSKHNRQQSYRTSFTANNIEVKNGRIKLPKLGWVKIAQSKDVQGRILNCTITRTCSNRYFVSVCCTDVDITPYEQTGCVIGLDLGIKEFATTSDGDVIENPKYLAKLEQRLKQEQRKLSRKQKGSKNRNKQRIKVARLHEKIANQRNDFLQKLSTKLIRENQIICLEDLSAKNMMQNHNLAKSISDVSWGEFVRMLQYKALWHNRMIQKADRFYASSQICSVCGYKNTETKDLSIRQWECPECHIKHDRDINAAINIMHEGLRLLYS

SEQ ID NO: 48711 - protein, 373 aa, unknown; identical to SEQ ID NO: 48710
  TnpB Polypeptide

SEQ ID NO: 48712 - protein, 457 aa, unknown
  TnpB Polypeptide
MQLKRALKYRIYPNREQKSILETWLNTCRVLYNDCLTERTDAWDTSHKSINYYDQANQLKEIKTFDGDLKEVYSQVIQDVLKRIDKSFKNFFRRVKRKEKAGYPRYKGKDRYDSFTYPQKGFTLEDRKLILSKIGSVNIKKSSKIKDFWDTQIEDLRLHRDIPESAEIKTCTIERDLDRWYACFTVEIEIEEPNYEAITNPIGIDLGISHLLTLSNGDMVDNPKYLSKSERKLSRKQRKLSKVLATSSWDLENLRFSKTKKGSDNRTKRRFDVSKTHRKIKGQRTDLIHKVSRGLVNTYDLIVFEDLRIRNMLKNHHLAKSISDATKSLISCSRKSKICVCQKSKIFEHRKNGTFLHVSWSQLTNFVSYKAEEAGRRVEFVNPKNTSQECSNCGEIVKKPLSQRVHRCPFCGLVMDRDENAAINILKRGLKNVGQGLPEFKPEDFSKRRMIQEAPML

SEQ ID NO: 48713 - protein, 350 aa, Escherichia sp.
  misc_feature (298)..(305): Xaa can be any naturally occurring amino acid
VKRLQAFKFQLRPGGQQECEMRRFAGACRFVFNRALALQNENHEAGNKYIPYGKMASWLVEWKNATETQWLKDAPSQPLQQSLKDLERAYKNFFQKRAAFPRFKKRGQNDAFRYPQGVKLDQENSRIFLPKLGWMRYRNSRQVTGVVKNVTVSQSCGKWYISIQTENEVSTPVHPSASMVGLDAGVAKLATLSDGTVFGPVNSFQKNQKTLARLQRQLSRKVKFSNNWQKQKCKIQRLHSRIANIRRDYLHKVTTTVSKNHAMIVIEDLKVSNMSKSAAGTVSQPGRNVRAKSGLNRXXXXXXXXAVRCLLFRQRTQASVARAVVIQRKKIACHKVNSDARYVDIQRTPM

SEQ ID NO: 48714 - protein, 395 aa, unknown
  TnpB Polypeptide
MIVSYKYPIFPNKITQWKLAENLDACRWLYNQLLQDLNDAKENGIKLKTYDTQNMIPSLKLINPKLNMVYSKVLQMVNYTLWSNIKGLSASKKNGRKIGHIRFKGYGWYNTLNYNQSGFKVDQDHGLLHLSKIGDMRIKIYRKIEGRIKAVIIKREGKRWFAIVQTDQEPQPLPETEEAIGLDVGLTSFVVDSEGNEIENPRCAEQSSAKLAKLQRKLVRTKKGSNNRKAIKDKIAKLHKRINCQRDDFLHKLSSTYINNFDIICVEDLDVKGMKEKGHNTGMHRSIHDASWSKFIFMLSYKAQSAGRKLIKVDPRNTTQRCSACGSIVKKDLSVRVHECPYCGFSCDRDYNASWNILIAGMEQPVAPIEPKPIHHISVMQVLAMTWEAASFRTR

SEQ ID NO: 48715 - protein, 395 aa, unknown; identical to SEQ ID NO: 48714
  TnpB Polypeptide

SEQ ID NO: 48716 - protein, 449 aa, Synechococcales sp.
LARRQYNFRLGERFRWFDATRHPVNCCPIDGGYGPVNSVENVFADIPLSKVLTKGKNKGAVYSLVNEGYVDWANVQKDGLKQTKLLFPEYKEMPAQMLQNVIERVNRAFDRFTQGDGNGKRSGKPKFKGKPYYSSICWPQDVKVLSAGLVSLPKLGELEFIEHRPIPVGFTVKTATIIRDGDGYHICFSLEDKFVPIVDVEIHPTESNSKGIDVGLEFYVSDSNGSQYEFPRWFRKAEKRIAKLQARKAKKPHGSIARKVLAVKISRLQAKVARSRKDWQFKLAYQLFADCDVIFCEDLQLKNLIRRNKLKTDDAGKIAANGQAAKSGMNKSMTDAALGQFLNQILPWVASKLGKQVIKIKPNGTSQYCQACLSKVPKGIGARWHDCDNCGESLPRDVNSGKLIKRIGLATVGEEQRSLKTALTCGRLKLIQPQHTVKSEDEARSLSFA

SEQ ID NO: 48717 - protein, 433 aa, unknown
  TnpB Polypeptide
VSKREKKPQLKTEEKKARERKDPNLRCKAYKFRLYPTKKQVNKLEWMMRRCKELYNAALQERRDAYKMCGVSVSYAMQADQLHDIKKLREEYSDIHSQVLQDVLKRLDKAFQAFFRRVSNGEKPGYPRFKSGDRYHSITYPQGGFEILHGKRLRLSKIGHVKIKLHREMRGKIKTCTIKKEGEQWYAILTSVYQFDATTTFHPSDEEIGVDLGVKVFAMLSTGEPIENPRHYRIEEEKIQATHQKVNRRKPRSHRRNRAKKELSRLYRKVRNRRRDFHHKESRKLVNRYQVIVFEDLQIQNLTATPKPKQEEETGKYLPNGAASKAGLNKSILDAGWGNFVHLCASKAEEAGGTVVKVPPHHTSQVCHRCGTIVPKDLSVRWHSCPECGEELDRDHNSALEVLHRYQRTKKALAGTGSVPQEPVSSCGEARIL

SEQ ID NO: 48718 - protein, 368 aa, Gemmatimonadetes sp.
MGYLTYKFKLYSRCDRNKYLHQEIDAFAQVYNHFIALHKRYHRRFGKYPSKFTLINHLKKLKDTTRFAHWRLLPSQALQNVVERIDFGYKRFFARDNKRPPQFRSKFKYKSYTLKQAGYKFFERNKVRIGKRIFRYHKSRCFDVESIKTVTIKRDRVGDLWLCVVAKAERFKQSIVKTGKTAGFDFGLKTYLTASDSTRIQSPLFFSRNIRKVKKANRNLSRKDKGSNNRHRASVNLARVHRRIANQRKDYHWRLAYQLCAAYDFLCFETLNIKAMQQVWGKKISDLGFSDFLTIVEYVAKKTDTGFKKLDMWEKTSKTCSGCDTVKDDLELRERTFRCCECGLEIDRDLNAAINIHRWGRPPMQEAA

SEQ ID NO: 48719 - protein, 433 aa, Streptomyces sp.
MYPDAAQRRALARAFGCVRVVWNDGLRARRDAREAGLPYVSSAELSKVCITQAKRTPEREWLSEVSAVALQQSLRDLDGAFKAFFDSVSGKRAGPRVGPPRFKSRKDPKQSIRLNTNAFVIRENGRLYVAKVGDLHVKWSRRLPADPTSLTVVRDASGRYFASFVVAVTPTPLPESGAEVGIDLGLTVFAVLSDGTKIASPRWFRRAEKKLRRLQRDLSRKVKGSKNRAKARIKLARQHARVADQRRDWHHKVSTQIIRENQAVFVEDLAVSGLARGRLAKSVHDAGWAQFVDMLQYKAARYGRHFGMINRFEPTSQVCSICGHRDGPKPLHIRRWTCGECGAVHDRDENAAINILAAGRADRSNALRSAGKAGTEVPAPRVEAGSHRGGGLPCSECRVVDSAARQVAEGACGRPDSRSICRTCPLGSVSLAP

SEQ ID NO: 48720 - protein, 436 aa, Streptomyces sp.
VGNSAVKRAFKFRFYPDDAQATELSKTFGCVRKVYNLALAARAEARDSRQRVEYAQTSAMLTAWKRSPELAYLNEVSCVPLQQALRHLQRAFVAFRDGRSRHPRFKSKRKSRTSAEYTRSAFRFRDGRLTLAKMARALPIVWSRPLPPGAVPTTVTVSRDPAGRWFVSLLFEDDPDPFPRSAQAVGIDAGLTALVTLSTGEKITNPKFERRDRARLARVQRALARKEKGSRNRAKARTRVARVHARIADRRRDHLHKLTTRLVRENQTLVIEDLAVRNMQQNPRLARAISDAAWRELRSMLEYKTAWYGRELITIDRWHPSSKTCSMCGALTRDMPLNIRVWTCADCGTEHDRDENAAINLLAAGLAVSACGAGVGPRRASATPGRRAMKQESPSVRAGRLPLREGDEAKQPNVGVSNAALPSAMPADTLRTSSQQ

SEQ ID NO: 48721 - protein, 415 aa, Pusillimonas sp.
MQRLQAFKYELRPDGQQTRQMARFAGSCRFVYNKALAMQQANHEAGGKFIGYVAMAKELTAWRNGSETPWLKDAPVHPLQHALKDLERAYKNFFAKRAAFPRFKKKGQRDRFRYPDAKQIKLDQVNSRIFLPKLGWLRYRNSRDVLGTVRNATVSQSGGKWFVSIQTERQVAQPMAQSSSAIGIDMGIARFATLSDGSYLAPLSSFKKHEARLRRAQQAMSRKTKFSSNWKKAKAKVQRIHTRIGNCRRDYLHKATTTISQNHAMVCIEDLQVRNMSKSAAGSAKKPGKNVKAKSGLNKAILDQGWFEFRRQLEYKLAWAGGWLIAVPPHNTSRTCPACGHVHADNRKTQARFACVRCGYEENADVVGAINILARGHRVAACGEDVSRARPARAKRAASAKQEPTEATHSSLAPL

SEQ ID NO: 48722 - protein, 382 aa, unknown
  TnpB Polypeptide
MLTAVKYRIYPNKQQAILIHKTIGCARLIYNLMLHDFYENDLIKTPAKYKNEYPFLKEVDSLALANSQMDLKQAFRNYKNNKEHFGTPKFKKKSHAKLTYKTNNQKGTIRIENNKLILPKFKSGIKIVLHRLIEGMIKSVTIEQVPCGYYTASILYDIPDCQEKPILSQENIVGIDLGLTHLAITSDHKKYTNPKHFHKLQAKLRKEQQTLSRRREQNIEKRIYDEEGKVVKTIYKRPLLDCKNYQKQKQKVAKIYQKIKHQRLDNLHKVSHEIVKNHDYIVIETLKIKNLMQNKKLSKSIADVGWAMFLNMLKYKSERYGKELIQIDQWFPSSQICSYCHQNDGKKTLSVREWTCTHCHTKHDRDINAAINIKNKGLALIS

SEQ ID NO: 48723 - protein, 408 aa, unknown
  TnpB Polypeptide
MTKEALNIIIENDVRSRKKAHELCYRFLRERYPYLHNKFVQEAYKRALAMYRSYRKLLNKWKRLPEKKKKRISPPSLPRIEDNRVIELHIDTYKLKRKYGLLVSTISKGNGVYLRFLMMEYNYARRELEGAKLGNSKIIVEGDEVYLLLTIRKNVEVNEHKNKLFIDINEDSVDCLLINYDRNEAVLFSIRHDIRRIRANYRRIRKSIQEKVKNPRLRDKLLAKYGCRERKRVEDRLKKITTLLAEIGRENNADLVRENLKDLKLNGRKKSKQLNYRLSTFSYRKFIEYIDYKFYEQGLSVLEADAKKTSITCPVCGYVDKRNRVSKDVFKCRKCGFTFNVQYVACLNLFTRSNDGTVAIRSGRLILTARKTAQVVAVNVAPNEPPTKMRWLREKPVLPPIISKVLKI

SEQ ID NO: 48724 - protein, 409 aa, unknown
  TnpB Polypeptide
MRRTVKTKIRKLTQAQYNHLRELCHVSKNLYNQTLYLVRQEFRNTGKHLSYGETDRLMKQTANLEGGINYRMLKAGVSQQILRRLDKNYRSFFRLLKACPDMNPGPPKYIRADFYNLIYDSQRFQVKDGRVILDKTVSVKIPSCISGKKIVQAEIIPKFRQFNVCFVYEDDTVYKQVAQNGRTAGIDLGLNNLAAVATTDGDMMLVNGRPMKSVNQFYNKKIAGIKSELKTRNNQDWSEKAQRLTDKRNNKIADYQHKASRAVVNFCIEHDISAVIVGNVSKSVNGISLGKRTNQNFVNIALGQFANKLGYKLEAHGIKIVKADESYTSKASFADNDSLPEKYEPGKEHHFSGKRIKRGLYRTAKGFLINADLNGALNIIRKAVPEFDFQKLKDGIEGMFIPHCRLLTC

SEQ ID NO: 48725 - protein, 552 aa, Streptomyces sp.
LAAPFVVSGPSGVAVRDRLKHLTPEDERVLQTVGEHQGTLASRDLKTRCADGLEHGAGSWAARKRELTKVSSSRIAGAITKASNDQWALARRSQAAHIRSLEDGIRTLKYRLSLPIGAKGTKRAAGAYRSRGEWFRKSRRLADLESRHTAAVADWRTGRVRVVRGGKRLLNTRRHLATAGLAEEQWRERWESERWFLAAGGESGKRFGNETIRVTPDGRVSIKLPAPLAHLANTEHGRYTLASTVAFAHRGAEWADRIEANRAVTYRIHLDTVRGRWYLTASWQRPLVQAIPWETAKADGVIGVDTNADHLAAYRLDQHGNPVGEPHRFTYDLTGTTHHRDAQLRHALTRLLHWAKQTGATGIAIEDLDFSAEKTREKHGRKKRFRQLISGIPTAKLKARLVSMAAEQGLAIIAVDPAYTSMWGGQHWQKPLTTPRRKMSRHDAAGIAIGRRALGHPIRRRTAPPPHDQSDRARHRTAQAAPGAREREGTRPPATDHAPRDVPPNGTRKRQPSAPKTVRDAPRTHQWVQHPLMHTGQERSKDTCMSPMPPPT

SEQ ID NO: 48726 - protein, 444 aa, unknown
  TnpB Polypeptide
MKRANQFDVRPRSEKEREVFVRWLDASASLWNETNYARRQAFLSDDDESVWDADTGSLEGKYKGVLSSSVAQQIIRKNSEAWRSFFSSNEKYHAGELDEKPSLPGYWGNEEDGRALRTYVRNDQYTIEFGERSRLELPIGSELKEELGLNRNQRLRVEVAGDPKWSGDQGRLELVYDELADTFRAFQPVTIDDSRLDSPLASHEAALDVGANNLVACTTTTGSQFLYDGRELFERFRETTEQIAYYQSLLEDQHKSSKRIDCLYRKRTNRRNHAQDALVRELVERLYEEGVSTLYVGDIRGVLSTHWSACVNEKTHNFWAYRRFITRLESVCEEHGIAVEEESETWTSQECPECGEREETIRYEDSLACPCGFEGHADLVASESFLRRQTEVGPMARPVYLKWNNHDWREHHNPPSITETTANEAYTNRSTTSSGNIALGDSDD

SEQ ID NO: 48727 - protein, 310 aa, unknown
  TnpB Polypeptide
LTPYWLTLSLNGRERVSLPIFFGEKQRRRIGVAFIGEWQFTTVEMVKRDRYWYAHFALKNAVEVPDEPETVTAIERGEHNLAVAVAISKSNPNKPIRGRFWRGEEIKRKRGLYAPIRRKLQEKRRVGKVKELEGKERRKVNQQLHIIANQIIAYAKQFHKPLIVMGNLNEIRGGFKRSKRLNRRLHSLTFRKLQTIIEYRALLEGIEVKYLTKKRVRGTSKTCHRCGHVAQERGREMRCLKCGLRYNRDLNACINIAHALTRGMGWGSTSSQQMCGGVKPSGKRWKPRPSKGGVAHPYSQCYHHFFSKKR

SEQ ID NO: 48728 - protein, 208 aa, unknown
  TnpB Polypeptide
MQVFFLSMKIKYRKRRLQKFLGLDFSMHELYRDSNGKEPAYPGYYRNAEKKLAREQRKLSKMQKGSNNRNKQRLKVAKLHEKVSNQRKDFLHKQSRQIANAYDCICIEDLDMKAMSRSLKFGKSVSDNGWGMFTTFLRYKLEEQGKKLVKVDRFFASSQTCSVCGYKNAKTKNLALREWDCPQCGTHHDRDVNAAVNIRNEGMRLVNA

SEQ ID NO: 48729 - protein, 396 aa, Frankia sp.
MSRFRLYPAPEQAAALDSHCGHARLVWNLAVEQQSWWTPRRGPAPGYAEQNRQLTEARHENPWLAEGSVIVQQQALRDYATALASFFRGPHRKPTFRKRGRSEGFRIVAVKPDDIRVLNRRWSEVRVPKVGWVRFRRSRSVPDARSYRVTKDRAGRWHVAFAAPPEPVGAPGTGEVVGVDRGVAVSAALSTGDLLRCPGLRPKEAERLARLQRHLAKTKRGSNRRGRIKVQIARLRARDADRRKDWAEKTSTDLARRFDLIRVEDLNVKNMTKSARGTVAEPGRNVRQKAGLNRSILANGWGLLVQRLEQKAPGRIEKVNPAYTSQRCSACGHVAAESRESQATFRCVACGHEDNGDVNAAKNIARGHRVAARGGVGLPEPVNREPQRTAPPLVAA

SEQ ID NO: 48730 - protein, 394 aa, Microcoleus sp.
MTLKAFSYRFYPTPEQESLLRRTMGCVRLVYNRALAVRTEAWYQEQKRVGGTETSSMLTSWKKTEELNFLNEVSSVPLQQCLRHLQTAYTNFFDGRAKYPNFKKKRNGGSAEFTKSAFRFKYGQVYLAKCAAPLPIRWSRTLPEGATPSTITVKLAPSGRWSVSLLVDVEIEALPQTDSQIGIDLGITSLLALSTGEKIANPKGFTAKYRKLRRAQKALSRKQKGSNNRHKARLKVAKVHQSIADARKDNLHKLTTRLVRENQTIAVEDLAVKNLVKNRRLALAISDASWGELVRQLEYKCDWYGRTLIKIDRWFPSSKRCGNCGHIVDELPLNVREWDCPNCGSHHDRDLNAAKNILAAGLAVSVCGATVRPEQSKSVRAGAKTLKRKKQKPK

SEQ ID NO: 48731 - protein, 476 aa, Clostridium sp.
MKAILINETDEQRNIIDNIMLVFCTAIRYSFKRLLENNIKIGELEKIVSKKYNLNIRQSKDAVESARQTILSQKELIKMNYDNYCNKVKAIEKILNGKKKISDKKRNALISKLDKRQRKVNCFKNFIDKNMIPSVIFGTKKMFIKRCKALISKEEWINCRNNRIYSRGDKTKNGNPNLRVIIKDGMSFLEISTLKKTKTNRAIKIQVPIYLPQKLSKKTGKVNGINYRELFINHLVTGEAYQVEILKRNSKYYCYITFELPKTPVTCTGHNGIIGIDTNPDGFALTMIDNKGNYKWHTYLKQYELLYARTNRRENLCGELVKQVASIAKTYGCRIAIEDLKFKNHKDVHSKFARIKHQFIYSKLLTMLESACIREGIEIVKVKPQITSKIGLYKYCHQYGMVVHNGASMVIARRSYKFKERVPKILKDKLVKDLDKFNKKNEWSKWNEINKDIKRKVGENPDLWLVNRKRILGLVS

SEQ ID NO: 48732 - protein, 444 aa, unknown
  TnpB Polypeptide
LDQEAHLAKSKAIAEALKATKAKRKTQICKVREMKVIKNKLSKEQAEHLRLLFLEAKWFYNYMLANPSLRNDIEAKLKVVSVKLPDGTFERRELKHLGSQMKQSITSGINQSIKTLAKLRDKGIQQPGALKFKSQLTTIELKQYDNTHRIDRELNKVFIQGLKKGLKAKGLEQLDELEATYGDIDIASAKIIDRPDGIFFKIVCYVIDNKEREQECVGIDMGLGKHITMSNSLSFRFRLDETKMLTSLQQKLSRKKGALKGEKKSKNFKKVKKRLNKEYQKIVNKRTNAINHIVSLVDLYQFVACQDEQIASWSKENKTERNKEIYHSGMGAIKSRLKSLESSRVDVINKYLATTQTCSGCGNIQPMPEEERIYHCKACGLEIDRDKNSTLDMIIMSIFSDKPVSTEYRNLMPRSRIYKKIENLKKVPYLEVYELKEAWQLIAE

SEQ ID NO: 48733 - protein, 385 aa, unknown
  TnpB Polypeptide
MLVRHYRVYRKQGVWLAPRNGERLEDALGGPTTLHAHSRDAAQQGFYKACKTARACQQAGLDTKYPHWHKHWRTTIWKKTGITRNGERLWLARARGVVPVSVLLPPTLLALPATAFLEVRLVWDRATQHYSWHVVVEDGAPPLPAPGTSTAAVDLGEIHPAAVTDGKQTCIISCRVLRANQQYTAKRLAEIRAKQDRKHKGSCSWKRLQRRKSRFLAKQKRRARDLEHKISRAVVTWATERQVGTLVIGDVRDVADGKRMHTKSQQKIGLWSHGRQRRYITYKAEAAGITVGLVEEAYTSQTCPGTLPDGTGCLHCYKPKGRVYRCPACGFTAHRDAVGCANLLSQHFTGEPGHVRPPKETYRYPFVGKRSRLDTADLARIPTVG

SEQ ID NO: 48734 - protein, 416 aa, Chroococcidiopsis sp.
METILTISCKLIAQGDQVAKLDATLVNFAAACNWINQSVDPKLTNNVRIQSLVYEQVRQQFDLSANLAIRAINRVAGNRKTAKQKGKSVKDFKPTSVDYDARIFAYNEKNQTVSLKLVGGREKFKLSLGSYQIGKLKGKKPTSATLVKTKKGEYFINIQVKDEAPQPIESKDVLGVDLGRTEICVTTNGFRASGKQITKIRNHHSRLRASLQQKASKGTRSSRRRCRQLLKRLSGKERRFQKYTNHVVSKTLVQQALASNSVIALENLEGIRERTNQLPRSKKERRLSNSWSFFELRQFITYKSLAAGVEVVLIDPRYTSKTCHCCNVIGERNGKSFKCINVVCNWTGDADYNGATNIKKLGAVLVNQPRGSELYCSLEQAETPVRGFPALRGVSKRVVLGLHKAPTIVTSGFIVA

SEQ ID NO: 48735 - protein, 417 aa, unknown
  TnpB Polypeptide
VNLVTTRTITASLTNDREGVVQDLDSLARSGSKIWNVARWTCGRIWDHTGEIPDEGPLKSYMKNQTCWKDLNAQSSQAIVEELADAFHSWFKQDNPDANPPGYRKRGDERPRSTITFKEDGFKLDTKHEQVRLSKGKNLKDGWADFVLCEYDTGPDTDLTDVEDVQQVRIVWIGEQWELHFVCKVAIDAADSTDEKTAGVDLGICNTAAVSVGDHTLLYPGNVLKEDAHYFRQEEYDTEGGNGPSNYAEWARQKKSRRQTHFLHTLSKDIVEQCAKRGVGKIAVGHPKNIRDDEDWGRHGNKRLHDWAFETLLSHIEYKAEERGIDVERVDEYELATSITCCECGMKTDSNRVERGLYVCESCELVANSDCNAAENMRATVTPSPARDRSNGCLAQPSVRLFDKQTGRVAPQEQVRP

SEQ ID NO: 48736 - protein, 464 aa, Ktedonobacteraceae sp.
MKKRKKHAKKGEPQTITKAVTHIRLEAANAGKLTALDTLAEVYLELTQQYTTLFCTDELPNGFRAPCFLTLLSERWHRNAIQHGAGIAKSWRSNRANAYQDYLDALAEYQEQQADETLEEGTKEPEWCEWNVPHLRECCIQANGNVIKLEEAEDGTFDYWLKVSTLDKGNPLLIPVKLADYHKEQFIDPETGKRRKINSSVTLNRRENAWWLTLTYDETIVPQTAPDAPVIGIDVGVANFVTTSDNKTYGSFNGRLRERQKQDREKRRRKAKLRKCLEKKGTPKDKLPSTSSATGQRLKRHVKQEINRAVNLCFEEHEGSQFAYEQLSVASMRFKVRAQNAYLRASQLAHIPDQISWNATKRGVLATRLKSAYSSQECHVCHYVDRKNRPNQGTFHCRVCGHTAHTDTNASENIASRLGDPELRACQNRQEVKALLLRRHEQWKQKFSLVVVQAPVQLGLWASS

SEQ ID NO: 48737 - protein, 410 aa, Actinopolyspora sp.
VQLRYRYRLYPDESQRQALAQAFGNARVVYNDAVRARQDAHAAGEKFPAGSVLQKRLITDAKHTEERGWLAECSNIVLQQAIRDCDASYRNFFDSLKGKRAGRRVGTPRFKSKRDRRQAIRLHTGGFSIRTNGKLRLSKVGDIRVAWSRDLPSAPSSVTVIKTADDRYFASFVVETGDDTLPEAVDEHGQDVELGLDLGLSTFAVDQHGRVIDNPRFLRRAERKLKRVQWELRRKQRGSNNRAQARKKLARQHAKVSDTRQDWLHKVTTSIVRENQTIVLEDLAVSGLARTRLAKSVHDASWGAFRRLLDEKAARYGRQLIIISRWLPTSQTCSACGRIDGAKPLSVRTWSCPCGAVHDRDRNAARNILAAGRAERRNACGGDVRPHTGAVAAEAGSSGTPRGDAAPRAA

SEQ ID NO: 48738 - protein, 414 aa, Okeania sp.
MYGCQQELIKSPESIPFLEYLCTTVNRLINCGIYLARQWYFKLGYITGKYDLEKRLKSNHNYQFLHSQAAQQTLRGVTESFKSYKELSYKHYLGKLKNKPQLPKYRKKGGLGVITYPKQALRLKGNEVRVPLGKKVKAAFKIDSFWLNFPSNLDFKKIREIRILPRNGCFYVEWVYQLEFNKPELDRDKVLGIDHGVDNWLTCVSNVGTSFIVDGKHLKSVNQWYNKQIATIKEKKTQGFWSKKLANITEKRNIKMRDAVNKAARLVINNCLKNGIGRIIFGWNKGQKNAINIGAKNNQKFVQVPTAKLKERISQLCELYGIEFIETEESYTSQASFLDDDFLPNYGEKPESWESSGKRIHRGLYQTKNGLLVNADVNGAANILKKVATTLELSLEGISRGSLIMPLRIQFWIA

SEQ ID NO: 48739 - protein, 439 aa, Okeania sp.
MKARYKYRIYPNHIQITKLNKLFGCCRYVWNQSLAHCNQIYASGEKKLSYVDLTKQFITQAKQKLIWLKDVASTPLQQSLKDLDQAYKNFFNSCTGKRKGIKVKAPKFKSRKSRQAARFVGSNYKIAQDKIFLTKIGKVKIVWSRPLPNQPTSVTIIKDSAGSYFASFVVETNPEFLPKTENSIGIDLGISIFATLSNGDKIVAPKPLKQNLKKLAKFKRKFARTEKGSKRREKARLRVAKLHGKIKDIRTDFLHKLSTDLVKKYDTIVLEDLNVSGMIKNRKLAKAISDLGWRQFRTLTKAKCEKYSREFRVINRWEPTSQKCHCCGFKGGKKELNVREWTCLNCGTFHDRDINAAINILNTQSVVETVTQPITKVETVETKIAENQIQLSLFDVVAEGQPETNKRTRRRGKSSPKKDVRVDESSTRPESFKQLSLFD

SEQ ID NO: 48740 - protein, 213 aa, Okeania sp.
MKNLSSKVYQYAFINLGEAFKRFFSFGMLRKQGLGKRPRFKKKSKSDSFTIDNCGKPIELNGWSHKLPFIGIVKTYEPIEATTQKITISRQAGDWYLSCSYEFTPTSTPKTTEVVGVDLGIKTLATLSTGEVFESVKPYKKAQNKLAKLQRKLSRKVKHSSNWYKAVVKLAKQHRRVANIRKDALHKLTTYASLEPRHCCHRRFECVWYVSQP

SEQ ID NO: 48741 - protein, 265 aa, unknown
  TnpB Polypeptide
MPSNLDYADIREVRILPIHGCFYAEFIYKSVNIKTNTDSKKVLGIDRGIDNWLTCISNTNTSLIVDGKHLKSLNQWYNKQVAVLMDGKPNGFWSHQLARLTEKRNRQMRDAVNKAAKIVINHCRENQIGTVVFGGNKGQKNSANMGNKTNQKFVQIPTGRLKTRISQLCDLYGLQFVETEESYTSKCSFVDRDFLPTIGAKPEGWKESGRRIKRGLYCTGLQQWRINADCNGAANIIRKVATMLGLDLSGFGRGVKTAPLRIAIW

SEQ ID NO: 48742 - protein, 145 aa, unknown
  TnpB Polypeptide
MSRKYNYCKTKKKIALWHEKITNTRKDYLHKMSHEIISENQVIVPEDLQIKNMVKNHHLAKSISDVSWYELTRQLEYKAKWNGRKYIKINTFYASSQLCSACGYQNTETKNLSVREWICPVCGTNHDRDINAAKNILEEGLRQIA

SEQ ID NO: 48743 - protein, 363 aa, unknown
  TnpB Polypeptide
MALKAHKIALRPTDAQVVWFQRQCGYARFAFNSALADFKAGLSDGVFRSFIDLNNRWNERKKELDWAGEQDQRAALYGVKNLSDAVERWQKKQNGFPKFKKRDSRQSYTVEGYQCSVDGKRIKLPKIGTVKMFSELRFEGKIKRVTVSRTAHRWFASILVDTGTPNVPRDTRGLPVVGIDVGINTLATLDDGTKYENPRPLKQYERKLAREQRKLSRKVFLSKNWYKQKQIVERIHYRIACIRRDAHHKATTAIVKSAAKIGIETLSVTNLFRNKNLAKALSDAALGGFLEKLKTKAETLGIPVVQADRFFASSKTCSSCGHKKDDLTLSDRHYHCSHCGASIDRDVNAAINLRNLAAGYAES

SEQ ID NO: 48744 - protein, 264 aa, Trichocoleus sp.
AKCSEPLPIRWSRTLPKGAEPSTITVKLDPSGRWSVSLLINDEAIQPLPKVDKAIGIDAGITNLITTSDGEKVANPKHFAKFYQKLRRAQKRLSRKHKGSRNRHQARLKVARVHAQIRDARQDFLHKLTTRLVRENQTIVAESLAVKNMGQNRKLARAISDAAWGELMRQLAYKAAWYGRNFVQLDRWFPGFKTCSKCGHKVDLLPLNIREWDCPQCEAHHERDVNAALNHLAAGQAVLVCGATVRPEESKSRKAGARKQKPKS

SEQ ID NO: 48745 - protein, 328 aa, unknown
  TnpB Polypeptide
MKKLLKSFKTEINPTPEQKIRIHKTIGTCRYVYNFYLCHNKTLYDKGEKFMTGKSFSVWLNNEYIPNNPDKAWIKEVYSKAVKRSIEDGCTAFTRFFKHQSDFPKFKKKGKSDVKMYFVRNNPKDCVCERHRLKIPTLGWVRIKEKGYIPTTKEGYVIKSGTVSIKADRYYVSVLVELPDNKTADNSNEGIGIDLGLKDFATVSNGKTYKNINKSAKLKKLEKQLIREQRSLSRKYENSQKGESTQRANIQKQKLKVQKLHHRIDNIRTDYINKTIAEIVKTKPSYITIEDLNVKGMMKNRHLSKAVASQKFYEFRIKLQAKCKRKWN

SEQ ID NO: 48746 - protein, 433 aa, unknown
  TnpB Polypeptide
VVLESVKVALDPSPAQERLLLSHAGAARFAFNAGLAHVKADIDAGAKPEWSLYGLRRWWNASKDTLAVGEDGVIWWSENSKEAYSSGLEALAKGLLNWSKSRRGARKGRKVGFPKFKAKDRATPRFAYTTGVFGLIQGDPKALKLPRIGRVHCMEDVTARVGDAKVLRMTVSQRAGRWYASLTVERDTPVAVCAPKGGAVGVDLGVKTLATLSDGTVIENHRLLRKSEQKLKKAQKALSRKTMGSKRRAKARAKVARLHARVANQRLDAIHKVTTMIARTYSTVCIEDLNVAGMVKNRRLAKAVSDAAFGEFRRQLEYKTARTGATLHVVDRWYPSSKTCSGCGRVKAKLSLSERVYRCDGCGLVMDRDLNAAVNILVAGSAPETINAHRGTVSRSGQLGRATQVPVKCEPSRRGGKPRRLGADECKPVLQTN

SEQ ID NO: 48747 - protein, 413 aa, Cyanobacteria sp.
MIKTRRITYKLKPKRSAVQTLHWARKMHADVYNAALSHRKTQYKRFGVSISYFDQQNSLPSFKEELWEYKQLGFHTLQASFKRVDFAFQRFFKGLAKYPKFKTKRKYRGWTYPDSAGWKAYTEGNNGYLELKDLGLTIQMRGKARTWGKPTTCTIIWDSRDWYASITVKCDPVRETGKGVIGLDFGSKTAIATSDGEFIETPRFQAKAAKQEKSLSKGLRRKWKPEKGKTKAFRRWKKLQRQIRQVKRKVANQRHNWSHQVAAEIVSSNSLVATEKLNLKGMTKKGNGKRNKQKTGLNRNLLDVGIGMTKDSLKYKVEKAGGIYTEVPTQKVKPTQRCHQCWELTKKTLSDRVHDCQHCRCQEDRDINAAKVMIKYARGQELSSSDGEPLSSTSCGSMAQLGAKKRQKPQAQR

SEQ ID NO: 48748 - protein, 434 aa, Sulfolobus sp.
VKRSNIVRLVVSKDVGKKLRELATWTAKCWNEVNWLRMQQFKEGKMVDFNDTEKVVYAKYKEYLKVNAQQVCRKNAEAWRSFFSLMKDKKDGKLPSWFKPRPPGYWKDKRGSYKLLILIRNDRYTVDENARTIYLKDFGLTLHFKGKLKWKGKQGRLEIFHNGLHWCASIPVEVEVNAKPKGNGIAGVDLGIVNLATVVFDDSSWVLFKGGSVLSEYENYSRKIAITQKKLSLHKQERSKRLKALFLKRKRFLKHVLNSMARKTVETAYEKGVSIIKVGYPKEISKHHGNKLTVNFWNYNYVIRRMQEVSEEYGIKVETVNEAYTSIVCSLCGEAHENGRIHRGLFKCPHIGKVVNADLNGAINILHIPKSRGGWSEGNSTKGIGVKWLKTQPVVYHWTSGAGWGFKSPTSCEAMGMKVVNHRPVNRPRGTLTL

SEQ ID NO: 48749 - protein, 459 aa, unknown
  TnpB Polypeptide
VSGCALIKGHRVFSVLRSYSLKHECGEELSPPLLAYRDAVNRVLEEPWDNIEWEKEKVKGKKQWRLIPKYKVDVKSKEYKKELRDSLLQEWPYAAHWVDSAIKTAYSILKSWRKNYVKGERKRNKPTARRLFARAKQTLIKLEGERLRLTIKPGGYLYIDLSKRYFPLPKEVSSVGLGEPIITLEKVHLPVHYKGENQEKPSAAWDFNLLSLDGYSPETGWVRIDTSKLASVHISSFEKRRSVQRRASKSKKAKKILAKYSNRERNRARKHQLEIARVIQSVAGVVGLEEIKKQGMFTRSRVWNRRISRSDWRSISRILIGKKGEAKVKELDPYGSSSYCSRCGWHNQDLNGAVFVCGGCGLRIDRQLNAAINLYMRLTFGYTTNWEDGKKRVQLRMEGASQKEWWDKVVLPSLLGGCVLTGAELKTPDELVRGLHDAVKPKLHYAYDRYADAYLRMPS

SEQ ID NO: 48750 - protein, 402 aa, Escherichia sp.
VKRLQAFKFQLRPGGQQEREMRRFAGACRFVFNRALARQNENHEVGNKYIPYGKMASWLVEWKNATETQWLKDAPSQPLQQSLKDLERAYKNFFQNRAAFPRFKKRGQNDVFRYPQGVKLDQENSRIFLPKLGWMRYRNSRQVTGVVKNVTVSQSCGKWYISIQTESEVSTPVHPSASMVGLDAGVAKLATLSDGTVFEPVNSFQKNQKTLARLQRQLSRKVKFSNNWQKQKRKIQRLHSCIANIRRDYLHKVTTAVSKNHAMIVIEDLKVSNMSKSAAGTVSQPGRNVRAKSGLNRSILDQDWYEMRRQLEYKQLWRGGQVLAVPPAYTSQRCAYCGHTAKENRLSQSKFRCQVCGYTANADVNGARNILAAGHAVLACGEMVQSGRPLKQEPTEMIQATA

SEQ ID NO: 48751 - protein, 444 aa, Streptomyces sp.
MTGKKVGRPGGQVKAPANAGRKYRLHPTPQQAEKLGNWGHTCRAVWNVALEQRLYVYEQRRKTLRADEQCRYLTQARHDLGWIAALPSQVPQQVLRHLDQAYQNFWNPEHPAAFPRFKKRTSRLAIPFPGQAVRVTKLNRKWASVRVPKLGEVKFRLTRPLGGRIKNAVIRRDATGRWYISFGVHSGTVAMLPNKQPAVGVDFGVKQAAFLSDETEPRLMAESLTKGEQRRLVGLERRRERQIREAKRHRRGKYSNRLRRTLRAIAELKARQARRRLDFTHKLTTDLAKSHGLVAIEDLRVKQMTRSARGTQCEPGAQVSQKAGLNRAILDNSPGERRRQLAYKCPAYGSELVLVPPARTSQTCGACNLWNPASRINRDTFVCTGCGHTDDADHNASVVILTRACPDRMGKTSAAGHCGAQHASTGRARPAMPRTGIRGARVNP

SEQ ID NO: 48752 - protein, 393 aa, Streptomyces sp.
VIVKLVAQVRLLPTPMQAALEATLRACNEAATWVSEIAFEAGEFKNFALRKLTYEQVKSHWGLGAQAAQHVVKKTCDAYATLRANLKGGRLGRPGSARYRRATEKPVAFRPCGAQPFDDRMLSWQIAERTVSLWTSGGRMKNVAFTASPEQLATLALYRKGESDLICRNGMWFLHATCAHAPLQTPEEEHFVRQAPTEEAEPQGGAAGQGHQPQDRDACGRGNGGTSRASAAERGGAPVAESPSKISRASASGYGFESLGAPPTPLRQWGRATHSSWAFAQLRQFIAYKARKAGVPVVYVDPAYTSRTCAECGHIDRANRVSQAWFACRSCGFVDHADRWGHLPLERSRERGKLPQHSRTRVGVVATRGPVNGPCPTPASAGRGWTQTGHHRQ

SEQ ID NO: 48753 - protein, 467 aa, Streptomyces sp.
VKVTRIAYSRNLNAGKYAQLEEQARRLGRVRAMVWARYGSPVNDGIRDRTIRDAWMKDGTADTFGVLANTWKETLRDAVADIAAHREAGKVKVRKAIHHRYRDKSERKKAYTALKYGRWQDDGFLSWQMRRHVKHGVSRTANQIVVRSDQYNTWRMADGNVWIDIPGLKRRQKIAIPLNTTVAPTGTLRIVLRGGRVEVHYAIDAPDLHEIRPCGIGKVGVDKGYTEVLTDSDGNHHGEELGKLLREESDFLKAKNARRAKIRSVAENARKAGDHVKADRIERSNLGVVKRDRRRSRFTSRVRTVTFTAVHTVVDKAAQVVAEDLTRSFPPRKKLGKNTNRRLAAWTKGVTAEALTSVSERRGSALTLVNAAYSSQVVPCCRILGKRSGDRLHCTRCGELWQADHAAAINVLERDGDPDISLITPHTRVKQLIQERADRLRTRLPVQDSSTHVRRANHPIRAAMLNE

SEQ ID NO: 48754 - protein, 488 aa, Calothrix sp.
LLANYVYKLRPNTTQSSTMCSWVDILRSHYNWCLNDRLTQYAQQFIQGDYCDVRTKAEACPITCFVSKNGATGEPWKDDKKANPRRTAGDIQITALPTLKKARHWFASIDSTVLQQNVKRLDTAYKNFFEGRGFPKFKNRSNFTSFTYQMGIKIQKNKIYLPKVGWMRFYNSRQIPSSFTIKAATIRKRQDGWYVSIKIEDKTVPDYVARPLSDVQSIIGCDLGLTKLVHLSDGHQIENPKFLTNKKTKRILKNRQRQVSRKLKGSNNRKKAATNVGKFQKKIADKRQAYQWHIANKIVSRNVDAIAVENLNVSAMKKRCKPKIDARTGRFLENGQSRKRALNRSISDASWGELIFKIEYLAEKHGKVVIKVNPKHTSQKCQNCGHVDANNRDDEKFICTSCGFMSHADINAAKNIKDRALSMVRQCGLGVSPSRATAEPFRVRGDSAKPEPKGSKRPKKPKETSPRSMSKRGEPGNLISQDIKTVMS

SEQ ID NO: 48755 - protein, 307 aa, unknown
  TnpB Polypeptide
VSLATVDGRLECDYDLPDDLEGTPHGEYLLNDDYAFATSTVHYDSEADEFYLHAAMKRELDVSRPEKAEDSRVLGVDCSVDDHIAVTSTGQFIGNADYLNHKRREFEQRRASLQQTGTRSAHLTAQRIGDRFGRWSEDYLHQCSKEIVAEANHHGCTHIAFEDLEWIRDRISDGKKFQQWAFRELQEQTANKAELAGIVVEKVDPSYTSQQCSKCGCTLEENRDDQHFACLNCSYRANADYNAAKNIARKLALTLQRGQNSPAGGVFCQYALKSGVMTVNATDVASDTSVSAERESTDKPTTSVVGH

SEQ ID NO: 48756 - protein, 411 aa, Okeania sp.
MNYTYRIYPDAAQQIDLLEWFETCRGVYNYALRELKDWIASRKCPVDRCSLEKEYIISADEPFPSYHRQQNNLPKAKKQFSHLGKVHSQVFQNTIRRLHDTWEAFQKGGHGFPRFKKFGQFKSFVFPQFKDNPINGFTIKLPKIGEVPINLHRPIPDGFKVKQVRVLSKVRRTQWYLVVTIESDVSVSDPPIYGRAIGIDLGLERFLTVSDGSFQERPKFFKSMQRKLKLLQSRAARKQKGSQNWQKAQTKVARIHHRIAKRRKYFHLKTAHKLCDQAQTIFAEDLNVKGLTRGILGKDCVDAAFGQFLSLTEWVCWKRGVYFAKVNPNGTSQTCPNCFTTVSKGLQIREYHCPECGYRTHRDCAAAEIVLHRGLETVVAQGLWGTETACQVGLSGVYDLDKWRGGRNAQS

SEQ ID NO: 48757 - protein, 398 aa, Nonomuraea sp.
MSRYRLQPTPAQEAALAEHCGHARFVWNLAVEQHAHWRPGRKGAPGFAEQCRQLTEARADNPWLAAGSVTVQQQALRDFAQAMAHFFAGTHRQPTWRKAGRHEGFRIIAVKAGDVRHLSRRMGEVKIPKVGWVRFRWSRAVPDGVKSYRVTREACGRWHVAFAAIPEPIPAPGTGEVVGVDRGVAVSAALSTGQLLNVPGLRETEKTRLLRLLRKLARARRGSNRRGKVKQAIAQLRARETDRRKDWIEKTSTGLARRFDMIAVEDLNISNMSRSARGTRAVPGRNVRQKAGLNRGILASGWGRLVTRLEHKAPGRVVKVNPRYTSQTCNVCGHRAAESRESQSRFACAACGHQAHADVNAARNVRDTAAGHAVAARGGPLLGEPANREPQRGRLLVG

SEQ ID NO: 48758 - protein, 394 aa, Nonomuraea sp.
VVQVRLSPTPAQAVALAAAVEVANRAAALVSRLAWRHRCFGRVALHRLAYHRVRAELPRLGAQAANLAIARVHSVYAHRRKSRQRAHGFRPSGAVPYDARMLTFNRDARTASIWTPTGRVSVSYAGRDADERAIETLPVGESDLICRGGKWLLQVTVTLPTPNQAEPVNGFLGVDQGVANLAVTSDGLVLPGKALPGTIAGNGHVRTVRARRFRQRRRLQAKGTRSARRALRRLSGRERRMMTDVNHQITAYVVREAERTGRGIALEDLRGIRGRVRADRLQRRTLHGWAFAQQTAFTRYKAARAGVAFVLVDAAYTSQCCPSCGYVSRGNRPTRGRFACLRCGLAGHADHIAAVNIAQRGVDGWGTVNSPHATGLPSARRDRESKPPAPARGR

SEQ ID NO: 48759 - protein, 443 aa, unknown
  TnpB Polypeptide
MVKNLTSVSGDKDQVNMHQENTMLPRRISVSLFTDQSIIWPVKRLQAFKFQLRPGGQQEREMRRFAGACRFVFNRALARQNENHEAGNKYIPYGKMASWLVEWKNATETQWLKDSPSQPLQQSLKDLERAYKNFFQKRAAFPRFKKRGQNDAFRYPQGVKLDQENSRIFLPKLGWMRYRNSRQVTGVVKNVTVSQSCGKWYISIQTESEVSTPVHPSASMVGLDAGVAKLATLSDGTVFEPVNSFQKNQKTLARLQRQLSRKVKFSNNWQKQKRKIQRLHSCIANIRRDYLHKVTTTVSKNHAMIVIEDLKVSNMSKSAAGTVSQPGRNVRAKSGLNRSILDQGWYEMRRQLAYKQLWRGGQVLAVPPAYTSQRCACCGHTAKENRLSQSKFRCQVCGYTANADVNGARNILAAGHAVLACGGMVQSGRPLKQEPTEMIQATA

SEQ ID NO: 48760 - protein, 408 aa, unknown
  TnpB Polypeptide
MQLTQKIRIFPSAEQIDVLWHLSERCRLVYNFALSERIEAFKNNKSYVSYFKQSSDLRKLKKQYTEYRYVYSKALQMILRTLDADYKSFYALHKKNDKSANPPRYKFKKYFTSMTYNQSGFKIKDNKLKLSHFYNGVELLFDIPENFKFNKIKQVTIFNKNNEFYLSIVHEVDAKKYKDNKKYQAIDLGVSKTVTAVNTKGKFFETINLRPDKYWNSKIDAIQSRRDHCIKFSRRWHRLNKALIRCRQKCSNQIKDYQHKLSRKMVDNTKANTFIIGDLNVKRMVENKKSFRKVNRSVQNQGYLNRFTRFLTYKAELVGKKVIEISEKDTSKMCCKCSKMHKMPLSKRNMNCDCGNNIDRDRNSAINIMVRYLSQNAKWTSYQQFVDNLRKTGLSLDNTLVGSSVKNS

SEQ ID NO: 48761 - protein, 440 aa, Spirillospora sp.
LPFADGTVLFVQLRYNFRVYPTPGQRIELARAFGCARVVFNDGLRLRQEARERGLPYVSDAELSKQVITEAKLTPERAWLGEVSSVVLQQALADLNTAYRNFFNSVSGKRRGRKMAPPRFRSHKDNRQAIRFTKNSRFRVLDNGRLRLPKIGDLAVRWSRSLPSEASSVTIVKDAAGRYFASFVVQATDDPLPELDSRVGIDLGLTHFAVLSDGTKVTAPKFLRRAARKLKRLQQALARKQKGSNRRKKAVVKVARAHARVADTRRDWQHKLSTAIIRENQAVYVEDLCVVGLGRTRLAKSVHDAGWAGFTAMLEYKAARWGRTFGRVDRFFPSTRMCSACGRINEKMALNVRAWDCPCGAAHDRDVNAAINVLAAGQAERENDRRAHVRPGLVPAARNETVTHPDAACPTRNVEGISALQGGEDVNPRRTPSGARRCRA

SEQ ID NO: 48762 - protein, 488 aa, unknown
  TnpB Polypeptide
MAEYITTRTYYSKKLDKQTYAELTLIAKRLGILRKIIWHQFSSDPKRLNDRKIRDIWLREKENGTNLYPKIIDQLPARLWKETVRDTIGSINAYFEAGFTEIIKRLYKKYGKAEAKKLAKILKTDYKANNELHRMVRTLIPKGYSKADNIICLDEDCYNFVDDESNIIQVMGLALRKRLSIPMTTKNKPKGNFMIILKNGRCEFRVYHKYQVTNIKKPIKAIGVDKGYTEVFTDNTGERHGEGFGKLLTKKSDFLDEKYKNRNKLWAIMKKAREAGDIRKANNIKVNNLGNKKLNKQKEVMKIELKEKIYSAAKKIAQKASIIAIEDLTFKTKAKKGKKAKKGKRTNRLLSSWIKGVIDEAIIKYCFIYGTKLVYVNAAYTSQGDSRFNCALMGTRIGDSFIGFDEVVLDADINAAINILARLYDSEINLYTSAEKVKEILTKRADAVLSASVETAQLGLQDVAPINLELHPKSGLSKKSSKKLAKVS

SEQ ID NO: 48763 - protein, 393 aa, unknown
  TnpB Polypeptide
MSKRAYKYRFYPTPEQGHNLACTFGCCRFVYNWALRLRTTAYFEQGQKLYYNDLSAALTALKKDEGTVWLKDVSCAPLQQSLRHLDKALVNFFQRRAKYPVYKKKRGTQSASYVGEAFHWDETHLTLAKQDKPLDIVWSRPLPKGCKPSSVTVTKDKADRYFVSILVEEVITPLPHLDNNKSIGIDLGLKSFVITSDGEAIANPKYYVRDEKKLAKLERSKAKKKKGSKNRNKARLKVAKAHARIADQRRDFQHKLSTRLIRENQVICLETLVVKNMLHNHNLAKAISDVGWSEFTRQLEYKAEWYGRTVVKIDRWYPSSKRCHVCGYVMQDIPLEVREWTCPQCRTVHDRDINAAKNVLAAGLVASACGDHVRPAVAKAAVGNGRRSRKPSS

SEQ ID NO: 48764 - protein, 387 aa, unknown
  TnpB Polypeptide
MATRNRAIKYRLFPSEEQEQKILQTFGCVRKVYNDGLSLQKGLYEAGFQSMSKYDLNNFVNRAWKEEFPFLREVDKFAITNSVYALSSAFENFFQHRGKYPRFKSRKDRAQSYTTNRTNRNIEIIAPARKGNHRGWVKLPKLGHVPALLHRLPPQNWVLKSATVSVDCSGKYFVSVLFAYEQEVPFVPVPTAENTLGLDYSSPHFYVDSNGQDAGVPSFFRQAEKRLAKEQRKLSKMVRGSSNYKKQRLKVQNIHQKVSRQRLDFCHKRSREIANSYDAVCVEDIDLKVMSRTLTLGKATMDNGFGQFRLFLQYKLEEQGKYLVTVDKWYPSSKTCHECGCINKELTLNDRTWVCPQCGSFILRDHNAAMNIRDEGLRLLREDKLSA

SEQ ID NO: 48765 - protein, 440 aa, unknown
  TnpB Polypeptide
MQKRKFTVVTQLHEKNNYEIIEYIESSRSEYARAMRETFYTIKHDDLNKSQHNKYLQTKYDILKRTAGSIISDAQGSYNALRESKEYERKQLESKIIHLETKVIPKIVEIRDYNSAKLRLGRNVSVAKQRNLRRKIIAKKAKLNRLKQKLGNLNYQLESGRLKLCFGTKRLLKQDYELFIAQRDSQMSFVGAKEEKACNLMLQLEYSCKNNQFRVQLRKDFGGYKSATDKYAYGKVYFNHHKKYLISILRSKTSPLSYKIIKRNGRYYLHCTFEIQVNELITRSTNGTIGLDFNKGFITLAETNRYGHLVKTQNLPYRFKSGDKTKTDLQDVVNHIVRLSCQTGKDVCIENLDFTAKKSKTETKQNKKYNEMLHSLAYREFSDIVESVTYRNKVNLIKVNPAWTSWLAKQKYCPPMKLNVHVGASYVIARRGQGYKDTFK

SEQ ID NO: 48766 - protein, 464 aa, unknown
  TnpB Polypeptide
MLTGRKFRIYPTEAQAATLAQWIGCQRVIRNAKIEEANYLCWLKGRAKFNPGTPDERGYARWLREHAEPAPGPDWYFDQTYSQFKTDLNPWLAEVPCQVLRNGVARAKTAFVCYWEGLGGRPKTRGRQPEESVFLTRELFQVKDGQLYLGTAKFPVGKINWKAHRKFDPPACITITRNVDGPWFCSFAFEDGEVLPTNEDLLVQHAFVPVERVNAFDRGVVIPLADSEGHTYGPTPKERKRLLRIDARLQKQQRKLAGQQRGSKRRKKTKAKCNKLRRAKRNITENWRHQTAAAVTRTEPGEPRQHDVLVFENLKLANLTRAPKPAPQTPTGAYPPNGAASKAGLNAALLELGLGRLAELVAYKARRQGLAFVRVPCHHSSQECSHCGHTHPDNRPTQAEFHCQACGFRANADYNASLVLRKRGWAFLQTQQLPFVRPRKSGALKRSKGVLAPAEKPPSLIGGR

SEQ ID NO: 48767 - protein, 405 aa, unknown
  TnpB Polypeptide
MPPVTSFLTNSGMWGIIQAVQLTVVGKLDLSAQDKQRVERTLGVFANACNAISQAAFTGRCFHPVALHHRTYYDIRQRFNLHANFTARAISRVARAYKTFKAKKQPLKLLTFKPQSLDLDARLFRLFWENDAVWVSLAACDGKRIKCPVKVGQRHMPILRDSNPTSAVLKRHRDGELYLHIVVSVPVPEPSEPPQSVVGVDLGEIDLIVASHGVKISGVESIERRKRFRARRRALQRKGTRAKRARTRLSDKERRWARTYLHTVSRRFVDSLPPNSLVVLEDLSGIRDRCKRSSAEQRAQFHAWAFRQLQWMIAYKARLAGHQVVFVKPNYTSQTCPRCGRVCASNRLSTRLFRCRECGFQHNANFVASLNIATRAVQAGLGGTGLLSTSLRLRAVNPLSANSRL

SEQ ID NO: 48768 - protein, 449 aa, unknown
  TnpB Polypeptide
MLKQKYTAVTQLHEVNNKDIIEYFENASVYFCKLQRKAFHIFKNENIAGKKIDYNLLQKKFMADYKISKRTTNSILKDVQGRIKALAELKKYEVSQKEQKIKNLKEEIEKLDKKILEFQEKMRNKIKVSHLKYWNLKKSRAFKKMKLNKFQMRLEQLKWEIETGNYKLCFGTKNLLKSNKTEFLLQRDSQMSYIGSQDEKRRNQMFQLSYNNGNNQFEIKIRKDFGLDMEEKYVFGKCYFNNHKNKLIEALETKNSTPLTYSIIRKNGRYYLHCTFEYRIENKSNFLTKKTYGTIGIDFNKGFLTVSEIDRNGNLVKTDILKYRFGKGNKTKSDLESCISKILKIALETGKDVCFEDLNFKGTKSKTTKGKTDKGKKYNNMLHSLAYSLYDKLITNMAFRNKISIIKVNPAWTSWIAKNKFCERMKLNIHIGASFVIARRGLGIKDTIK

SEQ ID NO: 48769 - protein, 435 aa, Lactobacillus sp.
MRTQTRVYKLQLNEEQKRLFIELCGYRRWAWNHALDIWNDMYEVRRLMADYTEKVKIVKEAAKTHDEVRRVIREIDRNSPGAKANPSPSWQRVRNELNSDKETDAWRLAYPAHLANLAVQDLGNAWKSFFDKAQPNWGKPKYKSRKAPRQGFKSDQSKIEGQILKLECPQGRKDWPLGRIRLNEPVLSDDFSVISYFTEAGNYYAAIPFQVEDIKQPAKTGKATAVDVNVGHFDYTEGRVNVLPKRLDKIYKKIKHYQRQLARKRIQNGKAAYNSKNYLKTRAKLQACYRKAGNIQNDLIQKFTTELVRDYDKIVIENLSVKGMLMSHVASKGVHRSMFGKFKQILTYKCDWYGKELILASKLYPSTQRCAACGNVKKGDEKITLYGNKKHGTKHNEYVCYNKKCPNYNKVVDRDKNAMLSLLALAEHPELNKAL

SEQ ID NO: 48770 - protein, 391 aa, unknown
  TnpB Polypeptide
MFSFARKSKNQMVLEKISPKGAMTMKTNEHAKYTYLTVELVPTAEDAAMLQKTWDAHKRACNRFSQKFYNESLKGKNKYKNWKTAYASASWLAKGKKGGLHAVYGHSIVDIIKKAYKRNEQKGKLELILFGDYGEKNTKSSAIHFCWESAFQVDFTTKKCRLDLADGRRTIAFSIPSKLPEPPTSWKIVRAYLKLVYGSWYLTLTFPNPTAEMKAEPDTNVVGVDRGELNIATTFSPAKGAHSYKSIDYPRPCKGSTNDDYHKSLFARDVHVASEVVENEPPYTIFILEDLYFEKTIEGWSYRHFEDVLIYLAALRHQSIFYCAPYNTSITCPVCGHVEKANRLHDENRFVCQKCGYGADEIVDDDENAARNIYNRGKEALEKELSNKVGA

SEQ ID NO: 48771 - protein, 376 aa, unknown
  TnpB Polypeptide
MLLTVKMKLHPTEDQHQKLLCTMERFNEACNYVSEFAFRNKVFGKIELHKNLYYDLRERYVLSSQMVVRVFGKVSESYLADRSSYHEFKPHGAIIYDQRILTIKTIDTCSILTLEGRELMKMSYGRYQPLDLKRVRGQADLVLIKNQFYLLIVADIPEDPQIEPQEIIGVDLGIVNIATTSTGNTFSGQKCTESRKKYSRIKGILQSVGTWNAKKHLKKLSGKERRFKNDTNHCISKKIVAEAKDTRSGIALEDLKGIRDRVPGYKELRASIGKWAFYEVAMYIRYKARLSGIPVYLVDPKYTSQQCSCCGYIDRENRKTQSDFFCIKCGYTDNADINAAKNIASRADVNQPIALRPEPKRSGRWKGKPMALAVGS

SEQ ID NO: 48772 - protein, 368 aa, unknown
  TnpB Polypeptide
LEKAFKYRIYPNKKQQELIQKTFGCCRFVYNYFLDKRKSEYGKDKTSLSYNDTSKLLTKLKQELVWLKEPDKDSLQKSLKDLDMAYQKFFKEYAGYPKFKSKKNRYKSYRTSCTNNNISFQNKHIKLPKLGLIKIRDRQIPQGRILNATISQEPNGHYYCSLCCTNLDFPQYQKTNQNIGIDLGLVDFAIISDGIKIENPRFYEKSEKKLARLQRELSRKTIGGSNWNKVRIKVANLQKHVANQRNDFLQKLTTRIIRQNDIICIENLDVKSMKETNSTIRNKRVGDVSWSEFRRLLTYKSKWYGRTLSVIDRYYPSSQICHCCGHQDGKKSEDIRCWICPNCNSELDRDINAAINILNEGLRQLNFK

SEQ ID NO: 48773 - protein, 415 aa, Clostridium sp.
MSLTVKQQLKHLSKEDYLNLKELSHIAKNLYNYALYNVRQYYFQEKEYLNYESNYLMCKDNENYKKLNSNMAQQILKEVDGVFKSFFGLIRLAKQGKYNFRDIRLPKYLKKDSHTTLVIGFVRIKDNELVIPYSQGFKKEHKPITIKIPPILVGKKIKEIRLIPKLNARFFEVQYCYEAVETQREFDCNKALAIDIGISNLATCVTSEGQSFIIDGRRLKSINQWFNKENSRLQSVKDKQGNIAPTKRQGIIRNNRNNAVNDYINKACRYIINYCVVNNIGNLVIGYNETLQRDINLGSRTNQNVANIPVGNIKEKLEYLCKLYSINFVKQEESYTSKASFFDNDTIPKYNADNPREVVFSGTRVKRGLYVTAKGYGLNADVNGALNILKKSSVVCLNALCSSGEVDTPVRIRIA

SEQ ID NO: 48774 - protein, 379 aa, unknown
  TnpB Polypeptide
MEHARRRALYERTGAIDYSVKGAYHDPSYAQLKEVLGSKNFDEALCLVSESWKSFKELLKLKERGELPTWLDPKPPKQLKRLIIAVKYDNYRVLEGEKAIWLRYYNVKLKFKGELRWWRQRLQQGRLIIVYDDVKGAWYAHIASEVKLKRGARAPLKCGIDLGQERLAAAVTESGVALLYRGTVLKSEYHFLKMEVSELDKRARFADFDVQVWLEKRKWLYRRFRMRKREIIKNMAAHLAKMLLELGATEIYIGYPRDIKRDKPTEGNNAWPYWQTIKEIARAAENYGIAVYLVPEENTSRICARHGCEVVREPRGLVRCPYGHAMHADLNAAMNILKRGGGRVPERVKTLSFTPTPEGVIERGKKRGGKPDSPAPRAG

SEQ ID NO: 48775 - protein, 301 aa, unknown
  TnpB Polypeptide
LSLTNLKPSIKLFLKSDSNKDNLEFKDNQPICYNNQNYKIDGYIISIPLYTTKCQRFAFPAKQTERFEELQQYIESGCKLGKASLVYKRGKWYFAVTIKIVDKETINSNVMGIDIGLRQVAVASVKNPQGKEINRQFNNGKQAGFIRKKYRSLRRKLSQSKKVKAIKKTNNKEQRWMTDLNHKISRQLINLAVQEQVGTIIMENLENIRNTAKSLNRADRNLHSWTFYQLQQFIEYKAELAGIKVKYVNPKYTSQSCSKCGKVNKSNRKVNLYSCECGIHIHADLNASRNIGNKYLEQQSA

SEQ ID NO: 48776 - protein, 557 aa, unknown
  TnpB Polypeptide
MTPITYRIPITAYVINNEEAPERNALQTLEGIRKHLYLAANIAYQHYYQLLAKEDPVQKNLFEKYNKFRKADEEAWKNLNDAKLRYHHLQTSKEKEEVKSIIEKLPDKIREIRNDAKKSIYDFVKQDEFIAKLTDKFRNVIPREVMQYSMTKVLQELYTDYPNIQDENIRQPLRVYSNNFPICFGWNNDLKNSFKFLDKKGSGEKTVQFYSFRCLDKENELIFRCRIGKRLSELADLLAQISIGAISYTNIGDPSIQYNGKNKWVLQFTYKPGSAAITTAGNDKLAMGIDLGYKVPISWAITDDNNTSGEIGGIDEIKEERKKIQALFKKKIAAIKNTRSGRGRSRKNAILKDRNVQEGNYFGNLNACWAHKLVKIAVDHNVAIIKIEDLDFRETKKRIKQIAKQINLQLAQRGTKKEHKSQPDNLLTMFRNWSYADLINRIEKEAEQHKIMVARVHPYKTSKICWKCEKEGKRNTQAHLRFTREQANQCSYKQSGECVLIPYDEKVIARQRKKAVKNGNSKGGQAQQVFTHYLMADQNAAMRIAWAQQYHLTPKQS

SEQ ID NO: 48777 - protein, 430 aa, Leptolyngbya sp.
MSVHLSYNEDMLTRRITYRLYPSSTQAAKLHWARKMHCALYNAAVANRKTQYKQFNHSVDYFEQQNSLPDFKRIWTEYRELGGHALQATLKRVDFAFQRFFKLKSGYPKFKASRRYRGWTYPDKQSWGVSTNEGVNGQLHLKDLDLKVQMRGEARTWGTPTTCTVIFDSGKWYASITVQCQPERELGSGVIGADFGCKTAFALSDGTKITSPKFLAQAQDQVRQLSKQQRRKRKPEKRKFKASRRWKKAQAQISKVKRRVKNQRHNWTHQVAADITRSHSIVVTEKINLKGMTCKARRGKRKAQKTGLNRSLLDVGIGMLKDAIEYKLLEGNGFLLHAPTRELKPTQRCAKCWELTPKTLSDRLHVCSNPECSHVEDRDINSAQVCEVWYGRREPSSSVAESPSSTLCGSMKQLGAMKRRKLSAQQSGGE

SEQ ID NO: 48778 - protein, 416 aa, Halorubrum sp.
MEYSHRYHAYPTQELAERLEHHIDVHRQAYNYTLYEYENVDTDDIGSAYKHHARLPDWKDEFPVFSDVNSKALQRTVTRFYQNLTGLSEQKQNGHSVGKLTWKPPRDFQSMTYSQSGFELKNTSGRTATLWLSKIGDIKLRYHRAIPDEAAIKEVTVKKETTGEWFVSFGLETDEANLSEKPDVASLDKTNSVGIDLGILNYIHTSDGTTVDWLELEEEYDRLRREQQKLSRKEHGSNNYESQREAVAKVKRHIRQKVLDYQHKLTTWLVREYDAVFIEDLNVAEMLQGEGNARNKQTAAWRQFITLLEYKGALYGTHVVQVEAAGTTKECASCGIETAKPLWVREHTCPSCGFECDRDANAAMNILQRGFAELGLRWPESTPVETALPTDTTRVSAKRVVETGSPTLNEATPVAE

SEQ ID NO: 48779 - protein, 411 aa, Moorea sp.
MLTLTYEFKLIPSYEQIAIIEEMLAVCRKVWNYALRERKDWIKSRKCDVNYCSLVQEYIIPADVPYPGYKEQAAALTIAKKSNPELKRVNAQVLQQVLRSLDRAFKNMKTQGYGFPRFKNKYRMRSFVFPQFSSNPVRGDWIKLPKIGLVKMRLSRPIPEGFKLKQVRIVRRANGYFVMLALQSDVNVPENPPSGHPLGIDIGLDKFLATSDNELIERPRFLTELHRKLKLLQRRLKLKRKGSSNRHRLNQKIARLHQKVSDTRKDFHFKLANHLCDQAGMIFVEDLDFRTWAKGMLGKHTLDAGFGQFFKILAWVCWKRGIYFGKVDYRYTSQICPNCGTHTGKKNLSERTHFCRSCGCEINRDVAAAKVICQRGVAAVGQIVAENDCGDVLTGTGNSLVKNLGSSKPEL

SEQ ID NO: 48780 - protein, 457 aa, Moorea sp.
MYRTIPVRAVFSDEEKAFWEFQCQHSNSLFNCAIYYSKQKHYKWLEDQEAYTTYWRGDELKAGWKTYVCGVKYPEIDKALKMSPHYKAMAAQSAQQTLKTAGEAIKSYNQLVGLYYKGEVDRPRFPRYRKSGGLFSVTFPRQALTYKQGLFYPSVSKESKPELLTEIILTPPSFIDPDWVKEVTIRPCYGQLWIDWVIDDGKQPVKSNSSLDYSQAMGIDHGGDNWLTCVSTIGKSFIIDGKKLKSMNQGYSRLVANYKAGKSEKYWDSTLDQIQIKRNNQMRDAVNKAARFIVNRCLKDKIGNLVVGWNEGQKTCSNMGRKGNQKFVVIPTKRLIDRLEQLCSEYGIKLTITEESYTSKASLLDDDFLPKYGEKPECWKPSGKRVRRGLYQTASGKLINADSNGAANILRKVSTQPFNMAKVSRGSLTVPHRYDLFSDLSKAYRYKGEAGRVYPPV

SEQ ID NO: 48781 - protein, 393 aa, Streptomyces sp.
VKRAFRYRFYPSDAQAGELSRTFGCVRKVYNLALAARTQAWARQVRVNYNQTSAMLTDWKKTGELAYLNEVSSVPLQQALRHLQVAFTNFFAKRAKYPRFKSRKKSRRSAEYTASAFRFRDGELTLAKMAEPLDIVWSRPLPEGAAPSTVSVSQDAAGRGYVSLLCEDPSVQPLPATGAAIGIDAGLDHLLTLSTGEKISNPRHERRDRARLAKAQRRLARKAAGDGANRAKARRKVARVYARIADRRRDHLHKLTTRLVRENQTIVIEDLAVGNMVKNGSLARAISDAAWSQLRSMLEYKAQWYNREVIAVDRWFPSSKLCSACGSLQRKMPLHVRTWTCDCGTTHDRDVNAAKDILAVGLTASVCGAGVRPQRKTPGGQSATKQKPLQREP

SEQ ID NO: 48782 - protein, 401 aa, unknown
  TnpB Polypeptide
VHDGLDELGFAAAKLWNVGRWAAQRVWDACGQIPGANALMAYLKNHERYADLNSQSSQRVLQELGEAFKSWYGKRDNGDAKANPPGYRKNGDEHPRSTVTFKEDGFKHDAQNGYIRLSKGRNTKEYWSDFVLCAYDADPDVTIENVQVVRAVFEHGEWRLHIVCRHEIEVKSPGDHIAGIDLGICNIAAVSFGDESLLYPGGALKEDEYYFGKQRAKCDDSFSREAQRLDRKRTDRHTHFLHALSKHIVAECVERGVGTLVVGDLGGIREGENGDPTNWGDHGNLDLHGWAFDRFTTMLDYKAEAEGIEVEPVSERDTSKSCSVCGRCDDSQRVERGLYVCDNCGLVANADTNGAENIRQKVLPNPQREDRDNGWMAQPAVRLFDKTRGGFLPRKQMDCEP

SEQ ID NO: 48783 - protein, 402 aa, Streptomyces sp.
VGRVIRAYKFLLRPTVGQQAALGEMLRDHCSLYNGALQERRDAYRHASKTTVRYGQQSAQLKDIRAFDPERQGRWSFSSQQATLRRLDKAFAAFFRRVKAGDEPGYPRFRSAKRFDTVDFPKDGDGCRWDSTPHDPVTRVRLQGVGHVKVHQHRPVAGKVKTISVKREGRRWYVILTVGQAAPGPLPPTGAVVGLDMGIANFLADSDGAFVANPRHGAKAAARLEAAQQALSRCKRGSNRRRKAVQTLARLHRKVRRQRLDHAHKTALEYVRNNDFIAHEDLKIRNMSKTPDPKPDPQQPGSFLPNGAAAKAGLNRSIADVGWGVFLTILTAKAECAGREVMAVDPRNTSRRCPGCGHTAKENRPTQEKFHCQSCGHQAHADTVGAINVLRAGLVRRDANPA

SEQ ID NO: 48784 - protein, 393 aa, unknown
  TnpB Polypeptide
VISALAAPDHSPQLVIADAAAAVEAEKKQDPALAWWGENSKCAYQEAFRDLDRALKDFITSKKGQRKGKRLGFPRFKKRGRCKDSFRLTGVMRCAGATVTLPRLGVIRTHESTRKLARRREDGTARILSATVSRTAQRWFVSFTAEVERQIPQQHAHPGSAIGIDLGVKTLLTGADDQGNVIEIAGRKPLNATLRKLRRASRQHSRRQPGSANRRKSAARLARVHARAAHVRADTLHKATTDLARRYEAVIVEDLNVAGMTRNRRLARAVADQGFGQARRMLGYKTTWNGGKLIAADRWFPSSKMCSACGTVKAKLPLSERTYRCGTCGLVTGRDVNAARNLLQLAASGAESQNACGAAVRPGLARHAAVKQEPGTADAGKTGTAPRQRGAAT

SEQ ID NO: 48785 - protein, 385 aa, unknown
  TnpB Polypeptide
MYTTNYKLFRAPRNRNLKRKTWIAHTIWNYFLGWQRMRYSLGLPYLSYKEMSREFTMLRKSHPNMFAHWRELDSWAARQVLKRLDDGYQRFFKKIAKRPPKFRSFRKPYSLTMCPSGYKFDRPIAGDKGFGIYSDRVTIMGKTYRFNLSRPIFGNIKTITIKEDALGDFYMSVVTDHKQSHLKPMTGNAAGFDIGVKTMLTCSNGKHYESPHFFTESIDNVRTANRQLSTKKRGSNNRERARKHHTRMHRKVKRQREDHHWKLALELARRFDVLFFETLNLDGMKRLWGRKVSDIGFYAFLEKVKWKPAKKRGKRLECIDQWQPTTSVCHVCDTRVSLELSDRTWTCQHCNTYHDRDVNAAINILKVGASTFGVKNVRLAIASGS

SEQ ID NO: 48786 - protein, 417 aa, unknown
  TnpB Polypeptide
VEVTKSIMMKVSKRINMHKFLAIREFLDTYQNIARIYYSYILENSLEEKLISGEITSKDLKNILHERFYKQIKESFDIGSQTIQEVRDVVVEAINSYAQLVKQNRKASLPKVEEFTVRLNHPRVVSVFEHGKRFDFFFKVKLNGGKRVVIPIECGELQKQMLKDALNGKYKIGAFQLVRRDDWFYFVIPLKKNVSIKQRYDGVVGVDLGLRYNAVITLLYKNGNITYTEFVKYRRLMHKIRELWYRIDELKSMLPKDQRTSKRIKRLWRKINRINNWIAHNVSRRIVDVAKENNAMISIENLKTLYPVKKKNSKKNNRRVSNWIRGRVVKYLTYKARWEGIKVRVVPPKNTSKICHFCGAEGFRNGALFSCSHCNRTYNSDFNASINIGIRATLPNVRGCVNHPLGLATYKAPSYLR

SEQ ID NO: 48787 - protein, 411 aa, unknown
  TnpB Polypeptide
MNQKTIKSYKFRLYPSKKEETKLMETLDLCRQTYNFLLQELNDQEIIDKSQIQGIIPDMKICEPKFNNLYSKTMQYECYRLFSNLRALSKSKEKHHKVGRLRFKGKNWFKTFTYNQSGFKFIETGKRFQTLKLSKIGELKIRAHRNIKGRIKQITIKKEQSGKWFATIVTEELNKVENKLNLNKTVGIDFGLINIIHDSNNKIIQNPRHLNKHEQKLKCLQRLLSKKKKGSKNREKARTILAKHHEKILNVRNDFLHQISSRYIKNYDVIAIEDLQIKNMIKNKHLSKSISDASWNKLRQFLTYKAENAGKLLITVNPHGTTQRCSNCKNKVKKNLGNRTHNCDKCGLIISRDYNSALEIKDITLNSIRQELSEFKPVEMPLTAELKIRSTSQALMKQETQERLTTDTQWL

SEQ ID NO: 48788 - protein, 302 aa, Conchiformibius sp.
MNIYKSFKFKLMPSDEQICKMKRFCGCARFVFNRGLMYQLEQYQQDASFKFSYAELSALLPAWKREWHWLKECHSQVLQQSLKDLACAFKNFFSQRACFPKFKRKGKKDSFRFPQACKLEQHNNRIYLPKIGWVRYRNSRLVSGSLKNVTVSQKCGQWFVSVQTECETAIPKAKGGAVGVDAIVFVEDLQVANMSQSTKGNAERHGKNVSAKSGLNRAILDQAWSEFRRQLGYKLLWRGGRLIAVPPQNTSRCCPVCGHTAKENRPTQARFACMKCAFAGNADVVGAMNVLKRGQAALAAHR

SEQ ID NO: 48789 - protein, 598 aa, unknown
  TnpB Polypeptide
MDVEIIAYRYGLQPPLDWGDDIEVAMQRQVDLWNRLVEIEQEYRGGVREIVASEANLELIRAERVELLQDLRQLIDQRSATHSKTRRRTTTPDLDSCIAATRKRLQEVTERAKATRAAAYTRLRLQLRELEDKRVKRVKEARQAAAAGGLWWGNYNAVIDSYEVARRGAIREGRELRFKRFTGEGRLTNQIIGGMSVVDLMSGTKAQISVGPVTGRRGRDGHVELRTLTATVYTDVGSRRTATWPIVMHRPLPANARVQTITVHRVRQADRWRWHAVIVLRQLRARGIPQGEVVAINLGWRKTAAGLRVATVLRSGNGEPEFIYLPARLIAGIVEGDRAHSRLDRKLNAMAEWLWALDLCDGPEQITQAIVTARDKKKLRPRHLEWLRCEWENHSERWRPHDLGYLQEFGRLWRRHWRSDAARRRWLINARRDHYRCETKRLIGDAEKIVINSHDLPSTIRASKDEAPPAVRRQHAMAAPAELRSIIENYSRRTGTSMVVREIAHDECAQCGEPLGAQNRSELVWKCRSCETRMDQDENFCRLMLAAEVSDPNPGAAVHIPEMQTYSTVYRWNRKRSRGRTQLSSDSNCGLEESPSVE

SEQ ID NO: 48790 - protein, 388 aa, unknown
  TnpB Polypeptide
MLKIKDNQKMLASKFRLYPNKEQEEKLEFALDTCRQAYNMMLGELNNQIVIDKAQIQAMLPNMKICEPRFREVYSKTLQYECYRLFSNLSALRVLKGNHKKVGRLRFKGKGWFKTINYNQSGFSLENNKLHLSKIGDIKIKVHREVNGKIKQIQIKKEIDKWYAIIITDEKKQIVCGKKVIGIDLGINHYLVDSEGNKIKNPKILERNLQKLKHLQKDLSRKKKGSNNRKKARIKLQKFHLKIYNQRDDFLHKITTNLVKECKIIVMEDLNIKQMSQQKYFNAKNMMDASWNKFAQLLDFKAESAGCQIVRVNPRNTSKTCSKCGNIQDMPLHKRTYECAECSFVIDRDYNSAINILNKLAGQELSCVERFPNTPLEQGNSMKQEALT

SEQ ID NO: 48791 - protein, 286 aa, Streptomyces sp.
LRLGPLSPQCKGQGAKLPGAKTFRVTFRNGQWHIAFAVVPDPVEGPGTGEVIGIDRGVTVTAALCDGRKLNCPQLTTRERAQIRKHQRRAARAPKGGKAKTAEYAKAARLKAREANRRKDWCEKTSTMLARTYDLVRFEKLNIKNMTARAKAKPDPDQPGQYLKNGRAAKAGLNRAILAQGWGLLRQRTGHKAPGRVEDVPAPYTSLRCSACGWIDKNSRKSQAEFVCSSCGFTCNADTNASTNIAAGQGGIPRPRRTAGAGGTTPPTQRSNFREPQPEWAGIPLF

SEQ ID NO: 48792 - protein, 410 aa, unknown
  TnpB Polypeptide
MSLPVRATVTARVEAVTPKGDERLLVEFLRVYRDSIQLVINEIWGLSEVPSWTELHNMFYGRLVKMGFRAHHVSEIYKRAKEVVESTRKNNGSKPLLKKLTARIHTLDYKIDLDKKTLRVTVLRDKWVELKLKWYSYLNKYLDGSWRPGEILLSYRCGRFYVYITFHRDVVFREPQAIMGVDLNFNNITYTIIDLNSELVSIGVIPFRGLSRALHLRRLAEDLQKRHPRSWRFLKWARRTRARWLSKARNILVDTAHRVSKKLAEVAREYNAVIVFEDLEKIKENNNGGKKLSCEKTLWCYRRIQEYTEYKALLKSIKTIYVNPARTSRKPPNGKKIKFINYRFLQLGDTVTSRDVVASWNLALRGLQQMKGSWVKWSPDGPGSDAMKTRTEPGNPEAEKYLKAFTAIHK

SEQ ID NO: 48793 - protein, 554 aa, unknown
  TnpB Polypeptide
MGGEMITLKCLLEFQNKQDKEIVLDLMRRFSSAMRYAYKRLLEGEKRKDLKKNISILFNINTRYSDDAILLAKQTIEIYKSHNKNPKKVIFGSRALFDKLNKKHLTGGSRNSLIKKWREKRQGNLYSRGDKSKQGNLNLRLQWINDKLYLRINIGDRQYIYTKVIRSVKREKDKWIELMFILEKAYQKSDWFPYSVRLKLKSGKVYAFISVEEKLPPDTIKKDSGVIGIDINAYPFHLALATASKDGNLENYQAISLYELLDVSSEKRQYLEWQIAHQIIEIAKKENKAIAIGNLDKLPKGKRGDGFAKLRQKLQKWIYKRLLNKIEITARRNGIEIRKVNPTYTSLIGKLKYAPQFNIDKDIAAAYVIARRGLRFKESLPKNYKELLNDKDFLLFSEASIEDKIAKLKKEIKEERNEYKRNKLKSKLSKLRKELKALQKHLSFIIESEKSKSVSQQPVNQRKEQVRGSAYAGYKNWQVLFTAFTFSCLESYRDFSPLKRVMISRDWARMVNRLVPVLGAGTMILPKYRLLGLGVSEMAEYKYPNSNCSFIQFG

SEQ ID NO: 48794 - protein, 390 aa, Deinococcus sp.
MSENTTVRTFRFRLYPTKPQQAALSETLRLTRTLYNAGLEQRREAYRKYGKTLSAYDQQKELAALKEACPEFGSVYAHVLQDVFDRLDKAYKAFFHRVKRGAKQAGFPRFKSAQRWSSFKFKQCWNNSKNDWTTCGRPVDGGRRISIPKIGNVKVKFHRPLEGKPKSLQIVLDCGQWFAVYTCEVPRQTLPATGSAVGVDVGTTWFAITSDGEFVENPRHLERAFKKLRVQQRTMSRRKKGGNRRRKAVQQVAKTYRKIRRQRQDFQHKLAHKLVKEHDLIAHEDLKVSNMVRSNLARRIADVSWSSFFEVLRGKAESAGRVVIAVDPRHTSQMCCKCGHICRGNRVSQSRFVCVQCGHAENADVNAAKNILGRAVPSGVNGEGLPCAVV

SEQ ID NO: 48795 - protein, 254 aa, Glycomyces sp.
MPSSQPCSAAPSEAVSDGIRHGTRLGELLTSASDHSSVVDSRRARLRALAERADAHGNRAKAARIRAENLGTLKRDRRTLTWRAAVRTTTFEAVHAVVDKAAVIAAEDLTKDFTGRERLGKNTNRRLARWTEGVTAEALEAVSGRRGSAVRLVNAAYTSQVIPGSDAIGVSKGDRLHCTECGAVWKADHAGAVNVLRRLGDADIALWTPHRRVKRILQERTDRRRSRLPDQDSSTARMCRCGERTIQPPDIGQY

SEQ ID NO: 48796 - protein, 293 aa, Escherichia sp.
MRRFAGACRFVFNRALALQNENHEAGNKYIPYGKMASWLVEWKNATETQWLKDAPSQPLQQSLKDLERAYKNFFQKRAAFPRFKKRGQNDAFRYPQGVKLYQENSRIFLPKLGWMRYRNSRQVTGVVKNVTVSQSCGKWYISIQTESEVSTPVHPSASMVGLDAGVAKLATLSDGTVFEPVNSFQKKQKTLARLQRQLSRKVKFSNNWQKQKRKIQRLHSRIANIRRDYLHKVTTTVSKKHAMIVIEDLKVSNMSKSAAGTVSQPGRNVRAKSGLNRSILDQGWLNRPGNPGD

SEQ ID NO: 48797 - protein, 381 aa, unknown
  TnpB Polypeptide
VKLTVQIKLLPTPEQAESLCETLETVNGAANRLSQLAWDTKEFRRFPLHKTFYRKIRDEFPLSAQIVCLLNAKVADAYKLDKKVQRVFRKHGCIAYDSRILSLNLITSTVSIWTLTGRVKMPFVCGEKQRALLAYPRGESDLIFRKGRWFLNITVEVPEDKEIEAVDVLGIDLGIAEIAADSDGNKYSGAKLNKVRHRNRALRKKLQRIGTKSARRLLKKRSRKESRFATDTNHTISRRIVSLAKRTNRMVAIEELTGIRSRVRAKKRERTKLHSWAFAQLGSFLEYKCARAGIPLLRIDPRFTSQTCSQCGHTEKANRKSRDSFVCKSCGHTSHADTNGAANVRLKGIALAGTGAFKHPNAAVITCGKIHERIQLQSASL

SEQ ID NO: 48798 - protein, 407 aa, unknown
  TnpB Polypeptide
MVLVEKHIIKPKHKYYDEIDHLCWLSKNLYNATLYHIRQYYFASKQFLNYQAVNKIFVDSNNPDYRALPAKVAKHTQMLVDRNFNSFFGLLKLKAQGKYNKPIKIPNYLKKTGRQAVHYEKGAISFKAQGFIKLSKTNIKIKTKLTKENVQFVRLVSRNNYIAVEIGYNVKEPEQKLNNNVLAIDIGVNNIASFVTTDGDKCLINGRQLKYINHNYNKAVADAKSKLKITHNQNSSKYISQIINKRNNRINDYLHKITTYIVNHAVSKDIGTIVVGYNKEWKQDTNLGKVNNQNFVNIPFYRLINLLEYKCRLKGIKFQTITESYTSKCSFVDDEEIKKHTTYSGKRINRELFRTKNGLIINADINGAYNILKKYMQKNATWNEQLAQTLVQVCSVPSVRKVNIRLS

SEQ ID NO: 48799 - protein, 343 aa, unknown
  TnpB Polypeptide
MYLTVKQELRKLKKEEYEILKELSHSAKNIYNMGLYNNRKEFFNNKKFLKYQDNYTICKAHPDYKILNSNMAQQILKEVEGSFKSFFALLKKIKNEGYDYKKVKIPKYLKKDGYYPLIISMIRIKNNKLIIPYSNSFKKHHIPIEITIPNILKDKNIKEIRIIPKHNARYFEIQYTYEVKEQENNKLDNTKALSIDIGINNLMTCVTNDGRSFIIDGRGLKSINQWYNKRNSKLQGYKDIKGLTSITRLQSNLLRKRNNKVNDYIHKSCKTVISYCIANNIKNIVIGYNNDIQRDSNIGKVNNQTFCFLPLGRIKNNLEYRCKKVGINLIVQEESYTSKASFF

SEQ ID NO: 48800 - protein, 393 aa, Clostridiales sp.
MPQLNCISKLLNLQEILVDVDNIFEDDEKIVIPISTEPSEQVCPCCGEKTSRIHDYRTQMVKDIPLRRKPIILELRKRRYVCPHCGKRFYEHYDFLPKYHHLSNRVFLNIIADLREKSSQKDIAKRNFVSANTVSRTLKLIAFSDKPPLPEVLGIDEFKSNCGYGKYSVQITDIANHKTLDILPTRQKVYLHAYFSRYTREERLKVKYLIIDMWDDYKSLAVLFPNVKVVVDRYHYVRQVYWALDAVRKRIQKRFYKEKRIRFKHLRLLLFKAYKKLDSDGRLALQTMLQQSIELENAWLLKEQFHEMLHSEKTADIDDLMKWIKAAENENLPEFKNCIDTLTRWRHYIAESFVVPHTNAYTEGKHNLIKTLKRNAFGFRNFDNMRKRILLCA

SEQ ID NO: 48801 - protein, 487 aa, Rhodococcus sp.
MARFEVPEGWVVQAYRFALDPTPTQQRALASHAGAARFAHNHMLALVTAVMDQRAAERSYGIADTDLTPPLGWSLPALRKAWNARKDDCAPWWGANSKEAYNTGLDGLARGLDAWNTSRTGERAGKAVGFPRFKTARARRSVRFTTGTLRVEPDRHHVSLPRLGMIRTHESTRKLARRIESGTARILSATVSQDSSGRWQCAFRTLVAAKTRPAHARRSEHPVVGVDVGVKADSLLVVATPDGTEVQRVHAPKSLSAAQARLRVSQRKAARQHGPYDPATKSKRQPSKRWRRTQARIGRTHARAAAVRRDVVHKATTTLAQQHRVVVVETLNASGMRSAGGAYKRGLNRALADAALAEVRRMLTYKTGWYGSAVVAADRFYPSSKTCSGCGGRKPNLTLAERMYVCAHCGLILDRDLNAAINLARLGETPILGEQGSAGSGSVAGRGAIHETGPAHAGPAGGCEASTRHNPTRVDRTGTVVSQGMTA

SEQ ID NO: 48802 - protein, 348 aa, Escherichia sp.
MASWLVEWKNATETQWLKDAPSQPLQQSLKDLERAYKNFFRKRAAFPRFKKRGQNDAFRYPQGVKLDQENSRIFLPKLGWMRYRNSRQVTGVVKNVTASQSCGKWYISIQTENEVSTPVHPSALMVGLDAGVAKLATLSDGTVFGPVNSFQKNQKTLARLQRQLSRKVKFSNNWQKQKRKIQRLHSCIANIRRDYLHKVTTTVSKNHAMIVIEDLKVSNMSKSAAGTVSQPGRNVRAKSGLNRSILDQGWYEMRRQLEYKQLWRGGQVLAVPPAYTSQRCACCGHTAKENRLSQSKFRCQACGYTANADVNGARNILAAGHAVLACGEMVQSGRPLKQEPTEMIQATA

SEQ ID NO: 48803 - protein, 359 aa, Planktothrix sp.
LLKQWFGVSRFVYNETIKYLQQPDTKANWMAIKTGILNGLPEWAKPVPYQIKSIAIKDACASVKAAKKGFKVDGKIRRCKFRSRKDVKQSIYIPKSAIKDCGIYHSILGGCKFKEALPDNFSDGRLTLIYGEYYLTIATEVQQLNSENQGRVVALDPGVRTFMTFFSETSFGWLGKDSNLHIQKLCFKLDKLVSQLSKAKCKQKKNLKKAASRLRCKIKNLVKELHHKTAKFLVENFDVILLPTFETSQMVSKSRRKLRNKSVRQMLTLSHYEFKQFLKWKSWENHKVVIDCNEAYTSKTVSWTGEIINNLGGAKTIKSNSTQLKMDRDLNGARGIFLRALVDTPWLRQFLTYVFVSKR

SEQ ID NO: 48804 - protein, 204 aa, Planktothrix sp.
MKNLRSKLKKAQKQLSKKFVKGAKPQSNNYHKARKRLGKTHLKIQRQRKDWAIKQARCVVHSNDVIVYEDLKVSNKVKNHHLAKSISDASWYQFTQWLDYYGKIWDKAVVAVSPNYTSQDCSSCGYRVKKSLSTRTHSCPNCGIEICRDTNAAINILKKGMGILGIKCQNSTFGQKGSAEQSGKHGEKTASTIDGKPDIASGLL

SEQ ID NO: 48805 - protein, 120 aa, Clostridium sp.
IKREQRKLSRKYESLEIRNKNIKEGRATRQNIQKQVAKVQRLHQRLANIRTDYINKTVFSIVKQKPSYITIEDLAVSNLMKNKHLSKAIASQKFFELKTKLMSKCKQNNIELRIVNRFYP

SEQ ID NO: 48806 - protein, 195 aa, Bacillus sp.
VDVGLKDVAILSTGEVFSNPKWFRKLEETLAKAQCVLSRRQELAFKRNCQLEEAKNDQKQKRKVARLHEKITNARTDYLQKISTEIIKNHDVIGIEDLQVSNLLKNHKLAKAISEVSWSQFRTMLAYKAKWYGKQVVIVSKTFASSQLCSICGYQNKAVSSNGELNRYEVFADLYSTRSANINKGTATRKCRRIS

SEQ ID NO: 48807 - protein, 417 aa, Ktedonobacter sp.
MRKTYKFRMYPNKDTEKQLFWTLTRSRELYNAALTERRDAYHFHVRQHPNYYDEPIRKQLAKELTVGYYEQQNALPEIKAELREEYQEIAAHVLQDVLRRLDKAFRNFYRRCKNGENPGFPRFQGHNRYDSFTYPDGAGWKFTVAEQGKKGTLSLTKIGKAKVKLHRPLEGKIKTVTIKREVDEWYATFSCEVPEPEKLPVSSEDVGIDLGVSHLATLSNGEMIEHPRSYRKAQKVLEKRQQALSRKKRGSHRREKARKLVAKTHRKIARQRQDFQQKASKKLVTRYQVIVFEDIKTINLVRKPTPKQDEKTGQYLPNGASAKGGLNTSILDAGWGTFVNMCAHKAAWAGRTLIKVNPRFTSQLCSGCGHVRNKDLSERWHSCECGTELDRDVNAAINILERGRRQQGAISVEAPCL

SEQ ID NO: 48808 - protein, 383 aa, unknown
  TnpB Polypeptide
MNRTFKTRIYPNNKQASILNGSCGFSRFAYNQGLSLWDDYYKAGGRPNYYSVKKVFNRLKRAIYTWTYDYSKWIGEAALQDLSRGFDAFFKGNARHPRFHKKGVHDSFRIDGSAVKVEEKRLKLPKGLTLKMAEPFRYEDCCTKVYNVTVSKQAGRWFVSISCEVPDTAGKSHAAVGIDLGIHVLMALSDGTVVENPRWYRRRERRMKHLQREVSRKRKGSKNREKAKKRLAGFQYRTACMRSDYIHKATTSIADSYGVVFLEDLNVKGMERNRHLAKSISDASMSMVSQQLSYKTTVGKIDRWYPSSKTCSNCGCIQDMPLHVRTYTCPDCGAVIDRDVNAAMNIYNVGVANYSELMPVEGVDANEAERSVKQESSSNQKIA

SEQ ID NO: 48809 - protein, 311 aa, unknown
  TnpB Polypeptide
LREGAIEVRTHRGWIRIVYRNNKHLHRYLYNNWKPSSELKLKLTDGKILVYLTLVREFEISYNPDNAVTVDINENNVTLAVFIDRRLHEIYRVETNIGRIVIAYSERRRKIAENRSARDRVARKALRKLHERERKEDIIYKTAKIIKEIARKYSATVVVGNAHRGKSRMASNANKKSLRHRIHQWCASKIVEILNNKPLYVFEESEAYSSSRDPFSGKPIKRYTPSVIRIALRGGRRVRVIKIQMRLARLSNGLAMDRDMIGAINIGLKYLSSDGRSVASPSTGPHAAWVKLVIPSLGPTPLTELKIFTSI

SEQ ID NO: 48810 - protein, 402 aa, unknown
  TnpB Polypeptide
MYQFRLYPSGKQANQLSQQLDICRRAYNELLEISIETYNNTGKGLTKFDLDDCIKYLDVDTSIVFSQVLQNISDRLNKAFRNFFRRCKEKKSGKQIDVGYPRFKKWFRSITYPQMGFKFKSDRRLYVSKIGNIPIILHRLPRGKTKTLTIKRNRANQWFAVFSCEFDNKPETHKYPENKVGIDVGLENFATLSDETIIQNPRFLVKSEKKLARFQRRLSRKVKGSANRRKAILKVARIHNKIANQRTDFLHKQSRVIADEYGFVAVEKLNINGMVHNHRLAKHVNDASWNRFIQMLGYKASSAGSQVVCVDPKGTSQSCSKCGKTVPKTLSEREHNCPFCGLKMHRDLNASIEILNRATVGLSGSHACGDHVRPSAKKAVVKEAGTICGKDLHKLPLEAYRL

SEQ ID NO: 48811 - protein, 402 aa, Escherichia sp.
VKRLQAFKFQLRLGGQQECEMRRFAGACRFVFNRALARQNENHEAGNKYIPYGKMASWLVEWKNATETQWLKDAPSQPLQQSLKDLERAYKNFFQNRAAFPRFKKRGQNDVFRYPQGVKLDQENSRIFLPKLGWMRYRNSRQVTGVVKNVTVSQSCGKWYISIQTESEVSTPVHPSASMVGLDAGVAKLATLSDGTVFEPVNSFQKNQKKLARLQRQLSRKVKFSNNWQKQKRKIQRLHSCIANIRRDYLHKVRTTVSKNHAMIVIEDLKVSNMSKSAAGTVSQPGRNVRAKSGLNRSILDQGWYEMRRQLEYKQLWRGGQVLAVPPAYTSQRCACCGHTAKENRLSQSKFRCQVCGYTANADVNGARNILAAGHAVLACGEMVQSGRPLKQEPTEMIQATA

SEQ ID NO: 48812 - protein, 713 aa, unknown
  TnpB Polypeptide
MDGDINIVVCKNKLSNIIKKKPNSVVKAEYEKFNQKDILEVINDTVIRTNKIVFHTYNFLKLYILHLHDKNITFPIINQDFVYTIMNIVSRRTEKAGRKPGAAKLEVIENLTLFYNEFYVQLIIQDDIMTDDKLSYILKNYESVDIVKNIDNNIKEHFIDHVRRYVNLLFKVKEKKQKIIDNASLTSIQKKEKVKKINERYNNIKYDILSSDSEYKSDEKFINKIQKIRKLILPYYDFIKESIFYDIKVNPQNYLKSMIILNKLIQDLNDERETNHKLFQVLPLRTSMVPKYITLDTAAIIQLFIGKAEYFKKISDLSNTIWGSVFNLEDKSFKRSGHKFIHMIKTDGVACSILLEKLTKLEKKIPKTYTTKVFKDHIDHRLATEEEKEMLRQDSENVSGKKIKRKIHNKEKDEVKKYNYEYIEEAKLSDEQKKKNFVFIDPGHNDLIKCLLGKNDDVMNKKKKRSKDVTFRYTREQRNREIKKERSRKISYRVKGEDIMYRETEMSNYNSKTCDFKKFRKYLKEKIKLNRQLCAHYETEIYRKLKFNTYTNTRKSESRMINNFKEKMGNPEETMIIFGDYDKQQTMKGSEPHISQRLKKIFVQNGYKLFLINEHNTSKLCNKCSCVTENVIKQNKKIWKLLRCTSGKCLTYHDRDMNAVRNMKKIVRSVMRGLGRPKEYSPQKEVPAECLSVRKPKIFMTIRNSTRFDNDSS

SEQ ID NO: 48813 - protein, 362 aa, Paenibacillus sp.
VLKAYKYRIYPNSEQRLFFAKTFGCVRFVYNKMLADRISSYKELHEKEDKTIKYPTPAQYKKEFEWLKEVDSLALANAQMNLNKAYAHFFRDKSVGFPKFKSKKENYHSYTTNNQKGTISIENGKLKLPKLKSLVKIRQHRPFFGTIKSATVSKTPTNKYFVSVLVEENEQLFPKLDTQVGIDVGLKEFAILSNGQRYENPKWFRKAEKRLTFLQRSLSRKKKESCNRYKMRLQVARLHEKIANQRAHYLHCISHVITNENQVIVMEDLKVKNMQKNRKLAKAISEVSWSQFRTMIEYKAMWKGRDVIIAPKNYASSQLCSSCGYKHADVKNLNLREWICPSCHTQHDRDYNASLNLVKLAM

SEQ ID NO: 48814 - protein, 233 aa, Okeania sp.
MVKPNNCWYYEVSKTAPQYALRHLSVAWKRCFSKVASKGGASLSGQPQFKKKGRDDSFTLDGSISVDFNRIKLPRIGWVKTFEILPDNVIPKSVTISKKANRWFVSFKIEKEPQITHKLVDVVGVDLGVKALATLSTGEVFEGAKSYKNLVAKLSRLQYLNRHKTKLSNNWKKAQLKIARLHSKIANIRKDTLHKLTTYLAKNHSQIVIEDLNVSGMMANHKLAKAALVYGFL

SEQ ID NO: 48815 - protein, 416 aa, Okeania sp.
MRTAYQYKLRPNSYQIATIEMWLELLRRQYNYRLGERFSWWSENCCPVNACPLVMPIPQLREIPDYYSQKKDLVNTKDKFPEYKLIQSQVLQDCIKRVKLAFDRWLKTDKKGTRLGKPRFKGKGRYRSFTYPQIKQNCIEGNKIHLPKIGKVKLIQHRPIPEGFIIKTVTISRKADGYYVTLSLEDKSVPALTTIVEPTLKNTLGIDMGLKEFLVTSEGESVPIPQYYRSSQKRLKTLQKRLSRKKKGSKRWLKAVKAVAKQHKKVADKSKDFHFKTANELLSKADIIAHENLNIKGLAKTHLSKSINNAGWGKCLSILTVKAGNAGQKTMAVNPKNTSQDCSNCGEKVPKELNIRTHSCPHCGIVIDRDLFAQHDLGNAAINIKNRAAGHSVLKARGARRDTGATKREAHTIAPA

SEQ ID NO: 48816 - protein, 388 aa, Nitrososphaeria sp.
MKAFIHRSARWIPEGAYRRALKTEAEVVEGGLSELLWDLALYRYAMQRVVDALWDLDRIPKKSQAHQLLYYILRSYGFRAHVARNIYNYALALVKAVKENGGSKPTLRKLSARLDYYDARVELDKSIVRVIIRDKWYTLRLKHREEYIERFKSLRWKEVHVKYEDKKLYVSIVFEAMYKPYAPRGVIALDVNLKTITTYNGSEIRRFKTRFVDALSKRKHAEELQDKYPKRWRYNERVLSRIRFLYRRARNIVVDCCWKIAKQIVLYAKRRQYAIALEDLNGLKESLNSKSDRVVWKLTMFAYRRFQHSIISKALEHDAPVIIVDPRSTSSTCPRCGEKLAYTHRLGVCKKCGFKADRDSVGAVNTWLRALYAMRGARVSSESPRGEG

SEQ ID NO: 48817 - protein, 218 aa, Okeania sp.
MDALRYLSLAWKRCFNKVSGVPQFKKKGKDDSFTLDGSISVCFNRIKLPRIGWIKTYEILPDNIIPKSVTISRKADRWFISFKIEKEPSITEKSVDVVGVDLGVKSLATLSTGEVFVGAKSYKKLEAKLSRLQYLNRHQVKFSHNWKKAQLKIARLHTKVANIRKDTLHKLTTYLAKNHSQIVIEDLNVSGMMANHKLAKAVADMGFYEFRRQARVQV

SEQ ID NO: 48818 - protein, 326 aa, Okeania sp.
LKARYKYRIYPNRVQITKLNQLFGCCRYVWNQSLAHCNQLYINGIIKPSYTDLTKQFITQAKRELLWLKEVASTPLQQSLKDLDQAYKNFFNSCKGQRKGIKVKPPKFKSRKSKQTARFVGANYQINQDKIYLPKVGKIKIVWSRPLASKPTSLTIIRDSANRPSIASFVVEINHESLPITDNSIGIDLGISTFATLSNGGKILAPKPLKKNLKKLAKFQRKFAKTELGSKRRERRRLKIARLHAKIKDISYGMLRKRTDFLHKLSTNLVRKYDTIVLEDLNVSGMISYGMLPYGMLRKRKRNRKLAKAISDLGWRQFRTLTEAIG

SEQ ID NO: 48819 - protein, 367 aa, Okeania sp.
LSVNLTIKLFFLTIYSIYNLHYNRSIFKSNKSCQVITLTYQYKLRPIKQQEAEINHILDVCKSVYNYALRERKDWLSSRKSPINSCSIISEYIIPADTPYPNYNIQAKTLTTAKKSNPRLKSVNAQVLQQTLKTLDRAFSEMKSLGKGFPRFKKRLRSFVFPAMLKNCLSDNRIKLPQLGWIKIRQSRQYPESMAAKQARVVKKASGYYLMVSFQSAELIPDNPVGKTSLGIDAGIESFIATSTGKLIKAPKFLLGKLRELKLLQRRLKHKTKGSNNWLKLQNKIGILHETIANTRRDWHFKLAHQLCNLADNIFVENINFVSWYRGIVRKQSLDSGIGQFINEILPYICWKRGKYYTKVDKDYTSQ

SEQ ID NO: 48820 - protein, 240 aa, unknown
  TnpB Polypeptide
MKKFLYLENKIFRSMDQIKQIRIYPPEKGTSRIIVVYEIPDPEILPDKGHYLAIDLGLHNLMTCYDSGNGKTFILGRKYLALERYFHKEVARIQSVWYGQQSAKGIKYPRSSKHIQRLYKKKQDAVTDYLHKITMYLTEYCKKQGITCVIVGDIGNIRKNKDMGHMTNQKFHGLPYNRIYIMLEYKLKMYGICFVKQKEAYTSQCSPLSPEVTKKICSPIKSKKKEGCTETIRKLTMRMQ

SEQ ID NO: 48821 - protein, 503 aa, unknown
  TnpB Polypeptide
MPKARKRKDTQFNNKMSKCVFLYGEPTNDKTAKIRKMQSEFVKLINNYIKALNDNSEVTLQLVKSDNKDSQMRAFEKSIRPEKVNAAYCQNAFDMAVTHLANRLDNIRLDMCRECKSIFTTSKVLFAMSIDGKSKAEMITAMQDIAKSVKPKKDTSFYDGCAEELKSIEDSEFEFIQQEFRVIYNMVSCEYKIPYHSIHKINTRKMAGMVSISMDIQKCLKVDWSYKNCVSQPKTSKIIGVDTGISDAFHTSEDKAIGSMSPVIDFYKNDVEKSFASLSDMRNKKRKISHYLRRHENLPEDVRRSLIQKMDRLDQMIQKTEAPHRKNRRYYGMLEHEIKSSIDSYIKSINHETLTVLEKLDIKEFNNSRKANGKRSMFARGQLQKKLMETLNWKGYDFKEIEPDYTSQCCPVCSYTDKANRNSKSFKCQCCGYEADADYVGALNIKARAEDKEILDVCEKYKYNHDEMQKHIKMIYHTRNEKYKAAAGEAMQQSENSGSRDAA

SEQ ID NO: 48822 - protein, 395 aa, unknown
  TnpB Polypeptide
LEYQLDVHRQLYNHVRWDYENSPEDDKPSEYDQNNKLPEWKRKWPVFSELHSKAAQATVARFHRNLSSLKELKNNGHNVGRLRRQGLSDYRSVTYNQSGFDLDKKRGHDKYAYVRFSKVGWVKVRYSRPIPDHATIKEVTFKKERTGEWFVSFGLEAADELVPEKPAMDSLDTSNSVGIDLGILNYIHTSDGKTVDWLDLEDEYECLRRDQRKLSRKEHGSRNYEKQRRKVAKAKRRIQRKVLDFQHKLTMLIVNEYDAVFVEDLNVKGMLQADGDARNKQDAAWRQFITLLEYKGDLYGTHVVQVEPEGTTKECASCGVESAKPIWVREHSCPSCGFETDRDANAAMNVLQRGFSELGLGWPESTPVETVTATDTTDFQSVSASRVIETGSLPS

SEQ ID NO: 48823 - protein, 377 aa, unknown
  TnpB Polypeptide
MKLTLQIKLLPTYEQVEILKDTFGVFNEACNVISQIAWKRCVFKQFDLHKEVYCLIKETYHLSSQLVVHAISKVANAYKSYRNKKRYFRKLGSITYDRRVLSYKISKSICSISLIKGREKIAYICYRPHLMQFAKGEADLVFIRGKFYIYQTIEIPDERENDVDDFIGVDMGITDIVSISDGTNISSNEVKNIRDKYNKVRASIQSKGTRNCHKLLKRLRGREGGFATIVNHSISKWLVAKAKKENKGIAIEDLKNIRFGMNSKKRNKTFRRRSNSWSFYQLRSFLEYKCKMNGVKIIAVPPAYTSQTCHECKHIGIRNGKRFHCKYCGNIADADINAAMNIATWGYVNTHERWELLSCSIHDDVSTSKTHKSLVYG

SEQ ID NO: 48824 - protein, 205 aa, unknown
  TnpB Polypeptide
MEYSYKFRVYPTAAQARQIQRTFGCCRFVWNHYLALRKDFYEQDGKTMNYSTCSGDMTQLKKTLPWLREVDATALQSSLRDLDTAYQNFFRRVKQGQKPGYPKFKSKHHSKKSYKSKCVGTNIKVLDKAVQLPKLGFVKCRISKDVKGRILSATVSQNPSGEYFVALCCTDVEIVPLTSTGAVAGIDMGLKAFAITSDGVEYGNV

SEQ ID NO: 48825 - protein, 332 aa, unknown
  TnpB Polypeptide
VELKLRNGEIYGSVSFEIPTPEVRYTKENGVIAIDTNASPIHLAIAEVSKTGELLSYQTISLHHFLGLSQNSKDHQEWILAHQLLDLAIQKNKAIAVENLKKLRKGKRGDGKAKLRKILHQWNAKKFLQKLKRVAMLKGVEVIEVNPAYTSVIGMLKYAPQLNIDKDIAGAYVIGRRALGFKEDMPENYERLLKDKAYLEFALKSYEEREKELRELVEKESNEYKRNALKSELRSVEDAKKLLTNLLQSLQSELSSCEGANGRNPEQGRVAKTTLQSAWQVLRVALLFPILGKVLPRDFSPLKPILVEGVWDRVRSRLVPLEAGGTVPIRDF

SEQ ID NO: 48826 - protein, 411 aa, unknown
  TnpB Polypeptide
MKRSSEQSIYPTHKVALSPTPKQESLLMQNAGYARVAYNSVLNDWTQNKKDIPWTAPALRQRWNVAKHTLDWTPDMIQSVGDFAIEDLAKAIAEWGKYRKARKTGLPHRIVGYPKHRAKRKGLSFSYDPRRCKVEARRINIPKIGWVKTREELRFDGKIAKVVIKRDAKRWFACISVQQPKPEETSRRGVVGVDVGIRTLAYTSRGLSYGNPRPLEAALAKLRRLQKAVSRSENINGREWQGYNLTKLRQEISVLHERIANLRNKWHHEIAAEIVAGVGKVRVETLNISGMIRNKRLARALSDAAMGRFLSILLWHCQKNGIHFERIDRWYPSSKMCSACGHVKSLLLLTERIYRCVECGHEMDRDENAALNIENAPTSGGIVEEPSDSLHFEAMSSACEARLKTAIPLVA

SEQ ID NO: 48827 - protein, 281 aa, Salmonella sp.
VKAGQANSHITGWIRYRNSREVTGEVKNVTVSQPCGKWYVSIQTEYEVPEPAHNATSIVGLDAGVTRLATLSDGTVYQPVNSFKANQRKLATFQRQLSRKVKFSSNWQKQKRKIRHLHSHIANIRRDHLHKVTSEISKNHAMIVIEDLKVSNMSKSAKSTAEPPGRNVRAKSGLKRSILGQDWYEMRRQPEYKQHWRGGQVLAIPPAYTSQWCACCGHTPKDNRQSQSKFECQICGDTANADDNGARNILAAGHAVLACGGRMKSGRPLKQEPTGARQAQV

SEQ ID NO: 48828 - protein, 396 aa, unknown
  TnpB Polypeptide
MSSTPKTRPVPSTRYVGCQIRLYPNNRQAVLLRRSVDAGRELWNAMLEATLAHQDRTGKFLGPAEREQFVKHWKQKAPVALDVPAAALYRIARDMGRAFSLWQKRRAKGKRGGFPKYRSRYARQAGIYQEGRSTHLEPGRVRLLKIGWLRWRGGDLPQGRLVSGRVWCDAGGRWMLSLAFDCPPPRRQAPAVEKMGVAVCGPALATVYDGAAHSSFASPDDPSPRVERRLEELERLIARSAMRCGPCGQQMPRAEWMALRTAGNRTKAPCGHHLAAFAPSARSARLQERRGVLHRKMRLRRRDAAHKASTAIVRRAGQLHVASLYGAEYDPGGRDAVAAEFLRQIRYKAAWHRRRLVVPPDQERPGPGDRQGWLHDERRAQEKAAAHLYRYEPPKE

SEQ ID NO: 48829 - protein, 478 aa, unknown
  TnpB Polypeptide
MSQRKKTRKEVNLLILTTSLKLELNFEEENVLRAEMEKYIACVNSLVTLHLSGVSIQKFSSKDVDAELPAAVKNQAIRDAKSVLRRHAKKQRKVERKRAWFAEQGKTPKHPIHDAKVPILRRPVLFVNNQNFKIDLDAKTVSFPIFRDGEMESRKTKRNSLRKEIRVAALTPRHREILTTTPHLSTLRIVIKGDKFLAQVGYTVEDPEIASLNDLLAAPNVLVMGVDLGIKCPAVSYSTDGKVRFFGNGRENRYKRRKFYARRKKLQKAKKLRAIKRISDKEARFMRDRDHQVSRAIVNEAIRQGVKVIALEDLDGIREGCTQSTPTRKSRKNIDKPKVDSVIENATANTGEPVQLNLFSESETMTKKQRRKKRKFSKKQIAARRKNNRSLNSWSFYRLAKFIEYKATLAGILVIRVDPYKTSQRCPICGETHKAKDRKYVCECGFHAHRDVVGAINIARNAINSNKTGCAGDEKEIA

SEQ ID NO: 48830 - protein, 404 aa, Thermoanaerobacterium sp.
MKVNRVERHIIYPKNPYYKLLDEYCFKSKNLYNFANYQIRQKFCSEGKYISYNDMDRLLKQQGMDFDYRNMPTAQSAQQILRLLDKNWKSFFKSIKDWSKHREKYTGRPKLPSYLPKNGRYQLILTNNNCKLRNGQIHFPKCFNGFVLNTKVTNLQQVRILPRYNHIIVEVVYQVEIPQMKKDNGRYIGIDIGLDNFATIGNNVGAMPIILNGKGLKSINQYYNKKISHYREIAKRINKLDYTNKMNKLTIKRNNKINDFIHKVSKRVIHYALALDVNTIIIGNNKNWKRESKMSKKVNQSFVGIPHQEFINKVIYKAENVGIKVILVEESYTSGTSFLDGEMPIKENYNKSRRIHRGLFKANNGRLINADLNGAYQIMKKVFPEAFAEGIEGVGLHPIKVNVA

SEQ ID NO: 48831 - protein, 167 aa, unknown
  TnpB Polypeptide
MEKAYKFRFYPTKTQIEKLNCTFGCVRYVYNHFLGLKQELYNKEKKSMSYSECSKELTVLKQEKEWLKDVDKFSLQNSLKDLDKAYKNFFSGSGYPKFKSKKDNRKSYRTNYTNNNIEFLDKWIKVPKLGKLKIRDKIKPQGRIISATITQVPSGKYYISLCCTDVE

SEQ ID NO: 48832 - protein, 259 aa, unknown
  TnpB Polypeptide
MRRDPLGYALDQVKRVRVVKRADGYYAQFGVAAERRVASVATGHAVGIDLGLAHFYTDSEGVTAENPRHLRRSEKALKRLHRRVSSKVKGSKNRAKARGRLARKHLKVSRQRRDFAVKAARALVMSNDVIAYEDLRVAHMVKNRRLSKSISDAGWRAFVTWLDYLAQVYGKVVVAVPPHYTSQDCSGCGERVKKTLSERTHVCPRCKTTLDRDHNAARNILALGLRRLAKTTAGHAERNAWGQSALYPPGATPVNMAAG

SEQ ID NO: 48833 - protein, 397 aa, Cyanobacteria sp.
MPKVTTTLKLKFLDLNQAKADLFAQMTTECTSLANELLKVPMAERRKLTTAKVATELSSALANQVIRNVTSKTARKVKEYRKMLPEANKQNWKVAKVGDTYSVSFPTLKGVKRVPLAVINPRHAAMLDRLMAGEVEQGSLKVALIRGQWFALCSVTQEVPAVASVNRVGCDRGQNNIAVIATPEGRSQFFKGSEVKHRRRRYQRIRTELQRAGKKRALKRLNNKEARWMREVNHAISKAIARFADYHNADVVMEDLSGCRGTMRQSKKQRGDAGNSRHRWAFYDLQQKTAYKMELLGRQLILRPAPYTSKSDNRNGILGKRDRHNFVGFDGYQVNADQNAARNIAQWDGFACPLGLYVPQDGVFDSPQDFGSPSASGCAEMQMGNSVNTQWPSAAVG

SEQ ID NO: 48834 - protein, 407 aa, unknown
  TnpB Polypeptide
VHYFKKLYNQANWYVRQDFFHLGNWLQYEDLNFILKSSNNYKLLKAQTSQQILKTIDKNWKSFFHAIKKWKKGRKKFNGRPRSPKYKKACNNLLIFTNQNSRITHNKIILTMSQLFNQTFPEFKNPIEILIPSYKNKNFEHYQQIRILPRKNFYEIEIVYKKEKEKSKLEQDYYLSIDLGLNNLITTAENQNSKPIIISGKLLKSINRQWNKRKARLYSIKDKQKLKWTDRLDKITIKRNSVVKDYLHKIAQFIVGYCLKNHIGNICLGELKDIKQNVRMGKRNNQNFANIPIQKLKQMITYKAQLVGIKVLEVDESYTSKCSSLDLEPIQKHKNYVGKRVKRGLFKGSNYLLNADVNGALNILRKVVGDGFIQNLSDRGYWFQPVRIRDMFQTSHEQFLLKTVNIS

SEQ ID NO: 48835 - protein, 258 aa, unknown
  TnpB Polypeptide
  misc_feature (179)..(182): Xaa can be any naturally occurring amino acid
MENNIMEGGVNVVEKAYKYRIYPNKQQEEQIQKTFGCCRFIYNTYLAERIKLYDDNKENFTYNQCSKDMPKLKSELEWLKEVDSTALQSSLKDLDMAYQKFFKEHSGYPKFKSKKTNKNSYKSKCSHGNIEYKNKYIKLPKLGMIKTKNKLTPQGRILNATVSQEPSGKYYVSLCCTEXXXXETQKYTHTGNSVGIDLGIKEFCITSDGEMIDNPKYLKKSLNKLAKLQRKLSRKTKGSSNCNKARIKVAKLYNHITN

SEQ ID NO: 48836 - protein, 378 aa, unknown
  TnpB Polypeptide
MKNFSLKYRIYPTPQQEEYLSRNLGCARKVYNMALNQYRQSKKSHPNVKWDTYFLVKQLVIWKKDPDYSYLNEVSSIVLQQSILNLGKSFHCFFEGISKEPKFKKKGFNECMRLTKNRFKVKNSLLYITKQKTGIKIALSRPLPEGLEAKSISIRRTSANKWFVSFCYQEDSLTPLPQSDKVIGVDLGLEHFLTTSNGDKVNNPRFFRKYAKELAREQRKLSRKRKGSNNYHKQRVKVARVHEKIVNCRLDFLHKLSTKLINENQVICLEDLCIKDMIAQGSRGLRKSIFDASWSEFVRQLEYKAEWYGRQIFKVDRYFPSSQICNSCGVKTPSKLNLRQRTWTCSSCETFHDRDVNAAKNILTAGLAGRACGFKSCA

SEQ ID NO: 48837 - protein, 402 aa, Euryarchaeota sp.
LVNEVVREALSTGKTSRGSMSRFARDRAFALQLTGSHAVVASEIGLSLVRSHRRRLRLSPASRAPYVRRPFVRADRTTFHFDAESGKVRLSLRNGLWCSFQVKVAKYHRETLGAVGVRIKQLHVSPDRAVLLLEFSAPEPFRPTSLLALDTNEASLDGVTVSPGENHLATVAFPEVRAIQARHVHRRRHLARKKATDRRVGRRLLGREGRRERNRVRSRLHALSRRLIETAEFHHSAIALEDLTRMGTPRRRASRVRRPGAPRSRGLRRRLSSWPRRELHRQIAYKAAERGVPIYWANPYRTSITCPRCGEVKQPRSRVGPVFECPGCHWRMDRQLNAGVNIGGIVLRDYGRAELAGLRLDLDALSEEAMRPLYPFERSDGHGRSGGRGRDEFGPTGNRGHG

SEQ ID NO: 48838 - protein, 290 aa, Okeania sp.
MQSIKTKLKVNNKQKTILAKHAGVARHAYNWGLANCISEYKETKKRPSAITLHKRLIAEVKSENPWYYEVSKCAPQQALRDLDRAFKNFLTIPKCGFPNFKKKGKKDSFYLEGSIKILRGNYIKLPRIGIVKTYEILPSVPVKNVRISKRAGDWYISFKYDECQPKPMTKKRAIIGVDVGINTLATCSDGTTYANVKAYKQAKKRLTRYQRRLKKKEPGSKNRAEAVKKLAKLHKKVADIRADALHKLTTWASFKPQHHSDRRFECQWNAQKAVRPRDDVSRKGTRTKTS

SEQ ID NO: 48839 - protein, 376 aa, Okeania sp.
NSCIRLWMDNKRTGKNDLQKYCSVLAKEFPFANELNSMARQASAERAWSSINRFYENCKKGVAGKKGFPKFQKNCRTVEYKTTGWKLAPDRKSITFSDKKGIGRLRLKGTRDLHFFQIKQIKRVRLVKRADGVYVQFCIDSERREDITPTGNTVGLDVGLKEYYTDSNGEVVKNPTFLRKAEKVLKRDQRRVSKKEKGSNNRGKARHILGKRHLKISRQRKDHAVKLARCVVQSNDLIAYEDLRIKNMVKNHCLAKSINDASWYQFRVWLEYFAKVFKRVTVAVNPQYTSQNCSSCGEVVKKTLSTRTHACKCGCVLDRDENAAINILHRGLSTVGHTGTTALDAENAWGDETSTQLGASLVEQVLSRNQESPSRD

SEQ ID NO: 48840 - protein, 227 aa, Okeania sp.
MADNYILSLTKLWVSMTQELVYKKNNHYKVLHSQAAQQILRTVAESFKSYYSLIKAYTEGKISDKPRIPNYRKKGGMATVSYPSQALKLKGNQIRVPLGNTCKRWFGVDSFYIPMPSIRAFYTLKELRILPRNKCFYWEFIYEKEVVVKPQLNQDNVLGIDHGVNNWLTCVSNVGTSLIVDGKHLKSMNRWYNKQISTIKENQPTGFWSNKLAAITEKRNRQMRFGY

SEQ ID NO: 48841 - protein, 147 aa, Okeania sp.
LPKSGNSIGIDLGINTFATLSNGEKFEAPKPLKKNLKKLSRFQRKFAKTELGSKRREKARVRVAKLSYGMLRKHAKVKDISYGMLRKRTDFLHKLSTDLVKKYDTIVLEDLNVSGMVSNHKLAKAISDLGWREFRTLTEAKCEKCGR

SEQ ID NO: 48842 - protein, 383 aa, unknown
  TnpB Polypeptide
MSKQILKAYKIRLYPTEDQQIFFAKSFGCTRFIWNKMLNDKIEHYRETKTELKNTPAQYKTEFEWLKEVDSLALANVQQNLRSAYSKFFKQGSGFPKFKKKGIKDSYTTNNQKGTVSVTQSSVKLPKIGHIKAKIHRSINGLIKSATISKSPSGKYHVSLLVETMVDDLPKTHSNIGIDLGLTDFITLSDGLKVANPKFLSKLEIKMAKSQKILAKRRLVAKTQQRKLSESRNYQKQRLKVAKVYEKITNARKDFLHKLSFNLIKNHDVIAIEDLNIKGMVKNRKLAKAISDSSWSTFTAMLAYKSEWYGKELVKIDRWYPSSKTCSGCDHVLAKAELPLSVRSWQCPNCLQSNDRDINASINILNQGLRCLKNKTVGATGLA

SEQ ID NO: 48843 - protein, 416 aa, Chloroflexi sp.
MIALTRAHVIRLNTTPKDEVYFRQACGITRHAYNWALARWKAARAEGKRVKLNELKSEYNQIKHDRFPWTSNVTKCAPEQAFADLGQAFANYWHMKAEGTQPKLKHSRKDGEEAGFPHFKSKKRDRLSFYLANDKFTVDGHALWVPKLGAVNMTEALRIEGKILSATIFYRARWWFVAIAVEVERDIPEHPGGSVGIDLGIKTLATCSDGETFENQRHYRRNLGRIQGLSKGLSRKVEGSRNWCEQAKKLAKAHYRAACQRQDSLHQMTTKVACTYSLIGLEDLNTKGMVANHHLAQAVSDAGFFEVKRQLLYKSEQCGGSVQLVDRWFPSSKTCYVCGWVKDDLTLADRIWECERCGTVHERDLNAAIMIEREALRLVTDVPVVASSERKFACGVGRSGPAMGATVCNEAGTQVS

SEQ ID NO: 48844 - protein, 364 aa, Ktedonobacteraceae sp.
MLTYEYKVAGTKKQYAAIDEAICIVQFIRNKCLRKWMDERGVSANDLQCYCAVLAKEYSFASLLNSQARQTSADRAWFAISRFYDNCKNHTPGKKGYPQFQHDNRSVEYKTTGWKFDPDGKHIRFTDGCEIGRLRLVGNKKQKVAAFPLKAIKRVRLLKRADGYYVQIAVKAERKVEHVTTGAQIGIDVGLKEFYTDSNGTMVANPRFLRKAEKKLKRLHRRLSRTQKKSANRKKVRQKLAKAYLKVSRQREDFARKTANALVTSHDLIAYEDLKIAHLVKNHSLAKSISDAAWGRFLDWVQYYGVIHTVPIVAVAPHFTSQDCSGCGTRVKKSLSTRTHICPHCTLVIDRDENAARNILALAW

SEQ ID NO: 48845 - protein, 407 aa, Streptomyces sp.
MVTAQVKRAYKFRFYPTEAQAAELSRTFGCVRKVYNMALQARTEAWSLRGERINYNATSAMLTAWKKAAELSYLSEVSSVPLQQALRHLQVAFANFFAKRARYPRFKSKKRSRDSAEYTTSAFRFRDGRLTLAKMVEPLAIVWSRPLPAGQSPSTVTVSWDAAGRWFVSMLCDDPGVKSLPEIDTAVGIDAGITSLVTLSTGEKVANPRHERRDRELLVRAQRDLARKARGSANREKARHKVARVHTRIADRRRDFLHKLTTRLVRENQTVVIEDLTVRNMLKNKTLARAISDASWTELRTMLEYKAQWYGRDLVTIDRWFPSSKLCSACGRIRDRMPLNVRVWECDCGAVHDRDVNAARNILAAGLAVAACGDGVRPQRSTPGGQSSMKQEVVPPQRSRAAAQPRG

SEQ ID NO: 48846 - protein, 301 aa, unknown
  TnpB Polypeptide
MRVLATAKVKAVAPNPSSLYKLIQFLRAYRDWTQYVIDEIWLDKRIPSMKGLHHRFYNMLRKHGFRAHHCHKIERRAREIVKAVKKNKGRKPVLRKLTARLDYQDYKLDINNKILRIAVLNNEWVELELIWYDYLGRYFNDSWELKEILVGYRDNTIWVYFTFQREVVLRKTRAIMGVDINFNNITYAIVDMNGRLITMGTLPFNGLKRALAHRIISEKIMSKYPRKWRYVKGIREAIRKHGRRARNILIDSCHYISRGIVGIAREYDALIVLEDLIKLKNKANSSKLFNKKLSLWVYRRI

SEQ ID NO: 48847 - protein, 659 aa, unknown
  TnpB Polypeptide
MKKLKKSIVKNNVKLFKPDVKSSRVTIDSRVCNMDKFNEFLALIDNTKNYKNIISQYCYDNLLSLVSEYKPFLTHYKSLDNSQLNSWERQTIFQEIAGHYSETATRYLDKAKFIVVKPKSNINNIALFINSQSNLIVNNNVYSLDFNIEDKLIQLTTYLDKYNLELNQNKNLLENLVQSKKDNSTEDINKEISRLEKSIKSYNKLIANYHEIQQFKSNKPLVYSRLIQLIVDKKLRFISKVKLAIYQTGTHARHLNNAQLSIVKDLSNKDYQYFIKVRKLDKLIGREPKQTEKNKNQYQELLDKYNEDNFIYLPLIFNQSRLKSIGKSIDNVLIKDNPQILIKSEQLRLGSKSRKIHIIFNYEQQNNLAKVIENNLINKTNINPTELNTLGCDLNLKHNLIADSNGHTYKEILNNNNINEDNKNKFINNLNEIVELFSIKTEERTVKQKYRYEKLLRSNESLLKTYLSGLIKDWRNSNILHLVFEDLNILNDKSYYEHKGIKIKYSRLSRLLRLGQIKHWVASMAEKQGIFTHFINPAYTSQECSVCHYISTTNRTKQEEFICRNPACANHKVKINADSNAARVIKSRLINKTIRNKLGKDNVYQCSRNKSINYKLVKNIVDDEYKIGVVTELLPNAKLAKSKEDGVRNHTEAPSFRSV

SEQ ID NO: 48848 - protein, 367 aa, unknown
  TnpB Polypeptide
MLRAYKFRIYPSKTQDAEMRKHLWLSKELWNELLALSKQMYQDFGYFPSKNMLQMLAKNNGMHSQAQQAVAHRLYAGTLRFLKLRKQGKDCGFPRFRSFDRMKSIYYPQSGFSLGKKLKVSPFGEIAIRQHRDIEGEIKTLALKREASGKWFVIFTAIEPSRKSRKHNGEAVGIDLGLKTFVALSNGWEIKNPRHLTKQEELLKLRQRQLSKKKKRSKNFYKAKKHLAITHEKVRNARQDFLHKLSKELTDTYSLIALEKLAPQEMAQEQLGKSINDAGWGMFAQMLCYKAESAGGNVIFVNPANTTKMCSCCGNVQEMALSKRTYECPRCDYIGDRDVNAAKNILIRATAGYAGSKACGEDKLCLQ

SEQ ID NO: 48849 - protein, 372 aa, unknown
  TnpB Polypeptide
MEKAYKFRLYPNTEQKELLAKTFGCARFVYNYYLDRRIKAYQQNKTTMNYNACSADLTKLKQEKPWLKEVDKFALQNALKDLDRAFQNFFREIKKGNKNQGFPKFKSKHHYKQSYRTTFTNNNIKVEKNRIKLPKLGWVDMIQHRDIQGRIVNCTITKTCSDEYYVSICCTDVVIDKYESTENSIGIDLGLKEFITTSDGEVIENPKYLLKLEKKLKREQRKLSKKQKGSKNMEKQRIRLNKVHKKIRNQRIDFLQKLSTRLIRENQIICLEDLSVKGMVKNHNLAKRISDVSWSEFTRMLEYKALWHDKIIQKIDRFYPSSQLCSVCGYKNEDIKDLSIRRWICPQCNTKHNRDVNAAKNILNEGLRLLAS

SEQ ID NO: 48850 - protein, 392 aa, unknown
  TnpB Polypeptide
MKSVRQCYAPTPEVIWLLEQFRQMLNGCVRIGLAENVTSLKSLSLKAYKQLSGYETMSYYKLCAISAATGMLRNHRKAKRKNPRTKEPYVKRLRLTTCYGFKLDAGQLLLPFKPKEPIRIPLNAHTQDVLAEPNMEVHSVTLTDELLSISYTHEVEPITPRGLVGLDRNLDNVALANSNGRITRHDLSEATKIKAVYREVRSHMIRNDHRIRRQVSGKYGRKQREKVKQILHHASKLIVTDAKEHQHGIVMEKLTGIRKLYSRGNWQGRCYRGRMNSWSFAELQRQVKYKAAWEGLPVMYVNPYGTSAKCSICGSRLARVPEENRKLRCASCGVTVDRDVNAARNILARGAVRFAASAPALEAMVQEPACAAILKVDAGESKRRDHSHVPKI

SEQ ID NO: 48851 - protein, 408 aa, Colwellia sp.
MKRTLKYNYRLKPTVDQEVKLVAFGSYARGLWNLLLSENIRRYRYDKTFLFYPEMAGLIRDLKKFDEFFWLKAFDAAAAQQVARDLEAALKNAFTKGRLQQFPTFKVSFKQKKLHDDSFRCVNNSNCIRIEKGAVSLPEIGKVPIVLHRKLVSKIKSATVQFKHGKWYISLTQEVDCKSAKQVLSTLVGYDINSQYTVVGSNGWYVKNPKTFKKSSTKLKQIQVQLSRRKKGSTRWHKTKTRLNKLHGKISRQRLAFAHEVSCSIAKTSDIIVFEDLNVKGMQQFNGKMVNDNVMGMVTALTKYKAELNGAVYHEIGRYVKSSGICCECKHEHKFDLRVRNFACERCGTVQCRDLSAAKSVADTGEKELIANGILVRALPNTQQKSPSKMKVFEQSKFGVGTEKKEVA

SEQ ID NO: 48852 - protein, 396 aa, unknown
  TnpB Polypeptide
MYNALLESWKGGYAWWKEHNPGDNQTFPSERNLSRYDLFKMFTQVRGEDTRWGGLDTRVGRGVICRFDRTRKAFYDQCQAGKTPGYPRFKSRRRWRSIEIPGASVAMLSEPGEGRWWRLRVKGVPSIRFADRSGRLGAALSEGTLVELRIVRTVLRVELHAVFRHPHVPDPTGEPTNPVGMDKGLTNRLALCDGDYEDARTVDNTTVRRYQRSLSRAKKGSRTRAKKRLALARLWRRETERVRAADYRLAHRLVTDFDGIAVEALNVAGMLRSRRFSKKMSEQRWSALDAILEHKAAKAGVRYVRVNPAYTSTDCSVCGHRQPMPLDTRVYDCGNCGMVLCRDVNAARNICARAYPVRGREGREETSPGVARTNFCQETEHPHGVERKQTLQNSMP

SEQ ID NO: 48853 - protein, 285 aa, unknown
  TnpB Polypeptide
MQLIRNSLKNIPVIPNSKARKHINFLINQNALTEISNIVINILSCLSLGMIKTKNKLVPQGRILNATVSQESSGKYYVSLCCTDVDIKPLEKTNNSIGIDLGLKEFCITSNGKMISNPKYLKKSLNKLAKLQRELSRKSKGGSNRNKARIKVARLQEHITNQRKDFLQKLSTDIIRNNDVICLEDLQVSNMMKNHKLAKSIADVSWSEFVRQLEYKADWYGREIIKVDKFYASSQTCNVCGYVNKETKDLSVREWDCPCCNSHHDRDINAAKNILNEGLRLLKVA

SEQ ID NO: 48854 - protein, 136 aa, unknown
  TnpB Polypeptide
VRTIEKAYKYRIYPNKQQEELIQKTFGCCRFVYNTYLAKRIKLYEESKKSLSYVQCANDMKKLKSELEWLKEVDSTALQSSLKDLDAAYQKFFKEHSGYPKFKSKKTHKFSYKSKCTNGNIQYCDKHIKLPKLGDD

SEQ ID NO: 48855 - protein, 384 aa, unknown
  TnpB Polypeptide
MSEKIIKTYKFRLYPSKAQVKTFEHWLDLCRELYNAALQERRDAWKLNRVSVSYFDQSKQLPEIKTTRQDVADVNSQVLQDVLRRLDKTFKAFFSRVKKGEKAGFPRFKNQKRFNSFCFPQVENSSVRIENNKLNLPKIGKLKIKLSRNIVGKIKTCTIKREIDKWFVLFSVELASETLPKTGRQIGIDVGIESFATLSDGTQIENFRFFERSQKQLRKAQRKVARRKKFSNQWRKAIKQVSKIHERIKNQRNDFQHKISTSLVKDFDLIAIEKLNIVGMSRGFLAKQINDAAWSGFFQKLKYKAENAGKSVMEVNPKGTSQTCICGERVEKDLSVRWHHCGKCGLSEHRDVVSAKVILKIALGQSVKTQTYAVRQSVVLESAL

SEQ ID NO: 48856 - protein, 645 aa, unknown
  TnpB Polypeptide
LTTQSATKTQAHSPSLSNVMRSYQVVLKCVDQSQRKEINQRIRTHEERQHQLLTPQVVKQAVELYRSNPKERFFIRRLGKEVGMNPNIAESAFHWLHIAVKGKIDKEKKAQGLLNFLLKNPQQLIEWIIFGRSPYTERSLENFWKLKRRYIINLLTSSRTHTDSYWRKKYNVLYSSEFLQLNTLLPKCSQTEVLQALDDALFYQQHEFSLLPQLTKNQQAFLKKLQLLKKEQNIVVPFLTSWINSLQVSRWKSLKTLAEQLAQIIDKPTRKLFSAVRQIAVFTLFDHYMQSVPQLIQGLPVEQVVPPPFKRKKKGRLPIKLLMKKDYVITRQGNAQELTDQIKKQGWTELGFPKQGKKKLVAQVHFPPKTLEYLNNGAYIRVFQVSSGKAPSYKPRIDVVLEGTHGCFHSSTLLHRYLSQIPGKKTSTLGVDINRLGQYMVVFNSAVPLPPDLLALANHYDHLSKKVIDELNRGFLRKRKEYDTHGSCKLKGELNRVYTRRYRILREITRLLPHFLAAVLVKKKCKVLKIERLTADATGTKGALAKAIYTMPDSLFIYKKAVWLASLELGYDVKLATVNPYYTSSIHYTCGGSLPRQQGQYDFTPCTKCGQQVNTHFNAARNIASLQGTLLPPDSFPSKHVRGST

SEQ ID NO: 48857 - protein, 402 aa, Actinomadura sp.
VKLVVQVKLLPRPEQAAVLTETLHACNRVAAWVSQVAYERKVFSRAGLQRLLYTQVKAQGLSAQPALHVIRKAADAYTALRAQIEAGRSGRAGSALRAKAESKPISFRPDAAQPFDDRSLSWQTDARTVSIWTTQGRMKSLAFTGEPSQLKMLAEHRKGESDLVRRNGKWFLVATCEVLAQPLNTRPRDWIGVDRGLTNLASTSDGDNHQGRGLLRYRRRMARVRAELQTKGTKSAKRKLKRRARRERRHAAHINHKIAKTVVADAQRTGRGIALEELQGIRDRVRLRRHQRATLSSWPFHQLGELITYKAHRAGVLVLEVDAAYTSQTCPRCGHVSRKNRPTRDDFRCMVCGLAGPADHVAAVNVARRARTAWAFVGTPHAAVSPSPGQGQSRAANPPSAG

SEQ ID NO: 48858 - protein, 383 aa, Actinomadura sp.
VKLVVQVKLLPDAAAQVALWETLKLCNQAAGHASRRAFATGTKGKTALQRLVYDELKAMGLSAQPAIHCIRKAAGAYAALAENLRAGNYGPVGSRRRARVEGAPVRFRKDAAQPFDDRSLSWQIQERTVSIWTVHGRLKSIPFACSAEQAKLLATHRQGESDLVWRGGCFYLYATCDLPPAPEYVPDGFMGVDLGIVNIATTCDGTVHSGKHINQVRHRNRRLRKRLQAKGTKSAKRLLRHLSGRERRFAADTNHRISKSIVTEAQRTTHGIALEDLGGIRARVRLRKPQRVTLHTWSFAQLGAFIAYKAERAGVPVVFVDPRHTSQECSACGHIDKKNRPDQATFKCTSCGFAEHADVNAARNIAARGAAGWAVSHAADDAA

SEQ ID NO: 48859 - protein, 512 aa, Streptomyces sp.
VIVMQLRYAFRVYPDTGQERALAQAFGCARVVFNEAVRAREEARAAKQPFPRAAELSKRLITEAKQTAERAWPGEVSAVVLQQSLRNAEMAYRNFFASLKGTRKGPRTGPPARFKSRKDNRQSIRFTANARWSLTGSGRLNLPKIGAVRVKWSRTLPTTPTSVTVIKDAAGRYFASFVIDTDTAADQARMPATDRTIGIDLGLTHFAVLSDGTKIDSPRFLRRAEKKLKKAQRELSRKQKGSRNRAKTRVKVARAHAQVADARREFHHQLSTRLISENQGIAVENLSVAGLARTRLAKPVQDAGWSSFISMLEYKAARYGRTLVKIGRFEPTSQTCSTCGVKDGPKALNVREWTCSACGAVHDRDTNAAINVKKAAGLAVSACGAPIRPGAIRAQREEAGSHGLPTELVPRSGTATIEKARILALQGGEHVKSRCSRTRVGDTAIDEGYFHGRNMGPIPLPSGESVPAAQKELRIRGVDLAKVADGRIVSYRLYFDQMELLGQLGLLPEELL

SEQ ID NO: 48860 - protein, 403 aa, unknown
  TnpB Polypeptide
MRNTTHKLFKDKTLRHLHDDLNIIGVVRNHFLAVSMRYYRRYGKGLSYRKMSSHLTNLKKLEKYQHWNIPYAWALQNILKRLSQSFREMKTLGRGHPQFKSCKKHKGMTFDGTQAPLEKVLDKQKHERNHPTYKIRLNGRWYRFALHRPIAGEITRVQVTRDALGDMYITLTEDYTEIKFEPKTGKAEGFDFGIKDFLTGSDGHRYTSPMFYIQNAAKLAEAQKAYSRKVKGSNNQERERKNIARIHKKTANQRTDHHWKLAIELCQKFDILFFEDLNLRGMKALWGKQVSDLGFGEFIQKLKHQSHKRIRSVLKINRWSPTTKCCCVCGHKNDTLTLADRSWKCPKCDTYLDRDENAALNILKEGIASFGLGVVSPIVLFNKIVGRSVESNHPILKSTNASD

SEQ ID NO: 48861 - protein, 424 aa, Okeania sp.
MTKKTKKKAKNLGCQQILLHPDRDLLAILEYLCGEANKVFNCSVYYGRQVWFKENRFVTKGELCGQMKWNRHFNAMYASSAQQICNSVVESFSSFRQLLKLFGKGELVNKPKPPNYRKSGLFTVSYPKKWLKLTDEGIRVPLGRKVKAWFGKTAFYIPMASNLDWNSIKEIRILPRHGCFYTEFVYSMKTHSVKFEKTHALSIDHGLNNWLTCTDTQGHSFIIDGKHLKSKNQWYNKQIATIKEGKPQGFWSKRLARITEKRNRQMRDAVNKTGRLIINHCLKYGIGTVVFGWNQGQKQSIELGTKTNQKFVQIPTARLKERIEQLCNLYGLQFIETEESYTSQASFLDNDFIPIYGEKPDNWEPSGKRIKRGLYKSAAGYLINADANGAANILKKVAGRLGLDLSRLSRGALTTPLRVRFWTA

SEQ ID NO: 48862 - protein, 417 aa, Hamadaea sp.
VAQPVKRAYKFRFYPTDEQVAELARTFGCVRLVYNMALEERSRAWNEEKRRVSYTQSSAALTAWKKTDGLAFLSEVSSVPLQQALRHLQSAFASFFAGTARYPRFKSRKKSRACAEYTRSAFRYRDGQLTLAKMNTPLAIVWSRPLPEGADPSTVTVSRDATGRWFVSLLVEESVTPLRRIDRAVGVDVGVTDLVTLSTGETIANPRHERADRARLAAAQRTLARKAKGSKNWEKAKFKVARVHSRISDRRRDYLHKLTTRLVRENQTIVIEDLSVSNMVKNRSLARAISDCGWGELRHQLEYKCSWYGRELVVVDRWFPSSKLCGACGTVHGKLPLHIRSWTCADCGARHERDVNAAKNILAAGQAVSACGAGVRPQRESSRTGQSAVKQETQRVTAGFASHWGGENVKGAPSGFG

SEQ ID NO: 48863 - protein, 427 aa, Escherichia sp.
MHQENTMLPRRISVSLFIDQSIIWPVKRLQAFKFQLRPGGQQEREMRRFAGACRFVFNRALALQNENHEAGNKYIPYGKMASWLVEWKNATETQWLKDSPSQPLQQSLKGLERAYKNFFRKRAAFPRFKKRGQNDAFRYPQGVKLDQENSRIFLPKLGWMRYRNSRQVTGVVKNVTVSQSCGKWYISIQTESEVSTPVHPSASMVGLDAGVAKLATLSDGTVFEPVNSFQKNQKTLARLQRQLSRKVKFSNNWQKQKRKIQRLHSCIANIRRDYLHKVTTTVSKNHAMIVIEDLKVSNMSKSAAGTVSQPGRNVRAKSGLNRSILDQGWYEMRRQLEYKQLWSGGQVLAVPPAYTSQRCACCGHTAKENRLSQSKFRCQVCGYTANADVNGARNILAAGHAVLACGGMVQSGRPLKQEPTEMIQATA

SEQ ID NO: 48864 - protein, 485 aa, unknown
  TnpB Polypeptide
MKVRVRTPVRSVLTPRERIAVEIRRSYRYALRPTGTQQRALVAQLDAHRVLYNSALDHRRTAYRMAGVSITYYDQARELGAIRVGNPQQKACNHSSQQHTLRRLDRSFQAFFRRIKAGQEPGFPRFRGRNRFRTLTFTHGDGATFTETRTSPLRHPFAATVKIQGVGAVPLVYHRRLGEREGGQMADPVRIGTVEIIRTGDHWEAVFSCTLTVPTPKDAYPTLPATGIDVGLEHYASLADGEQVPNPRFLRKSMGEVKRLQRKLDRARKDRAAEKRAAKKRETAVVTARVAGKPIPPTPPVEVWVSTRGKKRPKRTAERRARLLSRAVARRHEKIGNQRAFFQWHLARSLISRFGLIAVEMLKRRNMARRPKKKLDEAKTKDAGQPVYAPNGAAAKSGLNKSIYDAAGGLFVQRLSSKAEEAGCLIVGVRAAGTSQECPRCARKTPKTLDERWHTCPCGCSLPRDVAAAQVIRARGLTSVAVSAA

SEQ ID NO: 48865 - protein, 289 aa, Okeania sp.
VQSIKTKLKLNNKQKTILAKHAGVARHAYNWGLGTCISEYQETKKRPSAITLHKRLVAEVKPINPWYYQVSKCAPQQALRDLERAFKNFLTIPGRGFPKFKKKGKKDSFYLEGSIKIIQGNYIKLPRIGIVKTYEILPSVIVKNVRISKHANNWYISFKYDNEPTHTAKSGCDPATTTVALGSAPSKRDVIGVDVGINTLATCSDGTPFANRKAYQQAKKRLTRYQRRVNKKEPGSKNRGKAIKKLARLHKKVADIRADALHQLTTWASFEPQHHSHRRFECKWNAQKP

SEQ ID NO: 48866 - protein, 303 aa, Okeania sp.
VSVVPLQQSLNDLNQVYQNFFNSTKGKRKGKAIKLPRFKKRRSKQTAWFTLRGFQLHEDKVYLAKIGCFKVVWSRPLPGEPSSVTVIKDSAHRYFLSFVVEIQPQKLPESSKSVGIDLGISTLFSNGKKVDAPKPLKKRIKKYRKLSKSLSKKSNGSKQYEKARLRVAKFSFGMLRKHSKLKDTRTDFLHKLSTEIIRENQTIILEDLNVSGMMKNRKLSRAISDLGWRQFRTLLVGHTSIPCSLTGVRILSVTWHSHGEETIPYGTLARFPTEYCANILRSKTPGSEHLCLSPTWGRTAVPL

SEQ ID NO: 48867 - protein, 352 aa, Acidimicrobiaceae sp.
LVVARGVSSTYNDAAQRLSKAFTNFRKGRSKFPHFKRKGQTGSVRFMGPAVRLADSHHVRIARVVEVKTYESTRKLYRHLDRGTGKIVAATVAERSGKWQVSFTVEVTRQVPVTRTPERVIGVDVGLTTLYTGATPDGEQVLHVANPRHFVTAEKKLAHAQRIASRRQGPKSGAAPSKRWKKANGRVQTIHAGVANARSNLIHETTTMLAKNYDVIVLEDLNVAGMLKNHSLAKHIQDAAWGEFARQLEYKTKWYGSTLVRVDRFYPSSKTCSRCGTVKATLSLGDRTYHCGTCGLDVGRDHNAAINLARQGLPGTSSGTGRGGEVSPAQQKLVATAHPGEASTETPPDVGA

SEQ ID NO: 48868 - protein, 380 aa, unknown
  TnpB Polypeptide
MKIVKALKMRIYPNKEQALKIDKTIGSCRYVYNHMLARNKKVYERRNEHLSYYDMQNLLPCMKEYLPWLKESDSQALKYACRQVNKAFDGFFKKKTNFPKFHSKRTSKQSYTTTKKTSIDYDAKNRRVKIPFLGWIRCSDNRILKDCEFKMATVSKKNGKYYVSITYIIEKDVVPVPVSENQALGLDYKSDGLYVDSNGNIADMPHWFRLAQSKLKKEQRKLRNKHGSKKGETKSHNYSKQLRKVNNLHEHIANQRLDYLQKLSTHLADTYDVILIEDLDMKAIANKGFGNGKATLDNGWGMFTTMLDYKMAERCKYLQKVDKWYPSSQTCSVCGCINSETKDLSIRKWTCPHCGAEHDRDINAALNIKQEGLRLLNEAG

SEQ ID NO: 48869 - protein, 537 aa, unknown
  TnpB Polypeptide
MISDEEYKKLLKQFHKLSDRHILVVETDMPYSDVLKVMILSDKIRKAGNELVSFMRKNYDQLIRTKKYRKLLKLYGSTKDKKKRKDLADQLNEMQKAYNVTWDHCRRSMIPIGRKYGIDAVFALTKAEDVWRGIEKCLYGNGKAIHFSKYGELPCIRAKQINRGIPISVKDDRLQFKLGKTAFGIQVNDRFQQDEADAVLTYLAEPEIVDNKAVNTLIEDAYYIDTYRPCYATLVIKMIRGKYRVYVHLTIEGKTKLKYDKHGNPRHKYGKGVIGADIGTQTVAYTSDTEVGLKNLSERGNSIQTSERKERLLYRAMDRSRRAANPQNYNEDGTVKKGRKTWKYSNHYKKLKAKHSELCRINAVNRQLAINEDANHLRSLGDTFVTEPKNASKLMKRAKETAVNDKGRFNKKKRFGKSIKNRCPSGFQTTVEKKFKTTGGTYIEVPNNYRASQYDHTVDDYIKKKLSDRLYKLQDGTEVQRDWYSSFLLYCYDYKIQKIDKNKCITQFDNCYKKEKALITWIKAHKIKVLNSGIKIA

SEQ ID NO: 48870 - protein, 426 aa, unknown
  TnpB Polypeptide
MKRFQAFKYELQSNGEQQRQMRRFAGSCRYVFNKALALQQARYEHGEKKLGYAGLCKRLTEWRNSTETAWLSDAPVHPLQQSLKDLERAYTNFFAKRADFPRFKKKGLGDSFRYPDATQFKIDQANSRLFLPKLGWLRYRNSRNIIGQAKNITVSANGGKWFVSIQTEREVAPPITQATSAIGIDLGVARFATMSDGSYVAPLHSFRIHQQALTKAQRDMSRKEKFSRNWKKAKARVHRIYARMAHVRHDFLHKTSTTISKNHAMVVLEDLQVRNMSTSAAGTVETPGKNVRAKSGLNRAILDQGWGEFRRQLDYKLSWNGGMLLAVPAHHTSQTCPACRHISKENRRTQARFLCVQCGYENHADLVGALNILARGMALVRGDGPDTTDASVGQITAAQIACEVNGARARQQQEPTEATTQGVALV

SEQ ID NO: 48871 - protein, 219 aa, Scytonema sp.
MSREADKWFISFRFEASKPDLKLEDTWFFSEHSVVGVDLGVLNLATLSTGEIIEGAKSYKRFKDKLARLQWLNRHKVIGSASWKKAQLQIARLQRKIANIRKDTLHKLTTLLTKNHSVIVIEDLNVKGMMANHKLAASIADMGFYEFRRQLTYKCDLFGSKLIVADRWFPSSSPAIINFFLPVASTACLYSSYSQQSTIPGRLILCAYSSMYQIFITPP

SEQ ID NO: 48872 - protein, 511 aa, Caldilineaceae sp.
VREAGGRSGGDASDRSARVRGGTGPGRTRNHYGVLGTTVRQPVTQVAQVDRSPEVRPRRIRRRGCAGPMISHLKGVDKSHRIALDPTDRQASLMLEHAGWARVAANWARGRFQLAWFGETDERNADAWYAHVDVNPDGGQWLSDMDLRKDFNAVKADLFEWSGGLSQYVAKNAVIHMGRGLDAWGEYCKERKRGQPRRKTGFPPVRKRYRKLAFTPSNGRNSIRVDGPNVRLPRIGWVRLREELRFEGDILSVTVSRTAGRWFASFTVDTCAPAPALRSGPDVGIDMGVKTLATLWDGGEKTMIANPKALEQALADLRATQKAIGRSVKVNGRPCTRNRRRLYDQLARQHARVARIRSDHHHKATTQIAKRGGSVTVETLNVDGMKRNRQLARAISDAGMAEFVRQLAYKCHWYGTEFRRVDRWYPSSRTCSECGAVKQSLLLSERTYRCNLCGFECDRDENAARNIQAFGRPGRPSADAETRKTDCGSHGRRSIHQTAEHAIPTGIAGSA

SEQ ID NO: 48873 - protein, 432 aa, unknown
  TnpB Polypeptide
VLLTTNNRVKTKNKVKLAILKELTRNSKDLYNKALYTIREHFFSTKKYLPYKEVYNLLKSSEEYKKLPSNASQQTLKQVDNAFKSFFELLKAKRQGKIEDKPSIPKYLDKSGHFKVIYTKIHLKTMDNGYIRLALPKYIKERYKVNYLYFKIPSHIQDKEIKEVHILPYKPYYKISFVYSDGDKNYNHYTTDDIMAIDLGIDNLATIVTRYDKPLILDGKSLKSKNRYFNKKISVLQSSITKGKNSKEWEKESFKRLDVWYARRENYIIDYLHKTATKIINIAIEKGIKTIAIGYNKKWKEKCNLGRKNNEKFLSIPHSHLLQYIKYKAAQHKIEVIEVEESYTSKCDALALEKIQKHKTYLGKRIKRGLFQSSIGKLINADVNGALNILRKSVACDSLIQEIAGRGLVFRPVRVYIHPYKPSHKRSPDYNL

SEQ ID NO: 48874 - protein, 391 aa, Clostridium sp.
IVRLLKSYKTEIKPTLEQIQMINKTIGTCRFVYNFFLAHNKEVYEKEKKFVSGMDFSKWLNNIYIKENPEYSWIKEVSSKSVKQSIMNADRAFKRFFKGQSRFPNFKKKGKSDVKMYFVKTDAKVIIPCERHRIKIPTIGWVRIKEKGYIPTNPSTHIIKSGTVSCKAGRYYVSVLIEEQENPQSELNDFGIGIDLGVKDFAITSNGITKKNINKSSRLKKLEKQLKREQRCLSRKYEDYKKRSKKGEATRQNIQKQIAKVQKLHQRINTIRTDYINKSVNEIVKTKPSYITIEDLNVSGMMKNRHLSKAVASQKFYEFRTKLEAKCKETGIELRVVDRWYPSSKLCHECGCIKKDLKLSDREYICECGYRADRDYNASLNLRDAITYKIA

SEQ ID NO: 48875 - protein, 272 aa, unknown
  TnpB Polypeptide
MLKAFKYRIYPTKSQRSKMEQTLELCRWTYNETLAYRKNSFEQEGKIKRLTVRRSSTGKWFACFSVEIDDPPKPPWKDGLMAGIDVGLESFATLSNGEKIDNPRFFRSEEKALAKAQRRLSKYEKGTFERRRALKVVQRTHERIANRRYNFAHQVSHNLIERFELIAFEDLSITNMLQKHCLAKSISDAAWRMLVITTSYKAESAGPMVVLVDPRNTSQLCSRCGLKVPKSRSDRVHGCPQCGLVMDRDENAAINILRLGLQSLPKARSTAL

SEQ ID NO: 48876 - protein, 442 aa, Streptomyces sp.
MHRRNDVPATSIVIFLIHETNRSNVLGVQLRYNYRAYPNAAQRRALAQTFGCARVVWNDCLRDRKQAHAAGLPYVTSTELSRLRITQAKRTEERAWLADVSAVVLQQSLRDLDAAYKNFFDSLSGKRKGRKAGPPRYKSKKDTRQSIRLNTNAFTLQDDGTVYVAKVGHLKVEWSRRLPAAPTSLTVTKDSCGRYFLSFVVDTKPDILPEAETETGIDLGLSAFAVLSDGTKISTPRFLRRAEKKLKRLQRDLSRKQKGSKNRAKARIKVARQHARVADRRRDFHHQASTQIIRDNQAVYVEDLAVSGLARTRLAKSVHDAGWSAFVRMLEYKAVKHGRAFSKVDRAFPSSQVCSACGFRDGPKPLHVRQWTCGECGTVHDRDHNAARNVLFEGRRIVAAGRAETLNASWSAGKTRTKVPAQRGEAGSPRKGQPTQAGIPGL

SEQ ID NO: 48877 - protein, 536 aa, unknown
  TnpB Polypeptide
MVNEEYKKLLKQFHKLSDRHILVAETDMSSCDVQKVVALSDNMRKAGNELIGLMRKNYEQLIRTKRYRKLLKLYGSIKDKKKRKLLANQLNEMQKQYHVTWNFCRTSMIPIGKKYGIDAVFGLTKAEDVWRGMEKCLYGNGKIVHFSNYGELPCIRAKQGNRGIPVSVKDHKLQFKLGKTVFGIQIKDRFQTDEVNAVLSYLSESELIDRKAVETLVKDACCIDTYRPCYATLVPKRIRGNDRIYLHVTIEGKSKPKYDKYGNPRHKFRKGMIGADIGTQTVAYTSDTEVGLKNLSERGNNIQKTERLERLYYRAMDRSRRATNPQNYVLDGTIKKGHKTWNYSNHYKKRKAKHTELCRQNAINRQLAINEDANHLRSLGDVFVTEPKNASKLMKRAKETTINRKGKFHKKKRFGKSIKNRCPSGFQSTIERKFKVSGGTYIEVPNHYRASQYDHTADDYIKKKLSDRMYYLTDGTIVQRDWYSSFLLYCYDDKTKDIDKMKCICEFDKCYNKEKSLIGWIKDNKIKVLNSGIKIA

SEQ ID NO: 48878 - protein, 500 aa, unknown
  TnpB Polypeptide
MHTVCFKLKTTAYERKELARRFFALSHIHNVLVKHVRKLLIRLEHDAEYQEVLKEYRALLKKKTTPKEELVPYKERLNEIRNTYGLTEAGLQSYIKVCGKRYQKMLSSSQVQKEATRVWAGVSKVLFKDGKQVHFKKYRDFDTIGGKSPTNGVIFEKETLSIEWLGLSLNCIIPRQQKTWKYLVEALDAQISYCELERKMFPNGWHYYVKIVLRGDAPKKFIPGDSVMGIDPGTSTISAVSDTDVFLEELAKDAAKYEKKIFPLQQSMDRSKRMMNPQNYHEDGTIKKGKKTWKYSRMYFKKRDLVKTLYRKKSSVIKQSHEILCNKLLQDSRTFLVEDMDFKALQKRAKETKRQEKQSAVRQKDGSVKMVYKYKRKKRFGHSIGSRAPSLFLTILKQKTKLYGGTWIKIKTKEFRASQYDHIKDEYIKVPLSQRWKEIGNYLIQRDLYSAFLIRYAASDRKHANRKKCLLNFENFRKMHDRLIEEMKRSGRSMKQCFGF

SEQ ID NO: 48879 - protein, 231 aa, unknown
  TnpB Polypeptide
MLKYLKVEKIASIDLGIDNLATIVSEDFTIIFSGKFVKSHNQLFNKTLAKLNSIKDLQKIKGTTRRIKKLYYDREQYIEDVFHKISRKIVNLLIDSKITKLIVGYNKGWKQNVNMGKKNNQKFTQIPFARLVSYLEYKCELVGIEIVIHEESYTSKCDSLAFEKIGKHENYLGRRRKRGLFQSSVGKLINADVNGALNIMRKVVGDSCESIRRIIDRGLLFNPVRITNVFC

SEQ ID NO: 48880 - protein, 505 aa, Holophagaceae sp.
MMTRTYQSRPVLSPEGEALLGQYAAIHGQAERALFAALAAGANPGTIKPTFMVLHGLTARQYNALAAAVKGKVRSLQEIQKARITDLTRRIEGLEARLSKLPKGSNKRHQKARRLGILQQRHADLLADRTAGRIRICFGSRKLFRAQFALAANGYADHAAWLKDWREARADEVFIPGSKDETAGCQGCQMTPLGDGRFALKLRLPNQMAEHAKFLTLEATFPHGANRLEAALAGEQALSYRFLRDEKGWRVFASTAVEAGGAMQAVAGALGLDLNADHLALAETDGDGNLVTIHRIDLITYGCSTGQAKARIGDAIKQVIGIAQEVRKPLVTEALDFTRKKREMKDSGVRYARMLSSLSYARILENLKARAFDAGIPVHEVNPAFTSIIGRSKFAQRYGISLHGSAALVITRRAFRFSERPNPSRGHGTSPAPVRKRGEHVWSFWGKTLRRERRLQRTSGRSRAIPPATGPAKGTGAGGTNPGVPGGIPERESATSTVRGASNGK

SEQ ID NO: 48881 - protein, 399 aa, Sphaerisporangium sp.
MRTAYKCRAYPTSEQAAALNRTFGCVRFVWNRTLAWRRARYHAERVKTNFAQANAHLTAMKTADETAWLNHVSSVPLQQAIRHQQVAFTNFFAGRARYPRYKSRGGRQSAEYTRSGFRYRDGRLWLAKMDAPLEFVWSWPDVDVTAIDPTTVTASRDPCGRWYVSFAVEVDAPERAPAPGAVVGVDLGVKDFAVTSDGEKIANPRVLAKRERNLARYQRRMARKRRGSNNRAKARAKVARAHRKVAASRADFLHRMSTRLVRDHDVIVVEDLAVKNMVRNHKLAKAISDSGWGTFRRQLEYKTAKYGRHLIVIDRWYPSSRTCSACGHLLATLSLNTRHWTCPGCGTRHDRDINAAKNILAAGLAVSACGGDVRHSGSSRVRSPVKQEPQPAKVGIPRL

SEQ ID NO: 48882 - protein, 351 aa, Sphaerisporangium sp.
VQLRYRYRLYPAAGQCQALARAFGCARVVFNDGPRARTEAREAGLPYLSDADLSKQVIAEAKKTPGRAWLGEVSAVVLQQALADLNTAYRNFFASITGRRKGPKLAAPRFRSKNDRRQAVRFTKNARFSITPGGRLRLPKIGDVPVRWSRELPSAPSSVTVIKDAAGRYFASFVVDTSDEPLPQVAGEIGIDLGLTHFAVLSDGQKIDNPRFLRRAERRLRKAQQALSRKAKGSNNRKKAIARVAKAHASVGRRNRKPQRRRMTRCGLNPRPSGRRARQFLQMFWVAVRAAGVTVADGAAVLVVVVLMVTFLAPVYLVPTISSMPVTSASRSWAPGTAAASVRAESSRPAG

SEQ ID NO: 48883 - protein, 306 aa, unknown
  TnpB Polypeptide
MQNGIVHEAGTETVRLTLSRQLKEYMKSAYHIHETYLYLKNRIFKSMDRIKQIHLYPPEEDGKCTVAVVYEIEDAELLPENGHYLSVDLGLHNLMTCYDSVGKSFILGRKYLSICRRYEKEIARVQSQWASAQAAQGIRYPKGSKHLLRLYKAKKESVRDYLHKLTRYVAEYCKKENIHTVVVGDITGIRKGKDLGKSTNQKLHGLPYVQIYNMLEYKLSLYGIRFVKQTESYSSQCSPFSKAVSKEYAVRTNRCMRGLYKDQGVIFQADAVGAYNILRKYFAVSGGKQKLSVSGLSDPKVIKVAV

SEQ ID NO: 48884 - protein, 415 aa, unknown
  TnpB Polypeptide
MIIHKLFRFELMPNGEQIRKMKQFAGCSRFVYNRALAWQNEQYEKDNSFRLSYTKLTALLPAWRNELPWLKDCQAQLLQQSLKDLENAFKNFFAKRSNFPKFKHKGSKDSFRFPQYFKLEQYNNRIYLPKIGWVRYRNSRNVIGKAKNITVSQKCGKWYASIQTEWEIEAPRPNGGEIGIDMGIVRFATLSNGEYFEPINAFKTYKGKLAKLQRRFKNKSKFSKNWQKLKAKIAKLHYKIANIRRNYLHQISNTISKNHAIVYIEDLHIKNMSKSAKGTSEQPGKNVKQKSALNRAILDQSWYEFRRQLDYKLFWSGGYLIPVPPQNTSRCCPACGYTAKENRQTQSKFECVECGYQNNADVVGAINILKRGQELLAAQQKQFFRAGHARCVCEVNRAARRSAAETHRSESAEHR

SEQ ID NO: 48885 - protein, 379 aa, Streptomyces sp.
MKKFRPQPGFVVQAFRFALDPNASQEHALRSHCGAARAANNWAVGWVEASWWQRRAEESYGITEAELPEWRPWSLPALRKAFNQAKTTDPRFAAWWEENSKEAYSTGLANASAAFDNYAKSKQGKRRGKRVGTPRFKSKRKARLACRFTTGTIRVDTDGRHVTLPRLGTIRTHEPTVKLLAHVQAGTARVLSATVRHERGRWFVSFQAEVKRDLERVARPDTAVGIDLGVKTLAVMADSTGEIRTVPNPGHYDAARKQLRRASRTVSRRQGPDRRTGRKPSKRWEKANAQRNKMHHRVANLREDALHKLTTSVAAEYGTVVVEDLNVAGMLKNRCLARRIADAGFGEIRRLLGYKTRHPPRGREPLVPLLEDLFRGAAR

SEQ ID NO: 48886 - protein, 387 aa, Escherichia sp.
VKRLQAFKFQLRPGGQQECEMRRFAGACRFVFNRALARQNENHEAGNKYIPYGKMASWLVEWKNATETQWLKDSPSQPLQQSLKDLERAYKNFFLNRAAFPRFKKRGQNDVFRYPQGVKLDQENSRIFLPKLGWMRYRNSRQVTGVVKNVTVSQSCGKWYISIQTESEVSTPVHPSASMVGLDAGVAKLATLSDGTVFEPVNSFQKNQKKLARLQRQLSRKVKFSNNWHKQKRKIQRLHSCIANIRRDYLHKVTTSVSKNHAMIVIEDLKVSNMSKSAAGTVSQPGRNVRAKSGLNRSILDQGWYEMRRQLEYKQLWRGGQVLAVPPAYTSQRCACCGHTAKENRLSQSKFRCQVCGYTANADVNGARNILAAGHAVLACGGCQQTG

SEQ ID NO: 48887 - protein, 427 aa, unknown
  TnpB Polypeptide
MIRSSQHTLKFSNISKRDNLSIFRKEYILATKAFVDYIWNNGYSWKDKDNNIKYFNIKDNKLDLPSMLTSEIIKKSNLNTILTGRALKCCLTQVAGLINASVEKQRKRLYMLDKLKQEGKTKKKLDKLIKKIKQNIPQKPNCDRVNIELNSICCSYQKIDSKEFDGFLRLTSITKTKLDIKIPIKHTSHSKKMSSRGTLKASFLIRNNSVDFRWEIPDMSKKQNGITVGADQGMLDVLNMSDRQITPKQDIHGHSLSSILDKLCRKKKNSIAFGKAQDHRKNFINWSINSLDFSNICKVNLERIWNIGYKNPTSKKMSHWTNTLIRDKVESICEQNGVQLVHQSSTYRSQRCSECGIVRKSNRKGKIYTCDNCGLIEDADYNASKNHEINLPEIPYDFRNLNMNRKGFFWLESGLFSLDGRSLQSLL

SEQ ID NO: 48888 - protein, 531 aa, Richelia sp.
MSSITGSCSWEKPPRPHCLTYQTLVPSYLIDFCEEMGKLFGKVERNLYIGLSRGEKLNTLKSSYQTIYGINARQFNSIYASIKGKISSEKECLNRYIKELQLSIKGLKKSITAKINKLKKLYPCCGINGYKTLKKQLKWEIHQKQRRLSLKNHKLELLKTKTSGIIFGSRKLFQAQHKLEENGYSNHYEWLDDWQQKRNSQFLLVGSSDETAGCQNCQLSIDGNIKIRVPQVLSHKKGKYVFASRIQFKYGDQNIEYALLKGSALTWRFVKKDNGKWYVFVTVKRPEVPIQSRSSNGMIGIDLNPSVIGWAYSDQEGNLKARGQIKINLRDRSSHQVKATLGETVAHIVKLASFYQCPITVEKLDFSAKKASMRESGVRYSRMLSNFAYSQFLSILESRASKWGIQVIKVNPAYSSLIGLTKFLKLYGLSSDTAAALVLARRALHKSERPPARYARFLPEDRHRHAWSYWRMLHKQLWSLRRHSFYGVANSRDEVSLYDQDKTRSYGKPEGASSGRRDSSPQVGSTARPAS

SEQ ID NO: 48889 - protein, 374 aa, unknown
  TnpB Polypeptide
VLSKKEKQVVMTYKYKMYRSKSLRHLDRLIDYHCEVYNYCIALHRRYYKMYHKHLSANKLKVHLTKVRKRSDKEHWQELGSQSIQNVAERIDRSYKAFFDAKKEHRGGRHSIPHFCKRKNYSSFTLKQAGYKFHNGNHLTIFGKDYKYVAHRPYEGTIKTVSIKRDNCGDFWLCIVCAKPASIVIPRKGNAIGYDFGLKTFLTGSDGSHIESPRFLEQNAAALRSAQRALSRKRKGSANWRRAKMDVTRKYQYVKDCRKDWFYKLAVNIASQYSDVCIEDLNIKAMQQLWGRKVSDYAFTEFVGILQYQLSKTGGQLHKVDRFFPSSKTCSHCGYVAKELPLDIRRWECPTCHAMLDRDGNAATNILVEGMKSA

SEQ ID NO: 48890 - protein, 167 aa, Mastigocoleus sp.
MTRKSKGKNKRQKSGLNRSLLDVGIGNLKDLIEYKVTEAGGFYVEIPTRKVKPSQTCPNCGHQKKKTLSEREHHCVHEVRGKKCGYRCDRDVAAAMVMLNYASGKCGLGVSPSGAIFQDRGMERASTDVDEKTSTWCGSYDRRSRSANKQVAQMKRQKRVACPHANA

SEQ ID NO: 48891 - protein, 305 aa, Psychrobacter sp.
VKFKKSQDIIGIIKNVTISKKSVHWYISFGTERELAEKPVHPSKTAIGLDLGITKLITTSNGEYIKPKNSFKANQIKLAKLQRQLSRKVLFSQNWKKQKHKIQKLHHHIANIRHDYLHKITTSISKNHAMIACEDLTVANMSTSASGSVENKGRHVKAKSGLSHAMIACEDLKVANMSTSASGTTAQKGRNVKAKSGLNRAILDQGWSMMVDMLEYKQQWRGGLLIKVNPRYTSQTCSQCEHISKDNRQTQSKFECVKCGHKANADINAARNILSAGHAVLSAEGGCSKGRPLKQKTCDGREKVA

SEQ ID NO: 48892 - protein, 421 aa, unknown
  TnpB Polypeptide
MPRYECRIGRIETDITTFRILARMSWVATKLYNTALWAARKEWEETGNIPTAFDLQKIVLASPHHVLLPAHTYQHPAHQVGQSFRSWFALRKTDKTANPPGFRKKGELSSTLFTEDAFRLTSSGSILLTLSQGLKTELAYPNKFLPMRVHWNTPLPDDGTIKQLEIVPKDGYFVVHAKILLPEPEWKTEGQVVAIDLGMRNPIVSMDEVGNVDIFKGGKILSDLRYWNKEKSRVRAEVMGRTKGRKKHSKALSKMSKHGVAQVNHAVHALTSTFTELCIQRNIKEVVVGDIVGIKKNKNGAGKKWNDKSSQNWQSFPISKVVAQLDYKLARHGIQLIEQDESWTSKGRCSLCGCTDKKKLHRVHRGMFYCENCNSTQNADVNAVANQKARYLRKEQSPSSSGALAAPSVHRWDNHRWAVVA

SEQ ID NO: 48893 - protein, 417 aa, Mycobacterium sp.
VLTGRRFRVEFTGEQAEYAERIGAACRAVWNTGLEQRREYRRRGAWMNYQPQARELAEAKTEHAWLKDVPGHCLQQTLMDLDRACREHGTWRVRWRSGRRWSPSFRFPEGSKMVVDKLNGRHARIKLPKLGWVKFRASRDLAGEVIRSVTLTRDGRHWYLSVLVDDGRRTPETHQVAGEAVGVDRGVAVAVATSRGELIDRPFSTEGERRRVTVLQRRLSRCAQRSRNRDKARAQLAAIGTRERRRRADFCAQTAHQLATANAVVVIEDLKTKHMTKSAKGTLEQPGRNVAAKSGLNRAILGKGWHQFALALSSAARYTGTVVVSVPAAYTSQRCSACGHVDPKSRESQAVFRCTACPRPAEHADVNAAKNILAAGLAVIACEDQPRPAGRTRSPKQEPAGTREELLLPPTTAAPAA

SEQ ID NO: 48894 - protein, 265 aa, unknown
  TnpB Polypeptide
MSGNVTIGAAGMIQGLTTSNLSYINTLEVSGLTIDGPLTYAGTGGTPTSGSATTSPATISAAAGGHVVLTGGSIISNNRKKSAATLARLHARIANIRADFLHKLTTRLCRENQAVVVEDLHVKGMLANDNLARALSDVGFGQFRAQMEYKAKRYGTRLVIADRWYPSSRLCSVCGWKNEALTLKDREWTCPACGTHHDRDHNAALNLKRLATATALPEASPAGNGGATAEGASAVAGKVTPVRDDGGHQDTSGQEGNRAHLRARS

SEQ ID NO: 48895 - protein, 368 aa, unknown
  TnpB Polypeptide
MKLTLQLKLLPDAEQARALLDTMRRFNQAASFAARAGFDAGVFSKPSIQKLCYRELRDRFGLSAQMAIRAIGKAAEAFARDKTICPKFRPDGAMTYDERILSFKDCHRVSILTVKAARLMIPYVFGEYQAANLARIRGQCDLIYRDGLFFLYCTIEFQEAPPVEVGDFLGIDLGIVNLAVDSEGETHSGEQVEKVRRRYGKARRGLQRKGTKSAKRILQRIRRRESRFRQHENHVISKRIVAKAKALQCGIALEELTGIRERTEKTVGHRQRSRHSGWAFFQLRAFIEYKAKREGIPVTAVDPRNTSRTCSACGHCAKANRATRDGFACLHCGYSSNADLNGARNIRARAVVSPPHQQQAPGFLFASA

SEQ ID NO: 48896 - protein, 241 aa, Scytonema sp.
MLTLECDVSVAAPPAFGHPIGIDLGLDKFAATSDGALIERPRFLNTLHRKLKLLQRRLRNKNIGSNNRHKLNCKIARLHQRISDTRKDWHFKLAHKLCDGIGMMFVEDIDFRVWAKGMFCKHTLDAGFGQFVSILQWVCWKRGVHFAKVDKDYTSQVCPQCDTHTGRKELKDRVHSCPECGYTTHRDVAAAQVIRNRGISGLGRSLDENACGDGETSAAVLVSRQPGDWRTRRVWRGLVTV

SEQ ID NO: 48897 - protein, 605 aa, Scytonema sp.
MTSGYHQLKQQPDWEFQQKLCKDGRVRGESKRTGHREITEDSKPTQLTPCLELNQQTTEKQFSTQELVVEVKKTTSIHRLTISYLNILGAKSFETSEVDSTCEEKVYSPYWNEFCQAMSSWLSFPTKTDFAVLGSTITHGSRANSHVKFWFSTTTYLAQKERWSKIFLPLSTYFHADYMDSENTKKRSKKTLKYRVYPTGDTKKVWMLRIHGVRKVYNNAIAYLNKHQGFTYINTFGEVKTTGKREFRSFCKTLGSEIIPQWCKDLQIAHALDNALFEAYIAWKKTDKEPKFIGVGRNRKPHPDASQKMAKFRSIRSKNQTIQFDPHDYKNGHWMASSGLEKAQFWGQDYCLINYSQASELTYNKGRWYANFPVEMDAQPPRNGGKAIALDPGVRCFLTGFDGNHFIEFANGDFALIAKQSYHLDKLKSKHDKAKSGKFKRYRYKLRQAMERIRTRIKNLRSECHKQVASYLARNYDVIYLPTFETSQMVSRSKRKLHSKTARAMMTWAFYEFSQTLQHLCNRYGSRLVRVTEEYTSKTCTSCGHVHTKLGGNKTFKCPNCGTIIKRDFNGALGIFLKALWDTTRISTVCADEVVLSLACPECLG

SEQ ID NO: 48898 - protein, 421 aa, Thiotrichales sp.
MIQRTYKLRVYPSSEQRERLARWFGAARWVWNHALERRSKAYRRRGESVSGVDVSRALTGLKRTRRYGWLGEVPSGIATQKLRDQDAAFKAFFAGRARYPRFKKRGAGQQAVRLQVDARHVGVQQAWAAGEVFVPGLGRLKSRHGAHPLQAPKMVTVRRDPAGRYFVTAMVEEAPQARPEPVREAVGIDLGLKDLAILSTGERVANPRHLRRRMRRLKQAQRALSRKRRGSNRCARQRRRVARLHMRVRDARQDVLHKLTRKLVDENQVLCVESLNVKGLARSRLAGSVLDAAWGELLRQLTYKAEWAGRQVIAVDRYAPTTRRCGACGEITGPRGAEGLRVRRWTCTTCNTEHDRDWNAARNILALGIDQRLPAGSGEVMRVEGGRTRAGEGQPVLAGRHPVKREPITAQRRGLEPADGA

SEQ ID NO: 48899 - protein, 557 aa, unknown
  TnpB Polypeptide
LRICFNNPAKTGCFPIGSKQFVQVMCRSPFFVSPLPLLPYNDATAKNDLLKRTERPHMPDKKEKSEERGVRLAYKFRIYPTAEQRDAIEQNIDASRFVYNHYLRARMEAFERTQQEVRRPKPALDEQGNVQHDEEGREVWERNKDGKVVYHKVPNPGYDPKAKAMSMFDTSKDLTRLKKELVDEGGTPWLKAADATALMYALRNLDAAYQNFFRGLKKGQDVGFPKFKSRKNPVQTYKTGNVRLAGSREDGSEQCAVEAVPSPVPDGWDLADVRWDGIVLPKIGKVKARVHRIPEGTFVNCTVERKASGKYYASINVKEHELPEPQPADGEVGITFGASHWAVTSDGQVVDLPEQIAKLQRRKAIAQRDLARKEPGSANYRKQKAKVARYDEKIAEARKAATHNLTRELVDGYGLIAARQMNSKEMQQHESAATKSLPRKVKKMLNRRTADGNFAEFNRQLAYKSAWANRAFVEVPGDTPTAQVCSRCGHEELILAKDLRPTWTCSECGAKHDRKANGAVNVLEAGKDILSQQEQSYVSKAKSSRAKKRAEEKDPTK

SEQ ID NO: 48900 - protein, 186 aa, unknown
  TnpB Polypeptide
VKLIKVGYSDNGVNFIGIGINTKMNKVCKEIDIINSMIHKKKKDNKKEFKNNSNKRRNLKRALHRKIKYLENLKTELHNKSIKYLTSNYARIVMPKLDTQGMACKFNSKLARSLYNLSKLEKKCKELDVELIIRPEYYTSKTCTKCGHIKHDLKLSDRTYKCEKCKLVIDRDINAARNIMLRNNEM

SEQ ID NO: 48901 - protein, 441 aa, Ruminococcus sp.
MQIYTTYSVKIKHYNNIFKDTVIVYRHAVDYLIKVCLDNWDNIVAFKDVNRLTYIETLIHATKDNPNPIYDFDAKFYKMPSYLRRGAINDAIGKVSSYKSNLANWIKNQVGREPSNPKAGYTFPSMYRTVMYNQTGDYTAQIKVYIRNTWDWITINLKKSDMDYIYRHCSFRKQCAPTLQKRGKEWFLDFPFEEKVKLADISVYEQTIVAVDLGINTAATISVMRSDGTILGRHFCKLPKETDHLMHSINRIKKAQQHGNYKTPRLWAKAKGINHDIATKTAACIVDIAVLYNADVIVFEHLDKNGKVRGSKKQKLKLWRSQEVQSIVTNKVHRLGMRVSHICAWNTSHLAYDGSGFVLRGKFGGFNTYELCKFQNGKTYNCDLSASYNIGARYFIREILKSLDENSRLLIEAKVPQCSKRSTCTFSTLVNLNAEIIAQTA

SEQ ID NO: 48902 - protein, 402 aa, Escherichia sp.
VKRLQAFKFQLRPGGQQECEMRRFAGACRFVFNRALARQNENHEAGNKYIPYGKMASWLVEWKNATETQWLKDSPSQPLQQSLKDLERAYKNFFRKRAAFPRFKKRGQNDAFRYPQGVKLDHENSRIFLPKLGWMRYRNSRQVTGVVKNVTVSQSCGKWYISIQTESEVSTPAHPSASMVGLDAGVAKLATLSDGTVFEPVNSFQKNQKTLARLQRQLSRKVKFSNNWQKQKRKIQRLHSCIANIRRDYLHKVTTAVSKNHAMIVIEDLKVSNMSKSAAGTVSQPGRNVRAKSGLNRSILDQGWYEMHRQLEYKQLWRGGQVLAVPPAYTSQRCAYCGHTAKENRLSQSKFRCQVCGYTANADVNGARNILAAGHAVLACGGMVQSGRPLKQEPTEMIQATA

SEQ ID NO: 48903 - protein, 471 aa, unknown
  TnpB Polypeptide
MKKTVKIRADCSNNEDEILLIGKIQRNIKNYVWSRYGGISSLLKQSGWTIRDELVQKNLLSNKITKTLSKVAVEKSASIIKANWTITKKKVKKAIAQNENLTKDDKRYLYLCLKHTPTLYGILNYKKIDYQIDYLKDLKVDVHRLNNLLRRYVRRYKTKSYTNKANIVLTSSLYKFDLNNKKFALTGKKKHSRIEISLIGNIPKLKGTLELVKNQKDNQYYLHVPLDRIISKKEMTAESEILGLDVGMTDLITLSNGSVYGANSAELFYTLSDNLVNKNRSRLFVYKRELEQRILEEQDDAKKSILEQKLKNLEDNNLGSKKRNSKIRKYKSRIVSHINCELNKMVKEEDIKEIVREDLNWVSKKRNVSKKQQNRFSSWTKGVLLERLSVKLAEKGIKETIVNPAYTSQICCKCNHLGIRTGKEFKCSNCNLSIDSDFNASINTKKRKFIKEINIDTPYKEVKKYYENLPV

SEQ ID NO: 48904 - protein, 334 aa, Mycobacterium sp.
MGRGGLMRRAYVFRLRPTARQHVALAACVESHRELYNAALQERRDAWSHSTTRIYYGGQSAQLTEIRSVRPDQAVWSFSSQQATLRRLTKAFDGFFRRVKRGDTPGYPRFKGKARFDSVEWPKDGDGARWLPDHNRVYLQGIGQVKATVHRPVQGRVKTIQIKRQGRRWMLVLSCDDVPTSPLPATGRQAGVDVGVVTYATCSDGTEVANPRWARQEAARLEAAQQRLQRAQRGSNNRIARRETVAARHRKIANRRKDFHHKQARGLVAAYDLLVVEDLTIANMVRRAKPKPDPQRSGQFLPNGARAKSGLNRSISADFRVVGSGQHPRVARAA

SEQ ID NO: 48905 - protein, 505 aa, Mycobacterium sp.
VTAPAIVARRLPVVGELNAGKTAILAAMGAELDRVRAEVWSRFRGAKTACLSKRQVRDRLMAEGSPRKYAVPQRLWRATVEDTVDKIRAWQRAVIVTEVRPDIYSRTAQDKDGRRRLLTLAKAGRWREDPWLSRHCRDALGGKIPRPRRSGRIVADNCSYDLRRDHKGQLWLAVMTPTRGHRLALNLGTLPEHLEPRSTIEIAADGKGGWSVTAAYPAHQVSSVRPRLPRRKPVEAVDAGVTEVFTTTDGRRFGEGQSTVITARAERDCARGKARNKIRGVRDRHLDRAHLAAMAGDHRRAAAARAKAARIDRHNLGHRKRSQQRDHDRAATKDVVYQAVHDLVDTTDHIIAEDLTGMRGKSKFGPAVSRLYASWQRTFLADALASVPSRRGSAVTLVNPAYTSQQVHPCGHLGVRRGKKVHCQTAGCPQQGIVYDTETNAARNIRDRATDPQITRYTPYTEVKRILINRAGTVENCPTTTQAAALNGDGCERNNPIPRATMLRE

SEQ ID NO: 48906 - protein, 375 aa, Microbispora sp.
VGVRRSFTFLLRPTRKQAAALAACLEDHRVLYNAALEHRRTAYRRAGVTVRYGDQSGELKHIRADDPGGQGRWSFSSQQATLRRLDKAFAAFFTRVREGRTPGFPRFKGRGWFDTVTWPKDGDGCRWDCQPEHPSATYVRLQGIGHVRVHQHRAVKGRVKTISVKREGTRWYVILSCDDVPAGPLPQAGAAVGVDMGVASLVTTSDGDSLDNPRHLASSAGRLAVAQRALARKKRGSRRRRKAVARVAALHAKVRRQRLDYAHKAALTLVRDYDVIVHEDLRIANMTRSASGTIERPGRNVAAKSGLNRSILDAGWGVFLRVLAHKAESAGRELIAVNPAGTSRTCSRCGHCAKDNRRTQAEFACTACGHTAHAT

SEQ ID NO: 48907 - protein, 240 aa, Oscillatoriales sp.
MGLYLKLLPFQKKEIAGRVSFCVDAQGLPVQQPEGSVGIDVGVKSFVTLSNSQVFDAPKPLKQAKTKLARLQGKAHRQIKGSNNQRKTYSKLRRLARTIACIRKDFLHKLTTYLAKTFKLIKIEDLNVRGWLANHKLARAISDLGFYEFRRQLEYKCKMYGASLVLIDRWFPSSKICASCGHKKDMPLAERIYNCPACGVLIDSDLNARQEYFKLGTQGYWGIACLSWDGRPPNSAGSEF

SEQ ID NO: 48908 - protein, 410 aa, unknown
  TnpB Polypeptide
MHVHQKDAVPTAPNIVVVAHRPSVSFRPMQRLQAFKYETMPTGEQQRQMRRFAGACRFVFNRALALQKERYEQGEKKLGYAGLCKLLTEWRNGPETPWLADAPVHPLQQTLKALERAYANFFAKRADFPRFKKKGQRDSFRYPDPKQIKLDQGNSRIFLPKLGWVRYRNSREVLGTVKNVTVSQSCGKWFVSIQTEREIQAPVPKATSAVGIDMGVTRFATLSDGTFYAPLNSFQAARRPLAQGAAGDEPQNEVQQQLEEGESPRPAYPFPDRQRPPRLPAQVLHHDQPKPRDGVYRGLAGAEHVQVGGRRSRESGQECSGQVRSEQSHPRPRLVRVPPTTGLQAGMGRWASHRRAAAEHVADVPGLRPCVGGQPPDAGPVPVRRMRFRGKRRSGRRDQHTQGGTRPLRL

SEQ ID NO: 48909 - protein, 254 aa, unknown
  TnpB Polypeptide
LPRSQTARSTRRSTVFKQHEDRLRKAQQAMSRKTKFSNNWKKAKARVQRIHFRIGNARRDYLHKCSTTISQNHATVCIEDLQVRNMSRSAAGAAENPGKNVRAKSGLNKAILDQGWFEFRRQLDYKLAWAGGHLIVVPPQNTSRTCPACGHVSADNRQTQARFLCVECGFEENADLVGAINILRAGHARCACEVSGAVMPPAAGTHRSDSFRLDAGVSAVGIPQLRRGRMSKRCVPESLALACQGRAWARRAYP

SEQ ID NO: 48910 - protein, 312 aa, unknown
  TnpB Polypeptide
MSVPFPGQAVAVRTLSRKWAQVRLPKLGWVRFRLSRALGGPVRNVTVSRDGLGWHVAFGVATGATPAAPNGLPGCGVDFGVACSAFVSDETQPRRMPATLTPGEQRRLRGLERRKARQVARAKKYNQGRYSGRLRRTIDQIAKLKARQARRRADFTHKLTTDLAKSHGWVGIEDLQVKGMTASARGTKEQPGGNVRQKTGLNRVILDNAPGERRRQLGYKAPRFGSELRLVPAPGTSQTCAACGMRDPASRSGCGRVFACTACGHQAHADLNAALNIEGRAAGRAVHSTRSHPGVARPARSRMREPLAGATA

SEQ ID NO: 48911 - protein, 464 aa, Eubacterium sp.
VKLDNNAHSVFSLNYHLVLVVKYRRQIFNDDISDRAKEIFEYIAPNYNIILEEWNHDKDHVQILFRAHPNTEISKFINAYKSASSRLLKKEFPQIRKKLWKEHFWSQSFCLLAKTFGCVRMVYNHWLDRKIRQYEENKTNVTYTACAKEMAEMKKTEEYAFLREVDSISLQQSLRHLDTAFQNFFKQPKTGFPRFKSKKRNKNSYSTVCINSNITISNGYLKLPKIGQVRLKQHRDVPKEYRLRSVTVSQTSSGKYYASILFEYEDQVQEKEIETFLGLDFSMHGLYRDSNGNEPAYPRYYRKAEKKLAREQRRLSKMQKGSNNRRKQRMKVAKLHEKVCNQRKDFLHKQSRQIANAYDCVCVEDLDMKAMSQSLKFGKSVSDNGWGMFTTFLKYKLKEQGKKLVKVDRFFASSQICSACGYKNMKTKDLALRQWDCPQCGTHHDRDINAAINIRNEGMRLVMA

SEQ ID NO: 48912 - protein, 259 aa, Okeania sp.
LSKTQNYLFPYEFNSLNLICGAFKASRKSGTEQPSCGKFRSIRDRIQSIKFRVEDFKKGTWLPSLTKGLNILASEPLPTINVEYQQKQKGGTYKTCDLEQSWNAETQLVYEKKRWFAVFPIEFKPENSQSQSIIALDPGVRSFLTGFDGEKFIDIGNRDITRIFRLGQHIDKLISTKTALKGRQNKYKRQGLNKKINRLFIRIKNLIDEVHKKVAKWLTTEYRVIFLPTFESSQMVAKSGKKKRKLNSCVSSLNAKLGT

SEQ ID NO: 48913 - protein, 364 aa, unknown
  TnpB Polypeptide
MNQVETVRLHPPDPAQLIAWLERFNAATNWLSGVAFRERLWHWLPLQRRAYREVRERFQLPSAATVVVIRKVAYAYRNTQRRQHQATFRRRGAIPVYRHQYKRDGTVSLYGFRIPFTARPRVELSSRHQAVLCYRRGKFVLHQVVEVDVPAPAPVQDYLGCDLGTTNLLTDSEEEAYSGRAVEEKRRIYVHRRARLQKRGTRAARRKLRKISGRQRRYQRDVNHGIAKRVVAKAQRLCCGIALEDLRGIRDRIKARRRQRARLHNWAFGQLRQFIVYKAAQAGVPVVFVDPANTSRTCPVCGHVDKRNRRSQAEFNCRRCGHAGPADVIAARNIRAWARGDAPMVASARAATSPPPYVEGIIAK

SEQ ID NO: 48914 - protein, 462 aa, unknown
  TnpB Polypeptide
MAKILQRIATNQDYYRSIVSITDPNNMGKTINIDSMIKSYIDIIHVHYTKICNAIFKSRASFSYPEDGDYADDFQKRQNNYQEIIKIKNRYVDYCNRHGEDVNKNTIMDMYEHVLDILFEYNACKENDFTKEGFFDYAWSQIEQDLDIGFSCKNTESGVLCKINFPVRTRCGINWAKWFGVSLDRRLIPAKVNSFNVDSKQNLNKLSQKMLSSRLTLTKDGYKLHLRIKRETPEKYNTTVTVGIDLGLNSFMFYHCEDSDGKEVLIEACKNTALLDQYKCAVDSGDDAAITKSLNAIMSFLKNDIKQKIQKFKPRFIAFENLGDSLMNSDNVYSNHYPWNKIKTRLKRIVEEEGIHVIYIDFYNTSHDYAHGDDEIIRDEKDFSIGYCKKSHLPVNCDENAAYNIWGRCNVEILYRYCLSEEQVSEVKEFIAQRGYSPYRTNYKTAKEVLDFCKENYGILCF

SEQ ID NO: 48915 - protein, 427 aa, Escherichia sp.
MHQENTMLPRRISVSLFIDQSIIWPVKRLQAFKFQLRPGGQQEREMRRFAGACRFVFNRALALQNENHEAGNKYIPYGKMASWLVEWKNATETQWLKDSPSQPLQQSLKGLERAYKNFFQKRAAFPRFKKRGQNDAFRYPQGVKLDQENSRIFLPKLGWMRYRNSRQVTGVVKNVTVSQSCGKWYISIQTESEVSTPVHPSASMVGLDAGVAKLATLSDGTVFEPVNSFQKNQKTPARLQRQLSRKVKFSNNWQKQKRKIQRLHSCIANIRRDYLHKVTTTVSKNHAMIVIEDLKVSNMSKSAAGTVSQPGRNVRAKSGLNRSILDQGWYEMRRQLEYKQLWRGGQVLAVPPAYTSQRCAYCGHTAKENRLTQSKFRCQVCGYTANADVNGARNILAAGHAVLACGEMVQSGRPLKQEPTEMIQATA

SEQ ID NO: 48916 - protein, 435 aa, Deinococcus sp.
MASAVRAAQLTVHTALLHHAAGHPLSLVDAAPGRAAPLPRLAPDARVWPPTVTQQRLVGELQHLRGSLGWPSMPASALGWAVSSVAQVWRAPALRPRRVSDLTTLDALPPPVIALRNVLPVDEVTLEILGLGDHALVEADLYLLPTPFAQALWHRHHARLGREAERLTQAEAAFFSGGAPQPAADALRLRARYASVGLLLDGRSAPPAPPPGAPTCRDQVVLRDVGTPTAPRWEVVWSFHVPAPSRWLVDDVLGVDPGQRHTWAYASAAMHGVIPRPHAGAWVWPALDPGPGITPHGERRARAWARRALFERMRPGHEQLIALALMHRVCAVEDVAWGGFRWHGSYADYAGDPGIGIRAALDWLTALAPVHGVELIRTPPAYSTRTCSRCGRVRPRPGSGRPFTCPCGQREAADINAARNHRQRALQMLAARRDG

SEQ ID NO: 48917 - protein, 354 aa, unknown
  TnpB Polypeptide
MKTLKLRIKDKHAKVLNEFASEVNFVWNYVNDLCFKHLQRTGKFFSAFDIAAYTAGASKSGLNLHSQTIQAITEELVMRRKQFKKAKLRWRVSNPKSAKKSLGWIPFKASGIKYQNGQVKYAGHWFGLWDSYGLSGYKVRCGNFNQDSRGRWYVNLVVDTPEPATTTEGKTSVGIDLGLKEFATLSNGQKINAQRTYRQYEQKLAIAQRAKQKKRARAIHAKIKNTRKDFLHKLSRQLVNDHAAIFVGNVNAKGLAKTKLAKSVLDAGWSAFRTMLKYKSQQAGVWFFEVNEAYTTQTCSCCGSRQSSPKGRAGLGIREWTCQQCGTLHDRDVNAAKNILAAGHCRLAGGISVL

SEQ ID NO: 48918 - protein, 479 aa, Aquifex sp.
MQTLTLEISTTKRSVLNKLKRASLTFQQFKNLLYLCLLEYYKNTKDVKPFLSVSFLEKFVKGKENLPFENEKIKSYREKLKELWEKEIGSDTVKALARQVSKEVKSVLEKWKKGERAFLPRPRKLKKVHKFTVPTNPNMLVDKRKLKRRRENSIVVRLGISFGAVKVKIPQGINIRDVKITWYEDTEVIFRISYEVPKAQKELLKEKWLSIDLGVRNLVSCISNDENLRSFIVDGNPLKSFNQWVNKLSAKLRSEGKERLERKLWRYRKKRIKGFFHQVANLIVRVCLERGIGRVIIPNSLNEEYQKDSEKGARFNQEFRFIPLGELVKMIEYKCELCGIEVVKEDESWTSKVSSVSGNIEVLKEEIPEGEVKKLKFEGRRIKRGLFRDRRLKKVFNADLNGALNLAIKALGKKVREEFLSLRNWLDKLSRPVKVNLFRYPASLPVLWEIAGSKSCSPKGDSEGHFAGSVSDLITFAHF

SEQ ID NO: 48919 - protein, 464 aa, Aquifex sp.
MPKPLRCITIAFTDLPNEYKIVLGYLTYHSGRLFNQALYSIKTKQAKVNTYDLYNKLKDNSLHLKNLQSRCAQIVLDELVRAFKNWFEFLHNPEKFKGQEVKPPKFRPKNKPHRTITYDQTGFKVVGTKIRLSLSKALRQWLKEKHGIELKYLWLDTGLELDERLIKNIQIVPKANAKEFELHIIYEKPQNGEKLLKQDKVMVLDPNSSNFFAIVIEGIPQPYIIDGNGLKSLLRKYLKKIASLQSRLEGAKKKGFLTHFLEERISRLWLKVKRLLKHYAHTISNLILELALKYGVRKIYIGDAARNKNKESKLSSVADQIWSLLPHGKVKEYLEYKAKEYGIEVEYISEAYTSGVDSSVEGAVNKETYTPEARVKRGLFRTRLLGFLNADVNACRNLLKKLGKFDLISGILRPIRLRVFFKLRESSSAIPLYGGIGRSRGGVNLPVVVRHSKEGVNPPEAPHL

SEQ ID NO: 48920 - protein, 480 aa, Scytonema sp.
VSQLYRAIPIRARFTNEEQVFWVDQCQHANSLINCAVYYIRQTHYARLQEMDNAYTIYWRGDELRSAWKTYQCNSSYPELDKVLKDNPHYKGLAAQAAQQTLKSVGESITSYNGLVKAYYKGEVDRPFLPKYRKKGGLAAVTFPRQALSFKDGYFKPSISKETKPELIIDIQLKLPDFIDSNWVKEVTVRPYLGTFMVDWVVDDRKESISINSNLDYSHAWSFDHGGTNWLTAVSTRGKSFILDGRKLKAMNQGYCRLVAKYKQGKSDFYWDSNLDRVQRKRNNQMRDAVNKAARFIVSRCLNDKIGNIIIGWNEGHKVGSDMSKVNNQNFVPIPTGRLIARLKQLASEYGIVVTVTEEAYTSKASFLDGDSLHKFGEKPKGWKPSGRRIERGLYKTATGLLINADANGAANIARKVATQLGVSLVEVGRGILTVPQRYDLFTRLNKSYRRRCGDEPVLREGLPPQASGVGLLALGAATV

SEQ ID NO: 48921 - protein, 397 aa, Streptomyces sp.
MVMWINFITMACVKLVAQVKLMPEAGQAAALSATLRAVNEAANWVSGVVFERGVPREYELRKHTYAELKTRGLGAQAAQHVIKKTRDAYTTLKANIRAGNLGKPGSRRRVKAESKPIAFRPGAAQPYDDRCLSWRYDVQTVSIWTVAGRLKGVRFTCAPDALKMLREHRKGETDLVERDGVFYLVAVCDLPEPDPYEPDGFVGVDLGIVNIATTSTGYRAAGRGLNRYRARQLELRRKLRAKGTKSAKRLLKKRSRKEARHAANVNHIVSKTIVTTAERTGRGIALEDLTGIRDRVRLRKDQRTSLHSWSFRRLAAFVEYKAKRAGVPLVYVDPAYTSRQCSRCGHIDRKNRVGQAAFACRACGFLSHADDNASHNIARKGETVWTAGRESRVPATP

SEQ ID NO: 48922 - protein, 364 aa, unknown
  TnpB Polypeptide
MEKAFKYRIYPNREQRILLAKTFGCTRFVYNHYLAKRKDAYEKDGITLSYSACAKDLVSLKKEYEWLQEVDSVALQSSVKNLDTAYINFFRKKAEYPRFKSKKTHRYSYTTKYTNGNIELYENKVKLPKIGLVKIKKTRAPKGRLLSATISQVPSGKYYVSLCYTDVEEVLFPLTYNETGIDLGIKDFIVLSNGEKVENPKYLKKSIEKLKKLQKQQSRKTKGGRNWIKNRIKIARLHEKIANQRMDFINKLSTRIITEYDIICIEDLKVENMLKNHNLAQSISDVSWSKFTTQLEYKAEWYGKVIKKVDTFYASSQTCHCCRYKNEETKDLKVRDWTCPKCYSTHDRDINASINILMQGILAN

SEQ ID NO: 48923 - protein, 534 aa, unknown
  TnpB Polypeptide
MMHTVEFKLDLNQSQICKIDNWLSVQRWVWNHGLNLLENFDKFNHWDKHSKIWVPCCPLPWEYYKDTEGQLIPFTRLAQKKPYRMSCPILQDYRQPELESPSFFGILYHFAKKNHADKPWFCEVPCKFVAGTLQSLTDAWSEYKAGKHKRPKYKRYGNKFKSLVNNNAKAIKVSGKQISLPKLGKVKVKTLDKRWDSSIAIATLKIVREPSGYYLQLTGELPTKQLKPSNKAVGLGLGYKHLFITDGGRAIEPPAHYQKIEKRIQRLQRKLSRQQNLCPISTYNPELGEHFLSCPINPHKGANKQKTQQKVARQHEKLRRTRKAFNHKLSTKLVREYSRIAIAKSDRRKITRRPKSIVNKQGTGYDPNGAGLKSQFNKMILTNGQGQLTAMIEQKAVVNGRTYIEVAPKDIPDEPRQRTEHYSKRLRLPRAVHLSTFQQGSYRPWGWQVTLGESPVTLNQEAAMVAPLRDAGTTSNSTSETTNHNRLVDIPESTSALKVSKQPQKAHKHKDDQPNLNNQSGKKKRRSTKANNSG

SEQ ID NO: 48924 - protein, 448 aa, Clostridiales sp.
MSGAMKSHTSYTAFIRGQLSDSDPCAPVLNDLMGCTAQLCLSALKFCCRVFLEHWDVLKPLRDPERKTAAEALIHTTKHNDAQYPEFDVRFHGLPSGVRRAIRNDALGRVSSYVSNHKNWEALKPSERGAEPTLGLPSRYQLTFYQTERKTEGLKRGQILLKLYNGKTWEWYTFLIKPSDARYLARMAERHAMLSPMVEKVRGAYRIRFCFEDKRELVSDENKLSYRILAVDLGINAAATWSVMTADGTVHARGVIHARAEEDRLWHILNRVRKYQRRKKHPKSIYRFVRHANRALSICTARFLMAVAELYNVDCIVFEHLDKTGSARGRLASRIHHWRACDVQHRVETMAHRDGMRLSRVCAWGTSKLAFDGSGKVIRDKHNHSICTFANGKQYNCDLSASYNIGARFFLREWKKVYPDLEMPATPQRTLSTLYDVRNQVQHNEAAA

SEQ ID NO: 48925 - protein, 480 aa, Symploca sp.
VLLNYQYRAYPNTTQKLELNYWRRLAQYWYNWQLGERFQWWQQNRCALNSCPLICHLPELKDNPNYYSQKKLLPGKKKDLALVYHSGELLDFTRLPSQTLQEVCDRTKKAFERFVKGDSNGKRSGKPRFKNAAQYRTLKVEGQAITIERIDRRWLWISFSKFPGWLKIRLHRPLPDGFKLINVLVTKKADGWYASLVLEDKNIPTFNHDEIVPTWGNSIGIDAVLHEDDYLATSDNIKLPSLKSFRKSQSRLAKVSKRKALKKKGSKSRRLLAKRESREHQRIARARKDHAYNTAHELVCSGKYVFFYEDLRLLNLTKRNKAKQDKDGKYLPNGQFAKSGLNKSWQDAAFGQFFSVLDYIASKAGAVTRKCNPAYTSQLLSYRDEFVFTDCGIREWYDEKENLLVERDVNSAVNLKRVGLGMFPTIKRRRGNPVVVDSITNSTSKEVHRIFAEPEAHTVIYDSVWEMSRLGLDYTGISQG

SEQ ID NO: 48926 - protein, 398 aa, Micromonospora sp.
LTCGNLAVILAYKFLLRPTARQAAALAACVEDHRQLYNAALEERRGAYRRARLGIRYGDQSAQLKDIRRFDPGGQGRWSFSSQQATLRRLDKAFAAFFRRIKAGQRAGYPRFKGVGWFDTVQWPKDRDGCRWNSIGGGPTRVYLQGVGHVRVHAHREVDGRVKTVSVKREGRRWYVIVACDGVSAKPLPATGSVVGVDMGVALFLTTSGGVQVNNPRHLAASAVRLAEVQGALARGKRGSNRCRKTRERFAALHAKVRRQRLDHAHKTALWLVRHHDLIVHEDLRIANMTRSAKGTVDAPGVNVAAKAGLNRSILDAGWGVFLSILAAKAESAGRTIIAVDPRNTSRTCPSCGHCARENRVSQADFVCVQCGYAAHADVVGANNVLRAGLARQAVLAA

SEQ ID NO: 48927 - protein, 540 aa, unknown
  TnpB Polypeptide
MDKEIILKKYGRIYRLYPTKDQIKIFQDWQNGARAYGNEILWNQTVSERFFDEKKRDIVELKIKALTDVGKTEEEIKVLKDKDFWVTINNQLSDQYPIKDAIRNGFKEIRTELTIDKKGPDRELLDKIILERYPNYVDLKDSSKSYLGACGEGGMYKVGTGKYKLPSALVIGILKSNDKAWTTFYEICKNGKSVQHLVGAKKKKAAKGKRVDNFGKPKFMKKWEIPNLLFSTGNLKGPNFEKQQVFIQTLKTPIKAKLDVYPIGIITSYTVSNIGKKWFISYGLKTNVIEPEHQHIESQVGLDLGVTKFLTTTDSSQKTRIFELDKTSKKRLAILKNRVKMIQTIISRLERAEPMNYIEINWKLKMSDKTNPDYKHFQRHSNNWFRSNQKLVETKYKINEILKNFRHHVSNVITDKYGTIGIDNLQISNMTKSGKGTKDEHGKNVKQKAGLNRSILEQGWGIFNNQLKYKASWRGAKVIEIDPKYTSQTCPDCGHVSRDNRKTQAKFECIDCGHSANADVVGSQNNLKKINKKVAIPETL

SEQ ID NO: 48928 - protein, 177 aa, unknown
  TnpB Polypeptide
LNKVEQARVKTLKLRSELQKVKTKSSKKKLNKISGKEARFRTDVNHCVSKHLVEKAKDTNCSIALEDLTNINKRTTVRKKQRAERLSWAFYQLRQFIAYKATLKGVPVVLIDPRNTSRTCNACGHCEKANRKNQAEFVCKKCGHQDHADLNAAKNIRDLGLHQSAYCRPLSDCSKVA

SEQ ID NO: 48929 - protein, 343 aa, Escherichia sp.
  misc_feature (248)..(302): Xaa can be any naturally occurring amino acid
VERLQAFKFQLRPGGQQEREMRRFAGACRFVFNRALARQNENHEAGNKYIPYGKMASWLVEWKNATETQWLKDSPSQPLQQSLKDLERAYKNFFQNRAAFPRFKKRGQNDAFRYPQGVKLDQENSRIFLPKLGWMRYRNSRQVTGVVKNVTVSQSCGKWYISIQTESEVSTPVHPSASMVGLDAGVAKLATLSDGTVFEPVNSFQKNQKTLARLQRQLSRRVKFSNNWQKQKRKIQRLHSRIANIRRXXXXXXXXXXXXXXXXXXXXXXXXXXXXXXXXXXXXXXXXXXXXXXXXXXXXXXXLLFRQRTQASVARAVVIQRKKIACHKVNSDARYVDIQRTPM

SEQ ID NO: 48930 - protein, 427 aa, unknown
  TnpB Polypeptide
MLKDMERELRKIVELNTLPISGVKKDKLNALYSAWQSACSTLFDCIEYWDGFAYDLPLTSTNLHHQTYKGMREDTGLPSQLLECARREVFARRKHVRTLNVPIRYDNRTMRFGQTSNGNPILAITVMTKGRLAIPIKQDGAYKRLLKFSTDGWNAKSILLVKRNKSFVMHVVFTKTIMLDEPSKFKNIVAVDIGSTNLATVVVYSPAEKRMLRSFYLGRDVAPRQRIFEIRRAKLQSYGRIKKIRNDQSNYTKTRVHQIAHQIIDIAKEYNSCLAVEDLDGFTDIHYTVKSNRKIHRIPTRLGEVIGQVGIENGVPMLVENPAYTSQDCPRCSNRHKVSGKEYRCPKCGWTVNRDLNAGLNIALRATNHILKQDMVFGQKPKCRVAVAPPMRSDDGCVAMVSQTYRLPEECPTPVAFDARVSPMANL

SEQ ID NO: 48931 - protein, 578 aa, Rhizobium sp.
LTPYEISLCNIANAICLIVLVKKKVSAGKCTSVFRCDKLSTHMNAAKHALVKDMLRKWRVCATAMAALQWRCFFAEGQFDPFYDPATRHRKEGAEARLGLLLQISGYYSLESSAARKKRLPEMISGLVDPLASMKASIGAAQVQMVREQVLGTLNSFISNRQNDFIRSVFVSTISADQRHAHFVINRMKAWFDLKRPLHVKGELIAMSVRRLAQNIMRQILRRHRLPSFSRIGMVVDQRIASMAAAEKAKSFDFWLKLQMGRGRGGSLAIPVNGYERFKQRRGERKKSFQIIEDRETGLFTVGVITDVGKAFAASTESYRLNPERNVSLDFGLTTMFATGDGDLLGRNFLGRLKALDATISGIARHVQRSGAKPRTSVRYRRHVTRARGFITTEINRVINRLIATHKPTRLVLERLDFRVPGLSKRLNRIIQNCGRSVLNTKLVAIQQEFGIESTQVVSAYTSQTCSCCGYVDKRNRRNQARFACLWCGNKIHADVNASRNIGSERFRSFPALRPGFRKTVLQLLVREHLERHTRRIGSPADPRDDSSYFNDHRHQVRYLPSSAQALCGKTRQVELTT

SEQ ID NO: 48932 - protein, 136 aa, Moraxella sp.
MINKILDCRLDNLHKLSRKLINDNQVICVETLRVKNMIKNPKLAKHIMDASWGRLIQQLEYKANWAGRSLVKIDQFFPSSKRCCNCGYTLPFLSLDTRHWDCPECKTTHDRDVNAAKNILTAGLAGLAFGENVSLV

SEQ ID NO: 48933 - protein, 202 aa, Thermocladium sp.
MNLYPILSPWASPESRGNPLPLNKVRRLHKELSRKRYLSHNWFRAKMELARAYEHLADLRRYLYMKLGKYFAEHYDVVVMEDISVKQLIGKSGRRLKLHDVAIHELRSIVEYQVEKYGKGFILVDPRDSSKACAKCGYVKDLTLSDGVFECPRCGWRADRDYNSLNHLRRAGWVPPVVPVELHPLPVVHNYGQGGARKRETP

SEQ ID NO: 48934 - protein, 379 aa, unknown
  TnpB Polypeptide
MLIRKAFKFELIPNGAQVRKMKQFAGCSRFVFNRALAYQNEQYEADKSFKFSYVKIANLLPEWKRELVWLKDCHSQVLQQSLKDLESSFKNFFAKRSDFPKFKRKGEKDSFRFPQKCKLEQQNNRIYLPKIGWVRYRNSRKVLGKIKNVTVSQKCDKWYVSIQTEFEAEIPTPKGGEIGIDMGIVRFATLSDGTYFEPINAFKTLKGKLAKLQKQFKHKTKFSKNWQKLKAKIAKLHHKIANIRKNHLHQISSTISKNHAIVYVEDLKVMNMAKSAKGTVEKRGRNVKQKSGLNRAILDQAWYEFRRQLDYKLAWNGGHLIAVPPQNTSRCCPACGYTAKDNRQTQALFECVDCGYTENADVVGAINILKRGQEILVAQ

SEQ ID NO: 48935 - protein, 395 aa, Mycobacterium sp.
MPKFEVPDGWTVQAFRFTLDPTEDQAKALARHFGARRKAYNWTVATLKADIQAWHASGTVTAKPSLRVLRKRWNTVKDDVCVNTETGVAWWPECSKEAYADGIAGAVEAYWNWQTSRAGKRAGKRVGFPRFKRKGRDQDRVSFTTGAMRVEPDRRHLTLPVIGTVRTHENTRRIERLIKAGRARVLAISVRRNGTRLDASVRVLVQRPQQPKVVHPGSRVGVDVGVRRLATVATADGTAIEQVENPRPLGAALRELRHVCRARSRCTKGSRRYRERTTQISRLPGQRCPHPSPARPDDTVGSNPRPHCCRRLGRDRDVAAKRVAGCPRSSARTVGCGPGHSASALVLQDSLVRVGAGGRRPLVPVVENLPRLPACARHRLGRTMAMRPMLSGPSA

SEQ ID NO: 48936 - protein, 379 aa, Staphylococcus sp.
VVKHKAYKFRLYPNKEQAILINKTIGSSRFVFNHFLHLWNEAYKTTGKGLSYNTCATMIPALKKMDEYSWLKEVDSRALQSSVKNLEDSFKRFFKKQNKAPKFKSKKNPTQSYTTKNVSNTIQIDGNRIKLPKLKKVKFSNSRDINGRILGATISRKASGKYFVSLLVEEHIQELDKSNSSVGIDLGIKDFAILDDGTIYNNYRYTNKMAKKLAKEQRKLSRRYEQAKKDGKKLEDAKNYQKQKIKVARLHEKVVNQREDFLNKVSTIIVKNHDVICIEDLNTKGMLHNHKLAQSISDVSWSSFVTKLQYKADWYGKEVIKIDRWYPSSQICSSCGINTGKKTLDIRTWTCECGVKHNRDINASINIKNEGLKQIKNSQ

SEQ ID NO: 48937 - protein, 417 aa, Acidiplasma sp.
MKIIRTEQIFILDNGIISYMCYKSKNLFNQANYILRNQFFNKERLSSYKELVNEFSMPSEIDEYNNFQKLPAQTAQWTIKKVKESWSSFFRALKAYKKHPELFNGIPRPPKYKYKDGEFMLIFTNQQCSIVDGILKFPKIMNLELKTRLENVDLREVRIIPLGTGYNVEIVYSKEISDFNEVSANRILGIDVGVRNTITIGNSISEKGIAVKGGVLKSINQYFNKKLSRLKSINDKQRKNHENTKRINKLYMNRNRKIKDVMHKLSDAVIKYAINNKIDTIVIGHNNRWKQSAEMGKKNNQNFVQISFNTLINQIYYKGQEHGINVIIQEESYTSKCSFLDNESIEKHDNYLGKRISRGIFKSLNGTLIHADLNASYNIIKKAIPEAFANGIEGIGLYPGSLSIPKFIDMITSKGVC

SEQ ID NO: 48938 - protein, 666 aa, Streptomyces sp.
VGEGEVQQVAAACARALRGVDVVSGEQLDQAALVERAGWLTALVGSLASGAVREHWNGTDLAQLASGVDRSGIRLPSQGWMALRRLGWTVTVPQGVYVPDRVVRIAQEQAGRVLRSAWWRAEVTAALLATWPADPARRTEAEWQALRAALPEGGVVATSVLLARTRQIAAFQARHGRLPADVTECESAPGAGGQVVLAAVDKQLATLERCPEDPARYAVLTLRLPVRPDPASRADWHPVRVRFRLPPHVPATAVLCAPTLRIRQGRLLLDVPYVQAVAKPERAGHRTAVAFDWGLNTLLTGGTLHLTGEAQPRVLTDGPPVVFRAAGVLAKADRLRTLGEHIAARIGQLRTLITSRQERGMPPDPWLVAKLAVLEAERDRVARRRTRLNAALARAAARFIVDHAIAAGASVIHLEDLRDMQARGKGRTLNTRLSQTVRGAIVTHVRHQAATLGIAVVIVPPRGTSKYCPRCLTAFRHHKAPNDRAAGWAWASCPNPACGYSTGRDHAAWQRIGARGLTHQHKTSVDRSNGTFVIRTVVEALDRASAVQQQTRDRTKSGPTAKRPVPGKRRRVPAPPGNRAPTARPGDKRPAGRPPTHPTHSSQERRRQQGPNTIGTPVRPHRPDGARLGAGFHRHAHTTPVRRRPWPSHHPKRSRTPGITQETQAD

SEQ ID NO: 48939 - protein, 509 aa, Phormidium sp.
LYQLPKDIMPRSKTPSFVTGIPLVVDSAQEKVLLSRWQAGRQLYNACLNEAMVRMALVRQSAAYQATRKLPKGKLRTAAFSAARTAYRYSEFALHAYAKLTADRSKWLAAKLDANTQQTIATRAFKTSERVLFGKARKVRYKVPTRFRCLEGKTNKQGIRWTGEGLTWGKLYIPGMIDPDNKVMQHGLTSPIKYVRLLWRELNGVRRWYAQLICEGLPYAKPENYVSKGTVGLDLNVSNVAFVADDQAGLLPFAEGVPTFEQEISALQRQMERSKRANNPDNFEPAFTARRGRKTVKKKGKSKKGKRQWHNSNRYRTLTRKKRELERRKVAYAKSQNRRLVNELLRHGNHIKTERVSVKGWQKRYGKAIAAKSPGFFQAELVRKAANAGGSVTKFSTQTTALSQTHLTGEHIKKSLSERVHHDQTGRVMHRDLFSAYLARYVVQDKLSLQDAVDQYPGMEAALLGAWEHDQSAKRVGAAESPKSEPPVEQIPSHSEKASQISHSGLKAC

SEQ ID NO: 48940 - protein, 428 aa, Phormidium sp.
MAKPKKLLGIQQNLLHCDAETHAILTYLCEQSNSLYNCGIYWARQIFFKTSRIVSKYDPIYAVGDNIHAQAMPSVAAQQTLLSVSEAFKSFRELRQLAFKGELDQKPKPPNYRKSGGLFKVAFPNIGAGRPTFENGVIRFPLGLQVKRWFGLKEFFLPLPQNLKFDKVKEFTILPKNGAFYLECSYAMQKVETKLDMDQALAIDLGTSSNLMACVDTLGNSFLVDSRQAKAMNQLYNKRVAKRKAGKVQDYWDSVLDDYTRKRNHQMRDMVNKAARLVVKHCLEHGIGTIVIGWNDGIKDSCNMGKKGNQQFVQMPLARLKTRLEQLGIIYGFRVVQTEEANTSAGSYLDGDSLPEHGQKPDGWKASGRRILRGLYRSGDKSLVNADLNGAANILRKVARNLGIDLSRLGRRCLTTVGRIRLWATPKV

SEQ ID NO: 48941 - protein, 407 aa, Brasilonema sp.
MQLVEKHIISRQHKFWKECDYLALQSKHLYNCANYVQRQYFFETKKYYNSIDIYHQTKNLESYRYLPTKVSKQIVRRVSEAWKGWLAALKDWSKHPEKYQGMPRMPGYKHKERGRNVVIYPIDAISKPALTKGIVKLSQTNIEFSTNANSVDQVRIVPKLDHYVIEIIYTVAEPSKSNGEYVAGVDLGLNNLMAITSNHPGVRPLLINGRPLKSINQFFNKQVAKAQSIEAWRQIKELNSKRDRRIDNYLHTSTRRVIDWCQLNDIGQLVIGNNQRWKQDINIGKKNNQDFTKIPHAKLINLLTYKAQLAGIEVTLTEESYTSKASALDGDTLPTFNSKSDIKPVFSGKRVKRGLYKTSTGRTINADTNGSMNIARKVIPNFMDGIVGLPFIPVVLGLWIKITNGFV

SEQ ID NO: 48942 - protein, 425 aa, unknown
  TnpB Polypeptide
MNKTETTIVTSCILYNDVNKDLYEYFEEVTPLFAFLVRRTIHHLRHKLNGETETKYRTRLKNDYNVTNRFAKAVLKTAKNLLKLSKTAGDYLYSTYDKKIKSVSTKIIKTKVALNNPKTAKGRIKNLKTRLFWLEMRKNKLIQLKNNGSKPMLTLGTKKLLKSDKLKFLEKRDNQIVYIGDKNEYLGNQQFQISYDKKYNKFTYKLRLENEYIKDSKYISGRFVLKDKFAKKEILKTVNNPKSSPLSFRLIKKDNVLYLQIMYRVVAELNTRSSNGVLGVDFNKGFITISEIDERGKLLNHDRINYIHKGKVGVTKNSMHHLVRDLVDLAVKSGKDIVVEDLKSLNKNKREKTERKHYNRMINTLKFGRFRDLLQMKCDKCGVTLVTVNPYNTSKIAKEKYCYDMKLNIHSGASYVIARRFYNLD

SEQ ID NO: 48943 - protein, 497 aa, unknown
  TnpB Polypeptide
MNHTDKFRLFPTPAQEKVLNAIFTIYNHAKRKGYTLLVKGEANIQRQLKAFCGNNSYVNTILIENETKLKQQETWLGKQEAYLGSKVDVIREKIIAVKSLDGSDRRLRGLYARLSSLQHKKSSLTFKPLTFGSKRLFRDRLLQKISRQEFRIRRDASFCCVGKRQVINANLKVLPSKELRIRIFNTRKGRKWLNIPFSVNGKQENWFRAILGLELYTVTVKRMFIKKELRYYMHVSYEVPEPAIKFGFETGGIGLDFNYNHLDLTNIDRHGKLVSYLQIPLRNLYSYRKTQRSNYISFKLDKVLNYCMNKRKGIVLEDLSFKQSFSYNKNLNRKLAIFQTTALDLLKRKCIKKGVAYRKVFPGYTSQIAKYKYSRLHNLSIHILASYVIARRGLRLQEDLPPIYQWLLSQVGDLIKPRLKKSSPYYRWGRVHDLFKQSGITSFKTSKILQKKVLMQHVLNPATGVQPDNLRAGLSPTGQIEDYHTFWNLINNEELYK

SEQ ID NO: 48944 - protein, 408 aa, Cyanobacteria sp.
MLKAVKVRLYPTENQKQHLAQAFGCVRWVWNQSLATMSQTYKETGKGVSAFTLKKQIPIWKVEHEWLKECYSQCLQSSVLNLSQAFINFFDGRVAYPTFKNRNGRQSLQYPANVKILSDTEIKFPGNLGTVKAKIHRAVNNGKLKTVTVSKMPDGRYYGSLLIDDGVATPEPSAEGKAIGIDLGLIDFVVTSDGSKYRNPKHLKKHERNLKRKQRKLSRKKDKTTNKRRKAKFAVAKVHSKISRVREDFLHKLSRKTVNENQVIVVENLAVKNMVKNHNLAKAISDAGWGMFCTMLQDKAEPEGKIYLEIDRFFPSSHLCSNTLLPVPKMDLSVRAFACPHCGQHHDRDVNAAINIRNEGLRILALGTSATALGGKVRPKRYGRKSTTAEALPIEEGSPCCTASVSVG

SEQ ID NO: 48945 - protein, 349 aa, unknown
  TnpB Polypeptide
MVLDKNWKSFFEAVKAYKKDSSKFTGCPKLPKYKDKVKGRNVLVYTIQAISSKQLKNGIIKLSGTELSVKTKVNPEQIRLVRLVPKCDSYVIEVIYNKSESTASSSNFVASIDLGLNNLAALTSNQPGFIPLLINGRPLKSINQFYNKRSSRLQSQLKGSRKTSSRIQRLTRCRHQKIDNYLHHTSRMIVELLTTHQIGTLVIGKNTQWKTEIDLGKRTNQNFVSIPHSRLIEMLEYKARLAGIKVIVQEESYTSKSSFLNLDPIPVYGHTGASNVIFSGRRIKRGLYKTSVGRLINSDVNGSYNILRKAIPNAFSNGVESCVVQPVVNPLKVKAKGEGLNASHVMRNK

SEQ ID NO: 48946 - protein, 264 aa, Frankia sp.
VRFRVSRPVPGFRSYRVARDRAGRWHVAFAVAPEPIEAAGTGEVVGVDRGVAVSAALSTGELLSCPGLRASEAARLVRLQRRLARARRGSNRRARLRSQIARVKAREADRRKDWAEKTSTDLARRFDLIRVEDLNIRGMTRSARGTIVEPGRKVRQKSGLNRAILAGGWGLLVQRLEQKAPGRVEKVRAAYTSQRCSVRGHAAAESRESQARFRCVACASQGNADVNAARNIAAGRAVTARGGTALAVPVNREPQHRAPPLVDV

SEQ ID NO: 48947 - protein, 417 aa, Haloprofundus sp.
MEVKRTIPVKLDVPDERRDDLHQTIDQFNHACNYTVEHGRNNDGYLILNKSKIHDKVYYDLRDETDLPANLCVRAYSKAVESMKSTVAEWKKGNSRPLPRFGESSAVYDKRTLTIKDRSATLSTINGRVAVEYVLGDYQRSYLDDDDYEKRMGTLHYREDDDSFYLHIVLLKEVEERGGDRVMGVDLNLKNVAVTSTGRFFDGGELLWGQNHYFRVRRSLQDKGTRSAKQALARLSGRENRFVLDRLHTISRRLVEEARTHDCSYIAVENLTHIRERMWNGNDQTRRQMHQWAFRELQEILAYKASEYGIRVEQISPAFTSQTCSRCGHQSSTNRDSETGWFECNECGQEYDGDYNASKNIGLKLVTLPEGKRPSGLGDGHLALKNGTLNPNGDYTAYDRASSEGESHVQAHDFSRG

SEQ ID NO: 48948 - protein, 414 aa, Haloprofundus sp.
MSMEENSATRTVPIKLDVAENDADLLHQTLNHFLDAANYVVNVAWKPDWKITSKRELHNLTYSNVREDSPLPANLVQAARNRAAEAVNGCVERWKEGKKASKPRFTSRFASYDARTVTVNDNHATLATIDGRVAAKFVLPDESRDTPHSAYLFNDDYDVKGATLHYDSVEDCFYLHVRTKPCVENDNADKGDTKHVSVLGVDLGITNLAVTSTGTFWSGSELTHWHREYEKRRGSLQQTGTRWAHINVQRVGRKQTGRFEQFLHTVSSQLVEEALKNKCTHIVFEQLRGIRERLPHAKAVQKWAFYRLFENVVYKAESEGLEVEQINPAYTSQRCSKCGFTHEDNRPKTNGQDEFVCLKCGYDVHADYNAAKNIGLKYLRDRQKSDRGGAPVGVRLNSGVMNVNGEYSPTVLSS

SEQ ID NO: 48949 - protein, 427 aa, Haloprofundus sp.
MHYNYKYRLDPPGALTETLLHHVDTCRQLYNHVLSKLNESEDIPARYKVQGTLPKLKTWWDDLNDVHSKVLQMVVKRVYDNLSRLKRQKESGRTVGRLKWKCPREYRSLTYNQSGFKLKNTSGRPVLWLSKIGEIPIILHRDIPENSTIKQVTVKQEPTGEWFATFGIDVDENTPQKPENLERVVGIDVGILKYVHDSDGTAVESPDFSDERERLERAQRNLSRKEHGSNNWEEQRKTVARRHADLKRKRRDFLHKLSNYYAREHDLVAVEKLDAKGLVELPGNSRNRTGASWGTFLRMLEYKCEREGTHFVAVDPRGTTKECASCGTETDKPLWVREHSCPSCGFEADRDANASWNILSRGLEDIGAERSESTPVETALPTGTTSVPAKRVMEAGSPITRSQGDLVSSQKAELSDDTLKCEPSGER

SEQ ID NO: 48950 - protein, 443 aa, unknown
  TnpB Polypeptide
MNISHQYKLLPTHAQKIQMSRWLDMLRHQYNFLLADRFDWWEQNRCDINACPLICHLPELRENPEYYSQKRSLVPLKVNRPWYKEIYSQVLQDLVMRVKLAFDRFIKGDGNGKHSGRPRFRSKGRYRSFTYSQMEDKDLQGNRINLPKIGLVKLVLHRSIPEGFKIKTAIISKRPDGWYVTLSLEDTSVPELAVDMKPTVDNSIGIDVGLEKFLADSEGEFEEIPQYFRKSEEKLGLLQQKVSTKKKGSRAKKLLNRKVARLHQKVARLRLQFHFETAKKILNKANVVFVEDLTVKNMSRRCKPKQDETGRFLPNGQSAKAGLNKNIADAGWAQFIDILTFKVRNALPLSCRRLPPAGSAAERAGLKVVKVNPKGTSQHCSICLNEVPKTLKDRWHSCPKCGLEVDRDTNSAVLIKKVGLGVVLTIKRLTRKGREARAMPLVG

SEQ ID NO: 48951 - protein, 153 aa, unknown
  TnpB Polypeptide
MTCYDSGNGRTFILGRKYLSLERYFHKEIARVQSVWYAQQSEREIKYPKSSKHIRRLYRKKQNAVKDYLHKTTRWIAEYCRKEDIRCVVVGDIRNIRKEKDMGHKTNQKFHGLPYNRLYIMLEYKLKLYGIQLIKQGESYTSQCSPLSPEVIK

SEQ ID NO: 48952 - protein, 436 aa, unknown
  TnpB Polypeptide
MKGGLFMHTMSQMPYHIGFKVKLYPSDYQKHLIAVNDGAKRAVYNHLVACGNERYRLAKAVDSILLSHPAAYVPMYLERIDYLQSVSFDVKGIQNALPFLYGKEIDSLAVANAVKNYRFAWKNQKEQHRGVPMFKKKSYEQSYQTNAQYNTRKGITTCNVRFLDKDHVTLPKLGRIRIGASPKIIGSLLHRTADTRIGTITIQRDAVGEYWASFAIASDEPFHQKLEKTGSMHGIDLNLIDLINDSDGGIRENKRFYASSQHKLAKAQHKLSRRAEHARAEGRKLQGSVNYQTQRKKVAYLHRKIERQRTDYLHVLSKREVENQDFIAAEDLKVSNMKKNHHLAKAVSDASWRTFLTMLQYKGAFYGKTVVLIPPQYTTQTCSHCGYIMKGEEHLTLSDREWDCPNCHTHHDRDRNAAQNILNKGLQKAKDAGLCL

SEQ ID NO: 48953 - protein, 385 aa, unknown
  TnpB Polypeptide
MIRKAYKYRIYPNTEQKVFFAKCFGCVRFFYNKSLSDMNDIYKSTDKFKNITPASYKEDYSFLKEVDSLALSNAQLNRNIAFKDFIKQNYKNNKDKPNFKSKRNDQSYTTNMVKGNIKISSNNRYISIPKCPRIRIKMHRTFIGTIKSITVSRTTDNKYYISLLVESEIKPLKESNKIVGLDLGLKSLIVDSNGHKYKNHKYLTRLQKKLAKEQRKLSKMMKGSSNRNKQRIKVAKLHKHIQNQRNDYLHKLSKSIIDENQIICIESLSVKDMMNDSKLARNISDVSWSRLVSLLIYKASWYGRKVIKVPSTYPSSQLCHVCGYKNSITKSLNIRKWTCPECGTIHDRDINAAKNILSKGIEILTKDGTHPDRQYEVTLTYSQVS

SEQ ID NO: 48954 - protein, 333 aa, unknown
  TnpB Polypeptide
MLKTFRYRLYPTSAQATAMQHTLNECRWLYNHLLEERKTAWDARGETVGYYDQNGAIPPLKAERVTLKDVHSQVLQDVAVRLDLAFKAFFRRVKAGQEPGYPRFRGWGHYDSFCYPQKGYRLDGARVFLSKIGHVRAVIHRPLEGKAKTCCVRRTATGTWFATFACEVEDAPLPATDSAIGIDVGLASFATMSDGLEIANPRFFRRDEQALATAQRRLSTEPRPETGQRATPERRRRRRVVARIHERIANRRKDFAHQQSRRSSTPTASSPSKTSPSTAWSTITASPRPFRTPPGPCSSPACRTRLQAPVGSSPPSIPPIPRKRVRAAAIARN

SEQ ID NO: 48955 - protein, 416 aa, Salinimicrobium sp.
MAKIRKAYRFQLKTNREIESLLVRICGSARFVWNKCLAMNLDRLEINQPILWYNELAFWMTLWKRSEEYGFLKECPSQVLQQKLMDLDRAFRDAFDRNQPLKRLPVFKKKGRGDGIRFPQGIQFDNRRIFLPKIGWIGFYKSRPIRGKVKNVTVSSRAGRWYVSVQVEKEITIGPHPSRSEIGIDAGIACFAAFSDGTMVNGVHSFRRHQERLAREQRKLAHKKRGSNNWKKQKQRISRLHHHISNVRSDFLHKLSTHISETQARVYVEKLQVKNMSASARGSIEEPGRCVRAKSGLNRSILDQGWFEFRRQLGYKLFWKGGELVKVDFRNTSQRCSVCGYTARENRLVQALFRCVACGHEENADVNAAKNILTVGQTGLACEANLRGGRQQNPFRARASKPMGNRKEVPSLVSNN

SEQ ID NO: 48956 - protein, 508 aa, Streptomyces sp.
MRKFTVRPGFTVLAHKLALDPNATATGRLQSHAGGARAAYNWAVAHVTSVWWQRKAEQSYGIGEDQLTPWRSWSLPELRKAFNAAIHTDPRFASWWQANSKEAYNTGLAHACAAFDNYAKSRSGQRKGPRMGIPRFKVMRTARLSCRFTTGAIRLEPDGRHLTLPRIGTVRLHEDASHLRALADAGRLRILSATVRRERGRWFAALQVEQRHELVKVARPDATVGIDLGITTLAVLADSDGNRGQVPNLRHLEEAQQLRRASRVVSRRQGPDPRTGQQPSKRWEKANRARNKIHHRVANLREDTLHKLTTRLAAEYGTIVVEDLNVAGMGQGRRLSRRIADAAFGEIRRQLTYKTRRRGTRLIVADRWFPSSKTCSRCGVARAKLPLSVRVFVCDACGLVLDRDDNAARNLAALAAHTTRSTRSRTGTGVAGDLDPPVVGSKPRGADRKTRITRPRLMAGTGRAGGTIPGPRPGQKRETVNRTPERTPCPGETVTDHSGRNAGIAETS

SEQ ID NO: 48957 - protein, 287 aa, Okeania sp.
MIIYEFKVKAKEVQYHAIDEAIRTSQFIQNKCLRYWIDNKGVSKYDLNKYCKVLAQELKFASELNSMARQSAAERAWSAISRFYDNCKKKVKGKRGYPKFKKYCRSVEYKTSGWNLSLNRKAITFSDKKGIGKLKLKGTYDLNYYQINQIKRVRLVRRADGYYCQFAIKVDIQIDTEPTRKAVGLDVGIKYFLADSNGNTLENPMFYRQSEKKLNRANRQKSKKYKKGATPQSKNYYKARCRYAKKHLKVSRQRKEYCKGVAYSVIHSNDVVAYVDAELRAEGRFKR

SEQ ID NO: 48958 - protein, 390 aa, unknown
  TnpB Polypeptide
MLKAFKYRLYPTQAQEVLLSKHFGACRFVYNLALETKQAAYSSARVNLSRYDLQVQMKDLKQECEWLNEINAQSLQSELMHLDAAYSKFFKGLAAFPNFKNRNGRQSFQCPQSSKIKDGKLKLIKFPEGIKIVLSRLFEGEMRTVTISRTPTNKYFASILIQDNKPLPKTKKIKEATTIGIDLGLKTFATLSDGTEYENPKHLKKALKRLKMLQKRASKKVKGSANRKKANLRVALAHEKVTNQRKDFLHKFSDAITKQYDTICVENLNIKGIVQNHKLAQAVSDVGWSMGLDFIKYKAEWRGKTYHEIGRWDASSKLHNGCGYLNKELTLADRQWLCPKCGELVDRDINAALNIKQFGLIYLGVERPDFKPAEFRTLVETMKQEFPVKD

SEQ ID NO: 48959 - protein, 500 aa, Pleurocapsa sp.
MQTAYQFKLYPSCVQSDRLVEWQNKIRSLLNVCLADRIDTYQDSLAQGEFCSLRQRGIATPLACSVNKSASLGEYWKENKPSRRRGDGAYKPPNSFGGQRLDKTKPFNPRRSAVEIHSSFATLWRQTKPWYADVSSDVLQQALRHQDTAFGRFFAGQSKFPKFKSSLEIGIEFKPGTVRIENNRIKFPLLGWIKFAKSREIGDNWEIRTCTITFDVDCWMVSVLLRDNSIPDYRKKETELKTVIGCDVGIKKIVALSNKEIEPNPLIAKQLERRLAIRQRNLSRKKKGGSNRKKAAISVAKVHRDIRRHRQDFQWKLGKQIAKSADVIVFEDLNIQGMKRRCKPKKCELTGKYLRNNQKAKSQLNKAISDAAWYSLRKKTEHQAAKLGNWLITVNPRGSSQECHKCHFVSSTNRDKEKFVCENCGHHEDADTQAASVLAARGVQKLGIDTLTVVSREVTTKSALTDSPLRKLSPALASESGNPAKYVQLELFSSWEWKTG

SEQ ID NO: 48960 - protein, 389 aa, unknown
  TnpB Polypeptide
MSYLGFKYKILPTAEQVELLEQHFGSVRFIYNYFLDLKSKTYEESKVNLSCNELSKYLTNLKKQDEYSWLKLVNSQSLKESLRNLDRAYKNFFEGRASFPKFKSKRAPYSRFNVPQKVRLEGDTLFILKFREGIKVILHRPIKGIIKSATIERNPLGEFFVSILCEIDSPTLVKPEIKEDTTLGLDLGISSYLTTSKGEKIENPKYLSKSQSKLSYTQRRYSKTKGRKAKRKLNKIHTKVKNQRLDFLHKLSNKLLSDSENQTICIEKLNIEGMLKDNPLAKHISDAGWAMFINMLIYKAKLRGKTILQVDTFYPSSKLCHKCNYKNNNLKLNQRAWQCPNCKSNLDRDLNAALNIKNKALEEHRVKIKDSCQVKLEAETLGASGLNQV

SEQ ID NO: 48961 - protein, 364 aa, unknown
  TnpB Polypeptide
MPSYLRRSAIQHALGTVSSYETRMELWEKEGKRAGKPRLVYENHAMPVFYRGVMYREGEAGKDEAYLKLYDGHDWKWFPVRLLHTDMEYLRKNWYGEKASAPTLEKKHRKYFLRFSYTKEVTLTKTPVKNQVVCSVDLGINTDAVCTIMRPDGTVLGRKFINFPSEKDRMYRTLGRIRKFQREHGPAQAGGRWAYTKRLNTELGRKIAGAVAAYAEENHADVIVFEYLEMQGKISGKNKQKLHLWRKREIQKRCGHQAHRKGIRVSRVCAWNTSRLAYDGSGQVLRDPKNHSLCTFQTGKRYNCDLSAAYNIGARYFIRELLKPLPATERSLLEAKVPSVKRRTSCTYADLRELRLQMEVLKAA

SEQ ID NO: 48962 - protein, 138 aa, Nocardia sp.
MLANRHLSRAISDAGWGEFARLVSYKQQWRGGQVLFADRWFPSSRMCSRCGTRNRILTLADRVFACDCGHRLDRDLNAAINLAAWGEKHHQTQAREPEARAPVINVRRRDGAGPHSGVGETVPDDAETDTLTTSVAVV

SEQ ID NO: 48963 - protein, 368 aa, Chloroflexi sp.
MIRSHRIRLNPTPEQATCFAHAAGTRRFVFNWGLEEWKRQYEAGEKPSVLALKKQFNAIKSEQFPWVYAVTKCAVEGAFMDLAAAFKNFFEGRKAGRKVGFPKFKAKKRSREGFYLSNDKFDVSGHWLKVPKLGLVNMAEPLRFHGKILSAHITRTADWWFVSIQVEMPDLPKQVNDQAIGIDLGINRLATLSDGGVFENQKPLRSLLRQVRRLSQSLSRKKMGSRNREKARRKLARLHYRIACIRDDMLHKATTALAQQYGFIGMESLHVKGMMQNHALAQALGDAAFGRFTTFLTTKVAARGGTVQQVGRFSPSSKTCSCCGHVRDELPLSERTFVCPDCGFTLDRDWNAAINILNEALRLSASGL

SEQ ID NO: 48964 - protein, 417 aa, Helicobacter sp.
MHPLTHKIELQPNNKVQTHFKKAMGCARLAYNWGLAKWKENYQKGIKSNHFALKKEFNALKKEKFPFVYEVTKYATARPFTHLNLAFQKFFKDLKLGKVSYPKFKKKREYQGSFYIGGDQIKVIQGGTKDYLKIPNLPKIKMTEKLRLRGKINGATITQRGSKFFVSIQTDITQEEFNRTHKPIVNNHILGIDTGIKAFVSLSNGLQVFAPKPLNRLTRALKRLARQLDKKQHPKTKGDSTKKSSNYLIATLCLNRLHTRIANIRNDFLRKLSTALVRHAKILCLESLNVKNMLKNSRLAKALSDVSICAFNTLLEYKAKYYGREIKRADVFYPSSKTCSSCGNVKKDLMLSDRVYQCGACGVVIDRDFNASVNLVKHLVSGVPTEFTPADMTALLDDCQSNGLVTSMVETRTQHEP

SEQ ID NO: 48965 - protein, 421 aa, Methanolobus sp.
MKKGFKYRIYPNKEQRTLLEQHFGSVRFIYNRSLFIKNTMYSKFKINVSEIDLNNNLISLKEFHPWLKDLNSQSLQQANRNLLTGFKNFFEGNGSYPTRKNKRDNDFSFQVPQNYQINLTTSKIYLPKIGWIKIVLHRDFVDKEFIKNKLVIKEVNDELIIDQKLNKEFDILKTLTVSRTSAGRYHVSILIDDHVPEPTPVEFDESTTVGIDVGIKSFAILSSGEVIDNPRFLKKSLNKLKKLQRAVSKKKVGSKNRKKAVAKVAKQHQLVANQRNDFQHKVSIKIISESQAICLEDLNVSGMIKNHKLAQAISDVGWSEFIRKLTYKAEWYGKTILRIGRFDASSKLCNVCGYKKDDLTLDIREWECPSCKTFHYRDVNAAINIKNIALNNLNTVGTTERACGLTGIGQRNEARSYSVFS

SEQ ID NO: 48966 - protein, 323 aa, Microcystis sp.
MNAPATFFDKILTFAGDEIRPEYKLTGYKLSDDRRKIKFTDGFKAGEFDLWCNQKTLVYYSEQQIRRVRVVRRADGYYCQFLIDVERQEYHKPTGQITGIDLGLKEFYTDAQGNTVENPRYLRKSEKRLKKAQRRLSKRFCKGNKQSKNYHKQRIKVARLHLKVSRQRKDKAIKDALALVQSNDLVVYEALKVRNLVKNRKLAKSISDASWYQFTEWFEFFAKIYRIVCVAVPPHFTSQDCSVCETRVQKTLSTRTHQCPNCKTVLDRDHNAAINILKKGLKYLGNHLNGTVGQTETDPTPPPPLPPRHRGGRVRPLGFQWRH

SEQ ID NO: 48967 - protein, 241 aa, Microcystis sp.
IDVERQEYHKPTGQITGIDLGLKEFYTDAQGNTVENPRYLRKSEKRLKKAQRRLSKRFCKGNKQSKNYHKQRIKVARLHLKVSRQRKDKAIKDALALVQSNDLVVYEALKVRNLVKNRKLAKSISDASWYQFTEWFEFFAKIYRIVCVAVPPHFTSQDCSVCETRVQKTLSTRTHQCPNCKTVLDRDHNAAINILKKGLKYLGNHLNGTVGQTETDPTPPPPLPPRHRGGRVRPLGFQWRH

SEQ ID NO: 48968 - protein, 366 aa, unknown
  TnpB Polypeptide
MEKSYKFRIYPNEKQRVLIAKTFGCSRFVYNYYLDKKIKLYEESKQSMSFYACSADLTLLKKEIEWLKEVDKWSLQNSLRSLDEAYQKFFKEHLGYPKFKSKHNNRKSYRTTFNNNNIEFKDKYIKLPKLGLVKFRDKQIPQGRILNATISQAPSGRYYCSICCTDVVIYGLPKTGSVIGIDLGLKDFLITSNGDKVSNPKYLSKSLNKLAKLQRALSRKPNESNRRNKARIKVARQYEKITNQRQNFLKKLSTKLIRENDIIALEDLQVENMVKNHKLARSISDVSWGEFRRQLEYKAKWYDKQVVVIDKFFPSSQTCNCCGYINEETKDLKVREWICPQCGKTHDRDINAAKNILNEGLRLLNC

SEQ ID NO: 48969 - protein, 390 aa, unknown
  TnpB Polypeptide
MRKSFRFKLFQNHRKNNKLRRELWVFCQIYNHSLALIKRHYKIFGKNPTKNNLQKHLKRLMDRGLHPEWKELGYSQGIQEVTDRIYKSYDAFFKWCKIKKGVRKSPPKFKPFRKYKSFTLKQAGWKLEEENGRILIGKTWFRYNKSRNIQGVPKTLNIKRDPVGDWFITISCDLGDDFIPEKIAPRTGQSAGFDFGLKCFLISNDGEEHASGTFLKANLNELRRRSSKFSKKIKGSKNRKKAGKSLARLHRKIADKRLDSHFKLALDLIRTYDNLFFEDLNLNGMKKLWGRKVSDHAFATFMKIIEFKATEHKKTIHKVDRFYPSSKTCSNPKCGHVKKELTLKERVFVCDKCGLKIPRDLNASINIHREGASSLGLGGVSPDLGLVFAV

SEQ ID NO: 48970 - protein, 427 aa, unknown
  TnpB Polypeptide
MWIEKGFTDNWLQPTVAQERLMRQFAGHKRFVWNRALSIEQARYRRNEKMLGCTCMMRELTSWRNNPDPHSSFLREAPVHALQCVLWELYESYQRFFKKKQVHPPQFKKKAKSRISFTESDPASFEIDEANKPVRLPKLGWMKCRFTRRIKGEHNSVTVRWNALRWILSVQCKVEIPNPAHPNKTIVAGVFGVVRRVTFSDGVVVPPIDVSREEQRKAFYQQRLKNKTKFGRNWKKVQAKIATVDSRITNLRKDQTHKFTSEYSKSHAVIVLGDLNIKKMSASAAGTVDEPGKNVRQKSRLNRSILRQGWGELGRQLEYKASWRGGSVEYQSEDHSSQDCPACLHRSSHNRNTQSEFVCVECGFAANADDTAAQNQLQRFLSSDKGVALLASGYRASVNSLWSGRSWDSAMKQEPIEEVAQNAQFSA

SEQ ID NO: 48971 - protein, 411 aa, Richelia sp.
MLVFESKLEGTQPQYEALDEAIRTARFVRNSCLKYWQENQGIGRYDLSKYCAVLANCPDFPWAKKLNSMARQASAERAWSAIARFYDNCKKKVKGKKGYPKFKKHQTQASVEYKTSGWKLSEDRRYLTFTDGFEAGTFKLWGSRDLHFYQLKQIKRIRVVRRADGYYAQFCINTERLEKREPTGKTIGLDVGLNHFYTDSNGQNVENPRFLRKSERALKRAHKRLSRTKKGSRNRIKAREKLGRKHLRVSRQRKDFAVKTARCVVQSNDLVAYEDLKVRNMVKNHHLAKSIYDASWSLFRQWVEYFGKVFGVVTVAVPPHYTSQNCSNCGQKVQKILSTRTHKCPHCGYIASRDENAARNIRERGLATAGHAGSWEDNSRNVSGQSDLCLGGETPLSKPTGRKRKSKGVSL

SEQ ID NO: 48972 - protein, 312 aa, Rubrobacter sp.
MQSFKTELDLNNQQKTRAAQHAGTSRHACNWGLALCKQLLTYNKENPTDKIKFPTAIDLHKLLVASVKNENPWYYESSKCAPQEALRNLTKAFKRMHRVKKSGFPRFKKKNVSDSFYLEGSIRISGNKIKLPIIGWVKCHEQLPSVMPKNVTISKRAGRWFIAFKNEKTPVNNQTLGEPIGVDIGINTLATCSNGFVANNPKAYRKTKRKLAKLQKELCRRTKGGSNREKTKLFLARCHYRISSIRSDTLHKLTTHLAKNYSEIWVEDLNISGMLKNHKLASAISDCGFYEFKRQLEYKTSWYGSKLCLASR

SEQ ID NO: 48973 - protein, 379 aa, Kandleria sp.
MEKMTVTAKIQISVNADSKALLDETMSVYSDACNYVSDYVFRTHDLKQFSLNKILYSTLREKFGLKSQMAQSVFKTVIARYKTILENQNEWIQPSFKKPQYDLVWNRDYSLTQNCFSVNTLNGRVKLPYFSEGMSKYFNHNIYKFGTAKLVNKHGKYFLHIPVTYDIEESNISDICNVVGIDRGINFVVATYDSKHKSGFVSGKAIKQKRASYSKLRKELQMRQTPSSRRRLKAIGQRENRWMQDVNHQVSKALVESNPKHTLFVLEDLSGVRNATERVRTKDRYVSVSWSFYDLEQKLIYKAKQNQSTVIKVDPRYTSQCCPVCGHIEKGNRNKKIHLFTCKNCGYKSNDDRIGAMNLYRMGINYLEDSQVPDTVTAE

SEQ ID NO: 48974 - protein, 269 aa, unknown
  TnpB Polypeptide
MGIVHERDTDRVRLSLPKALKKYMEETYQIHENFLYLENKIFRGMDQIKQLRIYPPEKGNCKIIVVYEIPDQEELPQNGHELSIDLGLHNLMTCYDSKNGKTFILGRKYLGLERYFHKEIARVQAQWYGQQSGKGVKHPTTSKHIRKLYKRKHDSVTDYLHKVTRYLAEYCREQGITCVIAGDIRNIRREKDLGHRTNQKFHSLPYNRIYIMLEYKLKRYGIRFIKQEEVIPASAVRCHRKWRKDMQSRPNGKREGCTEMETEPITQMP

SEQ ID NO: 48975 - protein, 499 aa, unknown
  TnpB Polypeptide
MRPNQRKPKAPRRNTKGDARAVVAHAHVETNAGKLAMLDALLVTYGGYVQSCIETMVSLRITSVDVKDAEAMHGTFGPSTMTSQLQKCARQQAVGIMQSWANGLYGRTLSDYITAHKAEYTDDELRQLRTIGKYMIREPSGGKNPIEQRLVDLYWSWVWDADVSGKRPALGNSGMMLGEMCCEYGTAEEASGLGGWWIAVSTLTPYKRVCIPLAPHPKLDGKTKLAKTVLVRKRHDGRWTVQFTEYVAPIAEPSPDAPRVGVDVGKRELLVTSDDRHYGTAFSPAFDRLWNEIKETRRNRHRQGLPKNSKRLASMERRLSGMVKTNVGRAVNEVIRDYPGHVFVLEDLHLCGVRGSKRFAYTEAVRSFKRKVPTISCNPAYTSQECPSCHYVSRLNRRGGQFRCIGCGRISHADCVGGIGLAGRSSDKQITLDTSVDEVRAILRTRYLAARSGIPLRYDGSSAGGRVSRSATVAPDAHSRDRPKGPRGKASNSPVVKSP

SEQ ID NO: 48976 - protein, 386 aa, unknown
  TnpB Polypeptide
MQQPTVRKTFKYKLQPTAEQEGTLAFVVRRCRELYNAGLQERRDAWQKCGVSITAGSQSAQLPEIKDVRPEYRDIHSQVLQDVLTRLDQAFQAFFRRVKTGETPGYPRFHGANRYTSFTYKQFGNGASLDNGFLVLSKIGRLAVRWSRPLEGTPKTVTITREADGWYASFSCADVPIQPLPLTGDETGIDLGLESFATLADGSQIANPRIFRVAEMALKRAQRRVSRRKRGSHRRRKAVQLLARAHQTVQRTRRDFHHKTAMALVRRYDTIYHEDLQPANMVKNHHLAKSISDAGWSGFLSILSFKAAYAGKTVIGVPAAYTSQACSGCGVIVQKGLSVRWHECPDCGTSLHRDHNAALNILRLGQRSRAGQALQALTQPVGAYVA

SEQ ID NO: 48977 - protein, 471 aa, Mycobacterium sp.
  misc_feature (329)..(424): Xaa can be any naturally occurring amino acid
MARLKVPEGWCVQAFRFTLNPTQTQAASLARHFGARRKAFNWTVTALKADIKAWRADGTESAKPSLRVLRKRWNTVKDQVCVNAQTGQVWWPECSKEAYADGIAGAVDAYWNWQSCRAGKRAGKTVGVPRFKKKGRDADRVCFTTGAMRVEPDRRHLTLPVIGTIRTYENTRRVERLIAKGRARVLAITVRRNGTRLDASVRVLVQRPQQRRVALPDSRVGVDVGVRRLATVADAEGTVLEQVPNPRPLDAALRGLRRVSRARSRCTKGSRRYCERTTELSRLHRRVNDVRTHHLHVLTTRLAKTHGRIVVEGLDAAGMLRQKGLPGAXXXXXXXXXXXXXXXXXXXXXXXXXXXXXXXXXXXXXXXXXXXXXXXXXXXXXXXXXXXXXXXXXXXXXXXXXXXXXXXXXXXXXXXXXXXXXXXXASPPYNPHRERCRSSIRARLRALRAVVVREHRRYECDHGTHSPTPHA

SEQ ID NO: 48978 - protein, 403 aa, unknown
  TnpB Polypeptide
MVLRKVFRFRMKPNTRQQQALDRNAGCRRFIWNWALARKQRYYRENGKSLPTSVLKAELPILKRTPGMEWLAAADSQSLQETLRDLDRAFSNFFENRAGFPRFKSRKVDQARFRISQRVTIADGRISVPKIGSVGIRQSQLVGGDTKSATFKRDTCGNWDVTLVTEFTMPDVALAAVDPTRVIGVDLGLKDFAVLSNGERIPAPKFFRKRERKLRRAQRVLNRREKGSARRLKAKRTVSLVQAKTANQRKDFLHKLTTDLVAKYEGICIEDLSVKGLARTKLAKSIHDASFGEFRRQLEYKALWNRRHVAVIDRWYPSSKTCHECGWINEALTLSDREWDCLGCGAHLDRDLNAALNIKSEGLKLLAVGHGRVRTSRVKAHGQNKRTWTQRQTPAAGAIGVEA

SEQ ID NO: 48979 - protein, 403 aa, unknown; identical to SEQ ID NO: 48978
  TnpB Polypeptide

SEQ ID NO: 48980 - protein, 318 aa, unknown
  TnpB Polypeptide
LPAQLVCAARVKATEAVKSALDRQKKGRKTGVPASHVCPIRYDQRSSWVKWDTMICSLATIAGRVELPFRVPPYAEKYIGGKVCSADLCYRKGRFTLHITLSIPEPAPASSQEVMGVDLGLNRPAVTSTKQFLGERRWKEQERRIFRLRRQLQAKGTRSAKRHLRKLSGKLLRQRRDHDHVLSKRIVQHAPAGSTIVIENLTAIRSRVRMKKQTDTQRRLHSWSFAQFQAFLSYKAQERGITVVKIDPRHTSQTCSRCGYQHRSNRRSQSLFLCRQCGYCLNADLNAAQNIRQKHLASIGTPFAGGLPSDRLSFQSSD

SEQ ID NO: 48981 - protein, 384 aa, Methanogenium sp.
MDKTYILSGSILTGMLKACRYRIYPNKEQRELFFKHFGACRFVYNWALENKLKSYESDGKSISGFSLNKMLPGLKDEHVWLKDVYSQSLQGATLNLENAFTHFFREKKGFPKFKSRKNPVQSFSVPQHYVVDFDAHKIRLPKIGWIKTKLHRRYEGAEKSATVSITPTGQFYINILVDDGLDYPEKQPFDEKTTVDIDVGIKDFAVLSSGKKINNPRHLKNSLLRMKALQRRLSRKQRGSNNREKSKLSVAKLHEKISNQRNDFQHKISFRLICENQAIALETLNVAGMLKNHRLAQHIADASWSSFVTKLEYKAQRQGKNILRIGRFEPSTRICSVCGHYNGGLTLADRDWVCPDCNTNHDRDVNAAINIKKFALDRQNLIGV

SEQ ID NO: 48982 - protein, 342 aa, unknown
  TnpB Polypeptide
MTISAIKTSAARYKSVKEQLFQKPYKYKDENGEWHYITKTLDWLYRPIAFRRPQADLVFNRDYSFVNNSVTGESKLSLNTLKKRIYVDYDLPDNFKEYFNGTWKFGTGKIVSLNGEWYFHIPMTKAADKTFNVDNTEHLIGIDRGLRFLVTTYDEEGKTGFVSGSDIMKKRDKFQAVRAELQSRGTKSAKRVLKRLAGRENRWMTDVNHQISKTLVRSYGENTLFVIEDLTEVSFSEENLKNRSADGRYGLRSWSFYQLEQFLIYKANEAGAKVIKVPANYTSQRCPACGRIHKENRNHDTHEYVCDVCGYRSNDDRIGAMNLFALGIEYVNGDVNPHFSKK

SEQ ID NO: 48983 - protein, 459 aa, unknown
  TnpB Polypeptide
MCSKKKSEVVRESVDKPKKKSDEDDPFVRVEQHIIKPSNPAYEMLAEFCHLSKNLYNQGNYLLRQQFFAYEKQSSYEQLDKILKAKTDFPDYRNMPTAQSAQQNLRLLVKDWKSFWEELKDWKKHPEKYKSRPKPPHFLRKDGQHLLVLTNQECKIRDGKIVFPKVFQGFTVEPQFVREYTNSPREIKSFQQVRFVPHGGFITLEIVYRIKEVPQRKPNGRYAGIDLGVNNFVTMAFSTEDTPLIVNGRIPKSINQFYNKRLASLREMSEHLNGRKVTRRIQRLIDKRNAKLKDYLHKTSRFVVNELVQLNIPTLIIGLNRDWKERTPFTAKENQHFVGLPFARLIEMIQYKAYEHGIAVVVTEESYTSGTSFLDGEPPTREFYNKKRRIHRGLFRSNDGTRVNADVNGALQIVKKVVPNAFANGIEGVVLRPIMVAPTRIACAGLAARPTDSPRRESA

SEQ ID NO: 48984 - protein, 385 aa, unknown
  TnpB Polypeptide
MKTYKFKLYQAKKNKHLHEQIDLAGRIWNHCIALHRRYHKLTGKSLSAYALMKHLTKLKKLPKYSDWNRVGSQAVQDIVQRIDRSYQLFFRNRLCVAEGKAGIKTAPPGFKKVKKYKSFTLKQTGWKLLDSNKIRIQGVIYKFSKSRNILGVIKTVTIKRDKLGQFWLYFVTEQETEQPAEVEARTGKSVGFDFGLKLFLKGSDEIEIESPLFFRQYLNDVRRAYRQLSRKVKASYNWRKARAHLNRVFQRIDNLRHDFFFKLAHKLTDKYNVIYFEDLNLKGMKALWGRKVSDLCFGEFLNVLQYVASTKGVVIHFIDRFYPSSKTCFDCGHIYHELSLKERQWVCENCGAVHDRDLNAARNIHRVGASTLGVSEVRPEQSGVR

SEQ ID NO: 48985 - protein, 385 aa, unknown; identical to SEQ ID NO: 48984
  TnpB Polypeptide

SEQ ID NO: 48986 - protein, 137 aa, Okeania sp.
LIVDGKHLKSVNQWYNKQIATIKENKPQGFWSKKLANITEKRNRQMRDAVNKAARLVINNCLENGIGRIVFGWNKGQKNAINIGAKNNQKFVQIPTAKLKERISQLCELYGIEFIQTEESYTSQASFLDDDFLPNRA

SEQ ID NO: 48987 - protein, 402 aa, Escherichia sp.
VKRLQAFKFQLRPGGQQECEMRRFAGACRFVFNRALARQNENHEAGNKYIPYGKMASWLVEWKNATETQWLKDSPSQPLQQSLKDLERAYKNFFQNRAAFPRFKKRGQNDVFRYPQGVKLDQENSRIFLPKLGWMRYRNSRQVTGVVKNVTVSQSCGKWYISIQTESEVSTPAHPSASMVGLDAGVAKLATLSDGTVFEPVNSFQKNQKTLARLQRQLSRKVKFSNNWQKQKRKIQRLHSCIANIRRDYLHKVTTTVSKNHAMIVIEDLKVSNMSKSAAGTVSQPGRNVRAKSGLNRSILDQGWYEMHRQLEYKQLWRGGQVLAVPPAYTSQRCAYCGHTAKENRLSQSKFRCQVCGYTANADVNGARNILAAGHAVLACGEMVQSGRPLKQEPTEMIQATA

SEQ ID NO: 48988 - protein, 546 aa, unknown
  TnpB Polypeptide
MQFIMSDRPIFTYQTRPVVDAAQAAVLDAYAALYGHAERSLFAEMQDGGTVNELKREFLPKFGITARQFNAIRIGLDGKVDSIKQRRPELIAEAQTRIKKAVKVIAKLATKIPGSNKLHQKKRRLAMMQARLASMQSDEENGQVRLCFGSKRLFHAQYALESNGFASHADWLLAWQTARSDQFFVLGSGDESAGNQSCQASVVQDNALDLQLRLPDALSEHGKYLSIKGVRFAYGHNSIVAALQSSQRISTTTKAGVAIQKRIGTALSYRFVRDVKGWRVFVSCESQAVDVTTNIDLGAVGVDVNADHLAVGVLDRFGNAVDVDRVDLHTYGKTTDQAKALIGEAVVKIVGLAQSLNKPLVIEKLNFAKKKAELETSDSKKARMLSSFACNQVSKGIKAAAFRSGVEVIEVNPAYTSVIGAVNFAQVKGVSVHQGAAIAIARRGLGLSERSAVAVGLVPVANGGHVTFELPARNRSKHVWSFWSKVRTNLKAAHVAHYRYGEHKKSPSPLTPAMRPSSAIWSSTAQFRGANRQQNGSADVLDDVPF

SEQ ID NO: 48989 - protein, 375 aa, unknown
  TnpB Polypeptide
MSLKKNEGKQNKAYKYRCYPSKLQKELINKTMGCARFIYNRMLSDRQFHYQQIGSDISLTPADYKEEHPWLCEVDSLALCNAQLNLNRAYKAFFEKKSAFPVFKKKGIHDSYTTNSVNNSIRITENGIKMPKLGIVKIKQHRPIGINETIKGATISKVAGKYFVSVLVECYDTPQLLNKNNISTDRVLGLDYSSAHLYIDSNGYRCDHNRYYKNSQKNLAKAQRRLSKKQLKSKNYQKQLLKVQRIHRKIANQRLDALHKISNQITNDYDVICFEDINLNAMKQCLKLGKNTSDNGFGILRTFVEYKAKNKGKYTVKVGKFFPSTKLCHCCGYKNKSITLSTREWTCPVCGTHHDRDYNAAMNIKKEGYRLLLQS

SEQ ID NO: 48990 - protein, 370 aa, unknown
  TnpB Polypeptide
MPMLTIKAQIHADPETERILRDAMFCATKVYNGLMWHLRLQQEKTGRVNVRRSNLNRILAALPRAKGYYSMSVQLTRDEVRQAWRSFFALRRNGRTAHNAPGFRPKSMLSPLKYVQSGFKVEGDRLTLSLGTGREDGVRSVTFRISHRPDVEYERVREVCITYDKLTGRLEARLVVEVRPCENHGKERVAVDLGETVLLAAVFADGTALLYSGRLIKAIRRYWQKVRSHVRPPSRERPRKSRRFCQIAHREHRQVEHLLHIVTSHFIRECVKRGVVEIAVGDLAGIRDRIDYGAQMNQRLHALPYRKIIDMIRYKAALVGIVVRNNVDEHRAQHSTAHPAPAMRAVRCQSSAVCIVACTVALAGGRRRRM

SEQ ID NO: 48991 - protein, 185 aa, Escherichia sp.
  misc_feature (185)..(185): Xaa can be any naturally occurring amino acid
LQQSLKELERAYKNFFRKRAAFPRFKKRGQNDAFRYPQGVKLDQENSRIFLPKLGWMRYLNSRQVTGVVKNVTVSQSCGKWYISIQTESEVSTPVHPSASMVGLDAGVAKLATLSDGTVFEPVNSFQKNQKKLARLQRQLSRKVKFSNNWQKQKRKIQRLHSCTANIRRDYLHKVTTTVSKNHAX

SEQ ID NO: 48992 - protein, 227 aa, Escherichia sp.
  misc_feature (21)..(24): Xaa can be any naturally occurring amino acid
  misc_feature (223)..(226): Xaa can be any naturally occurring amino acid
LSGLTKTSSGSGLLFPDSKSXXXXATETQWLKDAPSQPLQQSLKELERAYKNFFRKRAAFPRFKKRGQNDAFRYPQGVKLDQENSRIFLPKLGWMRYLNSRQVTGVVKNVTVSQSCGKWYISIQTESEVSTPVHPSASMVGLDAGVAKLATLSDGTVFEPVNSFQKNQKKLARLQRQLSRKVKFSNNWQKQKRKIQRLHSCTANIRRDYLHKVTTTVSKNHAXXXXE

SEQ ID NO: 48993 - protein, 392 aa, unknown
  TnpB Polypeptide
VQLRWTFRCYPTEAQAQQLARTFGCVRFVYNFGLVERTKAFRAGSRMNFAQSSLALTKLKQTPEHAWLNEVSSVPTQQALRCLQTAFVNFFDKRAAYPTFKRKTGTQSAIYTRSAMTFDAGTRNLKLAFLGHLRVKWSRPMGGINPSSVTVIRKPSGRYFVSMVVDVATPQFAKTGAEVGVDFGITRLATLSTGERIPNPKHGQQQQARVAQLQRAVARKRKGSQRRHLAACRLARAQERVADCRRDTINKLARNLVSRFDVIYLEDLNLRGMVKNHALARTLSDTSIGASIRTIETKAAMHGKATVKIDRWFPSSKMCSVCGVLQSKMSLGIRRWTCECGAVHDRDENAAKNILAVGQTVSAHGGGVRLRRATARRSDRLRSANQPRSACA

SEQ ID NO: 48994 - protein, 404 aa, unknown
  TnpB Polypeptide
MVKTRKLKIKDSELERQLDELASVSADLWNTICTWYWRTVDRQDHWLSQGAMMRWHCRGHLDFHSQTAQAVACQFYQSIKSWHGNNRKGKPPLNRRKEWNKICWRSSAIKLRSDGQLRLSNGRGNDPVLIEWPVDEEPKYVEIGWNRGYEVRATYKTEVEDNTTGDKVAGIDLGEKHLAAVSMKDDSFLLNGGRLRAIRKYQNQTKALLQEKISRKEKGSNQWRKLIESKNKQLDHLSSKITDLLHKLSRKLIDMCLERDVSTVVIGELKGIQDHVDYGQRMNQRLHQWAYRRFSDYIEYKAKENGMDVEYVDEKHTSQTCPRCGTAKESHKNGRQFRCSSCGYEAHRDSVGAWNIRKKYVSEDTGKSVSSCLPGAMASPSGVRFEPHLPCSSRSKGLCMPSPC

SEQ ID NO: 48995 - protein, 454 aa, Eubacterium sp.
MSAGYAITTYKLQLCYKHLDWFKQTQSLFDAVLAFYYEQLDQNPQALSLTNQNLLRHLELKTIPQRNGTQPENPLPYKKVPLYFRRAAINAAISLYRSYDSRLKAWEENHKGQTEKGKPKPPGKLHASMLYYKGMYKDFDDKRIMLKLYTGKAWAWVKHRYTGRPFPENAETMSPTIVIKGKKVMLHIPVKEKVEDTRTAKERVKQRESFVVVAFSSSDTLAVCTAIQADGSTDYPYFIKGGKALAHRRKQLLGYIKRGTAGKKAPRLITQPVGNDALGVCPRGLSSYGQAEAGIVPQDHQPGRPNAKYYDKITRVTNHYAHEVSRKIVDYAKSHNAKIIVMPDYGNTFAKGTQHYLKTSVYDFIGRRIINDVKYKAWQCGIVVQQSNIRDSAKHCAKCGETIAKYNTEYQNPSQKFYGGRNFVCKNGHQGSTVLNTARNLGESFYQTFYEKAS

SEQ ID NO: 48996 - protein, 561 aa, Streptomyces sp.
MLVECGDGVFEAGWGERVGGLRELAASFVVPGPAGVAIRGRLRVSASDAAVLAEVGVFLGSLAASDLAERSRQGLAHDAASWAVRKRALTGTSSARWAGSITKATHDQWALARRGQAAHMDWLRRQVASIQARLARPLGAKADKREGLVRGYASRGEWHAKARRLQALKVRLAVVEADWAVGRVRVVRGGKKLAHARHHLAAAGLSEQAWRKRWQAERMFLAADGESGKQFGNETIRVTDTGRLSVKLPAPLAHLANASRGRYVLDAAVAFQHRGEEWRDRITANRAVAYRIHHDTARGRWYVTASWQRAASTVLALEAALARGVVGVDMNDDHLAAWRLDGHGNPVGEPQRFFYDLTGSTDHRDAQLRHALSRLLHYTRRCGAAAIALEDLDFATEKSREKHGRNKRFRRLLSRFPISKLKARLVSMAAEQGIAIVAVDPAYTSRWGAQHWQKPLTTSTRQMSRHDAASIAVGRRALGHPIRRRTAPPHPDQSDPGGHRTVQARPEARRREETRPHPPGPRTRCVLPGGGAKAGDQGAQDRSGHPAEHQFWHQDSLPLSP

SEQ ID NO: 48997 - protein, 335 aa, unknown
  TnpB Polypeptide
MEKVKIKHKTLKIKIYPTNKQKKIIKKWSNTFRCVANNTIEKREKDKCPNNFFDLRNKLVTAKNISDDMKWQLKVPKEVRANAVKEVVSNYKTAFSLLKNKKIKFFKMKFRKKKLHDNYFVLSKSGVKKLDDTHLSIHPRTFGTLKIRKDKAFKKTIKLLDGIKIKNGYIYIPVEVEQQIHTRAKYDICSLDPGVKTFQTMFSNEEVIKFGDRSKILKMYKIIDHYKSIQTKVNKYLKRKLHKKILLLNEKIRNKVDEIHWKTINYLTNNYKNILLPSFETQQMTKNLHRKTNREMMFWSHYKFKQRLIWKCNLKNRNIKIVNRRYLRLIEDTYG

SEQ ID NO: 48998 - protein, 565 aa, unknown
  TnpB Polypeptide
MKFRGVKECKGIYGLSRMALLNYEKKEPIKPLTEKKSEGNFITVECLLAFDKDEDKGQVLTLMRKFSSMVRFAYKRLMEGAERKELKKLLSRKYGINARYSDGAILLAQQALESCVERGQNPKKLVFGSRELFEKLKKKHLTGNRRDELRQKWEERRYGILYSRGDKSLQGNLNLRLVNLNNQWYLRINLGNGEYVWAKVVRLATRKTDKWISFISSLEHAEKTGEWFPYTVRLKLRNGKIYAQFSREEKFPKVTITKDNGVIGIDINAYPFHLAIVHTTKDGNLEKYERISLDKLLEGNSEKREYLSWQVAHQVVGIAKRERKAIVVENLEKLPKGKRGDGLPKLRQRLQKWIYKGLLQKIDIVARRNGIQVIKVNPAYTSIIGKLKYAPLYNIDKDTAGAYVIARRGLGFKEHLPKNYKELLKDTEFISYTIAKIEDKIANLKQEIREEKNEYKRNRLKSILWKTRKELDLLLRYLQGSGESESAAQQTVNRKMERLRGLTHVRQKSWQVLTVALALSCLESLRDFSPLKRVILARDWVGAAKRASPSLPGQGTTVLNLYSFV

SEQ ID NO: 48999 - protein, 382 aa, Escherichia sp.
MRRFAGACRFVFNRALARQNENHEAGNKYIPYGKMASWLVEWKNATETQWLKDSPSQPLQQSLKDLERAYKNFFRKRAAFPRFKKRGQNDAFRYPQGVKLDQENSRIFLPKLGWMRYRNSRQVTGVVKNVTVSQSCGKWYISIQTESEVSTPVHPSASMVGLDAGVAKLATLSDGTVFEPVNSFQKNQKTLARLQRQLSRKVKFSNNWQKQKRKIQRLHSRIANIRRDYLHKVTTTVSKNHAMIVIEDLKVSNMSKSAAGTVSQPGRNVRAKSGLNRSILDQGWYEMRRQLEYKQLWRGGQVLAVPPAYTSQRYACCGHTAKENRLSQSQFRCQVCGYTANADVNGARNILAAGHAVLACGEMVQSGRPLKQEPTEMIQATA

SEQ ID NO: 49000 - protein, 367 aa, unknown
  TnpB Polypeptide
MYQVLKLRIYRKHYVKLDKLSSAVNFVWNYVNDLCWQMWRRKRIFPSAYDIHEYTKGAGEELGLHSQTIQFIGEKHHQSRKQHKKVKLAWRTNRKDAKRKSLGWIPFKASAISHVKTYNTGKKALKSQVQLSCGKEKLILTVYDQYDLRRYNGFRTAEIVQDSCDDWYLCLLVKVEPKVCTATSEVGIDYGCKTAAICSNGDKLETKFTQQYAEKLATAQRAHKKKQARRINRKIKNKRADATHQFTGKLVKENRLIVAGNVKSSSFTSGKLAKSVYDANWFAINRQLEYKSRRAGCQFIKVDEKFSTQTCANCLQITNSSPKGVAGLGIREWICDCCGQLNDRDVNAAKNILRFGRETLAGGSPIL

SEQ ID NO: 49001 - protein, 335 aa, unknown
  TnpB Polypeptide
MEVFLCPEKNRGDRDRPPRFKQESIPITYMQMGIVHERDTDRVRLSLPKALKKYMEETYQIHENFLYLENKIFRGMDQIKQLRIYPPEKGSCKIIVVYEVPDQEELPQNGHELSIDLGLHNLMTCYDSENGKTFILGRKYLELERYFHKEIARVQAQWYGQQSGKGVKHPVTSKHIRKLYKRKHDSVTDYLHKVTRYLAEYCREQGITCVVAGDIRNIRREKDLGHRTNQKFHSLPYNRIYIMLEYKLKRYGIRFIKQEESYTSQCSPLSPKVGKRYAEPSKRKERGLYRDGNRTYNADAVGAYNILRKYHSVSGVKRELSVTGLKTPEIIKVAV

SEQ ID NO: 49002 - protein, 346 aa, unknown
  TnpB Polypeptide
LQERREAWKKAGKSVTVYDQMRLLGEVKAVRPEYQGVYAQVLQETLKRLDRAFQGFFSRVKRGEKAGYPRFRGRGWWDSFTFPQVWREGNWVGPGKPLGNGKVKIPGVGHVRMKQHRPLEGVPKTFTVKRSAGCWYAVYACDVLPQPLPPSERAVGIDLGLSHFVATSEGETFAPPKAYRQAEARLKRTQRALSRKRKGSHRRRKLKMRLARQHRKVAHQRKDFHHKLARHLVNRYGTIVHEDLNTSGLARSRLSKSVLDAGWSSFISILSAKAASAGRRVVAVKPHYTSQICPQCGSIQKKELSERVHACECGCVLDRDVAAAKVILALGLDGALGDGQRVAASA

SEQ ID NO: 49003 - protein, 343 aa, Moorea sp.
MRTNTVRHQAIKVRIYPTQEQVMILAQHFGCARWWWNYALNQCIETYKETGKGLSRSALNSMLPKLKKDEKTSWLKDCYSQVLQSVSLNLSRAYQNFFDGRAKYPRFKSFHHRQSIQYPQYVKQVGNCLKFPGKLGVVKARIHRALDGTIKTVTVSRTPSGKYYASVLMEYESDNIQPSTEGKVVGIDLGIKDFAITYDGEKTSKFGNPKHLSKYEQKLARKQRIAARKKKGSNGRKKARKIVAKVYERIGNVRQDYLHKLSRKIVDQNQVVVVENLNVKGMVRNHKLAKAISDSSWGTFVNFLSYKCEKEGKVLLEINRWFPSSKTCSNCHYRIKELPLNAG

SEQ ID NO: 49004 - protein, 414 aa, Pseudomonas sp.
MVRRQAFKYRIEPTGEQLRKLRRFSGACRFVFNKALALQKEHYEQGAKKLGYAGLCKLLTEWKAQQETAWLSDTPSQALQQTLKDLEQAYGNFFAKRAALPRFKKKGQHDSFRYPQGVKLEQGNSRVFLPKLGWLKYRNSRATLGAVKNVTVSQSAGHWYVSIQTEREVDVPLHASPLATGIDLGVVRFATLWDGHAETVLYPLNSFNRHQHRLAKAQRQMSRKTKFSNNWKKAKARVQRINRQIANARNDYLHKASHSLSKSHALLCVEDLQVSNMSRSAAGDTDVPGKNVKQKSGLNRSILDQGWGEFRRQLEYKAQWTGGDVLAVPAHNTSRQCPACGHTDKDNRKTQSLFLCVACGHTENADLVAAKNIRERGLNLLKGLDIAQIACEVNGATKPSAARTRRSDEAAKAA

SEQ ID NO: 49005 - protein, 223 aa, unknown
  TnpB Polypeptide
VEKKPKHLHRNLSRKQKGSKNWEKARLELATHYEKIYNQKKDWTHKTTRDLGNKYDVIVLETLNIKGMQKFNSGLSKSVTLDFSWHQFKIYVEYKMKWAGKHFIQVKWNFPSSKKCSHCGQITNDLPLDVRVWTCSTCGTTHDRDLNASINLKVEGIRILKEEKHITIIHDDRTTAGMAESQAFGDDVRPVAILQNECRRFSMKKEAHTYGKDLHESPSFRKE

SEQ ID NO: 49006 - protein, 317 aa, unknown
  TnpB Polypeptide
MTNGNIRIDFQRKRIKLPKLSWILYADDRIFTQNIKHVTVSKTKKGKYYASLTLEKQPDSSLLMHLFFSKIAAFDMSARDFVVNHLVKMENPRFYRAEEKRIVKAQRLLSRKQEGSKNYEKARRKVAKIHEKVYNRKKDWTHKLTHTLADEYHAIILEDLNIKGMQKFHSGLSKSVTLDFSWHQFVTYLTYKMKWNGHHVIKVDRFHPSSQLCSACGEKTNHLTLDMREWTCSHCETHHDRDVNASLNLLYQGLLALVSENPLMLIHDDTPTVGTTGSHAFGEEVRPISILTNLYRHTSRNKEFRLAKDESPPFIVE

SEQ ID NO: 49007 - protein, 365 aa, Sporosarcina sp.
MLKAYKYRMYPNAEQKEFFAKSFGCVRFIYNKMLADRIGLYESYKDDKDKLKLYKPRTYTSFKREFDFLNEVDNLALANAQLDLNAAYRKFFKEGAGFPKFKSKHKSKKTYKTNNQGGNIRVKGNQVKLPKIGFVKIKYHRPFNGLIKSCTVSQTPSGKYYISILVEVEEAERIPAKNKIGIDLGLSNFAITTNDDGRSEKYSNPKFHRKSEKQLIKAQKALSRKKAGSKNREKARLVLAKKHEKIANQRKDFLHKLSYRITHENQVIVIETLKTSNLLKNRKLSKSISDVSWHEFTRQLTYKSAWLGRTLIQADQWFASTQTCSVCEHKGEKLSLNIREWTCTNCQSTHDRDINASRNLLKLAN

SEQ ID NO: 49008 - protein, 342 aa, Paenibacillus sp.
MDTFLLCQYGRERLKRNDKNATLKNKRQEGENMQTVTIQIRIFPSNPSILADMGNEYIRTVNRLAEQAEASGTFPKLTSKTVQANLPSAVKNQAIRDAKSIFQKSIKEKKRPILKRRVYYVNNQNYSIGENTVSFPFCMDGKVQRLRTPALIANREKNMLQSSKLGLLRVVQKSNKWFVQISLERPKEQVIGGATMGIDLGLKVPAVVVTSNGKTKFVGNGRKNKFIRRKYNANRRKLGKLKKLSAIRKQCNKESRYIKDQNHKISRQIINMAKRENVTVIKLEKLSGIRQTTRTSRKNAKNLHSWSFYKVATVHRIQSGISWNQGCRSPSSVYFADMPILR

SEQ ID NO: 49009 - protein, 374 aa, unknown
  TnpB Polypeptide
MDNPHKSAYHYRLWLTNGQKRLLEQQLETCRWVYNQTLAVRRDAWDERQESLGLYDTINMLPEWKAEHPSLKQVHSQVLQNVQVRVDLAFKAFFRRVKAGEQEVGYPRFKGKGRYDSITYPQYGNGVKLNGDTLILSKIGSVKINLHRPIEGQIKTVTVRRSATGKWFVCLSVEKERQRMTDVPEAAVGVDVGLAKFATLSTSEEITNPRFFRRDEKDLARAQRKVSKEEKGTPARAKRRKVVARIHERIANRRKNFSHQISRKLVNTFGTIVFEDLAITRMIKNHCLAKSIADAAWNQLITDTQYKAAETGAVCMQIDPRGTSQRCSRCKTTVKKDLSVRVHRCPVCQLEIDRDLNAAINILAVGLHSLGVNP

SEQ ID NO: 49010 - protein, 308 aa, Enterococcus sp.
MSVLKAYKFKIYPNEAQKEFFVKTFGCVRFTYNHLLIARSQTDGKKMTPASLKKEYPFLKETDSLALANAQRNLETAFRRYYTGKSDYPKFKNKSNIWQSYTTNNQGQTICLTDGLLKLPKLKTRIAVNEHREIKGQIKSATISAKNNEEFYVSILCLESIEALPKTTLEIQLRYSPEELLDNLSGLTTLNFDQAAILCKMAKMNRRLKLRGKIARKKKVPLAYAKNYQKQKVKLSRLQGHQKEKKEDYFNQLSYTLIRDFDRITVDKAKLSDRSDDETVNFTKADWQTFLRKLQYKADWYGKEIIYQ

SEQ ID NO: 49011 - protein, 387 aa, unknown
  TnpB Polypeptide
MIKSYKYRIEPTRTQQELINKHIGSCRFLYNLALETKQTAYAGNKVNLGCFDLMKQLPDLKKECAWLKEINSQSLQQSITHLDNAFTKFFKGQADFPNFKKKSARQSFNIPQNVIVDFDNNKLIIPKFKKGIKIILHRVFKGIIKQATISKTPTGKYFVSILVENNIVTPIKSNITINNTIGIDLGIKSFLVTSDGLRFDNPKFFKKSESRLKYIQSKYSKYKGKRTKHRLNILYEYVTNQRKDYLNKISTQLIKSHDSVAIENLNIKGMLQNHNLSQSISDVGWGMFVDMLKYKSEWYGKNILQIGRFEPSSKTCHICGNINKELELKDREWICNGCGTVHDRDFNAAINIKNFALRNYLSVEHRQENHDELPTLVGVMTHEAHKF

SEQ ID NO: 49012 - protein, 407 aa, Streptomyces sp.
MKLVTQVKLIPEADQAAALSATLRTVNQLACWVSTVAFAHGVPREYELRKHTYAHLKAAGLGAQAAQHVIKKVRDAYTTLHANIRAGTYGKPGSRRRTKVESKPIAFRPRAAQPYDDRCLSWNYDARTVSIWTTAGRLKNVRFACSAGALTTLRQYRKGESDLIERDGVFYLVATCEVPEAATYEPDAFVGVDLGIVNIATTSTGFRAAGRGLNRYRKRQQALRAKLQKKRTKSAKRRLKQRSGREQRHATNTNHVIAKTIVTEAERTSCGISLEDLKGIRQRVRLRRPQRVALHSWAFAQLGGFIVYKARRVGVPLVLVDPAYTSQTCAECGHLDTRNRIDQATFICQGCGVVAHADRIASRNIAHKGEAVWNAGRESRVPATPSGCLDGGAHPAAGRALPPSPVL

SEQ ID NO: 49013 - protein, 171 aa, Okeania sp.
LKARYKYRCYQNLIQQINLAKLFGCTRVVWNDALAHCIQEFKSSKKKPSNAELQKVFITQAKKTIERSWLTEVSVVPLQQSLNDLHQAYQNFFNSVIGKRKGVKVKPPKFKKRNSKQTAIFSLRGFKLGQDKVYLAKIGNLKVHWSRPLPSPPSSVTIIKDCRGDSHRCPY

SEQ ID NO: 49014 - protein, 218 aa, Okeania sp.
LTRGITSLVTTSNGEKISNPKNINKLHKKLRLAGKSLSRKTKGSNNYQKARLKLARIHAKIKDSRLDYTHKLTTQLIRENQTIVIEDLAVKNMVKNHKLAKAISDANWSELVRQLEYKADWYGRQLIKIDRYFPSSKRCSNCGHIVEKLPLNIREWDCPECGSHHDRDINAAVNILAAGLAVSVCGATVRPSESKSRKAGALKQKAPNSDVKESRAVS

SEQ ID NO: 49015 - protein, 221 aa, Okeania sp.
LVVVGTFGINRDSHCNQLYTNGEKKPSYVDLTKQFITQAKKELLWLKEVASTPLQQSLKDLDQAYKNFFDSCKGKRKGIKVKPPKFKLRKSRQTARFVGDNYQVSQDKIYLPKVGRIKIVLSRPLASKPTSVTIIRDAANRCFASFVVENCAENLPKTGNSIGIDLGISTFATLSNGEKFKLSLPLKNNLKKLAKFQRKFVKTELGSKRGEKPRLKIGKLS

SEQ ID NO: 49016 - protein, 425 aa, unknown
  TnpB Polypeptide
MDIRYVILFSGRKTKNKMRTSYQYKIKPTKQQAEKIDQTLEMLRYQYNYLLAQRFDWYEMNRCPIDRCPLICHLPDLKEQPNYYNQKASLVQLKVDRPWYKNIHSQVLQEVPKRVELAFDRWLKGDINGKKSGRPRFKGKGQYKTFTYTQFKQHHFVNNKITLSKIGDVKVIVHRPIPVGFKIKTFSITKKADGYYVTLSLEDATVPIIKPEFNPESITGIDVGLKEFLTTSEGETVAIPQHYRKAQKRLRVIQKRVSRRKKSSNRRQKAVKQLGKQHKKVADKRKDFHFKTANNLLKKYDVVAVEDLNVKGLARTRLAKSVLDAGWSSFLSILTNKAENAGLLVIPVKASGTSQDCSNCGVKVPKKLHQRWHDCPNCGCSLDRDHNAAINIKNRAVGHPVLKAKSLLSDSRIVLEAYTYCEAEV

SEQ ID NO: 49017 - protein, 309 aa, Streptomyces sp.
VGAAGTGQLQRHLHDADRVEEDRGTGLPQRRLVGAAAADAAAPADGVHPFLRQAGQPEGTKPSTVTVSQDPAGRWFVSLLCEDPAIKPLPATDAAVGVDVGLDHLLTLSTGEKITNPRHERRDRTRLAKAQRELSRKVGGDGANRRRARRKVAKIHARIADRRRDHLHKLTTRLVREIQTLVIEDLTVRTMVKNHRLARAISDASWSEFRSMLEYKAAWYGREVIAVDRFFPSSRLCSACGTLQEKMPLSVRTWTYGSCGTAHDRDVNAAKNLLAAGLAVTVCGAGVRPQRSSPGGQSAVKQKTPRREP

SEQ ID NO: 49018 - protein, 402 aa, Escherichia sp.
VKRLQAFKFQLRPGGQQEREMRRFAGACRYVFNRALALQNENHEAGNKYIPYGKMASWLVEWKNATETQWLKDAPSQPLQQSLKDLERAYKNFFQKRAAFPRFKKRGQNDAFRYPQGVKLDQENSRIFLPKLVWMRYRNSRQVTGVVKNVTVSQSCGKWYISIQTENEVSTPVHPSALMVGLDAGVAKLATLSDGTVFGPVNSFQKNQKTLARLQRQLSRKVKFSNNWQKQKRKIQRLHSCIANIRRDYLHKVTTTVSKNHAMIVIEDLKVSNMSKSAAGTVSQPGRNVRAKSGLNRSILDQGWYEMRRQLEYKQLWRGGQVLAVPPAYTSQRCACCGHTAKENRLSQSKFRCQACGYTANADVNGARNILAAGHAVLACGEMVQSGRSLKQEPTEMIQATA

SEQ ID NO: 49019 - protein, 308 aa, Enterococcus sp.
MSVLKAYRFRIYPNEEQKHFFVTTFGCVRFTYNHLLVARQQSEGGKLTPAALKKDYPFLKATDSLALANAQRNLEKAFRRYYTGKSDYPSLKNKSNPLQSYTTNNQGQTICLSDGYLKLPKLKSLVAVNCHREIKGTIKSATISSRNNEEFFVSFLCVEEVEPLPKTLKTIHLVYSPNKLLESSEYTPPTLCNQEQLLDKIDRAQRKLRVRGKIARKRRVPLAYAKNYQKQKEKLGRLQLSCREKKENYFDQVSYAIVRQFDFIHVTKELLFETLPDQPLYFSKADWQMFLKKLEYKAEWYGKELTYE

SEQ ID NO: 49020 - protein, 265 aa, unknown
  TnpB Polypeptide
MKTLKLRIKDKHSKVLEQLVSEVNFVWNYVNDLSFRHLKGKGEFLSAYDIAKYTKGTSKECNLHSQTIQAVTEELVIRRKQFKKSKLKWRVSNRKSAKKSLGWIPFKKVAVKYTDGYIQYGKHQFKLWDSYGIGSYKVKSGSFVEDSRGHWYVCLTVEDHTKSVQSKGTTAIGIDLGLKDLATCSDGYVVTNPKHYRKYEQKLGIAQRAKDKKRVRALHTKIKNCRKDHLHKESSKLVKRHAMIVVGNLSAAKLVKTKMAKSVLD

SEQ ID NO: 49021 - protein, 426 aa, unknown
  TnpB Polypeptide
MENQFIYLNILFKIKYLLFTLNNIIFTTMIKSYKYKLNPNESQKTFFEKSFGCIRFVYNWALSKRIEAYQKNKERLSCVDLCKMLTSLKKEDDKTWLSEVSSECLQQSIRNMDSAFTRFFREKKGFPKFKSKKDNKKSYKAINSVSIDFDSNRIKLPKIGWVKFFKNRTFEGKIGTVTVSKTSTNKYYVSILVDDDKELPQKPKIEYDTTVGIDVGIKDFAVLSNGQIFENPKYLEKAEQRLKVLQKRFSKKKKGSKRREKARIKLSKAYEKVTNCRTNFIHQVTSKIVRENQTIIIEDLNIEGMMKNRHLAKRISSASWNEFFRQLQYKCEWYGKNLLKIGRFEPSSKMCTCGYINNSLKLSDRKWVCPNCKQLNDRDLLAAINIKRFGLQNQNLLEIKSSLVEGVGDVEWSTLVGTVKRQYVSV

SEQ ID NO: 49022 - protein, 378 aa, unknown
  TnpB Polypeptide
MIRKSYKYRIYPNQIQQELFEKHFGSVRWVFNWGLEKKIKAYQKNKKTLSCFDLTNELTKLKKKKDFQWLNEVNSQSLQMSLRNLDNAFTNFFRKNGKFPRFKSRKDNKNSFQIPQHLRLDNKLSIPKVSDIKIKLSRAIEGKIKMATISKTSTNKYFVSILTEQDKNLPKKPKITKKTTIGIDLGIKSFATISDGRKIDNPKFLSKSFKKLKREQRWLSRKAKGSNNRNKQKRKVALIYEKINNQRSDFIHKLTYQLNHENQVKSIAIEDLNVDGLLKNKYLAKAILDVSWREFKRQLEYKCDWYGRNLLIIGRFEASSKTCSCGYVNQELKLSDRKWTCPKCQAEHDRDILASQNIKRFALIGSGRPKSTLVETSR

SEQ ID NO: 49023 - protein, 381 aa, Meiothermus sp.
VKLTAKVKLRPTPEQRACLLDTMRRFNMACNHISAIAWESKTFKQVPLHHLHYHATKERFGLSAQMVVRANARVVDTYKLDRKTRRTFRELAAITYDDRILSWNLAASTVSIWTVEGRQTIPFVCGEYQRRLLATRQGETDLAYVRGEFYLFATVNVEEPDPIEVRDVLGVDLGIVNIATDSDGETYSGAHLNSVRARHRRLRRKLQKKGTKGAKRRLKKLSGKEQRFANDLNHRISKRIVEKAQRTNRAIALEDLKGIRQRVRVRRPQRSTLHSWAFHDLGQKLRYKAERVGVPLVFVDPKNTSRECPVCGHTERANRPNQRTFTCVVCGFAGLADHIAAVNTGRRAIVNWPNVGEANRALHGSVPASLDQNPLGFGQCG

SEQ ID NO: 49024 - protein, 319 aa, unknown
  TnpB Polypeptide
VAHKFLNEREGTLEARKKGLNTRYPWKFKNQFNPKWVDESFSIKGKKLALSLGNWNGKRQKALVLTLAKSIPFEVKEVELVFDQNLYICLSYDDGKETEENTNTQTAAVDSGEIHTISSFHENGNTLIITGRKVRSIHRLRNKKLRELQKLMSRCKKHSRQWKKYNRAKQYILSKSEEQLKYHLHKTTKQFVEWCVENNTKTILIGDTEGVQKNTKKKRKTNKNLRQKLSNWSFGKINHYIKYKAETYGIETIKRKEHYTSQECPSCGNRKKTKGRVYKCRCGYECHRDLHGAGNILTEYLYENFQVIKHKDHIYLRAS

SEQ ID NO: 49025 - protein, 443 aa, Ruminococcus sp.
MQVLSSYGVELRKQNIPIHQTLEIYRSAVSYLTEIYGQVWEELEQISDSKRRFNAAEHLVHTTKKNSARFDFDLRFPKMPSYLRRAAIQHALGSVSSYETRMDLWEKSGEKAGKPRLAYENHAMLVFYRDVMYREGKEGKDEAYLKLYDGHDWKWFCVRLNHTDMEYLRKNWSGKKASAPTLEKRYHKYFLRFSYTEEVTLTKTPVKEQIICSVDLGINTDAVCTIMREDGTVLGRKFIDHPSEKDRMYCTLGRIRRFQREHGSAQSRGRWAYTKRLNIEMGRKIAGAIVKYAEENHADVIVFEYLEMQGKISGKKKKQKLHLWRKRDIQKRCEHQAHRKGMRISRVCAWNTSRLAYDGSGNVSRNPKNHSICVFQTGKQYNCDLSASYNIGARYFIRELLKPLPVTERSLLEAKVPPVKRRTSCVYADLKELHLQMEILKAA

SEQ ID NO: 49026 - protein, 380 aa, unknown
  TnpB Polypeptide
MLRAIKIRLYPNKEQELKLNKVLGCYRFVYNQMLALKQQEYNKNKKSLGLTDLSKYFHGTLLKDEQYEWLKEQNTKVMKQSIRQMLSAYDKFFKRHNGFPKFKSKKDKQSALFPLEAISKHNTFETRHISLTTPLKNIKFRCSDLYFSRLQKYNKNIRSATLSKTKIGNFFLSILIEMENTELEKFEHTNEQVGIDLGVKDFVITSDGEVFENKHFFKKEEKQMKKHQRQLSKKVKGSNNRKKAQVRIAKLFERVTNKKDAYIHYVTNELLTYFDTIFMEDLNVQGMLRNHQLAKAIQEVGFYKFKETLVNKALVNDKQVVFINRFYPSSKICSVCGYKKQDLRLSDREWVCPNCMTKHDRDINAAVNILLEGQRMLTAE

SEQ ID NO: 49027 - protein, 418 aa, unknown
  TnpB Polypeptide
MRKKKDEIEKQIPTIIRTHKIRIYPNKHNQEVFQKYYDYQRSVWNRAIDERNAQYKIYKEMKATGLFTQKELNKNYFPHNKNLRKMEKFDWEDNFYCRVREIQFDNLCLAWNRYFNPNMPNHKKPKYKKKKEIETHKTLSLRNMRIKGKWLLLPKSYKSKPEYRFTKIKMAQELRFNGRITDDFTVSVENNKWYVTITVEAPLEEKLAISKQSTGIDVNVGSIDYLKSDGLNKEYGKFYLLPKSLLNQYDKIKYYSRVISKKRNKNPYYVNSKSYKEAITKLNNAYTKAYNIQEENLNNIVKYFFTNYNRIVIEDLDVNSMRMNKRLCKSLHRNAFGRFKRKMINKAEEYNVDFVLADRYFPSTQTCSECSHVKTGDEKLFLWGDKYGNDHNTYVCYNCGTIQDRTENAVLNLNHYGK

SEQ ID NO: 49028 - protein, 395 aa, unknown
  TnpB Polypeptide
MLRGIKIALDLTNEQEQQMWKSVNVARWCYNYAITRDRENYSNYLKDNTLPKTLSEGQIRKELTVLKNTTHPWLKEVGSNVIKQAVKDWNNARNRFFKGLCKAPKYKSKTKSKPSFYVNYETLLRVNGGFRGERLGFVKTTHPLPKIPKGTHYMNPRISFDGKYWHLSFTYEVPSISVELTDSVIGVDLGIKTLATLSTGEFIENINKSNRVKQLEKQLRREQRHLARQLQANTKGYLTTVKGSRKPIYKRPLELCSNIQETKRKIKLIYRKLHFIRMNHLHQTTSHIVKQLPKGVVIEDLNVRGMMKNKHLAKHIQNSMFYEFRRQLGYKCSEYGIQLIIADRFYPSSKACSCCGFIKSDLKLNDRVYKCNSCGLEIDRDLNAAENLANYFYRG

SEQ ID NO: 49029 - protein, 367 aa, unknown
  TnpB Polypeptide
LNIAYRFRIYPTEEQKILLGKTFGCCRFLYNQMLNDKIQEYKKTKKMLKNTPAMYKKEYPFLKEIDSLALANVQIHLEKAYKNFFCDPKVGFPRFKSKHHSKNSYTTNVVNGNILVEGSRIRLPKLKWITMKKHREPAENCRLKSVTVRMEPSGKYFASLLYEGYSCENQAADKDYSNAKILGIDYAMQGMAVFSEEIETEEAGFFRKNEKRLAREQRKLSRCVKGSHNYARQKKKVARCHEKIRNQRRDYLHKLSRKITDRYDIVAVEDIDMKAMGQCLHFGKSVQDNGYGMFRDMLDYKLAWKGKELVKVNRFFPSSKKCSKCGKIKKELKLSERVYRCTCGNEMDRDRNAAINIREEARRMLVA

SEQ ID NO: 49030 - protein, 395 aa, Phormidesmis sp.
MKQVLTIVVKLQPTPEQVSKMDASLQAFANACNYVNDNTDPKITNKIALQALTYQTIKAEFDLVANMAVRACARVGANRKTAKLKGKPVKKFAPTSMDCDKDLFTFREKDWEVSLATVQGRERVRLNAGNYQRGKLKGCKPTSAQLCKHRDGKFYLHIQLKDEAPEPIQSRNVIGVDFGRRDIAVTSEGEKWDGQDIQQVRDKFSKVRASLQAKASKGTRSTRRRARQILQRLSGRERRYQQWLNHRISKAIVQQAKALEAVIAVEDLTGIRERTNELRRNKTERRRSNSWAFYQLRLFIAYKAIQAGVEMVAVNPAYTSQTCHQCLHIHPVKGKSYRSGKRFQCGHCEWSGDADLNGSRMIKILGLSVNQPRGSELACSLNSHASGLLKAPRSA

SEQ ID NO: 49031 - protein, 442 aa, Caldisericum sp.
MNVEKNEAIKTSLKETKERRKTQTPAVYEMKLQNLTDKDIETLERLFLEAKWLRNYVVSDIANRLNKDTWKVKEVEIKVKDKFEKREITHLGSQIKQEIVNRVGDDLKALHNSKAKGNKVGTLKFKSEVNSIPLKQYGNTYGLDFKHNRVHIQTIKKKFRVLGLHQILDDVEFAKGELIRKPSGYYLYVTVYLNERPTTGRTKKGTAKEKKAEHFNKPLGIDFGIKNELTLSNGIQFQFEVKESKKLKLLQKKLSKKQGFKKGERKSKNFFKTLNKIRREYERLFNIRKDIENRIFAFIRLYERVYTQDDNIKGWHSGLFGKQIQSTSIGRIKARLSNNLETLVLVDRFLPTTQTCSHCLHKQRISLSDRVFKCESCGFEIDRDINSARDMVLLGKNSPKNLPVDCWEVTPPEREASARILESNPYIRVSYTSVNEEAPSFN

SEQ ID NO: 49032 - protein, 359 aa, Firmicutes sp.
MLVTLKVKLLTDSEQHSKLLETMHVFNEACNFISQLSFEKRIFNKVKLQQECYYEVREKFKLSAQFVIRAISKVTESYKANKKALHTFKPTGAIVYDQRLLSFKGLEHASILTMAGRILVPMIFGEYQKGVVDGRRIRGQADLILVDGVFYLLVVVELPDGSPTDTKDFLGVDFGIKNIAVDSDGEAFSGAKVNGIRKRHAKLRAKLQKKGTKSAKRLLKKHSKKERRFATDVNHYIAKKLVAKAKGTGRGIALEDLKGIRERVTVNRLQRRQHNSWAFYQLRQFIQYKATLAGVPVVLVDPRNTSRACPVCGHVDKKNRLTRDNFCCQSCGYAGPADSIAARNIAGRAVVMQPDVGVA

SEQ ID NO: 49033 - protein, 313 aa, unknown
  TnpB Polypeptide
VTWKQKGIRHDTKNNRVRLSKGANHKDHPRDWDYVLLEYKTRSEVTVENLQQVRAVYDTAKGRWELHLVCKHEVEKPDAPGTETAGIDLGICNFAAVAYSTEEADLYPGNRLKQDGYYFPKEIAKCDDSGSSEATRLHHKWSGRRTHFFHSLAKHIVEKCIERGVGLINIGKLNGVREGENGESKNWGKHGNLDLHGWAFDRFTKILEYKAKVEGIEVGEVSERDTSKTCCVCGRDSQRVERGLYVCEACDAAFNADVNGAENIRLNSNKSNSESSARLDEDRSTGWLAQPGVYLHDLSHGFSPREQVVDCKP

SEQ ID NO: 49034 - protein, 416 aa, unknown
  TnpB Polypeptide
MYLTVKQQVKHLSKEDYLILKELSHTAKNLANQAIYNVRQYYFTEGEYLNYQKNYALLKDSENYKILNSNMAQQILKEVDGSFKSFFGLLKLAKKGKYAFKDCKLPHYLPKNGYTTLVIGFVRLKGNKLIIPFSNSFKKTHEPVEITIPPILLDKKVKEIRIIPKANARFFEIQYTYKAECIQRNLNKNNALAIDLGINNLATCVTNTGKSFIIDGRRLKSINQWFNKENARLQSIKDKQHFGKRITNRQKAIARDRNNKVNDYMSKAARIIINYCITNDIGTLVVGYNETFQRGSNLGKANNQNFVNIPYGKLREKLEYLCELNGMVFVKQEESYTSKASFWDKDNIPVYNADNPQEYAFSGNRIHRGLYKTKNGITFNADVNGALNILRKSSVVDLIVLYSRGEVDTPVRIRVA

SEQ ID NO: 49035 - protein, 425 aa, unknown
  TnpB Polypeptide
MTVELYRQAVDFLIGVCLNEWGDIAQIEHSKDRMMFVERLVHKTKDRPFVKYDFDSPFYKFPNYLRRSAIAKAIGDVSSYKSNYANWAVEKNGNPPSKPKAGYTFPCLYKGNCFVRIDDYTAKIKVFVRNTWDWVTLKLKKSDVDYILHHCAMRKALSPTLRRRGKEWFLDFGFQEKVDLSDTEALERRIVAVDLGVNTPATISVMQADGTILDRKFYKLSKEQDSLLHALNCIKKAQQNRCLSTPRLWAKVKGINKDISVKTAQYIVDTAVLYDADVIVFEHLNVRGKKKGSKKQRLHHWRSQEVQRIVTDKAHRLGIRISRINPYGTSRYAYDGSGQVLRGKNANLSTYELCKFQSGKTYNCDLSASYNIGARYFIREILKSLTAKSRLQVEAKVPALCKRSTCTLADLINLYAAVVGVPSTC

SEQ ID NO: 49036 - protein, 324 aa, unknown
  TnpB Polypeptide
VAQGGCGGTPATDTSPPRQGMEGARGLKKREAQGAARRGTQVQVPPRRQAVSLFYQDQWLEGHRSRTPLAPKGRRDTRSLVALLTRTPSSVTIIKDASDRYFASFVVTVETTPMPVTDDDVAIDLGLTHFAVLSDGTRIANPRFLRRAERKLRKAHRSISRKQKGSNNRAKARLRLARAHAQVTDARRDFQHKLSTRIIRENQTVYAEDLDVRSLLSCSRSAKSIHDAAWSTFLRMLTYKASLYGRTFHKVDRFLPTTQACSQCASINGPKSLHVRTWQCRKCATIHDRDVNASLVILAAGRAERIKACGGIVSPTARAVGVSQ

SEQ ID NO: 49037 - protein, 447 aa, Sutterella sp.
MHLKNTVSAMPNIVLLHLEFSLIDQVKFYPMLFRQGFLFKLKPNGRQARQMARYAGCCRYVYNKGLSWVKEQYEKKTGQRPSYKNLSALLPEWKRDPQTQWLSECYSQCLQQSMKDLSRAYSNFFSGRAAFPVFHRKHGSSDGFRYPQGFKLDESGKQVYLPGIGFVKYRRSRYIEGKAKNMTVMRKADGWYVSIQTEYEKEVPSHHGDEVGMDMGVVWFCTLSDGTQIAPCNALKKHLKKLAQKQRALSRKQKFSKNWKKERKSIAKLHQRIGNIRQDYINKVALDLSKKHAVIYREDLKIKNMTGSAAGTPEAPGCKVAQKSGLNRAILDQGWGKFFRRLDWKCEQRGATVIKVAPQYTSRTCPNCGYESKENRPSQSKFKCVKCGYGGHADIVGAINIKVRGQRMSACGEPDEKDRVRVNRRMETLHGADQQQEPIEAIIGESR

SEQ ID NO: 49038 - protein, 600 aa, Plantactinospora sp.
MRASAPPFRVGVKGRAGGKGTPERAWLGEVSAVVLQQALADLNVAYRNFFASACGKRKGRRVAPPRLRSRKDNRQAIRFTANARFKVLDNGKLRLPKIGDLDVRWSRDLPSAPSSVTIIRDAAGRYFASFVVTTPDEPLPAVESEVGIDLGLTYFAVLSDGTKVAAPKFLRRAARKLRKLQKDVSRKQRGSQNRRKAVVLVARAHARVADTRRDWQHKLSTRIIRDSQAVYVEDLCVVGLGRTRLARSVHDAGWSSFVGMLEYKASRYGRTFAKIDRFTPTSQMCSECGRLDGPKPLSVRSWTCLCGAVHDRDVNAAINVLAQGRWDNSNDRGAHVSPALVPAARREAVIHPAPRVLHTARRESPSFRARRSSTPALRVGWLTGHRRGRLPLHPMAAHRVLEDRDQHLLAGLPATGVAEQHGDVRVEAECLLHLVELVLPGAVEAVHRDDERRTVLLEVVDRREAVGQPPGVGEHHRAQRAERQFVPDEPEPVLARGAEEIEHQVVVDADPAEVHRHRRGGLRLDPVEVVDGDALLGEEFLGPQRLGLADRADQRGLADAEAAGNEDLDCGRQSVAERPAFPAVRVLVAHLSPVRRCCHR

SEQ ID NO: 49039 - protein, 315 aa, unknown
  TnpB Polypeptide
MFNDFSGPEMITDRKTLHDRYYYDIRQKKYMKSQLAESLIKSVSAKYKAIDTTFKKQYYTYTDADGDMAKYRKDLNWLQHPVVYKRPQADLVRGRDWSFVNDENGGFRLSIATLTGRTKVRFAIKGFEDIISDSDMPGLSIEDPKWKFGEAKLLSSGGKWYVHISVTAKLPVTNNEDISNIVGLDRGLVNIVTAADQSGLTARYSGDDARKIRARYNKTRVSLQKKGTRGAKRVLKRLSGRENGYMNDVNHCLTKALCENYPEDTLFVLEDLTGVSFEERNFHSKEQTNELRSWAFYDFGEKLKYKAVLRGAAGD

SEQ ID NO: 49040 - protein, 377 aa, unknown
  TnpB Polypeptide
MEVRAIAKIKITTTNEIVRTIKVYSKCLQFCINQAWKRGISNNIKLHPFVYKSLRKRGLPSQLAIVCIKQSCSMIKRAKSKPIINHCSMGYNFNRSASFKNNILSILTIKGRQKFNIIIPECYKQYFNGWNITESLLRMDRKGRCFFLFGFSKEVNAQSSNFQDRVLGIDFGINNLAVTSDNKFFNSSKVKQIKRKFKYLRSKLQSKGTRSSKRLLKKLSGRENRFMKWINHNISKTIISNFNGNKIVMENLKGIRKMRRGRRMNYWISNWSFYQLQSFIQYKAERKGIEVVRVRPNFTSQICSKCGELGSRSNASFVCSHCGFSLNSDLNASRNLAHPKLVERQAFVTKPYNRGCEVKGSYQRPTEAELMVKSPCL

SEQ ID NO: 49041 - protein, 373 aa, Oscillatoriales sp.
MSSVNTFLTLESITTRLIFTTRRKTKIAYRYLPTKVSKQIVRRVAETWKAWCRALKDWSGHPEKYLGKPKIPGYKHKERGRNVVIYPKDAISSPLLSRGIVKLSQTNIELTTEANNINQVRIVPKLDHYVIEIVYTVSEPDKFDGKYLAGVDLGLNNLVAITSNHPGIRPLLINGRPLKSINQFFNKRVAKAQSIKACRQVKQLNSKRDRRIDNYLHTVSRRVIDWCQLNEIGQLIIGKNQRWKQSLNIGKKNNQEFTNIPHAKLINLLTYKAQLAGISVVLTEESYTSKASALDGDYLPNIQAKTEAKVVFNGKRVKRGLYLTSTGRIINADINGSMNIARKVIPDAFEGIEGLPFIPVVLDLWTKITNVAV

SEQ ID NO: 49042 - protein, 639 aa, unknown
  TnpB Polypeptide
VSEKIDLQQEALNALKDAGLGSNSLRQAFIKGYRAHAYRQPSQEEEHVAAVTMSGRMRSIFHLEESDEDNLTSKCSCIYSDIQTALHDAYDRFETEDDRRLVELTNLVGRNCHELEGCLVIFTSFRAGMPGISMPGGTAPPPFGLSLLSLYARSDIIGIMSQKVVIERVQVRGAAPYLGMSATSDGQQVPLYSANPDIVMRWLCDGWRCRYNQLRSRRTKWDRESQTAVPLNGRPDMRSDRQARLECSWLTAMPAMVLQSPNRIENTDWWSANKRRRTLKKKHRNPGMMPRFKSRHDDLYFVCWHNKGANANYRQLNRNHGEVVITGQNPGACRLDGQSCRYSIHIRVRVSQPIRDYTSVGVNWTKRTLVFVNDPLPIGRERTGAMVGLDRGCVHTLATSDNRFLDLPKQRLERIDREIRRRQKAQARRVNMSGKTVREYRRNPSRTYERTGREISRLYAKAHRIIDDWQHKTTTLLVREYDLIALEDLNLQGMSRKAKAKPDPDRPGAYLHNGQSAKRGLNHALRSAGLAGIVEKLEYKTRLTGQNRLILVNPAYTSQTCSECGYCDSRNRESQADFECKQCHMSMNADLNAANNILKRGLDHLIGLDEAEHAETESAVQPAYRGKNASTMTCETSTR

SEQ ID NO: 49043 - protein, 259 aa, unknown
  TnpB Polypeptide
VKTYKTEIVLSDEQKERFLRTIGTCRLVYNLFLQTNKELYEKNKDTDLPKYMNNFEFSKWLNNIFIKNNPEYSWIKEVSSKSIRRTIDNANVAYTRFFKHQSKFPRFKKRDKNECRMYFVKTDAKAKIRYERHRIKIPTLGWCKLKEFGFIPTNKIIKSGTITKQAGRFYVSVRVEEDIEIRQRNKNDGLGIDLGVQNFAVLSDGARYKTLKQQKLNKRLVREQKALSRKYKAKKKNKKEGATHKNIEKQKLRVQKIYQ

SEQ ID NO: 49044 - protein, 290 aa, unknown
  TnpB Polypeptide
MLKREELKHLPVKKLFSAIRYNQRTFKPYLQRGIISLCTVHGRIKVSIGIPKYFQQYLDWQVKSATLSYDICIEKLRLHLVVEKESPQKLEANTVLGVDSGIINHAVLSNNVFFASNQIRNVKVRYQFLRQKLQALGTRSAKRLLTKRSGREKRFQADVNHRIAKMIVQQPFNVIVLEKLKVKKEKKNGRRFNRKLGNWSWRQLQVFVEYKAEAYGKTVVYVNPAYTSQTCSRCGQKGARKGLVFKCKHCGFELNADLNASRNIAQKGMTLLGRLSVNEPYATPHSILTK

SEQ ID NO: 49045 - protein, 544 aa, Streptomyces sp.
VGGLREVAASFVVPGPAGVAIRDRLRVSDADAAVLTEVGVYLGSLAAGDLAERSQQGLAHDAASWAVRKRELTGRSSARWAGSITKATHDQWALARRGQAAHMAWLRGQIASIEARLARPLGAKADKRAGLVRGYASRGEWHAKSRRLHALKDRLAVVEADRAAGRVRVVRGGKRLANTRHHLDTAGLDEHAWRERWRAQRMFLAADGESGKRFGNETIRVTDTGQVSLKLPAPLAHLANAPHGRYLLDATVRFQYRGAEWLDRVTVNRAVAYRIHHDPVRGRWYVTASWQRAATPALPLQAALARGVVGVDMNDDHLAAWQLDVHGNPVGEPRRFFYDLAGTAQHRDAQIRHALTRLLHHTRRCGAAAIAIEDLDFTDGTNREKHGRNKRFRRLISRFPTARLKARLVSMAAEQNIVIVAVDPAYTSRWGAQHWQKPLSTPARTISRHDAASIAIGRRALGHPIRRRTTPPPSHQSDGAGHRTAQARPETRRREEPRPHLPGPRTGCAPPGSGAKAGDQGAQHRSGHPAEHQSWQQDSLPLSL

SEQ ID NO: 49046 - protein, 175 aa, Cyanobacteria sp.
  misc_feature (175)..(175): Xaa can be any naturally occurring amino acid
KHVKSLNRWYNKKVSQIKEGKPQGFWSKKLAHLTEKRNRQMRDAVNKAARRVINRCLENNIGTVVFGWNQGQKQQANMGSKNNQKWVQVPTARLKERISQLCQQYGIRFVETEESYTSKSSFIDGDYLPKYGEKPESWKPSGKRVKRGLYRSALNWYINADCNGASNILRKVATX

SEQ ID NO: 49047 - protein, 178 aa, Bacillus sp.
MVFRNPKWFRILEEKLVKAQRILSRRKTGGSNWHKQRKKVTCIHETITNARKDYLDKIFTDLVKNHDVIGLEDLSVSGILKNSHLSKAISEVAWSQFKRMLEYKAEWYGKKVVVVAKNFASSQLCACSGYKNKDVKNLALREWTCPSCGSHHQRDINAGLNLRNEAIRLVTVGATGIA

SEQ ID NO: 49048 - protein, 464 aa, Moorea sp.
MKYTYQYRLYPETQQALTLNGWLRVCRYWYNRMLGERFEWWEQNRCPINVCPLICQLPRLKDPPNFYSQKKQLPAIKKDLVKIACSGELLDFSEVYSTVLQDVCIRVKNAFNRFIAGDKNGNNSGKPRFKNAARYRTLNFPNAANSWLKFCTVNGKWLFVQIPKIGLIKLRTHRPLPDGAILKQLSITKKADGWYCNLSLEDKSVPEFNPDNITPTWENSIGIDAVLDRDFYLATSDGKKLPSLKPLRRNQNRLNTVSRHKNNRIFGSRARRKLAKREARIHQQIARNRKDFQYKTAHKLVNTGKKVFFREKLNLKGLTRRNAPKIDEDGRFLPNGQSSKSGLNKSWLDAAFGQFFEVLGQVAAKANASVVEVQPNYTSQLLSYRDEFVFTGRNMREYFDSEFKLIVDRDINASINIKRVGLDVFPTIKRRRGNPVIVEPTTTNSTSKEVLTALCEYQKPTLKA

SEQ ID NO: 49049 - protein, 207 aa, unknown
  TnpB Polypeptide
VLVFKYHRWVFEEKELQKFLGLDFSMHELYRDSNGKEPAYPGYYRNAEKKLAREQRKLSRMQKGSNNRNKQRFKVAKLHEKVSNQRKDFLHKQSRQITNAYDCVCIEDLDMKAMSRSLNFGKSVSDNGWGMFTTFLRYKLEEQGKKLVKVGRFFASSQTCSVCGYKNAKTKNLALREWDCPQCGTHHDRDVNAAVNIRNEGMRLVNA

SEQ ID NO: 49050 - protein, 378 aa, unknown
  TnpB Polypeptide
MLIYEYKLDGLSRQYAALDEAIRVVQFIRNKCVRLWMDERGINKNDLQCYCAVLAKEYPFAARLNSQARQASADRAWFAINHFYENCKNHKPGKKGYPKFQHDNRSVEYKQTGWKLEPDGKHITFTDGCGIGRLRLIGNKKQQIGAFPIKDIKRVRIVRRADGYSCQFGVKAQRKIEHVPTGREVGIDVGLKSFLTDSEGNTIDNPRHYRKAEKKLKRLQRRLSRKQKKSANRKKARKTLAKHHLNVQRQREDFARKQANALVSSSDLIAYEQLQIRNMVRNHKLAKSIHDAGWGNFLRWLNYYAFLHNIPVIAVAPQYTSQSCSACGTLVKKALSVRTHICPGCGVVLDRDHNAALNILEKAKCCTVGHTGTDGLAP

SEQ ID NO: 49051 - protein, 468 aa, Mycobacterium sp.
MSTPAIPAIDAARPTVLRAYRFALDPTPAQEQQLRSHCGAARFAYNHMLALVKANLEQRAAERTYDMPEQELTPSLSWSFYSLRNLWNQIKSDIAPWWSENSKEAYANGIANLATALSNWSTSRAGQRRGRAVRFPRFKTKRARPSCRFTTGALGLVERDRRHVRLPKIGIIRTHESTRKLARRVEAGAARIRSATISFERGRWHVAFSVELLGDHTQRHGRRHRRAVVGVDLGITHLAVLSTPVPGVSDEQGMVANPDHLEKAQKQLRRLQRQAARRRGRDKRTGATPSARWLHTQAQINRLHARIANARTDGLHKLTTALTERFETIVIEDLNVAGMLANHRIARRISGAGWGELRRQLTYKTNDRGGTLIVANRFYPSSKTCSNCGAVKTKLSLSQRIYHCESCSIKIDRDSNAAANLAALAASAAATSSPSCGATQNEPDGNPQKTSTAGSGYRHGKSESDNAA

SEQ ID NO: 49052 - protein, 370 aa, Clostridiaceae sp.
VILGKKVRLYPTKEQEQKLWQSVGTARFIYNWTLARQEENYKNGGKFINDGDLRKELTILKKSELKWLNEVSNNVAKQAVKDACNAYKNFFKGLTDKPKFKSRRKSRPSFYNDTSKLKVKENLVLIEKVGWIKISEQIPMDVKYTNPRVSFDGKYWYVSVSIENENHVIELTDESIGIDVGIKDLAICSNGMTFENINKTRLVKKLEKRLRRLQRKISKKYELNKEGRKFVKTCNIIKLEKHIRLLHRRLSNIRNNHLHQATTKIVKTKPSRVVMETLNIKDMMKNRHLSKAIAKQGLYEFKRQLQYKCEFYGIEFVEADKWYPSSKICSECGHKKTKLWLFERTYICEECGAVIDRDLNASINLSRYSA

SEQ ID NO: 49053 - protein, 385 aa, Lactobacillus sp.
MMLRTQKVKLYPNQTMKKVLDDLCDYRRYCWNQGLALWNDMYDASVILADKKQRPNARKVRDELVANKADWQFQLSARCLQLALSDLGKAWQNFFDRAQPDWGKPRFKSKKASRQGFKTDRAKLVNGRLRLDKPLGVKTPWFDIKFKGARNLTGELKVVSIYRENGQYWASLPFEVMVPEKTKTGIKTAVDVNVGHLDYTGGQIKTLPSHLQAIYKRIKHYQRQLTRKRKVNGKQATQSKNYAKTRAKLQRDYRRVANVQHDLIQKFTTQLVNAYDQIVIEDLAVKQMQMSHVAAKGLHRSLFGYFRQVLTYKCEWYGKALLVADRFYPSTQRCSVCGHIKQGDDKVTLAGNHKHHTKHDEYICYQCSATLNRDENAVANLLALI

SEQ ID NO: 49054 - protein, 495 aa, unknown
  TnpB Polypeptide
MRHTTFRFTLDPTPEQVGQLTRHAGASRFAYNQCLRFVTDALASRKSDPTVTVPWSSFDLINALNTWKRSEAAGRVFVVAQDGIVTERAVGLIWRREVSAQVFEEAAVDLGHALAAYGKASSGTLQEHRSGFPRPKRKGHCRDSFRMRNRISRSGRCHIRIGEGHARTILLPTIGVVRVHDDTRRLRRLLRRVEHRRPLTGSPALAPRARLLFATVARHGNRWMISLNVEAPDFHAERRHHPPSVGCGKDFVGIDRGIAAFAVAATTDGREVARFHAPRPLARRLSRIQRRAQAVSRAKRGSRNRAKAVSRLVREYARIANIRQHFLHRVSSQLAKTHSQLAIEDLATANLIRNKHLSRAIADVGWGEFARQLTYKADWFGGELVTCDRWFASTRICSACGTTKNQIGLAERTFRCSSCGLIVDRDSNAAANLAAWADAAVLAPAHAPDRQAGGRITKASGGGTRAADSASADLAPEEGGTDALAAAGAKDTREG

SEQ ID NO: 49055 - protein, 486 aa, unknown
  TnpB Polypeptide
LTRKRSRPIWAASLLSNFQQRQVITDVEKDPAALTDNERGVLDEIARALPVMNAAGKQPTEAGDRYKMPAQGKSFLSYPFLEALLRASNNPDFLCGKLPRQAAQAVLKDCVQEMKSYYAAKREYKRDPGKFRGEPKFPGYNKPSGCCTTTLTNQDCILYDAGRGVHELKLPLTRERLSLGKAPIQGRLKQVKVIPTHGIFVISLTTEVKGELPEPAEVPQRIIGTDLGVNNFSAITNNLGKPCLLFKGGVAKSANQWYNKQMAALVSEQTSRTGAKFVPTPEARMLELRRDNYLSDYMNKVAKLVIRWCVENQVDTIVVGVNKDWKQGSHMGSQNNQSFVSLPFAKFRWQLQYRVERLGIRHIKHEESYTSKASFLDGDFIPVHGEAGADQVKFSGRRFKRGLYRSKSGQVLNSDFNGSAHTTRFARVATFCCRPRWQRKGENKQHGEYHFDGHAVLKRPSCGRTNCLPGGHPGHPAWRYGPRQGT

SEQ ID NO: 49056 - protein, 350 aa, unknown
  TnpB Polypeptide
MGVSLVMLKHTIHAKLVLDRKSKREAVEHEYHAWQRELRGSDERLYSATKQQAERFKVRVKRQNHHGLKMREYPMILRRDCVKLQEQKHAIFHWWIRIPLHPESIWIPIQLPYKQEPLLKYELRECRLLRGEDGEWYVNVTVQKQARLKRKYVAILPVDMGIRKLATTIEDGKPHFYGKEVRTIRGQYYRLRRSVGNPRITKKWKHAEQVSVRHEVHAITRRIVEQAKRANAIIAIGDLEGIRNQNCGRKFNRRLGSQPFYLFRQLLTYKANWEGIRVLTVSEAYTSQMCHRCGVRGQRVAGRFSCSNCGLVCDADVNGAWNIAKRAHGLLVHETGAVLALPRTLVVCEP

SEQ ID NO: 49057 - protein, 463 aa, Sulfobacillus sp.
MGCQRIIYNAKVQEDRYYRRFQRRMVGTAGMEVPIDQQYSRFITEQTAFLRQVPPQILRNGAVRWRQAYQRFFKKLSGRPKMKRKSGRQSVWLTSELFEFRPIVDDTTGAVCGYHLHVGTDKFPVGSIPYVAHRPHGIPSSLYIAIEGGHWWLSFAAEDPTVTMPKKTVDAATEQIAEDLRHLSPEQLAVRTLGGDRGVAKPLMTSDGHVFDLLPVQKTRIKKAWRQHKRWQRRASRRKKGSQNQKKAYRKVAHYQQYEKNVRHEYAHQTSHALVVNAANDLYVFEDLPIQQMTKRPKAKKDVAGHFLPNGRAAKAGLNRAILASAWGQVVTFTRYKALRRGKLVIAVPFAYSSQECAECAFTSPDNRPSQAAFVCQRCGHADNADHNAAVVIAKRGIAKLLSGEPLTKSHKTTRIFRKLGPERSKVTPGETHIRRAPSKTDMHRSQNQELRGVIRETPTSTR

SEQ ID NO: 49058 - protein, 427 aa, unknown
  TnpB Polypeptide
MAGVGLSHRDVRDEWLAQEREFDTPARVWKQTLSDVFGDIEAAREAAKSRVRRVIWRKYPDDDVKRKRLFTLLKIDRWGEDSYLRRLMRRYYRRGHTSVENQIVLDTQCYKTFDMGGDVWLSITSLIPRQRLVIPLNTTVAPSGTIRLILRDGRVEVHYAVEAETVTVQRPHGNGQIGVDKGYTEVFVDSDGDRHGAGLGEILSAESDRLKVKYQRRNKIGAIARKHQKRNSAKFARIRANNLGRKKMDRRKKLHRQKVRDTTFKAAHALVDKADTIAAEDLTSPMSGKSHGKNQNRRLNAWTKGVMAEALNSATQRRGSALKLVNPAYTSQTDSRYGVLLGERRGDLFYCFDGVVLDADQNAAKNILGRASDTEINLYTSYRLVKDILHRRTERFKNGWDWPNPDSSCSGPRLMPLSTESELPTLA

SEQ ID NO: 49059 - protein, 435 aa, unknown
  TnpB Polypeptide
MKQTLVAKLKVHTTPEQFKALRATQLAYRDALNFVSQYAFAHGKMSNKVRLQEGTYREIRARYLIPAQMACSVPRQVGATYKALWTKVKRNVALRKAGKTKKRFKGLDQPPKYVSPTLTYQLGHDYGFKTDQRVSILTLEGRVILPYTGYNQHVALIEHGASIGAAQLYYDKPKKQFYLLVSLTVSLAGATPETQTSVVGVDVGIRYLAVTGTTRGDCAFYSGKRMVAKANHYTRLRKRLQKKGTRSATRRLIAISRRERRLKQDANHVVSTRIVEQHPHSLIGLENLTGVRERTKRKRGRKATKKQRKANAKQSRWSFAELHGMIAYKAARQGSMAVKIDAHYTSQACPVCGHTCRGNRPDNGLLFICQHCHYTLHSDLVGARNVALRTLLIRQDWMSTGRLSIAPDVSSNEAKAERLKRYSELRWSLDTSSAL

SEQ ID NO: 49060 - protein, 219 aa, unknown
  TnpB Polypeptide
MSYQMSLLLMILGTVGAVIVLCLIHKYMAGKMAQILFGGILVVYGMAFILFAARTGIALTTVVSENRYTIISTGQEIRNQCIELTVEDENGTRATIVLGKLSTTLVNENQIICVEDLNVKGMLRNHHLAKSISDAAWSEFFRQLEYKSAWAGRVVVKVPTFFPSSQTCGNCGFQNKEVKDLSVRHWTCPVCGCTHDRDINAANNILKKGLSLLATPAAS

SEQ ID NO: 49061 - protein, 259 aa, Unicellular sp.
MRRSCLSGDRSKQICQHKDDDWYVHIQLKSDAPKPIKSDKVIGVDFGRRDIAVTSTNKSWSGKEIQEKRDKFNRVRASLQQKASQGTRSTRRRCRQILKRLSGKERRYQAWLNHNISKAIINEAKQTQSFVSIEDLTGIRERTNQKPRNKTERRRSNSWAFYQLRTFLEYKGIKEGIEVIAINPRYTSQTCHCYLHIGLRNNKSFKCSNKACGWIGDADLNGSLMIALVGLSVRQPGGNHLLSCAIDGGLQKALDFSVA

SEQ ID NO: 49062 - protein, 421 aa, Unicellular sp.
MILNYTYRLYPDAKQIDQLNEWLETCRVSYNYALRELKDWISSRKCPIDRCSLEFEYIMSADYSFPSYHYQQNVLPKAKKQFPRLKAVPSQVLQTNIRRLHDAWDFFRNRGYGFPRFKKVGQMKSILFPQFKSNPLTRWQIQLPKLGKVQINLHRPIPDGFVIKQVRVVKKAMGWFAVIAIESDIEIPEPSLQGHCIGLDVGLLSYCATSDHYVEPRRKFFKTEYRRLKVLQCRLGRKQKRSKNYEKARKRVEKQHNHVAFKRKDYQYKLSHKLCDMADTIFVEDIDFRIMAKGFLGKHTIDAAFGQFRTILKYVGKKRGVFVGEVDSKGTSQICPNCRTTVRKELSDRYHICHECGYGVDVPVDRDIASAQELCNRGIETYRGTPEKQEIGSQVDLSGNFVLDKWRRGAMPNREFGKPAL

SEQ ID NO: 49063 - protein, 387 aa, Boseongicola sp.
MTLEAQRQLRNDALAERIDRYRKTGRSIPCFDQCRSVTKCRRDIPAMAECPLRIQRGTLKRLDEACRHFFRRTQEGGASGFPKFKGRPFFNSMSIVSGVKVRDGTLHIPSFGALKIQRKGGNPYPDRTPVSAVLKREAGKRTAIVCYAVELEEPTDNGIVLGLDRNGGQVADSDGVLHEMPDMKRLDGKARRLQRQLSRRKKGSKRRERTRRHLAKDQRKKAQKRHDWHYHVSTALAVKAGSIAVEGLNVTGMTRSAKGTVEDPGRNVAAKSGTNRVILNTGWTALKRKIDCKAANVIVVPAMYTPRTCHECGVVDSDSRRTRDDFICMACGLAAHADLNAAKNIREKALERLCAMEAASGTGASARRGAFGLPTPTTREFNRGDTL

SEQ ID NO: 49064 - protein, 409 aa, Bacillus sp.
MAKVKTIEERNKELALIGKKLQLYGLKMRVYPNKKQTEFFNQTIGCARFTFNFYFQEKQEIYQATGQTLSYVTFKKSFNALKKHPAFSWLKHADKFALENAMMNLDDAYKRFFKGEVKFPKRKKKHSAKQSYTTNITNGNIKLNVENNTVQLPKAGEVSCKIDKKVRKQLLENGLQGTIKSATVTRHSDGTFFVSLKIEEIVDIKPTIDVTQISDEDIVAGDLGLTHFIILSDGTKIENPRYYQKQLKKLAKMQRKLSKMKKGSNNYIKQRKKIAKLHLHITNMRRDFLHKVSRKLVDENQVIVLENLNVKNMIRNKKLAKSIQDVGWGMFKTFVTYKAEWVNKHVVLVDTFFPSSKLCNGCKTKNTLLSLNEREWVCPSCGEKHDRDQNAALNIKEEGIRLLKEQKIA

SEQ ID NO: 49065 - protein, 415 aa, unknown
  TnpB Polypeptide
MNRAHVIRLNPTAEQEVYFRKACGVARHAYNWALARWKEARAEGKRVKMKELKAEYNRVKGEQFPWCYEVTKCAPEQEFAHLGQAFDNYWHMKKEGTLPKLKHPRKDEEEAGFPRFKSKKRDRLSFYLANDKFSVDKHTIRIPKLAAVNMTEELRFQGKIMSAIISYRAGWWFVSISVEVKHEFPTHSGGAVGIDLGIKTLATCSDGVVFENQKHYRQGLGRIKGLSKGLSRKVEGSQNWWKNTKKLAKAHYRVACQRQDSLHKITTHAAQTHALIGLEDLHAKGMLANHCLAQAVSDASFFEVKRQLLYKVEQYGGYIQLVDRWYPSSKTCSACGWVDKDLNLGDRVFICESCGVTIDRDFNASLNIRDEALRFITDVPVVASSERKFACGVGSSGSRCVESETFCDEASTKVL

SEQ ID NO: 49066 - protein, 627 aa, Streptomyces sp.
VRELRELTAPFVVLGPSGVAVRDRLKHLTAEDETVLRLVGDHLGTVASRDLKARCAVGLDHDSEGWAARKRVVTGVSSSRWAGSITKATHDQWALARRRQLAHIQQLEAGVRMIAHRLSLPVGEKGSKRAPGGYGSRREWRAKARRLHVLTDRLQAARADWEAGVVHVVRGGKRLLNTRHHLDAAELTEEEWRTRWQAERRFLQADGESGKRFGNETIRVTPGGEVSLKLPAPLAYLANAPHGRYVLTARVRFAHRGEQWADRIHANRAVAYRIHEDTTRGRWYLTASWTNPVVQTVPLAAVRAGGLVGVDTNADHLAAWRLDAHGNPTGAPRRFGYDLSGSAAHRDAQVRHALIRLLHWARRHHLAIAIEDLDFTAEATREKHGRRKRFRTLVSGMPVSRLRARLVSMAAELGIPVVAVDPAYTSRWGAQHWQKPLTSTTRKPTRHDAAAVAIGRRALGHPVRRRTAPPPAHRSDEQGHRTVQAPPGVPGREGPRPRIPGPRTRSLHAGCGAYAGDQDTQHRSGRPAEHEFWQQDSIPLSFQEWCERHEACGATPSGRGPSRLGTVAPSVHRSATAATASVGRRPLTPDRGTTGPAGGGAGGPQDGRSQSQALAVASSRRPLFAVR

SEQ ID NO: 49067 - protein, 196 aa, Bacillus sp.
VDIGLKELFVASNGTKERNINKDAKVKKLLKRKKSAQRDMSRRFKKGVKIQSAGYEKAKAEHLRLSRKITNIRNNHIHQATAKLVKTKPMRIVVEDLSISNLLKNKKLSKAFSFQKLHFFFQCLSYKCEKYGIAYVKADKWFASSKICSCCGVKYDHSVQPEGQWSLKIREWRCVECNSHHDRDVNAAINLSRWVK

SEQ ID NO: 49068 - protein, 391 aa, Promicromonospora sp.
VLVSDWWQHGRHAQAHLVPVPSRPVGRTGARAVPARRSGEVRLQPGPAPAQGRLRSHALRAAHGAGGGVRQRAARERWGPGWSGALVGVRSDQRIQRLEAVRGRWAPVPGRRRGALPSADRPTNVDAEQDSSPHSDPRVEHPWVGVDRGLHALAVAGSSDGTEVLRVDNQRALRRGLPRLRRLPKAVSRKKKGSRNRKKAVVRLGRQHARIRDRRRHVLHQVSNQLVKNHARLVLEDLNITGMTSNRKFSRAISDAAWGELARQITYKQDWRDGQVVVADRWFPSSKTCSSCGTRRKDLTLKDRTFECRECGLEMDRDLNAAVNLAAWAENHTPPVIDGAGRGVARVGDRQAAGPVKNAHRQDTPTRDGSRGRGDTGLDDVGTNPRTAPAA

SEQ ID NO: 49069 - protein, 392 aa, unknown
  TnpB Polypeptide
MYLTERHIIKNNRELDILCFNSKNLYNKALYLVRQHYFNTKNYLDWIKVNKLMVDSKDIDYYLLPNRVAKQILKLLDRNFKSFFALLKKKKNNTYDKPIRIPRYLDKQGRYLAIFNKEAVSKRYLKKGLIKLSSLSIEIPTKVTESNLVEVRVLPRNNHHVVEVTYKVEEKESKCDNGRYASIDLGLNNLATVGSNVVKPFIINGKPLKSINQYWNKEKSRLQSLLKGNKETSKRIESIANKRNNKIKDYLHKSSRMLVNFLVSNNISTLVIGYNEEWKQNINTGKKNNQAFVNIPFYTFIKQLEYKCKLEGINFIITEESYTSKCSFLDNETIGKQENYLGKRIKRGLFRSAKNRIINADLNGSLNILKKAVGEFQYPIEVCSTPLRVTLK

SEQ ID NO: 49070 - protein, 306 aa, unknown
  TnpB Polypeptide
VVKNKKAMGVQQVLLSPDHETKAVLNYLCQQSGKLYNSGIYFARQTFFKTGKLLTGKFDLAYEPSVSKTMVAQSMPSTPAQQTLLSVIEAFKSFKELRSLFLKGQLHFKPKAPGYLTGSKLFKVAYPNGGGQKPTLINGQLRFSLGLTVRRWFGISDFFLTMPSNIDYSKVKEFTILPKNGAFYLEMSYEVEREKHDLDINQALSIDLGTADNLAACVDTLGNSLLIDARSMKAMNQLGNKKVSTRKENKPEAYWDNWLDRVTRKRNHQMRDGVNKAAKLIIDHCLKHGIGTLVIGWNEGFSAIRC

SEQ ID NO: 49071 - protein, 398 aa, Limnoraphis sp.
MLVLEAKLYGKSEQFKIIDEMILTAQFIRNRCIRHWMDNKGIGQYDLSALTKDLAKEFAWCGKLNSSARQASSERAWASIKRFYDNCRQKVAGKKGFPRFKKNVRSVEFKVSGWKLSENRKQITFTDKFKAGTFKLRGGYDLNFYSINQIKRVRIVRRADGYYVQLCVNVERKIEHKFTGKVTGIDLGLESFYTDSDGNRIENPRLLRKSEKRLKILQKRVSKRQKGGENRNKAKQKLASLHLRVSRQRKDWLVKLASALVASNDLIAYEDLQVKNLVKNHHLAKSISDASWSIFTNWVDYYCKIHGIVCVAVPPQYTSQDCSGCGEKVKKTLSTRTHKCKCGTELHRDHNAALNVLAKALKMLGLEYQTTVGRTESHAWGETSLYLIQETDLDKLIR

SEQ ID NO: 49072 - protein, 131 aa, Microcoleus sp.
NIRQSLNAKPGNKQERRRTNNWAFYQLRLFIQYKANIAGIPVVFVPPAYTSQTCSNCNHIHPDSTKSYRNGKRFVCGHCGADVDADYNAARNIARLGVSINTPEAPKLFCSLVPQSALGAKPHPQPQGRVG

SEQ ID NO: 49073 - protein, 445 aa, unknown
  TnpB Polypeptide
MQIYSTYSVKIKHYNHIFKDTVSVYRGAVDFLITVCLNEWDNISKIDQSQKRQQYVERLCHRTNGNPNPVYHFDKKFYKFPNYLRRGAINEAIGKVSSYKSNLKNWEETDIKVHGNKPSFPRAGFTYPCMYRTDMYKQTELYEAKIKVFIRNTWDWITVKLRKSDMDYIERRCAGRKKCAPTLQKRGHEWFLDFPFKGRVTLCDTAVKDQTVVSVDLGINTAATVSVMCADGTILGRHFCKLPKEIDSLSHSINRIKKAQQYGNSRTPRLWARTKGINHDISVKTVQFIMDVAVLYNADVIVFEHLDKQGKVKGSKKQRLKLWRSQEVQRIVADKAHRLGMHVSHICAWNTSRLAFDGSGYVLRGKYGGFKTYELCRFQNGKIYNCDLSASYNIGARYFIREILKSLDESSRLLIEANVPQCSKRSTCTFATLINLNAELMALPS

SEQ ID NO: 49074 - protein, 386 aa, unknown
  TnpB Polypeptide
MCKHAYKFRLYPTRKQEQLLTWTLDRARELYNAALQERKDASRMAGKTINYYDQANQLPEIKEMRQEYQHIHSQVLQDVLRRVDKAIKAFFRRVKAGEKPGYPRFQGRNRYDSFCYPQGGYSLTADNRICLSKIGSIKLKLHRQIKGTIKTATIKREGDCWFIIFACEVEDSPKLACTGEAVGIDLGLTHFATLSTGDTIDNPRYFRQSEKKLARAQQKLSRKKKGSKRREKAAKLLGKLHRKVRRQRQDFLHKQSRQLVDTYETIVFEDLQPTNLFRQPKPKQDENGTYLPNGASAKGGLNKSINDAGWSQFQQYCTYKAANAGREVLFVHPRYTSQICSGCGTVKKKDLSERWHSCECGTELDRDHNAAINILRLGQSLQGTRP

SEQ ID NO: 49075 - protein, 431 aa, Herbidospora sp.
MARIVKRAYKYRIYPTPEQAQVLTRTFGCVRFVYNKALEERIRAYRADNERLTYDATSKALTAWKKTPEFAFLKEVPAIPLQVALRNLERAYTNFFARRAGYPAFKSRKRSKATATYTRTAFRLRDGGLWLARMSGPLAVVWSRPLPEGAGPSSVTISRGADGRWFASFVVEETIPPLPQVDYAVGVDVGLTTLVTLSTGEKVANPRHERADRRKLTRAHKALTRKTVGSANRDKARFRLARAHARVADRRRDFLHKLSTRLVRENQAIAVEDLNIRGMVGNHPLARAVSDAAWRELRAMLEYKSAWYGRELLVVNRWFPSSKRCATCGDVRRDLPLDVREWACHCGAVHDRDVNAARNILAAGLVERRNACGADVRPQTRLLSGEAAGDETGKLTGDRGSPLPSRGGDEVKGVSSRRASRPAAPASRWPC

SEQ ID NO: 49076 - protein, 375 aa, unknown
  TnpB Polypeptide
MWRVKVLLSYKFRLYPKSEQEEKLVETLEICRWTYNYFLSQWNGKERTPSRLELQAQLPVLKRVKPELNNVYSKVLQMVLYQLYSNLKALSQLKKNGKKVGRLRFKGKGWFKTFYYNQSGFKLIKTGKRLDLLHLSKIGDIPIRIHRPVKGKIKQIIIKRYNSGKWFACICVEREVKAVRREPKKVVGIDVGIKHFLTDSEGRQIENPRFYERTLERIRILHRNLSRKKKGSKNREKARVKLARAYEKLVNQRNDFLHKLSRFYVNNYDVICVENLNIRGMVRNHKLAGKILDASWGKFLQLLEFKAERAGALMVKVNPRGTSEGLAYENPLRDWISANRIKMRGWGSPKTPVEMRPLLVEVPASFIVEAGSPLR

SEQ ID NO: 49077 - protein, 394 aa, unknown
  TnpB Polypeptide
MEQTLTAKLHILPAESDMSLLIKTMKAYSLACSYVAKYVSDHQMPLNQFKVQKETYDTCRSVFTLPSQMAVSVTRTVIASYKTIQTMQAEHPDRFRKSKRNARIIPKFTTPQVSLVWNRDYSLVKDKVTGEMLFSVNTLNGRIKVSFYSNAMDWAFAPGSKFGTAKLVYKHGKFFLYVPVTKVVPDSPVPSAVKNVVGIDRGIRFLASAYNSEGKTFLYSGRDVKRRRAHYKEVRAQLQKRRTPSSRRRLKAIGSRENRWMDDVDHCLSKALVESQADSTLFVLEDLTGIRGATERIKTKDRYISVSWAYYDLETKLMYKAARKGDTVIKVDPRYTSQTCPKCGHVEKANRDHFKHIFKCCNCGYTSNDDRIAAMNLHRMGIEYLTQAQSSDKD

SEQ ID NO: 49078 - protein, 388 aa, unknown
  TnpB Polypeptide
VRVTYKYKLYNSKKNKHLHQTITLAGRAYNHGIALHRRYYRLYDKHLNQYALMKHFTKLKKRPHYAWLNDIPSQALQEIAQRIDRGYRLFFRNLKAGIKTAPPLFKKTRKYKSYTLKQAGWKLLGDSRAQIGKRVYKMCRDRTLVGDVKTVTIKRDALYDLYLCFSVEVDDPKVRPTSGKMAGFDFGLKSFLTVHDGFESYEIASPELFKQSLKSVKALSRCLSRKAEGSNNRRKARARLARAHRAIANKRLGWFFKLSHDLTERYDYLFFETLNLKGMQRLWGRKVSDLAFGMFLNVLQYVANKKGKVVALIDPFFPSSRLCPHCGCINEHLELSDRRWRCPHCHEIIERDVAAALNILREGASSLGGGDVRPVLGQSLLMPESHAL

SEQ ID NO: 49079 - protein, 378 aa, unknown
  TnpB Polypeptide
MKTAYKFRLYPNRQQEAQLALTLDTCRHLWNKALADRKNAWEREGITRSYEDQAALLAFEKQSNPYLNAVHSQVEQDVLRRLQKSFDNFFRRVREGAQKKGYPRFKSINRYSSITYPQSGFKLNGTRLILSKISGGIRTFVHRPIVGRIKTCSIKRDKTNAWYVIFTTELDNPTMLKPKTAIGVDLGITHAAVTSDGQYFDYPKYYVQAEKKNRAANKSLHRKKLGSNNRKKAQTKLARIAKRVTNLREEFLHQVSRKLVNSADSIVFEDLSIQNMLKNHCLAKHIQDVSWGKLIRFTVSKAERAGKTVVLVNPYNTSQRCSACGEIVSKKLKDRVHICSRCGLIICRDLNASMGIRTLGLRGIACGEQTSGFGQCPK

SEQ ID NO: 49080 - protein, 655 aa, Streptomyces sp.
VSRKLQLADGETSRTACARAVLRTGVDEKTGEFLPTTVLAERIDWAADLVSGMVADLLAEHWNTKDVDVLASGEDAGGRKLPSNAWMAMRRLGWITAPPEGVQANDRIIRMAQEQAGRTLRSTKWRADVTAGVIATRPGDPARRTAQEWDAVREAIPGGEYLPSSVIKSRTRQVAAFERKHGRMPADLFEAEAEPRTAKMLLLAACDGQQATIERADEPGRALLRLQLPTRPNPASYKDWTWVACPIQPPPTVPASAVLHLPTLHIKQGKVHADIAFTHAVPKAQRSGHTIALGIDWGLGTLLSAGAARLHDNGIITALGAGGQFRAAGVLARQHRLRRHSEHLHAKADQYERLIGDSDGHALEVKHQVLRDEIGHVSLRRSNLNDALARASARWAVDQAVAARATVIYIEDLRSMEALGMGRTHNTRMSQQVRGQIVDRMRHLAAEVGIAVVTVPARNTSKHCPQCLTPLRHRKAPDRRTTPGWKWAICPNPDCRWQGDRDQGAWRRIAARGLAHQTKTACDRASGTMVIRSVVDKLEAKAAISTAIETSRKDRSKTGPTRPRTTRSAPRRRRAPSPTRPSGLAGKRPEGHANTARRCLPRAAHRDQGVNTSVKHTHQPRGAALGAGFHLHAHASPPQWAEPAPDTTSCMGSLN

SEQ ID NO: 49081 - protein, 268 aa, Leptolyngbyaceae sp.
LPDGAEPTTVTVKLSPAGRWSVSLLVDIEIEPLPKSPNEIGIDLGVTSLVALSTGEKVANPKGFSAKRRKLKRAQKALSRKQKGSNNRYKARLKVAKVHQEISDARQDFLHKLTTRLVRENQTIAVEDLAVKNMMKNRKLALSISDAIWGELVRQLEYKCAWYGRTFVKIDRWFPSSKRCAECGHIASKLPLDIREWDCPKCGTHHDRDVNAAKNILAAGLAVTVCGANVRPERHKSDGSCYEAERSRSDPGNPRAFTPGRMSTESAL

SEQ ID NO: 49082 - protein, 425 aa, Verrucosispora sp.
MLVMMQLRYRFRITPDVAQRAALAQAFGCARVVFNDGLRLRQRAREAGEKYISDAELFKQVITHAKGTEERVWLGEVSAVVLQQALVDLNSAYRNFFAAVTGKRKGRKVASPRFRSRKDNRQDIRFTKNSRFKVLDNGRLRLPKIGDVPVRWSRSLPSDPSSVTVIKDAAGRYFASFVATTAEDEILPPVGSEMGIDLGLTHFAVMSDGTKVSAPKFLRRAARKLKRLQQDLARKTKGSNRRKKAVVKVARAHARVADTRRDWQHKLSTTIIRDNQAVYVEDLAVAGLGRTRLAKSVHDAGWASFTSMLQYKAARYGRAFGRVDRFFPSTRMCSDCDRINNKMTLDVRTWDCPCGSHHDRDINAAINILAAGQADRLNDRGAHMRPGPIPAARGEAVTHPDAACSTRSVEGTLVPQGEEDVKTPR

SEQ ID NO: 49083 - protein, 185 aa, unknown
  TnpB Polypeptide
MCCILDADGKQKAVYSCRGGDAYRSKCKVLLEKIEKSRVYTDKDNAAQPNHKYYLRLKNLSEHYAHQVSREIVDFCVREEARVIVIPSYDKEFSKMVQYRSGMYSPLYLGSRIREFLKYKAWSVGIVVLELSAEGTSSRCFVCGGKIKKNGAMFECENGHQGSRFLNSARNLGVKCLKDFERKRK

SEQ ID NO: 49084 - protein, 604 aa, Acanthocystis sp.
MVTSPAQKSKNSSTSATGRSDTGQTPGKLRASELPEDNDDMIYQHSEHQKEITRSKTTEKSSAMLECPLGDKRTTFNDKSVSSNGIAPRVSSSPTSPPASTGNARALRPFWNSRCKEISEKLSWPQGTVCVASPSSSSNGCSHSTTSVSQSSTPKDVPRNKSCPTTSSALCRSFAVAETENVDTSADQTPSSRLLRMRKIKMNPTKTQKLMLNKYADAARFTYNACVSSVNDKTHTANKFTLRNAFVTAKNNPFFEDKKWILVTPKVIRQQAVFEVAKNFKSAFSNKRNGNIDRFKMSFKTLRNQRASGYVLGIERAVKFEDDDVPSKRSGKLTILSKSIGSIRFFEKPPITKVPEAECSIQRDSFGDFWLQVPVYKTRKPSNCGPAVAIDPGVRTPLSYYSPCGSSGFLGGKMKDRIDDIKGCVATVDRRLSKAEGAFRKKLLWHRRRLFRKYTHVRDDFHWKIVRDITDTYGCVILPHLQTSRLCGSLKAKTNREMFGISHFTLKARMEMKCEERGIMFQTPTEEYTSKTCGNCGSINGSLGSSETFRCDCGLVCHRDLHAARNIYMKWFLETERDARAPEAFAPLLASCGHPQESYGSGDA

SEQ ID NO: 49085 - protein, 268 aa, Aigarchaeota sp.
LAKKLFTQLDPQLYRFYGDKVRISVRPRQFLFVQLKYGDYQRRLIDAWREGKLKTGEVTINETEIIVPFKKEVDLSNPGDWIAIDINESNVTAVSSNPHILRIESKLRTIHTTYFNIVRRIQRLRKLKPKAAERLLRKYSGRRRRKAMDECHKIARMVVDFAKKHKMGIIMEVLRGIRRRINYGRRLNRRLHSWNFRRLQFYIEYKAKLEGLPVVYVSPKRTSSLYPICGGRLAPNGCRRLKCGCGYENDREVTACLNMLRMRGARCP

SEQ ID NO: 49086 - protein, 376 aa, unknown
  TnpB Polypeptide
MRTHEYKLKPTKKQTKELERLFWETKCLYNTALEQLINHYKETGKHLNRFTHDRMWNKETCPQLPAVLVDTTIVRLHQSFANFFRGLKQGKKKGFPRFQSYKRWSSFSFRDYKSGGRIVNNRFHLNPKNKIKVILHRPIVGTPKFSRVVKRADGFYVQVVCDNIPKIKAKKTNKQVGLDLGLKYFVADSNDNKTEAPKFFRKAQYKLARNQRQLSKKKKGGKNRNKARQLVAKNHLTIQRQRKDWLHKLSYKYSNENDVVVVENLNVAGMVRNHHLALSIQDASWATFLSMLEYKLQTLSRTLIKVNPAYTSQICSQCGAIVKKSLSQRTHYCPECLYVDDRDCNAAKNILKMGTERSLAEIASIEGSMKQEARRL

SEQ ID NO: 49087 - protein, 385 aa, Proteobacteria sp.
VPERQTFAYKLYRSKCNRKLHRQIHVGGAIYNHCIALHRRSYRLYKKSLSCFTLNNHLATLKKLPKYAWWKQLGSQAIQNIAARIDQGYQAFFANVKARKARTISRRVGPPSFRTVRNAKSFTLSQAGWKLLEGNRLKIGATIYKYAKSREIDGTIKTVTIKRDPLGDLYVYFSCILDDQQPIDRVMTGQSAGVDFGLTTYLTGSDGTEHQAPQPFKKHLKAIAKAHRRLVSKKQGSHNRQQALHHLSRTHRRVTNHRQAFHWKLAHELCAHYDCIALETLNLQGMKALWGRKVSDLGFATFVETLHSVASTTGTLVQHIGKWFPSTKLCSACGCINQAITLRDRVWPCPDCGATHQRDVNAAINIFREGASSPGGNLVSLASAS

SEQ ID NO: 49088 - protein, 423 aa, unknown
  TnpB Polypeptide
VHQAYRFALDPSPRAARTLASHVGARRFAFNWGLALVKDRLEAHKRGEDVEVPWTLPALRREWNRAKETAAPWWRENSKEAYSSGLAGLADALKNWSESRKGKRRGRRMGFPRFRKKGRGRESVCFTTGAIRVDGKSHVVLPRIGRVRTHEPTTALLERIEAGRARILRATVSREGGRWFVSFTCEVEREPKAPRFPGTVVGVDVGLRHLAVLSTGEKVPNPRPLRKALSRLARLNQALARRKPTSRNWEETRRKLARLHARVANIRRDAIHKLTTRLARTYGTVVVERLNAADMLRNRRLARAVADASLAEIRRQLAYKTVWYGSHLLEAEWFYPSSRTCSRCGVVKESLSLWERVFRCDACGLALDRDENAARNLAALAAAVAGSGPETLNARGRDVRPEAAFGGRPAVPEEAGSRRRAGA

SEQ ID NO: 49089 - protein, 432 aa, Moorea sp.
MAKTKSPIGTQQILLHPDKETEAILVYLCQQSGKLYNMGIYLARQIFFKTGKLLTGKFDLLYERSVGKSMIAKSLPSTPAQQTLLSVAEAFKSYKGLRSLWFKGDMKDRPSPPKYLKGSKLFKVAYPNSGGQKPKVKEGQVVFSLGLTVRRWFGVRSFSLPFPSNLEGRKIKEWTILPLNGAFYLEVSYEIPNQTPVQQDSNEALSIDLGTSSNLAACVDTLGNSFLIDSRAMKSYNQYWNKQVATRKEGKPQSYWDQWLDRVTRKRNHRVKDGINKAARLIVNHCLKVGIKTIVLGWNEGFKRNSNMGRLNNQEFVQIPLGKLKDRLSQLCDLYNIRLEVTEEAYTSKASYLDGDSLPKFGEKPDGWKASGRRVKRGLYRSANKSIINADLNGSANIMRKVARKLDLDLSRLGRRSLTTVARIRLWVQARV

SEQ ID NO: 49090 - protein, 424 aa, Flavobacterium sp.
VFGCQQVLIKPDKELKAVLEFICGESNKLHNCAVYYARQMYFKARVYVRPFDLINELKRNPHYGALCAQAAQQTCGAVGESVKSFKGLIKLFREGGLEHRPKFPNYRTKDGLHLIAYPKQALGKKLIDGQISIPLGQKVQTWFGVKNFTIQMPSNLDYAVVREVRILPRNGQFYAEFVYKTEAVYSDVDPKKVLGIDHGIDNWLTCVSNVGSSFIVDGRHLKALNQWYNKRVSTLMDGKSNGFWSHQLARITEKRNRQMRDAVNKAARLVVTHCLENRIGTVVFGWNKRQKDSASMGRKTNQKFVQIPTARLKKRIEQLCEQYGLQFVETEESYTSKASFIDRDFLPTIGAKPDEWKESGRRVKRGLYRTGLQNWYINADCNGAANIIRKVATMLGLDLNGVSRGVLTAPLKVRLWTLQESPRL

SEQ ID NO: 49091 - protein, 482 aa, unknown
  TnpB Polypeptide
MESAPRPTAPNEPWRRARMTDNTYHRAYVFVLDPTPTQLHQFESHAGGARFAYNHMLGLVKATLDQRAAEKTYGVPEDQLTPSLSWSHYALRKMWNTRKDAAAPWWSENSKEAYSNALAGLASGLKNWHDSRTGKRKGKPVGFPTFHGKKSKKSFSFTTGVMRLEPSRHHVTLPKIGTVHVMESTRRLYRLVERGDARILRVTVSEHRGRWQVSLLVELPKPAPRPDKGRVVGVDVGCKDWIVAATSDGTEVMRVPVPGQLEELDKTKRRLQRRNHNRQAPDKSTGQKASKRWLKAQRRINRCDWRMAAVREDTLHKVTTELAERFDTVVIEDLNVQGMMTRGGAYKKGLNRSVARAGMSASRTMIGYKANNTVKANRWFPSSKTCSSGGAVKTKLRLKDRVYVCEGCGHVMDRDVNAAVNLAKYGELSITAGSPLVAGRGASDQTEPPAGGKAQGVEASTLTSGSVSLATAASNQLSLFDG

SEQ ID NO: 49092 - protein, 274 aa, unknown
  TnpB Polypeptide
LRQYGNEKNRRDVMLAHDEKHLYIPHKLGDSVKIKLHRPMEGTPKTAHLVLRADGHWYVLIVCETTAKNEHVPDECTHADIGIDVGLKSFLTDSEGNTVDNPRYYRTSQATLRRKQRTICRRKKGSRRRRKACKSTAQTHLKIQRQRRDHHFKTAKQYADKYHHIVVEDLHIDNMVHNHHLSKSIYDAGWGQFVNILSAKAENAGHAVIRVNPRYTTQKCSTCHELVQKSLSVRTHVCPFCGYIADRDTNAAQNILQRGVGLGHSLQASTSRDT

SEQ ID NO: 49093 - protein, 429 aa, Acidianus sp.
VLRKLRIKSLQPEEEYIYLTYSLENDKKEESKILLENYRVLLQKALDWLWERTKMERKEVKKGKKVLTKVKITLPKKKQVYNTLRDELEKINNLASHYVDKAINDAYSILRSWKRRVEKGQASLSKPTLRKVYVRVKSTLRKVEGEEVRITVRPYEYITFSWSHKWFSKRVKGLELGEPVIKEDKVYLPFRYRLPWFTPLDFLSIDSNLYTLDAYDGEKFVTFSMKELYSMKYGMELKRGRIQSFASKHGRKGKELLRKYSHRERNRVLDYVHKFVNKLLEMYPLTLFAVEKLDKQEMFEDANDSLSKKISRTVWRSIHRVLKYKAPLYGSFVKEVNPHLTSKSCPRCGWVSRKVGRTFHCERCGFTLDRQLNASLNIYLKMCGFPHIRDIPRVWVGVIPLKGRRGNGFPRDSVEAQGLRIDIKYYEIL

SEQ ID NO: 49094 - protein, 230 aa, Acidianus sp.
MARRGSKAIRASVSMKIALSDSLLALVNNYVKALRFTLFWLKENVKNPEEKGVLSKVHEELYEKLRGEYNLPSKVAEDCYRDALSIYKGWYNNPKKGRFPRVYKPTVWLTPKASYDVDFERMTVRIAGVGELPILGYPRNLKEYLSWKMREARLVVKDGKAFLKVVFEKEEEGKVESKESIAVDINMSEIVVGKDDRNYVRISTRLGEVYHWKSLAENLQKKIPKKVEGE

SEQ ID NO: 49095 - protein, 410 aa, Acidianus sp.
LGVKGAESPQAGMDSPLIFKYFFADFLSMARRAKAIRATVSMKIALSDSLLALVNNYVKALRFTLFWLKGNVKNPNEKGVLSKVHEELYTRLRGEYNLPSKVAEDCYRDALSIYKGWYNNPRRGRFPRVYKPTVWLTPKASYNVDFERMTVNITSVGELQILGYPRNLKDYLSWRMKEARLVVRDRSAFLKVVFEKEEEGKVEPKESIAVDINMADIVVGKDDKNYVRIPTRLEEVHHWKSLAENLQKKYSRRWRENKRILHRIHSFHQKARRIMEDFARKVGKWVVEVARMMGSNVIKLENLRNLIKNVEKLPKEFHDKLYLMQYRRLQYWISWQAKKHGMIVEFVNPSYSSVSCPKCGQKMVEVSHRWFKCSCGYENDRDVIAVVNLNGRGSLSLSTAPQMRDVRANR

SEQ ID NO: 49096 - protein, 431 aa, Acidianus sp.
MDSLLIFKYFFADFLSMARRGNKAIRASVSMKIALSDSLLALVNNYVRALRFTLFWLKENVKNPNEKGVLSKIHEELYEKLRGEYNLPSKVAEDCYRDALSIYKAWYNNPKKGRFPRVYKPTVWLTPKASYNVCFERMTVKIASVGELTILGYSRNLKEYMSWRMREARLVVKDGKAFLKVVFEKEEEKVEPKESVAVDINMAEVVVGKDDKNYVRIPTRLEEVHHWKSLAESLQKKYPRRWMENKGILYRIHSFHQKAKRIMEDFARKVGKWVVEVTRMMGANVIKLENLKNLIKNVDKLPKEFHDKLYLMQYRRLQYWIVWQAKKHGILVEFVNPSYSSVSCPKCGQKMVEVSHRWFRCSCGYENDRDVIAVVNLNGRGSLSLSTAPQMRDVRANRWGESPLVGRKSATYAISYGSYITDHAVNLFFVI

SEQ ID NO: 49097 - protein, 267 aa, Acidianus sp.
LSILFWMKPRNLKEYMGWRMKEARLVVKDGKAFLKVVFEKEGEKVEPKESVAVDINMAYIVVGKDNANYVRIPTRLEEVHHWKSLAESLQRNYPRRWRENKRILNRIHSFHQKAKRIMEDFARKVGKWVVEVARDFGANVIKLKSLKNLLKNVDKLPKEFCDKLYLMQYRRLQYWIEWQARKRGMIVEFVNPSYSSVSCPKCGQRMVEVSHRWFRCSCGYENDRDVIAVVNLNGRGSLTLSTAPQMRDVRANRWGESPLVGRKSGEL

SEQ ID NO: 49098 - protein, 383 aa, Acidianus sp.
MARRVKAIRASVSMKIAVSEPLLALVNNYVKALRFTLFWLKENVKNPNEKGVLSKVHEKLYEKLRGEYNLPSKVAEDCYRDALSIYKGWYNNPRRGRFPRVYKPTVWLTPKKSYSVNFERMTVKITSVGELQILGYPRNLKDYLSWKMREARLAVKGGKAFLKVVFEKEEEGEKVEPKESIAVDINMSEIVVGKDDIHYVRIPTRLEEVHHWKSLAENLQRKYSRRWRENKKILYRIRSFHIKAKMIMEDFARKVGKWVVEVARMMSSNVVKLENLKNLIKNVDRLPREFHDKLYLMQYRRLQYWISWQAKKHGMIVEFVNPSYSSISCPKCGQKMVEVSHRWFKCSCGYENDRDVIAVVNLNGRGSLSLSTAPQMRDVIPNR

SEQ ID NO: 49099 - protein, 388 aa, Gemmatimonadetes sp.
VAERVVKRAFKYRFYPTVEQETELRRTFGCVRLVYNQALEARTAAWYGEQRRVSYVQSSAMLTEWKRDPDLAFLAEVSSVPLQQSLRHLQGAFVNFWEKRAKYPRFKSRKRGRQSAEYTRSAFRYRDGSLTLAKMRDPLGIRWSRPLPDGAEPTTVTVSLDPAGRWYVSLLCEVAVHDGPPTDSAVGVDAGITSLLALSTGEKITNPQHERADRKRLALAQRRLARKQKGSNNREKARRKVARVHARITDRRRDHLHKVTTRLVAENQRIVIEDLNVRGMLANHSLARAISDAAWHELRSMLDYKCRWYGRDLVVIDRWFPSSKTCSACGAVQDSMPLNVREWTCRCGTIHDRDVNAAKMIRTAGLAGIACGDGVRPARAEAREGNCR

SEQ ID NO: 49100 - protein, 354 aa, Streptomyces sp.
VTRQVKRAFKYRFRPTDEQAAELSRTFGCVRLVYNKALEDRTRAWYGEQRRISYVQSSAALTQWKKTEELAFMTEVSSVPLQQALVAEPLDIRWSRPLPEDTGPTTVTVSRDSAGRWFVSLLCEDTVALAPATTTAVGLDAGITSLVTLSTGEEIANPKHERRDRDRLARAQRELSRKAKGSANREKARRRVAGVHVRIADRRRDFLHKLSTRLVRENQTAVIEDLTVRNLLKNGRLARAVSDASWTELRSMLEYKCAWYGRELVVIDRWFPSSKLCGTCGTVREKLPLNVRVWTCDCGAVHDRDVNAARNILAAGLAASACGDGVRPQRGSSRTGRSSVKQETQRATAGLARL

SEQ ID NO: 49101 - protein, 551 aa, unknown
  TnpB Polypeptide
MAKAHKRKNTSFGTQMVKCVFLYGKPNREKAARLAAMQIAFTDLVNTCIKGLSKETGITEYLVKNDSRSSKICELKKQLRPEKVNTAYCQNAFDMAFVQLSNRLLNMKQDMYAVCPSIFTSSKVLFAMSVDGKTKSEMLSAVTELAEKVKTKRDTSFYNDCIAELSDMEEDVFTFVQREFQELYRMTSLEYRIPFVKQANIPLDARIMKLEKSETVKAPYVISISDMLHVRGERIVVPLNTSKHSLNKIRSHKMAGMVSISMKPNGCLKVDWSYQHAIHQPKTARSVGVDVGISDTLHTSDRKAIGSMKPVIDFYHDKVETSFASLSDMRNKKRHISHYLKRHKNLPEDVRRSLIQKMDKLDQMIQRADAPYRKKRHYYEMLDHEMKASVNQYIGSISPDTLTVLERLDMKEFSKSRKANGMMSTFARGKLQKKLMTKLNWRGYDFVEVEPDYTSQTCPVCSCLDKNNRNGKIFKCVCCGYTEDADYVGSLNIKARPDDKEIQDVCEKYKNQHTEMQKHIKIVYQLRNDKYKAAAGETVPKNGNPGSQEAA

SEQ ID NO: 49102 - protein, 361 aa, unknown
  TnpB Polypeptide
VKLTAQVKLVVTPEQSDALKRTMQAANAVCDSLSAWAWENQTFGQYPLHKGQYAQQRAASGLTAQVVVRAIGKVADSYKLDKRTQRTFQPLGAVAYDDRILRWYTDKGQVSIWSVDGRLKLPFVCGEYQRGLLAFQQGESDLALVDGEFYLMATVSIPDPPLIETDGVLGVDLGIVQIATDSEGNQYSGEAVKACRRRRRSHRAGLQRTGTKRARRTLKKISRKASRYSKWLNHNISKKIVQTAVHSRKAIALETLTGIRERGSAWSREMRWQLGNWAFHELANFITYKARRVGIPVVFVDPRNSSRTCSACGHCDKANRKSQSQFLCLQCGFQTNADRNAALNLEARGKVNFPKVVTVFG

SEQ ID NO: 49103 - protein, 146 aa, Okeania sp.
MNKSEATTKKITISRQAGDWYISCSYEFTPTSTPKTTEVVGVDLGIKTLATLSTGEVFESVKPYKKAQNRQALLQRQLSKKVKHSSNWYKAVVKLGKQHRRVANIRKDALDKLTTYLAKNHGTVVIEDLNVSGMLANHKLAKSVSR

SEQ ID NO: 49104 - protein, 392 aa, unknown
  TnpB Polypeptide
MKAYKTEIQPNKKQIELIHQTFGNTRYVYNQFITLNLQRLDENQSVISGYDYSKMINNDPKRPDWLVKSPSKAIKQAIMNADRAIWNYLKGNKSKPKCKKKTKHNSFYLIGTIKVERHHIFLPKLKWVRLKEFGYIPNQVKSVTVSMNNGRYYISCLTDETPDERTPTSNEGIGIDFGLKNQFITKNAIIPSINNSNKIKKLKKKLKRKKRALSRKYEANMTNKVYYKSGNKKGQLKSFKWKRPLHQCKNLTKQRLEVNKLYERITRIRTDYNQKALQSILKQKPRFIVIEDLNIKGLLKNKHLSKSISNAQWYASRLFLINQCNKLGIELRLASRYYPSSKLCSECGYKHNALKLNDRFWTCPACKNVHDRDVNASKNLEQCETYTVLTAV

SEQ ID NO: 49105 - protein, 507 aa, unknown
  TnpB Polypeptide
MSRIRQGEFSMRAKTSSYIVAVKLKLPQSIENRLEKSFHITASAYNEALSLGLRRFEALKQNSMYQELLEQRRVDETQRKEYDQALFKLRKSYGLTEFGLSAHLGQQRKKLGSSYKQLNSCELQVIAGQAYKALEKVLFYQIKPKHLRFRSKYDLNVSYRNRINNTGTRLLTSNKKGVAYRLYLHKVSTFVDIPIKAFNNYQQMSLLRSEKIKYVQIIRKTIRGKNVYILQIVCQGSPLSKVNKGDGILGIDPGISTVSYASQTEVALFDLVPKNTNCKERLMRHLDRKIEHSRRVNNPYCYKSDGTIKKGVRFKQPSNRQMRLRVRQLKAYRSLSEERKKLQGQLVNQLVSQASVIKMEDLNVKGLQRRSQDIRINPKTNRPFSKKRFGKAIFRAAPSAFRQALQTRAHQLGIDFEIISPREVKPSQYNHITQTFEKKTLSTRIFDLSPEWTGLQRDLYSAFLIGHIEDGIYQQEQLVQDFPDFYRQMKKFLQEPRETSRLDWYLR

SEQ ID NO: 49106 - protein, 425 aa, unknown
  TnpB Polypeptide
MTSITLVAESKLYLKDNLTLYDYFDDYSSLFNFLVRRCVHHLKNKLNGESESLYRTNLMLEFNITNRMAKAVIRTAKNQLKLLKESARYQYNNLYKRRRSLYKKIVKLKAILSSSSVTLKQRKLAKCRLFWTQMKLNKVNQLISNGLKLHLTFGTKHLLKTNKAKFLAKRNNQVVYIGDKNETCGNQQFQISFNSKYNRFEYKLRLDNRWVSSTDKYIYGSFVLKNKEAKNDILKTLSEKKSNPLTYRIIKRDGNLYLQIMYRRETIDITRNNYGILGVDFNKGFISVSEINSDGMLQSLMRYEYLHTGKATKTKTSMLDLVSKLVDQAVSVGKDIVIEDLVSLDSNKKQEKATSKNYNRMINSLKFGLFKHCLLSKATKEGVSVHTVSPYNTSKIARTSYTDRMKLNVHDAASYVIARRFYQYD

SEQ ID NO: 49107 - protein, 371 aa, Lactobacillus sp.
MKKVLDELCDYRRYCWNQGLATWNEMYDASVILADKKQRPNERKVRDELVANKADWQYQLSARCLQLAISDLGKAWKNFFNKAQPDWGKPRFKSKKAPRQGFKTDRAKLVNGCLRLDKPRGIAEKWSDIKFKGAKDLAGGLKVVSIYRENGQYWASLPLEVMTVPSKPKTGAKTAVDVNVGHLNYTDGEINTLPSHLQKLYKRIKHYQRVLARKRKVNGKQATQSNNYAKTRAKLQRNYRRVANIQHDLMQKFATRLVNDYDQIVIEDLAVKKMQMSHVASKGLQRSMFGYFRQVLSYKCDWYGKALLVADRFYPSTQRCSVCGHIKQGDDKVTLAGNKKHHTKHEEYICYECGVVMDRDENAVANLLALI

SEQ ID NO: 49108 - protein, 246 aa, unknown
  TnpB Polypeptide
MKISESLLITKGTIKNPRVAFDGKYWYLSYSFEVEPMTIDLLDEILGVDLGIKDLAIVSNGDVYSNINKSDKVIKLEKKLRILQRRVSRAYEKNSHRKTRNIIKMERKLRLLHRRLKNIRQTYIHQITYGIVKTKPSMIVLENLGISNMMKNRHLSKSIQNQSWYFFRQCIQYKSEFYGGINVLVVPRTYPSSKLCSRCGNKKHNLKLKDRVYACSSCGLIMDRDLNASINLRNYGLAKLDKSASV

SEQ ID NO: 49109 - protein, 211 aa, unknown
  TnpB Polypeptide
LPKTGKEIGVDAGIESLMTLSNGIQIDNFKYFESAQKQLRVAGRKVSRRKKGSLLWRKAVLRLRNIHGKIKNQRNDFAHKVSTHLVKEYDLIAIEKLNILGMSKGIFARAIHDAAWSNFFQKLKYKAENAGKTVIEVNPNGTSQTCICGETVKKTLAVRQHYCVSCGYKNHRDIVSAKVILKRAVGQTVETLTYLNRESVVSESPSIIISV

SEQ ID NO: 49110 - protein, 358 aa, unknown
  TnpB Polypeptide
MQTVTYKYRVKDRSARKTLARHAKACNQVWNYCNAFQRDIEARYRAGAPKRRWPSAFDLAKLCKGVGKELGIHQQTVGTVCDQFAKSRDKAKHSLRFRPSFGVKRALGWIPFQKQSRQIEGNSIWYLGKRYRFFSCKRRPLPDSAKGGAFVEDALGRWYVCFHVEVTERHPHGNGAIGIDLGLKSLAVMSDGQKIEAPRHYRQLEGKLAIAQRAHNKQRVRRIHAKIKNTRKDFLHKLSTTLADQNAIIAVGDVNSKQLAKTRMAKSVFDAGWSTFRTMLKYKSAGYVEVDEKFTTQTCSHCGALPPERPKGIAGLGIRAWECSSCGESHDRDVNAAKNILVLALSAERPVVESRIAA

SEQ ID NO: 49111 - protein, 436 aa, unknown
  TnpB Polypeptide
VGNCVNNSKRTTYLVRKEILVPTDEQALVLGHMSYAASKLWNVANYERKHWEELGLKVYPNWYDQKKRLKTNLFYKNLPSQTAQKVLKKLDESWASFYALQASGGVKNPKPPRYKHDKMYVTFVQNGIKIIDKSTLRLSIPKQLKAYLRTENGLEAHYLFLKIGRLSGLRDVKEVQISFMDDGRLKLLLVHEAEVPDERGNNGRYLSIDLGLKNNFTCYDSANVETFILSGLFAKTHWFDKEISRLQSISDAQRVAEGERHPKKSKRILNLYRRKNDVQTDFLHKSTRFLVGYCVRHNLNTIVVGDWTKIRENKDGSAKNWGANGNAKLHSFPYLTFYKLMRYKCTLAGIRFIVRSEAWTSQCPPDSLGITREFAEKSKRVFRGMYFHNGVRYNADAVGAFNILRKFLFDEELASNNNVTERELFSLRAPKRVHVA

SEQ ID NO: 49112 - protein, 425 aa, Microcoleus sp.
MFNLTYEFKLKPTAAQVAFFEDWLEQCRCVYNYALAERKHWFQSRSCQVNACSIRSEFIIRAQTKRPTYASQCKSLTAARANIPALCAVAVHVLQQTLRRLEKAFVSMWEQKHGFPRFKKAGAMRSFVFPQLGVNPVNNGVLKLPKIGFVKFHQSRPIPDGANIKQARIVRKASGWYVMLTLQWDVSVPSVMPHGEALGVDVGLTNFIATSNGLLVKRQKFFADAECKLKLLQKRVSRKKLGSNNWKKAQKKVAKLHEYVANCRKDWHWKLSHQLCKDVGMVFVEDLNLVGLSKAMLGKHCLDASWGQFFAILEQTCFKYGVYFQKVDARKTSQICPSCGLETGKKELSERIHSCSNCGYTTDRDVAAAQVVLIRGLAAVGHTVKMLSEGKFVGIPAKKESSYLKVRGVSKAIKWRSDRESFLES

SEQ ID NO: 49113 - protein, 418 aa, Microcoleus sp.
VEAMQNQAVKVRLYPTIEQQTILAQHFGCSRWWWNYALDMCIETYKATGKGLTQIALNKLLPNLKKQEETQWLSECYSQVLQSTTLNLVTAYKNFFESRAKYPRFKSKKNRQSIQYPQSVKLVDDFLKFPGRVGIVKAKLHRPIEGTIKTVTVSVTSSGKYYASVLTELEGDKPVVHTDGKVAGIDLGLKDFAVVNDGIKTSKYPNPKHLAKHERNLKRKQQKLARKEKGSKSRDQARKLVARVHERFTNVRQDYLHKLSRRLVDDNQVIVVENLHVKGMVRNHKLAQAISDVGWGIFVNFLRYKLDREGKVLVEIDRWFPSSKLCSNCHYQVNEMPLDVRTWTCPSCGTHHDRDGNASINIRAEGIRMLSVLGARTAADGGDVSPKLGRKSKLTQSPLKSEAHAVPLCQRWVVHSNC

SEQ ID NO: 49114 - protein, 164 aa, Methanohalophilus sp.
NSIKRLKVLQKRLSRKQKGSKNRGKAKQQIAKLHEKIANQRNDFQHKLTSRLISENQAIALETLNVSGMLKNHCLAQSISDVSWSSFVTKLEYKAEWYGKTILRIGQFEPSTKICNVCGYHNKNITLADRKWQCPDCGASHDRDVNAAINIKKFALNKQNLIGI

SEQ ID NO: 49115 - protein, 364 aa, unknown
  TnpB Polypeptide
MIKGVKFRIYPNKEQQQLIDQTFGCCRLVYNKALALRKEAYEERQEKVGYMQTSAMLTKLKKQDEFVFLKDVDSIALQQSLRDLDRGFKNFFEKRARHPQFKSKHNNHQSYRTINQGDNIRIVGKYIKLPKLGYVKIRQSMEVGHINNVTIEKTPTGKYFVVLNVDFEPKLRPNNGCMVGIDVGIKEFYSDSNGNVVNNPKYLEMSQRKLIREQRRLSRKQKDSNNRNKQRIRVAKVHEKITNQRNDFLQKQSTMLVSENQTICIEDLNVKGMIHNHKLAKSIASASWSKFFTMLEYKAAWYGSEVIKVPTMYPSSQTCSCCGYKNPLVKNLAVRTWECPQCHAKHDRDTNASINILNKGLFIA

SEQ ID NO: 49116 - protein, 378 aa, unknown
  TnpB Polypeptide
MQLSETVKLYMTKEQRSLVVMAMNEYISTVNSLVSVAVNGTSISKYTTADVSANLPSALTNQCIRDARSIINKYSKAVRKADSKNKQLEKRGSEIRVKEPSVPVLKRPCCYINNQNFKIKDNHIEFPVLMGGKSKRIAIHTSMTDRQKSVLADSKLGTMRIVYKGNKIMAQIVYEVAETEYSNDGNIMGIDLGIKCPAVSCISDGSVKFYGNGRKNKYMRRHYKYLRKKLQKAKHPEAVGRINNKEQRIMKDLDHKLSHDIVETAVAHNVKTIKLERLANIRSTTRTSRKNNHSLHTWSFYRLAQYIEYKAKLAGIKVEYVNPAYTSQTCPVCGHVHHANDRNYVCKCGFHIHRDLLGAMNICNSTEYVGDSNIRHTA

SEQ ID NO: 49117 - protein, 201 aa, Bacillus sp.
MIARNISDEHDVENQKNKGMKRMSQTLTVKVKLIPTKGQICLLEQSSQEYIKVINTLVSEMVEAIRRMDDKEQRWMQDKDHKISREIINFAIANHISVIRLEQLTNIRQTARTSRKNEKNLHTWSFYRLSQFISYKAMIAGIQIEYVNPAYTSQSCPKCAKKNKAQDRKYKCPCGFKTHRDIIGAMNIRCATVIDGNSQSA

SEQ ID NO: 49118 - protein, 388 aa, unknown
  TnpB Polypeptide
MTCKAFELKSLSLSFLNIKKEMLTKFFRQANYIYNSLVADSKKFKTTDKEITILCGDHYEIRRLDLGSGIKQGIRDKFITNCKSLKGKKDSGDKIGKLKFKSYTNAIPLRQYKNTYNINFDKNTIRIQCIKQAFKVRGLKQIPENAEICNAELIRKASGYYIHVVIFVPKENKQANSRQIGLDFGIKSNVTSSNGEKYDVKVPESKGTKLASRKTNHKKKGSKNRQKAQQKLRIAYEKDTNRKLDKAKKLVSYLDSYDLIAFQDENIKDWHKEFGKVVQHSAMGFIKAVLKTKANSIMISRYFPSTQICSVCSKLTPHSLNKRDYDCSFCGYHHDDRDVKAAQTILDYVNVSLGRRANSLVELKTSALKDFSSSISLDYEAGRPYSLE

SEQ ID NO: 49119 - protein, 500 aa, unknown
  TnpB Polypeptide
LTETRGKPLPSGRKDSADSDASRCTWSSSPSISTSAACASEQTSTKMPRRTSIARASNTRRRYFVTKTQCPRNLKTQCLPRRMLLSLFIAQPYHRIVKRLQAFKFELRPNGAQRRQMRCFAGSCRFVYNRGLALQKVRFEAGEKKLNYAGLCKLLTQWRSETQTSWLKDAPAHPLQQALKNLERAYTNFFARRAGLPRFKKKGQHDSFRYPDPKQIRLEQVNSRLFLPKLGWLRYRNSRKVLGVLKNVTVSLSCGKWFVSIQTEREVEQPLPRGGAIGIDLGVARFATLSDGTFYAPLNSFKRHATALRKGQQAMCRKQKFSSNWRKAKGRIQRIHARIGNARRDYLHKTSTAISQKHAVVCIEDLQVRNMSRSAAGSIETPGKRVRAKAGLNKSILDQGWFEFRRQLEYKLSWNGGSLILVPPQNTSRRCPQCDHVAAENRQTQERFACTECGFEENADRVGAINILRAGHARCACGVSDANRQQQEPTEAIQEQLRAA

SEQ ID NO: 49120 - protein, 443 aa, unknown
  TnpB Polypeptide
MYLTTKILQTEKRHEVDLSIIRNLCYHSARLYNVGLYSVRQHYFNTQSYLSYYSNYNNCKTNENYTILLSDTSQQILRLVDRDMQSFFKLLTLKKSGKYSNAVRLPKYKKSEELSVFALQGRSCRIQKDGRVAIGLTKEFREKYGITDKRILFTIPKNIRNVTEFKEIRIIPQYDGKQFSIEFIYESNKQTQKASGDGYMSIDLGIDNLAACTIFSNSDVQQFLIDGRRLKNINHYYNKKVAQLKSEYSKNKNITSDNTKRMLRLINGRTNRINDYFNKTAKLLVNKCIDNNVTTLVIGYNKCQKQEINIGKVNNQNMVMIPLYKLRQKLQYQCELHGINYCPQEESYTSKASCLDDDFIPTYGDVDAVSTKFSGKRMHRGLYKSSVGSLLNADINGSVNILKKYFKERKSNVLTTDDVRVLVNVPCQRLSVFAKSPKSLVYV

SEQ ID NO: 49121 - protein, 204 aa, unknown
  TnpB Polypeptide
LGVKDFLTLSTGEKINYPDRLRRLEENIKREQRKLSHRRKGSSNYRKQKAVVAKAYAKLRHYREDFQHQLSHRLIEENQFIGMETLAVRNMTRKAKKRSDANGKPTRGGQSRKRAMNRYILRNGWSSLVGKLSYKAQWYGRTLVQVDRFYPSSRLCHDCGHKYEGLRLSEREWVCERCGTLHDRDVNAALNIRDEALRLTQTGQ

SEQ ID NO: 49122 - protein, 393 aa, unknown
  TnpB Polypeptide
MRILLKSFKTEINPTLEQIQQINKTIGTCRFVYNFYIAHNKEIYESEKKFVSGMDFQKWINNVYLKENREYLWIKEVSSKSVKQSIMNAEKAFKRFFKHQGGFPGFKKKGKSDVKMYFVKTDAKTVIPCERHRIKIPTLGWVKLKEKGYIPSSKQGYVIKSGSVSYRAGKYYVSVLIEMPDAKKIQLNSCGLGIDVGIKEFAVMSDHTIKKNINKTAKIKKLGKQLKKEQRCLSRKYGSLKKRNKKKKGEATRQNIQKQVLKVQKLHDRIDNIRTDYINKCVNEIVKTKPSYVAIEDLNVSGMMKNKHLSKAVASQNFYSFRAKLKNKCKENGIELRIVDRFYPSSKMCHCCGNRKKDLKLFDRVYKCECGYVADRDYNASLNLRDAKTYKIA

SEQ ID NO: 49123 - protein, 393 aa, unknown
  TnpB Polypeptide
MEDVEASRQTRLCGQLWNEVLSVFNKNRIENRYLTEGEMKSHFKGFNGLHSQTTQAVIERFYSARKTAFVVRKQNPKMKFPHKRKSESPAVWKRQGISIKDGNLNMSLGKKYSFISIPWNRNETPTEVKICRDKITGKQFALCAIQFPDTELSTSDKTLGVDLGEKVLAVLSNGEQQFMLSSKLIRSKIRYRHKTLGSIATKQKTKKKNSRSWRKLQARKDRMRIKIERQLEHILHSQSKNLVEITVKLNIGKVTFGDLATLRNNKKGQSVNNNFLYGNFRRKCVYKLLSKGIASEKISEAYTSQTCPCCLTRNNLTDPQSRKALRIYRCANCGFIAHRDCVGSINMWKKTINKFEVSCPTARSRWMNPPVSVKPKCSPQKNCVIVKSMVRGL

SEQ ID NO: 49124 - protein, 485 aa, unknown
  TnpB Polypeptide
MRIFPHTWAISPARLRGPLASDEAERYRKEQAQQEYLRSTVTVEEEQGTGPLPVPFSKGGSMSIKAYKYRIYAHKATTDKLQWVLDRCRELYNAGLQERRDAYEIAVRRHPNYYDDQARKQLTREHAIGYYEQKRELGDIKEERPEYQDIASHVLQDVIMRLKRAYDDFFRRVQNGEQPGYPRFQGRNRYDSFCYPDGAGWKLDAKERPADKKGIVRVNLKLTKIGTVKLHLHRDLGGTIKTLTIKREGEHWYAVFTCEIGKAEPFPTSYEDVGIDLGVTHFAALSNGEFIDHPCYFRKAEKKLAKAQQALSRKKRGSHRRTKAVKQVTKCHCKIANQRKDFQHKASRKLVNRYQVIVFEDLRVKNLTKAPAPRQDKETGKYLPNGASAKAGLNKSILDAGWSTFTEMVSVKAAWAGRTVVFVNPFMTSQLCSGCGAVVRKDLSERWHSCGCGTELDRDTNSAKLILNLGYKQLSVGTRPTSATA

SEQ ID NO: 49125 - protein, 361 aa, Bacillus sp.
MKLDSNNHSVFLLYYHLVLVVKYRRNVFDDDMSDYAKDMFVRLSENYNITLVEGNHDVDHVHILFKAHPNTEMTKFINAYKSASSRLIKRDFPTFKSKKDRKSYTTNVLNGNIMLLNGHIKLPKLKMVRIKQHREIPQDHIIKSCTISMTPTGKYYVSILTEYEKEIVQKEVETVVGLDFAMDQLYVSSEDERANYPKFYREMLDRLAKAQRVLSRRTKGSGRWHKQRIRVAKLHEKVANQRKNFLHHKSKELATHFDVVAIEDLNMKGISQALHFGKSVADNAWGMFTSFLAYKLHEQGKQLVKIDKWFPSTKTCSSCGNVKNMSLSERVYSCICGVNLDRDYNAAINIKNEAIRLLALA

SEQ ID NO: 49126 - protein, 188 aa, Bacillus sp.
  misc_feature (185)..(188): Xaa can be any naturally occurring amino acid
MRKTFGCVRFVYNRMLAERKEAYEKHKDDKDQLKKQKLPTPAKYKAEFEWLKEVDSLALAKAQRVLSRRTKGSRRWNKQRIRVAKLHEKVANQRKNFLHHKSKELATHFDVVAIEDLNMKGISQALHFGKSVADNAWGMFTSFLAYKLHEQGKQLVKIDKWFPSTKTCSSCGNVKNMSLSERVYXXXX

SEQ ID NO: 49127 - protein, 431 aa, unknown
  TnpB Polypeptide
MKVTRIVKFNVKETHVDYGYIKTQLIESKEVYNFANYVLRQLYFKNSKEHKYSLGFIDEYPNLKDLFLEYVNENKQFTTLFYKIICEFAKLKNYSINTKIVQNIVDKLKNDWISYWKLLRMKKNNLYSKLVNIPKYKKDYNLVEYNNQVMSKTKLKLGYVGTAKMVQGIKIADIHKNLNCKCFRVYYKNGKIICELIYEKLINTRDSTSKVVSIDLGLENLFTVAFNYNKKPIAIKGNKLKAVNQYFNKERAKMQSSLPSKQFISKNIQRLLYKREEQLRNYIGHYTNKLVDILEEEKVSKVVVGYNKGWKQEINIGSVNNQNFVNIPFRKILDVLKYKLQDKGIEYVEQEESYTSKASYLDNDYIPTYGDGKIRIFSGTRIKRSLYKTKQGKIIDADLNAALNILRKSGEQLLEKLEYLQFNNIFTSKLV

SEQ ID NO: 49128 - protein, 392 aa, unknown
  TnpB Polypeptide
MIKSIKVRLNPNNKQLTKLFQYAGCARFAYNWAIAREQESYNQGNNFLFDNELRKEFTQLKKQEEYKWLNDVSCNVTKQAIKDACNTYKRFFKGQCKYPRFKSKKYSTPSFYQDNVRIRFTNTHVKVEGFSKSKKQNKQKLNWIKLCEKGRIPTNCRYMNPRFTYDGLYWYVSVGVEVDITNTLASNEGIGVDLGIKDLAVCSNGSTYKNINKIQKVKKLEKRKRRLQRSISRRYEKNKKGVSYCKTCNIIKREKELLKVVKRLTNIRHNHIHQITSEIVKRKPSFICIEDLNVSGMIKNRHLSKAVQQQGFYEFRRQIEYKSEWSNIPVIIADRFFPSSKLCSCCGTIKKDLKLSDRTYKCECGNVIDRDFQASLNLQTYGENVLKQQSVM

SEQ ID NO: 49129 - protein, 372 aa, unknown
  TnpB Polypeptide
MAVRAYKFRLYPTTRQAVALAYQLSEACRLYNAALQERRDAWRKGHRVNFATQCLQLKEIRAAGDLGLVNAAAAHEIMRRVDLAFVAFFGRCKAGIQPGYPRFRSVRRYDSVTFPYQNGASLTCGDLRIQGIGRVRIRLHREMPRAPKRVTIKREGDRWFAIFLCEVEPQPLAATGQAVGLDVGLTSLVATSDGDLVDNPRWFRTAQAETRIAARRVSRRVKGSRRRRKAVAILRRKLAHVAAQRRDFQHKLARQIVRKYDVIAVEDLNTKGLAGGMLAKAVHDAGWASLTERIAEKAEEAARAFVRVNPRGTSQACSGCGSVVPKTLAVRRHVCPDCGLDIDRDVNAARNVLKLGLEEAVGRQREVTHACA

SEQ ID NO: 49130 - protein, 451 aa, unknown
  TnpB Polypeptide
MRVTFKQRAYLTPGQEAITREWDGSLRALHNAALEERQNNYRAYKRYNTPQGYINYNSQAKQLTEIRALVDWVRAVPAQVQQQMLMDLEKACVKHGSLNVKYWARYRHDPSYRYPSPHMTPVEKLNRKWGRVFLPKLGWVRFKWTRLMPGNLCQTTLTRDGNDWYICFQHETGLEPPAPREWTPATSAGGDLGVANSLVIVDESGQGVGFDREFVTAGEAARLKRLLQQQAKRRRVNKNWRSSKRYRRTQNQIRELYARQRRRRRDFHDQVAALLTTTYPMITHELLNIKGMTKSAAGTVENPGVRVAQKRGLNRAILAKGWGIFLRLLKWHALKRGAHIQPAPAHYTSQQCPECRFTHEDNRESQAVFTCVACGFEAHADVVGAWNTRERGVKLASTPGRLVEADTQVSVGRQAALGKTGDNTRSLGVGGDSALAGSVKRQPLRSFTYIV

SEQ ID NO: 49131 - protein, 328 aa, unknown
  TnpB Polypeptide
MRGCASSSPKDSPVHALQQALNDLERAYGNFFAKRAAFPRFKKKGQRESFRYPDPKQIKLDQGNSRDVLGDVRNATVSQSCGKWYVSIQTAREVEEPVTQATGSVGIDVGIARFATFSDGSHLAALNSFRKHETRLRRYQRSMCRKVKFSSNWRKAKAKVQRLHVRIGNVRRDYLHKATTTISQNHAIVCIEDLQLRSMSRSAAGSIEQPGKNVAAKSGLNKSILDQGWGEFRRQLEYKLAWAGGTLIAVPPHNTSTTCPRCDHVSAENRRTQAQFRCVRCHYTNHADVVGAINAQERGLRLFACGGMAHVGHPAKREPTEATQAVVA

SEQ ID NO: 49132 - protein, 328 aa, unknown; identical to SEQ ID NO: 49131
  TnpB Polypeptide

SEQ ID NO: 49133 - protein, 335 aa, Thermococcus sp.
MKVEGSKIRVTVKPREEYLELDYSGEWFYERIKDWKVGELIIRGKDVYLTFSKEVEFDKKIKIGIDSNLMSLDVYHSERGWIKVDLSELHRISETYDRIIDRLKSVQRKAPKRISILLKKYYARRRNRIEDFLNKLAVQLAREFPDAVFVFEDLNKFKMLENGSRKFNRKLSRSTWGKIVQKLSYRVPIELVNPAGTSSTCPVCGSKLESRNGLVGCSNCGFKADRQFVGAFNVFLRGLGVALSGGEASDLLPDEPGGELRLMNPKSVVRVDLRGRTFTHVPPKNSRRTDPVSDPSSIPSLASSSFRASSRLILGFITRSLQGSSYKNFFGGEEP

SEQ ID NO: 49134 - protein, 393 aa, Thermococcus sp.
MPSETIKLTAKFKLKGTLKGLDELFQTYREIVNLLITYAFENNVTSFYRLKKETYKGLRKEYPELPSHYLYTACQMATAIFKSFRKRKKKGRAKGKPVFKKDVIMLDDHLFKLDLENKTVKLSTPKGRVQLEFYPAKYHEKFREWKVGQAWLVRTSKGVFLNVVFSGEVEVKELKAFVGVDLNENNVTLSLPNGEFVQFITHEREIRTGYFVKRRRIQQKIKVGKMRKELLEKYGLREKNRLNDLYHKLANKIVELAEKYGGIALEDLMEIRDSIRYSAELNGRLHRWSFRKLQSIIEYKAKLRGINVVFVNPALTSSLCPVCGDKLSPNGGRVLKCSKCGFEADRDVVGSWNIRLRALKMWGVPVPPESPTMKTGVGKVIRYDWFESSKSSG

SEQ ID NO: 49135 - protein, 336 aa, Thermococcus sp.
LPEWYNKPSPPGFIRKKNGRKLFIIPLRNDQYRINGNIIELRRLGKYGKLEVQFKGRIHLKGKMGRLEIIYDDVKRKWYAHISFSRVDERLEKNGWVKLPRQPKENLSAGIDLGINNLMAVYVEDGESFLVNGRPLKSIAFYWQKKIAEYQSKLNKSGQDNSRKLRRMHQKWKLQARHYINTVVRQTVQRLYELGVSRIVVGYPKGITQNSGEEENKKPAGVSKKQNFLRSRVWLFNYTIQRLVEVGEEFGIQVVLVDEAYTSQSCPLCGQRHPDGRIFRGLFKCRREGVVMNADLVGAFNILKKVVKTITPSLFALAGVGVTGGRPSPRGSKNPF

SEQ ID NO: 49136 - protein, 325 aa, Thermococcus sp.
MPSETIKLTAKFKLKETPEGLDGIFQTYREIVNFLITYAFKNNVTSFYRLRKETYKGLRREYPELPSHYIYTACQMATAIFKSFRKRKKGKAKGKPVFKKEVIMLDATLFKLDLKNKTIKLSTPNGRIQLELYPAKYHEKFEDWKVGQAWLVRTPKGVFLNVVFSREVEVEEPKAFVGVDLNENNVTLSLPNGEFVQIITHEREIRTGYFVKRRKIQKKLKAGKRKRELLEKYCEREKNRLNDIYHKLANKIVELAEKYGGLALEDLTEIRESIRYSAEMNGRLHRWSFRKLQSIIEYKAKLRGIRVVFVNPAHTSSLCPVCGGN

SEQ ID NO: 49137 - protein, 447 aa, Thermococcus sp.
MKRTATIKLQPSKEQEKILFELAYATAIAWNKVNYQRLKQYKQGKIDFLGTQQEAYYLFKDWIGGSTLQTLARKNAEAWRAYFKLKKKFENGELPEWYNKPSPPGFIKKKNGRKLFIIPLRNDQYRINGNVLELRRLGKFGKLEVQFKGRMHLKGKQGRLEITYDDVKRKWYAHIAFSKVEERLEQNEWVKLPRIPKGNLSAGIDLGINNLMAVYVENGESFLVNGRPLKTIAFYWQNRIAKYQSKLNESGQDNSRKLRRMHQKWKLQARHYINTIVRQTVKRLHELGVSRIVVGYPKGITQNSGGKQGKKLGGVSKKQNFLRSRVWLFNYTIQRLVEVGGEFGVQVELVDEAYTSQTCPLCGQRHSDGRIFRGLFKCRGEGVVMNADLVGAFNILKKVVKTITPSLPALAGGRGNGGKTLPEGLSEPFSRVALMRTPQTSPPMARD

SEQ ID NO: 49138 - protein, 436 aa, Thermococcus sp.
MKRTVTLKLHPSKEHEKILHELADAGAKAWNRVNYLRRQQYFQEQIVDFNKTEKTVYDEFKRGIGSATVQQIARKNAEAWRSFFSLLRKKRNGELPDWLKPKPPNYLKEDGKRKPIIILRNDQYKIEGNKLILKGLGKFKRLEVQFKGRIHLKGKQGRLEIQYNPVKRKWYAYISFTVEKKLESEEWVNVPRQPKGNLSAGIDLGVNNLMAVYPENGESFLVNGRPLKSIDFYWRKKIADYQSKLNKSGAKTSKKLRRMHDKAKLQAKNYINSAVRQTVKRLYELGVSRIVVGYPKGIARNSDKGKKQNFILSHVWRFNHVIKRLTEVAEEYGIKVLVVGEAFTSKTCPVCGKPHEGARFVRGLFKCPATGLVFNADLVGAFNILKKAVETITPNLGGLYAQGRGNGEKALPEGLKARFELGFNEAPQTSPSLARG

SEQ ID NO: 49139 - protein, 438 aa, Thermococcus sp.
MKRAVTVKLQPSKEQEKILFELAYATAVIWNKLNYQRLKQFKEFGKIDFNGTEKEAYHEFKNWIGGSTVQQLARKNAESWRSFFSLNKKKKTGKLPEWFKPKPPKFVREKNGRKLFVIPLRSDQYKIKGNIIELRRLGKFGRLEIQFKGKIHLKGKQGRLEIIYDPIKRKWYAHISFSKVEEKLEKDKWVELPRIPKGSLSAGIDLGVNNLMAVYVENGESFLLNGRPLKSIDFYWRRKLADYQSKLNKSGAKTSRKLRRMHEKAKLQAKHYINTAVRQTVKRLYDLGVSKIVVGYPKGIARNSKRGIKQNFILSHVWRFNYLIKRLTEVAEEYGIEVEVVDEAFTSQVCPLCGQRHINARFVRGLFECHREGVVMNADLVGAFNILKKVVRTITPSLPALSGGRGNGGKALPEGFEEPKFERVLMKTPQTSPSLPRG

SEQ ID NO: 49140 - protein, 436 aa, Thermococcus sp.
MKRAVTVKLQPSKEQAKILHQLADIGAKVWNRVNYLRRQQYFQEQIVDFNRTEKTVYEEFKQEIGSATVQQICRKNAEAWRSFFSLLQKKRNGELPNWLKPKPPNYLKEDGKRKPLIVLRNDQYKIDGNKLILKGLGKFKRLEVQFKGRIHLRGKQGRLEITYDPVKRKWYAHISFTVEEKLEGGEWVSIPRTPKGNLSAGIDLDVNNLMAVYVENGESFLVNGRPLKSIDFYWRRKIADYQSKLNKSGAKTSRKLKRMHERAKLQAKHYINTAVRQTVRRLYDLGVSKIVVGYPKGIARNSDKGSKQNFILSHVWRFNYLIKRLTEVAEEYGIVVVVVGEAFTSKVCPVCGKPHEGARFVRGLFKCPATGLVFNADLVGAFNILKKAIKTITPNLGGLYAQGRGNGGKTLPEGLKTRFLVGFNETPQTSLPLARG

SEQ ID NO: 49141 - protein, 392 aa, Thermococcus sp.
MPSETIKLTAKFKLKEPPEGLGDLFSTYRDIVNFLITYAFENNVTSFYRLKKETYKGLRRDYPSLPSHYLYTACQMATAIFKSFRKRKRKGKAKGMPVFTKEVIMLDDHLFKLDLENRTVKLSTPKGRIQLEFYPAKYHEKFKDWKIGQAWLVRTPRGVFLNVVFSKEVEIREPKAFVGIDLNENNVTLSLPNGEFVQIVTHEREIRTGYFVKRRKIQQKIRAGKRRRELLEKYGEREKNRLNDLYHKLANKIVELAEEYGGIALEDLTEIRESIRYSAEMNGRLHRWSFRKLQSIIEYKAKLKGVKVVFVSPAYTSSLCPVCGGKLSPNGGRVLSCKCGFEADRDVIGSWNIRLRALKMWGVTVPPESRPMKIGGWKPTRYEINTLHTLYG

SEQ ID NO: 49142 - protein, 276 aa, Thermococcus sp.
MKRAVTVKLQPGKEQEKILFELAQATAVIWNKLNYQRLKQFKEFGKIDFSTTEKEAYHEFKNWIGGSAVQQLARKNAEAWRSFFTLNRKKKNGELPEWFKPKPPKFVREKNGRGLFIIPLRNDQYKIKGNVIEFRRLGKFGKLEIQFKGRIHLRGKQGRLEIAYDSVKRKWYAHVSFSRVEERLEKDKWIKLPRNPKGDLSAGIDVGVNNLMAVYVENGESFLVNGRPLKSIDFDWKRKIADYQSKLNKSGAKTSRKLKKCTRRLNFRLNTTSTLL

SEQ ID NO: 49143 - protein, 437 aa, Thermococcus sp.
MKRTVTVKLQPSKEQEKILHRLADIGAKVWNRVNYLRRQQYFQEQIVDFNKTEKTVYEEFKREIGSATVQQIARKNAEAWRGFFTLLRKKRNGELPSWLKPKPPNYLKEDGRRKPLIVLRNDQYKIEGNKLILKGLGKFKRLEIQFKGRIHLKGKQGRLEITYDPVKRKWYAHVSFTVEEKLDGGEWVSVPRKPRGNLSAGIDLGVNNLMAVYVENGESFLVNGRPLKSIDFYWRRKIANYQLKLNKSGAKTSRKLRRMHEKAKLQAKHYINTAVRQTIRKLHELGVSKIVLGYPKGIARNSKKDKRQNFLLSHVWRFDYLIKRLTEVAEEYGIRVVVVNEAFTSKLCPVCGKPHEGARFVRGLFKCPVTGLVFNADLVGAFNILKKVVRTITPNLSGLYAQRRGNGGKALPERFEEPVVTGALMRTPQTSPSLARG

SEQ ID NO: 49144 - protein, 351 aa, Thermococcus sp.
MKIVERNFRSFFHVLNERKKGNYNRPVRPPKYLPKDGHFVLIFPYQSFRVKGDRIILSLGRNFARKYGVQHLEFTLPKNVRSHRIKEVRILPRYNALWFEIEYVYEVEPEKRELDYSKYLAIDLGVNNFATCVDTTGTAFIIEGRGLKSFNRWWNKEKARLQSQYDKQGIKFGKKMAWLLKKRRNVINDFMNKAVSHIVNYCLENGIGNIVIGELKGIKQNANLGKKNNQNFQYIPFGLFKRKLRVKCECYGITYVEVDEAYTSKADALALEPIEKKEEYLGRRVRRGLFQSSTGTLINADVNGALNILRKVAGDSPVRAIAGSGRVNRPVRVRLPWGGLTPHETPSVRAG

SEQ ID NO: 49145 - protein, 422 aa, Thermococcus sp.
MKRAVTVRLQPSKEQAKILHQLADLGAKVWNRVNYLRRQQFFQEQIVDFNGTEKTVYEEFKREIGSATVQQIARKNAEAWRSFFTLLRKKRNGKLPNWLKPKPPNYLKEDGRRKPLIVLRRDQYRIDGNKLILKGLGKFKRLEIQFKGRIHLKGKQGRLEITYDEIKRKWYAHMSLTVKEKLEGGEWVSIPRTPKEGLSAGIDLGVNNLMAVYVENGQSFLVNGRPLKSIDFYWRRKIAEYQSKLNNSGAKTSRKLRRMYEKAKLQARHYINTAVRQTVRRLYDLGVSKIVVGYPKGIARNSGKGKKQNFILSHVWRFNYLIKRLTEVSEEYGIEVLIVNEVFTSKTCPVCRKPHEGARFVRGLYSCPATGIVFNADLVGAFNILKKVAKTITPNLGGLYAQGRGNGGKTLPEGLKTNLSWV

SEQ ID NO: 49146 - protein, 434 aa, Thermococcus sp.
MKRAVTVKLQPSKEQEKILRQLADLGAKAWNRVNYLRRQQYFREQIVDFNSTEKTVYEEFKRKIGSATAQQICRKNAESWRSFFSLLRKKRNGELPENHNPKPPNYRKEDGRRKPLIVLRNDQYKIKGNKLLLKGLGKFGKLEIQFKGRIHLRGKQGRLEITYDEVKRKWYAHISFTVGEKLEGGELVKLPRTPKGSLSAGIDLGVNNLMAVYVENGESFLVNGRPLKSIDFYWRKKIADYQSKLNKSGAKTSRKLRRMHERAKLQAKHYINTVVRQTVRKLYDLGVSRIIVGYPKGIARNSDKGKKQNFILSHVWRFNTVIKRLTEVAEEYGIRVVVVNEAFTSKTCPVCGKPHEGARFVRGLFKCPATGLVFNADLVGALNILKKVVGTITPNLSDLYAQRRGNWGKTAPEGSKTHFTLGLNETPQTSPPVG

SEQ ID NO: 49147 - protein, 436 aa, Thermococcus sp.
MKRSVTVKLQPSKEQEKILSELAYATAIIWNKLNYQRLKQFREFGKIDFSTTEREAYHEFKNWIGGSTVQQLARKNTEAWRSFFTLNKKKKKGDLPEWFKPKPTKFTREKNNRKLFIIPLRNDQYKVKGNVLELRRLGKFGKLEIQFKGRIHLKGKQGRLEITYDDVKRKWYAHLSFTVEEKLEGEEWVKLPKTPKGNLSAGIDLGVNNLMAVYVENGESFLVNGRPLKSIAFYWRKRIADYQSRLNKSGYETSRKLKRMHEKAKLQAKHYINTAMRQTIRKLYELGVSRIVVGYPKGIARNSDKGKRQNFILSRVWRFNYVIKRLKEVAEEYGIKVEVVDEAFTSQTCPLCGQRHVNGRIFRGLFECRRVGVVMNADLVGAFNILKKVVKAITPNLGGLYAQRRGNWGKTAPEGSYGPNPVTVVGETPQTSPPIG

SEQ ID NO: 49148 - protein, 391 aa, Microcoleus sp.
VFNLTYEFKLKPTTTQVAIFEDWLEQCRRVYNFALAERKDWLKSRSCQINACSIRSEYIIPADKPRPTYACQCKALTQARAIIPALNAVQVQVLQQTIKRLERAFISMWEQKHGFPRFKKVGARRSFVFPQMGVEPLKNSAVKLPKIGWVKFRQSREIPSGATIKQVRVVRRVSGWYAMLTLQWEVSIPDVIPHGNPVGIDVGLTNFIATSNGLLIERPRFFIDAERKLKLLQQRVSRKRIGSNNWKKAQKKVALLHEYVANCRKDWHRKLSHQICDGAGMVFVEDLNLVGLSRAMLGKHCLDAGFGQFFNIFEQTCFKHGVYFQKVDAKKTSQICPNCLNETGKKKLSERVHSCHNCGYTRDRDVAAAQVVLIKGLAAVGHTACDARHCK

SEQ ID NO: 49149 - protein, 407 aa, Caldivirga sp.
MIARRAILIRLPRDKCDVNYIRRLMALTNLAHRGFEVWVPDLPKSIQYQIYGFKSYKNSLMFGTAPKRWFAKTWVPLKTLRVYGDGTRKGATDALVILDFKKNVIKIHQVCKNEPGYSIEVPMPRWVVERVNEGGDIKYAMIGLKNDKPYLALVAERVVEPYVPSGCRLVVDVNAWNNGVAYGIINPSNKIAEYSPLRPNLRLIDTWYHKAEKLSKKLGKLKRLGLDSTPEAKGLRREIKALRRKVYAYLRDFAQKKAHELVMKALRLRAEVLIDDMIEESRRELLEMKLPRGLRKVYLAETRRFVKLFTTQLQWYGVPYEFKRLPSTVCPICGHKLIQERGRVMACTNCGFKAPRDKVPIHWALKAMPKAKVSPLDESPMPLGSTATHEPTPIAHVGEVEAPRRNT

SEQ ID NO: 49150 - protein, 402 aa, Lactobacillus sp.
VIKFNKAEQLMLLTYKVEIKPTKKQAWQIDSHISGSRWAYNLFLDINRQRYECGYHYRGAYEFGKWFNHEYLEGNPDDLWVKDLYAKSVKEAFIDADTAMKRFFKKLSGFPHWRSFKRGQGSYYFVKNGKLQVITCERHRIKLPKLGWVRLKEFGYIPTDAEHFVIKQGRIKFKAGRYYLTCLVEQAELPSLELTGDPIGIDLGLKKFAILNDGTLYPNQNKSSRGRQIRKRLRRLQRKMSRQYYALEAKRQKEGKSATDLNLAKTQRKVQRLYQRLTNIQSDYQNKIIATVVRTKPQWVALEDLNVKGMMKNRHLAKAVSYLGFYNFRVKLIAKCRQLGIPVHLTNRFEPTSKLCHQCGYKKIDLKLSERTYQCPKCCYTADRDINAALNTRDTKNFELAY

SEQ ID NO: 49151 - protein, 385 aa, unknown
  TnpB Polypeptide
MKGVHFMEQITITAKVQIVVSDTNKVLLNKTMSVYRDACNYVSDYVFRTHDLKQFSLNKVLYSTLREAFGLKSQMAQSVFKTVIARYKTILENQNEWIRPSFKKLQYDLVWNRDYSLTQNCFSVNTLHGRRKLPYFTEGMSKYFDRSIYRFGTAKLVSKHGKYFLHIPVTYDVEESSISDICNVVGIDRGIHFVVATYDSNHTSGFVSGKTMKQKRANYSKLRKELQMRHTPSSRRRLKAIGHRENRWMQDINHQVSKALVESNPKHTLFVVEDLSGIRNATERVKTKDRYVSVSWSFYDLEQKLIYKAKQKQSSVIKVDPRYTSQCCPVCGHTEKSNRNKKIHLFTCKNCGYKSNDDRIGAMNLYRMGINYLADSQVPNTVVTE

SEQ ID NO: 49152 - protein, 364 aa, unknown
  TnpB Polypeptide
MNRSFKVRIYPNREQQVLLEKTFGASRFVYNHFLKLKQYLYQEFKIKITYNHTSKMLTELKRQKSWLKVPDKWALGNALRDLDNAYKMFYKGSGYPKFRRKDDKNSYRTSSNIRIDNSFITVPKVGLLRYKDAYKLEDKNILKIYNITISKTSSGKYYASISAEVYIPCFEKTNQNVGIDLGLKDFAIFSNGIKIKNPRILKHLEDRYRRLAKAVSRKVKGSSNYIKAKLKLARFHGYVANIRKDFLHKLSTRLVKTYDIICIENLNISGLIKNHKLAKSFQDVSLYEFIRQLEYKAKWYGKTISKVDRFYPSSQLCSSCGYKNSEVKNLNIRKWTCPVCGTHHDRDINSAMNILSEGLRVLNS

SEQ ID NO: 49153 - protein, 294 aa, unknown
  TnpB Polypeptide
VITLRGDAPKRIRLSEDGGHRTGVDFGTSTIATVSNNEVHLEELAPDSVNYEKEIRHKQNLIDASMRKHNPENYNKNGTVKKGKHKWKTTRRCRRLKRQVRVLYRKQSAYIKTSHHTFINKLLKNTSELILEPMNFKALQKKSKKTERKDEATAVKQKDGSVKMLRKYKRKKRYGRSIKNRSPGLMQADLKSKATQYGISYYEIDIHQYRASQLHHDTGEYIKPTLNERFKTIEGCKVQRDLYSAFLICHTDDTLTAPDFEACHFDFPHFVKMQDTLILNKKKCGHTMKHCFGF

SEQ ID NO: 49154 - protein, 440 aa, unknown
  TnpB Polypeptide
MRTVIHGIAWFPSITKERLLNLMQLQCSASRSAYQAQQKSLKNNDIRKYVKQNFMQSLNQRYINDACSNASQISKSHVIFGGKKLWKDLVNGKISKGKWHNKRNNQLYSRGDRSQQGNPNIRIQGNRIYINDPNNRGKWLEGSIFIPKKFSINQDCYDVRILWRNNRFEIKIGYEQEIPDSISQIPGSIGIDINPDGVALAETNGHGNLLKHQYLAEPRIQFAREDKRNYDIYQLAKEAIEQAKQAGKSIIIENLKFIRKNKGKIFNRMASNFCYKKIAEAIVRRAEKEGIEVIQVNPAFTSILGLLKYKEMYSLNRHTSAALVIGRRGMGIKERQVFGASAEEKVKKDGSEKSVVNLEGRGTRIALSQKSWSWLQDQFLEPTTAGLTAPTLDRRLAAQMSSEGENPSCESQFTTGRTGLKQCGVKGPHANLNGNICQVC

SEQ ID NO: 49155 - protein, 455 aa, unknown
  TnpB Polypeptide
MKIYTTYAVKLKESHGFLRETVIQYRRAVAFFLHAAMEEWETLETVQAPLEKQRALEALTHRTRKNPNAKYDFDKHFHKFPSYLRRAAITDAIGKITVYQSRLLLWKEEQERIKKEGGKAKVPNPGRPTAGFSYPVMYRGNCYIRTGDYTASLKIYNKNKTAWDWLDVEFKKTDADYILRHCAERKECAPTLRRRGKNWYLDFAFEEKVELGEKPVAEQTAVGVDLGLHNDCACVVMKPDGTILGRRILSLSKEKDSLKHALNRIKKAQQHGAKRKPRLWARAKGISGDLAKKTAQFIADLAAEYQADVIVLPYLDLTGKKTGPRKQAVHHWKLRTIQRIITDKAHRMGMKVRRTCPYQASALAFDGSGKVKKKKGCRSICIFPSGKEYHSDLSASYNLTARYFIREIMETLPPALKTEMETKIPDISKRTACTLSTLRELNRELISSDGDTGAV

SEQ ID NO: 49156 - protein, 382 aa, unknown
  TnpB Polypeptide
MDSEATKAKRIRIYPNSAQKQMFRQWFGVSRHVYNNTVVHLNLPKENRQKHWMAAAKIILSTLPEWSKAVPFQVKKIAVNDAYKSFYNGCRKANNTGERFRLNFRSRKNPKQSCFIPLSALKESGIYPTISGKLKLTEAYPELPRDSRLVCEHERWFVIVPYRGAIMPSENQGRFVALDPGIRTFLTGYSEDTVFKLGEGAFARISRLCCHMDDLISRMSKAVCAARRGMKKALSKMRWKVWDLVDDLHFKSIRFLLNRYDVILLPTFEVSEMVGRSGRNIRAKSVRSMLTLAHFRFKQRIKSAVHACGKHLLDVNEAYTSRTASWTGEMTKIGGAKTIRSCGVVLDRDVNGARGIFLRALVDQPLLRNEHATATKSHRLVA

SEQ ID NO: 49157 - protein, 487 aa, unknown
  TnpB Polypeptide
MSQLAAEVRDISSYATYVVRNDVTLGERLVLTGAVQPTTAGRRAGVTMPEFLVTGKSGRSRKEALIQHNVVTAFRSWQERIAAANGESGKYVSQGWKRTVDASAPSYGEAGFINLGAVNKQYAVIENNPLADGEIVLKMVIQGSWYRLIFPFGNTRFTTGKVTLPVVKVKNSQPVFIFTVVTDNPVVQFSGDYTIGVDVGINDYATVVVRNSTTGRIVYETTLSQRVHSLWNSIRASEEQVRALNKKADKLIYQRQAHMCATDKAQLHREAASRKKRELAILAAQEIAYLSHQFNNAVVAVEDLGWIRNTMQNGRWNRGAFMQWLTHYVAQNGGWVVPVNSAHTSQVCHLCGEKVAHPAHKVSLCPKHGATDRDVNAAANIAARAVSKVEKARKTRAKNRKLQRRTALKTPVARDSLKYPGRDRTKNAPTPKRKKHISKEVNLPLSPARVNMTTVLADWDAFGILETDMAAINQDYVTHKCRLCNLN

SEQ ID NO: 49158 - protein, 352 aa, unknown
  TnpB Polypeptide
MLDRAGREAYQWFSYWRKERFLTNELLKNWAKWASKNGIAFPEPLMGQNRIVSYSGNLKGWPGSQRGQWPQTNLRLFVDSDSLDFQVSIDRVIVKTRAVIGGTPEKLLRQALNGKKGYSIGAPRLINREGKAYLAVPVTTKVPIPKIENLTHPTVIGVDLGINTLAAAVAISYDERILPAKVVSGKRLKHQLRQLWGKRRRASRLKKSEKIQALDKKTKHTIQHWTNTTANEVVRYATKFNQPVISLENLSTYQATRRRTSWAKPQLRDQLGKWARGEIGKTIQRNAALQGIPVIWVNAAYSSRICPRGCLCMLTRSSRSVFQCPACGVKLPRDINAAIELAGRGIRLIKKC

SEQ ID NO: 49159 - protein, 251 aa, Thermoplasmatales sp.
LTDNRVCITFIVNTDEKPLINNNIIGFDLNFKSVDYTIIKNSEIINVDSIDTSDIAKTQRDYARKRSKIQKHIKNPAKRNRKLKEAKHRQRNIIKDKLQKLTTEIVNNNDDKTFVFEDLTNIKKEGMKKKKNSNKSKKNPNKSKRFRTDINRWPYRLFQQYVDYKSRNETLYIDPEGTSSECPVCGGKLEHPIWEISKCNNCGLSYDRDKLSSLSISIRGLGLCGTPFTVSGSSSWHFMKDDYMYLCTDRS

SEQ ID NO: 49160 - protein, 179 aa, Anaerostipes sp.
KEAAKMGLLNTKQIRRLHQKRDLFFHDAMHKISSRIVQECMSHGITTIVIGVNELWKQSIELGKNTQSFVQMPFYQLRKMIEYKAERVGIEVISQEESYTSKADLTARDHIPIYGVDDERAKFSGTRIKRGLYQNKEGNLFNADLIGAGNILRKKFPEIFSKITDFSFLQDMKVIQVFS

SEQ ID NO: 49161 - protein, 503 aa, Anaerostipes sp.
MSSFTLELEISFSKKLLTAYKSDPKLEPGSIRTLEKKLDTAIAIRNTAKGEALKRLHKLQHDRTYQQLQKEYATRKKKDPEADVSDLSPKYWECMSFYGYTEYDLQSYVVQAKHQYHNILGADECQKLATQAFCAVDKIRTKESKKVRFLPRTYDSSVEGKSKKSTLKYIGDCCIQFGKGNIYPLILKKKDLYAQEALTHRVKYVRIVRRTIRGKRRYFAQLVMDGIPPKTKHLDYGKKGQRVGLDEGTSTIAIVSKEEVSLLELAPKTRTDEKDLRRLNRAIDRSKRAMNPDNYNKDGTVKRGRLKWKKSKHYIAMESRRKELYRKSAWNRHCSHNQLANHIVSLGTEIRVEEMRIAALAKRSSKISKNKKNGRIRSKKRYGKTILNRAPASLIEAIDRKLHYIGASVQKVDTAQVRASQYDHMLDTYKKKQLSDRWHVFWDGSKVQRDMYSAFLIYCTADTLDQIDRDLCIHNFLRFKQLHDQEILRLQTEDNKTLRWYIA

SEQ ID NO: 49162 - protein, 372 aa, unknown
  TnpB Polypeptide
MLKAFRYRIFPTNNQRNQLQRYFGVSRLVFNLGLETKTIAYASNRKSISKYDLIKQLPNLKEEFDYIKECPSQVLQHSLINLDTAYQNFFKGKGQFPKFKNRYSKQSITFPQGFEISFEDKVIRLPKLKEVAINYHREFRGLPKRVTLSKTVTGKYFVSVLVDTQTELPKKKSIANNTSVGIDFGIKNLAITSDGVVYENKNFFKSQQRRLRVEQRSLARKKKGSINREKQKLIVALLQEKIRNQRTDYLHKISTELVREYDTIVLEDLAVSNMVKNRKLSRAISDMGWRQLRTMLEYKADWQGKNLIVIGRFEPSSKVCSNCGNLKSDLKLSDRMYHCNKCGNSIDRDLNASYNIKNFGIRNNPVIAKVVY

SEQ ID NO: 49163 - protein, 493 aa, Moorea sp.
MQKKVGAVKKISTQVVPVVGIAKSVELELLSTMKKLGVVRSESYNKLGSISHWGLDWKKAYPEVRDFRKPESLGLPSKLMEWTVSDVAKTITAQQAASIEAVIKKIYKRFPGKENQKIRKDISKQLKTSAFLDNPLLHRLVRKEFQRGHSWVKNQVVYQQGGYSCKRLSRYTYQLELAGIRRGKRNKLIVRSNRNIKGQIRLIYNSLLARFEIHFLVNHGTAEIPPERRAIGVDKGYTEAFYDSDGQAHGKNLGKIATIKSVRVAWPFGHRICAKNRNRGKLWAIHRKLEKIDPAKSARILKNNLSRKTENSRYRRDQSELRAIIGAASKSLFKGESLRIFAEDLTQPIKNKRQSKAMSRKLNSWMKGEMRYSLQKWANWTGSVVTEVQPSYTSQIDSFSGTLLGARIGDSFIRFNGVVLQADHNAAKNILARGTDQGISRFMTRVEVQAVLLRRTARFLEGMDLTLADAVKLGWLDRKHAKTQAFKELLTGM

SEQ ID NO: 49164 - protein, 404 aa, Synechococcales sp.
MLIFEFKVKAKPIQYSGIDDAIRTTQFIRNKSIRFWIDNPKASKYDLNKQCAVLAKEFSFADELNSMARQSAAERAWSAISRFYDNCKKQILGKKGYPQFQKDCRSVEYKTSGWKLSNDRKYITFTDKKGIGRLKLMGSRDLNFYQPEQIKRVRLVRRADGYYAQFAVDVERTESTGVTGKAIGLDMGLKEFYTDSNGEMVENPRFLRMSEKRLKLAQRHVSRRIKGSKNRGKGRVILGKRHLKISRQRKDHAIKLARCVITSNDVVAYEDLRVRNLVKNHCLAKSINDASWYQFRVWLEYYGKMFGKITVAVNPAYTSQECSQCGGVVKKTLSNRTHACQCGCVMDRDHNAARNILSRGLSTVGHTGTFGLDPSNAWGVETATLVGAIQSQQVTTQNQESPSL

SEQ ID NO: 49165 - protein, 381 aa, unknown
  TnpB Polypeptide
VTVVKKGVRVRLYPTEEQKILIDKTIGCARFVYNQTLADCKQMYKQSKHFPSQNERMKNLVPLKGKHDFLKEVDSKALQQSVRDFNSALDKFFKNRSHFGFPVFKSKRNLKQSYRTPYDHGKAGVLDNKHIKLPKLGIVKTKRFDMPDVHKIFNITVKKTTTGKYYASICIETEARLLPKTGKQVGFDLGLVDLLIGSDGSRFGRPKFDYLYKDKLAKEQRKLSKMRTKLERANLNLDECKNYQKQKHKVAKLYEHIANSAKDFNHKLSRKLVEEYDFLAFEDLNVEGMKKNRYLAYSIADVRWAQLINFIQYKCAWYGKAFKQVDRFYASSKICSCCGTYHKDIVNSLSVREWTCPDCGTHHDRDVNAARNILNQALSVA

SEQ ID NO: 49166 - protein, 241 aa, Haloferacaceae sp.
LHFVCRVEMDESKPLGDGVAGIDLGICNFVTVSYGDAVLYPGGALKEDEYYFTKKRTETDNSASRETKRLDRKRTGRRTHFLHTLSKDIVSECVERGVGTIVVGDLSGIRENKNDEAHNWGSHGNLDLHGWAFDRFIQMLNYKAEAEGIDVVTKSERGTSKTCSAYGWSAKRQRVERGLYVCECGFVGNVDCNGIENIRRKVLLNPPSEDRSTGWVAQPGVCLHDLSCGFQPREQVVDCKP

SEQ ID NO: 49167 - protein, 407 aa, unknown
  TnpB Polypeptide
VRVILSHRIALVPTAAQEILLRQAVGVSRFSYNWALTEWQRQYQAGQKPNEGALRRQLNSIKRQQYPWMLLVPKSVPQQVIKNCGRAFERFFHKEACYPKFEKKGLRDSARLDNGPGTFQFEGRRLRLPIIGWVKLREELRFSGKALSTTVRRIADRWYVSVAVEIEMPETVRESQAAVGIDLGVSTAATLSTGEKLAGPKALDVNLEKLRRLSRWQSREKKGSSNRRKSALRLAHLHARISAIRRDWLHQTTTRLVRELAVLGIEDLNVRGMLANPKLARKIADIGMGEFGRQLEYKAKLYGAELVMASPWFPSSKMCSQCGRIREDLPLSIREWTCAWCGALHDRDTNASTNLRCYAIDRASCGRINACGEEGSRAGPLGWRETGLVETGINHVLFGHGFEQRSQ

SEQ ID NO: 49168 - protein, 161 aa, Calothrix sp.
MLATMSMSRLNQGYSVRRRFKISSTKTSAEDLTGIRERTNELPRNKTERRRSNSWAFFQLRLFLSYKSVKYSVKLITVNPAYTSQTCHKCLHIHPVKGKSYRSGKSFKCGHCGNHCDADENGSKVISIVGAAVNPLGGSVLSCNLADHIRATESPRLLAVG

SEQ ID NO: 49169 - protein, 464 aa, Calothrix sp.
LLLNYQYRAYPDTNQKLELNYWLRICQYWYNKQLGDRFDWWENNRNNINACPLICPLPQLRDNPNFYSQKKQLPIIKEDLIKVVHSGELLDFSRVPSQTLQDVCKRVDLAFGRFIKGDGNGNRSGKPRFKNAARYRTLKIEGQAITIERVEKDWLFASFSKLNGWVKVRLHRPLPEGLTLKNALLTLKADGWYLTICLEDPNVPEFTPDEIVPTWRNTIGLDAVLHEDDYLATSENTKLPALKSFRKSEQRLAKVSRRKAIKKKGSRPRRKLAKREAREHQRIARARKDHAFKTAHTLVRTGKKVFVHEDLNLKALSKRNKAKQDEDGSYLPNGQSAKSGLNKSWNDAAFGQFFTILEYIVSKTGARTIAVKPAYTSQLLAYRDNFVFTDCSIREYWDEIESLWVDRDINAGINIKRVGLGLFPTIKRRRGNLVVTESTTNSTSKEVLETLKMCQKPTATRRAL

SEQ ID NO: 49170 - protein, 532 aa, Calothrix sp.
MGKSKASKTKQGKDSLMSSPIFAVQLELPLFATAESVQPNSETTLVDKLLICSHSTQMPKSDAPYVANASLSKISAVESTLNAKDCKPYWTDLCKEISSRLLLPVVTDSQGLDLSLFSTWSSKTVDKSWFSTTLYTAPNQSLPRIFSPSSTSSLVGCTAGESTVKKSKKIRIFLTAIQRQTLKQWFGVSRFVYNTTVKLLQDSSIKANWKAIKTDILNGLPEWSKSVPYQIKSIAIKDACKSVSSAKKKFKNGGGISKVRFRSRKDPVQSCYIPKSAVKDLGIYHTILGEATFKEALPQSFGDCRLVFAYRDYYLTVPENVPRQKSDNQGRVVALDPGIRTFITFFSESSFGEIGASANLQVQKLCFRLDKLISKLTKAKCKQKKRMKLAASSLRGKIKNLVDELHKKTARFLVDNFDIILLPTFETSQMSKKAKRRIRSKSVRQMLTLSHYRFKQFLKHKVFETGKVVMDVNEAYTSKTVSWTGEIIHKLGGAKFVKSPSDGRVMPRDLNGARGIFLRALVDTPSLKECIC

SEQ ID NO: 49171 - protein, 406 aa, Calothrix sp.
MKTLKFKLYQHKRNRHLKRTINAAGMIYNHCIALHRRYYRMFGKYLSCAKLQSHIAKLRKRNSFWQQVGSQAVQDICQRIDKAYQLFFKHNKKRKVRAEEASARNFVRGGVRPPGFKKVRKYKSFTLKQAGYKFLGGNSVKIGNRVYQFWKSREIEGTVKTLTIKRTNIGELFMVVVVEASATLSLDPERSRRVDCGSTPEVNLTTGNIAGFDFGLKTFLTCSDGTKVESPQFLKQALNAIKRANRQHSKKIKGSSNREGARKNLARKHENVTNQRRDWFWKLAHELTDKFDILCFETLNLKGMQRLWGRKISDLAFGEFLKILEWVAKKKNKMVIYIDQWYPSSKTCFCCGYVLETLALSVREWRCPSCQSINGRDDNAARNIQAVGASTVGLGDVRRAVPAIAV

SEQ ID NO: 49172 - protein, 303 aa, Calothrix sp.
MLLPIFLWLKGDSNGKRSGRPRFKGKGRYRSLTFPDPIKPEHIQGKFIQLPKIGKLKMILHRPVPDGFKIKAATISHKADGWYISLSLEDVTVPSLTTDVTPIPDNMVGIDMGLKSFLVTSDNQTIEIPQHYRKAEKRLKRLQRQLSRKKKGSNRRKKAVKRVAKSHLKVANQRKDFHYKTALWLLTKSQVIAHEDLNIKGLAKSMLAKSITDAGWGQFLQILNTKAASAGCLVVAVNPNGTSQECSDCGATVPKVLADRWHSCQCGASYDRDHNAARNIKHRAAGHPVLQSSVNVRRVAGSH

SEQ ID NO: 49173 - protein, 381 aa, Sulfurovum sp.
MLQVVKVRLYPNEAQKQLLLQHFGSSRFVYNFMLHKKKEAYETDKTSILSYELKKLLPLMKKCEEFSWLKEIDSTALQNSILNMDKAYKNFFRRVKNGEKSGFPQFKSRHNSRQSYQSSTATIKDGKLYLPKIGLIKTKFHREVAGVVKTVSISLEANQYFASINYENGSKQVYGTNNGKSIGIDVGVKVFVYTSENEVIKHINLKKEISNVIKAQKVLSRRKKGSANRAKAKANLAKKHLKLKNKRNDFLHKVTKKLSENQTIAVENLKIKNISKQAKGSIENPNMRASAKRGLNRSILQQSWGKFFELLEYKLERNRGQLIRVDPKFTSQKCSCCGHIEKENRLKQAQFICKSCGYVSNADYNASINILNAVGTIVKAS

SEQ ID NO: 49174 - protein, 412 aa, unknown
  TnpB Polypeptide
VLVLEYKAVVNKNQTTAIEEAILTTQFIRNKAIRYWMDAPRESKINKIALNNYSTALRKEFKFVEELNSMACQSATERAWTSIDRFYQNCKKKVSGKKGYPRFQKNNRSVEYKTCGWSLHQTKRRITFTDKKGIGELKLLGKWDIHAYPVKSIKRVRIVKRADGFYVQFCLDIEATLEPRTGDGEIGLDVGLEHFYSDSNGHHEPNPRFLRKAEKSIKHAQRQIYKKEKGKNQRRKARVRYARKHLRVSRQRNEHSKRLGRCVCKLNSLVAYENLNVKNMVKNHCLAKSINDVGWTLFRQWLEYFATKFGTVVVAVPPQYTSQNCSNCGVIVKKSLSVRTHACKCGCVLQRDHNAALNILSLGKQTTGGHPGSNATGLATSTLLGETLVKQVARRNVESPPSLRDAARTRYS

SEQ ID NO: 49175 - protein, 303 aa, Nonomuraea sp.
VQLRYSFRLDPTPGHQIELAKAFGCARVVFSDALRLRNDAHEAGLPFVTDAELSRQVITEAKKRPGRVWLGEVSSVVLQQALADCTRAFRDFFALLSGQRKGPKLGAPRLRSRKDNRQAIRFTRNARFSITPGGKLRLPKIGEVAVRWSRELPCEPSSVSVIKDAAGRYFASSVVEVSASPLPESGIDSGIDLGLGHFAVLPDGRKIDSPRFLRRAEKMRAGRRSWPCWSTRRVCTAGPSSRSVAGFRVASCARYAQPYGRTCPCRCGSGPAPVARPTTGTSTPRSMSSPPDGRRDKTPAEGR

SEQ ID NO: 49176 - protein, 504 aa, unknown
  TnpB Polypeptide
MPTLYSLGKAKIVGMASVLGLDGVNNRRSTAKAVTGFFLALLAMISFISNFNILLPEFPRIAGGMNGRQGLSGKHLPWNCVKLNIMLTLNYTYQFYPDAAQELLLQEWLKTCRKVYNYSLRELKDWIASRKSLSDRCSLVQEYIIPVDAPFPSYQAQQDALPKAKKVFPRLASVPSQVLQTTVRRLHDSWEAFQKRGYGFPRFKKFGQFKSLLFPQFKESPVTNLHIKLPKIGAIRINLHRPIPQGFVVKQVRVVRKADKWYTSINIQCDVSVPDPIPHGHPIGVDTGLEKFLATSDGVLVRPPKFFKTLQSKLKLLQRRLVRKKKRSSNYEKQRIKVARVHHKIANTRKDFHFLQAHSLCDAGDMIFMEDIDYRISAKGFLGKHMLDGGFGQFRNLVRYVCWKRGKFFAEVDHRGTSQECPECGGEVRKDLSVRIHSCPHCGYTTDRDVASGQVLKNRGIALISTAGLAGMETAYADGLPGVEVTQSRQVSKSRKGTTRKSKK

SEQ ID NO: 49177 - protein, 415 aa, Leptolyngbya sp.
VLEFVCKEANKLTNQGIYYARQWYFKTGKYVSKFDLNYQYKPSKHFAALAAQAAQQVLGSVYESFKSYRELLKLWRAGELPDKPKLPNYRTKGGLAVVSYPKQAIKLVDGQVRLPLGNQVKAWFDLDCFMVPMPSNLKFEDINEVRILPRNGCFYAEFVYRLPPIKVEVDFSKALGIDSGLNNWLTCISNVGTSFIVDGLHLKSMNRWYNKQISTLKENQPQGFWSKRLADLTETRNRQMRDAINKAARMVIDHCIKHHIGTVVFGWNKGQRQQANLGNKTNQKFVQIPTARLKDRIAQLCEQYGLQFVETEESYTSKASFVDGDELPVFGEKPEGWYASGKRTKRGLYRTATNWYINADCNGAANILRKVSMTLGLDLSGVSRGALTRPTRILFWVTAKKTRRRTAEASLVASV

SEQ ID NO: 49178 - protein, 578 aa, unknown
  TnpB Polypeptide
MAFGSKNSTPSFVLTLPLDINLNEQDYLYKEFKKCGIIYNQLVSVTIKMWHQLRKTRKYRELMAAIAKSASDSDEQKTLYKQREKILKEHHFSEDSFHKLVVPYAKHYAIHSHVAQAIATDVWKAWKSFFFSKGKEVHYKRLDDVSSISGKNNATGIVLRPAKLTTSNLASAKRKVQKTVEQRYYKAYGQSDPKDDKKVILPDSVIPQMEAEIAVAVAKVKPAVGNGSLRIVYGKHEFPVVVRNSNTQTGKYQQEALKCGVKFCRITRKWVKIKWKYYAQLVLEGYPPTKCDSNGVIKHPIKQGCVGLDIGTQTLAISGSDICDLRLLAPSARAQAKGLVNEIARTQRAMDRSRRATNPDCYNPDGTIKRLKCQHGHKQKRDWKYSKRYYRLRARLRDLNRRLADIRKMEHNILANELLEHGNEFIVEDMNYKALQKRSKETKVNAKTGRIHTKKRFGKSLSRCAPAMFITILTNKVTRYGGKVIKVSTFETKASQFDHTDESYTKKKLSERMAHLSSGEVVQRDLYSAFLLEHIDTESLEYNTEALKSAFPAFLKMHENTKKHLQKEENNLPASVGF

SEQ ID NO: 49179 - protein, 402 aa, Salmonella sp.
MKRLQAFKFQLRPDGQQEREMRRFTGSCRFVFNRALALQNENHEAGNKYIPYTKMASWLVEWKKSPEMQWLKDAPSQPLQQSLKDLERAYTNFFQKRAAFPRFKKRGQNDAFRYPQGVKLDQNNSCIFLPKLGWLRYRNSRQVTGIVKNVTVSQSCGKWYISIQTESEVSTPVHPSASMVGLDAGVAKLATLSDGTVFEPVNSFKKNQKKLAALQRQLSRKVKFSNNWQKQKRKIQRLHSRIANIRRDYLHKVTTTISKKHAMIVIEDLKVSNMSRSAAGTVSQPGRNVRAKSGLNRSILDQGWYEMRRQLEYKQLWRGGQVLAVPPAYTSQRCACCGHTAKENRLSQSRFVCQACGYTANADVNGARNILAAGHAVLACGGMVQSGRPLKQEPTEMIQATA

SEQ ID NO: 49180 - protein, 367 aa, unknown
  TnpB Polypeptide
MGSVKKRYNYRIYPNKNQKEYLESIFSINRFVWNQFLAANIRYYNHSKKFHFFNEMSSILTECKNIEGYEWLKTVPSSSLQQTLKHLEKAIRDCIKKKKGVPKFKRKYSKDSFTLVGDHYSIKENKLHIAKLKSLMEVKWHRELPSKPSSCTIIKDNIGRYFVSFVVEVVPKIVPPSISKIGIDLGIETFCSTSDGKKYKLPDLKLIYKKVKKQQKELSRKKKGSNNFKKQKLKLAKTNMKIVDIRIDFHNKLVSTLINENQVISIETLKVKEMVMKGNKLLSRLISQQGWSSFITKLINKANECGRIVHKVDTYYPSSQLCSNCDYKWGRLNLSIRTIKCPECLVEHDRDINAAKNMLTNYLKTVQ

SEQ ID NO: 49181 - protein, 533 aa, unknown
  TnpB Polypeptide
MNKEVLKKKSNSNFVTVECLLAFDKDEDKGRVLTLMRKFSSVVRFAYKRLMDGAERKELKKLLAQKYGINTRYASDAILLAQQSLESCVEREQNPKKLVFGSRKLFEQLKKKHLTGKRRETLRQKWEERRYGTLYSRGDKSLQGNLNLRLVNLNNQWCLRVNLCNGEYVWAKVTRSVKRKTDKWISFISSLEQAAKTGDWFPYTVRLKLRNGKIYAQFSREEKLPEVTITKDNGVIGIDINAYPFHLALVHTAKDGNLEKYQRISLDKLLEGNSEKREYLSWKVAHQVVEIAKRERKAIVVENLEKLPKGKRGDGLPKLRQRLQKWIYKALLQKIDIAAKRNGIQVIKINPAYTSIIGKLKYAPLYNIDKDTAGAYVIARRGLGFKERLPKNYKELLEDTEFISYTIAKIEDKIANLKQEIREEKNEYKRNRLKSVLWKTRKELDMLLRYLQESGESESATQQTVNRKMERVRGSTQMERKSWQVLSVALAFSCLESLRDLSPLKRVILTRDWVGAAKRNGLVPPYLVRGRVY

SEQ ID NO: 49182 - protein, 286 aa, unknown
  TnpB Polypeptide
VKSRQGKAGFPRFQNKQRYNSFTFAQSGFSISDNRLTLSKIGKVKIKLHRAIVGKVKTLTVSRDSCGKWFACFSVETAKEILEPTNKSVGIDVGISTFATLSDGIEIDNPRFLKTDEKILATAQRRLSKQQKGSNERHKKRKIVAKIHNRIKNKRTNFVHQVSRFLVNSYDVLVFEDLNISGMMKNHCLARSIADVSWSQTIEYTSYKAENAGKKMLKVRPNFTSQDCSNCGHRQKMPLELRLYECVNCHISIGRDINAAINIKRLGLESLGCALEATTKQGLVVE

SEQ ID NO: 49183 - protein, 574 aa, unknown
  TnpB Polypeptide
  misc_feature (209)..(210): Xaa can be any naturally occurring amino acid
  misc_feature (212)..(212): Xaa can be any naturally occurring amino acid
  misc_feature (233)..(233): Xaa can be any naturally occurring amino acid
  misc_feature (496)..(496): Xaa can be any naturally occurring amino acid
LPDELQTDALRLLDLSRAVINLTVTRLWDRLDEFATRTNAYAYKQVEEMITPPLVHGHRQWRCEAEQAGRILRSQAERKQQFVLILPLLEQGMIIPKSENKRGGKNRKAIREALTQLRDAASDGGNAVELQSLIEQACNFYLANGCFPDTYEEMQSVPVLKAGILPYAGDDGPAKGQTYRLSLDLDAKTLTLALRTPDETGKWARNWRXXTXQMALPEIVVARTKAGKMQAPXLREIIEPDGTRYAVLDFIVEVPVEEQATFEKMRTVLGFDWGVRVLVTASCVDLDGYQVGRPFFLDTGPFDGRQARTRRQIDQLKAKVARLEHQRDRFPVGDPRRKPSEEALPILRREIARCWSKYEARNNDLAHLAANVLLMLATTFGCELIAGESLKSMKSAGRGRGAKGRWRNWRTNAQVRGDLWRVLRYKCFLAGFRLEWQQPRHTSHTCPRCSKPANTYTSPEHRSKINEWGAWLCCSNPECLWNGSRDYAASLNIARXGAAMIRHAQTTGRVVHPSIIHSSVQPVSYIGTRAALRLPPPASWGHLIASGRIYCNGWRLSVKLRSSYTTSIMLRLCG

SEQ ID NO: 49184 - protein, 427 aa, Escherichia sp.
MHQENTMPSTPDIGFFFTDQSIIWPVKRLQAFKFQLRPGDQQECEMRRFAGACRFVFNRALALQNENHEAGNKYIPYGKMASWLVEWKNATETQWLKDSPSQPLQQSLKDLERAYKNFFRKRAAFPRFKKRGQNDAFRYPQGVKLDQENSRIFLPKLGWMRYRNSRQVTGVVKNVTVSQSCGKWYISIQTESEVSTPVHPSASMVGLDAGVAKLATLSDGTVFEPVNSFQKNQKTLARLQRQLSRKVKFSNNWQKQKRKIQRLHSRIANIRRDYLHKVTTTVSKNHAMIVIEDLKVSNMSKSAAGTVSQPGRNVRAKSGLNRSILDQGWYEMRRQLEYKQLWRGGQVLAVPPAYTSQRCACCGHTAKENRLSQSQFRCQVCGYTANADVNGARNILAAGHAVLACGEMVQSGRSLKQEPTEMIQATA

SEQ ID NO: 49185 - protein, 471 aa, unknown
  TnpB Polypeptide
VSNISFIGLFLNLINWRGKSHPIDGMGMRAPFLVQGRGREGRRWACAQARLPYLTGTNVWSTLPETTPVKPGADMQTVRIYRLKGLAPPTRARLRAAQLEAARVWNVCCERHQDARLRHQPWPDRDALQQATKGGQFALHSQSIQMICHQLLANVETTRQLKPTHPRMRYPYKPKQYMTVQWPAQAVSRQGKRLILPMGRGRKALCFRLELPERIGGVSLVWNGSYELHVVVPAPAAAHVSGVAQAAIDLGEIHLAAVTTTTGQGLVVSGRGIRSLKRRHNKSLGQLQRKQARCTRGSRRSRALQRARARLRARTERQVRDRRHKATRQVVRFLQHEGVQTVFIGDPHGVRDQPCGRHHHQRMSQWEYGKDKDYLSQKCAQAGILSFTGSERGTSSRCPNCQRRQKIRGRNWVCKNPQCRFAGHRDIVGSLNMHRLAFGRAIAYPSRVTYLRPSRDVVAAGAPACGRGNPY

SEQ ID NO: 49186 - protein, 575 aa, Natrialbaceae sp.
MSSTHLSLPLCLPDEERERYNRLATLTTQTANTLIQQYWTPDHLTEIDESSYQAWKYFDEQEAFAEFDIYLPSRYKRCLLQKVGETLRSHADKRDAFQTIKPLLPDHKIRSIHTRRIKDRLWDSDGYLSSGYVDLLIDQLNAYYDVHGTYPATYFDFQDCPEYSSGVLPYSADDGPTSGQAVKYQYNKSTEQLTVELKTPDTLEPETYGDWTWTEYTLDGYESFHELVDHGSLSAPSFQPNTSKQGTEYYELSFPVEVEHADKSDGVASVLSIDGGLRKDATAVVVDEEGEQLSTPYFIQNAERERMRNLNQERNQLNSKLAHLRRQGRDHTDYFKHIQSEYERVNNKIRHKREQLVHDVANQILALALVYDVDAIVHEDLRSLSPPRGEGQLSWELSSWARREIIENTEYRADIAGIRVERVYAGNTSRSCPRCGSTGHTTKSPDHYHEVWHGGHFRCDNSRCGFQGDRDYVGAVNVARVFFAESDSLDSDFTSSYMGDFEIELAGRSAGSRPVFGTSLIAYVGQLRVTAGGGSAFIAPAVTPSGTKNNGSKSSVSSPATHSYSLFVRGAAVCC

SEQ ID NO: 49187 - protein, 455 aa, unknown
  TnpB Polypeptide
MKQTLAVIRLQLTPDKVTAACLDDQSRKCNVLYNKVLENAYSLKESFKATGDLQVAQLLYSAWGLRNLVPGIKSQYPYLKSVYSAPLKNAALRVTESIKAYQQSRKGKRKGAKTGWPRFRSWSSSWFSLLYDEPLRGYKFKGNTLILSLGTGSDNKRHSLTVPMSDGHVLEGKEVRNLRIVKESGIFSAVITIVRSVPETKPIKRVLALDPNHKNFAYGVDNEGKALEIAAPFWLKVFDLRLDGLKSKLDRCKKRSYLIPVVDAQGNLLKQRWQSSRRYNKIATVYAKARTKRRELTKLFCYRLSNYLYKQYDLVAVGDYTPRGNGITTPMRRAMNNRSLIGRFKEILSWVALKSGKSYHEFAEKGTTRTCHACEFIVPNGLAPHVRQWTCPSCSAQHIRDENAACNGLRKTLRDLSLKSKELSLPVPSSGHVLIKERWAWRVASSSALCTAGIQ

SEQ ID NO: 49188 - protein, 256 aa, unknown
  TnpB Polypeptide
MKCRTTIKLKIPKKIQLLKLFDSYLKACQYSADKALEHECKTKYDLHNIIYYNIRKLFKLKSQFAINAIAKGFEAYLSAKKLKGKKPVFKSVPVRFDRRTFTFFADKISLTTQEKRCVVPIDIPVYYWKYLDWTYQTADLILIKDKMFINITFAREVNTSTVGSTTVGVDLGINQLAVCSDGQVFKGHKTRIIQHNYLRKKLQAKGTKSAKRLLRKVSGKQKRYMAWVNHNISKTIVDSADTIVMENLKGIRKIGR

SEQ ID NO: 49189 - protein, 428 aa, unknown
  TnpB Polypeptide
MGQATRTTKLLLDLGKREEGGANTGKRAYLDATGAILTQARAFYLDFFLAHAQKLAERVSYYSEKHLEMRTRAISANELLTWAEGCTVATREHPHPWEGWNFSERFAGMPVVYRRAAIKDAIGKARAYLSQRANWEKSGKQRGKPGLPGAANHPTLYEGAIELDLSGDGKERARFVRLKVYTGTAWQWHNYPVKLSRYFEERWQDPAWESQSPKLILRRKSAALHFPQVKQVAAKKVKASKEDPHLVTVAVDLNVKNLAVITVRQDGRIIETVFVTDHGLDQARFRHLKRIAKKQWQSGKPVKGEHSNQQLWGHVRQMNEDAAHNVSRRIANVYARYPGCVLLFERLRKIKPKAADEPPAGQSAARQDQPLRQRQSLCSRHSHCRGESAWHQPVLLPMRRERGEVLLPERQTHPGEMGQAVQMPGVSF

SEQ ID NO: 49190 - protein, 335 aa, unknown
  TnpB Polypeptide
MKTFEYRIYPNKEQYHLLMQCLVESRMMYNNMLVMMKAQYKQNGTFPSKYDLEVAFKGHGTHVPASTIQMLSDRLSKSLTRFLVAKTLGLPNVGFPRFRKPSRWHSIQLRQYGNEKNHRDVMLAPDEKHVYVPKLLGRSLKIKYHRPMEGTPKTAHLVLRADEHWYVLIACDIEPKNEHVLGECTHPAIGIDMGLKSFLTDSEGNIVDNPRYYRKSQATLRRKQRTICRRKKGSCRRKKACKSAAQTHLKIKRQRRDFHFKTAKTYANTYQTIVVEALHIDNMVKNHALGKSILDASWGAFLDILEVKAWNAGRKMIRVNSRFTSQQCSKCGEMV

SEQ ID NO: 49191 - protein, 382 aa, unknown
  TnpB Polypeptide
MRKTFKYRLYPSKEQLAALEHQLSEARSLYNAALQERREAWRRRGVSLNYYDQANQLKEIRDAGNLDLANYSACQDVLRRVDKTFKAFFRRVKAGEKAGYPRFKSRDRFDSYTFPAWGDGCHITDAGRVKVQGVGTVKMKMHRPIAGEIKTLTLKREVGRWYACFSVSVDVPAQAQPPGAIGIDVGLYSFAALSTGELIANPRNLKAGLGKLRRCQRKVARRKRGSIGRRKAVRLLQKAHTHIRNQRSDFQHKLSRQLADAYGLIAVEDLNIKGLSRGMLARSVNDAGWGMFLAKLAYKVEETGGVLVKVNPNKTSQVCSLCGCLPDVPKTLADRIYSCSHCGLVVDRDVNAARNILRLGLSLWDETWHTGASVSQEAVCFS

SEQ ID NO: 49192 - protein, 406 aa, Streptomyces sp.
MQLRYAFRLDPAPGQRIALARAFGCARVVYNDAIAARERARAAGEAFPTAAVLSRTLVTEGKKTRERHWLSEVSAVVLQQALRDAESAYRNFFASLKGERRGPKPGAPRFKSRKDRRQAIRFTANARWKITEAGWLSLPKIGEVRIRWSRSLPSVPSSVTVIKDAAGRYFASFVVETDPAADAGRMPASDQAVGIDLGLTHFAVLSDGTKIDSPRFLRRAEKKLKKVQRELSRRQKGSKNREKARLKVARAHARVADARREFHHQLSTQLIRENQTVVVEDLAVGGLARTRLARSVHDAGWSQFVTMLAYKAARYGRTLVRVGRFEPTSQVCSACGHHDGPKPLQVREWTCPACGTVHDRDHNAAKNIKAAGLAVTACGAQVRPGPVPAQRGEAGSHGIRTGAGAA

SEQ ID NO: 49193 - protein, 270 aa, Streptomyces sp.
VRCDAAGQAGVQVPLLPDGRAGSGAVAHVRLRPPRVQQGAGRAAFAGFFAKRAKYPRFKSRKKSRASAEYTRSAFTWCDGKLTLAKMAEPLDIRWSRPLPEGAEPTTVTVSRDAAGRWFVSLLCEDTITPAPVTTAAVGIDAGITSLVTLSTGEKIANPKHERRDRARLARAQRELSRKAKGSANREKARRRVAKVHARITDRRRDFLHKLSTRLVRENQTVVIEDLTVRNLLKNGRLARAISDASWTELRTRHATSWPPGWRCLPVETV

SEQ ID NO: 49194 - protein, 607 aa, Actinoplanes sp.
VGLRQPPGGGRRPGRLRLHRVEVLRRRVVTGREGRVEPFPVRHEPMVGGGQPVLGVLVAAVTGGGGQFLDQRGEIAHPEVAGGGRGGGDLARFAAVGRMVRAAVLHHAVDQEECAQMPVAHPGSLVLTSPVPDVTEHVTISHSDIVRYRITMRWRIPHRAWPEGYWSSDSSVDTPAFGPERKRNPCEAGQGQPIRRQGGWASIHGLPARPIPNRCANLRAVSERAVKRAFKFRFHPTPEQADLMNRTFGCVRKVYNLALEARTTAWYQRQERVNYNATSAMLTAWKKTGELAFLNEVSSVPLQQALRHLQSAYTAFWEKRARYPRFKSKHKSRASAEFTPSAFRWNNGELTLAKTATPLDIVWFRPLPEGQSPSTVTVSRDAAGRWFVSLLCQDTIAALPAVETAVGIDAGLEHLITLSTGEKVANPRHERADRERLARAQRELARKDKGSRNRDKARLNVARIHARIGDRRRDHLHKLTTRLVRENQTLVIEDLTVRNMVKNHTLARAISDAAWTTFRELLTYKADWYGRNLVVIDRWYPSSKVCSACGRLTEKMPLNVRSWTCPCGAAHDRDVNAARNILAAGQAVSAYGAGVRPQRKPPSGAAG

SEQ ID NO: 49195 - protein, 409 aa, unknown
  TnpB Polypeptide
MFEARRLHAYLYNACVEHRKTSYKRFGKSISYLTQQAALVPFKEDWDEYKALNHGSLQATVKRVDFAFVRLFKGLGGYPRFQSIRKYSGWTYPDARQGFKVHSTGVNGYLELRDLGFQIQMRGLARTWGTPTTCTIVYRNGKWFASITVNCEPVRETGTGAVGVDFGCLTAAALSDGTKIENPRFKARLSAKVRKASKSKRRKRSPDFKKKIKGSKRWKKASKRVSKLQHKVANQRKNWTHKVAADIVSSNSFVATEKLNLKGMTAKPKKGKRKRQKTGLNRSILDVGIGMLRSAIEYKLIEAGGVFVEVPTVIVKPSQTCPNCGHQEKKTLEQRVHDCAKCGLVEDRDVAAAIVMLKWARGLGTSLSNVDEPSSTSCNSMKQLAQVKRKKRLAASLSGETPREACDGE

SEQ ID NO: 49196 - protein, 552 aa, unknown
  TnpB Polypeptide
MTDLWNALISIEQSYRTAVASRTAEDPSIAAIDATLTELDTRIENLLTEQKRLRRSARTRALPELPDVSQQLQTASSLRRSLRSQRKEVAKVVREKASDSLAKMAQERKSAIVAARRGSAKVGLYWGNYNEIIARFESASLRARKGRGTLRPAQHGGDGTLTVQVIPPVPTEKFPRGGEGWTLDVFPPTPPPQSVVRPPAAWLRPYTDCRGKPRALTGLTVVGARAAGGSPVQVVLDIAYHRPLPTDADVVYVRLTRRRAGSRWIHTISFTCRSDLVVEPATGATVGIDVGFRRIPEGLRVAVAAFSEGSIETLVLPEALLARHTAIADRQGRLDDAVNAMWGELLAESDALASAPDPLVATWAAELQRQSAGARLTHVGLLRLRAAWPQDWRADLRSKLEDWAFRRSRARNGLEAFRKRTARWGRELRRIWVANLVRRAGHVVIPDIDIRRITRRIHPDGTENILVLEHRRLAAIAAPGHLLDWIATQAVALGVTVTRCFDKATWICHVCGLEHAPIDAGQLIHRCCGCGTSWDQDYNAARNRAAALRPDP

SEQ ID NO: 49197 - protein, 402 aa, unknown
  TnpB Polypeptide
MRTAFKCRAYPTPEQASLLNRTFGCIRVVWNRTLAERHIRYHGGGGSTSYAETDRQLTAMKTDAETAWLAEVSSVPLQQALRHQHSAFVAFFAKRARYPRFKSRNGKQSASFTRSAFRMKGAELRLAKTAEPLRYVWSWPDIDPAGLDPTMVTVSRDPDGRWYVTFAADVEAPTAPVPTGQSVGVDVGLKDFAVLSTGERIAHPRHMDRHERRLKRYQRMLARKQRGSANRKKAKQKVARAHSRVRDARRDFLHKASTGLVRRFDAVAVEDLNVASMVRNRSLAKAISRTGWGEFRTLLTYKAHRDSRTLAVVDRWYPSSKTCSMCGHLLASLSRGTRHWTCPGCGTRHDRDVNAAKNIKVAAGLVETINACGADVRRAGATPARPAVNQEHQPAREGIPSL

SEQ ID NO: 49198 - protein, 364 aa, Vibrio sp.
MKEVAIKQRFYPTNEQAELLAKTFGCARFVYNAILRWRTDAYYKDGESISYNQASAKLTELKKNPETEWLKEVSSVPLQQALRHQQTAFKNFWDNRARYPQFKKKHAKQSITLASAAFKYRDGQLFMAKSKEPLNIRWSRDLPSAPTTVTVSKDKAGRYFVSMLCRFESKPMPVTAKTVGIDLGLNNLFITDNGEKVDNPRHTKHYENKLAYLQRKLAKKQKGSKNRDKARQKVARLHAKIADSRLDNLHKLSRKLINENQVVCVESLAVKNMIRNPKLAKHIADASWGEFVRQLKYKAKWAGRTISEIDRFFPSSKRCNGCGFVHESMPLNIREWGCPDCGRTNDRDINAAQNIKTVGLAGLA

SEQ ID NO: 49199 - protein, 402 aa, unknown
  TnpB Polypeptide
MYGMRYKAYRYRLYPNKEQQELINKHIGCCRYVYNYGLEKKIKVYQETKKGISKFDLSNDLPKLKKEQETSFLKEVNSLSLQAALACLDNAFTRFFKEKRGFPKFKTKRDSWQSFQVVQNTKVNFARNRVYIPKFKEGIKCKLHRTFEGEIKTSTISRTPTGKYFISILVKMQDDMPTKKPIDENKAVGIDLGIKTFATLSDGQEIQNPRNLKSAIKKLKRLQRKLSKKTKGSNNREKARKRLAVQYEKVTNRRNDFLEKVTCYLVSTYDTICLETLSAKNMMKNHHLAQALSDISIGRFNQLIEQKAEWCGKNILKIGRFEPSSKACICGYINKELKLSQRVWTCPKCGRVHQRDLLAANNIKRFAFCKNNTAGTAEINACGDMILDRESAQEAHKSLVCG

SEQ ID NO: 49200 - protein, 397 aa, Synechococcus sp.
MYRAYKYRLYPTADQQVSLAKSFGCARWFWNYALHLCQQTYQSTGKGLSRGYLQGLLPALKREYEWLKEPYSQCLQVVALNLSTAYKNFFEKRAMLPRFKSKHGRQSISYPQNVKFDGDYLHLPKIGAVHCCVHRPFEGTIKMVTVSRNSDGKYFASVLVDDGQEKVESLPSDKAVGIDVGLNHFAITSEGSKFANPRHFAKHQRNLKRKQQRLSRKRKGSRNRQKARLAVARVYGKVARCRGDFLHKLSRKVVNENQVIVVENLNVKGMVRNHNLAKAISDAGWGMFCTMLKYKAEWEGKVYLEIDRFFPSSKTCHVCLNRVGSLPLEVRAWTCEGCGTHHDRDINAAINIRNEGLRILSLGTSDTAWGGNVRQPGKTSVLLDAVPVESGSPRSNL

SEQ ID NO: 49201 - protein, 409 aa, Synechococcus sp.
MLNMTWEFKLKLTAEQVSEIERTLTVCRKVWNYALRERKDWLNSRKSPINACSIEREYIISVDEPFPNYHVQAKRLTTAKKEIEALRSVNAQMLQQVLRKLETAFEQWRMKKHGFPRFKNQARMRSFVFPQMLKNCVSQAGIKLPQLGWVKVRWSRQIPDLFVVKQARIVRKASGYFVMLSLQADVDVPQTSFYGHSIGIDVGLEYFLSTSDGTQVKRPRFFAKLHRKLKLLQRRLKHKQKGSVNCAKLLKKIARVHQRIADTRKDWHFKLAHRICDQADSIFIEDLDFRIIAKGMLGKHTLDAGFGQFTNQILPWVCFKRDKYYAKVNPNGSSQECPDCGGAVRKTLSDRLHHCHACGSTKPRDVAAAQVINSRGQRDRENACGVEVAGDSVTGSSQLAVKQEIFRAI

SEQ ID NO: 49202 - protein, 334 aa, Synechococcus sp.
MWGEHLNCNKLQSHIAKLRKRTPFWQTIGSQAVQDICQRIEKAYRLFFKHQKKGVRPPGFKKVKRYKSFTLKQAGYKFLGGNRIKIGNKIYQYWNSRPIEGAVKTLTIKRTPLGELFLVVVIDSADELETKFETGNIAGFDFGLKTFLTCSDGTQIESPQFLKQSIHAIKKASRQHSKKPKGSANRERARLNLVRKHEDVVNRRSDWFWKLAHELTNKFDVLCFETLNLKGMQRLWGRKVSDLAFGDFLRILKWVATKKGKQVVFIDRWYPSSKTCNHCGHVLESLDLNTREWRCLSCQSVNGRDENAAKNICTVGASTVKLGDVRQAKPAIAV

SEQ ID NO: 49203 - protein, 401 aa, Synechococcus sp.
MINLTYEYRAYPTSDQAIKMDEWLDTCKRVYNYALAERRDWIQSRKCPINACSIQREFIYPMDAEKPTYYSQKRNLTAARKESPFLQNVHSQVLQDVMGRLEKAFNALWNSGFGFPRFKKRFRSFNFPQLGKNPIGDNQIKLPVFGWVKTVVHRPIPDGFEAKQARVVKRASGWYIQLVIQSDVKIPDPVIGGHAIGIDVGLNHFVATSDNELIARPRFFVEVQHRLKVLNRAVARKQKGSKNQQKARQRVARFHERITNRRKDFHRKLAHYLCDQAGMIFAEELNLKGLAKGMLGKHCLDAGWGQFLDTLKWVCFKRGVHFQKVAAYGTSQECPSCGVAVRKDLSVRRHECPECGYTTHRDVASGQVIRNRGLIAVGQTVQSCGATPSGEALKQEFLKAT

SEQ ID NO: 49204 - protein, 414 aa, Cyanobacteria sp.
MKARYRYRIYPTPAQQLALAKLFGCVRTVWNDALAYCVNQYQAGGKKPSNASLQKQFITQAKKTVEREWLAEVSNVPLQQSLNDLEQAYQNFFKSCKGERKGKAVKPPRFKKRRAAQSARFTTFGFKLDKDILYLAKIGNLDVVWSRPLPSVPSSVTVIRDAAHRYFVSFVVEIQPETLAPTDNSVGVDLGVATFATLSTGEKVDAPKPLKKSLKRLRKVQRNLSRKQKGSKRREKAKKRVARFHARIKDTRTDFLHKLSTRLIRENQTIILEDLNVSGMVKNRKLSRAISDLGWRQFRTFLEGKAQKYGREFRVISRWEPTSQRCSCCNELGGKKELSVREWTCLFCGVIHDRDINAAINIKAAGGHSEAKNGCGGRRKTTAKVAASCEASTRPEVIQLSLFDLLLITAPSGR

SEQ ID NO: 49205 - protein, 418 aa, Symploca sp.
MLVLEYKVKAKQVQYRAIDEALRTVQFIRNKCLRYWMDAPKASKIKCFDLNKYSTELRNEFKFVKDLNSMACQASAERSWLAISRFYDNCKSKKNEKKGYPRFQKDNRSVEYKTSGWKLHLTKRRITITDKKGIGELKLLGKWDIHTYPVKAIKRVRLVRRADGYYCQFCVDIECIDTQPKTGNEIGLDVGIESFYTDSNGHQEPNPRFLRKAESELKQAQRRIYKKKKGSTGRRKARVRYSRKHLRISRQRNEHAKRLARNVCKFYDLVAYENLRVSNMLKNHCLAKSIAVCAAWCDSSIASWYQFRQWIEYFANKFEKLAVAVPPQYTSQECSQCKRVVKKSLSTRTHACQCGCVLNRDTNAAVNILLKAKSRGGHPQSNAKGVATSTLLGVTLVEQVATVNLESPSMQERGVSMF

SEQ ID NO: 49206 - protein, 256 aa, unknown
  TnpB Polypeptide
MQATWYNQDGDVCGIFVQIPAVPKPDTRKSDLTHTRLLSVRVQPLSRHTKRSLSNEMGEHSTTMDCAGDVTQLKKTLEWLREVDATALQSSLRDLDAAYQNFFRRVKRGEKPGYPRFKSKHDHRQSYKSKCVGTNIKVLDKAVQLPKLGLVKCRVSKEVKGRILSATVSRNPSGKYFVALCCTDVEIEPLLSTGVAVGLDMGLKSFAVSSDGVEYPNHKFLTKSQEKLARLQRQLSRKTKGEQAQRKSPASGGKTP

SEQ ID NO: 49207 - protein, 371 aa, unknown
  TnpB Polypeptide
MKKTYKYRLHANCQTVANAEQWLWLCRRLYNAALEQRITAYKQGRHTLSAYDQSNELIDLKAAFPEYRDVGSQVLQGVLERLNLAYKAFFRRVKSNHGKGGFPRFKGRNRYNSFTLKQVGWKLDGKYLTIRNVGRFKLRLSRAIEGDIKTVTICRAPTGKWYACFSCDNVPERYLAPSDKAVGIDVGLKAFVVDSDGGKVEPPRVLREAEAILRRKQHKLSRRVKGSNRRRKARVLVAKAHEKVKNQRNDFLHKTANYYIANYGLIAIEDLRIQNMVQNRHLSKSISDSAWGQFFVYLDYKAAEAGRIVVKVSPRDTSQNCSSCGVKVPKTLAVRVHACPNCGLVLDRDENAAINIKAAGQAVQELTYAIA

SEQ ID NO: 49208 - protein, 367 aa, unknown
  TnpB Polypeptide
MKTYCFKLYDSKRNRKLHSQINAAGLVYNHCIALHKRYYRLFGKSLNIYRLQKHLSKLKKISRFTYLKEIGSQAVQDITQRIDKAYKLFFRNLKHKIRTAPPSFKKIKKYKSFTLKQSGWKLNEADNSIIIGKQRYRYAKSRKIDGKIKILTIKRDALGDIYLYFVCETSENEVLARTGKSVGFDFGLKMFLNASDGKDIASPLFFKQNANAVKRANKNLSRKVKGSNNRQKAKLTLARLHKKIANQINDFHWQVAHRLVAEYALICLESLNLKAMQKRFGRKISDLGFADFVDKLKYLSNKTGSSVIEIDRFYPSSQICSACGYQNTKIKNLEIREWVCPECGSTHNRDRNASINIEREGIRIFFA

SEQ ID NO: 49209 - protein, 419 aa, unknown
  TnpB Polypeptide
MKRTNKLRLRPTKKQEKALLTLCEMSAVLWNKVNYKRRQSFFSGNIDWNTKEEYNEFKKILGSATTQQIIRKNDEAWRSFLRLLKLKKQRKLPKHVNRISPPRYWKDRKTGRRKLMTVIRNDCYRIEEVRGKKFLILPKGLRIRITGEMRWKGKQGRLEIFYDDLTGRWYAYQSVEVNQPSTTSLVKAFVDLGVINIITAWIEGEKQAMAFSGKPLLADWWYWTEKIAKHQSKLKTINGKNTSKRLRRLYRKRKLRFRNAVNTIVFRFVRLCHLKGVGEIVVGDVTHIRDNNDKGSKVNAMIHNFWSFNYVMERLKVTAENFGIKVKARNEAYSSSECPWCHSRKVVKSKRLFKCLNCGIEAHRDVVGVLNIARLRGDGFNGVLAHPLLLRVEEGVEVKADETPMLMKPLEAGTSHALA

SEQ ID NO: 49210 - protein, 396 aa, unknown
  TnpB Polypeptide
MRRTNTFKLKPTKEQEKRLFELADNCSRLWNEVNYRRRQSFFNGEIDWNTDEEYNKYKRLVGSATAQQIIIKNNEAWKSYFALLKLKQKGKLPPHINQIKPPRYWKDRKTGKRTLRILVRCDCYSLGGDVLKLPFGLRIRWSGKNRWEGKQGRLEIVYDDLSKSWYAFQPVEVEPLHQPIGEKRAYCDLGVRVLIMAEIEGMLIGYSGNSLLSDWWYWTKKIAEHQSVLKETNDKHTSKQLRRLYRKRKRRFRHAVNTVVSRFVGLCYNKGVSEIVMGNLNGIRNNNSRGKKANSMIHNFWSHRYLVQRIKEKAEEYGIKVIEVNESYTSSVCPRCHSRNVIKYKRLFKCLDCKLEAHRDAVGCVNIGLAERGVVNGAVASPLLLSVEAGTSHALA

SEQ ID NO: 49211 - protein, 419 aa, unknown
  TnpB Polypeptide
MFKTQKNHIRCNKKTYRILRMLTRLSKNLYNFTLYTIRQYYFNNGKYLPYEQAYHLVKQNENYQLLPSQVAQQTMKVVDRCMKSFFRLLKERKKGNYNRPIHLPRYLSKNGYFVCIFQKDMFKVNGNKIRLSLGRNFAKKFDVRFLEFKLPPTVVGKKIKEVRVLPRCRGLWFEIEYVYEVEPEKVDLDYSNYLAIDLGLDNFATCVSTSGTPFIIEGRGLKSFNRWWNAKKAKLQSIYDKQGIKMGKKMAWLLRKRKNVVNNFMNQAVNYIAKYCLSNRIGNIVIGELKEIKQNIKLGRKNNQNFQYIPYGLFKQKLKSKCEYYGINYIEVDEAYTSQTCSICGDVNKNNRKHRGLYVCRKCGFVVNADVNGALNILKKVAPESVRIGGSGGVNPPVRIRVVDFRHQTPHEAPSARAG

SEQ ID NO: 49212 - protein, 401 aa, unknown
  TnpB Polypeptide
VQLRYNYRLYPTPGQRAALARAFGCARVVFNDGLAARQAAHQAGLPYPSDRELSARLTAAKATPDRAWLGEVSAVVLQQALADLNAAYRNFFASLTGGRKGPRVGPPRFRSRKDHRQAIRFTANARFKILDNGRLRLPKVGFVPVRWSRPLPSEPFSVTVIRDSVGRYFASFVVQTGPGTLPEAEPVIGIDLGLEYFAVLSDGRKIASPRFLRRAEKRLRRAQRSLSRKQQGSRNRDKARVTVARAHARAADARRDFHHQLSTALIRDNQAVAVEDLCVTGLARTRLAKSVHDAGWSAFVAMLEYKARLYGRQFHRIGRFEPTSQTCSACGVKDGPKPLHVRAWQCPACGAWLDRDINAAVNVAKAAGLAVTACRAQVRPGLALAQRGEAGTHPTSRRNAA

SEQ ID NO: 49213 - protein, 515 aa, Streptomyces sp.
MGGVRKVAAPFVVPGPSGVAIRARLRVSQTDAAALAEVGTFLGSLASRDLAVRSRQGPECDTSAWSARKRGLSGYSSARWAGSITKATHDQWALARRGQAAELAWLRGQTASIEARLARPLRAKADKRAGLVRGYGSRREWHAKSRRLHVLRERLARLEADWEAGRVRLVRGGKKLARLRHHLNEAGLDEHGWRERWQAARMFLAAGGESGKRLGNETIRITKDGQVSIRLPAALAYLANAPHRRYVLDATAEFKHRGEEWQDRITVNQAVAYRIHYDVLRGRWYVTASWQRATVPLLPLEDALAQGVVAVDMNDDHLAAWHLDIHGNPVREPRRFFYDLSGSTQHRDAQIRHALTRLLHHAHRSGVAAIAIEDLDFAEGKTREKHGRNKHFRRLICRFPTAKLKARLVAMAAEQDIAVVAVDPAYTSRWGAQHWQQPLTTPTRKITRHDAAAVAIGRRALGHPIRRRTAPPRNDQSDRYGHRTAQARPETRRREEPRPRVPGPRTRCVLPGRRE

SEQ ID NO: 49214 - protein, 422 aa, unknown
  TnpB Polypeptide
MCYKVLKMRIEPNSSQRSVIDYTMDYNRYIFNFLITANKLTYTRDKRLLSEFEMNDLCTKLRQRWPCFRRMHSMTHSDISRKVHQSCAKCRENSIRRRNRAVAKGILPKDSPLTMSWPRYRKQGRYDSYAHLSNRDFKIVETVNDNGKEVRKLRLGKVKGLIRCYNQSTPVQGEPKTCTVSRKDIGTHTEYYACISYKFPDAEVKEPSEPKAIGIDMGIRHIAATSDGKLYGHSNDMKEDLRKLKRLSRRLSKDRCDPVEEKKARSRLNHHHKRMVNKRKENIERISKEIVDENDVIIIERLNVRKLWEKSLSKGMTRGFANSSLGILRNRIQSKAECAGKRIVEVDPRGTSQICSQCGAEAKKGLKVCVHSCPCCGFAADRDVNAAINILRKGWTGHPVPGRDESQTAIAGGEARTETVAD

SEQ ID NO: 49215 - protein, 218 aa, Acidilobales sp.
VDINENNVTLAVFIDRKLHEIYRIETNIGRIVIAYSERRRITMGRSARDRVARKAFRKLREGERKEDIIYKTAGIVEEVARKYSAIVVVGNAHRGKSRMASNARKNLRHRIHQWCASKLVETLNSKPIYVVEGSEAYSSSRDPFSGRPVKGYAPSVIRFALRGGRRVKVIKIQLRLARLSNGSTMDRDVIGAINIGLKYLSTDGRGVGSPRQGPMRCG

SEQ ID NO: 49216 - protein, 363 aa, unknown
  TnpB Polypeptide
MAGIIWNHVTALQRRYFRLFGGYISIGRMKRHVAKLRNGRRSEWRLLGSQAVQDVIERHDAAYRRFFEYKSGKRSRKAGRPRFKKVKEYTSFTLKQAGWKYLGDNRIKIGKANYKFALSRPVEGEIKTVTVKRDRAGRLFLCFSVIQSIEPVETCTNKIGGFDFGLKTFLTDDEGRGYQSPQFFRENMSEIGRLNKSLSRKAKGSVNRRKAKRRLALAHIRLADKRRDSHFKLAGRLLAEYDVLCFEDLNIDGMKRLWGRKVSDLGFAEFMSILDGMARQRLGKEVVRLDRFLPSTKACSTCGAIQDMPLNERTFVCRSCGNVKPRDWNAAINIRSWGVNFGVEDVRRHHVAILARSQESHAL

SEQ ID NO: 49217 - protein, 416 aa, Streptomyces sp.
MFDRPSVTGMQLRYSFRVYPDARQRTALTRAFGCARVVFNDAVRAREDARRAGRPFPTAGELSTRLITEAKQTTSRSWLGEVSAVVLQQSLRDADTAYRNFFTSLKGTRKGPKLGAPRLKSRKDARQSIRFTANARWKITDSGRLNLPKIGAVKVKWSRTLPATPTSVTVVMDAAGRYFASFVIDTDPATDAARMPDTDRTIGIDLGLTHFAVLSDGTKIDSPRFLRRAEKKLKKAQQDLSRKQKGSRNRDKARLKVAHAHAKVADARREFHHQLSTRLLSENQGIAVEDLSVVGLARTRLAKSVHDAGWSSFTSMLKYKAQRYGRTLITIGRFTPTSQTCSTCGVVDGPKPLNVREWTCGACGALHDRDVNATINVKTAAGLAASACGAPVRPELVLAQREETGSHGFPTEPCAA

SEQ ID NO: 49218 - protein, 311 aa, unknown
  TnpB Polypeptide
MVWPPIYGAIECYRDALANTNAWRNNPRKGRRPRVRKLSMLLHPGSGYRVKEGYVEIIGGIKLKIIGWDGRYDQYENEEARLVYREGKMMLWISRKIPRPEPYQPRDVIAVDINEKKIVYGDHVINKERDTEIDEAHRWKKLAEDLQKRYSFTRYPAWRRRRGILNRIRSYHRKAKDILEDWARKTSLGIVRFAKKLGYAVAREDLTGLINSLRKIKNKDHRTKLIIMGYARLGRWIDWQAEKQGVPLAIVNPNRTSSECPQYGAEMIENGYRRLKCPRCGFEADRDIVGKLNIRKRALKKLRIKANPGDL

SEQ ID NO: 49219 - protein, 343 aa, unknown
  TnpB Polypeptide
LPPHIRKLSPPGYWKDRETGEKEIHILIRNDRYYLEPISEDEGYIVLEGFDLRIRYGGRIRWEGKQGRLEIIYVNGRWFALVPIEVGVDPPKSNPKGYVKPNYKGKIVNPRSIKQRDPIGDKEAFIDMGLNNLFAVTISDGSAMLIKGGTIKSEYYWWKREIATYQAIRDLLRNAGISTWKEYHEKYLKAMYKRDERLRHLYITAIRFLADELHRRGVKKLYIGYPIMLSQDNGNEYNTNIWWYRRIMLWIVDIFMEYGIEVEIVPEDYTSRECSICGNKHKNGRIYRGLYECKKTGKKINADINAALNIARRLGRRIRIARKIESYHVTHNGVKSLIPRQGG

SEQ ID NO: 49220 - protein, 537 aa, unknown
  TnpB Polypeptide
MAPPFVASGPSGVAVQTRLKHLEPGDEKVLRLVGAHLGSLASKDLKARCRDGPEHSGEAWAVRKRGLTALSSSRWAGSITKATHDQWALARRCQLAHIQNLEAGIRAIEDRLSLPVGQKGTKKAPGGYRSRREWHAKSRRLRVLEDRLAAARADREAGLVHVVRGGKPLARTRHHLDTVGLTESAWRGQWEAERWFCQADGESGKRYGNETIRISPEGEVSLKLPAPLAQLANAPHGRYVLACRVTFAHRGEEWADRVVANRAIAYRIHLDTGRDRWYVTASWQIPPSPTIPIEAVLAHGVIGVDMNADHLAAWRLDVHGNPTGSPRRFFYDLTGTAQHRDAQVRHALTRLLRWAQTCGVKAIAVEDLDFTAEKTREKHGRRKRFRQLISGMPTAKLRARLASMADQTGIAVIAVDPAYTSRWGAQHWQKPLTSTTRTTTRHDAAAVAIGRRAQGHPIRRRTTPPPQHRSDAVGHRTVQARPDVPGREGPRPRIPGPRTRSVGAGCGANAGNQNAQHRPGRSAEHETWQQDSLPLSP

SEQ ID NO: 49221 - protein, 321 aa, unknown
  TnpB Polypeptide
MSRYRLTPTPQQETILRQHCAHARYVWNLAAEQQSWWRPGRASAPGYCARAAQLTQARAEFGWLAGGSQMVQQQALRYFAQAMANYFAGTHRKPTWRKEGRHEGFRIVAVKPGHIRRLSRKAGEVWIPKVGRVRFRWSRAVPAVKSYRVTLDRAGRWHIAFAAIPEPIPGPGTGQLVGIDRGVAVSAALSTGELLHCPGLRRTEQARLRVLQRKLARARRGSSQRARLRTAIAKLRVREADRRRDWAEKVSTDLARRFDLIRIEALRVQDMTRSAARSVDQPGRNVRHAVCWRDGWTPRRPAESRGLVPRSPRSAAARAGP

SEQ ID NO: 49222 - protein, 365 aa, unknown
  TnpB Polypeptide
MDACRWVYNQMVEKINREGFQTRNDLNYFLTELKESEPWLYSHHSKMLQMVSTQIDGSQKSLIELRKNGYETGSLKFARFSKYNTFVYNQSGFAIKNGFLYLSKIGRIKIIQHRQIPENHTIKQITITKSKSGKWHACLTCEIDAILPRINMTKSVGIDVGITNFVYDSDGYQTPNPLNLKKMLRPLARIQKKISRRKKGSNNRLKAIRHLQRIHERITNRRKDFQHKLSTIYAKNNDVVFIEKLEKLNMVKNHRLSQSIMDSSWGTFLQKLEYKCKMVIEVPARNTTIDCSRCGNKVPKSLAVRIHRCNVCNLVMDRDYNASINILKKGLGIFNIKLPQELREVTPVKILMRSVKQEEATGLVR

SEQ ID NO: 49223 - protein, 414 aa, Ignisphaera sp.
MSLSMRVLATAKIEAAAPEGGETLLHQFLKAYRDAVQYIVDGIWLLNDVPSEEKLHKMFYSELRRLGFRAHHVSEIYRRAREVVEATKRNNGSKPVLKKLTARIHPLDYRADFSAKVLRIAVLNNQWVELRLKWYKYLDKYLDGSWKPGEILVSYRDERIFVYITFHRDVEPIAFKTVMGVDINFNNVTYTVLDLSGNLITIGVIPFKGLERSLHLKKLSEDLQRRYPNSWRFIKWVRGVRGRWLSKARNILMDSAHRVSKRLVDIAREYRALIVFEDLDRLKENSNNGYKLLWEKSLWCYKRIQMFAEYKAMVYGIKAVYVNPSKTSRKSPNGKKLSFINYRYVMLGNVITSRDVIASWNIALRGLKKLKRMRGSWVKLSPDSPRNEAMKTRAKRGNPEARKIYPQPIIAIHR

SEQ ID NO: 49224 - protein, 350 aa, Haloquadratum sp.
VVRLRRRQGQPTGLPQRKLLRRRGSSCPRRTPTQYGDVKQNGFKHDTKNNRVRLSKGANHKEHPKAWEYILVEYETRPGITVENIQQVRSVYDQHKERWELHLVCKNEIETPDAPGTETAGIDLGISNFAAVAYSTEDADLYPGNRLKQDGYYFPKEIATCDDAGGNRATNLQKKWSERRTHFFHSLAKHIVERCVENGVGRINIGDLEGVREDEDGSSKNWGKHGNLDLHGWAFDRFTSILEYKAKGEGIKIVEVDERDTSKACCVCGRTDENQRVERGLYVCESCDAAFNADVNGAENICFDLNQSNSESAPDLGGDRSTGWLAQPSVYLHDLSHGFSPREQVVDCKP

SEQ ID NO: 49225 - protein, 429 aa, unknown
  TnpB Polypeptide
MNMNKNETIKATLKATRAKRKNQTCKVYEIKLDKSHLNNATKTHLNRLFIEAKWFYNHILAQHKIFGMDDNVHQVPVKVKDIFEIRDLQCLSAQMRQSILSRTQDNIRGLAERKKKGYKIGKLKYKSLIQSIPLKQYGNTYKILNTKYIRVQGIKQKLKVIGLKQIPVDSDIANGTLIHKNGDYYLSITTYQEKGKTKQVHANKSVGIDFGLNRQLMLSRTGIAIQYSIPISPKLRRIARTLSKQKLHSKNWNKTRIKLNKEYDKTTNIKEDIKNKVVSFLKNNYETVCVQDESLKAWQRIWGRKILSTSIGGIISTLKKKVHTLIEVPKNFPSTKTCSKCGNIQEIALDERVYICKNKNCNNILDRDHNSADNMENEGLKQVGTVRTELTPVEIEANTSMFLRYLNNIPYIRASSVYESGSSRLLAGE

SEQ ID NO: 49226 - protein, 403 aa, Moorea sp.
MIVLEFKVKGKQSQYSAIDEAIRTVKFIRNSCVRLWMDNKGTSKNDLSKYSKILAKEFPFANELNSTARQAASERAWSSIARFYDNCKKKIPGKKGFPKFQKRGHSVEYKKSGWKLSPDKKSITFADKKGIGKLKLKGTWDLWRFDKKQINRVRIVRRSDGYYVQFCVAVKVSEDLDTTGRTIGLDVGLKEFYTDSEGYSEPNPRFYRKNEKRLKFYQRRVSRKKKGSTNRIKAINKLGRQHLKISRQREEHAKRLARCVIRSNDLVAYEDLRVKNLVKNHCLAKSINDAGWYQFRKWMEYFGVKFGRITVAVSPAYTSQNCSECGETVKKSLSTRTHACKCGCKLDRDHNAAINIRNRAISTTGHVGTWVLNPNASGDLASTLLGSDLDEQAESLIEESPRL

SEQ ID NO: 49227 - protein, 365 aa, unknown
  TnpB Polypeptide
MQKGVKFRIYPNREQKNLINQTLGCCRLIYNKGLVMHNEAYKTGNKISYSQTSAMLTDLKKQEHFAFLKVVDSIALQQSLRDLDRGFVNFFQKRAAYPIFKSKHNHHQSYRTINQANNIRIVGKYLKLPKLGYVKIHQSMKAGKINHVTVERTPTGKYFAILNVEFEPQPRPNKGGAIGLDVGIKAFYTDSNGNVVPNPKYLEKSMRKLVREQRMLSRKQKGSSNRKKQRVKVALVHERITNQRNDFLQKQSTMLIRENQTVCIEDLHVKGMIRNHKLAQHIASVSWSKFFEMLEYKAAWYGNEIIKIPTMYPSSQICSCCGYRNPLVKNLAVRAWECPECHAVHDRDANASVNILKKGLQMQLA

SEQ ID NO: 49228 - protein, 386 aa, unknown
  TnpB Polypeptide
MNLVAYKFRLYPNKSQKEYFSKCFGCVRFFYNKSLSDMIEYHKEHKDFKNITPATYKNEYPFLKEVDSLALSNAQLNRNSAYKAFFRGQNKFPKYKSKKNDQSYTTNNQKGSVRLSDNNRYISIPKCKRIRIKKHRDFDGVIKSATISKTTDDKYYISILVETEIKPLERTDKSIGLDLGVKDLVITSNGLKYRNHKYLAKSEKKLAREQRKLSHMVKGSSNRNKQRVKIARIYKHINNQRNDYLHKLSKHIIDENQIICVEDLKVMKMTKDNDYNKSLLDSSMSRLLTMLTYKASWYGRTIIKIPSDYPSSQLCSSCGYKNKEVKNLKIRKWTCPECGSVHDRDINASINILSKGIEILTKDGTHPDSLFMLDPLGSSSKKPTHL

SEQ ID NO: 49229 - protein, 384 aa, unknown
  TnpB Polypeptide
VKVVRTTKIKIKGSTKASNIIVNYLSALNWLSQIVFNSKELNSNRLAKSFYPTLREKFNLPSQLSCSICKQITATYKTAKSNKRWKLVIFKNATIPLVWKRDFNKSGRGVTLWGEHVSLHHPSIPQNTWKDSKLKQIKNKFYLILCYEKEVQEPVQRGSIVGVDSGIKRMLVATNSSNNKTFFFKGGELNHLRKNIRLRRAKIQAVGTRSAHRLLQRLAHRERAITEHLLHVASKALTKYAVESNARVVVFEDLSNIREASLQKGKDLREKTCRWPYSGLQFKTGYKLSEYGIGMEIVSPFYTSQECPKCGHIAEESRKGLRFCCISCGHKGDADRNASNNIGNQYILREQGFRRMGSVNTLEKSNHSLEMVSHKSLICSGIQV

SEQ ID NO: 49230 - protein, 422 aa, unknown
  TnpB Polypeptide
MGYRASTTQCIVRLLPLRNLNQEQAVLCEALRREAGRCWTDMLQAHIQSRGGKWLTSVDLGKRFKGEYALHSQSIQALAQKLEANVDAARQLKKEDSAVRYPHHPKKYQTVVWKASAIHWAEDGRLLLSNGKRAPGLRVPISDEYRGMDLCKAELTWRADHYELCLTMDTGIENPLLKESGQVAGVDLGEVNIAAVATEAGDALVVSGRALRSVKQLRNKRHAALTSRIDHCKPGSRRHRKLGKSKARASAKLRRQQRDILHKASRQVVEFCQANDVRAIAVGDVRDVQDGVDLGKNANQKISQWPHGQFVQYLSYKAKRYGMRVEQIPEDYSTRTCSCDGSVKDHAPRGRVYACPGCGAVLHRDVNGACNICSRARYGSYGRVQARTTMYLRPLGRSRAFETGRGRLSDCCSEISPRTPAL

SEQ ID NO: 49231 - protein, 397 aa, Kluyvera sp.
MKRATKVRIYPTGEQAAFLNAQFGAVRFTYNKALHISRHMYQRHGVSLKPTRDIKPLLAVVKKSRRYSWLKEFDSLALQQAVINLDRAFANFFQKRAGFPTFKSKQGKQSSYHPNGKVLTDAIQLPKLKPIRANIHREIVGKISSITITRNAAGKYYASILADDGQDAAAKPTYITRVTGYDLGLSHYLIGNDGGKVLNPRHLVNAHRRLRRDSKALSRKKQGSTNRRKALICLAAQHERVANGRADFQHKLSRRIIDENQAVIVETLKSVNMMKNRHLARHIGDAAWSGFVKKLAYKAESAGVHLVKLDQWFASSKTCHCCGHKMPKMPLNFDDAPSAQLTHHFLMDEEILPVCSPEYARRYDLMGSLLNLPHCTLLHDRQAWSNDSGTDEWHSWA

SEQ ID NO: 49232 - protein, 287 aa, Frankia sp.
VEWPKDGDGCRWNSDPHHATQTRVRLQGVGHVKVNQHRPVRGTVKTVSVKHEGTRWYLILSCDDVPAVPLAPTGAVVGVDLGVASLATTSDGKQYGNPRFLERAAGKLADAQRDLARKKRGSKRRRKAVARVANHHRTVARQRVDLANKTACELVADHDLIAVEKLSIKGMTRRARRKPDPDRPGAFLPNGQAAKAGLNRSILDAGWGVFLNVLRAKAESAGRVVVEVNPRHTSQRCAQCGHVAAWNRPTQATFLCVTCGHTAHADENAAVNILRAGLALQTDAQAA

SEQ ID NO: 49233 - protein, 260 aa, unknown
  TnpB Polypeptide
LKIWHHPFTLICRIWQEWISERITSQLSHAQTARLLYTRAVPFCPQISSLPSKGQVPYPPSQKERNTVHASSAFLSNLSLKHDCFLKDQMHKLSTAIVRYCIAHRIGILVVGTNRLWKQHASMSKKNNQKFVSIPHERLRWMISYKALIAGIEVVWQEESYTSKADCTAGDLIPVYGKEKTHPVFSGRRIERGLYLCREGYCINADCNGAANILRKAFPHAWDACKDFQFLSTPASVGFESLNPSSIPNRQKQRAANKKK

SEQ ID NO: 49234 - protein, 349 aa, Escherichia sp.
VKRLQAFKFQLRPGDQQECEMRRFAGACRFVFNRALALQNENHEAGNKYIPYGKMASWLVEWKNATETQWLKDSPSQPLQQSLKDLERAYKNFFRKRAAFPRFKKRGQNDAFRYPQGVKLDQENSRIFLPKLGWMRYRNSRQVTGVVKNVTVSQSCGKWYISIQTESEVSTPVHPSASMVGLDAGVAKLATLSDGTVFEPVNSFQKNQKTLARLQRQLSRKVKFSNNWQKQKRKIQRLHSRIAYIRRDYLHKVTTTVSKNHAMIVIEDLKVSNMSKSAAGTVSQPGRNVRAKSGLNRSILDQGWYEMRRQLAYKQLWRGGQVLAVPPAYTSQRCACCGHTAKENRLSQS

SEQ ID NO: 49235 - protein, 461 aa, Escherichia sp.
VKRLQAFKFQLRPGDQQECEMRRFAGACRFVFNRALALQNENHEAGNKYIPYGKMASWLVEWKNATETQWLKDSPSQPLQQSLKDLERAYKNFFRKRAAFPRFKKRGQNDAFRYPQGVKLDQENSRIFLPKLGWMRYRNSRQVTGVVKNVTVSQSCGKWYISIQTESEVSTPVHPSASMVGLDAGVAKLATLSDGTVFEPVNSFQKNQKTLARLQRQLSRKVKFSNNWQKQKRKIQRLHSRIAYIRRDYLHKVTTTVSKNHAMIVIEDLKVSNMSKSAAGTVSQPGRNVRAKSGLNRSILDQGWYEMRRQLAYKQLWRGGQVLAVPPAYTSQRCACCGHTAKENRLSQSTVEAGTHRNDSGDSLNVAGIHVLQGVEDVNIGFCQRLNSTPRNKRLRQLIPRTQNQSRPASIHLPLPEMPPPPRRAHAHYAAPDTNCRQWYSTAPDLPASGSNLRAGQPSSR

SEQ ID NO: 49236 - protein, 440 aa, unknown
  TnpB Polypeptide
MAKARKSMGVQQVLLHPDMETKSILNYLCEQSGKHYNNGVYFARQTFFKTGKLLTGKFDLVYEPTVSKTIVAKSLPSTPAGQTLLSVTEAFKSFKGLRELYSKGQLHFKPKAPDYLKGSKLFKVAYPNSGGQKPILKNGQLRFSLGLAVRRWFGVSELFLPMPSNIDISEVKEFTILPKNGAFYLELSYELASQKHELDINQALSIDLGTADNLAACVDTLGNSLLVDARAMKAMNQVWNKKVSTRKDGKEHAYWDDWLDRVTRKRNHQMRDGVNKAAKLIIDHCLKFGIGTLVIGWNEGFKTNANMGKVNNQKFVQMPLGKLKERLKQLCELHGVRFEETEEAYTSKASFLDGDSLPKYGEKPEGWKASGKRVKRGLYQSGNGSVVNADLNGAANILRKVASKLGIDLNQLGRRSLTTVARIRLWVLPRVVLSAESQSL

SEQ ID NO: 49237 - protein, 423 aa, Streptomyces sp.
MLDAMLRDHCSLYNGALQERRDAWRHGSKTTVRYGDQSAQLKEIRAFDPERQGRWSFSSQQATLRRLDKAFQAFFRRVKAGQKPGYPRFKGVGRFGTVVFPKDGDGCRWNSTPHEQQTRVRLQSIGHIRVHQHRPVEGRVKTIAVKREGSRWYVVLSCDDVPAEPLPPAGGPVGIDMGITHFLTTSVGEHITNPGFLDAAAEELAKAQRHLATFPARTRQRTKKHRAAARRVAKLYAKIRHQRLDFHHKAARTLVRDHDAIAHERLNTAGMTKAPAPRADPDKPGAFLPNGAAAKAGLNRRILDAGWAQFLGILANKAESAGRLVVPVDARYTSRTCPRCEHVAKGNRVTQSRFHCTACGFTANADHVGAANVLNRAGPALRDVAQPPMREARAAARGRGHDRTVSEATVYETRPRGHRWVST

SEQ ID NO: 49238 - protein, 276 aa, Moorea sp.
IRDYSGWTYPSASGWKVNSNGKHGTLILNDLKIKIRMRGKAKYWGKPTTLTVVYKPRLNQWFASITLKVDTPEPLYGAESDLSYESVVAYDLGTETAITTFDGSEFNEIENQRFTRTLEPLLKNAGKAKRRKRAPNRRQRVKPSSRWKKANKRESQLKRKIGNQRKDWQHQVTSDLASRYDIGVTEKLNTKGMTRKAKNSSKRQRQKAGLNKSILDVGFGSLNKMLTYKIELKGGIVLQLPTKQLKPSQRCPKCGKVHKEWADISNRYHVCDECGF

SEQ ID NO: 49239 - protein, 369 aa, Moorea sp.
LYPTASQQSKLFYARSLHQLLYNACLAHRRYEWKVNQKSVSYFEQQNILPAFKECWTEYKGLYSTSLQATVKRVDLAYNSFFSGLRKFPRFKSIRDYSGWTYPSASGWKVNSNGKHGTLILNDLKIKIRMRGKAKYWGKPTTLTVVYKPRLNQWFASITLKVDTPEPLYGAESDLSYESVVAYDLGTETAITTFDGSEFNEIENQRFTRTLEPLLKNAGKAKRRKRAPNRRQRVKPSSRWKKANKRESQLKRKIGNQRKDWQHQVTSDLASRYDIGVTEKLNTKGMTRKAKNSSKRQRQKAGLNKSILDVGFGSLNKMLTYKIELKGGIVLQLPTKQLKPSQRCPKCGKVHKEWADISNRYHVCDECGF

SEQ ID NO: 49240 - protein, 296 aa, Ktedonobacteraceae sp.
MGRGGLDGKKLILPTGGGNKHGPKLYPDIVATLMEEAPTDYKEVAISRDAREYYYASFVVEVAEEQHEQDGILAIDLGIKTLATGVNEQGRMYHIGGFRGHRWYNKRLDRIRSKRDRCKKGSRRYKRLSQVYQRVSEQKRNKQRDSLHKASHLIAHKTVERTIVIGDLSQRQMVTNAHKERNKHLNRAVYNDWLLYTFVRMLTYKCVRYGKELVILDERDTSKTCSGCGRKQAMPLWKRTYHCPNEDCRLVMDRDENSAVNILKRYLARRGPHTGDPVRCAEVFTAIEHVNTREHV

SEQ ID NO: 49241 - protein, 379 aa, unknown
  TnpB Polypeptide
VIIIIKSIKIRLIPTKEQEILMFKSCGIARFTYNYGLARWEEMYKQGLKPSKAIIKKEFNNTIKKQEEYKWLYEVSGQVTSQAFDDLNTAYQKFFTGISKKPKFKTKKKSRKSFYVRYDAIKFNDNKVNLEKIGKVEYKSNYNIPQLDKYINPRCHFDGKYWYLTLGFEQGENKTELNQDLSIGIDLGVKDLAIINCLDKPIKNINKSKKIKKLKKKLKRLQRQVSKKYEMNKDGKQFIKTNNIIKLEKKIKLIHRKLTNIRNNHIHQSTNKIIKMKPYRVVMEDLNISDIMKNKHLSKAIQEQKFYEFIRQMKYKCKFNSIEFIQVDRFYPSSKICSDCGFKKKDLKLSDRIYICDNCGLVIDKDKNASINLSNYKLA

SEQ ID NO: 49242 - protein, 429 aa, unknown
  TnpB Polypeptide
MRRINVVKLAVDKETHEKLKELGIITAKCWNEVNWLRIQQFKKGERVNFVETEKEVYEKYKHVLKVNAQQVTRKNAENWKSFFSLIEEKKEEKLPKWFKPRPPGYWRDESGKYRLIIIIRNDRYEVDENKRTIYLKDFKLALGFKGKLKWHGKQGRLEIVYNEARRSWYAHIPVEVENVVEARGSLRASMDLGIINLATIYVEDSIWYIFKGGGVFSQYEYYSKKISRVQKVLSRHGQRTSKRLKLLYDKRSKFLKHALNSMVRRIMEELKEKEVGEVVVGYPKNIVRNHGNKLTVNFWNYGYIIRRFKEVGEELGIKVIDVDEQNTSKTCSLCGEAHKNGRVKHGLFKCPRIGKVINADLNGAINILHIPESLGSRSRGQLLGRDRGNGLKTQPVVYRWMNGAGWVRFALTSYEVMKMKVVNREPMNP

SEQ ID NO: 49243 - protein, 427 aa, Glycomyces sp.
MRILRRVPYRIPGTASKRVLRGDLRCTSGVKPIRVGGVGRCQVVHLRYRFRVYPTAPQRVMLARTFGCVRTVWNDAVAARKAAHAEGLPYPSTAVLDKALITEAKHRAERSWLAEVSTVPLQQTLRDCHAAYRSFFDSIAGRRAGPRVGPPRFKRRAGVQSARFTRRGFALPGDGRLYLAKIGHLRVAWSRELPSDPSSVTVLLTPTGKYFVSFVVAVDEGAELLEPLADPDAETGVDLGLKDFAALRGGRVIENPRFFRRMERRLRKAQRALSRKSKGSANRAKARLRVAKVHEKIRHTRLDWVDKQVAALVSENQALYVEDLHVKGLVRGRSAKSMHDAAFGMFLSRLESKAARTGRTLVRIDRFFPSTRLCSACGALSGPQGLPGLGIRAWECGCGAVHDRDANAEINIRREGRRLVAAGRADM

SEQ ID NO: 49244 - protein, 401 aa, Bacillus sp.
  misc_feature (16)..(49): Xaa can be any naturally occurring amino acid
  misc_feature (363)..(396): Xaa can be any naturally occurring amino acid
MQNILKIKHYLLLFLXXXXXXXXXXXXXXXXXXXXXXXXXXXXXXXXXXFSKWLNNIHTKECDQWIKEVSSKAVKQAIMNGDKAFKRFLKGLSKFPRYKKKKKQDVKCYFPKNNKTDWTVERHRVKVPTIGWIRLKEYGYISKNTTVKSGTVYQKAGRYYVSILCEVKGGKPNATLNAVGLGIDLGIKDFAVRSDGKTHKNINKTVQVKKIEKRLKREQRSLARKFENLKKRGEKSVTNKRVNIDKNVLRVQKLHARLANIRLAYVKSIVNDVVKTKPTFITVEDLNVKGMMKNKHLSKAVAQQCFYAFKTWLLTKCREYGIELRQVDRFYPSSKTCSCCGQKKSDLKLSDRVYTCDCGNVIXXXXXXXXXXXXXXXXXXXXXXXXXXXXXXXXXXVCKRL

SEQ ID NO: 49245 - protein, 166 aa, Microcystis sp.
MEKAYSFRFYPTAEQESLLRRTLGCVRLVYNKALHLRTQAWYERQERVGYTETSSMLTEWKKQEELDFLNEVSCVPLQQGLRHLQTAFTNFFAGRTKYPNFKKKHQGGSAEFTKSAFKFKDRQIYLAKCTEPLPIRWSRQIPESCEPSTVTVRLHPSGRWHISIKI

SEQ ID NO: 49246 - protein, 274 aa, Microcystis sp.
MKPLYRKTLLRFLPIVFNLERANQLSLLPDKDLADLCPLIEPYQVTKNPIKPLPVTDKAIGIDLGISSLVITSDGDKVSNPKHFKKHYRRLRKAQKSLSRKQKGSKNREKARIKVAKIHAQITDSRKDHLHKLTTQLVRENQTIVVENLAVKNMVKNPKLSQAISDVSWGEITRQLAYKCRWYGRNYIEIDRWFPSSKRCSNCGHIVEKMPLNVREWDCPDCGTHHDRDINASKNILAAGLAVSVCRATIRPEQSKSVKAGAKNPSGKKQKPKS

SEQ ID NO: 49247 - protein, 360 aa, Microcystis sp.
MYGVQEVLIHTDSEIRAVLEFVCEEANKLANCGIYYCRQMLFKAGRYIGKYDLDSQLKNNPHFRAMRSCCAQQLLHDVAESFSSYKGLLGLWNKGQLPNKPRPPKYRKKGGMAVVTYTARYVKLTEKGLRFSLGDQVKAWFGIDSFYLPMPSNLRFEDIKEFRIVPRNLSFYLECVYKQPDQEKVKPNNNVLGIDHGLGNWLTCVSNTGKSFIFDGKKAKSQNQWHNKRVAQIKTGKPPGYWDDELAKITERRNRQMRDATNKAARFIINWCLGNDIYTVVFGGNQRQKDSIELGKKVNQEFVSIPTAKLKNRICQLCEKYGIKFVETEESYTSKASFLDGDSLPKFGEKPGSSLLGMVQ

SEQ ID NO: 49248 - protein, 166 aa, Microcystis sp.
MEKAYSYRFYPTPTQESLLRRTLGCVRLVYNKALHERTQAWYERQERVGYTETSSMLTDWKKQEELEFLNEVSCVPLQQGLRHLQTAFTNFFAGRTKYPNFKKKHQGGSAEFTKSAFKFKDKQIYLAKCTEPLPIRWSRQIPEACDPSTVTVRLHPSGRWHISIKI

SEQ ID NO: 49249 - protein, 130 aa, Microcystis sp.
VVENLAVKNMVKNPKLSQAISDVSWGEITRQLAYKCRWYGRNYIEIDRWFPSSKRCSNCGYIAEKMPLNVREWDCPDCGTHHDRDINASKNILAAGLAVSVCRATIRPEQSKSVKAGAKNPSGKKQKLKS

SEQ ID NO: 49250 - protein, 251 aa, Microcystis sp.
MKARYQYRIYPTDQQKRLLSQLFGCVRIVWNDTLAYCQELYRQGEKKPKYTELSKRLTQIKKTTEKVWLTEVSSIPLQQSLRDLETAYSNFFASCKGERKGRKVKPPKFKKRKSKQSARFTDNGFTINQYHVTLAKIGDLRIVWSRPLPSKPSSVTVIKDAADRYFLSFVVEIQPEILPNNGESVGIDLGIATFATLSTGEKIDAPKPLKKQLKRLRKAQKNLSRKQKGSNRREKARKRVAIVISDKSDTL

SEQ ID NO: 49251 - protein, 291 aa, Microcystis sp.
MFVLEYKVKPKPNQIEAINEAIRTTQFVRNKVLRYWMDNQGVGKTELFRYNTALRKEFKFVDDLNSHACQTAVERTLRAITRFYDNCQNKVKGKKGYPKFKKHSRSVEYKVSGWKLSANKRHITFTDKKGIGTLKLIGSRDINYYQPDQIKRVRILNRADGYYVQFCLKLDPRDTVKPLTPSQKATGIDVGLKFFLVDSEGHQIDCPNYYRKAEKQLNRLNRKKSKKYRKGKKQSRNYHKARKRYARKHLRVSRQREEFVKSVALRLVKSNDLIAYENLNIQRHGQKSSFS

SEQ ID NO: 49252 - protein, 245 aa, Microcystis sp.
MEKAYSFRFYPTPEQESLLRRTLGCVRLVYNKALHLRTQAWYEKQERVGYAQTSSMLTHWKKQEELDFLNEVSCVPLQQGLRHLQTAFTNFFAGRTKYPNFKKKHQGGSAEFTKSAFKFKDKQIYLAKCTEPLPIRWSRQIPESCDPSTVTVRLHPSGRWHISIRFDDPTIQPLPPTDKAIGIDLGISSLVITSDGDKVSNLKHFKRALSETAKGTKKSFSKTERLKKSGKSENQSSQDSRSNHR

SEQ ID NO: 49253 - protein, 402 aa, Microcystis sp.
MLNVLKVRISPNKKQELALAKNFGCVRFVWNYYLNKTNNQYLETGKGMTYCDMAKDLTKLKKQLDFEWLAEATAATLQQSLKNLESAFKNFFSKRTKFPKFKSKHKKQSIRYPESCSIRNKGIKLPKLGVVKAKISQVINGKIKSVTVSKTSTDKYFAAILFEMDDSTTIEKLKISGIDLGLSSLVTVFDGETTYKIDPIKPTRKYAKRLKRRQQALSRKAKGSNNRQKAIKEVAKVHEKIANTRQDFLHKLSRKLCDENQIVVAENLNIKGLARTKLAKSIHDAGFGMLLNFLDYKLKREGGKLVEVDRFYPSTKLCSCYGFKNDLLTLSIREWICPECKTQHDRDENAAKNLREEGMRILSTNTDGQSEFQAWGETVRLVGTCTEKRVSVNQESPVTASA

SEQ ID NO: 49254 - protein, 353 aa, Microcystis sp.
LIEPGNQLIGFTRIVDAQIPGKKCFPRFKKHSRSVEYKLTGYKLSDNRRKIRFTDGFKAGEFDLWCSQKTLVYYSEQQIKRVRVVRRADGYYCQFLIDVERQEYHKPTGQITGIDLGLKEFYTDAQGNTVENPRYLSKSEKRLKKAQRRLSKRFRKGKKQSKNYHKQRIKVARLHLKVSRQRKDKAIKDALALVQSNDLVVYEALKVRNLVKNRKLSKSISDASWYQFTEWLNYFAKIYRIVCVAVPPHFTTQDCSVCGTRVQKTLSTRTHQCPNCKTVLDRDHNAAINILKKGLQYLGNHLNGTVGQTETDPNALGESDLWVFSGDIENLSCLVEQGISNSDVERIPRHSVA

SEQ ID NO: 49255 - protein, 191 aa, Microcystis sp.
MEKAYSYRFYPTPEQESLLRRTLGCVRLVYNKALHERTQAWYEKQERVGYAQTSSMLTEWKKQEELDFLNEVSCVPLQQGLRHLQTAFTNFFAGRTKYPNFKKKHQGGSAEFTKSAFKFKDKQIYLAKCTEPLPIRWSRQIPESCEPSTVTVRLHPSGRWHISIRFDDPTIKGSSVCVMQWTGVIRDETII

SEQ ID NO: 49256 - protein, 205 aa, Microcystis sp.
VITSDGDKVSNPKHFKKHYRRLRKAQKNLSKKKKDSNNREKARIKVARIHAQITDSRKDHLHKLTTQLVRENQTIVVENLAVKNMVKNPKLSQAISDVSWGEITRQLAYKCRWYGRNYIEIDRWFPSSKRCSNCGYIAEKMPLNVREWDCPDCGTHHDRDINASKNILAAGLAVSVRVATIRPEQSKSVKAGAKNPSGKKQKPKS

SEQ ID NO: 49257 - protein, 216 aa, Microcystis sp.
MTVGKTCLGIDAGIESFVATSRVDLIKAPRFLLKVQSKLKLLQRRLKHQVKGSNNWLKLQEKIARLHEKVSNTRRDWHFKLAHYLCDFADNIFVEDINFVSWSRGIVRKQSLDSGIGSFINEILPFVAWKRGKYYLKVDKNGTSQECPNCGAITGKKALSERVHRCDSCGHIEPRDTASAKVIENRGKNAVGLTVLENARGGDLTGIDRVKPGRSS

SEQ ID NO: 49258 - protein, 330 aa, Microcystis sp.
LGCVRLVYNKALHVRTQAWYERQEKVGYAQTSSMLTHWKKQEELNFLNEVSCVPLQQGLRHLQTAFTNFFAGRTKYPNFKKKHQGGSAEFTKSAFKFKDRQIYLAKCTEPLPIRWSRHIPESCEPSTVTVRLHPSGRWHISIRFDDPTIKPLPVTDKAIGIDLGISSLVITSDGDKVSNPEHFNKHYRRLRRASKSLSRKQKGSKNREKARIKVAKIHAQITDNRKDHLHKLTTQLVRENQTIVVENLAVKNMVKNPKLSQAISDVSWGEITRQLAYKGLPKNKLFMLKNNNHSRSVGGRGRWLPPPSNFVVELILYIINQVFLCKCIWN

SEQ ID NO: 49259 - protein, 182 aa, Microcystis sp.
MLPKKPKYTELSKRLTQIKKTTEKVWLTEVSSIPLQQSLRDLETAYSNFFASCKGERKGKKVKPPKFKKRKSKQSARFTDNGFTINQYHVTLAKIGDLRIVWSRPLPSKPSSVTVIKDPADRYFLSFVVEIHPETLPNNGESVGIDLGIATFATLSTGEKIDAPKPLKKQLKRLRKASEKPF

SEQ ID NO: 49260 - protein, 402 aa, Microcystis sp.
MFVLEFKVKAKTQQYQAIDDAIRTAQFIRNKCVRLWMDTKGTGKNDLYRYSQELAQDFKFADELNSTARQASAERAWSSISRFYDNCKRKVSGKKGYPQFKKSRSVEYKQSGWKLLSPKTVKFTDKKNIGVLKLVGTWDLGYFQESDIKRVRLIRRADGYYCQFVLSCDVKEDVKPSGKCIGLDVGLASFYTDNNGNKVDNPQFLRKSEKRLKRLQRRLSKKKKGSKNRQKARQRLAKAHLKVSRQRQDFAVKLARCVVHSNDVIAYEDLRVKNLVKNHCLAKSINDAAWYQFREWIEYFGVKFGKITIAVSPNYTSQNCSNCGETVKKSLSTRTHQCKCGCVLDRDENAAINILKRGLSTVGHTGTFGLDPINAWGENTSTFSEAILSKQVISVNQESPSL

SEQ ID NO: 49261 - protein, 292 aa, Microcystis sp.
MLTDWKKQEELDFLNEVSCVPLQQGLRHLQTAFTNFFAGRTKYPNFKKKHQGGSAEFTKSAFKFKDKQIYLAKCTEPLPIRWSRQIPESCEPSTVTVRLHPSGRWHISIRFDDPTIKPLPVTDKAIGIDLGISSLVITSDGDKVSNPEHFNKHYRRLRRASKSLSRKQKGSKNREKARIKVAKIHAQITDSRKDHLHKLTTQLVRENQTIVVENLAVKNMVKNPKLSQAISDVSWGEITRQLAYKCRWYGRNYIEIDRWFPSSKRCSNCGYIALENAVKCSRMGLSRLWDTP

SEQ ID NO: 49262 - protein, 204 aa, Microcystis sp.
MEKAYSFRFYPTPTQESLLRRTLGCVRLVYNKALHVRTQAWYEKQERVGYAQTSSMLTDWKKQEELDFLNEVSSVPLQQGLRHLQTAFTNFFAGRTKYPNFKKKHQGGSAEFTKSAFKFKDKQIYLAKCTEPLPIRWSRQIPEGCEPSTVTVRLHPSGRWHISIRFDDPTIKPLPVTDKAIGIDLGISSLVITSDGGASHLRDK

SEQ ID NO: 49263 - protein, 168 aa, Microcystis sp.
VITSDGDKVSNPKHFKKHYRRLRKAQKSLSRKQKGSKNREKARIKVAKIHAQITDSRKDHLHKLTTQLVRENQTIVVENLAVKNMVKNPKLSQAISDVSWGEITRQLAYKCRWYGRNYIEIDRWFPSSKRCSNCGYIAEKMPLNVREWDCPDCGTHHDRDINAKLKRT

SEQ ID NO: 49264 - protein, 401 aa, Microcystis sp.
MLPVGEFFEAVEQVLTLVIKLQVCSEQQQALSDTCTAFASACSWINENVNPRLTNRNSIQAVCYQDVKDQFGLTANHVVRACGRVAANRLTAKLQGKKVKNFAPTSFDCDARTFRFVEKDWAITVSTTGKRLTIPLRASNYHRGKLTWQNPTSAQICLHRDGGWYVHIQLKSEPPKPINADNIIGVDFGRRDIAVTSTDQSWSGDGIKETRDKYSRVRASLQRKASQGTRSTRRRCREILKRLSGRERRYQAHLNHVISKAIVAEAKSTNSIIAIEDLTGIRERTNQQPRNKTERRRSNSWAFYQLRQFLEYKGIKEGVEVIAVNPRYTSQTCHCCLHIGIRSGKSFKCSNKTCGWIGDADANGSKMIRLLGLSVIQPREPNLLACPISLGLQKAPVKLTL

SEQ ID NO: 49265 - protein, 247 aa, Microcystis sp.
MLVVEAKLKNGTPEQYHQLDEAIKTSQFVRNSCVRYWMDNQGTTRNDLQKLCAVLADNKETPWVNKLNSQARQSAADRAWQSITKFYQNCHAKIPGEKGFPRFKKHSRSVEYKLTGYQLSEDRRKIRFTDGFKAGEFDLWCSQKTLVYYSEQQIRRVRVVRRADGYYCQFLIDVERQEYHEPTGQITGIDLGLKEFYTDAQGNTVENPRYLSKSEKRLKKAQRRLSKRFRQGKKQSKQLSQATDKSS

SEQ ID NO: 49266 - protein, 166 aa, Microcystis sp.
MEKAYSYRFYPTPTQESLLRRTLGCVRLVYNKALHVRTQAWYERQERVGYAQTSSMLTEWKKQEELNFLNEVSCVPLQQGLRHLQTAFTNFFAGRTKYPNFKKKHQGGSAEFTKSAFKFKDKQIYLAKCTEPLPIRWSRQIPESCEPSTVTVRLHPSGRWHISIKI

SEQ ID NO: 49267 - protein, 422 aa, unknown
  TnpB Polypeptide
MLVREAKLKHGTTAQYAAIDEAIRTAQFIRNKAVRFWMDNQDVSKAVLYTLCKDLASEFPFAKKLNSAARQASAERAWAAISNFYARCKKGKGKKSFPKFKKHCRSVEYKVSGWKLSEDCKSITFTDGFEIGTLAIFCNNETQEDLHRLKINRVRVVRRADGYYAQFCFDANRKEKGEYTGNVVGLDLGLKYFTKDQNDNAVIYPQFLRKSEKRLKKAQKRLSKKFVKGAKPQSKNYHKARKRLGKTHLKVQRQRKDWAIKQARCVVHSNDVVVYEDLKVANMVKNHHLAKSISDAGWYQFTQWLDYYGKIWDKAVVAVLPNYTSQDCSNCGHRVKKSLSTRTHSCPNCGIEICRDTNAALNILQKGMSILGVEWQKSGKCGLGETPRVATFQDNGTSGQEESASQEGKRGEKTASTIDDAP

SEQ ID NO: 49268 - protein, 187 aa, unknown
  TnpB Polypeptide
MGVDVGENNAAALSTGRIFKAGKMKDDRDKYLSSRARFQRNGSRSARQALRKASGREKRHVEQINDEISKSIIEDAAERNIRLIVLEDLTDIRKRIKAGQKVRARLHRWPFRELQQKIVDKACRAGIEVIFVDPRFTSKTCPHCNAIGTRHKHRFVCKNCGYRAHSDLNGGRNLQRLGCLLITQGLV

SEQ ID NO: 49269 - protein, 395 aa, unknown
  TnpB Polypeptide
MRTAYRCRVYPDEAQQRILARTFGCIRVVWNRTLAERRRLYQAEGTSLCYAASDAALTKMKKDPALAFLNDVSSVPLQQTLRHQHAAFQAFFARRTRYPRFKSRRGRQSATYTRNAFSLRDGMLRLAKMTTPLRIVWTWPDNNVITLSPTSVTVAKDPAGRWFVTLHVDVPDPVPLPATGKSAGVDVGLTRFATLSTGETIPHPKDWERHERRLKRYQRRLARCKRGSANRGRRAVKVARAHARVADARRDFLHKASTDLVRRFDVIAVEDLNVSAMVRNRLLARAIGCSGWAEFRAMLEYKAQRYDRRIAVVDRWYPSSKTCSRCGYLLTSLSLGTRHWACPSCGARHDRDVNAAQNILAAGLAAGARDGADACGGTVRRAGATRTRVPVKQET

SEQ ID NO: 49270 - protein, 389 aa, unknown
  TnpB Polypeptide
MTHRGYKYRIYPTACQEEILRKTVGSCRFVYNWALAQRREAWVTSKKSVSYNATSKGLTELKESPEKAWLNDVSSVCLQQSLRNLDCAFNSFFRKKSAYPSFKSRKNGGSARFMDNAFQIKGDGLFLAKIKTPIVIKWSRQLSSTPNSCTISQNAAGQWFALFLCEEEIQHLPPTTNKVGVDVGIESFCTLSDGQKFSQPKKIKRLRKKLARLQRLHSRKQKSSRNREKARLKIARLHQHVKNVRTDFLHKLSTKLVHENQVIALEDLVVSNMIKNRHLARAISEQGWRDFRRMLEYKAEWYGRELLIVDRFYPSSKTCSCCGAKASFGLETRTWTCGACGASHDRDVNAAKNILAAGQAVSDCGVDGRPTKNYVLRGRTLRSSKPSQR

SEQ ID NO: 49271 - protein, 260 aa, unknown
  TnpB Polypeptide
VVGIDPGVSTVAFASPTEVALVDLVPKNITQKEKLLKQLDQKIERSRRVNNPECYQQDGTVKKGARFKRPSKRQVRLRNRRLKAYRSLSEERKKLQGHLVNRIVSQASHIKVEELGVKGLQKRSRDIRINPKTNRPYSKKRFGKAIFRAAPSSFRVALETRASRLGIDVEVISPKDVKPSQYNHITQTFDKKPLSTRVYDLSDDYPGVQRDLYSAFLIVHIEKGYYQQEQLEQDFPVFYQQMKDFLQQPIETKRLAWYLN

SEQ ID NO: 49272 - protein, 415 aa, unknown
  TnpB Polypeptide
MHLTKKVKINPIKEQVNVLWRLSEQCRCLYNFALAERRDAWKNEQRSVKYVEQQNQLPALKEKYPEYKIVYSKVLQSVLKKLDANYKSFFSLWKNGDKSARPPKFRSEKYFMTLVYNQSGFKIKDGLLSFSHKVNEISLSFEIGNNFNSLTIKQIEIYNDDPYKSRGNFYVSITYEENPTTEYVDNDLYQAIDLGITKIVTAVNTQGKFFEVKTPRSDQYWNPKIDSIKSRRDHCKKGSKRWNRLHKTYRKIEAKKSNQIKDFQHKLSKTMIENTKSNTIIVGDLNVKNMAQSKKLKGKRKRSQNRSTQNQGYLSRFIEFLTYKAELAGKKAIRIDEAYTSKECCICGIRNEMPLWERTMQCDCGNVIDRDRNSAINIMKRFLSQNALWTSYQKFSDNLRQTGLQMDTCILQISK

SEQ ID NO: 49273 - protein, 215 aa, Anabaena sp.
MRDKHQIIEEPCEVKVSSTVLKTNGVGDNLVEFTELAVCSNGEVFENPKAYRRMSKRMKRLQRSVSRKVKGSNNRKKAVRKLAKLHAKVSNIRKDSIHKLTYYLAKNHSVIKIEDLHVKAFLKNHKLAGAIADCGMYEFKRQLEYKTEKFGSELILVDRFFPSSQICSNCGNHRHKMPLKNRVYVCPDCGYKADRDLNAARNIDRWFADIFIPVA

SEQ ID NO: 49274 - protein, 393 aa, unknown
  TnpB Polypeptide
MSKLSLTIKIKLLPDEEQSKIMLESMERYSSACNEVSKNAFEYKSFNRVQLHRELYKTIRSDYNLKSQQTCSVFRTVSAKYQALKSTHQELVQIDFSKPQCDLVWNKDYSLSKDTFQISTNKGRIKVPFVMKTKEEYFSSHDYRFGTAKLFYKKEKFYLLIPVTFEAPDFDPSKCVQIVGIDRGINFVVTSYDSKGKTTFIKGRHIKHKRNHYKQLRKHLQSKKTPSSRRRLKAIGKRENRWMNDVNHCISKALVKNNPQNTLFVLEDLTNIKENLKKVKKEDRYAHMSWSYYDLEQKLMYKAKKNQSFVIKVDPRYTSQKCPKCSEIEKSNRDKKKHIFKCKQCGYTSNDDRIGAMNIFSLGVEYMNGLHGSNAPVYGVQSITPNVTTPFRG

SEQ ID NO: 49275 - protein, 262 aa, Lactobacillus sp.
MSKPARLEFCKKTKIKRYTVVLEPTGKYYLSLQAEIPEPEKYSLTDKQVGIDVGVADLAILSNGLKYPSFNSSYFEKKAKIWQKKYSRRRHLAKLLVLQDRNKKVLCPRSLESFANWQKAQKSKAKYQAKAANQRRDYLHKLTTHLVKQYDVIVIEDLKTKNLQKNHHLAKSIANASWRIFRQMLEYKCEWYGKKLIAVDPKNTSRICSKCGYNSGAKPLEIREWICPKCQTKHDRDINAAVNILHKGSTKLSGQGLAMITS

SEQ ID NO: 49276 - protein, 409 aa, Lactobacillus sp.
MFDIILKRKEGTNVLKGIKLRLYPNKVQQGQLEQMFGNDRFVWNQMLAMMNERYQNNKALPFLGRFKLNYLLKPLKKEYPFLKNSDSSSLQVVNEFLTQSWKNFFQDKTGQIGKPRFHSRKYLKKSYTGKSIIKTAGKRYLKIPKLGYVKTSKTGVWQNTKIKRCTVLLEPTGKYYLSLQVEISEPERYSLTGKQVGIDVGVADLAILSNGLKYPSFNSSYFEKKAKVWQRKYARRRHLAKLLVLQNKNKRVLCPRSLESFANWQKAQKSKARYQAKAANQRRDYLHKLTTHLVKQYNVIAIEDLKTKNLQKNHHLAKSIANASWRMFRQMLEYKCEWYGKKLIAVDPKNTSRICSKCGYNSGAKPLEIREWTCSKCQTKHDRDINAAVNILHKGSTKLNGQGLAMATS

SEQ ID NO: 49277 - protein, 448 aa, Lactobacillus sp.
MLFQAKEMKFMAFKTKLAEHEIQLGTRQYRIYPEGEQIAWIWQLFGANRFVWNQFVAAFEARYEANPELKFPKIGVLKSWLPLMRKEYEWLKRVNSTSLQFTVERFSDDMWAFLTKKQVKQGKPRFKSRKYYCQTATIKNVKYQTKTGAQAQIAVLSPHHLRIGKKNGITLRTSSLHNLRNVRIQKAVISYRQDLDRYYISFSVVKDKRQLAQYQVKSKKTGKAVGIDVGLGKEWLVTSDGKRFGVPDTFKLEKAMLKRQSHCDRNRTAIEKRAARFNHEHEEKIDKHDYANWQKLRKTKSKYQLKIRNIRYDYLQKVTTELVKGYDVIAIEDLKVKNLLGNHKLAHNIANASWGMFRRLLAYKCEWYGKKLIVVKPQYTSRICSECGKKNPRFAHMKTRDWIAIREWYCPYCHAHHDRDVNASKNILARAVGLGSKISKIQAGAQPC

SEQ ID NO: 49278 - protein, 437 aa, unknown
  TnpB Polypeptide
MLDIHRTHQAKICNHSQVAESLNRHGWSASKLWNVANYHARQVWDETGEIPDHEDLKRELKDHPQYNGLHSQSSQRVLEELAESFTSWYKSDDDRDNPPGYRKRNYYDDHGRRVHEEHPRSTVTWKQNGFKHDQKHNKIRLSKGANHKEHPKAWEYMLVEYETRPDVTVETVQQVRAVYDTSKGRWDLHIVCTDQLETPEAPGDETAGIDLGICNFAAVAYSTDEAELYPGNRLKQDGYYFPKEIATCDDSGGERATRLHATWSERRTHFFHSLAKHIVQRCVEKEVGRINIGDLEGVREDEDGEAKNWGKHGNLDLHGWAFDRFTKILTYKAKVEGIDVEEVDEQGTSKTCCVCGKTDESQRVERGLYVCEEHDDAFNADVNGAENIRLDRNESNAESSASLDEDRCTGWLAQPSVYLHDLTRGFQPRPQVVDCKP

SEQ ID NO: 49279 - protein, 214 aa, Okeania sp.
VRAASGGCQTDQNGNKIDNPKFLRKSEKRIKRLQRRFSKKKKGSSNREKARARLAKVHLKVSRQRKDFAVKLARCVVHSNDVIAYENLRIKNLVKNHCLAKSINDAAWYQFREWIEYFGMKFGKITIAVRPQYTSQNCSQCGEIVTKSLSTRTHSCSCGCVLDRDENAAINILKKGLSTVGHTGAKVWGENASTLMEVILSKQVVSMNQKSTRQ

SEQ ID NO: 49280 - protein, 191 aa, Alteribacillus sp.
MDVGIKDVAILSDGTVYKNHKYFRTLEKKLAKAQRILSRRKKGSSNWQKQRIKVARLHEKISNARNDYLHKISTDIVKNHDIIGIEDLQVSNMLKNHTLAKAISDVSWSQFRTKLEYKAKWYGKQVVTVAKTFPSSQLCSSCGYRNKDVKNLALREWTCKECGPHHDRDINASINIRNEAIRLTAGTAGIA

SEQ ID NO: 49281 - protein, 382 aa, Rhodococcus sp.
MQLRYQYRVYPTPGQQDMLARSFGCARVVFNDCLLARQNAYAAGLKVSDTDVQRWVVTEAKKAPQRAWLAEVASVVLVQACQDARRAYRNWFDSMSGKRKGRRVGAPRFRSRKDNRQAIRLTRNGFSIRDNRKLYVAKVGELKVVWSRDLPSEPSSVTVIKDAAGRYFASFVVETTDEPLPECDAEVGIDLGLTTFAVLSDGKVIESPKFFRRAERRLRKAQQSLSRKERGSKNRAEARVKVAKAHARVADARKDWAHKQSTAIIRENQAVYVEDLCITGLARTRLAKSVHDAGWGVFTRLLEEKAARFGRVFVKVDRWFPSSQLCSVCGVQDGRKPLSVRRWQCQACGVVHDRDVNAAKNILAAGRAERRNACGGAVSLSV

SEQ ID NO: 49282 - protein, 387 aa, Clostridium sp.
METIEKGFKYRIYPNKTQINQIELSFKAKRYVWNYFLNINKHRLNHHKSILNYTKMSRLLTLLKKKEIWLKQCEKSVLQNTLKVQYETFLKFFKKECGFPKFKSYKNNYQSIKMNFTNNNIGILEKEIQHTSTGKYKKQNCKIKLPKLKQVKIAYSRQYQGRILSSILSRDTDGKYYISLCCIDIQQENIDKTGLSIGVDLGVKEFAMTSDSEPILNPKYYRKYEDEMIKSQRKLSKRKKGGSNRNKQRLKVNKYHKKIYNCRLDFLQKLTTKLINQYDIICLEDLNTSGMLKNHKLAKSIADASFFEFNRELEYKAKWYSKTISKIDRFYPSSQLCSRCGNQSNRTKDLGVRTYICEKCGLEIDRDYNASINILNEGLRLLNINSI

SEQ ID NO: 49283 - protein, 355 aa, Symbiobacteriaceae sp.
MQRTFGCSRFVYNYFLARRKEAYEAEKATLGYSKCCLELTQLKKELEWLQEVDATALQATLQNLDAAFQGFFRRVKKGEAPGYPRFKSKKSQRRSYRSKRVGENIAFDGYSIKLPKIDWVKAAGYSEISGRILNATVSQTPSGKYFVSLCCTDVEIQQHAQTGAIVGLDLGIKSHVATSDGQLCENHKYLHRSEKKLIREQRRLSRKPIGSKNRAKQRIRIARVHERIANQRSDNLHKLTSRLVREHDLICIEDLAVKNMVRNRRLAKSIADASWGELRRQIVYKCEWHGKRLQVIGRFFASSQLCSVCGYQNAEAMDLGVREWICLGCGVSHDRDVNAARNILNEGLRLRTDSS

SEQ ID NO: 49284 - protein, 320 aa, Nostoc sp.
LYKIAYPNSGGQKPTLINGQLRFSLGLTVKRWFGVSEFFLPMPSNIDYSKVKEFTILPKNGAFYLEMCYEMEKQKHELDINQALSIDLGTADNLAACIDTCGNSLLIDARVMKAMNQLWNKKVSTRKEGKSQDYWDNWLARATRKRNHQMRDGINKAAKLIISHCLKYGIGTLVIGWNEGFKANADMGRLNNQSFCQMPLGKLKDRLKQLCELHGIRFQETEESYTSKASFLDGDSLPKYDQKPLGWKASGKRVERGLYRSANGSIVNADLNGAANILRKVASNLSIDLGLLGRRSLTTVARVRLWALPKFNLSAESQWL

SEQ ID NO: 49285 - protein, 383 aa, unknown
  TnpB Polypeptide
MRKEVQLTVVGKVFKSNKRKILALNKTLNEYFRLVKWYLGFNSTSKTFLHENGYEIAKRLFNLNTALIQTARDKAAEILKSFQKNKEDNSVLKLKRISIRFDKRCYSFSKTTNILTPYWLTLSLNKRRRISLPIVFGERQRQRIEEGFSGKWKFTTVEMVKRNGEWYAHFVLKKTVELPDDFETIVAIDRGEVNLAVAVAVSKKNPSKPVKGQFWRGEEIKRIRGLYNHIRRKLQEKKLLKRVKETSVKERRKVNQQLHIIVNQIIQYAKQFTKPLIVMENLKGIRNNFKKSKKLNKRFHNLPFRKLQTYIEYKANLEGIEVKYLTKKETKNTSKTCHRCGYVARIKGRIFKCPKCGMEYDRDLNAAINIARRVMSSAGWRSK

SEQ ID NO: 49286 - protein, 422 aa, Microcoleus sp.
MQLAERHIIKSTEHRFAQIDELAFKSKNLYNAANYVIRQSFVYGWSYINYNEMNRLMKSHQAYKALPAKVSQQILMILDKNWKSFFEAVKAYKTDPSKFTGSPKLPKYKDKVKGRNILVYTIQAISSTQLKKGIIKLSGTEILIKTKVNPARICQVRLVPKYDSYAIEVIYDKSESTLDDDKFVASIDLGLDNLVALTSNQPGFTPLLINGRPLKSINQFYNKRKARLQTQLKGSRKSSPRIQRLTRCRHQKIDNYLHHTSRLIVDVLIAKQIGALVIGKNAQWKTEIDLGKQTNQNFVSIPHARLIEMLEYKARLVGIKVVVQEESYTSRSNFLGLDPIPVYGKIDKDILFSGKRIKRGLYKTSVGQLINSDVNASYNILRKAIPNAFSDGIGRGRSSAKAGQSAQSKVKGEGLDASHVMS

SEQ ID NO: 49287 - protein, 497 aa, Microcoleus sp.
VLRFWDTPNILWSGRKKEVSMQLTYKYRLKPTKAQLATISNHLELCRRQYNYRLGERFRWWESTRTFVNACPLTASIVPVEEIYQNIPLRRVQTRDGRKKDESGNPFTRKGDIFSNIEGGYVQWQTIQLADLKNTKKLFPDYKALSSQVLQDVVNRVETSFSNFTTPDKNGNRRGKPKFKGFHYYKSFTYPQLHNLDIIKDEQNRICVNLAKIGQVPMVFHRPIPTGFTVKTGTVVREADGWYISLTLEDKAVPVTVAEIQPTDKNTLGIDLGITNYVYLSNGERVENPRFLRKSAEKLAHLQAKLASRVKGSKPWQVIKSKISRLHQFVARARLDFQFKVAHELFGKCDVLVVEDLSVKNLTRRAKPKTDIEDGNLVYLPNGQSAKSGLNKSMLDAAHGQFASVLKYVAWKSGKNVLFVDPKGTSQYCWNCLNKVPKELSDRWHSCQCGESFDRDENSAKLIRKVGLSYQSGGGTPSLKKAFAKKEKEACGPTVLR

SEQ ID NO: 49288 - protein, 433 aa, unknown
  TnpB Polypeptide
MGDVVRTVKVKLDVPAQRCDDLHRTKDQFLHCANTTAAWAWRYPDDYCVTSKRKAENALYDQLRRETELTANLVQKGIRRGIEATKSGVARLKKGENTSQPHFDAWSVVYDKRAATFHREHVSLSTVNGRVECDYVIPDEAEDTPIGEYLLNEGYEFRTSTVQYDRSTESFYLHARMRRTEDTEQDHSMASSETEHRTVLGVDLNVDGSLAVTSTGAFIGNADGMTHRRREFEKTRGSMQQTGTRSAHLSIQSMKDREHRWMQDELHRASNRILEEARDHHCTHIAFEDLTDIRDRMPAAKRFHAWAFRRLFEYVEYKAEMVNISVEQVSPAYTSQRCSSCGCTHEANRRSKHQFVCQQCEYELNADYNASKNVARKLLKRLHSGQTSSSGGAPCQCALTSGTVNLNGEYTASVDSTAEGESTDKPTTSVVGH

SEQ ID NO: 49289 - protein, 430 aa, unknown
  TnpB Polypeptide
MQHGNTVPTGADVIISSHRPNILVGMRLRYNYRLDPTPAQRQALARAFGCARVVYNDGLRLREDAHRAGRPFVGGAELSRLVITLAKRTPERAWLGEVSSVVLQQSLADLDRAYSNYFRALAEAKATRARGEKAKLRIRKPRFKSRRHDQAARFTANSRFRILPDGRLSLPKVGVVPVRWSRPLPAEPSSVTVTLDGSSRYHASFVVEVAETPLPPVDTAVGVDLGLTTFAALSTGEKVDNLRWLRQREKALRRSQRNMGRKRKGSRNREKARRKVARLHLKVADARRDLHHQLSTRLIRENQTVCVETLNIKGLGRSKLAKSVHDAGWGQFTAMLEYKATLYGRTLVKVDRMFPSSQLCSACGRRDRPKPLKVRTWICPACGAHHDRDLNAAKNILAEGLSVAACGGHVRPGASPAVADEAGTTLAGAA

SEQ ID NO: 49290 - protein, 557 aa, Geobacillus sp.
MKKAYFSRRLYKSEMDILHVTETSYALELFNQAKRFAFQTLVREKRWGRKLHKESLHIVVKKKYGLNDYFANSAVREANALFSSLMELNKMHLQQTEEKIKDVKKKLKTERTKLTKLGKIKESCIKGNLRFPKNTNFVLHKSGIISLELKNRSLVWMNSYLFEHRYLDVEWKRTKAKIGRLTHRLDRLEQKKMKLKEHIPSAVFGGKKLFKQQFTKEEFIKDHEAWRKLFLAARNKEIIISGRKDAGSGNFVFHYNPMTKELHMNSITGKVVTFPEVIFPYGQEMVNKTVTDQIQCKNKKEYGKPISWSIEDHGEYYIIKCLVDVESNPYINFSTSDGVIGVDCNYNHIAWTNVSKDGNFLESGKLTFSIEGKTSGQITKIMEAEAITLVDIAVRKKKPIVLEKLDTTLSKTGNRYGNKKANRMKSMFAYRKMIQAIKRRADKMGVAVIEVNPAFTSVSGKLKYMRKFGISIHQAAAFTIGRRGLGYKEKSPKVLKKHVPKDASHHWKHWSILNKKFSVRTHTLYHLFNVNQPHQGIDVFHPSLLEEEKRQLIKTLA

SEQ ID NO: 49291 - protein, 442 aa, Richelia sp.
VAKTKKSMGVQQVLLSPDKELKALLEYLCQQSGKLYNSGVYLARQTFFKTGKLLTGKYDLSFEPSVAKSMVAKSLPSTPMQQTLMSVAEAFKSFKELRDAWVKGQLHFKPKPPGYLKGSKLFKVAYPNSGGQQPKLAGNQLRFSLGLTVRRWFGVSEFFLPMPSNIDFPKVKEFTILPKNGAFYLEMSYEVKKEKHNLDIGQALSIDLGTADNLAACVDTRGNSFLIDARAMKAMNQLWNKKVATRKEGKPEGYWDNWLDRATCKRNHQMRDGINKAAKTIVSHCLKYGIGNIVCGWNQGFKSQVNMGKKNNQKFVQMPLGKLKDRLKQLCDLHDIRFTETEEAYTSKASFLDGDSLPKYGEKPLGWKASGKRIKRGLYQSADGTVINADLNGSANILRKVASKLGVKLNRLGRRCLTTVARVRLWETPKPTLSAESQWLQP

SEQ ID NO: 49292 - protein, 371 aa, Terrisporobacter sp.
MILAKKVRLYPSELQEQKLWKSVGTARFIYNWTLAKQEENYKNGGKFISDGILRKELTKLKKTELNWLNEVSNNVAKQSVKDACDSYKRFFKGLSDKPRFKSRRKSKKSFYNDNCKLKVKEGKLVNIEKVGWIKTNEQLPIGVKYSNPRISYDNKYWYISVGIEQEEIKEELSNVSLGIDLGLKDLAICSDGTIYRNINKTYVVRKIEKRLKRLQKQVSRKYEKNKKGKEYVKTKNIIKLEKQIQQVHRRLANIRNNYLHKTTTSIVKTKPYRVVIEDLNVKGMMKNKHLSDGIRKQGFYEFKRQLEYKCKFRGIDLVLADRFYPSSKTCSQCGEIKKDLKLKDRVYKCNCGLTIDRDLNASINLSKYKLT

SEQ ID NO: 49293 - protein, 381 aa, Nocardia sp.
VQLRYQYRLYPTAGQRESLARVFGCARVVFNDALAARKTAFEAELPYVSDSELSKRLTAAKATPEREWLCEVSAVMLQQALADLNTAYRNFFRSVTGKRKGPRMAHPRFRSRKDNRQSIRFTRNARFAVTTGKKLRLPKIGDVKVAWSRELPSEPSSVTVIKDAAGRYFASFVVEVVDRPLPDVDAEVGIDLGLTTFAVLSNGKRIESPKFLRRAERKLAKAQKSLSRKQKGSNNRAKARIVVAKAHARVADTRRNWAHKHTTAVVRETQAIYVEDLCVKGLARTRMAKSVHDAGWAMFTRMLEEKAARSGRYFAKVDRFYPSSQICAPCGHRDGPKPLSVRVWTCPVCGAVLDRDLNAANNVLAAGRAERLNACGGSVSP

SEQ ID NO: 49294 - protein, 406 aa, Scytonema sp.
MQVFNLTYEFKLKPTQNQVEIFEEWLETHRRVYNHALAERKDWYKSRSCQVNACSLVSEYIIRADAPRPTFASQCKSLTAARKENEYLKRVNAQSLQQTLRRLEKAFVSMWEQNHGFPRFKKRDRMRSFSFPQLGQNPLSNGYVKLPVIGVVKVRQSRDIPDGGVIKQARVVKRVSGWYVMLTVQWDLSVPSPLPHGEAVGIDVGLTSFVATSNGLLVKRPRFFVDALRKLKLLQQRVSRKRIGSNNWKKAHKKVASLHEYVANCRKDWHRKLSHQICNNAGMVFVEDLNLVGLSRGMLGKHCLDAGFGQFFNILEQTCFKRDVYFQKVDSRKTSQICPNCGTETGKKELSQRIHVCSNCGYTTDRDIAAAQVVRERGLAAVGHTVKMLAEGKFIGVPVTQESPAL

SEQ ID NO: 49295 - protein, 419 aa, Bacillus sp.
MYLTQSNQIRGLSKEQFQQLREMCHYAKNLYNVGLYNIRQHYFTEKTFLNYEANYHVSKTNENYKLLQAGVSQQILKVVDRSFKSFFNLIKKAKKDEYRFQDIRMPKYLKKDGLFSLIFSTNAINIKDGFFRVAVSNAYKKANPNYKEILIPFPSRLEGKKIKEVRIVPRNNGKFFHIQYVYEQPSEKAELDFNKALAIDIGLNNLASCVDSDGASFLVDGKKLKSINRLYNKEKARLQSVAMKQGLKYTKRMDSLTLKRNNQVNDYIKKTARFIINYCLENQIGNLVVGYNKDFKRNINIGKKNNQQFTQIPIGNLREQLSNLCERYGIFYKKQEESYTSKASFFDNDEMPRWNPADEKEYPFSGKRINRGLYRTSTGYEFNADINGALNILRKSNLLDTRILQARGCLARPSRIRVA

SEQ ID NO: 49296 - protein, 380 aa, unknown
  TnpB Polypeptide
MIRSYRYRLQMSARHRRAFDTAKQIHNQLYNAALEERIGAWQKAKVSVTRYDQQKSLTEIRAALPEIAKYAVTMVRLPLEQVDLAMKGFFERCKKGKTPGFPRYRSIARCKSFGFIEATGWKLDGHILRMKGLPAVRIKQHRPLEGKCKKLILKETAGRWYAIFVMELPDVVGPPAPTVLGIDVGIEAMATDSDGDRYDHVRPERSNANRRIRAERMMAESKKGTRRRLRAKRRLAKLREREANARRTRHFQIASQIVGKGAGHIVIEDLAVANMMRSASGTIEQPGTNVAAKSGLNRSIADAAPAQFLKILSDKAESAGARVIVVDPRYTSKMCSGCGDVHVMTLKQRWLNCRCGNRMHRDHNAAINIQRRGLLRLIGA

SEQ ID NO: 49297 - protein, 276 aa, unknown
  TnpB Polypeptide
MFKMDAANFSLNYSVLSLPFKKGERVLVPLRYGEYQRSFLMDKTLKRGSVTMTESSIIVAFSKEITATEPSGKVGYDLNEKSMVGSDGTKHELSEVARLHTLYGVRRSKFYERHPDDRRLVKKFASSRREKERVSQALHSVSTLIVEKARANKEAIILERLKGIRYAHQKGNGEGKSGRRRIALWPFRQLQSYIEYKARWAGVPVEYVSAAYTSKTCHVCGFINRKLKLTERGWLCPQCGAMLDRDINAAINIERRGKIRCLPITTVVTRAEARGR

SEQ ID NO: 49298 - protein, 384 aa, Lactobacillus sp.
MIRVQKVRLYPNQTMKKVLDDLCDYRRYCWNQGLALWNDMYDSSLILDDKKLKPSEHKVRNELVSNKEDWQYQLSARCLQLAISDLGKAWSKFFNKSQVDWGKPKFKSKKAPRQGFKTDRAKIINGKLRLDKPHGIKTWYDISFKGAKSLDGDLKVISVYRENGKYWASLPFEVEIAKKTKTGKKTAVDINVGHFNYTEGKVNTLPNHLRKLYKRIKHYQRQLAKKRVVNGRKATQSHNYVKTRAKLQRDYRKVTNIQHDIVHKFTTKLASDYDKIAIENLAVKKMQMTHVASKGLQRSLFGYFRQILAYKADWYGKKIVLASQFYPSTQRCSKCGYIKTGEDKIGLDGNQKHKTKHNEYICYECGSVMDRDENAVKNLLALIA

SEQ ID NO: 49299 - protein, 421 aa, Sulfobacillus sp.
VYLTQSNQIKGLDKNEYEALREMCRYAKNLYNVGLYSIRQYFFAEGRYLRYESNYQVVKENENYALLQAGVSQQILKVVDRSFRSFFNLLKKAKKGEYRYQDVRIPHYLEKDGYFPLILSTNAIVIKEGFLHVPMSRRFKQAHPDLGRIKIPFPVRLERKTIKEVRIIPVERARFFAVQFVYEASEAAQPTLSPDKALVIDLGLDNLATCVNSTDGSSFIIDGKYLKSLNHLYNAKMAKLQSLLDQQKLPRSEQMARITVNRNNRVHDYLMKAARYIVNYCLTHKISTIIVGYNPDWKHDANMGKRNNQNFVQIPHGQLRTQLENLCERYGMQYGEQEESYTSKASFLDGDPIPIWNGNHPDVKFSGKRIKRGLYRTKDGRTLNADVNGAANILRKSNHRLISDERVARGLLANPLRVKLT

SEQ ID NO: 49300 - protein, 198 aa, Mycobacterium sp.
  misc_feature (9)..(9): Xaa can be any naturally occurring amino acid
  misc_feature (194)..(194): Xaa can be any naturally occurring amino acid
MPVYGCWCXVRRLATVATADGVVIEQVSNPRPLETALRELRQVSRARSRCTKGSRRYRERTTQLSRLYRRVNDVRTHHLHVLTTRLAKTHGRIVVEGLDAAGMLRQKGLPGARARRRGLSDAALGTPRRQLSYKAGWYGSALVVADRWFPSSRTCHACGHVQDIGWDEKWQCGSCSVTHQRDDNAVINLARYEXWSRP

SEQ ID NO: 49301 - protein, 372 aa, unknown
  TnpB Polypeptide
MAKVNGLSKESIEKRKTQRQNLQSIGYHEYAYKFRIYVDKAQREFLNKSIGCVRFIYNKMLYLSEENYKNYGFTWNIYDYKKLIPEFKKIYPFLKECPSQALQETVWALDNAYKKYLKGESNKPVFKKKKNGGSIHIPQGWRLEYIGNKFGKLYIPKLKTPLRVRMHININETPKSITIVKEPSGEFYAVFSCIRKIEKLPNTNKAIGIDLGITNYITTSQMDLLEKNIKHNKTTNPKHLKKSIKKLKRLYRQLSRKQHPRAKDDKTLKSNNFIKHAKKVAKLHKKVKNQRLDFLHKISKAIIDENQVIVAEDLNIKGMIKNKYLAQSIFDVSWGKFLRMLEYKAKWYGREFVKINRAYPSSKLCFCGYKNN

SEQ ID NO: 49302 - protein, 212 aa, unknown
  TnpB Polypeptide
VEFPDCRDRSNHDGIGIDLGIKDLAICSDGNTYKNINKSQTVKKLEKCKRRLQRSVSRKYEHNKKGGSYCKTNNIVKKEKLLLKVNHRLANIRKDYLNQTTSEIVNRKPRFICIEDLNVSGMIKNRHLSKAVQNQGFFEFRKQLEYKCNDRGIQLIVADRSYPSSKRCSCCGKIKKDLRLSDRTYKCECGNVIDRDFQASLNLKAYGEQFAS

SEQ ID NO: 49303 - protein, 416 aa, Lactobacillus sp.
MAELPYHFGVRVRVYPSTEQKRLIKRNSDASRFVYNEMVAMNRELFALRQTKCPIGLVIQRIATLQERLKRPATGISNIHGWLNHPDFDADMKANAIKNYRAAWKNFRQVHRSGFPQFHKRSARQSYQTSNHYQANKGQPTMTNGSVRLLDRHHLTLGKIGRLRFAGLPKWLFARTENTRIGTTTVTMDATGAYFVSFQLGSTQPFVTPSSKNGSQIGIDLNLDNFLTDSNGNTVANPHYYRQITGKLARAQHKLSRRAHRAKQEQRPLSQAKNYQRQRLLVAQIHQRVANQRKNFLHQLSTALVKNHDLVAAEELRSKNLLKNHALAMSISDVGWRQFLAMLAYKAQLHDKRFITVDPRNTTQTCHDCGFVMGTADTRKLTLAQREWDCPRCSQHHMRDWNAAQNILSKGLAVIA

SEQ ID NO: 49304 - protein, 380 aa, Epsilonproteobacteria sp.
MAMNYVYRFRLYPTKEQEQFLKQEAGNIRFVYNYFLSLAKREYETNNKKWNYYEYKKLLPKLKKEFEFLKLSNSQSLQESLKNLDKAFKNFFKGLSDFPKFKKKKKTNSISIPQHFRIEDNKLKIPKLKTYIKFKKHRKIEGEIKSISITITPSGKYYLNVLTNRNITPLPKTDKVIAIDMGLTDFIVTSDNQAIKNPKHFKKLERRLKLWQRRLSRKEKGSNNFKKWAKRVAKLHEKITNAKNDFLHKLSKRLIDENQVIIVENLNIKGLIKNKKLSKHIHQASWYKFINMLEYKAKFYGRELIKVNTFYPSSKLCSVCGYKNKELKLSDRIWTCPVCKTIHNRDYNATINLLKEGLKQVGLERPELMPVEVALTAERS

SEQ ID NO: 49305 - protein, 185 aa, Borrelia sp.
MRHFLVSSGGEKINHPKYLLKNASYSYQYQRKLSKKQKGSRNRAKSILRVAKLHRKISNQRKDFLHKLSYYSVANYKNIVIENLSIKGMQKGMFGKSVNDLGWHEFVRQLSYKSEWYGSYLHKVDRYFPSSKLCNNCGIKNTILKLSDIRWTCGGCSILHDRDINAALNLKAYYYKEIKTKAGTA

SEQ ID NO: 49306 - protein, 562 aa, Halobellus sp.
MLTTSVANTLIEQYWTPIHLERIGDHSYQAWKYFDEHEVFEDSDVYLPSRYKRCVMQKVGETLRCHADKLEAFQSIQAVLPDHKIRRIHSRRIKEQLWDSEEYLKSGYIDLLIGQLNSYYARHGRYPESYFDVEQCPTYSKGVLPYSADDGPTSGQAVKYQYDEDAQTLSIKLKTPDTLEPEARGDWTWTEHELDGYTAFHELLEHGSLSSPSFQSTKTKTGDDYYELSFPVEVEHQEKPDDVETVIAIDSGLRKEATAVAVNEDGEQLSVPYFIQTTERERMRNLAWERDQLNSKLADLRRNGRDHTDSFEHIHAEYERVNNKIRHKREQLVHDVANQVLALALLYEVDAIVHEDLRSLSPPRGEGQLSWELSSWARREIISKIQYRADLAGLHVRKVRPGNTSRSCPRCGSTGHTTRSPDHYREIWWGGHFRCDNTRCGFQGDRDYVGAVNVARVFFSNTASLQHDFTSSYTGYFEIVPASRSAGSRLVFGEAPIAYIGQSEQDVTAGGGSCLIAPAVTPTETKANSSNHIFVSSPATHSTTQFVKRTADYCRKLERLGF

SEQ ID NO: 49307 - protein, 410 aa, Symploca sp.
MLTMTYEYKLQPTAEQVALIEQTLDVCRSVWNFALRQRKDWCASRKSPVNACSIVSEYIIPTDELFPSYHRQAKQLTQAKKTSQRLRSTHSQVLQQVLRTLDRAWQDMQSKRLGFPRFKNKYRLRSFVFPKLGVNPVSAWGIKLPKLGLVRWRMSRLIPKGFEVKQARIVRKASGYFVMLSLQLDVDVPSPIPHGHPKGLDLGYDKFVATSDGQEIKRPRFFQTLQRKLKLLQRRLKNKHQGSNNRHKLNQKIARLHQRISDTRKDWHFKLAHRLCRDAGMLFVEDIDFRTFHRGMLSKHSADAGFGHFVNILKWVAWKTDTYFAKVDKNGTSQTCPNCGTHTGKKTLDIRIHSCGWCGYTTSRDVASAEVVKNRGITALGHSVFENVCGDGLAGAVVTLSSQESTKQKT

SEQ ID NO: 49308 - protein, 370 aa, unknown
  TnpB Polypeptide
MKQTLMIKLAPNQEQYQSLIQTMERFNEACNYVADLAFCHYSAGQVTLHHLTYDHLRKHYGLSAQMAVRCIGKVVEMYRRDKSKLVSFKPHSTMVYDQRILSFKGLDKVSILTLNGRQIIPIRIGAYQEGRINREVRQTDLILRDGIFYLAVTIDAPEPTPNEPDGFLGVDLGIVNIATTSDGEVYSGGQVNGIRKRHAKLRSKLQAKNTKASKRLLKKRSNKEKRFAKHVNHVISKRIVAKAKDSGRGIALEDLNGITDRTSVRKAQRRQQHSWAFYQLRKFIEYKAKLAGIVVEFADPRNTSRTCPICGCIDKHNRPSQSLFSCTSCGYSANADVIAATNISRRVAVNRPYISPLVGVGITPCALSIG

SEQ ID NO: 49309 - protein, 296 aa, unknown
  TnpB Polypeptide
LPHYLPKDGYTTLVIGFVRLNGNKLILPFSNSFKKTHKAIKITIPPILLDKKVKEIRIIPKAKARFFEIQYIYKAECIQRNLNTNNALALDFGVNNLMTAVSSYGKSFIIDGKRLKSINQWFNKENTRLQSIKDKQNFGKKTTNKQKAIARDRNNKVNDYMNKAARKVIDYCISNDIGTLVVGYNETFQRKVHIGKQNNQSFVNIPYGRLQNKLQYLCELNGIKFVKQEESYTSKASFGDKDIIPVYNNDNPKEYEFRGSRVKRGLYKTSSGKIFNADVNGALNIMRIGLIKDEEN

SEQ ID NO: 49310 - protein, 429 aa, unknown
  TnpB Polypeptide
MEYTHRYRAHPNNEVAVQLCRHIDIHRQAYNYTRYEYETLPSDTDTIGSAYRHHKRLTDWKSEFPVFGEVHSKALQRTVARFYDNLSNLKDKKDAGYNVGRLKWKPPRDFQSMTYSQSGFELKNTSGRTATLWLSKIGDIPIRYHRDIPNEAVIKEVTVKHESTGEWFVSFALEVDDESLPEKPAIDELDAADCVGVDLGILNYIHTSDGLSVGQLDVEDEYERLRKAQRTLSRREQGSENWEKQRCRVASVKRRIRRKVLDFQHKLTTWLVTEYDAVFVEDLDVKRMLEDSQNARNKQDAAWRQFITLLEYKADLHGCHVRQVEPANTTKLCNGCGVKTDKPLWVREHRCPSCGFELDRDWNAALNVLEGGLGKVGLGQSEVQRLLETGAAVDSAHSRSVSASTVVESGSPTREHGSPGLNEAAVAAE

SEQ ID NO: 49311 - protein, 382 aa, Okeania sp.
MSKLTLTLKLPFYRLNACKAAEFERLTLLNTEVANTLLKVDTSERRKYTSKDFHHVEIGSMWINQTIRNTCAQTKVKKFKRLPIEVNNQGYNVSRQGDLFTISLSLYRGQRKRIPLTVHSASHQETLEKIINGEAFLGSLKISKSRKGIWYALISVSMDVPDARLVNDWIGVDRGQNNIAVAALPNSFGKFWTGKQVKSLRRKFQKLRKELQEAKKLIKIKDIERRERRIITHINHVISKQLVKLALDYKMGLRFEDLSGIRQSSKQRKKTKSDASKNRDYWAFYQLELFTRYKAVKAGVPVESVPAPYTSRSDHRNGVIGKRVKHTFIGYDGYQCNADWNASQNIGQWLGFSCPMNLKKVVSVMGIDDSEVGVNDSPSTDE

SEQ ID NO: 49312 - protein, 506 aa, Okeania sp.
MESLSKKLEEDLTTNEKKCLPYWNRSCQEMSNLLWSHTKIGSFDLASICESGSAPYTLAKSWFTAELNFLPFAQHSVSQHLCWKGNPKWLKTSFQSSTVSVQDCIHLKSLRIRVYPEKNLHQIWKKWLAASRYCFNQAIAYQRKHGLISKYDLRKVVLKNESLPDWIKESPYHLKVNAIYDANTAFKTSRKSGTKQQNCGKFRSIRDRIQSIKFRVEDFKKGTWLPSVTKGLNIQASEPIPTINVEYQQKQKSGTYKTCMREKSWNAETQLVYDKKRWFAVFPKEFKPETSSSQSIIALDPGVRSFLTGFDGEKLIDIGKGDITRIFRLGQHIDKLISTRGALKGSQNKYKRQGLNKKINRLLIRIKNLIDEVHKKVAKWLTSEYRVIFIPTFESSQMVAKSGKKKRQLNSTTVRQMLNWAHYRFKQTLKFHGLKRGTTVIDVTEEYTSKTCTHCGHVHQNLGGSKHFKCPHCGHSMPRDWNGALGIFLKALRDTASVDGSAVTLL

SEQ ID NO: 49313 - protein, 370 aa, unknown
  TnpB Polypeptide
MILAHKIRLNPTPEQETYFNQASGIKRFVYNWGLAVWKNSHSEAGSVFGVMTIKKQFNEIKQEEFPWVYDVAKDVAEGAFQDLGTALKNYFDHKKGKRKSWIGFPKFKSRKRSKQSFRLNNDKIQLEDYQIRIPKLGWVNMTESLRFAGKVMGVVVSKTASWWFAAIHVEVTISDPVSFKQESVGVDLGLKTLAKLSDNEQFENQKLFRKELRKLKKLNRELSRKIKGSSRWYRVKKQLARFHYKVACKRKDLIHKMTTTIASKYRIIGVEDLNAEGMKRNRRLSLSISDASFGEIIRQLVYKSLLFGSQVIKVGRFFPSSKLCSDCGFRNPDLKLSDRIWTCPNCNETHDRDLNAAINIEREAMRLVSS

SEQ ID NO: 49314 - protein, 404 aa, unknown
  TnpB Polypeptide
MLVKGVVFRLGDELPSEARFLLEDFRLAVNNAVRTGLQARVTSRYALTKLTYNDFRQEHPKMYAKHLVSAFEVAGSVLKNHRRLVRKGNAGHVPYVRRLFMKAENQAYKLDRVNGVVDLPIRAGCHVMLKLVLSNYHRDYLNDPSYSLGSLTVFPDRVIIAFRKGAPKPYAPESALSLDTNERSLDGVFAKDNDVKTVKAEFPDIAMIQQRHHERRKRLQKKKAHDRRALRKLCRREGKREHHRIEYRLHQVANAVLSFAESRKSAIVLEDLKGFKPRWKKELNRRLSLWPRRKLHQIIQYKAQWRGIPVVKVDPRYSSRTCPICGRIQDSRMGTEFECECGWCLDRHINASLNLLQTAISKGMAGGLRFNPGAFQHDVMMILYDPVTGARSEPNGTSCMRVVA

SEQ ID NO: 49315 - protein, 389 aa, Shigella sp.
GGQQEREMRRFAGACRFVFNRALALQNENHEAGNKYIPYGKMASWLVEWKNATETQWLKDSPSQPLQQSLKDLERAYKNFFQKRAAFPRFKKRGQNAAFRYPQDVKLDQENSRIFLPKLGWMRYRNSRQVTGVVKNVTVSQSCGTWYISIQTESEVSTPVHPSASMIGLDAGVAKLATLSDGTVFEPVNSFQKNQKTLARLQRQLSRKVKFSNNWQKQKRKIQRLHSCIANIRRDYLHKVTTTVSKNHAMIVIEDLKVSNMSKSAAGTVSQPGRNVRAKSGLNRSILDQGWYEMRRQLEYKQLWRGGQVLAVPPAYTSQRCACCGHTAKENRLSQSKFRCQVCGYTANADVNGARNILAAGHAVLACGEMVQSGRSLKQEPTEMIQATA

SEQ ID NO: 49316 - protein, 355 aa, Synechococcus sp.
MEYGCQQTLIKDKEVIPILQYLCQQSNKVYNCALYYARQVYFKTKRLVNYAALCTEMKRAKNKHFMAMYVSSAQQTCKSVAEELLSFKTNLQLFLQGKLSAKPNLPRYRKAGMFSVTYPKKWLKLQEGQVRVPLGNQVKAWFGIDAFWVELPTNLAWEAIRELRILPRHGVFYLEWVYQKSPEPKQLGPAKALAIDHGIDNWLTCVSNLGHSFIIDGRKVKSFNQWYNKQLARLRTGKPQGFWSQQLNRITEKRNRRMRDAINKAARLVIDYCLKHSIGKVIFGWNKGQKQECQMGNINNQNFVAVPTGRLKERIMALPSLRWMKRTARRRVFWMGMSYPTPVKNPTGGKPLESE

SEQ ID NO: 49317 - protein, 249 aa, Frankia sp.
VSYDGHVNLKEWAESQGVAYVTARRWYAAGKLPVPARRVGGLILVGEPDQPTGDGLTAAHARSKPGSAGRRQRAAQLAAIHVRVANQRHNGLHKLTTRLARSHDTVVVEDLHVAGMVRNRRLARAVADAGMAEVRRQLAYKTRWYGSTLVVADRWYPSSKTCSGCGWRNPSLTLSERTFTCQSCGLVLDRDHNAAINLHHLVAASASETVNARGADRKTRASGRVAGKREPGTASAGQTGGASPRGEAA

SEQ ID NO: 49318 - protein, 229 aa, Frankia sp.
  misc_feature (39)..(39): Xaa can be any naturally occurring amino acid
  misc_feature (135)..(135): Xaa can be any naturally occurring amino acid
  misc_feature (162)..(162): Xaa can be any naturally occurring amino acid
VLSCDDLPAAVVEPTGAVVGLDVGVASLVTTSNGDHYGXPRFLERSAERLADAQRDLSRKKRGSKRRKKAVARVAARSRAVARQRVDLANKAALELVRDHDLIAVEKLNIKSMVKRAAPKPDPDRPGAFLPNGQXAKTGLNTSILDAGWGVFFNVPRAKAEXAGRTVVEVNARRTWVTRVASANQRSTSTACSRLVSFRCHRPPSATQPPTVRDAHAELSIVARKGSLR

SEQ ID NO: 49319 - protein, 377 aa, unknown
  TnpB Polypeptide
MEVYRRVFCSLKVNSEDLARLNSTVKAFEDACNYASEVAFKKGIHKHKVLHDRIYRELRAIFKLSAALAVRVIQKVASSYKELSHELHIFKERSISLDGKLFCLKRKGRLIASIATARGRIEAELEVGDYQRSLLDNPVRGARLILKRGVPYLQINVVCEVLPREMDSPVGVDLGIRKLLVASNGFKVNGRPVNAKRQHFRALKYSLKEKGTSSARRRLKRLIKREKQWFRTTLHQSSKALVESLDEGNYLVLERLHGTKVKMGSKRNLRSTKPSFQSLAIGRLQQMISYKCGDRGIPVILAKPDFTSQRCPRCGTIDKFNRRSQALFRCVHCGYQHNADFVASINLRELALGGWVAVSQPDAVPPIEKDCKPLSAE

SEQ ID NO: 49320 - protein, 377 aa, unknown; identical to SEQ ID NO: 49319
  TnpB Polypeptide

SEQ ID NO: 49321 - protein, 457 aa, unknown
  TnpB Polypeptide
LKTLKRTVKLESDPLNEWKYRALREVEEYQKKIVNEMIDVIISEGLPTTRKKLHERFYSHYKEKYPFLPSRVIEGSYITAGRIVKSFRERKRKGLTRKDKPEYKRVIITIPNMINWRFNRVSISILTHKGWVEIPLRVTSQLIRYLHEGWRVSQELKLRLVGRKVLVWLTFEKEVEVETREGNYISIDVNENNVTLAVFEGFKLRELRRYETGLGRIVVNYSLRREEITRGNSTKDELVKKKLRKLRERERKIDVLRKTVKRITDLARSLNAKVLVGKFSLRAKEKMEGDKNDKLRHRIHQWSVIKFVEMLKAQPIDVEEVSESYTSSIDPLDGRKLKKGKQVVERVVKVFNPYLMTGTAHEGGGIKVFKVNARYLESGEVLLERDSIAPLNLVRKVDGRVVVFPSTSPNDLRVTVYDPLRGVPVAELEVIKKVRKSYATGKHGGLLSFSTSLGTRP

SEQ ID NO: 49322 - protein, 473 aa, Microcoleus sp.
MRKGRSAMKTTYQYQFYPDTNQKLSLNHWLRICRYWYNRQLGDRFDWWEMNRTTVNACPLIASISAPREKPNYYSQKQQLPVIKKDLVKVFHSGELLDFKQVDSTILQDVSKRVDKAFERFIVGDSKGGKSGRPRFKTEADYRTMTFSTANNDWIKLVRKNWIYIRLPKLGVIKVRMHRSIPDGFTIKQASVTRKVDGWFIQLMLEDSSVPEFTPDKISPNWDNSIGLDAVLNEDVYLATSSGEKLPSLKPLRKNQAKLDRISTKRNKRKRGSKSRRKLAKKEAKQHQKIARSRQDFHYKTAQKLVRSGAKFFFHEDLNLKGLTKRNKVKQDDNGTYLPNGQSAKSGLNKSWLDAAFGQFFKTLDYIAEKAGAVVIPQKPAYTSMVLGYRNEIIFTDCGIRDYWDEQNSLIVDRDINAAINLKRLGLDIFPSIKCRSGNLSVVGTMDDSTAKEILYTLHRAAKKPTPYFTQLV

SEQ ID NO: 49323 - protein, 398 aa, Microcoleus sp.
VEQVLTVVCKLQPTPEQASKIDALLKAFADACNWANQTVKAGITSKTTIQNLVYQQLRKQFGLSANQAVRVCARVGANRKTAKLKGKSVKTFAATSADYDARIFAFREKDWKVSLTLLDGREHIQLNPGNYQRGKLKSRVPTSAQLCQHRDGQYYIHIQLKNEGPDPIPSERVIGVDFGRRDIAVTSIGDKWDGKQIQDVRDKFAKVRTSLQTKASKGTRSTRRRARQILQRLSGRERRYQTWLNHNISKLIVLSALQHNAIIAIEDLTAIRERTNEMPRNKTERRRSNSWAFFQLRMFLSYKSVKYGVEVAAVNPAYTSQTCHNCLHIHPVKGKSYRSGKAFKCGHCGNHCDADENGSKMISIVGAVFVNPLRGSVLSCDIADHIRATESPRFLAVG

SEQ ID NO: 49324 - protein, 493 aa, unknown
  TnpB Polypeptide
MPNKPKSEAQGIQLSYRYRIYPTPEQEKALAFEFDACRYVYNHFLHLRTESWERTQKTLRRPKLAPGADPNAKHPEYVKDSNGKTVWEECVNESYDPKAKAMGNIPSKELTALKNSCLDEDGNLWLKQADSTALGYSTKNLDAAFDNFFRGIKQGQKIGHPRFKRRFDSAQSYKTQGGQLLGTYPDGSPAKLILKGMGKTPVPSPLPEEHPLRTVRWQYVCLPKVGKVRVKVHRIPEGTFVATAVARTASNKYYVAVNVKDAAPKPVPAGHGEVGITFGASHWVTTSDGEQIDLPERMDRLQRRKAIAQRDLARKQKGSQNFKKQKRKEARVEEKIANIRKDATHKLTRELVDSYDVIASRNMGSSDMMQHKTEATKNLPKKVQRALNKKTADGNFFEFNRQLAYKSAWANRAFVEVPNDTPTAQVCSRCGHEELVLAKDLRPKWTCSECGAQHDRKANGAQNVLEAGKDILAKQERSFVTKAKKSRTKKRAK

SEQ ID NO: 49325 - protein, 413 aa, unknown
  TnpB Polypeptide
MDYSHRYRAYPTQAVADRLEHHLDVHRQLYNHVLWDYENSPDDDRSSEYDQNNNLPEWKQRWPLFSELHSKAAQATVARFHHNLTTLRELKENGHNVGRLTRQAPAEYRSVTYNQSGFDLDEKRGQDGYAYVRFGKIGWVTIRYSRQIPERVSIKEVTVKKERTGEWFVSFALETDDTNLPEKPNVDSLDTSNSVGIDLGIRDYIHTSDGKTVDWLDLEDEYDRLRREQRKLSRKEHGSSNYEKQRRNVATANRKIQRKVLDYQHKLTTWLVEEYDAVFVEDIDVQSMLQGEGNARTKQDAAWRQFIQLLEYKGDLYGTHVVQVEAAGTTKECASCGVETRKPIWVRDHACPACGFETDRDANSAMNVLQRGFAALGLGWPEATPVETVTATDTAAFQRVSASHVLETGSLPS

SEQ ID NO: 49326 - protein, 399 aa, Rhodospirillales sp.
VILAHKIALDPNDRQATHFAKAAGTARFSWNWALGQWQEQFKAGSKPNEAALRKQLNAIKDEQFPWMADVTKNAPQQAIKNLGTAFKNFFDGRAKFPKFKKKGVHDSFRADNGPQVKGADAVIVDGKRVRLPVIGWVRMREPLRFAGQVKSAVVSRTADRWFVSLQVEIPDRAMPENQGAAVGVDLGVKALATLSDGGTFEGPKALRKNLKKLRRLSISLSRKAKGSNNRRKARIKIARLHARIGNIRNDVTHKATTAIAKNHGVIVIEDLNVRGMMANDRLSRAIADVGLHEFRRQIDYKALLNGSKIIVADRWYPSSKTCSTCGYKMEVLPLSVRDWTCPACGGAHDRDVNAAKNLVKLAVSSTVSACGEEGSGGRRKPAVKPASKKQEPNAVCPLG

SEQ ID NO: 49327 - protein, 343 aa, Escherichia sp.
MRRFAGACRFVFNRALALQNENHEAGNKYIPYGKMASWLVEWKNATETQWLKDSPSQPLQQSLKDLERAYKNFFRKRAAFPRFKKRGQNDAFRYPQGVKLDQENSRIFLPKLGWMRYRNSRQVTGVVKNVTVSQSCGKWYISIQTESEVSTPVHPSASMVGLDAGVAKLATLSDGTVFEPVNSFQKNQKTLARLQRQLSRKVKFSNNWQKQKRKIQRLHSRIANIRRDYLHKVTTTVSKNHAMIVIEDLKVSNMSKSAAGTVSQPGRNVRAKSGLNRSILDQGWYEMRRQLEYKQLWRGGQVLAVPPALRVLWSYSERKSPVTKSIQMPGMWIYSERRCKRRS

SEQ ID NO: 49328 - protein, 414 aa, unknown
  TnpB Polypeptide
MPGMKIVTQVKLMPEADQAAALSATLRTVNDLACWVSEVALAHGVPREYELRKHTYPRLKAEGLGAQAAQHVIKKVRDAYTALRANMRAGNLGKPKSKRRIRAESKPITFRSEAAQPYDDRCLSWQYDTQTVSIWTTAGRLKNVRFVCSADALKTLREYRKGEADLIERDGVFYLIATCEVPEAETYEPDGFIGVDLGIVNIVTTSTGYRAAGRGLNRYRKRQLDLRTKLQKKRTKSAKRRLKERSRREARHVKNTNHIISKTIVTEAERTSAGISLEELKGIRQRVRLRKPQRVALHSWAFAQLGDFIVYKAKRAGVPQAFVGPAYTSQTCAECGHVDKRNRVDQGLFICRGCGVVAHADRNASHNIATRGESVWNAGRESRVPATPQGCLDGGVHPSSQLGTTSKPGPSEPG

SEQ ID NO: 49329 - protein, 383 aa, unknown
  TnpB Polypeptide
MSYRAIKLKLFPTREQEKLLWQSAGTARFAYNWAKKFADTYYRLYKKSLNTGKVRTHFTKLRNHKKYVWLKEVSSEIPQQAIKDYFEALDKFFKKVAGYPRFKSRKRSVVSFYHSNAKFTVSDNTIKLEKIGEIRMKDDNRLPRGNYRRDKIKVCNPRVKHNGKYWYISLCIEYECEKCELDKTLSVGIDLGIKGLATVSNFEKPFGNINKMQRVRRLKKQLRRLQHQVSRKYEQNRSGNKYFKTNNILKLERKIKLLHRKLSDIRLNYLHQVTIAIAKTKPYRIVMEDLNVSRMMKNKHLSKAISEQGFAKFIELMKYKAERFGIEFIQADKFFPSSKTCSHCGSIKKDLKLSERTYHCPCCGFTIDRDKNASINLANYKLA

SEQ ID NO: 49330 - protein, 493 aa, unknown
  TnpB Polypeptide
MPPSYKNSHGIEGVLKWAKTWHADAIIGRFDNDDNVELFRENGIIALAQDYKSRFSNIPNITGDYRKTGRMAAEFFLSKGFQNFAFYGYHELVLWKKQPETAFLREAMSQPLQQALLDLDRAISDSFRPKSDPAHKGWPKFKAKDIGDGFRIPQFAPEHIDDANGRVKLPKIGWIRYRRTRPIAFECADGMLVPGVVKQIHVRKDCGHWFVIFTVEFEVKVPDMKALDVGIDVGVVHAVATSDGRFYDLDTAKIRSIEKRIAGLKRKLSLNQESRKKLAKLELAEPFDKKQPSRKRRQLKERIQNLYRKIRCIRQDFHRKTAHALAQEYGCVYVEDLKVKNMTASAKGTVENPGKNVKQKSGLNRAILRTGFYSLRQAIEWQLLKMGGVVIPVDPRGTSITCPHCQTRDKRNRPTQAIFKCVNESCGFKANADVVGALNVLRKGRTGPSAHNKKHIAHVVSIGEQGFRPEDSMPSMGTALEPRDRVVQGIPAL

SEQ ID NO: 49331 - protein, 451 aa, Halothece sp.
VKIETMKQVITAKLKLNLSTEQKTLLREVSLAYRDALNYVSQVAFDNNRTSSANKLQKLAYYDIRDEYNLPSQMACNVCRQVGATYRSLWTKVKQNSQHRKQGKTKKRYKGLDNPPKFVSRTCNLNYGRDFSFVKEGISIITLQGRIKVSYSGYQKHLDLIKFGEAKAKGAKIHYSSSNKTYYLLVSLEIEKSDIQPTDIKRVSGVDVGQRYLAVETDTKNQASFYNGKSTIHRANHYQRRRKSLQRKGTRSAKRRLKKLSGRERRFRADINHQVSKKVAKSNSLIGLEDLTHIRERTNPRRKGKRASKKQKKANRKQTSWSFAELQSFIDYKAVLNDSLAIKVDADYTSQSCPHCGHTSKGNRPNKGLTFHCENCRFDLHADLVGARNIAMRTLLVRQDWASTGSLSACPDDLSGSSDVSSDEAKAMRLSRFMELRWTAETSPNHIAFSD

SEQ ID NO: 49332 - protein, 633 aa, Comamonadaceae sp.
  misc_feature (495)..(594): Xaa can be any naturally occurring amino acid
LDVGPFLPQQATGDAFEAVHEIGDSHLGRVFHKQVNVIVLAVHLDQLRLEVGADLGEDRAQPVDGVAIEYPAAIFRYKDQMDMHLKNAVSSMPNIVVVAHRPNYNIRMQRLQAFKYELRPDGQQERQMRRFAGSCRFVYNKGLALQKERYERGEKKLGYAGLCKMLTEWRNSAETAWLADAPVHPLQQALKDLERAYSNFFAKRADFPRFKKKGQRDSFRYPDPKQIKLDQGNSRIFLPKLGWLRYRNSREVLGTVRNVTVSQSCGKWFVSIQTEREVEQPVPQATTAVGIDMGVIRFATLSDGTFYAPLNSFKRHETALRKAQQAMSRKTKFSNNWKKAKARVQRIHSRIGNARRDFLHKTSTAISQNHAMVCIEDLQVRNMSRSAAGTTEQPGRNVRAKSGLNKSILDQGWFEFRRQLDYKLAWQGGWLVAVPPQNTSRSCPCCGHVSADNRQTQARFACVECAFEENADVVGAINVLRAGHARFACEVSDAXXXXXXXXXXXXXXXXXXXXXXXXXXXXXXXXXXXXXXXXXXXXXXXXXXXXXXXXXXXXXXXXXXXXXXXXXXXXXXXXXXXXXXXXXXXXXXXXXXXXTAMVSGSGTQASRCPALTNLTARPSVVLRKRLSAGGRKP

SEQ ID NO: 49333 - protein, 402 aa, Nocardia sp.
LTEDELTPAVGWPAYALRKDWNQVKGVVAPWWPENSKEAYASGFVNLDAALRNWVESRAETRAGAAMRFPRFKEKGRAMSCRFTTGAIGLAIDRRHVRLPRLGLVRSHESTRKLARHLEQGSARIRSATVSMRAGQWFVSFSVEVSRADSAPVQPDRVVGVDLGVSSLAVLSDGTVVPNPRHLDAVKRRVRRLQRQAARRRGRNRRTRSEPSNRWLRTQARLARAHARVANARRDALHKLTTGLVDRYGSIVIEDLNVAGMLANRRLARSIADAGWGEFRRQLEYKSERRGTQLHIVDRWYPSSKTCSACGVVKTKLRLSDRTFHCDRCGFSIDRDLNAARNLAALARMSSASCVGTKNSLAGNPRKSLHSRATGTATRRPTSTDKGQRKRSISLAQDGFSS

SEQ ID NO: 49334 - protein, 457 aa, Moorea sp.
VYKTIPVKANLSDEEKVFWEFQCQQANSLFNCAIYYAKQKHHQWLEEQKAYTTYWRGDELRVGWKTYKCSTKYPEIDKALKMSPHYKGMAAQSAQQTLKTVGEALNSYNKLVGLYYQGKVNRPKFPRYRKSGGFAAVTFPKQALTYKEGWFYPSVSKESKPELLTQITLDPPDFIDPDWVKEVTVRPYYGQLWIDWVIDDRKQPVSDNPKLDYSHAIGIDHGGDNWLTCVSTLGKSFIIDGRKLKSINQGYCRQVAKHKSGKPEKYWDSHLDRIQLKRNNQMRDAINKAARFLVNRCLNDGVGNIVFGWNEGQKNRSNMGKKGNQQFVPIPTKRLIERLKQLCPEYGINFIVTEESYTSKASFLDGDSLPKYGEKPNGWISSGKRVRRGLYKTASGKLINADSNGAANILRKVATQSFDLTKVVRGALTLPHRYDLFTDLSKSYRNKGGAVRVHPTA

SEQ ID NO: 49335 - protein, 205 aa, Lactobacillus sp.
VIKSGRIKEQAGRYYLTCLVEQPEQLHERLLGDPIGVDLGVKEFAIIDDGTIYRNRNKDRQVKRIRKRLRRTQRKLSRQYIAYKARKTKEGRSATDLNLAKTERKVQRLYQRLHNIQADYQNKIVANLVRTKPNWVSIEDLNVKGMIKNCHLAKAVNQQGFYRFRTKLINKCQQLGIPVHLVNRFEPTSKICHQCEDKKSRFIFG

SEQ ID NO: 49336 - protein, 377 aa, Lactobacillus sp.
MVLTGVKLRIYPNQTQRLHIKLNFGYNRFVWNQMLNMLIKRHENNPQAPLPNAFALNNLLPALKAEYPWLKAAESTSLQATNHGLIIAYQRFFQSRHGFPKFKSRKFPKQSYQSRMGIRLIDEQHLKLPKLGIVRFSGRQISGKIKNVTIRFSATGKFYTVLLVDTEIKQLAKTDKKVGIDLGVADLVITSDGIKHPTIRFDKQLAQKKHYWEKRLARRRRQAQQVMAWEKHNHELVTRELSDFRNYQQAKRMVAKYAEKIANQRSNYLHHLTKQLVTQYDVIKIEDLKTKNLLKNHQLARAIANQAWRALRAQLEYKCEWYGKQLITVNPRKTSQICSNCHYDCGKHALDIREWTCPSCGINHDRDINAAKNILSA

SEQ ID NO: 49337 - protein, 411 aa, Massilia sp.
  misc_feature (115)..(115): Xaa can be any naturally occurring amino acid
MLLAHRIRIDPTPEQRGYFARAAGTARRVWNWALAEWQRQAAAGGKPNAMALKKQFNRIKYSDPAWLDENGQPWLRTVHRDAHAQPFANLARAWTRYFEQRRAGRPAYPPVFKKXRILGASVSRQADHWFLCVQVEVPDAAARLPRSGHGITGVDLGVNAAATLASGEKIVAPRPLKAALRRLRIRSRRLSRKLEAAKVLAGIAGRIPKGTRLTVSKNRIRGMQALARLHARIARVRQDFTHKLTSRLCRENQAVAIEDLNVGGMLANARLARAISDVGFYEVRRQLLYKATRYGTLIVLADRWYPSSKLCSGCGARNAALALGERAWTCAGCGARHDRDVNAATNLQRLATGALAAATALPVASPAATPGTAAGLVPAGGGKVTPVRHEHGQQEGSGQEENAAYFCARFC

SEQ ID NO: 49338 - protein, 401 aa, Proteobacteria sp.
MILAHKIRLVPTQEQEDYFRRACGTSRFTYNWALAAWKASYEAGDKPSGRSLKVSFNAIRKDAFPWTYEVHRDCTAAAFDHIQAAFGHFFRRVKAGLAAGYPTFKKKGRSKDSFSIANDKLQLRPLGVRIPTLGWVKARETLRFEGKVLGAVVSRTADQWTIAIQVDVGERRRLRVGDDVVGVDLGIKASATLSTGEVIKGPKALRLNLRKLRRLSRRHSRKEEGSSNRRKSAMKLSRVHMTIANVRKDHLHKLSTRLVSENQAVGIEGLAVANMVRNRKLAKAINDEGWGELRRQLEYKAPMYGTEIVVHDRWFPSSKACSGCGHVKEALWLSERTYWCAACGLVLDRDHNAALNLQPKELPVGYGDVKPVEMGALAGRKDSETAVDEAGTGAGGLSPSF

SEQ ID NO: 49339 - protein, 471 aa, unknown
  TnpB Polypeptide
VIQVHEKVLELGRKEALTALEKLTHTTMRNPHPIMPLSEIGVDIPALFRRAAIHAALGSAHSFYTHLKKWRAHKEKAEAKGKKFTKRPPVPPRTWHKSATLYAGMWKERTHSSLVIKLWTGTCWSWLKIRLTGREISLDAEMGSPQLIRRGKWWWLHTPIEKQFSSPANIEKQVTTNTQTKICAVDLNLNEHIAVATIQTVEGTILATRFIGGGKEIAGFRKKQLGRIARNRAKTGICASGEQDNMALWCKLRSRDEQFAHFVSARLVQFAKAHEATILVFEHLSNLKPTKGKYSTRGNQKRAYWMKGRIFTYARYKAWNEEMVTSRVNPRDTSRECARCGSLVARYAAGNPAEGYTEGAPLVFCPVCNMRGNADRNASMRMGHRLLARYQQSVQEKPLAPLVRGREEKSSGVDHSQDAKSKDRPSTDHARHGEVNGHGTAQEQKSMDGCAVPRFSSSTTVDTESQPRCIS

SEQ ID NO: 49340 - protein, 465 aa, unknown
  TnpB Polypeptide
VKRTNTFAVRPLSDDGEQLLRDLLDASAALWNEVNYQRLMRYNDEGDFEDEDVWDADTGRLEGKYKGVLGASTTQQVIRKNSEAWRAFFRLKDQYHDPENTSVTEHPEPPGFRGNEDDGRVLKGVIRNTSYTVEWGNRSRLEILVGSELKDRYDHTGRLRLEIVGDPNWPDYEKQGRLDLWYDETDNTFRASQPVTVSDETRDTPLADEKAALDIGANNLVACTTTTGGQYLYEGRELFQRFRETTREIARLQSKLEEGRYSSQRIRRLYRKRTRRRDHAQEALCRDLLERLYEDGVDTVYVGGLTDVLDTHWSVETNAKTHNFWAFKQFTERLACTAEEYGISVEVRSEAWTSQECPQCGGTERTTRYQDTLTCQCGFEGHADLTASETFLRRHQNSPSSDWRTRREASRQRHTEQAVRPMARPVRFEWDDHNWSELPRFHRPKEQRTDPSTVHHNGNVASGDS

SEQ ID NO: 49341 - protein, 375 aa, unknown
  TnpB Polypeptide
MLRTVSVQLNVDSEQAAALMALQSAYADACNRLVPTVVEHRCWNRVALHNLAYDRLRKETPLSARMVCNAIFSVCKAYKAQKELGRIRKGEPVPVMHFDCVGVYFDERNYAIKGECLSLYTLSGRIAVTMAPGEHQRRIMASGKAKEAELVCRKGCWYFNFVVESEDVVESEDSEPIASGPVMGVVVGENNLAATSTGKVWGGGELRHKRNCHLALCRRLQSNGSQSARQKLRQVSDKEQRRVTHINHETSKEIVAEARRIGASRIVMKDLSHIHNRAFDWDFRQLQTFVEYKARAVGIAVEYVNPTFTNQTCSNCGSIGECVRHRFVCQTCGLQTHADDNASRNLARIGSGAPLPKAAVNAPHVGGASHVCVSQ

SEQ ID NO: 49342 - protein, 375 aa, Spirochaetes sp.
MHFNHARFVYNIGLEQRKLNDKSHRERGTRVTAASQSRELTEARREFDWLRAGSTVVQQGALRDLDRAFANFFTGRAKFPRFRSRYTSNTFVVRDVSLKRLNRKWAVIFVPKAGWLKFRVTRSWTEISAATSARVSFQHGQWYVSLTTLPRARREGGTDVVGLDRGVAVSVMSSDGEMFTAPSLTEGEQERWLKLERQLAKHDKRSTRRDVTRAKLGKLRRALNNRRHDWVEKSTTRLAETYALAGIEDLNIAAMVKKPAPKPDGEGGFLPNGAASKSGLSKAIHASQWGKFVTRLGDKMEVVKVPAAFTSQCCNECGHICKENRESQADFRCKRCGHTANADVNAAKNIRRLAVCGGTLRERAKPSGDANLQTA

SEQ ID NO: 49343 - protein, 359 aa, unknown
  TnpB Polypeptide
MRKTFKYRIYPTKPQMAVLESTLSSCQELYNAALQERRDAYRLERKSVRYVEQANQLPAIKKIREDIAGVHSQVLQDVLKRVEKAFDGFFRRVKTKQKAGFPRFRSRQRYDSFTYAQSGFALTDDKLRLSKIGSLRIKLHRPLTGKVKTLTITRSATGKWYACFSVEIEAQPLPTSDRTIGIDVGLSAFATLSTGEQVANPRFFRTDKKALACAQRQRKKKAARRIHERIKFRRNNFAHQLSHALVSLYGAIFFEKLNVRGMVKNHCLALSIQDAAWNQLIQYTTYKAECAGREVRTVDPRGTSQRCSACGAVVIKDLSQRIHDCSCGLRLDRDHNAALNILALGLQSIGIKAKEAPSF

SEQ ID NO: 49344 - protein, 417 aa, unknown
  TnpB Polypeptide
MRLYWKLVFEIPWTEPKLDWLLKEFRLIVNKSIRVALEQRLHSRMRLARVAYAGFGREHNIYKQYIPSAFDFALRILKTYRRRLKQGKTASVPYVRKPVLVAENQSYRLDRTTGRLRIPIRGTEGVQLVLPLSEWHRSILEDPAWALGSLTVVPGRVVLAVRRTSPSAYEPVSAIALDTNEDSLDGVAVGSARARLTSLSFLGVREIQARHFRRRRRLARAKAQDRRVQRRLLARESARERRRVKQRLHLVSKRLVQFALASKSAIVLENLKLPSLHGRSRRMNRRLSSWPNREIHRQIEYKAALRGVPVIKVNPAWTSKTCPVCGARRRDRVGKDFVCLICDWEMDRQHNAALNILKTALASNEALARAVRFQPGALRDDVVSPLYDLLREGGGAREEPSGVELDAIPPFEISGDS

SEQ ID NO: 49345 - protein, 400 aa, unknown
  TnpB Polypeptide
MQRLQGFKFQLIPTGEQKRQMARYAGSCRYVFNKALALQKERNERGEKRLGYAELCKLLTKWRNGEEEPWLRDAPTHPLQQSLKDLERAYTNFFAGRTELPRFKKKGQGAGFRYPDPKQIRVDQVNCRVFLPKLGWVRYRKSRELAGDVKNVTVSMSCEKWFVSIQTEREVEVPISEGEVVGIDMGIVRFATCSNGKFVEPLNSFRKHEVALRKAQLELSRKEKFSQNWKKAKGLVQRIHARIANVRNDFLHKLSTTISKNHAIVCVEDLQVGNMSKSAAGTREMPGRNVRAKSGLNKSILDQGWYEFRRQLDYKLAWNGGWLIAVAPKNTSRTCPICHHVSADNRQVQAQFLCVKCGFEENADVVGAINILRAGLARLACQANEITRRQQEPTEALLAR

SEQ ID NO: 49346 - protein, 367 aa, unknown
  TnpB Polypeptide
MANIAYQYRLYPDPEQAALFVRTFGCCRKVWNLMLSDKIEYYASEKKMLQTTPAQYKKDYPYLKEVDSLALANVQLQLQGAFRKFFSEPNIGFPKFKSRKSSRASYTTNLVRKNIRISDRGIKLPKTGFVRAKIHRKAPEGYQLKSVTIFLDQTGRFYASVLYEYEDTSAFVPSEGMTHIGLDYKSDGLYVDSEGNACEMPHYYRQSEKQLARAQRRLSRKQKGSANREKQRKRVAKIQQRTANRRKDFLHKTSAAIAKRYDVISVESLNMKAMSAFLRLGKATMDNGYGMFCSMLAYKHPDVFPLDVAEEQHFPSSQLCSCCGYKNPVTKDLSIRKIRCPKCGTEYDRDINAAINIDREGVRLLTT

SEQ ID NO: 49347 - protein, 311 aa, unknown
  TnpB Polypeptide
  misc_feature (298)..(298): Xaa can be any naturally occurring amino acid
LKIENPFLKDVNAQSLQGMTKRVDSAFTRFFREKKGFPKFKSKKNPVQAFPVPQHYSVNFETSTVKLPKIGEIKAKLHREFTGDLRTATVSKTCTGEYFISILVENNEELPVKQTFSESTTIGIDVGIKDFAVHSTGEKIENPKYLKSSLKRLKVLQKRVSRKQKGSKNREKAKQRLAKLHERITNQRNDFQHKLSFRLVSENQAIALETLNVKGMIKNHHLAQAISDSAWSSFVTKLEYKAVWYGKTILRIGQFEPSSKICNVCGFHNSDLTLRDREWTCPDCKTKHDRDINAAINXKKFALIDQNLIGV

SEQ ID NO: 49348 - protein, 343 aa, Nonomuraea sp.
VIKKVADAYTSLRGLIRNGRLTGRRRRKAESKPIIFRPDAAHPFDDRCLSWLHDGRTISIWTVRGRVKNIAFTGSPDQLKTLAAYRKGEIDLLFRDNAWYLVATCEIPQAPPEADLGAWLGVDRGIVNLATTSDGINYSGEELTRYRRRMAKVRAELQARRTKSARRKLKRRAKRERRFATQTNHVIANEIVADAQRTGRGIAVEELAGIRDRVRLWPSQRATLSTWPFHQLGEFLAYKARRAGVAFVQVDPAYTSQTCPNPWCGLTGRGNRPTRDVFCCASCGFAGPADHVAALNVSRRAGAVWAFVNMPNEPAVESGLSASRAGQPDRTARRKPRAPALGR

SEQ ID NO: 49349 - protein, 402 aa, unknown
  TnpB Polypeptide
VRLRYNFRLYPTPGQVRVFARVFGCARVVYNDALLARRQAHNAGLPYISDAELSARLTAAKATPERAWLGEVSSVVLQQSLADLNAAYKNFFASIRGDRQGPKIGPPRLKTRKDHRQTVRFTVNARFKILPDGKLRLPKVGDIEVRWSRELPSEPSSVTVVRDTAGRYFASFAVETDPAVDIGRFPPTDTEVGIDLGLTTFAVLSDGTVIKSPQFLRRAERKLRRVQRADRRKAKGSRNKEKSRVRLARTHARVANRRANFHHQVSTRIVRENQAVYVEDLCVIGLARGRLAKSVHDAGWAAFTSMLEYKSVRYGRVFRKIGRFEPTSQRCSTCGVTDGPKPLHIRQWTCAACGTVLDRDLNAARNIVALGRRETQNACGGDVRRETDSATASEPGTLRGAA

SEQ ID NO: 49350 - protein, 401 aa, Cyanobacteria sp.
MLNLRYNYKIIPTKEQIEKIELNLCVCKSVWNHALAERKLWSNSRSCQINACSIQSEYIVPPFEYPTYHTQSANLTQAKKTNPFLKSGNAQAMQQTLRKLDRAFNDMRAKGKGFPRFKKRMKSFNLISNKIEVQGNKIKMPLLKEVRFVKSRNIPDGFKIKQVQIVKKGSGYYVNLALELDVDLPTPQPHGHAIGIDVGIKSMIATSDGLRVKRPKFLDHVLRQIELLQRRRRNKKRGSNKYLKLQKRIARLHEKVANKRKDYHFKLAHQLCTSSGMIFVEEINFTAWSRGMFGKQSLDMGLGQFFTILEQICAKTDTYFAKVNKDYTSQVCPNCGVNTGKKDLSQRLHICSECGYEQDRDVAAAEVVMKRGVAELVEALTAVGAPVVKQPSHGGLSGAIA

SEQ ID NO: 49351 - protein, 368 aa, Moraxella sp.
MKTLKLRIKDKHATQLNRLSGSVNFVWNYVNDLGYKYLQCTGKFLSAYDLNEYTKGSGELLGLHSQTIQAINETHTKSRKQFKKAKLNWRTNNPNSKRKSLGWIPFKKSAIKHPATRQSGKKALKSTLQLSLAKGQKLILDLWDSYNLSLYQINTCELVQGSRNRWYACITVKNYPKQTCGTGSVGIGLGLKDSATTSNGNKLQIKQTLKYAKDLAIAQRAKNKQRVKAIHAKIKNTRLDLIHKFTTQLVRDNALIVVGDVKSNQFNSKKGKLAKSVYDAGWFELKRQLEYKCKHAGCRLEIVNERYTTQTCSCCRQIDSNSPKGRAGLRIREWACAECGTWHDRDINAAKNILAVGLDRLAEEIPER

SEQ ID NO: 49352 - protein, 235 aa, Campylobacter sp.
VGDSLSSNKIDINRAVGIDMNINEIALSNGALLLTCSKSINKAKYSTTFKRLMRKQSKRVLKAKKDKIKLGSNFRKTQIRLNKIYERASNIKKDLAHKISNQIVKNFDLIVVENLKVKNMTKRAKLKNVKAKSGLNKSILDTSFYQFLSFVEYKAMHNGKVFTKIEPQYTSKACCKCGTIKENLTLKDRVFTCDNCGYVEHRDINASKNILDRGLKSFGLGTSLLDYKQEALRVS

SEQ ID NO: 49353 - protein, 404 aa, Phormidium sp.
MLNLTYSYRIYPGLDQEAQMLDWLEQCRRVYNYALAERKDWMNSRKCPVNACSIRQEYIIPADVPYPDYYKQQNALTEAKKRIPELKAVHSQVLQDALKRLDKSFKFYTERGFGFPRFKKLGQYRSFVFPQFKSNPVNGFEIKLPKVGAMPINLHRPIPDGFEVKQVRIVFKPSGWYAQLILQADISVPDVMPHGEPIGIDLGLEKFLAVSTGELVERPRFFVNLQSKLRWLQRQLRNKKKGSANYRKIQAKIRQLHEHIYNVRREFHFLTAHKLCDNAGMIFAEDLNLKATRRGMLAKHCLDAAWGSFLEILKWVCWKRGVYFAQVDPNRTSQTCPQCGAQTGKKELSERVHHCHECGYTTDRDVAAAQVVVQRGLAFVADGQSVRLPAEEGCLGTPFAKRSR

SEQ ID NO: 49354 - protein, 444 aa, unknown
  TnpB Polypeptide
MKPEPADRTPVIMIAAWRPRPLGRGGNAASPPRKCQWCSLVCSHVPVPAAPHNRPGSGAAGPLRPRPVPVEPRRRAARPLAPGPQERSGLPGAVPAAHRRPSRAPVAGRGFQTVQQQALRDFAQAMAAFFDPGNPAGRPSWRKAGRDEGFRITGRRGRQWDVRRVSRKVGQVWVPKAGWVRFRWSRAVPPEVKSYRVRMDRAGRWHVAFAAVPDPVPAPGNGQVVGIDRGVAVSAALSTGELLRCPGLTGRERIRLRRLQRRLARAARGSNRRGQVKCAIARLRARETDRRKDWAEKASTGIARRFDVIRVEDLQIGTMTRSARGTRENPGRNVRAKAGLNRGILRSGWGLLVRRLEDKAPGRVEKVKPHYTSQRCSACGQVDRDSRESQAVFRCTACGFACHADVNAAINIAAGHAVTARGGDGAARPVNREPHLLASLTGRG

SEQ ID NO: 49355 - protein, 388 aa, unknown
  TnpB Polypeptide
MHLQAGRVVQMIVTKAYKFRMYPNEKQRILINKTFGCSNLVYNKLLDKKKANPKLSKYDLVSFIPGFKQELEFLKEVDSMALIHTAHDVTVGYNKYLSGKAGMPHFKRKGVKVSYTTNCIRSSYKSKSYANIMVDMKNRTIVLPKLGSVKIRGYRNLKKFPFKIINATVSKVANKYYVSVVVEEDIKSKYAKTYHIVGIDLGIKSLVTTSSFESYGNVSSLKKHEKRIVILQQKLAKKEKNSKNYNKIKIKLERAYLRLANSRKKQAEEIVSKLLKENDYIVAENLQVSKMITESSSKSLRKNIIHSTFSLILTKLRQKCLWESKKFIQVNTYFPSSQLCSCCGHRNKEMQDLKLREYKCSECGNILDRDINASLNILNEGIKMAFGL

SEQ ID NO: 49356 - protein, 534 aa, unknown
  TnpB Polypeptide
VKAKPKATRKRTSQKRAKAFTGVQALLLFPSGEDHKATLDLMRRFSAAPRYAYNRLLEGWSREALKRENGPLCTFFRLNTRYADDAVMKAQALLDSARERGEDPRKVVFGGRRLFETLRRRHLSGKPLKEVKREWKEKRQGLLYSRGDKTKGGNLNLRLFVKDGALWLRINLGDGGYAHALIQTKHPNLSTLLQRVYASLPYNVELSLKEGKVYATFTWEEEPAPLVATKENGVLALDVNSDPYHLALALVSPDGNLRRHLTLSLEEVDRAPNKGAKELVLWKIAHEVVSLAEEHGVAVATERLKHLPKGRRGDGSGRAFRRKQHRFAYASLLRKVHSLAGKKGVQVVEVNPQDTSTIGMLKYAPQLSLSKDVAAAYVIGRRALGFKEKLPKGYGKLLQDLSFRDHVQGFYASRVQELRAKRSAEPNPYLRRRLSQELERAKRHLSLLSSLQGSPGSRREVTDGRNSPGVNPWRVHKVASLTRVGTFLPLLGREVPRDLSLLKPILFGGSWEGWRGGLGPHPGGGPECANVRST

SEQ ID NO: 49357 - protein, 534 aa, unknown; identical to SEQ ID NO: 49356
  TnpB Polypeptide

SEQ ID NO: 49358 - protein, 404 aa, unknown
  TnpB Polypeptide
MHKVRKLKIKDSELEEQLDELASDSADLWNTICTWYWRTVDRQGHWLSQGAMMRWHCKDHSDFHSQTSQAVADQFYSSIKSWHARDQKGKPPLDREKEWNKICWKSQCIKLRSDGKLRLSNGLGNEPVLLEWPVNEEPVYVEIGWNQGYEARATYKIKTEDRTTGDKVAGIDLGEKHLAAVAMKGSSFLLNGGRLQAIRKYQNQTKALLQEKISRKERGSNRWKKLVKSKNRQLNHLNNKITDLLHKLSRKLIDMCLERDVSTVVIGELKGVRDQVDYGQYLNQRLHQWAHRRFSDYIEYKAKQNGIEVEYIDESYTSQTCPRCENTEPLNKNGREFECSECGYEAHRDSVGAWNIRKKYVSEDADRSVSSCLPGAMASPSGVRFEPHLPCSSRSKDPCIASPS

SEQ ID NO: 49359 - protein, 235 aa, Halostella sp.
LHVGTKADAESEIPNGGDAEHSTVLGVDLGIEQIAVSSTGRFWSGDYLRHRRREYERIRGSLQQTGTESAHRTIERMSGRETRWVKDYLHRISKEIIEEAVVNDCDIIAFEDLTDIGERLPTGKKFQNWAFHRLYEYVSYKAETEGIEVRQVDPAYTSKRCSRCGSISDGNRPSQAKFSCQECGYQVQADYNAAKNIGIRLLRGRQKSSHGGATRHLALKSGTLSVNGEYSPASG

SEQ ID NO: 49360 - protein, 442 aa, Aeropyrum sp.
MKRTVTIRLLPDKDSEAKLKALCSLSSKLWNELNYARRRMFFETKRVDLKGTYREFYEKYKTLIGSATAQQILNKNNEAWRSFFSLLKAKKEGKTPPFMNMVSPPGYRKRDSRRILWTVLRNDQYRIEGDYIVVKGLGAIGSLRIRFSGRIHIIGKQGRAEIRYDADEKKWYMHISFEVEEKIIRDERVRVPMKPLGDGIAGVDIGINSLLAVYVDDGSALLVSGRPLKSISFYWRSKIARYQSTLNRCGLKTSKRLRRMYRKWRRQIKSYINWAVRNAVEWLYYRGVRRVVVGYPKHIAQKPGKNSKTSFEVVHVWSYGYLLRRLKEVAEEYGIEIEYVDEKDTSRTCPICRTHIGHKRISRGLLKCYKHNKVFNTDLVGAFNILSKGKPIALSPALSGVGVTRLRPGAGLNQAPAWDVALNLPAPERTLAPLGRGEVRCL

SEQ ID NO: 49361 - protein, 421 aa, unknown
  TnpB Polypeptide
MLTGKRIRLLPTSEQETLFRKSAGAARWAYNHYIDMQKETYTRYVASGGKGAKFIPEGEIRRHITRDLKPTSHQWLCEVGCNVVKQAVKDADRAMRGFFTKKTGFPKFKSRKRSKPSFYVNYESLRRMNGGFRGERIGFVRTSEPLPKLRDGEHYLNPHISFDGKYWYLSFAYDNHIIPPRTQKNGVSVGVDLGVKELAVCHGTDGTDTTMRNINKTRKARNLERRLRRQQRKAARQRAHNIDHYQTITGKDGKPARKPVWTRPLEECRNLNKTNRRIRLTQRKLDGLRDNHIHQMTAMLTKTKPARIVIEDLNVSGMMKNRHLADSIAKERFFEIRRQLEYKCRREGVRLTVADRFYPSSKTCSNCGNVRGKLTLRERTYKCEQCGLRIDRDLNAAINLAEYVPAAIGELKPAERYGKRK

SEQ ID NO: 49362 - protein, 249 aa, unknown
  TnpB Polypeptide
VKIVVQVKLLPDAGQAAALEATLRTVNEAACCVSAVAFERRVFREYALRKHAYGELKARGLGAQAAQHVIKKTCHAYATLRANIKAGNLGEPGSKRRVTAESKPIAFRPDAAQPFDDRCLSWQLDRRTVSIWTTVGRLRGMRFACSPDALKTLARYRQGESDLLHRDGAWYLYATCEVPEAAQHEPSGFLGIDLGIVNIATTSDGEVMAGRTLNRYRRRQRALRRKLQARHTTSARRLLARRKPGSLRT

SEQ ID NO: 49363 - protein, 436 aa, unknown
  TnpB Polypeptide
MAHHRGNNMDVKALSERNMLISKSMSETMIKRQSQECKVVTVKITNNKLNKTQKEALKMLFVEAKWIRNEMIGFGKENNIFDYEFKDSIQVMNKDKEFEMRERKYISAQQIQAVITEVKDNIKSLAKTKERGKRKIGSLKFTSEVKSINLKQYNATYKIKSETKIKVQGVPGDVKVKGLNQLPKNCDFANAKLLNKPDGYYIAITIYINKNELIDNFIPDTEIGIDMGVKDNITLSNGKKINVFIEETERLKNLQKKLHRQEKGSNNRYKTKKLIRKEYQKMGNRKEDISNKIVSELKSYETIYFQDENLVGWKNKKSLAHGSKKIQHSILGRVKSKLRNCDRAVMVDRYCPTTQTCVCGCKNKMTLDDRTYSCSECGYVNDRDTHSANMMILFGKESIGLEQTEFTPVEILASVAPLCGAVSRGRLNQEAASSLD

SEQ ID NO: 49364 - protein, 443 aa, unknown
  TnpB Polypeptide
MLKRKFTVVSQLHEANNREIIHYFESARFTYAKAVRQSFHIIKNTSTFNKAQYNSVLQSKFGILKRTANSIISDAQGRLNALKELKKFEKQQLEYKIQALEQLITQFQQRKLANVNKIRQKLPINLVKHRNLKRKLFAKKAKLNRLTQKYNNLVYQITTNTYKLCFGTKRLLQSDFEAFLEQRDSQMSFVGSKSEASGNQMFQLTFNSKKNQFQIKLRKDIGGFKSSEDKYAYGQVYFNHHKNIIKHILRDKNSPLSFKIIKKNNRYYLYCTFELQVESVEFKTRSTYGTIGLDFNKGFVTLSETNQYGHLVQTQLIPYRFKSGHKTTTDLQQIAKHVITLALETGKDICIENLDFKKTKSKTQRQQNKKYNEMLHSLAYRQFVDSIEQCGYRHLVCIKRVNPAWTSWLAQRNYCPTMKLNIHIGASYVIARRGQGFTETVNH

SEQ ID NO: 49365 - protein, 374 aa, unknown
  TnpB Polypeptide
MYAKAWEELSEITDTKKRFNEAEHLVHTTKKNQAPYDFDRYFPKLPSYLRRSAIQHALGSIASYETRLELWKNGTLSGKPKLTLENHAMPVFYREVMYREAGETENAAYLKLYDGHDWKWFRVRLLHTDMEYLRKHWMGKKASAPTLEKRHHKYFLRFTYTEETKLSRTAVKDQTICSVDMGINTDAVCTIMQEDGTVLGRRFLNFPSEKDRLYRVLGRIRRFQRQHGSGQSGSRWAYAKRLNMELVRKVSGAITAYAWEQGAEVIVFEYLEMQGKKQGGKKQRLYMWRKRDIQKQCEHQAHRRGIRVSRVSARNTSRQAFDGSGKVARNPENHSLCTFTTGKQYNCDLSASYNIGARYFIRELLKSLPETGRS

SEQ ID NO: 49366 - protein, 400 aa, unknown
  TnpB Polypeptide
MLIYEYKLDGNKPQYQAIDEAIRIVQFIRNKCLRRWMDGRGVDRNDLQIYCAVLAREYSFATCLNSQARQASADRAWAAIARFYENCRNKKPGKKGYPLFQHDNRSVEYKTTGWKLEPDGKHITFTDGCGIGRLRLVGNKGQRLEEFPVKQIKRVRIVRRADGYYCQFAVEAERRVEHHSTSKQVGIDMGLKVFLTTSEGETVANPRHLRKAEKRLKKLHRRLSRTQKGSANRKKARKALARGYLKVQRQREDFARKTASTLITSCDLIAYEHLQIRNLVKNRRLSKSISDASWGRFLMWVKYYGMMHAIPVIAVEPAFTSQDCSACGTRIKKSLSIRTHVCSGCGLVLDRDHNAALNILYKAVDRTGGQSGTGGQPQNASGQTATTRRSPQRKTGKRAG

SEQ ID NO: 49367 - protein, 406 aa, unknown
  TnpB Polypeptide
MLKIRKAYKVRLKTNNNIENKLVRYCGSSRFLWNKCLAMNLDRLEKRQSILWYNELAYWLTLWKRSEEYSFLMECPSQVLQQKLKDLERAFRDCFDKNQPMKRLPVFKKRGLGDGLRFPQGFKIDNRRLFLPKIGWVGFYKSCPIKGTVKNITISHRGRHWYASIQVEQIIEIGKHPSDSEIGIDAGVKCFAALSDGTLIEGVNSFRKHEDILVREQRKLSRKKRGSNNWKKQKRIISGLHHTIAHVRSDYLHKLSTEISKNHAKVYVEGLQIRNMSASARGTIEKPGSNIKAKSGLNKSILDQGWFEFKRQLDYKLYWRGGMLTEVNPRYSSQRCSFCGYTAKENRASQALFRCMACGYEENADINAAKNIRTVGQTGMACAANRISGRQQEPAVNREELLPVAS

SEQ ID NO: 49368 - protein, 392 aa, Thermosynechococcus sp.
MKARYRYRFYPTDQQRQRLAQLFGCVRVVWNDALAICKQSDSLPKTSELQKLVITQGKKTPERQWLSDVSNVPLQQSVADLGVAYKNFFDSIKGRRKGKKINPPRFKKKTERQSARFTTYGFSIKGEEVYLAKIGNVRPIWSRKLPSKPSSVTVIKDAANRYFLSFVVEIDPVHQPASNPSIGIDLGIKAFATLSTGEKIDGPDYSKLDKKIRRKQRKLARQVKGSQRREKTRLQIAKLHSRISDIRRDFLHKVSTRVVIENQVIALEDLNVSGMVKNRKLARAISLQGWREFRVLVEAKCNKLNRDFIVIDRWEPTSQTCSKCGFKWGKVDLSVRSVVCLNCGAEHDRDENAARNIEKVGIGHCHDYKWTQRGSKTTSVASPSEASRIIAL

SEQ ID NO: 49369 - protein, 307 aa, Thermosynechococcus sp.
LPIKTSSIKLKVGEKAKRSTLLDLTERQSARFTTYGFSIKGEEVYLAKIGNVRPIWSRKLPSKPSSVTVIKDAANRYFLSFVVEIDPVDQPASNPSIGIDLGIKAFATLSTGEKIDGPEYSKLDRKIRRKQRKLARQVKGSQRREKTRLQIAKLHSRISDIRRDFLHKVSTRVVIENQVITLEDLNVSGMVKNRKLARAISLQGWREFRVLVEAKCKRLNREFIVIDRWEPTSQTCSKCGFKWGKIDLSVRSVVCLNCGTEHDRDENAARNIEKVGIGHCHDYKWTQRESKTTSVASPSEASRIIAL

SEQ ID NO: 49370 - protein, 239 aa, Thermosynechococcus sp.
VIKDTANRYFLSFVVEIDPVDQPASNPSIGIDLGIKAFATLSTGEKIDGPDYSKLDKKIRRKQRKLARQVKGSQRREKTRLQIAKLHSRISDIRRDFLHKLSSRVVIENQVITLEDLNVSGMVKNRKLARAISLQGWREFRVLVEAKCTKLNREFIVIDRWEPTSQTCSTCGFKWGKIDLSVRSVVCLNCGTEHDRDENAARNIEKVGIGHCHDYKWTQRESKTTSVASPSEASRIIAL

SEQ ID NO: 49371 - protein, 387 aa, Lactobacillus sp.
MDQIIKGVKLRLYPNRGQKDKLWQMFGNDRFVWNQMLSMAKTRYQNNPRASFINGYGMDTLLKVLKNEYPFLKESDSTSLQVVNHKLNQSFQMLFKHRGGYPRFKSRKATKQAYTGKSKVSVVAKRCLKLPKIGYIKTSKTNQLVDTKIKRYTVSYDATGRYYLSLQVEVPAPELLPKTGKVVGLDVGLADLAISSDGVKYGTFNAKWLDKQVNKWQSAYAKRKYRATIAVRQWNHNHKTVKEELNDYQNWQRARRYKARYQAKVANKRQDNLQKLTTELVKQYDVIVIEDLKTKNLQKNHHLAKSIANASWYQLRTMLEYKCAWYGRQLIIVKPNYTSQICSSCGYHNGPKPLKIREWTCSKCGVHHDRDINAAINILHKGLKANG

SEQ ID NO: 49372 - protein, 375 aa, unknown
  TnpB Polypeptide
MITYKYKLYKTERTKHLDKMLREASFVWNHALSLQKRYYSLYGGYISVNQMQKHFSVRLKPKLLHSQSVQEIIQRLDTSYQRFFKNISTRPPKFKRAKDFTSFVFKQGGYTLNGNVLTINKLHKRYKFSKSRDYEGKIKRIAVKRSKLNEYYVIIITDNNPNTYEKTHNGASVGIDFGLKTYLTMSDGTSFNNPQFLKEDLPELRRKSMLLSKTKKKSNNREKRRIELCRLHESIQNKRNDYQWKLAHELCRKYDYIFIEDLSLTGMTKLWGRKMNDLAHASFISKLQYVATKYRVKVHKIDRWFASSKTCECGYVNNSLTLSDREWKCPECELINDRDVLAANNILRRGISELWSEDKTALAAPHVCTQESPCL

SEQ ID NO: 49373 - protein, 462 aa, Micromonospora sp.
VRRVKVVQAYRFALDLTPAQEREVLANAGAARVAYNWALARVKAVMDQRAAERTYGVPEELLTPTVGWNLAQLRKAWNQAKPDVAPWWPECSKEAFNTGLDALACGLKNWSDSRTGKRKGRRVGFPRFKSRRRSTPSIRFTTGAIRVEPDRQHVVLPRLGRLKLHESARKLARRLEAGTARILSATVRRDGGRWHVAFCVEIERADRAPWRPRAVLGVDVGITHLAVLSTGKMIPNPRHLDDAAKRMRRLARRMSRRVGPDRRTGQRPSQRWERARRQVARAHARVANLRRDGLHKLTTRLARKYGTIVVEDLNVAGMLRNRRLARRVADAGFGEIRRQVTYKTGWNGGRLVVADRWYPSSKTCSACGTVKAKLALSARTYKCTSCGLVLDRDLNAARNLAAIAAEATTAGSGPVAGRGADHKTRPGGPVAVKRQPGTAQAGETGTVPPSGGTADHVLTRAH

SEQ ID NO: 49374 - protein, 373 aa, Serratia sp.
MKRAYKFRFYPSTEQIQLLAHTFGCVRFVYNFILNWRTDAFRQRKEKVSYAQASARLTILKRTPEFAWLNDVSCVPLQQCLRHQQTAFKNFFEGRTSYPAFKSKRHKQVAELTASAFRYREGHLYIAKSKTPLNIRWSRKLPSSPSTVTVSKDSAGRYFVSCLCEVQPEPLPVTSSIVGIDVGLTRLLVTDSGFKADNPRNTAKNAKRLALLQRRLSRKQLGSKNRTKARQKVARLHAKNADCRLDNLHKLSRTLINENQVVCVESLSVKNMMRNPQLAKSIADAGWSELIRQLRYKSEWAGRRLIAVDPFFPSSKRCSCCGYTMQVLPLNIRFWLCPKCQSHHDRDINAARNIKAAGLAVLAHGATVNPQVA

SEQ ID NO: 49375 - protein, 394 aa, unknown
  TnpB Polypeptide
MELTKTYKYKLRLTKTQEVVVQGWIHTCRAIYNLALDTKIYAYKSNKISLSCYDLQKQVTELRSCGDFDWIKDVPSGSLQDVLERMDKAYKKFFSGGGFPKFANRDRYHSITFKSVEQIGKNRVVLPKLGSVKFFASRVMQGDLRRATITKEIDGYYISILTKEKVDVKPAIFHSEKQAVGIDTGITYFLVTSDGEFVENPHFLKTQQKQMRILQRGLARKKKGSSHYEEQKVKIAKLHNKVKRQRLDFLHKTANKILAYDFISAEKLQLRNMTKSAKGTVEEPGINIKQKSGLNRSMLDLGLGIFYDIIRYKSLWQGKVFVQIPPQKTSNTCSVCGFSYSGNRRSQSEFVCLKCGHSENADYNASQNIKREGIPYFRKRETTVCALEKNLATF

SEQ ID NO: 49376 - protein, 396 aa, unknown
  TnpB Polypeptide
MLKHLRTIREGTMEKQYRFRIYPNEKQKIQIQKNFGCVRFVYNYYLEKRIKAYQDSKSNLSLGECGRDLTVLKKIQGFEWLAEADDNSLRYALRDLDFAYKSFFRGLKQGDRHSNFPRFKSKKETRQSYRSKNNTVRQSISIYENKIKLPKLGFVNCRLSKKIEGRILSATIIQVPSGKYFVTVCCTEVKSSSLAKTHAVTGIHMGINTLASLSNGQQIENIRALKKAKGKLARLQRQLSRKPKGSKNHEKSRIKLAIAHEKVANQRNDFIHKLTTQLVREYDLICVRKEPFAEKVKYPWYSKHAPDAGWGTFVRQLEYKCKWYGKELVKVSGQHPSVQLCSSCGYRNQEVKVKKTSVRWTCPSCDKRHNRAINAAVNILAEGIRVRLDRPEVKPG

SEQ ID NO: 49377 - protein, 441 aa, Streptomyces sp.
MQLRYSYRAYPDASQRRALARAFGCARVVWNDCLRDRREAHAAGLPYVKSADLSRLRITQAKRTEERAWLAEVSAVVLQQSLRDLDAGYKNFFDSLKGKRRGPKVAPPRYKSKKDTRQSIRLTTNAFSVRDDGTVFVAKAGGIKVKWSRPLPAAPTSLTVTQDSCGRYFLSFVVDTEPDILPALDTEVGIDLGLSTFAVLSDGTRIHSPKFLRRAEKKLKRLQRELSRKAKGSKNRAKARIKVARQHARVADRRRDWHHKASTQIIRDNQAVYVEDLAVSGLVRTRLAKSVHDAGWSAFVGMLAYKAVKHGRYFGKIGRFEPTSQVCSTCGVKDGPKPLHVREWTCRECGTVHDRDDNAAQNTLAAGRADRLNASRSAGKTGTKVPAQRGEAGTHRDGHTTVAGTPDLQAGGDVKPGIPTSAGTLRAFSDGSHGPGAEYSS

SEQ ID NO: 49378 - protein, 280 aa, Streptomyces sp.
VTKDACGRYFLSFVVETEPDILPELDTEVGIDLGLSTFAVLSDGTRISSPKFLRRAEKKLKRLQRDLSRKAKGSKNRTKARIKVARQHARVADRRRGWHHKASTQIIRDNQAVYVEDLAVSGLARTRLAKSVHDAGWSAFVGMLAYKAVKHGRYFGKIGRFEPTSQVCSVCGIKDGPKPLHVREWTCKECGTVHDRDDNAAQNTLAAGRADRLNASQSAGKTRAKVPAQRVEAGTYRDGHTTVAGIPASRPAAPGAGSESRRPVAGSGHAHGVLPPMSWS

SEQ ID NO: 49379 - protein, 402 aa, unknown
  TnpB Polypeptide
MVSGGEGLLTLSTGMRVSPEPEAIELLRRYNVSLNYAINRILSLDLRSIGSVHNALYRELMEWFGLPSRTAVDCYRDALANAKAWRNNPRKGRRPRVRKLSMLLHPGSGYRVKEGYVEIIGGIRLKIIGWDRRYDQYENGEARLVHRGDKMMLWISKRIPKPQPYKPRDAIAVDINERKIVYGDDKINKERDTEIDEAHRWKKLAEDLQKKYSSTRYPAWRRRRGILNRIRSYHRKARNILEDWARKTSLEIVRFAKKLGYAVAREDLTGLINTLRKIKNKDHRTKLIIMGYARLGRWIDWQAEKHGVPLAIVNPNGTSSECPQCDSKLEESGYRRLRCPRCSFEADRDVIGKLNIRKRALKILGINPSGGSLTTPTAPQMTDVNPNRWGEPMNRPKGTLAL

SEQ ID NO: 49380 - protein, 383 aa, unknown
  TnpB Polypeptide
MRSHKYRIYPNKQQEQALNSTLTTCRYLYNNALDQRIQHYKTTKKSLSYADQANWLVKNKNQYQKQVHSQVLQSTLKRLDKTFKNFFNGLKKKKLVGFPRFKNEQRFRSFCYPQSGFKLKSQHIELSKIGNVRIKLSRPVEGIIKTCTVVRDIDEWFVVLTCETPAYLGPQSTNPTVGVDVGISKFATLSDGSIVDNPRTLKHSAKKLAKEQRILSRRKKGSKRRIRQRIKVAKVHRKIRRQREDFLHKTSNWLIRNYGTICFEDLNILGMLKNHNLAKHIADASWSKLIQFTEYKAASAGVQVVLVNPKNTTQNCSGCGEKVSKTLADRIHCCPHCGLEMDRDENAARNICTAGSAGTYAQGDGVRQNTLPSGTSILQSSLN

SEQ ID NO: 49381 - protein, 392 aa, unknown
  TnpB Polypeptide
LKQPEAWQTPLEEVTPIQTTTHLKAFRYRLRPTKAQEATLLEQLRLCRNLYNAALQERRDAYRKAGVSLTAYDQMKYLSEIKEALPEYKGVYSQVLQEVLKRLEKAFKAFFRRVKAGQTPGYPRFKGAGWYDSICYPQSGFSVAGDVAYFSKIGNIRLRLSRPLEGKLKTATITRDCGEWYVSYVCEVESTPLPATGNQVGVDVGTTYFCITSDGEFVENPRHFQRSMKALRVKQRSLSRKKRGSNRRKKAKAAVAKLHRKVARQRLDFHHKTAAKLIRENDLVAHEDLNVSGMGKGNLARSIHDVGWGQFFSLLSQKAEWAARTVVAVAPRYTSQACSQCGHTCKANRVSQSRFVCQSCGHTANADLNAALNILARAVPSVVNVAPSASVH

SEQ ID NO: 49382 - protein, 168 aa, unknown
  TnpB Polypeptide
LRRQKLENIVHGERKSIQIEKPKGNKTASVDLGINILASVVVDDGTWLLYKGIRAKEDYFYLEKRISEVQSLADRTKNIGEYDAYEELVGEKRRLLRKLRRRFAHLHRNLASHLVKTLHELGVSAVYLGYPYCISQDKFTVNVWSYRKLMDAIELKGSRVRYESVRSC

SEQ ID NO: 49383 - protein, 441 aa, Sarcina sp.
MKINSSYGVEIRKAGGGLSITLKIYREAVRVLSLFYDTVWEELSAVEGKMRRFNFAEHLVHSTKKNRAVHDFDMRFPKMPSYLRRSAITHALGVVASYRTRLAQWEEGGRKGKAPVLGERTHAMPVFYRGDMYREGEGDTACLKLYNGKDWVWVKAVLLHTDAEYLRKHWTGVKASAPTLEKRHRKYFLRFTYEEKREFDDKPVKEQRICAVDLGLNSDAVCSIMEADGTVSARKFIDFADEKDRLWKTLNRIRKRDREHGPKSAGSLWRYAVRCSAELSKKTAAAIVFFAQENHADVIVFEHLDMKGKIRGKRRMRLHMWKKRGVQETSAHMAHRKGMRIARVCAWKTSALAYDGSGKVERDPDNHSLCTFTNGKRYNCDLSASYNIGARYFIRELTKPMPATAWSVLEAEVPAVRRRSSCVLADLVRLNEAMRENGWTA

SEQ ID NO: 49384 - protein, 384 aa, unknown
  TnpB Polypeptide
MRTFRYKLQNHKRNRHIQKDIYIMAEVYNHFVALTRRHYKIYGKCEGYKRVSYTRMSAHLTKLKKLPKYSHWHTPYSWALQESLKRLDYGYNRFFKKLAKRPPQFKKYRTYKSMSFAGKYCPIEVLDKVDGCPTAKVRLNGRWYKLWYSRRIQGTVKRATVKKDIVGDWYITFTTDDEGLDPEAKTGIAAGFDFGLKTFLTCSDGTKYQSPEFYRKSIRALQKAHRAFSRKVKGSHQRYKAWKHLARQYRKVTNQRADHHWKLALELVRKFDVCFLEDLNLDGMKRLWGRKVSDLAFGEFTQKIEWQATKRVKEVKAIGRFEATTPICHFCGQRTDIELKVREWICHNCNTTHDRDVNAAINIAQVGASTCSVGNVSLAIASYS

SEQ ID NO: 49385 - protein, 417 aa, unknown
  TnpB Polypeptide
VKRLQAFKFEMMPDGEQQRDMRRFAGARRFVYNKSLAIQKADLGFCQNYAAGGKFIGYVDMANRLPEWKKEFEWLKESPSQALQQSLKDVERAFKNFFEKRAGFPRFKRKGTGDSFRFPQGFDVDQGNSRIKLPKLDWIRYRNSRDIPGTAKNITLSQTGGKWFASIQTEREVEQPIPVATSAIGIDMGIVRFATLSDGSFIAPLGSFKKHETRLRRHQRKMSRKIKHSKNWQKAKRKVQKIHTRISNARKDFLHKASTEISKNHAMVAIEDLKVGNMSRSAQGTVETPGKNVEAKSGLNKSILDQGWFEFRRQLDYKLNWNGGLLIAVPAHYTSQTCPACDHIAKKNRQTQAKFECVDCGHEENADVVGAKNVLARGHRVAACGEDGSGLARKRKTKPASVKQEPTEVTMCEETHV

SEQ ID NO: 49386 - protein, 395 aa, unknown
  TnpB Polypeptide
MNKALDKLFAIVYNIFRNLNIAFRKVVNIMVNKAYKFRIYLNKQQKEILAKTFGCCRFVYNHYLAKKIELYKASKTTLSYNQCCGDLTQLKKELDWLKEVDKFSLQNSLKDLDNAYQKFFKEHSGFPKFKSKKTHSYSYRTSFTNNNIEFCGKHIKLPKLKMVKIRDKQIPQGRILNATISQEPSDKYFVSLCCTDVEVKSLEKTGSMIGLDLGIKEFCITSNGEMIENPKYLKKSLNKLAKLQRELSRKSKGGSNRNKARIKVARQFEKIANQRKDFLQKLSTQLIKDNDIICIEDLQVKNMIKNHKLAQAISDVSWSEFVRQLQYKADWYGKQVVKVDKFYASSQTCSVCGYINKETRNLSVREWTCPCCNTHHDRDINAAINILNEGLKQIA

SEQ ID NO: 49387 - protein, 387 aa, unknown
  TnpB Polypeptide
MLKAYKYRLYPKGKSEQQILRNLGSARWVYNWALQRKIETYRQNGKSISGFSLMRELTALKQQEETSWLKEVDAHSLQKAIIHVEAAFTRFFREKNGFPNFKSRHGRQSFKVDTTVNCKFDENKIKLPKTGWLKCKFSRTFDGEVRHAVVSRETTGKYFVSILVENGIPIPRKSKPDISQAVGVDLGLKDFAVLSTGEKIVHPKCLKKYEIQLKTLQRKLSKKQKGSNRRRKTKTRLAKKHEKVRNVRSDFLHKLSTQLVRENQTVCMENLNVSGMLKNHHLSKSIGDSGWSEFRRMLGYKCEWSGKHYIEIGRFDPSSKMCGKCGHINRGLKLSDRNWTCPNCSAILDRDINAAENIVWFAFREQNLITPTDCREVLMEGARWGSL

SEQ ID NO: 49388 - protein, 354 aa, unknown
  TnpB Polypeptide
MIIRELKLKPTKKQIQTFNEWLNILTGVYNFGIRKIELNSKDKIYFSKFDFHNLCSDHSKKLGIPSHVIQATLEKSYNSWEKCFKKQAKKPKLKSIHNKIRSIPFPDVLKRSRISNNKIDIPGIRKVKYFKQQIPEGQIKNIRIIKRASGWYCQLCIDTDHLFTVKETTEKVGIDTGFKTLATLSNGIKYDNKRVFIQGQQRLAQAQRGKNRKLTAKLHERIANRRKDYNHKVSREIVENYQEIYITKDNLRGQASIFGKSVTDAGIAQLRNFIIYKGDTHGRKVKLVDSKNTTLTCSNCGFLTGPKGLSGLAVRNWECCICGNTHDRDINSAMNILNSGLGYNLVNLKPLKGN

SEQ ID NO: 49389 - protein, 479 aa, Bacillus sp.
LENEYRTYQIIIKKGHKLYPYFANLCSNGKNLYNTTNFYIRQVYTALKQEKEWQPLQQEVMATISNNIDKMNENQRKCWEKKMKKEMAKPEEERKEIKLNLFDLPTKEHSFLGYNFLDCLFKTMKQQDYCSLPGQINQQVIRNVIQNWQSFFESLQDYKLNPEKYKGRPKIPRYLAKDGQKEITLSNQICKMVDGKYLRFPKTKSRMNTGKLASNNGKLQQVRVVPKYGQYVVEIIYLLGEKKEINAKLESCMGIDLGLNNIATIVTNTGITPVLFNGGRIKSINQWYNKLRAYYYAVLRNGKNTNIGAYYSKRLLKLDSKRNNQIKDLFHKISCNIIKMAKENEIDTIIIGKNAGWKQEVNLGKRNNQNFVQVPHSILIKLLMYKAHAEGISVMITEESYTSKASFLDEDFIPTYKVGDEQHVFSGKRIYRGLYRSQNHILIHADVNAACNIVRKVVPKAFANGIAAVCSQPHVVNVH

SEQ ID NO: 49390 - protein, 392 aa, unknown
  TnpB Polypeptide
MLKAFRYRLNPSASQAELINKHIGCARFVYNNALAFKQSEYAKDKTNHSWYSLVKRLPDLKKENEWLKEVNSQSLQQSIVNMNTAFENFFKGRADFPKFKKKGKGKQSFNIPQSIKIDNDKLIVPKFKGGINIVLHRPIKGEIRQATISRTPTGKYFVSVLCETGDVEKQPKPVNKKTTVGIDLGIKSYLVASNGKEYDNPKYLRKAQDKLKYNQRQYSRHKGTRRKYKVALLHEKVANQRKDFLHKVSTELIRENQSIALEDLNIKGMVKNHCLAGSISDAGWGMFVAMLEYKAKWNGVNILRIGRFEPSSKTCSECGYINKELTLKDREWACPECGSVLSRDFNAAINIKNFALNNHLCTEHTLKNHGTLPSLEGALTHEAHPIAFGVGG

SEQ ID NO: 49391 - protein, 361 aa, unknown
  TnpB Polypeptide
MLETHRRLYNECLAQRKTAYDTSKKSLKYTEQSAWYKNERITNQWYAKLNFSSAQATMRRLDKSFQNFFRRLKTGEKPGYPRFKARGRFESIEFPKHGDGIRLNNNRLRVQHIGNLKVKLHRPVQGTIKTISLKYEGDKWYCIVSCDLGDIQVPKNNKPAIGIDLGLEHFLTTSDEEHEPNPRFLKHELPELHRASRAVSRKKKGGKNRRKAVKKLRKTHARVRNLRRDFHHKTALKLVNRYGFIAVESLTVRGMVKNRRLSRSISDAGWTGFKNILKHKAEKAGVEIVEVDPSWTSQICSGCGQLVQKELSERWHECSCGCSLQRDVNAARNILTRGLVRTEPAGLNVSVSLHVPRSRLL

SEQ ID NO: 49392 - protein, 368 aa, unknown
  TnpB Polypeptide
LKAYKFKLKMNQTFANQCERTLDGCRELYNAALQERRDAYKTCRTSVNFHKQALQLPEIKLIREDIDGIHSQVLQATLRRLSKAFDAFFRRVKAGDQPGYPRFKGKYRFASFCYPQSGFRLIGDKLTLSKIGSCRVRLSREIEGRIKTCTIKRQADGWFVIFAVEESQSRFIPKTGDATGIDVGLESFATLANGEVIENPRFLKKAQRAIKIAQRKVSKKKRRGANRRKAVKILARKHLKVANQRADFFHKLSHQLIAEYDVIAVEDLHIKGLVRNHHLAKSISDAAWGSFIQTLSNKAASAGRRVVKVSAAYTSQDCSQCGNRVRKSLSQREHRCIGCGFVAHRDHNAAINIQARAVPLVRVNAVTH

SEQ ID NO: 49393 - protein, 379 aa, Turicibacter sp.
MILSLKIKLHPTKEQEQLMWQSAGVSRYIYNWGLALKKQKYEEENINLSISDLRKELTQFKKTSGFAWLNTPSADGGREALRDLGDAYKKFFKKQGGYPKFKKKGKCETSFYHDPRKLKVNDDYVYLEKIGLVKMSDEGRLPKGNYKKDKIKVTNPRIKHNGRYWILTLGIEVKDEPVELTNVSLGIDVGVKDLAVCSDGQVFKNINKLRTIKKLEKRLKRLQRQVSRKYEMNKQDNKFVKTKNNIKLERQIKLIHLRLRNIRNNHLHQATNKIVKTKPSRLVIEDLNISGMMKNRHLSKAVQQQKLYEFRRQLEYKTKKYGIELVLADRWYPSSKTCSSCGTIKSDLKLKDRVFKCNCCGLEMNRDYNASINLSKYNQ

SEQ ID NO: 49394 - protein, 250 aa, Micromonospora sp.
VAYTGSPAQLKAVASSAIGESDLVHRDGMWFLYASVEVAEAPSYEPDGFLGVDLGIANIANDSDGNRYAGTRLNGYRRRQLRLRARLQQKGTKSAKRLLARRTNKEARHAANANHRIAKTIVTEAARTGRGIAVEDLTGIRERVRLRKPQRVTLHSWSFHQLGGFLAYKARRAGVPLVQVDPRYTSQTCHGCKHRDKRNRPDQETFTCRSCGVVAHADRNAALNIAERGVESWGAVNRPHVASPRSQRGV

SEQ ID NO: 49395 - protein, 384 aa, Thermofilum sp.
MASPRGNGKLAVEGFRVLKFEAELPEELREFIKEVYQPRASLRFWQRLLGLVGEELEVAWKAVPWAYRKAFNDMIVPSTMPKRKSYLRFPLMSYTLKHHGAGLQGKELIIRLFRRAYSIPLPERGLGWLRMQEDACRESGGKLTRYVAVKSDGQVSVVLHCSHSLSAEELLENLEAIAVVDINSSHGFYFLAYDLRNGSFTIRRFKVPEVNWGRIKELQQKAAKSRKPGAWAAARCALRKAYRRRRAALLRAVAEVVKRLKGRNAIVFIDVPFDESLRNSGLQRTLRSFAKRLENVLGFHGIPVIERTLPSRRCPLCGGKLEEVRKRGRTRVMHCTGCGVEFERDSVPALHALKLFIEEAEVEELAERLAKRYGLQGVQRLQSG

SEQ ID NO: 49396 - protein, 423 aa, unknown
  TnpB Polypeptide
MRGYATPAERHAKAARLQVLQARLAGVHRRLEAGTVSVVRGGKALLRKRGSLTRAGVTDAWWRREWESARLFLTADGEKDKAWGNETIRWNPGEGWLEIKLPAPLARLANRPHGRYRISAPVGFSYRGDEVAAQAASGAVRYDISHDPARGRWYLDASWKAAPAPVLLLDELRATPVLAVDLNHGHIAAWAVTPGGNPVGPPVTIPIELAGLPSATRDGRLRAAISSLIRLARQGGCRAVVIEDLDFADAREQGREHHGTRPSRGGRGRGFRRLVSGIPAGKFRDRLAQMTSNAGLAVIVVDPAYTSQWGREHWLAPLRDHSHPVPASGHHAAAVVIGRRALGHRARRKAGVTGGGQRTSRRRATPGAPAARPTSRNGRPRQAQRQPPRRRKTATANRTRPPDQATQDRPGPPATQDHVLLAQ

SEQ ID NO: 49397 - protein, 402 aa, Salmonella sp.
MKRLQAFKFQLRPGGQQEREMRRFAGACRFVFNRALALQNENHEAGNKYIPYGKMASWLVEWKNATETQWLKDSPSQPLQQSLKDLERAYKNFFRKRAAFPRFKKRGQNDAFRYPQGVKLDQENSRIFLPKLGWMRYRNSRQVTGVVKNVTVSQSCGKWYISIQTESEVSTPVHPSASMVGLDAGVAKLATLSDGTVFEPVNSFQKNQKTLARLQRQLSRKVKFSNNWQKQKRKIQRLHSRIAYIRRDYLHKVTTTVSKNHAMIVIEDLKVSNMSKSAAGTVSQPGRNVRAKSGLNRSILDQGWYEMRRQLAYKQLWRGGQVLAVPPAYTSQRCACCGHTAKENRLSQSKFRCQVCGYTANADVNGARNILAAGHAVLACGGMVQSGRPLKQEPTEMIQATA

SEQ ID NO: 49398 - protein, 239 aa, unknown
  TnpB Polypeptide
MSKEEKSQKKKLAKQLAACRTEQGLSKASLEHYLKVCGKQFSKLLSSQQVQAEADRVWCGVERCLFGNGKELHFKKLMDFDTIGGKSNKNGARFDLDAMHVNWLGLSLKCYLPKSENSLSYVWESLKGKISYCNIKRLMFSSGWRYYTEIVVSGAAPTRVSIGTSTMGIDPGVSTIAGVSEDACVLEELAPNAIQYEKRIKRFLKVWIALEESVTQISITKMELSIVLIVIHGNTPKTM

SEQ ID NO: 49399 - protein, 376 aa, unknown
  TnpB Polypeptide
MIRSYKFRLYPNKLQDTEMRKHLWISKNLWNELLSFSKEQYQNHGLFPTKRTLQSMSKVTGLFSQTRQEVSHRVFESIMRVFKLRKKGVDCGFPRFKSSDRMKSLYYPQAGFKLGIKLKVTPFGELSIVKHRKIKGDIKTLSLKREPTGKWYAIFTAERDAKVKKNRGKAIGIDLGLKTFATLSDGKIADNPRHLKEHEDKLAFLQRNLSRCKKGSNNRFKARHKVALLHEMVVNTRKDFLHKLSHSLVSRYSKIAMEKLASKEMSEDGLGKQINDAGWGMFANMIRYKAEEAGSKAVFVDPKYTTQECNRCGTLSKKELCDRRHDCPSCGLSMDRDLNAAKVILKRATAGYAGCNACGVEAIALSMNQEAHTIHG

SEQ ID NO: 49400 - protein, 415 aa, Haloferacaceae sp.
MYYAYKYRLKPSDAHREELDRHRDICRQLYNHALYRFNQIPKDAGTLNQRVRSVRDELPALKVWWDGLSDVYSTVLQTTVMRIEQNIKSLGKLKQNGYGVGHLTWKPPREFRSFTYSHSGFKLDKKGGQTVLSLSKLADVPIRLHREIPDDAKLKQVTLKKEPTGEWFATFGVEVDREPPEPPENPGRCVGIDVGILSYTHDSDGFSVGPLDLSEERERLEREQRKLSRKEHGSANYRTQQRVVARRHADLKRKRRDFLHRLSAYYAREYDLVAVEDLDAKGLMELPSNSRNRASASWGTFLRMLEYKCDREGTHFVAVDPRGTTKECSQCGVSTDKPLWVREHSCPSCGFEADRDANAALNILARGLDHVGVVHSDSMPVETALATGTTAVPAQRVMEAGSPALTERTAQAVNE

SEQ ID NO: 49401 - protein, 422 aa, Moorea sp.
VKHKAVKVRIYPTQEQVQVLAQHFGCARWWWNYALNQCIETYKETGFGLKQSALNSMLPKLKKQKETEWLKDCYSQVLQSVSLNLSRAYQNFFEGRAKYPRFKSYHHRQSIQYPQNVKQVGDCLKFPGKLGIVKAVIHRPLDGEFKTVTVSKTPSGKYYASVLMEYEGDGVKLLKNGGALDLGEFNSPRSSAPKVIGIDLGIKDLAITYDGEKTSKFSNPKHLAKYEKKLAKKQRIAARKKKGSSGRKKARKIVAKVYERIGNVRQDYLHKLSRKIVDQNQVVVVENLNVKGMVRNHKLAKAISDLGWGTFVNFLSYKCEKEGKVLVEINRWFPSSKTCSNCHYQIKELPLDVRTWTCPSCGTHHDRDGNAAKNIRAEGIRMLSSSGTGGDNASGEEVRPRRGRPSKLRRSSVKLEAPTSTK

SEQ ID NO: 49402 - protein, 576 aa, unknown
  TnpB Polypeptide
MQDTKTKADINLIQFHKITSRHVLVLEADISECDKRELLHMSNIIRIAGNELIVVMKKQYEQLLRTKRYRQLRDMYAKAKKIDNKEQVKIIGSEMNEMQKSYNLTWEYCQKAMVKINRRYQLNSIFALSKAEDVWRAVEKCLFSDGKTIHFKKYGDYPEVRARQRNRGIVISADDNGMKFKLGNIIMRPIVNKPKHKKTRRGNGIKTIESHDIFAEMEIESIIRYLENPEVVDETALDLYNKKGIIIDTFRPCFASISFKEIRGKMRVYIHITIEGISKPKYNKDETRRHQYGKGFIGCDIGPQSIAYTSKEEVGLKNLAERGASIKAREQKEARILRKMDRSRRAMNTENYNDNGTIRKGKKTWKKSNRYKKLHSQYRNICRIAAENRHLAINEEVNHMRALGNVFITEPKNAKKLQKRSKKTEHQDKPSVVQKSDDTKQLVYKYKRKKRFGKSIKNRCPGYFQAQAKAKFERTGGVYIEVPATYRASQYDHTCNKYIKKALSQRMYELADGTRVQRDWYSSFLMYCIGTDLQNISRYKCKRYFSELYAKYLELEQYIINNKIIVMNSGIKFKAA

SEQ ID NO: 49403 - protein, 407 aa, unknown
  TnpB Polypeptide
MILTETHQVNKGNPLYDVFDDLCFKAKNLYNAALYTFRQSFFDDDVKTLGWMEISTMFSKSKQADYASLQSKVANNVIKMLGANISSFWELLKLKRKGKYDRKVRLPKYLHKTEGRFVLDFRSGTISRKRGERGEAILCPKSYNIKVPTKVEGKINCIRVVPCRDYYKIEVIYEVSKSQIKEKGCIAGIDPGGENLLTIAFSDKEKRPAIISGKKIKSENCYFNKVIGEAQSKLRPGTYRSLWLDRLWTKRENKLSYEMHVISKFVADFLDESGCSKVVIGDNKNQKQEIKMGRQNNRKFVQIPHQKLFRMIGYKCRRKGIEVIFREESYTSKASFIDNDFIPEFSSENQGKHKFSGRRVKRGIYKTSAGKKINADVNGAYNIMAKHFPEELSDRTGRKYSPVKFNI

SEQ ID NO: 49404 - protein, 423 aa, Malikia sp.
MRRLQAFKYELRPNGEQARQMRRFAGACRFVFNQALALQKANHEAGGQFIGYVAMAKHLTAWRNGSETPWLKDAPVHPLQHALKNLDRAYQNFFAQRMAFPRFKKKGKRESFRYPDPKQIKLDRANGRLFLPKLGWLRYRDSREVLGTVKNATVSCIGGKWFVSIQTEREVEPPVPASSSAIGIDVGIARFATMSDGSYLAPLNSFRKHEARLRRYQRAMSRKVKFSSNWKKAKARIQRLHVRIGNVRRDYLHQATSAISQNHAMVCIEDLQVRNMSKSAVGSSEQPGKNVRAKSGLNKVILDQGWFEFRRQLDYKLAWNGGLLIAVPPQNTSRTCPACGHVSAYNRRTQAKFACVACGYEENADVVGAMNILARGHRVAACGEAVSQARPARARRAASVKQEPTEATESGAMPLRAVGIPCL

SEQ ID NO: 49405 - protein, 483 aa, unknown
  TnpB Polypeptide
MSIGQLTEQGELFDTNTSQVAAKGSSSDKAAEELAQSVVSSASNESLPQDYQRVSNIKLRYVALGENKILMENFEKELMLKVRQTAKILGQKCRLGIVHKMCNQSGYIWTPQNEKITPTYMRDSEDWFKEIWADCENKGLPTILIEQVINRYQSYKKRNKKLPNYVEFKKNTINIKKNYLRYCDCENAVFIRDLHNNVIKLNIEDKRSVLVHKDLWLKKLSAKKTKPSSELKSVTFAANVMFGCRQIIPIVQIQEMEAYRAKGFFAIDINKSAKDWLTFNMPIDGKMVYEKPEVIIAAESRIKKIEKAINDTLDIMPDKRRGKGVKVDHPDFEGKVFKCTSDGRRRLRLYWKDAHKKLQKAINKLDILKRIEKFCFDNKLGFAHDDVASGQQNGTFSQDKLKIYWVSRASEAKFPLEIVNPAYTSQQCPECGHRSPKNRVKDDFKCLNCDYENESHKVGAINIANKAIKAYSNKERVCAPISE

SEQ ID NO: 49406 - protein, 234 aa, Paenibacillus sp.
IDLGVENLATIVTTTGSKPMLVKGKMIKAINQYYNKMKAHYIGILRQGKKSHEGAHTSRRLERLHLKRHRRIKDLFHKVSRHIVNTAVEQQIGTIVIGHNDGWKQASAIGRRNNQSFCHIPHQMLIAMIRYKAAEQGIAVTLTEEAYTSKASFLDQDPLPRYDEEGEWIFTGKRIHRGLYTSTKGLIHADVNGAANILRKVFPNVSAQGTDGIEGLDGNQTVNVSTPLVLSILK

SEQ ID NO: 49407 - protein, 470 aa, unknown
  TnpB Polypeptide
MPIKDSDDVVRFLEPKFDFGRSVYNATLSTALGRLERMRASLEWREAVAMEKGRERNRRLNGIRQSWGLTEYGLHAVANAHRNGAKRFVRRTEPGAVRTKDECILGAHVAQKIGSRVWVALERYMFGNGGRPRFKSRPRGLHSLEGKTASANIIWLPKEKAFSWNKRRISVVVPTTAYASDALADPTDPSKPRKVKYCRVVRRVIRGRIRYFLQLVLEGLPPVRYVPAPREACVGIDPGPSKIAFVSEYGAALLRASPRSTDHALEKKRILRMMDRSRRATNAENYDAAGVPKKGARQWKYSKRYEKLRRELSEIFRLERETRRSDHGLIANTIIQLGGTVKCEKNCYVAFQKNFGKSVGRNGTASLIQRVRSKAESARGTQFVELNAYRCRLSQYDHVTAAFAKKPLGQRWTRVGNTVVQRDAYSAFLAMCVVDNEHNPQLLREKWPSVETFLRRAGLARNFTYPALYL

SEQ ID NO: 49408 - protein, 371 aa, Herpetosiphon sp.
MRTLTRCYKYRLYPATDQQNTLVQWAGCRRFVWNWALHCKQTHYQATGQRLSYQRLAAMLVDLKRQPKTAFLRDCHSQPLQQALMDLETAFTHFFAKRAKYPRFKARKVTPHSLRFPQGVVVVDEHTISVPKIGLMQAIIHRPLLGTAKGATIKQDATGAWWVVFVCHINRPDVLLTTDNPVGIDVGLESFTTLSTGEKTTPPKFYRRSQKKLARAQRKLSRAQKGSNNRLKARKHVAKIHQKISNQRADWLHKHALGIVRQFDVVCIEDLNLKGLAKTKLAKSFSDAALSTFMQMLHDKAEWHGRRVIKVGRFYASSKTCHHCQTKTALMLSDRVWTCPTCGTIHDRDRNAAINIVHEGIRLLAVGTTES

SEQ ID NO: 49409 - protein, 223 aa, Herpetosiphon sp.
VVLVCHINRPDVELPTNQSVGIDVGLESFTTLSTGEKTEPPKFYRRSQKKLARAQRKLSRARKGSKNRLKARKRVANVHQKIRNQRADWLHKHALGIVQRFDMVCIEDLNVKGLARTKLAKSFSDAALSTFMQRLQEKAEWYGRRVIKVGRFYASSKTCHYCQTKTSLTLADRVWTCHTCGMTHDRDINAAINIVHEGLRLLAVGTTESQNAARDGVNPAKRW

SEQ ID NO: 49410 - protein, 385 aa, Herpetosiphon sp.
MRTLTRCYKYRLQPSPTHVETLVQWAGCRRFVWNWALGQKTDHYRATGQRLSYSQLAAALVDLKRQPKTAFLRECHSQPLQQALIDLETAFTNFFAKRAKYPRFKARKVTLHSLRFPQGVAVVNERTISVPKIGHMQAIIHRPLLGIVKGATIKQDTTGAWWVVFVCHTERPDVLLTTDRPVGIDVGLESFTTLSTGEKTAPPKFYRRSQKKLARAQRKLSRAQKGSNNRLKARKRVARIHKKISNQRADWLHKQALGMVQRFDVVCIEDLNIKGLARTKLAKSFSDAALSTFMQRLQEKAEWHGRRVIKVGRFYASSKTCHHCHIKTALTLADRVWTCHACGTTHDRDGNAAINIVHEGLRLLAVGTAESQNAARDGVNPAKRW

SEQ ID NO: 49411 - protein, 417 aa, unknown
  TnpB Polypeptide
MLLSHKTFIRLNENEANVIGHLCYAASKLWNVCNYERIHYKELGLEKYPDWYYQKSHHKDDMWFKSLPSQTAQEVCKLLDKSWKSFYVLQKTKGVMNPRPPRFKQNGIAVTYMQNGIKHESGSERIRLSLPKKLKEYMREQYQIDDNYLFLENKIFKDMDQIKQLHIYPPENGRCEAIAVYEKEDAELQPDNGHYLSVDLGLHNLMTCYDSDGNSFILGRKYLSICRKYEKEIARVQSQWAKQQSQKGIRYPKPSKHVLKLYQKKRDCIKDYLHKTTRSLTEYCIENDIRTVVIGDIKNIRKGKNLGTKTNQKLHGLPYEKIYGMLEYKLKLAGIRFVRQEESYTSQCSPYEERVSKEVAHRPNRKQRGLYVVKDKVFNADALGAYNIMKKYFAASGIEKDMSVLGLTKIRIIKVAV

SEQ ID NO: 49412 - protein, 429 aa, unknown
  TnpB Polypeptide
VDSHIFHRFCGNCNIRNNKKIYCRTKKSMTRTFKYRIYLNKKQLQKLLSDIELCRRLYNIALEQKIFAYKQSRKSISCYDQINQLPELKKSFPEYQSVHSQTQQDVLRRLDKSFKAFFGRIEKHQKAGFPHFKGRDSYNSICYPQSGFEIKGNKLHLSKIGNIKIKLHRPIKGTIKTCLIIKEGNQWYACFSLEIKNKEIENRPIKTAIGIDLGLDSFATLSNGEKIDNPRWFRNSEIKLARQQRWLSRKKKDSNNRKKQKKIVAKIHCKIRSQRNDFTHKLSRRLVDKYELIAYEDLAVKNMVKNRYLAKSISDVAWNGFCQKLLYKTDECGKYALPVSPRNTSQICSGCGEIVHKALWVRRHKCSKCGIDMDRDENASINILKLGIEEYRRNYGNQRLGSLLNRLNHEPRSLFPHRERVVHLIKIVE

SEQ ID NO: 49413 - protein, 502 aa, unknown
  TnpB Polypeptide
MIVKRVLPIRLSSKYRAKVRSFIYDLAQFQNLLRIFILEWDRKTSDIFRLFNSSLLYSLIASRIQSNKSEWQKKELEKVRSIIEGDEELKSWIEKLKEQKKRINETRVCAQVINQEVNNFKFWARAIKEYKANSEKFRGRPRLPKPRKLKNLTRFSVIVPFMRYGRKLQLKLRSRELLLEVLLPEGFDYRVKEVRLVYDMEWIEVRVVYEREISMDSVGIHQAGVDVGLNNLLSVVSDNPELRSFIISGKELKSFNRWWNKKRAEIQSHMDLVRNMVNEEKDEERKKVLEKHYLQLKKYLWNLCKARDGKLTTWMHQVTRRLADLLYETGHRIVYIGKNAIDKNGMPFSKVVNQNYVCIPHRKLVNMLRYKCEELGIQVIEVDESYTSKASPVNDDVVGIQTRKVNGEEIEFSGKRVSRGLYKDLVLNKVFNADLVGAMNILKVGAKLYRLLFDLKTLFVKLCNPIRFKLFDLICKSNPKSLLIGAEIGASKPVFRQEALAL

SEQ ID NO: 49414 - protein, 252 aa, Escherichia sp.
VKRLQAFKFQLRPGGQQECEMRRFAGACRFVFNRALALQNENHEAGNKYIPYGKMASWLVEWKNATETQWLKDAPSQPLQQSLKDLERAYKNFFQKRAAFPRFKKRGQNDAFRYPQGVKLDQENSRIFLPKLGWMRYRNSRQVTGVVKNVTVSQSCGKWYISIQTENEVSTPVHPSASMVGLDAGVAKLATLSDGTVFEPVNSFQKNQKTLARLQRQLSRKVKFSNNWQKQKRKIQRLHSRIANIRRDYLHK

SEQ ID NO: 49415 - protein, 410 aa, unknown
  TnpB Polypeptide
  misc_feature (197)..(197): Xaa can be any naturally occurring amino acid
  misc_feature (201)..(202): Xaa can be any naturally occurring amino acid
  misc_feature (217)..(217): Xaa can be any naturally occurring amino acid
  misc_feature (219)..(220): Xaa can be any naturally occurring amino acid
  misc_feature (251)..(251): Xaa can be any naturally occurring amino acid
MTLRMFRYRIYPSRKQKNRLLDNFKTCKIIHNGLLNLSITNYKETGMGLFKYDFNKFLTNKYQNIHSQVKQNVSDRVSKSFNNFFMRTKNKEKKKGFPRFKSSIKSITYPQSGFTFVNEKKLLVSKIGNIQIVLDRIPKGKIKTMTIKRNQADQWFAIFSCEIELPKIIHNSKKSVGIDVGIKSLAVLSDGKVINNXRFLXXSENKLKKLHKNLSRXKXXSKNRFKAKILLSRQYVKVTNQRNDFLHKESXKIANEYSKIVVENLKIKNMVKNHKLAKHINDASWNSFIQMLSYKAVDCGGQIIKVNPRNTSKTCSNCGNIQEMPLSERSFKCLKCGFTCDRDLNASINNYDRAGLVRISTPVGDTVRPELFLEPFLEKSLGKKLRENFGKENGKNIKARVNESGTIYRR

SEQ ID NO: 49416 - protein, 376 aa, Streptomyces sp.
MPASAHDADALAATLRACNRAANAASEVAFAKDLKRRNVLQEAVYHRIKADFDLGAQAAVRTIKKVCDAYATLKGNLKAGNHGPQRSKRRAKMESKPIVFRESAAQPYDDRILTWNLDTRAVSIWTVAGRLKGIPFVCSEEAMRLLAQRKGESDLVMRDGMFFLIATIDIPEPGTSEPTGWLGVDLGIVNIATTSDGKIMSGRQVNRYRQRKRDLRSKLQKKRTKSAARVLKRNRRKEARYATQRNHIIAKKLVATAERTSRGIGLEDLTGIRQRVTAKKDQRARLSSWAFAQLGSFVEYKAKRAGVPVVHVDPRNTSRQCSECWHTHRSNRISQAWFVCRSCGTVLHADHNGSRNIAHRADAAWQRGAVNRPSTA

SEQ ID NO: 49417 - protein, 359 aa, Actinobacteria sp.
VRKTYKYRLYPTKEQEEKIQFTLERCRLLYNRLLDERRFAYDTDNTTLNYYDQATTLNERKKYIPALKQVHSQVLQDVLKRLDKAFQAFFRRVKQGEAPGYPRFKSAGRYDSFTYPQCGYSINANKLALSKIGKVKIKLHRQPQGKIKTCTVVVKNGKYYVCLSCEVEPNILPESKETVGIDLGVKHLAITSGGEFYEHPKFLRESERKLHRKQRSLSRKKNGSARRRKAVRELAREHEHIANQRRDYAHKVSRKLVNGYGLIAFENLNVQGMVKNHHLAKSIVDASWNQLVQCTTYKAEEAGRRVVLVDPKNTSQLCSNCGEIVPKKLSDRVHRCEYCGYVQDRDANAAQNILKRALA

SEQ ID NO: 49418 - protein, 459 aa, Mycobacterium sp.
MARFEVPDGWTVQAFRFTLDPTEDQARALARHFGARRKAYNWTVAALKADIAAWHATGAQTAKPSLRVLRKRWNTVKDSVCVNAETGVVWWPECSKEAYADGIGGAVDAYWNWQTSRAGTRAGKRVGFPRFKKKGRDNDRVCFTTGAMRIEPDRRHLTLPVIGTVRTHENTRRIERLIRAGRARVLAISVRRNGTRIDASVRVLVQRPQQSNVALPDSRVGVDVGVRRLATVADEDGTVLERVPNPRPLDAALKELRHASRARSRCTKGSRRYRERTTEMSRLHRRVNDVRTHHLHVLTTRLAQTHGRIVVEGLDAAGMLRQKGLPGARARRRGLSDAALGTPRRHLSYKTVWYGSQLVVADRWFPSSKTCHACGNVQDIGWDEKWQCDGCSVIHQRDDNAAINLARYEDTVSVVGPVGAAVKRGADRKTRPGRAGGCEARKGRSREAADQPRDGVQVA

SEQ ID NO: 49419 - protein, 363 aa, unknown
  TnpB Polypeptide
MPFVCSTPDLPSHLVCAARVKATEAVKSALTWKAKKEREYPKKVAKAQKQGRPVPRFKPVKCPYSEIAAIRYDVRSYWVKWYISMCSLATTNGRVEIPCTVSKHLVQYVGYKTCSADLCYHKGRFTLHVVVSIPERDIAPTATIIGIDLGLARPAVTSERRFLGDKRWQEQERRMFRLKRKLQKCGSKSATRHLKKLSGKRFRQRKDHDHVLSKRIVQTTPQGSTLVLENLKDIRVTSTIGRGKNTKNVLTKRRFHSWSFAQFHGFLSYKAAWHGIQVVKIDPRHTSQTCSRCGHQHRSNRRSQSLFKCHECGYSLNADYNAAINIRNKYVTSLASLGTPSTSGQSSTCLLSPSSDEGQDLTP

SEQ ID NO: 49420 - protein, 308 aa, unknown
  TnpB Polypeptide
LAVLSYKCRIEPNRAQATAFGDMLADFCQLYNAGLEQRIAAYRRRRICVSYKMQADELKGVRCAAPELARWSFSAEQQELRRLDKTFKAFFARGKGFPRFRACVRAAGPDSVGVDFGLSNPIALCNRETVARPRWVTRAEGGLRRRQRQLARCKRTSKTRSRCKAALAKFQGRVAAKRRDHLHKVARDLVTRCGGTGIENLNVKGLAGGMLAKHVHDAAWSQLTAMLDHKAASAAVELVNVDPRGTSQTCPECGIVAATTLAKREHRCECGCALDRDVAAARVVHFRAFGFWPGAGRGSPSPRAAALA

SEQ ID NO: 49421 - protein, 314 aa, unknown
  TnpB Polypeptide
MDDFKWLYNVSGQITAQAFADLEDAYKNFFDGLAQRPKFKNKKKSKKSFYVRYDRITFKNNSVHIEKIGKVKYSSNCKIPKLEKYTNPRCHFDGKYWYLTFGFEHGESQASLNEDLSIGIDLGISYLGVVNHLDNPIKNINKSKEVRRLKKKLKRLQRQVSRKYEMNKKGNQFVKTNNIIKLEKQIKLVHRRLNNIRNNHIHQATSKIIKLNPYRVVMEDLNVSGMMKNKHLAEKIAEQKFYEFKRQMKYKCEFNKIEFFEADRWYPSSKACSCCKNIKKDLKLSDRTYICNECGLVIDRDKNASINLGNYKLA

SEQ ID NO: 49422 - protein, 349 aa, unknown
  TnpB Polypeptide
MVTVTVTTKFHNPSLSRRKEWQRATRLYRDTKQFCINGWENGNFDKSVTTASIDNDLYSAIQNQAIREAKSDHSKDGAVRYQESQPFAINNQNWELDTTESGTVVVGFPCVSQWWYTPIEVYDDIDDHVDRLVEGNAKKTRLQVYRRGDDWYCTFNIEYDTDTSGETPIGVDIGERHILAATAYDEDESMLVSGGEAKYVRRKYRSLRDSLSEAGALRARNRVGDKEQRRINDLNHKLSRRLITFAEQFENPVIRMEDLEGIRENSSWSGVHSWHFHQLQQFITYKAGRVGIRVEKVDAYHTSQQCSACGSMGTRDGDQFSCAECGRGRHADLNASENIAQLEGEPCTA

SEQ ID NO: 49423 - protein, 226 aa, Lachnospiraceae sp.
MEIGHINHATVERTASGKYFVVLNVDFEPEPRPNAGGQVGLDVGIKAFYSDSNGNTLSNPKYLEKSARKLVREQRKLSRKQKGSGNRNKQRIKVALVHEKIINQRNDFLQKQSTMLVRDNQTICIEDLRIKGMLRNHKLARALSSVSWASFFSMLEYKASWYGSEIIKVPTMYPSSQTCSCCGYQNPLVKNLAVRRWECPVCHAVHDRDINAGLNILNKGLQMQSA

SEQ ID NO: 49424 - protein, 351 aa, unknown
  TnpB Polypeptide
VIRKSTLNLNYGNTEKEKTLREFITEYTRVVNFYITVLWSNEIFTGSFMSKDYLAVESWLSERAKQCAGKQALQIVKSQRKKKKKTQPVFSGKALELDSRFIEIQQGNNSFDIWIKLSSLGKKIILLLPSKKHYHFNKFTSWVMKKSARLRVREDGQLYLDLYFEKQAEKKKEEGESLGLDCGYKKLAVLSNGKVSGKNLEHLIEKISRKKQKSKGFFRALKERNEYIDKELKNFNLENIKEIVVEDLKDVKKGTKGRIRKEFNNKLQRWVYRYFLTRLEQLCEVVGVQLHKVDPAYTSQTCSACGDVHRSNRNGEIFKCRSCGYTTDADYNASLNILNRYRLQEHMVPVQ

SEQ ID NO: 49425 - protein, 528 aa, Moorea sp.
MARLNAKKHQAAPDSLTPKACLASGENNKDNQLPSAIAESAAANKETILPDKSPTCTPSSRKRKSSLTSGRDSITKDKDLKPYWNDLCAAINSQLLLPVETDSPDLGLNSLSTWSVSTVEKSWFSTNLKVAQNQNSPQIFSRSLMSFLIVSTDSESTGQKSKKIRLFLNAEQRVIIRQWFGVSRYVFNKTVKILENSEVKANWKAIKTGILNDLPEWCKAVPYQIKSIAIKDACTAVREAKKKYQKTGQINRVRFRYRKNPVQSCYIPKSAVSAKGIYHTKLGELTFTENLPDNIGDCRLTSTNGDYYLTVPHKTTQIKTENQGRVVALDPGVRTFLTFFSENSVGKIGHGDFSRIQRLCSHLDQLLSEISKAKGKQKRRRRKAARRMVIKIRNLVNELHHKAARFLVNNFDVILLPTFETSEMTKKRNRKIRSKTVRNLLSFAHYRFKEFLKHKAQETGKLVVDVCEAYTSKTVSWTGELINIGGSKTIRSKIDGRSMDRDINGARGIFLRALGDTPWLRNQLALAS

SEQ ID NO: 49426 - protein, 272 aa, Oscillatoriales sp.
LDGTIKILSSNKLKVPVIGCLKTYERLPVVPDPKNVTISREADRWFISFKIDVTVAPTDKIVDVVGIDLGIKALATLSTGKIIKGTNSYRKHEKKLARLQRKVSRKVSGSANGHKAQVKVQKLHRKIANLRKDTLHKLTSQLCKNHAINAIEDLNVSGMLANHKLAKSIADMGFYEFRRQMEYKSELYGSKLIIVDRFYPSSKTCSNCGAIKDSLPLSERVFYCEHCHLKIDRDLNAARNLEKIGRATAKFTPVDNLEPTPLVEAVVKPTQA

SEQ ID NO: 49427 - protein, 412 aa, unknown
  TnpB Polypeptide
MSAERGRGNRRGGFRVFRVHVDRGNLERLRQLFRDFVNGKARTRGALCYREEWMAEWENVLRMREEAGKRTVPNPPAATLLVRFVMPDGSMRGDGRAPCIIDLRRGELRIPSYGVAMPLRRSLVKALIEENELNPRPGFTLQITRRGFVRVIAQREAYSELATPLRIITIDENSSYGFTIAYWRIDETRASMAGFEKLRPPNHGYRRGVASLLQSYADKPSGEAKQRLAEALPEEVLRTLTAERARELAEATRRKERRLNNAFVERPAAKARRLIREARRQGVNTLILLDAINPQSLRGTELQGTLLRVRRHLKNLAMYEGAMFRLARASGRHCPRCGSEGEEARHTKRSRIYRCPRCGLEWDRDKGVHCNLVYAYFARMVKEESDDLTALATRILEAMREWLARHPDILTY

SEQ ID NO: 49428 - protein, 363 aa, unknown
  TnpB Polypeptide
MKTLRIRIKDKHAKALDAMARDVNMVWNFINELSLKHTLRTGKFFSAYDLNQYTTGATKEGLNLHSQTVQAINEEYATRRKQFRKRRLRWRVSKGPKKSLGWIPFKAVGIAYKNGQIRYAGHHFSLWDSYELSQYTLKTGSFSQDARGRWYVNLCAVPKVKLAHQLSLFDGSVGIDLGLKDFVATSDGAVIEAQQFYRDLEPKLAVAQRGNKKARVKAIHAKIANRRNDFHHKLSTRLVNSYGAIFVGNVSASGLAKTRMAKSVLDAGWSAFRIMLQYKGDCAGVWFEEVSEAYSTQTCSSCCCLPPERPKGIAGLGIREWTCSECGTNHHRDVNAAKNILAAGHRRLAVGIPVLTAQAAAIG

SEQ ID NO: 49429 - protein, 350 aa, Bacillus sp.
MLFRSYKFLLKLKSNQEIIFDNLLKHINKAYTLLSPHLSSENRITAAQLRSVINPMFEKHSFTPLFTELIFPQVLNNLQKESGYLEASFPLSFKQFSYNPFKNEVTLPFCKNIRLSHFRKLPSKIHKVELYNKNKKWYINFLVSKKPAQKKTSDLKTIGIDVGLKAFASLSNGKSVKNPRFYEQMKEKIYIEQHKLSTKQQGSNSWMKQKEKVNQLYSRLHRQRIDFLHKFTHYLTETYDVIGIENINIQDLQKKKHLRNSLSDVSWGEFADILRYKCEEKGKHLILVERFYPSSQLCYKCGNKRWMPVHIRTYKCTQCSNEIDRDYNAALNIENRAKQLYLNLFHTIKS

SEQ ID NO: 49430 - protein, 557 aa, Bacillus sp.
MKKAYFSKRIWKKDVNALTVAEMKALSKLFNCAKRFVFQTLVRQKRWGRVLHKESIHLVVKRKFSVNDYVANSIVRESQALLKAQTELNKLYIKQKDEKIKKIKKKLKSERSLLTTLRKIKVSFIQGNLRFPKNRNYTLHSSGIVSLELKSCSLVWMNTYLFEHQYLDVTIKRLKAKIGRLEHRLFRLEGEKEKLTTHITSVVFGSKKLFKHQFTKREFVQDHQSWRELFLAARNKQVLISGRKDSASGNFVFTYQPDTNGLHMTSLSGKVVTFSNVVFPYGQEQVDNAVLHQRNCKDKKANGKPISWSVEDHKDYYIIKCLLDVEEEISVNFSTSDGVIGVDCNVDHFAWTDVSKDGNFLESGKLSFSLHKKTTGQSTKILEAEAIALVDLAVRKNKPIVMEDIDTTLSKTGEAYGNKKANRLKSVFAYRKMAQAIESRAQKMGVAVMVVNPAYTSIIGKLKYMRKFGISIHQAASYTIGRKGLGYKEKAPQVLRHHIVREQLPYWKQWWALNKKLNVRAEMFYQLFNVNKPSQHIKLTQEELTEKESKHLKKAFA

SEQ ID NO: 49431 - protein, 399 aa, Streptosporangium sp.
MSRYRLSPTPAQEAALAEHCGHARFVWNLAVEQHARWKPGRASAPGFAAQCRQLTEARAEFAWLRGGSTVVQQQALKDFAQAMTNFFGGTHRRPTWRKRGQGEGFRIVAVKAGDVRRVSRNAGEVKVPKVGWVRFRWSRAVPGGGVKSYRITRDAAGRWHVAFAAIPQPIPAPGTGEVVGVDRGVAVSAALSTGELLNAPALRDTEKTRLLRLERKLARARRGSNRRATVKATIAKLKAREADRRKDWVEKTSTGLARRFDVIAVEDLKITGMTRSARGTLAAPGRNVAQKAGLNRGILANGWGRLVARLEQKAPGRVQKINPRYTSQTCNACRHIAGESRESQALFLCVACGHQANADINAACNIRDTAAGHAVAARGGPPLGGLVNREPQRDLLLVG

SEQ ID NO: 49432 - protein, 390 aa, unknown
  TnpB Polypeptide
MLYVYKVRKRGEKMKVTRSYEIKLKPNKSQMFQLNNYFYEAKILYNYLLNCSNIFAVHSCKIKHVFKYDKDRNKINVVLSYLPSKLKQNVHRGMMDAIKSLSALKRKGKTVGRLKFKSEITTIDIDNQSYFVVDKYHIKLLGFRRKKIRCLGLHQLDDSIIKFRNAKLIKRDNEFYLKICVLKEVDILQSLRQDDVSQTEQFDQNIGTDFGIADTITLSNGQKLNCKIEETARLKKLQKKFARSKLLNSKRTNNQQKLLVQIHKEYRKILNRKKDFTNKLIHRLDSNYTYIVFQDEQIRGWKNLKSCRCTIQHSCLGTIKQRLISKHQEQPNRYIMLDRWTPTTQSCPKCHKKNPHSLDKRIYQCSCGYTEDRDVHAAKSMLLFANLSPV

SEQ ID NO: 49433 - protein, 185 aa, unknown
  TnpB Polypeptide
LDLGIKDLCITSDGVRYKNPKIIKKYERKLSRLQRQLAHKEKGSNNYRKKKKEIALCHEKITNTRKDYLHKISHEIVSENQVIVSENLQIKNMVKNHHLAKSISDVSWYELTRQLEYKSKWNGRKYVKTDRFYASSQLCSACGYQNTDTKDISVREWICPNCGTKHDRDINAAKNVLAEGLRQIA

SEQ ID NO: 49434 - protein, 257 aa, Actinopolyspora sp.
MPSKRPRWRAHRKARHTRADFVHRTSTNLVRRADTIAIEDLTVAGMISSARGTTDRPGRTVRATAGVNRRVLDAAWGEFRRQSEYKTTRAGKTLAVVNGWYPSSTTCSYCGYLLGALTLSVRHWTCPDCGTRHYRDVSAATNIRAAGLAVAGEYPGEACGAGVSPQGSSLAALGDEAGPLGREPDGNPRPPRRGVVKRPRSAVPARCRFARRVSAGAAWPVVPWPLPVRWLCCLSRRSDRPPRPPRVPRRTGVHRSR

SEQ ID NO: 49435 - protein, 365 aa, unknown
  TnpB Polypeptide
MKINKAFKFRIYPNKEQIQFLAQSFGCARFVFNYFLRQRIDYYAENAKGLNYFDNSSALTQLKKLPEFEWLNDINSQSIQQTLRNLDVAYHNFFNKRAEFPKFKKKSNKQSFNVPQNFSVHDNMLDIPKCKGIKIKLHRTIEGTMKSITISKTPSDKYFASVLCELDIPEPVFTGNEIGIDYGVKSFITCSNGEVVDNPKHTRKHEKKNKRNNRKISRKVKGSNNRRKAIGKLARSHEKVANQRQDFLHKLSKQLVCDNQAIYIESLAISNMVKNHCLAKSISDTGWNTFVNMLKYKGQWYGCHIYEIDRWFPSSKRCHVCGHINENLTLDIRNWQCPECMTNHDRDLNASINILTFGRAGIART

SEQ ID NO: 49436 - protein, 286 aa, unknown
  TnpB Polypeptide
VRAGDGVTWPKDGDGARWLPEAKRAYLPGIGQIKVEAHRPVAGRVKTIQIKRQGRRWVLVLSCDDVPRNPLPATGRQAGIDVGIVSFATTSDGEHIDNPRWGRVAPARLATAQQRLAGAKRGSNNRERRRQTVAARHRKIANQRKDFHHKQARALVGRYDLLVVEDLQIANMMRRAKPVTDVTNPGQFLPNGARAKSGLNRSIGDAGWGGFVSILRAKADDAGRIWIEVDSRHTSDGCEKCGYAAAENRPTQARFECQRCTHRAPADEHAARNILRAGLALHAQAA

SEQ ID NO: 49437 - protein, 439 aa, unknown
  TnpB Polypeptide
VNVKQAYRFALEPTPAQERMLRSHAGAARFAWNWGLATCQERYAAGGKWCSAIDLYKLWNAAKKADPALAWWSENSKCAYQEGFRDLERALRNFVKSKKGERKGRRLGFPRFKKRGRCRDSFRLTGDRVTCSGKTVTLTRIGTIATHESTRKLARKLDKGTARILSATVSRTAQRWFVSFTVEVDRAVPQRHPRPGSAIGIDLGVKTLLTGMDDRGNLITVPGPRALGSSLQRLRRASRAHSRKTKGSANRRKAADRLARLHARAANVRADALHKATSDLATRYAVVACEDLNVAGMTRNRRLARAIADQGFGQARGMLAYKTTWNSGKLILAGRFYPSSKTCSGCGTVKAKLALSERTYHCQTCGLIVDRDVNAAANLLKLAASGAERTNACGGTVRPGSAGHVSVKQEPGTALAGKTGTAARQPAAWMASFICDGFA

SEQ ID NO: 49438 - protein, 373 aa, unknown
  TnpB Polypeptide
MLIRKSFQFRLRPTKKQARVLEAQLDECRWLYNELLEERKLAYEELDISLSKYQQNMILPLLKVERAALAQIHSQVLQNVVDRLDKAFQSFFRRCKAGEKPGFPRFRGMHRYNSFCYPQSGFSLVGKDLKLSKLGSIRVIMHRPIEGEIKTCTLRKTAKGDWNVSFSCELNVEPLAPKQEAIGIDVGLEHFATLSNGQEISNPRFFKQGEKALAKAQRKLAKLKKGIPERRKQGKIVARIHERISNQRNDFCHKEARKIVDQYQYICIEDLNIIKMIEGSSFAKSITDASWNQFRQFLTYKAAEAGRKLGLVNPAYTSQDCYRCGYREKKNLSEREHCCNICGYRAPRDLNAAQNILALGMDGLEAIPRSLRL

SEQ ID NO: 49439 - protein, 361 aa, unknown
  TnpB Polypeptide
MQLTYHYGIKDKHAGELQRQARAVNIVWNYCNETQQKAVRDGREWLSYSDLAHLTAGSGPLLDIHSHTIQRVCRQYDKSRRQHKRPWLRFRGRKSPGWVPFNTGHVSFRDGAFFFRGGRYDVWLDRAPPEGSSILGAGSFSQDARGRWYLNIPVDVECAAAAPLSYVGIDLGRKYLATLSDEKRIVAPRFYRDSEAQLAKSQRARKGRRARAVHAKIANRRKDFLHKESNKLATQYGLIVVGDVNPKNIIAETTISNIAKAQHDVGWASFKTMLAYKSFRNGGSMLEVSEANTSRTCAACECMAGPEGRAGLNKRVWRCDGCGSVHDRDVNAARNILRLGLQALVAGASVAAGNPGLQAGE

SEQ ID NO: 49440 - protein, 374 aa, unknown
  TnpB Polypeptide
MKLIARLQLHPTPEQHALLKQTLEAANAACNYVSEQAWETQTFNQFVLQKLCYHDVRRQFDLGADCAVRVFAKVADAYKLDKKTQRTFKPLAAFPFNDRLVSYKLGPQVVSIWTMGGRQKMPFVTGEHQLRLLQGLRGECDLVFRKGKFFLYQTCDVEEAPEIDPDEFLGIDMGIANIATDSDGTFHQGKGVKNVRHRHRALRTKLQRRQTDSARRHLKRLSGRERRFAQNTNHVLSKQIVQTAKDTGRGIALEDLTHIRERVTARKRQRAILHSWAFDDLRQKIAYKAARAGIPVVAVDPRNTSRTCPACGHVDKANRKSQDAFLCTSCGCAGRADYFAAVEIGRRALLSAPIVGMDASAPPTYKLPALAGSN

SEQ ID NO: 49441 - protein, 289 aa, Moorea sp.
VIIIEFKAKGKEYQYSAIDEAIRTVKFIRNSCIRLWLDNKGTGKSDLSRYSKILAKEFSFANELNSTARQAASERAWSSIVRFYDSCKKKVPGKKGFPKFQKRARSVEYKKSGWKLSPDKKSITFTDKKGIDLRSRYANGKLKLKGSWDLWRFDKKQIKRVRIVQRADGYYVQFCIAVNVKEELPHTGEIIGLDVGLKEFYTDSNGRSEPNPRFYRKGEKRLKFYQRRVSRKKKGSSNRKEAVNRLGRQHLKISRQREEHAKRLARCVIQSNDLVAYVREACRKARFKS

SEQ ID NO: 49442 - protein, 385 aa, Ignavibacteria sp.
LFFQPTVWSAELPQKTGRGIKKRGAGMMLAHQIRLDPTAAQAQYFRQAAGTARFVWNWALAEWNAEYAQGKKPSGMKLKKQFNAMKYEQFPWLHEIHRDAHAQPFANLQRAWTRYFSQKKAGKEAFAPVFKKKGVRDSFYLANDKFEMDGHRIKLPKIGWVRLHEELRFVGRIVGASVRRIANAWYVAVQVDVPDDKAQRKRRGDSVIGVDFGIKAAATISSDGKHGSETVLAPKPLKSNLRRLRIRSRRHSRKNKGSKNRVKSAQNLASLHARITNVRRDFWHKLTSKLCRENQAVVIEDLNVQGMMQNGKLSRAIADVGMSEGRRQLEYKAKLYGTRLVIADRWYPNDAERQALTGDCGCGHERRAAATGIQGKTLWYTPCDC

SEQ ID NO: 49443 - protein, 370 aa, unknown
  TnpB Polypeptide
MKTLKAYKYRLYPSKAQRRVLDETLETCRRVYNDTLAYRKEVYETETRTAGYYETTKQLTRWKETNPYLPNVHSQVLQDVQRRVDKAYNNFFRRVKRETEKPGFPRFKGQGRYDSFTYPQSGFSLLDNSWLRASKIGNLKIKLHRPIEGVIKTLTLRRDSCGNWWAAFACEVEIEPQAPTGAIIGIDLGLSSIITTSEGAKVDPPRFFRMGEKKLAKAQRQFDKLEKGTEERARHKVVVAKVHRKIANQRADFNHKLARQLVTDYDVICYEDLSVSRMVHNHCLAKSIMDAAWTQLVDFTKYKAVEAGKVVVTVDPRNTTKRCSRCGTLVDKDLSVRIHDCPSCGLVIDRDWNAAINILSLGLQALGASP

SEQ ID NO: 49444 - protein, 442 aa, Lachnospiraceae sp.
MRIVSSYGVELRKQNIPICQTLDIYRSAVSCLIGIYAQTWDELAVITEPKKRFNTAEHLVHTTKKNQARFDFDLRFPKMPSYLRRAAIQHALGSVSSYKTRLGLWKKTDQKGGRPKLVCDNHAIPVFYRDVMYREDTEEKDRVCLKLYDGHDWKWFRVSLSHTDMEYLRKNWAGKKAAAPVLEKRHRKYFLRFSYTEEVPLTKTPAKERIICSVDLGLNTDAVCTIMRSDGTVLGRRFIDFPSEKDRMYSVLGRISRFQREHGSAQVKSRWAYAKRLNTELGRKIAGAVTGYAEENHADVIVFEYLETKGKISGRKKQKLHLWRKRDIQKRCEHQAHRRGIRISRICAWNTSRLAYDGSGTVVRDPGNHSLCTFQNGKRYNCDLSASYNIGARYFIRELLKPLPVTERFLLEAKVPSVKRRISCVYADLRELFSEMEILRVA

SEQ ID NO: 49445 - protein, 442 aa, Lachnospiraceae sp.
MRTVSSYGVEIRKQNIPARQTMEIYRQAVGYLTEIYAQVWEELRKIPETKKRFNTAEHMVHMTKKNTARFDFDLRFPKMPSYLRRSAIQHALGSVSSYETRLGQWKETGVLSGRPKLTCRNHAMPVFYRDVMYREGAEGKDEAYLKLYDGHDWKWFRVYLKRTDMEYLPRNWKGKKTSAPALEKRHRRYFLRFSCTEEVTLTKTPVKEQIICSVDLGINTDAVCTIMRSDGTVLGRRFIDHPSEKDRMYRTLGRIRRFQREHGSAQTQGRWAYTKRLNTELGKKTAGAIIRYAEENHADVIVFEYLEMQGKISGKKKQKLHLWRKRDIQRRCEHQAHRKEMRISRICAWNTSRLAYDGSGAVTRDRENHSLCTFQTGKRYNCDLSASYNIGARYFIRELLKPLPATERSLLEAKVPPVKRRTSCVYADLRKLHSEMELLKAA

SEQ ID NO: 49446 - protein, 450 aa, Lachnospiraceae sp.
MSYQGEIKMQIISSYGVELRKQNIPIRQTLEIYRSAVSYLIGIYVQVWEGLAEIPDAKRRFNAAEHLVHTTKKNHACFDFDIRFPKMPSYLRRSAIRHALGTVSSYKTRLDLWEKTDRKSGKPKLVYENHAMPVFYRDVMYREGAEGKDEAYLKLYDGHDWKWFCVRLDHTDMEYLRKYWSGKKASAPTLEKRHRKYFLRFSYTEEVTLTKTPVKEQIICSVDLGINTDAVCTIMRADGTVLGRKFIDHPSEKDRMYRTLGRIRRFQREHGSAQTQGRWAYTKRLNTELGKKIAGAIVRYAEENHADVIVFEYLEMQGKISGKKKQKLHLWRKRDIQKCCEHQAHRKGMRVSRICAWNTSRLAYDGSGVVTRDWENHSLCTFQTGKRYNCDLSASCNIGARYFIRELLKPLPATERSLLEAKVPSVKRRTSCVYADLRKLHSEMEFLKAA

SEQ ID NO: 49447 - protein, 376 aa, unknown
  TnpB Polypeptide
MLHRAIKIRLGYDKRLVDTIYTYNSACNFVLQTAFNAKTYNKTRVHHLTYKKVREMFPALKSNLVCAARNQACAMLKRQKLKCLPIVKKAGSIRYVTFTFTPQFKKGVISLSTIYGRVKVPIRVPLYFHQYIHWVITFATLSFKQGHLFLHLNAKKESPSKLPPKNLVGIDRGIINPLVTSTGQFFNSRKLRNVKARYQWLKKCLQSKGTRSAKRHLKRLSGREKRFVTDVNHCLSKRLVQSEADTFVLEKLHIKPAKSNGPLFNTLLGGWSFGQLLNFLRYKSEGVRKNVLLVPSKYTSQECSICGYVEKSNRKGALFRCKKCLHSLNADLNAARNIAQRGKTLLSRLRVDQPIVAQPITIGATSFAVKPSTYPY

SEQ ID NO: 49448 - protein, 366 aa, Psychromonas sp.
MREQANVIKTLKVRVKDKHKAILNRMAFETNQVWNAANAETSEWCYIPIPEVGYIRNNISAFDLQKWLKGIKKARGFIIPAVTVQEIIAVHAKARKQFKKDKLKWRASGGARRSLGFVPFKSTGIKWINGQVKFGGFFINVWDSYGLSKYNFKSGSFSEDSRGRWYFNIVVEVPQVKSIGIGEIGIDLGLKTTATCSDGTQLARKAFYRNSESKLGKAQRANKKKQVKSIHAKIKNQRNDAMHKFSTELVRNNGLIVIGNVSSSALAKTKMAKSVLDAGWHMLKTQLDYKSKGMLVEFVEVNEKYTTQMCSCCGEITANSPKGRTGLGIREWSCAECGTVHDRDINAAKNILRLGHQTLAVGIPAF

SEQ ID NO: 49449 - protein, 368 aa, unknown
  TnpB Polypeptide
MRKTFTYRIYLTNGQRRILEQQLEECRWVYNETLAERKRAYEERGESLRLYDTQAMLPVWKIDRPSLKLVHSQVLQNAQVRVDLTFQAFFRRVQAGETPGYPRFKSFGRYDSITYPQYGNGVRLDGERLILSKVGAVHVVLHRPVEGTPKTVTIQRSRTGKWYACFSCVVEPKALHPSDQMVGIDVGLESFLTTSHGGKIPNPRFYRRDEADLKRVQQRLSEAKEQQNWTEYRRRKKALAHIHERIANRRTDFAHKLSRVVVNTYQIIALEKLAPLEMGRSRGMRKSILDAAWTQFISMVGVKAEEAGRTLVLVDPRNTSKMCSSCGKLVQKTLSDRTHTCPSCGLVMGRDHNAALNILHRGLQTLRL

SEQ ID NO: 49450 - protein, 390 aa, unknown
  TnpB Polypeptide
VINLFKAYKFRIYPTNEQIEKLNQHFGHTRFIYNLFLEFSSNAYKNTKAYTNYNMWARVLVALKKTEKYQWLKDVNSQSLQQSIKDLETAFKRFFKKQSKYPKFKKKSNKQSFRVPQHIQLYEKEDNNKYGILSIPKFTEGIKVRVHRKIPSNAKIKSCTITKTTTDKYYVSILYEIDENIPMRDIDYENSLGIDMGLKDIVVLSDGIKYQDPKPLAKLEKKLERKQRSLSRKVKGSKNRNKARLEVAKIHEKIRNIRTDFQHKLTKTISENQADVFFVETLNIRGMLQNHKLAKNISDASWYQFKTLLKYKAERLGKKVIEIGMFEPSSKTCSVCGYKNKDLELSDREWVCPECGTKHDRDINAAINIRQFGIDKYTSKQSKELQLVPA

SEQ ID NO: 49451 - protein, 385 aa, Sulfolobus sp.
LRALKAQLRLACEVYNTLRWADTYFYQRDGKGLTQTELRQMALDLRKQDEEYKQLHSQVVQQIVDRFYEAKKRFMDGLARFPREKKPHKYYSLVYSQSGWKVLSLREIRRKSNHKKKLMKLYLSHLGVFNVIVHRDFPLDKVKRIIVKLEPSGRIYIIFVVDYEFKALPSTGKVVAIDVGIEKLVTTSDGQYFPNLKPFERALTKVRELHRSLSRKRFLSHNWFKAKVKLARVYEHVKNLRKDIYMKLGKYFAEYYDIVVMEDISVKKLVGKSLKVRRRLHDVGFYEFRTILEYQLIKYGKKFTLVDPAYTSMTCARCGYVREDLTLFDRVFVCPKCGWIVDRDYNASLNILRRSGSERPSVWSSAFYRWQGGAMKQEALSVRGG

SEQ ID NO: 49452 - protein, 247 aa, unknown
  TnpB Polypeptide
VYEKDIKGLAEGESKKIMGIDIGLRNIVTIGDSISNDGIAVKGGVLKSINQFFNKKYAGMKSISDRQIGNKQLTKREKRLFMKRNRKIKGIMHKLSKAIVQYAKSRKIDTIIIGHNNGWKQSANMGRINNQNFVQIPFNTLINQIKYKAEEAGIEVIIQGEDHTSKCSFLDNESIEHHDEYMGKRIKRGIFRSKNGIQIHADLNAVYNIIKKAVPEAFADGIEDVGLYPRSLSVSEFTGMITSKGEC

SEQ ID NO: 49453 - protein, 440 aa, unknown
  TnpB Polypeptide
MCAILREGVRRKTGEEKEQGSMAKATMTIKQQLHYQPQHAASFAANQQLFNAVVAFYFDVIQAHDQILKLGSIDAMRALEQLTHATEKNPRPVMPLSAIGEDIPAMFRRAAINAALGSAKSFYGNLKRWRTRKEKAEAKGKPFTDRPPVPPRTWNKSVPFYAGVWRQRTENSIVLKVWTGACWSWVKVRISGRDLPAGYEIGSPHLIQHGKEWWLHTPVEKAFEAPAKVEEQVTGNNETRICAVDLNLGEDIAVCTVQTAEGTILATRFIGGGDAVNGFRKRQLGRIAQNRRKTGMIAEGEQDNAARFQKLRHRNDYEAHRISRRIVQFAVAQGASIIVFEHLGNLKPEKGKYSHRGNLKRAYWMKGRIFRYAKYKAWDSRLITCRVNPRNTSRQCAHCGAQVRYAVGWHPQHGYTVGAPLVLCPTCQYRGHADRNAVRP

SEQ ID NO: 49454 - protein, 313 aa, unknown
  TnpB Polypeptide
LLRPNQATSPVKKTNPEYKQVNSQALQDVVERLNKAYQGFFRRVKNKEKAGFPRFKGQNRYDSFTLKQTGWKLQENQLTIQKIGTFKIILHRPLEGDIKTITIRKDLTNKWFVCFSCDNVPQKLFPKTNKEIGIDVGCESFLTDSNGQKIDNPRFFKKSQDILKMRQQRLSQKVKGSNRRNKIRLLVAKIHQKISNQRKDFHFKVANKLIKENDRIYIEKLKNWKTFRNLNRSMRDVAWFQFFNILHFKAEEAGRGVIEVPAKNTSQLCSKCGRIVEKDLSVRVHKCSCGLEIDRDWNAALNILRAGAALQAS

SEQ ID NO: 49455 - protein, 268 aa, Methanosaetaceae sp.
LLNGKIAVSIEKEYPEPVNDRRYVVGVDIGSTTLAAVTVFDSQTSKVVKQLYFGRDVAVRQRKYEERRSKLQHHADKGSEKAKKYLRRLKRKQRNFVKTRSGQIAKVIVNLALKYNASIAIEKLRLRATKGEVGKNGRKKINRIPYAQFRDFLKSNCLKYGVPFQEVDAYHTSKWCPHCGAVNSGHDSRNYALYRCKKCGMVVNSDRKASLAIAVKSLLERTSQGLTNSCFVQISRRRVAVNLLVRPDEGDLSGAVHLTQPLMESPLR

SEQ ID NO: 49456 - protein, 491 aa, Bacillus sp.
MMKAYFSNRIYKDTLPEEYTNSISHAHLLFSRAKQFSFQTQVLEKRSGVNGSPKFNQTSREQQFGYFFVVQFKYRADIYYHAYQFEHDYLNVQIAFFKSKLGRLEFRLDRLQKQLKSLKNSINSVVFGTKKLFKAQHTKENYQNDHEQWRKDWERSRYNQITISGRKDAKVGNFVFCYTPETRELHFTPPNGTEIIIDNLVFPYGQEQIDHAIETQMSCKNKKKYGNPIAWSVEDHGDYYIFKCIVDVPGNPHKNDSRADGLLGLDLNVDHIAWSNINTTGQLIKSGVFSFDLEGKTSEQITKMIENKAVVIVDLAMKLNKPIALEKLNTTQSKVSQPYGNRKANKAMSHFAYNKMISAIKNRAEKMGVAVFDVNSAYTSQIGKIKYMKRMGISIHQAASYVIARRAMGFKETLPPVLHSLLPEKIAGLQHWAQWKWISSCLSDVRKHAFYRKELFAYDKIDSMNQLFPQGALSDFEAKGLLKVKSRKHIA

SEQ ID NO: 49457 - protein, 434 aa, unknown
  TnpB Polypeptide
MKTIKLPYKTAEDLTPLLGQYSLVVRWSYNRFLEGRSEKEIRELSKSLNNIGLLNSWLIQCAIKDSKAIQTRFKDRKVVFGGKTNLIKRIKNKISREEFRLSRLTPINIQGEQLARGNRSFKLDIIENNRIIFKLNKSKHINLELPNLRNNIKRELFKLQQLNEVKTRERGYTYSIRLNLNYIYISFEKFKNEETKQLKEERYLGIDLNPDTIGISVLENNKVIYAREFSLKPIFNKILSQKLSSDSERMKYFQNKLRFETFQISKSIAKLAKHFLCKSVFIEDLNFKVGDSGLGKKFNRKNRNLWKRELFIDNLTRRLSVDGIKLYTVNPVYSSFIGNLMHDYTDAVNASIEIARRGFECRIRRNKRGFYPNLLVKHQWKEMATKFGDWKEFFLAVKNSKLKYRVSLDELNRPFKVFQQNSRRSMVLNYVFYE

SEQ ID NO: 49458 - protein, 395 aa, Rhizobiales sp.
MTIDGNASKESGNQFARLRRRADGRYDLELRLPKALAHLATRSFKSAGHDVHCVAFPGLSFNHGDEAIQQAIEAKRPVTLKFRRDDTSWRVSVSVDDRIEPAVVDFSRSALGVDLNAGHVSAALVDADGNPVESFTFPCVTYGRSSDQAKDTIRKVAAQIAALADRLGVPVVSEKLDFARKKSSLKDSDDARYARMLSSFAYSAFDAALGSACLRGGVGHRRVNPAYTSIIGRGKFVRRYGLSVHEAASVTIARRAVGCFERLPRSDDGTVTVPTNGSVHVTLDLPVRNGSRHVWTEWNGLNKEYQKKALAARGSSGRRSRPGWRPKTASGRSGAPLHGPSAEAGRSHQKPLQSRDPGVGHVPGKGSCNEVVIGSNIRDEYPFKRRNLHEGDYHD

SEQ ID NO: 49459 - protein, 417 aa, Rhizobium sp.
MHRAQVFLLRPNQKQAQYFSRAAGIARFSYNWALAEWKRQAMEWWDSGKQTQFPTFFSLLKQFNSIKRESWPWITEISKFVPEGAIFAVGQAFDSYKAGQTRYPKFKSKDKIRSSFLASPTHQDCKIEGRKIRLPKIGWIRLARTMRWPGASIKKAVVSKKAGKWYVSVTFEMPDAEAIERPAIAAGVDLGIKTPIKATCSGSSFDMGAELLQRINVERRKLRRANKTLHRRVSGSNRRKKAKLRVSRVQKRIADIRSDFQHKATAMLSSIASHIGVETLSVKNMMRNGRLARHIADVGFFEIKRQLSYKADNVVEAERFYPSSKTCSCCGSVKEKLTLSDRTFICDECGFKCDRDENAARNLEKLAADRAVTARGDGSSVRRRKLTLRSLSMKRESAKAEITSDKQQLFLNEEAGK

SEQ ID NO: 49460 - protein, 367 aa, Fusobacterium sp.
MEKAYKFRFYPTKTQIAILNFTFGCVRYVYNHFLGLKQELYNKEKKSMSYNQCSKVLTVLKQEKEWLKDVDKFSLQNSLKDLDKAYKNFFNGRGYPKFKSKKDNRKSYRTNYTNDNIEFLDKWIKVPKLGKIKIRDRMKPQGRIINATITQVPSGKYYISLCCTDVEVEKLESTNKSVGIDLGIKDFALTSDEISIENPKYLQKSLNKLAILQRKLSRKPKDSSNRNKARIKVARLFEKISNQRKDFLQRLSTELIRKYDVICIEDLQVKNMVKNHILARNILDVSWSEFNRILEYKAKWYERTIVKVDKFFASSQICNCCGNKNEEVKDLSIREWTCPVCGAVHNRDINAAKNILKEGLRLLKESA

SEQ ID NO: 49461 - protein, 325 aa, unknown
  TnpB Polypeptide
MTWCGTCWNAPYPPSRRSHDGQPGVPLRTRPEHHRPRGAGSACGDRPFRLQLGPRSLPGLPGGRGTPAGRHDPTPALDGPIRTKEPTVKFRGRILSATVGREADRWYVSLTVERERPDPTPVQGPVVGIDLGLDRFAVLSDGTEVEAPKPLARNLRRLRRRSRAHSRKRRGSANRKKSALALARLRRRIRNQRLDFLHKLTTRPAKTKSVIVVEELSVAGMVKNRRLARSIADAGWSQFRRMLAYKTTWYGSRLVVGPRFHPSSKTCSVCGFVKPSLSLAERVFRCEACGLTLNRDLNAALNLERLVAGSSPETQDACGADVRPA

SEQ ID NO: 49462 - protein, 556 aa, Microbispora sp.
VRRSFKFLLRPTSKQAASLAACLEDHRVLYNAALEHRRTAYRKAGVSVRYGDQSADLKHIRADDAGGQGRWSFSSQQATLRRLDKAFAAFFLRVKAGRTPGFPRFKGRGWFDTVEWPKDGDGCRWDSQPEHLAATFVRLQGIGHVRVHQHRPVQGRVKTISIKREGTHWYVILSCDAVPAESLPAAGAAVGLDMGVASLVTTSDGEPLANPRHLAASAGRLAAAQRALARKKRRSKRRRKAVARVAALHAKVRRQRLDTAHKAALALVAAYDVIVYEDLRIANMTRSASGTIGQPRRTVAAKSGLNRSILDAGWGVFLRVLAHKAESAGRELIGSSSRCAASNRSSASSARVGPSAAITPSDMTSERSHSSSAYGRSWVTISTVTSRLLRISASSRRDAGSRFDDGSSRTRISGSIASTVATATRRRWPKDRWCGGRSIASSMPTRSSASRTRRSSSAPRSPRLAGPNATSSRTVGMKSWSSGSWNTSPTRRRISRRVSARTGSPATSTVPWPAVRMPLRCMTRVVLPAPFGPSRATRSPRSIVRSTPYNACVPSG

SEQ ID NO: 49463 - protein, 367 aa, unknown
  TnpB Polypeptide
MQLKYTYKFRIYPNETQQELIEKTFGCCRFVYNQILDAKIKLYKDENRSTSYYDTCKMLPSLKQQYEWLKEVDSTALQGSLFNLDKAYKNFFQQRSRFPKFKSKKNNSCCYTTRQLASVKLFDKYLQLSKLGKIRCKFSKKVEGKISAVSVRKTPSNKYYVSILVERDEFKPFEKTGSVVGIDLGIKDFCITSDGIKYSNPHFLRKSEDKLIRCQRKLSRKSRGSNNYNKQRIKLAKIHEKISNQRTDFLQKLSTSLVKDYDIICTETLKVNNMLRNHRLAKSISDCSWSSFVNMLEYKSLWYGRDIRKIDTFYPSSKLCSNCGYKFSELTLDIREWTCPSCKTKLDRDVNAAINILNEGLAITCKK

SEQ ID NO: 49464 - protein, 380 aa, unknown
  TnpB Polypeptide
MNTIRIYPLKNLSQTQFQRLRDAQMEAAQVWNVCMQIHKDARLQHTSWPGRNKLQKATKGRFALHSQSVQMVVHAFLANVDTTRQLRQTHPQMQMRYPYHEKRFYPVSWPEQAVSRERGRVVLPMGKGRKSLVLPLDLPENSGACTLVWNTGFELHVCVEIPQAETAPGDNHATVDLGEIHLAAVTTNTGKAMIVTGRGIRSLKRQRTMQVRSITKKQSKCRKYSRRWKKLQRAKNKQCRRAERRIRNQRHQATRKVINFCIEKKVGTLFVGNPHGVRNQNRGRHHNQRMSLWEYGRDIDYLTHKSKQAHMVCFTGSERGTSSQCPACGHKHKPSNRQWNCKKCGFKGHRDLVGSVNMHRLTFDEQVSFLVPSRIYVLAC

SEQ ID NO: 49465 - protein, 387 aa, Lactobacillus sp.
MVKVLKGIKLRLYPNQHQVDQLWQMFGNSRFVWNQMLAMAKERYRNNPSSRFVNEYGMNYLLRPLKQEYPFLKQSDSTSLQVINHDLVQSFKMFFKHQGGYPRFKNRRASKQSYTGRSTCRVIAKHRMKLPKLGTIRTSKTSRVAGLKIKRYTVSYDSTGRYYLSLQAEASAPQALPKTGKAVGLDVGIANLAISSDGTKYKTFNAEWLAKQAVRWQSKYNRRQHWAQVAVRQWNHNHKTFKAELTDYQNWQRARIQKARYQQKIANQRKDYLHKLTTALVKQYDVIVIEDLKAKNLQHNHHLAKAIANASWYEFRTMLAYKCAWYGKKLIVVKPNYTSQICSRCGHHSGPKPLAVREWTCPKCGVHHDRDINAAVNILHKGLKAIG

SEQ ID NO: 49466 - protein, 378 aa, Bacillus sp.
MEVNEMMINKTYKFRIYPNQAQAILINKTIGCSRFVFNHFLSLWDYAYKETGKGLTYGTCSAKLPAMKKEFVWLKEVDSIAIQSSVRNLADAYTRFFKKQNSAPRFKSKKNNVQSYTTKQTNENIAVIENKIKLPKLGLVRFAKSSEVKGRIVNATVRWNPSGRYFVSLLVETEVQELPKTNSYIGIDVGLKDFAILSDGRPYKNPKFFRSLEAKLAKTQRVLSRRMKGSSRWNKQRVKVARIHEYISNARKDYLDKISTEIIKNHDVIGIENLQVSNMLKNHKLAKAISEVSWSQFRYMLEYKAKWYGKQVIVVSKTFASSQLCSCCGYQNKDVKNLNLREWDCPSCRTHHDRDINASINIKNEAIRLLTARTAGLA

SEQ ID NO: 49467 - protein, 412 aa, unknown
  TnpB Polypeptide
MRSQKIRLKLTKEQERLAWWYSKVSRNFWNLLVDIDKRNNKGEFDEILSQKGNKTYHSNFYDREVYSLNQSDYLHLAKLVVGKNYDEDQEQWSWYYQPNQFFIYNFLSRELIKIRKQNKGKLSFRSINKVQPNFNVMCCVSSDKKRPSRIYLKRNGKLQIPTIGDVKYGSVREGFDLSCKKQVANVSFDGKYWYLSYTEDVEPQVEDLPEFTDGVGIDLGIKTFATVSDGTIVPNIKTFRRVRILNKRLKRLQRKVSRKYLINKCNKHNKTRNIMKLERQIKLIYRSIKNIRINHIRKFVSELVKKQPQFIAIEDLNVKGMMRNKHLAKDIANCSFYTIKEQLIRKAKERLIAIRLVERFYPSSKTCSACGHYKKDLKLSQRVYHCSHCQEKIDRDFNASLNIAKTDNYILA

SEQ ID NO: 49468 - protein, 381 aa, unknown
  TnpB Polypeptide
MPVQKLNRAIMYRAYPTPEQQVLLSKTFGCVRFIWNQMLMDAQQFLGEAGVFFIPTPAKYKKEFPFLKEIDSGALCNAQLDLKEARKRHKEDPKAVGSPRLKSKRKSKMSYTTNIHSHKANDGHVVHTIVLGYDSIKLPKLGWVKIKKHRQPDAGWVLKGATVSCTRSGKYFISLLYEFEKDIKPVVPTKETSLGLDYSSHDFYVDSNGKVANYPQFYRQSEEKLAKEQCKLSRMKVGSHNYNEQLHKVRLLHEHIANQRKNFCHTVSTAIAKQYDAVFVEDINLRGLAGSLKLGKSTNDNGFGMFRTMLEYKLTSQGKTFAKIDKWYPSSKTCSVCGFIKDDLTLADRVWTCSACGTTHNRDHNAAINIRNVGLLGLYPA

SEQ ID NO: 49469 - protein, 473 aa, unknown
  TnpB Polypeptide
VLEAQLRAACRVYNTLLHAEEEEYEKNKHTMNRNELRQLALDLRKRNTEFQSLHSQVAQQVAERFYWARQRFFEGLANKPKVKKPHRFLSLVYPQSGWKLSNIREVGQGENKKKKARLYLSKIGFFTIVIHREFPLNRVSQVCVKLNPSGRIFVVFLVDESEGERPERPIQGSGKAVSVDVGIVGLVTLSDGRFLENPRPLERSLDRIRALQGSLSRKKKLSKNWFKAKRRLAKEYEYVGDFRRDLFYKLGALLAKEYDLLVLEDLNVVGLIRRGETGKRRLRLHDSAFSELRRILEWEFEKRGRGVLAVPAYNTSRECFQCGEINHGLTLEDRVFRCPHCGFTLDRDLNACLVLLNRAGWVPPAWCARGAPPNTSPTITRVGEGEGWAWWGNDAGSSALYGRPKIRAWGPISVKHKFGSTVQGGVAHLEFVGGFLLFSITCKEFVSDLVCERNVEWVVYGRTASHSYFVGAV

SEQ ID NO: 49470 - protein, 429 aa, Brasilonema sp.
VIIYEFKVKGKDRQYRAIDDAIRTSQFIQNKCLRYWMDNKEQKVDKYALNKYCAVLAAEFPFADELNSMARQSAAERAWGGISRFYDNCKKKVKGSSGYPKFKKYCRSVEYKTSGWKLSNTRKAITFSDKKGIGTLKLKGTYDLNYYNIKEIKRVRLVRRADGYYAQFAIDINLKVETQPTNQVVGIDLGLKYFIADNKGNVELSPQFYRKAERQLNRANRKKSKKYDQARKKVSQPVAGVPPVEGTGEPVRAKKPQSTNYHKARIRYARKHLKVSRQRKEYCKRVAYSVIQSNDLVAYEDLNVKGLVRNRHLAKSISDVGWSTFRSWLEYFGHKYGKVTVAVPPHNTSQNCSNCDKKVKKSLSTRTHVCPHCGYVEDRDVNAAINILKRGLSTVGHTGTYAWGDLPSWAVGANLLSNGESTNQESLRL

SEQ ID NO: 49471 - protein, 422 aa, unknown
  TnpB Polypeptide
MPIIKIMVLLHKAFVFKLKPDGATFRKLARFCGCARYVYNKGLAWDKEMHEKDPSFKLSYSKLCALLPEWKKETTWLAECHSQVLQQAMKDLHGAFLSFWEGRTNFPKFHKKFKDEDSIRFPQGFQIDQARKQIRLPGIGWCNYRRSRFIEGTIRSITVMRKADGWYVSVLTQREVEPPVHPKKGVEVGLDVGVAVTAMLSDDTPPYKPANALRQNLAKLAKLQRALKRMTKFGKNWKKQQAKIARLHKRIADIRRDHLRKIARDICKNHAVVYREDLRIKNMVKSASGTVEEPGKNVEQKSGLNLSIHDQGWGMLFRMLDEYMLEMGGEVRVVPPQYTSRTCPACGHVAAENRPTQSKFLCVKCGYKNNADRVGAINILRVGQTRSACGSVEAASTQVNRTARQRRSGQQQEPIEETVRKA

SEQ ID NO: 49472 - protein, 418 aa, Methanosarcinales sp.
MKVKRTNKLRLRPTKEQEKVLLSLCEMSAVLWNKVNYKRRQSFFAGSINWDTSSEYEEFKRIIGAATAQQMIRKNDEAWRSFLKLLRLKQKGKLPKHVRKISPPRYWKDRLTGRRKLLTVIRNDCYRIVEVGNKKWLVFRGLRIRITGDIRWRGKQGRLEIHYDDLTGRWYALQSVEVSVNRAESAKRAYADLGVVNIITGWVEGERQCIAFSGKPLLADWWYWTKKISRCQSQLKRVNGRKTSERLRKLYRKRRRRLRHAVNTIIHHFVRLCFSKGVGEVVVGDVSHIRENNDKGNEINAMIHNFWSFRYIIERLRTTAENFGIKVKLVRENGTSSRCPWCSSKNVKKHKRLFKCLSCGIEAHRDVVGVLNIARLHGDGFNGVLAHPSLLRGEEGAEVKADVAPMSVMPSEARISRL

SEQ ID NO: 49473 - protein, 364 aa, unknown
  TnpB Polypeptide
MNKAYKFRAMPNAEQRILFAKTVGCARFVYNRMLADKIAHYKETGKMLHNTPAQYKAEFPFLREVDSMALCNAQIQVQTAYKNFFRDKSIGFPKFRSKKFSRKAYTTNWIKGNIAIVGNCLKLPKMGLVRVKFHRQIPEGYKIKSVTFSQEPSGKYYVSILTEYEANIPERTLDIEKALGLDYSSPHFYVDSQGVEADMPHFYRQAEQRLSREQRKLSKMVKGSSNYQKQKRRVALTHEKVRNQRKDWQHKRSRELADKWDIICVEDINYKGMSGSLRLGKATQDNGFGQFRTFLSYKLAEQGKKLVTIDKWFPSSKVCRHCGYINDGLTLSDRVWTCPSCGETILRDENAAINIRNAGVAQIA

SEQ ID NO: 49474 - protein, 356 aa, unknown
  TnpB Polypeptide
MAEFTKTLKVRVRDKHAKVLRRQAAAVNFAWNYVNELSHRSIRERNTFLSAYDIQKYTNGAGKLLGLHSQTVQRVSVEYVTRRKQFRKSKLAWRKTHGVRRSLGWVPVNTGAAQWKNGQVFFNGQHYKVWDSYGLSQYRFRSGCFVEDARGRWYFCVAVSVEAEKCCGTGSVGIDLGLKTTATPSHGEPLEAGRFYRDQEQKLAIAQRARKKDRVRAIHAKIRNRRHDALHKYSRALVSRNGLIVVGNVSSSGLAKTKQAKSVLDAGWSTLRTLLEYKCEYAGGVFMEINEAYTTVTCSGCNSRTGPKGQEGLRIREWTCRACGITHECRDVNAARNILALGHQGLAVGIPFQKAS

SEQ ID NO: 49475 - protein, 412 aa, unknown
  TnpB Polypeptide
MNLSMRVLATARVEAAAPEGGEALLHQFLKLYRDAVQYIVDGIWFLDDVPSEEKLHKMFYAELKGLGFRAHHVSEIYKRAREVVEATKKNNGSKPVLKRLTARIHPLDYKIDFSAKVLKVAVLNDEWVELKLKWYNYLNKYLDGSWKPGEILVSYRNGKILIYITFHRDVKPIAFKTVMGADINFSNITYTVIDLSGSLVTIGVIPFKGLERALHLKKLSEKLQKRFPRSWRFIKWVRGVRGRWLNKARSILIDSAHKLSKRLAEIAKEYKALIVFEDLDKLKENSNNNYKLSWEKSLWCYKRIQMFAEYKAAFHGIKTLYVNPAKTSRKSPNGKKLKFINYRYVELGDVVTSRDVIASWNIALRGLEKLKRMRGSRVMWSPDSPADEGMKTQPNAENPEAKHLKLIKTICR

SEQ ID NO: 49476 - protein, 373 aa, Tissierella sp.
MLRAYKYRMYPNEIQKEQLAKTFGCSRFVYNYYLDKKIKGYENGDKYLSKIDCNNHLNRELKNEYIWLKEVDKFALTNAIYNLDEAYKNFFRRLKDDKGKAGFPKFKSRHSNRFSYKSNFTNNNIEVDYEENKIKLPKLKWIDSKVHREFSGEIKSATISKKPSSRYFVSILVDEGIKELPKIDKEIGFDLGLSEFIIENSGNKVPNPKNLIKNEMKLAKLQRQLAKKQKGSNNRNKMRIKVARLHEKITDTRKDFLHKLSSQIINENQVIVSEDINISGILKNHKLAKAISDASWSEFTRQLEYKAYWYGRTYIKIDRFYPSSQICSICGTKNIELKNLKIREWTCENCGNHHDRDINASRNILKEGKRMLA

SEQ ID NO: 49477 - protein, 542 aa, Rhizobiales sp.
LDLRDGHGPALSFVLDEYAAVMSRAERLLLARLKAGRTWTGDLKVSFYQHLGLSATHLDMAYRQLQGKLKSVSELAAERVKDLTKKINSKQTDIVRKEKAVAKAFAERAKLPGELATTGEKIEKCRAILASAKDSMREKQRFALKVYLNQLHGKCAAKDSITTRIRALRSALHQHKRRRVVLETKLAEARTQAADPSLCFGSRKLMHARHRLEANGFASRKEWRDHWTAARSAQFTLDGNSSKECGNQFVRLRVRDDGLFDMELRLPKALAHLAQRSIRLGGTDVHCVDLQGLSFHHGHAVIERAIASGRPVCVKFARDEKSWKVSVTVNDCVEQTVSDYSRGAIGVDLNAGHVSVAYIDASGNPVESFDIPCVTYGRSPDQAKDSIRTAAAQISELAARLDIPVVSEKLDFAKKKAALKDSNDPRYARMLSSFAYSAFDSALASACYRRGVAHRRVNPAYTSIIGRVKFARRYGLSVHALHPLPSPAGRWDSPRDCPVPPMARSPCRRTAQSMSPSHYLQGRIPGPQAASARGMCGQSGPG

SEQ ID NO: 49478 - protein, 380 aa, unknown
  TnpB Polypeptide
MHTICVKYRLYPTHAQQTALEQTLDICRQVYNSFLHWRKFAYETTGEAPGLRQQEKALTVWKAEHPELKSVHAHLLQNVAVRVDLAFQAFFRRAKQGQTPGYPREKGAGCYDSLTWKEYGNGCRLNTDSLTLSKIGTIKAVMHRYLPGTPKTCTVRRQGDKWYATFACLVEQEPLPESAETVGLDVGLEKFAATSDGEFVENPRFFKKDEKALKRAQRKVERHKKGSRKRRKAKKMVRRIHERIANRRHDFCHQTARRLVNRYGLIAVEKLNIQGMVQNGHLAKSIQDAAWSMFRRVLSEKAASAGRQVVEVNPAYTSQDCSGCGYRAKKKLSERWHFCPMCGLSLDRDINAAVNILQTAVGLHSVRKAERSRADLSAAE

SEQ ID NO: 49479 - protein, 426 aa, Saccharopolyspora sp.
VKRAFKYRFYPTEEQAAELSRTFGCARKVYNLALDARTRAWFTEQRGVNYNETSAMLTAWKKSEDLAFLGEVSSVPLQQTLRHLQGAFTAFFDKRAKYPRFKSRKKSRASAEYTRSAFKWRDGQLTLAKMREPLNIVRSRPLPEGAEPSTVTVSRDSADRWFVSILVETSVNHHTPTDQAVGVDADITSLATLSTGEKITNPKHSDRERARLAKAQRVLGRKEKGSNNRAKARLKVARVQAKIADRRRDHLHKVTTRLVRENQTVVIEDLSVRNMVNNRRLSRAISDASWAEMRSMLEYKCAWYGRDLVVIDRWFPSSKTCSECGKLTESMQLSVREWTCDGCGARHDRDINAAKNILAAGLAVTACGAGVRPQRETSRTGRPATKQELSDVSRMESPAFRRGSSQASRLVSAAASCRAVDSQVGS

SEQ ID NO: 49480 - protein, 465 aa, unknown
  TnpB Polypeptide
MQKKKSSKTLVQVSTTNSQFYDDICKTISSHLLSPTEIESAVSDLSCLTSSSRGAEVKSWFSTNQRIATSNKSRKICSQYFKPSREECTDLSVTQIKTRKIRIYPTKEQKTILHRWFGVQRLVYNQSIQHYNDKEFEVRNWMKLYSIVFLELDMDYVKEVPCLIKLNAVKDAYTSWSTNCKKRKKSGTPFSLKFKSKKDKVQSCYIPKTAISALGIYYTKSGIMKFSDTDWFANSEISDSRLICDHGRWFLSIPKKITTQCASEKKGGAVAVDPGIRNFGTYFSTDGRFGWVGQRAFERILKFNLRIDKIRSIIAKTEDKLYKFRLKRVLDRLYHKIQDLVNELHWKFINFLTKEFSVVIFPPFNVSDMVKKSGRKIRKVVVRSMMALRFYEFKERLKNKCKERHVLFIEQNEAWTSKTNSFNGEVMTNLGSREYFNYQGLKINRDVNGSRNILLRAMRDSSANG

SEQ ID NO: 49481 - protein, 363 aa, unknown
  TnpB Polypeptide
MLATKSIQGKIIGLTNYKRGLLDNEYSEFNRLARWVSECNKEGIDEFAEYSFVKNKFMVYSQTKQQALRNCQYANKEQPLIICHQSIKITTNNNKLTSLWVRISVHGVKGGIWLPVKTSKEKIKLIKECKTRSIKITKEKNVYYINIIIQKEVTMKSCSNVLAVDLGERYMAVVSGTAQKQPLFLGRGVRGIRRHYAWLRKRLGEKKLLKKIKQIGQKESNKVDSILHVISKRIVEVASKTNSTIVLGDLKGIRNSTKKKGKRLNRIVANMPYFKLTEMIKYKAKWSGIEVKKVSEAYTSRTCSKCGYCDKKNRKTQGQFKCQGCGLELNADYNATKNIVKRSLGQHLSDGALAYAHKSIING

SEQ ID NO: 49482 - protein, 457 aa, unknown
  TnpB Polypeptide
MSNLVQKAYKFRFYPQNDLKIILAKTFGCARFVYNQTLAYSENHYAQKEILVSQGIEYKNLTSSDRVNFVTKLKKSIELDQLKPNYNQLKYPWLKEVSSISLQQSVRHLNDSYSRFFKGQSAKPQFKSKRDNHNSFTITGKKSLHFDKDFNKPDKPGFKKFYLPKYDKPLIIKFGKSKSKDNKNNIRFNHLAVSSVTISQNPTGQYFISFLVKEDLTIIQAKNPKCAFDLGLKTMAKVYEGKIDSQGNKIFQDFNLPDLLKAIDKKLRKQQRILSRKGNGSKNRNKQRLKVAKTNQKRVNIITDYYQKQSTIMVNENQEIVLEDLNISGMRKNRKLSRAIHNIAWNRFISMIKYKSKWHKRKLTVVNRFYPSSKTCSSCGHIYKELSLKERQWTCVACNANHDRDENACLNLFSFINNNAVGTTVNACGGNVRPKRIKKVISKSLEAVSSEAGIHCL

SEQ ID NO: 49483 - protein, 718 aa, Streptomyces sp.
VRTELLEAVPASDVPARRFRGKNKGKRWTRGEDTELAVIRLPLDVHDHGTRHRTEQLYSAMWSVKRALQRDARDAVAAYWAGDVRRETDAKAWRLKLGLSREGMERRAYRHMENSKHLGHHVTKALVMHQADEVFETSVSRHLFPDSSGRRHGRPEVGRWWDYTRIPGRARSHTTARKWETFRLHGTLSGHLDTYRHRDLAPTVTTPEQAAALPPGARVLEQPGRMPAPSRPSGRIETGEVTATGKPKTRAATWWDHTGALAVVFTGGAESNRSDLVVPLRLPSGSGWWPRLLHFLNDPETWHKIDLVRRRDASAPGGWAYEAHLMVLCDGYASPATRARRAAAAGLERAGGVDGNVSNVSVVSFPATFDPADGDVEATRVALTDEELAALAKARRKERGRKHALDRSRRASNPGQYGPSKRQQARTARRQDAGLPARTVPVPGGARAANKAGVPMQAYRRDALSAGYRLNRARLAEAAATAAAAKDHRARRIAEDIVAAHGANLTVEDCDIRTWYRRWGKALQATTPGRVITAIGRECEKTGGWMLRASTFTTKLSQTCFCGETVTKTLADRIHTCTGCGVVGDRDMVSAALAAHVGLADPHDSSTARLNTVQARNTQILFHERLQEALPSQPQHGARPTRGRTHAAAHKPGHPVQRGPLLDKTPPTGTGQTPNETRPANERHKAHVGTAGSTDRRHPCAPGPCRHRAGITALRDDS

SEQ ID NO: 49484 - protein, 395 aa, Streptomyces sp.
VATWTDTVMVMKLVTQVKLMPEAEQAAALSVTLHTVNEAANWVSAVAFERGVPREYELRKHTYGELRARGLGAQAAQHIIKKTRDAYTTLKANIKAGNLGRPGSKRRVKAEAKPITFRREAAQPYDDRCLSWQYDAQTVSIWTTAGRIKNVRFACSPDGLKTLREHRQGESDLIERNGVFYLIATCDVPEAEQYEPDHFNGVDLGIANIATTSTGHKAAGRGLNRHRKRQLDLRKKLQAKGTKSAKRLLKKRNRREQRHASNTNHIIAKTIVTEAERTSAGISLEELHGIRQRVRLRKPQRVALHSWAFAQLADFIVYKARRAGVPVVFVDPAYTSQQCCECGHIDKKNRASQALFICRNCGVVAHADRNASHNIARKGEAVWTAGRESRVPATP

SEQ ID NO: 49485 - protein, 358 aa, Aneurinibacillus sp.
MSQTITVKIKLLSTKEQASILKNMSKEYISTINSLVSEMVAEKKSTKKTTKDVPANLPSAVKNQVIKDAKSVFQKAKKSKYTAVSVLKKPVCIWNNQNYSFDFTHISMPIMIDGKTTKTPIRALLVDKDNRNFDLLKHKLGTLRITQKSGKWIAQISVTIPTVERTGLKVMGVDLGLKVPAVAVTGDDKVRFFGNGRQNKYVRRMFKSKRKKLGKLKKLNAIRNLDDKEQRWMKDQDHKISRAIVDFAKENKISVIRLEQLANIRQTARTSRKNEKNLHTWSFYRLSQFIEYKANLVGIKVEYVNPAYTSQTCPKCSARNKAQDRKYKCECGFEKHRDLVGAMNIRYAPVIDGNSQSA

SEQ ID NO: 49486 - protein, 383 aa, unknown
  TnpB Polypeptide
MARRGNKAIRATVSMKIVLSEPLLALVNNYVKALRFTLFWLKENVPNPNEDGVISKVHEALYTRLREEYNLPSKVAEDCYREALSIYKGWYNNPKKGRFPRVYKPTVWLTPGASYNVDFEAMTVRIASVGVLPILGHPRNLREYVNWRMKEARLVVKDGRAFLKVVFEKPREENVEPKESIAVDINMSEIVVGKDDTHYVRIPTRLHEVHHWKSLAENLQRKYPRRWRENKWILYRVRSFHLKARRIMEDFARKVGKWVVEIAEDFSANVIKLESLRNLVKNVNKLPKEFRDKLYLMQYRRIQYWIEWQAKKHGILVRYVNPSYSSVSCPKCGRKMKEVSRRWFRCNCGYENDRDVIAIMNLNGRGSLTLSTAPQMRDVNPNQ

SEQ ID NO: 49487 - protein, 319 aa, unknown
  TnpB Polypeptide
  misc_feature (116)..(116): Xaa can be any naturally occurring amino acid
MRKNPQTRFPHARKLMLTTCYGFRIQNGLLRLPVGPRHYIYVKLNNHTLQVLSGLNARSITLTPDTLGISYAKETVEIKPEGYVGVDRNLDNVTVASTDGTVKAFDLSKATRIKAXYRCVKSRFKRNDARIRTGVFSKYGERQRNRVQPILHNASKRIVEDAKTRRYGIVMERLTGIRRLYRKGNFQGRNYRARMNSWSYGELQRQIEYKARWEGLKVIYVPARNTSKLCSICGYKTLESTHRRLWCPHCGAILDRDENAARNIAAGGLRFSPNGPPGEAVKGNPTTTVIPRVDGGKLSQPPTRPKPCDQGLAEPLKRL

SEQ ID NO: 49488 - protein, 355 aa, Oscillatoriales sp.
IRVYPETKLAAKWRTWIAASRWCYNQAIAILKTEKIGKYDLRKKIMDSAPIWVSEQPYNPRQMAVFQAFEAHKAAKKSKGIAKFRSRFDRSQTIRFQVSNWKSGTFYPQATKGLSFKVSEPIADVMEHEPTLSLINGQWFICYAVDTAKPLQNESSLAIALDPGVRTFLTGFDGSDILEVGKNDIGRIYRLARHLDKLMSRIGLHKGGQFKRLRYCLRKSATQIRIQIKNLVNELHKKAAKYLVTKYKIIFLPTFETQQMVKKGKRKLATKTARALVTLSHYRFKQMLKHQASKSGCIVVDVTEEYTSKTCSKCGHIHTKLGGSKKFKCPECGHTLDRDVNGAFNILLKALRDTS

SEQ ID NO: 49489 - protein, 408 aa, Oscillatoriales sp.
VKQVFNLTFEFKLKPTPTQVAVFEDWLEQCRKVYNYALRERKDWYNSRKCQINSCSLRSEYIIPADTPRPTYSSQCKALTVYRKTSLPLQRVNAAVLQQTLRKLEKAFVSMWEQNHGFPRFKKKGALRSFNFPQLGVNFDRGNRFFKLPVIGCIKFWQSRPIPGGAIVKQACVVRRSSGWYIMLTLQWDVSIPDVIPHGNPIGIDVGLTNFIATSGGLLVKRMKFFSDAECKLKLLQQRVSRKKIGSNNWKKAQKKVALLHEYVANCRKDWHRKLSHQICNDAGMVFVEDLNLIGLSRAMLGKHCLDAGFGQFFNILEHTCFKRGVYFQKVDAKKTSQICPNCFSETGKKELSERVHSCQHCGYTNDRDVAAAQVVLIRGLAAVGHRVKMLAEGKFIGIPAKQESPRL

SEQ ID NO: 49490 - protein, 185 aa, unknown
  TnpB Polypeptide
MSSFIWKRHIRIFFENPRLDFQGSSQSIIPETAIQRKLSRCVRGSHNYELQKKKVARCHEKIRNQRRDYLHKLSRKIADSFDAVAVEDIDMKAMGQCLHFGKSVQDNGYGMFREMLDYKLAWKGKKMVKVDRFFPSSKKCCKCGRIKKELKLSERVYHCECGNKMDRDRNAAINIREEARRMLTA

SEQ ID NO: 49491 - protein, 373 aa, Bacterium sp.
MKQLKAYKFRIYPNEEQKIFFSKTFGCVRLVYNLMLNDRIKAYEESKGNPDKKIKYPTPAQYKKEYEFLKEVDSLALANAQMNLDKAYKNFFRDKSIGFPKFKSKKNPVQSYTTNNQNGTVNIFENWLKVPKLKELVKIKVHRKIEGIIKSATISRNGSGKYFISLLCETDIQELPKTNSSVGIDLGIKDMAILSTGEKIENLKFRKQLEDKLKREQRKLSKRLLIAKKENRKLSEAKNYQKQRIKIAKIHEKIMNMRTDFLNKLSTDIICIEDLNTKGLLHNHKLSKSISDVSWASFVNKLEYKAKWYGKEIIKIDKFYPSSQICSVCGYKDGKKTLDVREWTCSVCHTHHDRDINAAKNILTEGLRIKQAV

SEQ ID NO: 49492 - protein, 371 aa, unknown
  TnpB Polypeptide
MVRAHKIRLNPTDEQEQYFRKAAGTKRFVYNQALDLWKFGKAVGAAEFGVMEIKRQFNLFKAEQFPWLYEVAKDVFEGAIADLGAALKCYFDSKNGKRKGAQMGFPKYKSKKNKKQSFRLNNDKIKVEEHNFWVPNLGWVNMAEPLRFAGKIMGAVVSKVADWWFVSITVEVAKPAPKQFEQQSTGVDVGVKTLATLSDGEQFENQKPLRNGLKRLRTLNRSLARKVKGSHRWWQAKRKLGRFHFRIANKRADDLHQISYQIASTYALIGVEDLNVKGMVKNRRLSLAVSDVSFGELIRQIEYKAKAFGGQVVRVGRFYASSKTCSDCGYVNQTLALKDRTWVCQDCGTIYDRDWNAARNIEQEALRLVGA

SEQ ID NO: 49493 - protein, 527 aa, unknown
  TnpB Polypeptide
MRSQTPSFVVKVKLHLQENVKNHLNKSFHIADSAYNETLSFGLKRFSAMKKNERYQELLELRREVVKVQDNTKKKIKEETEKEIKQKLKEEAKQIKTRLKEIDENLGEILINYGLTKYQLSSWLLKRRKQTVAYQHLNSIELQVVAENAYQTLSQVIFYKTKPEKLKFRSKYSLEHSFRNKVNSTGTRLVESEKTGVAYRLYIHKSSTFVDIPVSAFTEHQQEQLLRADKIKYVQIISKTIRGKQVFYLYIICQGIPISKIQKGEGVIGIDPGISTVAYVSKDSCGLVDLVPKDFARKERLIQNLSRKIERSRRVNNPEAYNKNGTIKKDVRLKTLSKRAKRLAIRRQTAYRKLTEDRRKIQGELVNHIVSQSSVIKIEELDVKSLQKRKRETRINPKTGRPFSKKRYGKAIFKAAPGYFKTLLLHRANSTGCKVDIISPKKTKPSQYNHITGEFNKKELETRIYNLTNEITDIQRDLYSAFLIAYIENDKYLTEQLEENFENFYKSMKEQLRILRQKPSRLSWYVE

SEQ ID NO: 49494 - protein, 450 aa, unknown
  TnpB Polypeptide
MDYFSALVPFYAKIYRSVWQEVMCNSISILSGKNKSSYNTYLQRKFCISKRMANSIIADVVGTYNAMLELKKHELSQLNGKIDGSYKKLEKYNLRLERFKNSDINKLSKQDRRTYKRLRFAVWKRLRRINRLKQKRDVLERNIQSGKVSICFGAKKLFKAQWFLEENGFASHEEWLKTFHQNRDKNILFLGSKDETACNQMFQFAKIGDSYQIKVRKVENCRINPSGEKYIYGMCKFRRKDFESYLSENLENHKNKEECVPLTYRIVFRDKRIYLQVMFEYKREDFSYTTKTFGTIGIDYNDGFMQVAETNETGNLVRLERIPLDYHGTGNRAKSEIEEKIAKVVKQAVRIDKTIVIEDLDFRKTKSKAQTGKTERGKQYNRMLHKFDYSRYKETLENCCYRNNVELIKVNPAYTSRIAKAKYCESRKLNVHAGAAFVIARRGMGLKDVG

SEQ ID NO: 49495 - protein, 273 aa, unknown
  TnpB Polypeptide
MKLTLKIKLLPTDEQANLILDTMREANTVCNSMSDVAWEKKIFNNFKLHHEVYHPYKATFKLSSQILVRCIAKVADSYKLDKKTKRQFRPLGSIGYDSRIMTYKPNDIVSLWAIGGRIKIPFVCHNRNYLPYIKGEADLVYKKGKFYLFQTVDVPDADIMDIEEFIGVDFGLTDIAVTSDGVKHSGEWLNNYRETKQRIRSSVQSKGTKGCKKLLKRLSGREKTTAIIQNHTIAKSIVKSAKEQGKGIAIEDLTNIRFTSKRRNKKFRTKLGK

SEQ ID NO: 49496 - protein, 193 aa, unknown
  TnpB Polypeptide
LTRKWRGNDGIKKGSNRYKKAKHDVAVCHERIRNRRQDFLHKVSKKIVSENQTIVIEDLNVGGMLKNHCLAKGIASASWSEFFKMLQYKSDWRGVNLIRIGRFEPSSKMCGCGYIHRDLKLSDRVWTCPECGAVNDRDLLAANNIKKFGLEKQNLLSQENINKTPVVNREEDVELSAVAGAVKRQNVPVQTGI

SEQ ID NO: 49497 - protein, 434 aa, unknown
  TnpB Polypeptide
MGSYEAVKVQLDPTPRQERLMASHAGAARFAYNAGLAHVKEALDNGESPEWSHYSLLRWWNKNKDTLAVNGDTGVVWWGQNSKEAYSMGLRSLAQGFSNWSKSRKGQRKGKRVGFPRLKSKSTTMRFAYSTGFTAPKACDPYGLKLSRIGRVHCMENVHERVNGAHIVRISVSRRAGRWYASLTVEREPTAKPAPKRGAVGVDLGVKNLATLSDGTVIPNPRALGARLKALRKAQQALSRKVKGSARREKAKERVARLHARVADMRADAINKATTMIATTYSVVCIEDLHVAGMVKNHSLARSVSDAAFGEFRRQLEYKTTRSGATLHVVDRWYRSSKTCSGCGSVKAKLSLSERTYRCDSCGLVLDRDLNAAINIQVAGSAPETLNARGGDVRRADTMSGDADLGEARTKRAQKSAVRLGADLGNEAIQPRVN

SEQ ID NO: 49498 - protein, 389 aa, unknown
  TnpB Polypeptide
VTVRKVAQRILFTPSKTQAALLEQCFGARRFAYNQQVEAFNAYDKDTNPHPTYPCTTDMKGANEWLRDSPVPSNALSNAIMDFRKARSSYFRKAEYGKNRPRFASKGDRVQSFRNTAPMRRMEGDRYPLSKKLGSVRIRRRDRIRYPLESLSSWTVKRENKTYYLVFLFNVDVQPKPPVDGQVGIDVGVKDFLTLSTGEKINYPDRLRQLEENIKQEQRKLSRRVKGSSNYRKQKAVVAKAYAKLRHYRENFQHQVSHRLIEDNQFIGMETLAVQNMARKAKKKPDENGKPVRNGQASKRVMNRSILRNGWSDFTEKLAYKAQWYGRAFVQVDRFYPSSRLCHDCGHKYSGLRLSEREWVCESCGASHDRDVNAALNILGEALRLSQTG

SEQ ID NO: 49499 - protein, 394 aa, unknown
  TnpB Polypeptide
MELNTNTTTLKLRIKDKHRSFLDGLARETNMVWNYVNELSSRAIRERGQFMSGYDLQKYVAGVGKEGLLLPSQCHQQVCEEYATRRKQFKKTRLNWRVSNQQSPKRSLGWIPFKKGAVSYRNGQVRFAGKLLNLWDSYGLGQYELRAGSFSADSRGRWYLNVAVKVPAKPSLGFESVGIDLGLKECAVASDGQRVEGRFYRKLEQKLGIAQRAGKKDRVRAIHIKIRNQRKDMLHKFSTRLVQEYGGIFVGNVSSKKLVKSKMAKSTLDAGWSGLKTMLEYKSHRAGVVFSEVNEAYSTQTCSCCGVISDSSPKGRAGLGIREWTCVDCGSTHDRDINAAKNILAVGLGRLAEGIPGLKAGEVIKSSLWSVMPTMASSRSGKRGRLRVIVRFCS

SEQ ID NO: 49500 - protein, 289 aa, Catenibacterium sp.
MALIQSEIVRPQVITAKCSELQADTIKVEVKEIRIIPKADARSFEIQYIYEAECIQRNLNKTNALALDLGINNLVTAVSSKGETFIIDGRRLKSINQWFNKENARLQSIKDKQHFGKKPTNRQKAIARRRNNKINDYMNKTARNVIDHCIDHEIGTLVVGYNETFQKDSNIGRRNNQTFVNIPFGLLRDKLEYLCELNGIILVMQEESYTSKASFWDKDVIPVYKSDDTEEYHFSGKRIHRGQYRTASGQVLNADVNGALNIMRKSSVVDVNILYSRGEVDTPIRIRIA

SEQ ID NO: 49501 - protein, 453 aa, unknown
  TnpB Polypeptide
MLYGVTGVLRSYSLEHESGDELEPLLRAYRDVVNQTLEELWGLIEWEKRKVKGKSQWRLLPKYKVDIHSKEYRRKLRDSLLQDWPYAAHWVDSAIKTAYSILKSWRKNYVKGDRKRRRPTAKRLFVRAKQTLIKLEGEKLRLTVKPGEYVYLDLSKRYFPLPGEVSSAGLGEPIITPEKVHLPVHYGDGNQGGNPSVAWDFNLLSFDGYSPETGWVRIDTSKLASVHTSSFEKRRSVQRRASKSKKAKRILAKYSRRERNRAGKHQLEIARVIQSLCGPVGLEELKKQGMYTRSRIWNRRISRSDWRSITRIFVGRMGEARVVELDPYGSSSYCSRCGWFNRDLNGAVFECKECGLRINRQLNAAINLYMRMRFGYTEKWVGGRKRVELRMEGASQRDWWVTVVLPSLLGGCVLTGAELKGIDEPVRSLHDALKPKLHYAYDRYNDMYLHIPT

SEQ ID NO: 49502 - protein, 410 aa, Nostoc sp.
MLVFEAKLEGTNKQYQSLDEAIRTARFVRNACLRYWMENRNIGRYELSAYCAVLAADEQFPWVAKLNSMARQASAERAWSAIARFFDNCKKSKPGKTCTERSRSKGYPRFKKEQTHGSVEYKTSGWKLSDDRRHITFGDGFKAGTFKLWGTRDLYFYSLKQFKRVRVVRRADGYYAQFCIDQERVEKREPAGKTIGLDVGLNHFYTDSEGLQIENPRHLRKSEKSLKRLQRRLSKTKKGSKNRVEARNRLSRKHLKVSRQRKDFAVKLARCVVRSNDLVVYEDLQVRNMVRNRHLAKSINDAAWTQFRQWVEYFGKVFGVATVAVPPHHTSQNCSNCGEVVKKSLSTRTHICPHCGHTQDRDWNAARNILELGLRTVGHTGTNASGDIDLCVGGEIPPSKSSRGKRKPKK

SEQ ID NO: 49503 - protein, 384 aa, Micromonospora sp.
MWNLLHAWWTWGGKNRRPCLKQADEAIRQARKDIPWLADLPAQAAQQVLKTYMRAWKNCWEGRASAPEFKSRFRSRMAVDVPQGRDLSVVRLSRHVGQVRVPKVGLVKFRWSGPIPGVGRESGRVTGARLVKDALGWHIVFRTEVEKPTPAQHQGPAVGVDRGVNVALALSDGNDQIHEDWIRPKEAERLLRLERKVARQKQTRKRGEPCSNRLHRTYDQIAKVRAKVKRRRGDWQHKTTTSIAQRYGIVVVEDLRINNMTRSAKGTVDAPGVNVRQKSGLNRSMLNEAHSRTADLLAYKLVDRGGQLLKVPAAGTSQTCSACGHRDSASRRGVAFVCTSCGWTGHADSNAAVNILNAAGLAVYGRGAETVGSGCEASTSRRAA

SEQ ID NO: 49504 - protein, 556 aa, Ruminococcus sp.
MIIDPTKNKKDAAFCQYFKTNTADSKCMYNTANFYIRNTMTGLKKSPEERTHLETEVLHYVFTGIQKANEVIGQKNMKKKFAELNLSKVGGMNSVVIAFSIVSQESFQYPTEEKWFLSYGTLDAIFKFTDNPVYRRMNSHVNQNAIRKAVAAWQGYFESLKAYRKNPAGFTGKPKIPGYKQDEGYIAWFSKQVAKLKEEDGRCYIQFINNPDRFGIGKASLYDDLKYVKTEVKPMYGKYYILITFDDKIAEVEVPENPKRILGLDPGVNNFLGAANNFGGAPFVMNGRAVKSANQRFNKKRAKLISSVTKGSDSKSSVKYSKQLNILSQRRESFLRDYFYKCAWYICRYAKAAGVDVIVMGHNDGQKQEIDLKDNVNQNFVSIPYTKFITILKTVASKCGIAVVIREESYTSQASLLDMDDIPTYKKGENKKYAFSGKRIHRGLYRSKSGTLLNADINGAANILRKEYPNAFDSIKDFAYLCVTTISIGYKDLYRNAKACAGRPKPYKYHKSGKYTVVRHIERSHKKCEYRKLLGKGKFVWRPDKNKQDTQQGKAA

SEQ ID NO: 49505 - protein, 260 aa, Rhodococcus sp.
MISSQRVSIGRVVKIKLAPTDAQAHALHDTLMLCNTAAGVASRVAQASEDCRAFALQKAVYHQLKALGLSAQPAVRTIKKVADAYATRGANLEAGNYGPRGGKRATDIAAAAIGFRALAAQPFDDRCLSWKQQGSTISIWTSEDRLKAVRYVCAPWQRALLEHCCGETDLVFRDNMWFLHATVDVPAPEPVVVEEFLGVDLGIVNLAVTSDDTAASADWSGGAVTARRGKYTRTRRTGSHRIGLCAGCVDMSIRQITMPR

SEQ ID NO: 49506 - protein, 409 aa, unknown
  TnpB Polypeptide
MEVRRTVPVKLDVDESDADLLHETIQQFLDAANYVVDAAYDGEWVETRKSVLQEETYSDVRERTELHSNHVQSARDRAVDALKSVVAKWSNEESASLPTFTTPFCEYNHRNATFYDDHATLSTVDGRVTVGYQFPDDDRDTPHSQYLTSEDFETTGATLHYREGSFFLHVRTKADVDVPDRPENGTVLGVDLGVENIAVTSTGTFWSADELNHWHREYEKRRGSLGQCGTRWAHENIQSVGRTETGRFEQLLHRVANGIVDEALENGCSYIAFEDLTNIRNRMGGLKKLHEWAFRRLYSYVEYKGEALGLSIQQVNPQYTSQRCSTCGFTHKQNRSSQDSFCCRDCGYENHADYNAAKNIGLKLRRNQTGGGGGAPVGVRLNNGMLTTNGVVPVPDSVRVGVHVECHGR

SEQ ID NO: 49507 - protein, 145 aa, unknown
  TnpB Polypeptide
MCCYINNQNFRINDDCISFPVMINGKSKRISVKTKISKRQRLIFSSSKLGTMRIVVKGHNLVSQIVYDAKEDATSSNDNVMGVDLGIKCPAVSYCPDGSVKFMEMGRKNKYIRRHYNNLRKRFQKAKKPKAVVKINNKEQRIMKI

SEQ ID NO: 49508 - protein, 344 aa, unknown
  TnpB Polypeptide
MIKTFSFRIKDSTCAKHLEAMARATNSVWNFCNETQRAAIKWGKKWPTGFDLNNLTAGSSRELGLHSQTVQAIGEEYARRREQHHKRWLRWRGRRSLGWIPFKKSGIRIKGDSVSYCGHRFRFWKSREIEGVIKSGSFNQDARGRWYVNVTCLLPEPTPTTGTGQVGIDLGLKDFATFSTGERVAAERRYRELEDKLGQAQRRGKKRQVKTIHARIKNRRKDFLHKLSTRRVEENELIVIGNVSAFRLAKTRMAKSVLDAGWSMFRTLLSYKAIARKVVFAEINEAYTTRTCSQCGARGGPQGREGLGVREWVCSACGAVHDRDVNAALNILRLGHQSLRSEVA

SEQ ID NO: 49509 - protein, 302 aa, unknown
  TnpB Polypeptide
LRDVDNAYDNFFRKVKNSRNSKYKGKLGFPKFKSKKKAIGSFRLTGSIKVFPDVIQLPRLGKLRLKEHDYFPVSGVHILSATVSEQAGRWFVSIQVEEDRPGPVIATGQPIGIDLGIKTLATLSDATPFENPRALKQQLKRLKRLSRAHSRKQKGSKNRGKSRYKLAKLHAHIANIRKDALHKTTAQIVAKTKPANARPSVIVLEDLNISGMLKNHKLSRAIADVGMSEFRRQLAYKATQAGIVVKYADRWYASSKTCSMCGWVNEDLDLSQRVFVCVDCGYFADRDYNAAKNILAVSSTER

SEQ ID NO: 49510 - protein, 380 aa, unknown
  TnpB Polypeptide
MLLSYRFRLYPSKSIQARLTEHLELCRWLYNRLLSEVNKAKEEKRRITQRDTQALIVELKRAEKPELKGVYSKVLQMVNHQLWSNIKALTQLKRNGRRIGWLRFKGRGWFKTLNYNQSGFNLESKRLTLSKIWSIPIKLHRPMEGRVKGVIVKRAKSDRWYAIFQVEEKPKPLPKTGRVIGIDLGLRHFLTDSDGRQVESPRFYRRTLDKIKRLQRRLSRKVRGSRNREKTRVKLARAYERLVNQRNDFLHKLSRFYINNYDVICVEDLQIQNMVKNHNLAQRVLDASRGRFLQMLSYKAENAGRVAASVNPRGTSQIYRFGKLDRDYNASLNILERGLSGLGRPSEPVERRPLLRITALAVITGQVASMKQEAPPFMVG

SEQ ID NO: 49511 - protein, 265 aa, Veillonellaceae sp.
MLTLQGREKATAHWQVGYFDKFYNGGWEQCSATLHERRGKWYLHIAMQKDVEEFSKEHVAHVVGIDRGLRQIITTFDEQKHIHFESGKQIARRRRHFYELRRLLQKKNTKSSKHRIRTIENRENRWMADINHQISKALVSHYGPNTLFVVEDLTDVSFDKKNLKRTKKGKKELRSWAFYDFEQKLVYKALANKSLVLKVSAAYTSQRCPRCGRIHKENRKHDRHLYVCDCCGHQMNDDAVGAENIYLLGTQWVSGMEAPHFEKLS

SEQ ID NO: 49512 - protein, 466 aa, Eubacterium sp.
MQLDHDNEYQSWRNEYCTLLKQKKLSKTDRMRKLELSKQMSARRQEIGLSKWALQSYIKVCGKRYSKLISSQQVQAEAANVWAGVEKCLFSKGKDIHFKKFMDFDTIGGKSNLNGAKFNTDTMIVSWLGLELKCYLPKKISDRNYILESLNHKISYCTIKRVIFSNGWRYYLVVTLDGDAPRRKYKTKIGVMGIDPGVSTIAAVSDTVCILEELAPDADVYEKQIYKLERHMEASRHISNPDNFNPDGTVKKCKDCKPWVFSNSYEAARRKLKTLYRKKSAYILHSHRNLCNRLLENADSFIVEKMNYAALAKRSSKTERQNKPTDVVQKDGTVKTVNKFKRKKRFGRSINRRSPSRFLSELKRKAESSGGTYMEVNTQTFKASQYNHVTDECVKVSLSQRFKLIGNDNVQRDLYSAFLIKNADGTFEHPDRDKCIYEFESFVAVHNETINYMKESKISMKQCFGF

SEQ ID NO: 49513 - protein, 372 aa, unknown
  TnpB Polypeptide
VKLTLQVQLLPDPGTGACLGATVAQFNEAATWLAGEAFAAKLANKVFLQRLHYRTLRERFGLSAQMAVRCIARVVEAYKRDKRKQPRFRKYAAMPYDQRMMSFKGIERVSLLTLEGRVLVPIIMGRYQRERFTNAKGQSELVLRRDGRWFLLVSVDAPEGTPIPTTDFLGVDLGVVNLATDSDGTHYTGAQIEGVRLSHAGTRRSLGRKMSDQHTRSTRRNARRTMKRIGNREQRFRRHTNHCISRSLVQTATGTERGIALENLSGIRERTRFRREHRARLGGWAFSQLRKFVEYKAKLAGVPVVIVDARNTSRTCFACGHCEEANRQSQTEFCCRACGHAAHADHNAAQNIARRGAAVMRPEGSERAAQAA

SEQ ID NO: 49514 - protein, 126 aa, Okeania sp.
MVKNHKLARAISDANWGELVRQLEYKADWYGRELIKIDRYFPSSKRCSNCGHVVEKLPLNIREWDCPECGCHHDRDINAAINILAAGLAVSVCGATVRPEESKSRQAGAMKQKAPTRDARESRAVS

SEQ ID NO: 49515 - protein, 613 aa, Gemmobacter sp.
LGSLTSTTRVRLPAGPHDAELDRTGELFGRLERRLHVALRAIDRGLPGAAADRNALKVAFCAEHRITARHYNSLLRALDGKHASVIEKARIDAADLEDRLAAVRKKIADAVRKLDKDAAARAGIAARAAAGKAPTRGQAKDRLNDKDRAALRRGLHGRRRKADRLEGKIARLRALTERRVPPLVFGSRKLLRSRPQDGTPDEVAAWLLRWREARSAQIFSVGSRDEPGGSQCCRPLWDGWADGTIGLRLRRLGPVPAGASPYIEITGIPLNKHASALLGPVRDLFAADGSTAISVRLVRTPAEEPVPAGMSRWEALITVEEAVPDAPHRAGARVLGVDVNADHLAWALLSPDGNRLKTGRIGLPLDGRGAEARRSLICEAASALVKVAVAGTAQIALEALDFTRKKRELSLRPESANRRRRLHALPYAAMLEAITRRAARAGVLVLRVNPAYTSVIGRVNLATRHGISTHRAAALAIGRRAQGHSERPHYPLARPEAPDPSLGAVQPRRHVWSQWVVVSREVSRLDAVARKSAGSRGEVAPGAGPFRGRRPASGRPRPTPSAPVTDWIPDFPTVPGQEPTGNTVIPTAGDTSPAVRSGLVRCGQDIVRNDYVS

SEQ ID NO: 49516 - protein, 304 aa, Bacillus sp.
MNGDKAFKRFFQGLSGFPRYKKKKNQDVKCYFPKNNKTDWTVERHRVKVPTIGWMRLKEYGYIPKNTIVKSGTIGKRAGRYFVSVLCEWKEAEMKPILNQTGLGIDLGVKDFAIRSDGIVYENMNKTIQVKKIEKRLKREQRSLSRKFENIRKRGEQSATNKRANIDKNILRVQKLHAKLANIRLAYVKSVVNDVVKTKPTFITVEDLNVKGMMKNKHLSKAVAKQCFYTFKTWLLTKCEEYGIELRQVDRFYPSSKLCSYCGQKKVDLKLSDRVYTCNCGNVMDRDLNASINLLQAKKYTILT

SEQ ID NO: 49517 - protein, 392 aa, unknown
  TnpB Polypeptide
MKSRWTFRCYPTPEQEQHLARTFGCVRYVWNWALRARTDAFRAGERMGYPATDKALTLLKRQTETVWLNEVSSVCLQQALRDLQVAFSNFFDKRAAYPSFKRKEARQSANYTERGFSFDSERRKLKLAKIGAIKVKWSRKAIPHPSSIRLIRTASGKYFVSLVVETQPAPLPKTGEDIGIDFGVARLATLSNGERISNPKHGAKWQRRLAFYQKRLARATKGSKRRMKVKRHIARIHEKISNSRSDTLHKLSTDLVTRFDVICVEDLNLRGMVKNHSLARSLHDASIGTAIRRIEEKAERYGKTVVKIDRWFPSSKTCSDCGHIVEKLPLSVREWACPECGTIHDRDANAAANILAVGQTVSAHGGNVRRTSAKADARKSPRSANRQGVNRA

SEQ ID NO: 49518 - protein, 404 aa, unknown
  TnpB Polypeptide
MKRLQAYKFELRPNGQQKRDLRRFAGSCRYVFNKALVLQQARYEHGEKKLGYAGLCTLLTQWKGQPETAWLTETPSQALQQSLKDLERAYKHFFEQRTDFPRFKKKGHSDRFRYPQGYRLDQSHSRIFLPKLGWLRYRNSRDVLGTVKNVTVSQSNGTWFVSIQTERAVEQPVHPATSIIGIDMGIARFATLSDGTFIVPLNSFTRHQQALTKAQRAMSRKVKFSHNWKKAKACVQKIHARIGNARRDFLHKTTTTISKNHAIVCLEDLQVRNMSTSAAGTVETPGRNVRAKSGLNTSILDQGWGEFRRQLDYKLSWTGGHLIAVPPHHTSQTCPACGHMSADNRETQARFACVECGYENHADLVGALNIVAAGHAVLACGGTALSGRPMKQEPAEATRAAHAA

SEQ ID NO: 49519 - protein, 493 aa, unknown
  TnpB Polypeptide
MWFVKVFMGGGDMEKVRRAIAVEVESPPSELYAVEEPYRRIVEEVAAYVAERGTLEKEKYNELYRRFRKQYPLPAQLIQQAINQGVEIGKSFLALKRDGRIHKPRPEVRRVAIRFAKDSWSYKKAISSAAPVRLALSLPGGRREVWIKPHRRFWLYWWKTLRREAELASTLILKRRRGKWYAIFVFDVMPKREPSAEVAAFDVNENTVAVARLSLLATVDRIASWNRQYINPVLYSIRTDFGRLAKRYEAVRDKKLEELKQRYPFAGRDEEERRQNVTDTREFRRFVRRLRERRRKEGRVRQIVREMTRNPAVIITEELGKNPQEEMIGLEEKRVKKRELRHRVKQTPFRKLIGTVEDKAREAGSVVVYVSPYRNSKVCPIHFTLLRDNGGWHALYCPHGHVMDRDVAAVLNMLWKVTPAGTAKGIWWDLKDVKRRLEKGRGLVPKEAKEEKSARPMARRARRLDLAQVTEGQRQMARGAGPGRPHDPCPRRR

SEQ ID NO: 49520 - protein, 438 aa, Okeania sp.
MIIYEFKVKAKEFQYRAIDEAIRTSQFIQNKCLRYWMDNKGVSKYDLNKHCAVLAKEFAFVNELNSMARQSATERAWSAISRFYDNCKKQIPGKKAVRPRDDDSRKGTRTKRGYPKFKKYCRSLEYKTSGWKISENRKAITFKDKKGIGKLKLKGTYDLNYYQLDQIKRVRLIKRADGYYSQFAIKANVKVETEPTGKAVGLDVGIKYFLADSNGNTVENPMFYRQSEKKLNRANRQKSKKYKKGAKPQSKNYHKARCRYAKKHLRVSRQRKEYCQGVAYSVIQSNDLIAYEDLNVKGMVKNRHLSKSISDVGWSTFRQWLEHFGRKYGKLTIAVSPQNTSQNCSNCGGKVKKSLSTRTHICPHCGYVEDRDINAAKNILKKALSTLGHREANTLAGDLPSGLVGFGLSSDGESMFAQRCVSKPRITVAKSAGSVKNV

SEQ ID NO: 49521 - protein, 282 aa, Okeania sp.
MKSIRTKLKLNNQQKTLMAQHAGYSRWCYNWGLSLWNAAYTDGYKPNPSFGMLRKRKLREVFTNHTKPLYPWMKNLSSKVYQYAFINLGEAFKRFFQGLGKYPRFKKKGKSDSFPTECYANTIDNCGKPIELNGWSHKLPFIGIVKTYEPIEATTKKITISRQAGEWYLSCSYEFTPTLTPKTTEIVGVDLGIKTLATLSTGEVFKSIKPYKKAQNRLAKLQRQLSKKVKHSSNWYKAVVKLAKQHRRVANIRRDALDKLTTYVAKNQPTPIPSWEGSKRGG

SEQ ID NO: 49522 - protein, 382 aa, unknown
  TnpB Polypeptide
MQTILKGYILRLYPTDEQRKLINKTIGCTRFVYNYFLDEKINDYKVTGKSKSCYDQIKELPALCKEYQWLSEVDSCSLRTSLFNLDDAYKRFFNKQNEFPRFKNKDIGNSYKTNNIKNTYKDKSYESIKIDFQNKIITLPKLKEVKFRGYRNKPCFIGNIKSAVIRRVANKYYVSVLVEEPLILPEFIPRSIIGLDLGIKDIIITSFNEKIENSLSSLEVKKRIKGLQKGLARCKSGSKNRYKIKLKIQRAYMKLKNIRKHLIHDVTNKLVKENDIIVMEDLNIKGMYQLNSIAKSLTNIPLAEIKLVLEYKCKWQNKKLLTINRFYPSSQTCSVCGYQNKEVKDLSIRRWECPKCGSLHDRDINASVNIMFEGLKMYVNSL

SEQ ID NO: 49523 - protein, 398 aa, Bacterium sp.
LSHIPSLVNDFFQIFDKFRYFHYLCIMKLTLQIKLLPSVEQAESLKKTISVFNEACNAISTIAWERRCFRQFNLHKEVYYAIKDTYGLSAQLVVRAISKVADAYKLDKKKQRKFREFGAITYDSRVLSYTAKQEASLSVIGGRIKVSYVCHRPELMQYAKGEADLLYIKGKFFLYQTIDIPDEDIEDCAEFIGVDMGVTDIAVTSEGKTYSSTEINRIREKYNKTRASVQAKGTRSAHRLLKRLRGRERRFATIVNHTISRQIVEQAKRESKGISVEDLTNIRKRASREKRNKTFRRRANSWPFAQLRSFLEYKGKLAGVNVVAIPPAYTSQTCSKCQHIGIRNGKSFRCTHCGFVADADYNAARNIATWGYVSTHERWDILSCSLHDDLSTSKANAL

SEQ ID NO: 49524 - protein, 422 aa, Methanobrevibacter sp.
MSSLIGENNCYGGDQEVTESVKVRLYPTDKQKCKINQNIGNRGFIWNKMLGKIKHENVKPTMKNLNNILKELQIDYPFLKDSESSSRQQVFIDFIRAYNKHKKEGAGFPKFKSRKNPNSSFRIQANNNNIRLNVRKNRIHVPTIGKIKFRTSKEYKQKIHESEINNMTIKYENGIYYGILNINTKHTPMKHCFEAIGIDIGIKRPLTCSDGLKIEELDLTKEEKNIKYYQREMDKKEYGSNHFLIAQQKYWKAVNKKINKKNDYYHKITNDIVKNNLVIAIETLNIKGWFKNSRWAPKLQRIALYEIIRQLKYKSKRNKREIIQVGRFFPSSQKCSNCGYQYYDLELGEEDWICPECGKHHDRDLNASINIKNEGLRLILEEIIKTIFVRDCHGLRCAGIGSTILTFYSSKNMLINRESPTS

SEQ ID NO: 49525 - protein, 373 aa, Lactobacillus sp.
  misc_feature (324)..(359): Xaa can be any naturally occurring amino acid
MLDIILKRKEGTNVLKGIKLRLYPNRTQQNQLEQMFGNDRFVWNQMLAMMNERYQNNKALPFLGKFKLNYLLKPLKKEYPFLKNSDSSSLQVVNEFLTQSWKNFFQDKSGQIGKPRFHSRKYLKKSYTGKSIIKTAGKRYLKIPKLGYVKTSKTGVLQNTKIKRYTVVLEPTGKYYLSLQVEISEPEKYSLTGKRVGIDVGVADLAILSNGLKYPSFDSSYFEKKAKVWQRRYARRRHLAKLLVLQDRNKKVLCPRSLESFANWQKAQKSKAKCQAKAANQRRDYLHKLTTHLVKQYDVIAIEDLKTKNLQKNHHLAKSIANAXXXXXXXXXXXXXXXXXXXXXXXXXXXXXXXXXXXXKLKQLISAEIICIN

SEQ ID NO: 49526 - protein, 344 aa, Lactobacillus sp.
  misc_feature (227)..(328): Xaa can be any naturally occurring amino acid
MFGNDRFVWNQMLAMMNERYQNNEALPFLGKFKLNYLLKPLKKEYPFLKTSDSSSLQVVNEFLTQSWKNFFQDKSGQIGKPRFHSRKYLKKSYTGKSIIKTAGKRYLKIPKLGYVKTSKTGVLQNTKVKRYTVVLEPTGKYYLSLQAEIPEPEKYSLTDKQVGIDVGVADFAILSNELKYPSFNSSYFEKKAKIWQKKYSRRRHLVKLLVLQDRNKKVLCPRSLESXXXXXXXXXXXXXXXXXXXXXXXXXXXXXXXXXXXXXXXXXXXXXXXXXXXXXXXXXXXXXXXXXXXXXXXXXXXXXXXXXXXXXXXXXXXXXXXXXXXXXXKGSTKLTGQGLAMVTS

SEQ ID NO: 49527 - protein, 248 aa, unknown
  TnpB Polypeptide
MRIVSNYGVELRKQNIPICQTLDIYRSAVSCLIGIYAQTWDELAVITEPKKRFNTAEQLVHTTKKNQARFDFDLRFPKMPSYLRRAAIQHALGSVSSYKTRLGLWKKTNQKGGRPKLVCDNHAMPVFYRDVMYREDTEEKDRVCLKLYDGHDWKWFRVSLSHTDMEYLRKNWAGKKAVAPVLEKRHRKYFLRFSYTEEVPLTKTPAKEQIICSVDLGLNTDAVCTIMRSDGTVLGRRFIDFPSEKDRM

SEQ ID NO: 49528 - protein, 327 aa, unknown
  TnpB Polypeptide
MEITSSYQTEILTNADMKNTVQIYRKALAFFIDVCNKEWTNISPIDTQQKRQRHIERLIHPTKSNPNPKYPFDTKGSEYYKFPSYLRRAAINDAIGAVSSYRSNYTNWQNDGKKGNAPILQHDRHSMPVFYNKNMYKETAPKNAKYPKGISPDDENVRWLKLYKNKDWIWTPVKLRRTDINYINKYWGACEDKSAPVLEKIHNKYYLRFSFTETVILSDTPIAEQIICAVDLGINTDAVCSIMRADGTILARNFIDFTSDKDRMIHAMNRTRRKQSKYGPKSTRGLWAYVKRLNEDRAKKNISGNRRICIPAFRRCYRNGASGLQGV

SEQ ID NO: 49529 - protein, 654 aa, Streptomyces sp.
LRRKLPLGEGETARTACAPALIRTGVDEKSGELLGHTALAARFGWCADLVAGMAGTLLAEHWNSTDVDALASGVDAGGRRLPSNAWMALRRLGWTTAPAEGVKVNDRIVRMAQEQAGRVLRSVKWRADLTAGVLSAWPVDPAKRTAEEWGRVRAAISDGAYLPSSVIRSRTRQVVSFERKNGRLPADVFESEPAPRVARMLLLAACDGQQATIERSDDGRRALLRLQLPTRPDPQRYADWSWVACPVTLPPTIPANAVIHLPTLRLAGGKVRAGLAYTHPVPRTRRTGHTVALGVDWGLNTLLSAGAVRLHDDGRITTLGSGARLRAAGVLAKQNRLRRNSERLHAKTDQYTRLADPDPDGRHAVLSEEMRRVSERRSNLNGALAWSAARWAVDQATAAGATVIYLEDLRSMEAGGMGRTHNTRLSQTVRGKITDRMRHLAAEAGIAVVVVPPRNTSKHCPNCLTPLRHRKAPDRPTVAGWKWAFCPNPECRWQGDRDQGAWRRIAARGLTHQTKTVTERTNGAMVIRTVVDTMEAKAVITAVPKTSRWDRSKTGPTRPGTNRLAPRRREVPSPARPTGRTGQRPEGHAPTDRRRLPHAAHRHQSVITISTPTTSRHRPRGAALGAGFHLHAHASPPRWAEPMPDLTARTGSLS

SEQ ID NO: 49530 - protein, 700 aa, unknown
  TnpB Polypeptide
MIEDIKDNVAKTTVGTIGHTSGEVAKIDMKAEQSKTVKTKQTQTEASSKGEARVIRNFTYELHDVEDIFTSKISFFLTELNKQLNALVNSNIYTKNKDKLDKVLKSKSDFRKALLHLLKTEYTDFYQKYYFEAKIFGNKAKYFRTVIEEYRRILLSRLSRQTVIDMIVNNPEITYQEVFNKLCELNDGSSDKDYKFNWISKAEFNNIIKQVSNLDKSTSEAGVAKAASYTVVQQVINVYAIDYSIEDDQISEFNLTESEDKEYYLIEFKLKYSDYTTQSDSLLTYQCKIPKKQIKGLTTGYTKLKKFTRPRVYLNTEQNKLYISYNYELEVARSHSEQTIVDDTWQFKTMGIDIGVAKSATAAIMTTNMCWATSDGETGEQQREVQDETSGSNTKTKQDKPERIVAIDITKPVAISNELTISDKTKAVSEHIEKLKEEQNHIYKKEQAIYDLLKLKAKQPDDSEALVNHAGDRAAVSISLDSAAAASGVAATPTNSTPLLQKYQILNKHRLHLRHKVSNLKKELSFLTARDMISHTIDNEVDLITMEKLSWIRDEHHTTWDYNQIQQRIIHEANIYGIKVKKVSCAYSSAHNPLTLEKEEVDQNRTLVKCLFDRDYAAAIILDRRGVKLGKKQLKINENLTHINDSFQAVSYSIKPSLKYRQLKLCEQKSIISYRSAGTARCASSKASEAKANFAYYNIL

SEQ ID NO: 49531 - protein, 443 aa, Acidimicrobiaceae sp.
VTRILATTKIHQAYRFAIDPTPEQATLLRSHIGAWRFCYNTLLGLVQANWDENRVRKDAGEEVSKDDYLKVGHLDLQKLWYEKRDELAPWWAENGSSSYNYAHVHLAKAFTNWRKGRAKFPTAKKKKSSNSVTFMNGAIHLVDSHHVRITRIGAVKSFESTRKLYRHLERGTGRILSATITERGGTWTISFTVEVERHISETRAPERVIGIDVGLSTLYTGATPEGEQVLSVENPRNYQRVERRLARTQRVASRRQGPRKGVAPSNRWKKANARVQKIHTNVANQRRNLIHETTTYLTKNYDLIVVEDLNVKGMLKNHALAKHISDANWAEFTRLLEYKSKWYGSQVVRADRYFASSKACSSCGVVKATLPLGERVFCCEACGLTTNRDHNAAINLARWATSTSAGTSSVAGRRGEVRPKQQNLVATAHPDEASTETLTLVST

SEQ ID NO: 49532 - protein, 366 aa, unknown
  TnpB Polypeptide
MRDALRMALVYAYVMAREDNSRVPSPIALRRGFREWFYSRYGYARHHINPVCRNAVALLRSYKRRHKRLEIPEVKRLAVRIDAELFKIEQEQGNDGSVSAKITLQPFRYGYITFTPRHKRWEEYSRGRASELLITDRRLFITFVTSDGKKKPLGSRFVASDINFNTIDSTIASKEGETVKLRQVKTEPIGRIARIQNDFSRRRRRIQLHVKNPQKRAKKLRETRGRQRNRIRDALQKLSTEQVRKNPGASFIFERLTGIRENGNAEKSRKLRTYLNRWPYRMYQSMVEYKSPFMTVYVSPGGTSSRCPVCGGRLEQPAWAMSRCEKCGADYGRNRLSSLAILLSWYAPVRPAVCRECGRLLAAYEG

SEQ ID NO: 49533 - protein, 401 aa, unknown
  TnpB Polypeptide
MSHPWGSRGEKRTIAVEDQPSEEILGYLSDMRDALRMALVYAYVMAREDDSRLPSPIALRRRFREWFYPRYSYARHHINPLCRNGVALLRSYKRRHKRLEMPEVKRLAVRIDAELFKIEQEQGNEGTVSARITLQPFRYGYITFVTSGGKKKPLGSRFVASDLNFNTIDSTAASKEGETVKLRQVKTEPIGRIARIQNDFSRRRRRIQLHVKNPQKRAKKLRETRGRQRNRIRDALQKLSTEQVRKNPGASFIFERLTGIRENGNAEKSRKLRTYLNRWPYRMYQSMVEYKSPFRTVYVSPGGTSSRCPVCGGKIRHPAWAMSRCNTCGADYGRNRLASLAILCRGMRLCGQPFAVSADASWRLMRDEYLHAPAAPDSRRAGWTEEAANAPNENVYTKVHV

SEQ ID NO: 49534 - protein, 323 aa, Clostridiales sp.
MKHITKLKRLPKYAEWNTVGSQAIQDIVERIDKGLKLFFRNRKAGIRSSPPSFKKVRKYKSFTLKQSGYKLFEDNRIQIQGRMYKYFKSQEIEGKVKTVTVKRDSLGDIYVYIVCETPERKIMPRPGNSVGYDFGLKTFLKASDGNDIKSPLFFKQGQSEIKRLNRQLSTKKNGSNNRRKAKQELVRAHKRIADRRKDFHFKLAKHIAEEYAVVCIENLNIKGMQKIWGKKISDLSHSSFVNILKYQCLKVGTQVAEIPRFYPSSKTCHVCSTINENLTLKDREWTCDCCGAQHNRDHNAAVIIERVGTSTLGVEIVRPAKAG

SEQ ID NO: 49535 - protein, 432 aa, unknown
  TnpB Polypeptide
VKTIKLPYRTSEDLTSILKQYSNVVRYSYNRFLEGKTEKDIRELSKSLNSIDLLNSWLIQCGIKDGKAIQTRFKNEKVIFGGKRNLINKLKNKITKEEYQLKRLCPINIQGEELKQGNRSFKLDIIENNQIIFKLNKNKHIELKLPNLRNNIKKELFKLQQLNEVKNGQKGYTYSIRFDLSNIYISFEEFKHEPIKLNENRYLGIDLNPDTIGISVLENDKVIYAHEFSLKPIFNKILSEKLSSNSNRMKYFQNKLKYETFEISKYISLIAKEFNCKTVFIEDLHFKGSSTIKISNRKNKNLWKRELFTQNLTKRLKTLGIKLHSVNPAYSSFIGNLMYDYTDAVNASIEIARRGYEYRIKKNKTGFYPNLLVKHQWKEMATKYTDWKKFFIEIKNLKLKYRVSLDECLHEFNVFQQNSTSKSMVLNYVFYD

SEQ ID NO: 49536 - protein, 359 aa, unknown
  TnpB Polypeptide
MIQYQLKLKLTKTQDRILSQWLWNLTGIYNWAVRKIKMDAGYRIYHSQKDFQNLLAGHSPKLDVPSHTIQGILTNAYTSWQRCFKKQAKEPKLKGIRNKLNYIPFPDPIKRPAKNKIRLPELKEVRFHKQYIPEGIIKCGRIIKKASGWYLCLVIDASSNPIPRISNEQVGIDPGFNHLLTLSNGGKIEHPRELEASLKRLGQAQRGKNKKLTARIHERIANQRKDRNHKLSRKIVSENVFVAFSKDNIRGIAHKFGKSVSSSGHGQLRRMFAYKSSSCGTEYVEVESKNSTKSCCVCGSLTGPSGLGDLAVREWVCGVCGTFHDRDINSAVNALISGLGDSHELLREGSLKSYKEFSI

SEQ ID NO: 49537 - protein, 487 aa, unknown
  TnpB Polypeptide
MLRRSIAVELEVTKELNKLLHSVESAYLNIVREVVEYAVANNVLNATQLHKLFYHKYRGEYQDLNSQLIIQAIRQASQIAKSFVERRRKGLVSKPYLEVRSVSIRFTEKAWSYDQFIRSIAPIRLSLSLPGGRREVWLRLHRRFWLYWWRVLNGEAELASTLVVKRKANKWYAIFVFEIKPKEEEPKSVVTFDINENTVAVGRIDIETTVSKVVDWNRQYLTPQLYMIRIDFGKLARRYERVRNAIIEKLKPGFALPNGKYINITNTREYRRCVKRLRERVRKVGRVRHVASELTRTPAIIVTEELGENPQESMIEDVGKDELRHRIKQTPFKALERAVGDKALERGSRMFKVSSYRNSRVCPIHFTRLEGTSDWHVLKCPLGHYVDRDYASILNMAWKLTPEAWTKAFWWNMRKRMDWREYEGKSNPLIPYPIVQYLHAMLKTFTASEESPAMLARGKPMNHHQIQNEGGGEGTTPRPLRAGRRSD

SEQ ID NO: 49538 - protein, 285 aa, Clostridium sp.
FTKKKNQDVKIYFPKNNKTDWKIERHKINIPTLKWVRLKEFGYIPTNSKVVSGTVSRKADRYFVSVVCEINWNMPSGQYINGVGIDLGLKDFAICSNDITKKNINKTKTVKKIEKKLKREQRKLSRKYESLKVRNKSIEKGKATRQNIQKQIVKVQKLHQRLDNIRTDYINKTVNEIVKQKPSYITIEDLAISNMMKNKHLAKAVAQQKFYEFRIKLEHKCKLFGVELRIVDRFYPSSKLCSCCGNIKKDLKLSDRVYRCECGNVVDRDFQASINLKNAKIYKVA

SEQ ID NO: 49539 - protein, 375 aa, unknown
  TnpB Polypeptide
MRQYFFEHRCFPGYRKVNADFTHENQPDYRALPAKVAKHVQMMADEACRSFLTLNALHREGKLQDRPKLPGYMDKTKGRQVLHYEKGAISRPWLQKGIIHLSGTELYIPTGADPAKVQFVRIVPAGGAFAVEVGYREELPELKEGPSRIAALDLGVNNLAVCCSNVSGPVLIDGKYLKSINQRSNKAIAKAKAEARKKNGQNMTVRIRAMYLRRNNRILDYMHKATRYLVNHFVSSQIDTVVIGHSKGWKQDTDMGKRTNQNFCQIPFNMFISMLCYKCRMAGIRAVCTEESYTSKCSFLDDEECRKHKEYMGRRVHRGLFRSHDGTVINADLNGSLNILKKEMQKMDAWNDTLYRQCVEHNLKTDLVRYKVPRS

SEQ ID NO: 49540 - protein, 396 aa, Brasilonema sp.
MFQAMYAIKIELKVNNKEQTLLRKHAGFARFVYNYGLALIQGLERDGIAGGYGKKIKAIKKVLTNYTKKQQEFQWMSKLSSKVYQSSLQALENAYRRWGQGIADRPRFKRRKDGESFTVYDSNGKILLPYGKRIKIPTLETFRLKEALPCSYCTQTFTISHHAGKWFVSFAVDAQKIPPTYHPEEKVGIDLGVKCFATLSDGTSVEAPKPMKKAKTKLAKLQWRNRKKQLGNRRLSVKQSNRAKKYFDSLAKQHDRVTSQRQDFLHKLTTNISRKYYRIRIEDLNVSGMLANRKLSAAISDLGFYEFRRQLTYKSQVYGTKVELVDRWYPSSKTCCMCGAKHDGLKLSDRIYKCINFSCVAHTIMLDRDLNAAFNLLNAPCEYVRLAQPEDTSVDK

SEQ ID NO: 49541 - protein, 216 aa, unknown
  TnpB Polypeptide
MASRSLSFAPGHLARIRVDVGISTWPSRSNRKHRAYRKARRPSALTWALKHLPRTAMAASLSQRDGIAQRANKKRRVKAIHAKIANQRKDAIHKKTSSLVQEHAVIFVGNVNAKAMAKTRMAKSVHDAAWTTFRTQLKYKAIGRCVVFEEVDERFTTQTCSCCGLISASSPKGRAGLRIREWACGSCGAVHDRDTNAARNILAAGLRRLAVGISEV

SEQ ID NO: 49542 - protein, 399 aa, Streptomyces sp.
VGAIRVKRAFKYRFYPTDAQAAELSRTFGCVRKVYNLALAARTEAWTVRQERINYNATSAMLTAWKKTEELAYLGEVSSVPLQQALRHLQTAFANFFGKQAKYPRFKSRKKSRKSAEYTSSAFRFRDGKLTLAKLDQPLDIVWSRPLPEGAQPSTVTVSQDPAGRWFVSLLVEDPGIKPLPATGTAVGVDAGLDHLLTLSTGEKITNPRHERRDRTRLARAQRELSRKTKGSSNRNKARRKIARIHARIADRRRDTLHKVTTRLVRENQTIVIEDLTVRNLLKNGRLARAISDAAWSEFRSMVEYKAHWYGREVIAVDRWFPSSKLCSACGTLQDAMPLSVRTWTCGNCGITHDRDVNAASNLLAAGLAVSACGAGVRPQRRTPGGQSAMKQETPRREP

SEQ ID NO: 49543 - protein, 468 aa, unknown
  TnpB Polypeptide
MSFPADSTVSADTAKPPKKRSRAKNREEGQEEKTAEEDEPESGGAFRMRKTRLRLTREQRGVFRRWMGGARFVYNKGVEHVRKTGKVSRSELRQLFASDKGPLAAEHPWLTHVPYKIREQATDDIYKAQKANLARQKSDPKHRKWTFKYKSRKVASSWTIGIVSQCFNQAEVMPRPETRKPRQDGRAYPDVEPRVRRWTKLRLFRDKNNELGDFWAVEALPESVLAGKRGAFALQRDCRITMDMLGRFHICVPIPTETPPVAKPEAERTVVALDPGVRTFQAYYSPECHGGYADGCFSHIFSLCEQMDAKISLQNQQPSTPYMRRMLRAQVWRIRQRIRNLVDETHRKVALDLTTRFDTVLIPEFKSKDMCQKKNREDGKKRTIRSKTARSMLTWAHYRFRTRLQHKALACGKEVATVTEEYTSKTCGKCGHLNAKFSSKTFKCAACNVVMDRDANGARNIFLKQLKC

SEQ ID NO: 49544 - protein, 358 aa, unknown
  TnpB Polypeptide
LQFQLNACRFVYNKALETRKEAWEQRQESISRYDTVKMLPGWKEEHEWLQDGHAQAMQETLKRLDLAFRAFFQRVKAGEEPGYPRFRSRHRYDSFTYPQEKGNWRFLPNDRLRLSKIGEVKIKLHRPLEGECKTLTIRRDSVGNWYACFSCIVEPKLLPPTDKVVGVDLGLATFAVLSNGKSIKRQRWMKQDAKNIARLQRKKEKLPKGGFERHKAVHALCHAYQRQTNRRNDFAHKESRKLVNEHQLIAFEDLQIQDMQSNGNKVINRGIADVAWGRFVQFSQNKAEEAGRTVVLVNPKGTTQECSGCGKVVPKGLSVRVHKCPHCGLSLSRDLNAALNILSRGLATLPFGARSSPL

SEQ ID NO: 49545 - protein, 606 aa, Rhodococcus sp.
MTDTGFTALRQFSFTTRPYLAVDDATGAPIGRGDLDIRVGWMLDLISGAETELMSRLWQPATFDVLATGRDSHGRKLPKHGHVAAARLGWTPRYPDGVYAPSPVTRVATAQAVATLRTLTYRDTAIASLSARFDPETGRLSAPSGAAEYVPSGFARGVRRQLIARTRRIGDAHSGAAQSARVRITDVQTPPRTSATARLSAADRQLAHITVTDAVMTLTVTLPTTVAPTGRAQRRRVRLAAAIPPHLHRRPISDWHLPTLHLDHRGLLLRCAATEAVPAADMTSGTTVVGVDRSPSTLGAAAIATETPEGLASDYRGWTYDDHGLGIKLARLQTEGQLLHRKAARLRRLAATAPPEVRAQLEAKIAVLDAHRETVGVKRGKINREPAFHFGRQVTDFAAAAGATVIAVEDLTTLDTRGHGRVNNNRAAQSARRKAVDALTHTAAGVGVTVVSVPARGSSASCPGCNQPLARPGGYHRAWYARCTVGGHRDHVAGVNLANRALLGRGQAVRKRGRNPQIRVIEHAPVRQCRDKKSPTPSRPRHRRVHRNAPAAKPPVGVNQTRIVPAPQASVWDTVKPATPQRVTGSREVHTTPTPATPAVGSMRPM

SEQ ID NO: 49546 - protein, 369 aa, unknown
  TnpB Polypeptide
MLKSYKYRIYPNKQQEEQIQKTFGCCRFVYNQTLVYRKELYEMKKESINKIACNNYVNQVLKKKYIWLKEVDKFALTNSVYNFDFAYQKFLKEHTGYPKFKSKRNNRKSYKTNSTNGNIEVSSDINKVKLPKLKWVKASIHREFTGIIKSAAISQAPSGKYFVSILVEAEYIPMESTGCMIGIDLGIKDLLITSDGEKFGNIRTTIKYEDRLAKEQRKLAHKQKGSKNYQKQRIKVARIHERIHNTRIDNLHKITHRLISDNQVIVSENLAVSNMVKNHNLAKAISDCGWYELTRQLQYKADWNERQYIKIGRFVPSSQLCSDCGYQNPDTKDLSVREWTCPMCGAIHDRDVNAAKNILKEGLRLLNVA

SEQ ID NO: 49547 - protein, 398 aa, Mycobacterium sp.
MLAGRRFRVELTEGQQRMAQQTADACRVVWNTGLEQRRDYRRRGAWMNYQPQAAELVEAKAEHEWLKEVPGHCLQQTLIDLDKACRRHGTFRVHWRSSRRWVPSFRFPEGSKMELEKLNRNKSRLKLPKLGWVKFRASRSLDGEAIRSATLTKDGRHWYVSVLVDDGAVAPAAHAAPDTAVGVDRGVVVAVATSDGDLLDQVFSSPREKRRAVRLQRKLSRAAKRSANRNKTRQKYAGLRAREARRRQDFCVKTARGLAEKNAVVVLEKLPVKNMTRRAKPAPDPKNPGRYPPNGAASKSGLNKAILSKGWYRFEQALQSVSRYTGTKVVKIPAAFTSQRCPACGHVDPKSRESQAVFRCTHCSHSEHAGRSAAKNILAAGRALGRNADSQNACGEDP

SEQ ID NO: 49548 - protein, 398 aa, Kibdelosporangium sp.
MTRVKQVVQVRLLPTLSQASALLDTLNTCNTAASWLSRQMHTAGTFRKFDVQKRFYAALRERFGLAAQPAIRVIGKTCDAYSTLRANLTAGNYGRPGSERRRKVEASPVVFRAQAAQPFDARCLSWRLGDTGRDGMVSIWTTAGRLRNVRIMGNPAHVALLRSRPAIGETDLLCRDGVWLLHAVVDSPETPQREPKNGFLGVDMGIVNIATTSDDDRMSGARLTRYRKRQQRIRKRLRARKTSSARRLLKKRRRKENRFATDMNHQISKRIVAEAERTGRGIAIENLNGIRERVRLRKPQRVTLHSWAFAQLGQYLSYKARRAGVVLVQVDPAYTSQQCHRCGWIDKKNRRSQASFICGRCGFVGHADHNAAHNIAARGAVCWGEVMRPHAAPTLATS

SEQ ID NO: 49549 - protein, 374 aa, unknown
  TnpB Polypeptide
MSHSKTFQYRLYPTKKQVKALQVSLDACRYVYNKTLETRKNGWEERKESISFYDTNKLLTDWKKDKPDLTNAYSQCLTDAQMRVELAFKGFFRRIRKGETPGYPRFKGKDGYDSIAYSQSGYKIIDNRLKLSKIGSVRIKQHREIEGVIKTVNIRRSGEKWYANFSCEIEPNILPKVDAVVGIDMGLISFATLSTGEKIDNPRFFREAEVKLAKLQRRLSKAAKGSADSTKQKKKVANIHVKITNKRKDFAHKLSRKLVNQYQAIAFEKLNIKGMVENHTECFGHNLNKSINDAAWNQFIAYTTYKAEWAGRQVVMVDPRNTSKMCSRCGQIVEKDLSVRVHSCSCGLTLDRDHNASINILALGMKSLLRLNTQ

SEQ ID NO: 49550 - protein, 511 aa, unknown
  TnpB Polypeptide
MSVIWGVAISVGIKITRTLKIAVAGTRRDEAILDQLLRDEVQLINSGLTLVSRFRYSKLSKRDVIALLGRATSEFFILRGTTYRKQVLAEGIAAKVYQQYKSQSRLWRRQVFLAARFADQIDYGFLQGVVEDESGTWSGLRSVVGDKSIPFGVTPESAAEFARVEPLFPRGIKNPVACFRSRACRFVRTRRGNYAVRLVHPIRLRRHMFLRVVGRGHDTFIEEILRRDGPERGTFTAELRREKQRLVLHVYFSRDVTSPDYAGRTYVGMDLGIVNVAVGAAVDPIRGLIKPKFWHGRAIRHRLRGLDARNALRTAGLKSPVVVADYKRYWTYRIAHEIVEFAAGYPSPVIVLEDLRTMKGKHRKWSRRSNRDLHSWDYGRMRDFIAHLAAWQSIRVIEVQARGTSSTCPKCGHGVLRRRASHLSKCLNPECAYQNNDDLVGAINVALRGAQLERTRSPVPGHVQALEAREAGARIALHSDFHSTTVHPTVESLSSAGSEGVRSSPSDDPKQ

SEQ ID NO: 49551 - protein, 479 aa, Microcoleaceae sp.
MGVQQVLLSPNPEIKALLEYLCQQSGKLYNSGVYLARQTFFKTGKLLTGKFDLSCESSVSKSMVAKSLPSTPMQQTLMSVTEAFKSFKELRDLYIKGQLHFKPKPPGYLKGSKLFKVAYPNSGGLRPKLVGNQLKFSLGLTVRRWFGISEFFIPMPSNLDFSKVKEFTILPKNGAFYLEMSYEIEKKQHNNLEIDRALSIDLGTAENLAACVDTLGNSFLIDARARSAMNQLWNKKVATIKEGKPEGYWDNWLDRVTRKRNHQMRDGVNKSALLTINHCLKYGIGTLIVGWNEGFKSNSNLGQMNNQKFVQMPLGKLKNRLKQLCDLHGIRFVETEEAYTSKASFLDGDSLPKYGEKPSGWKASGKRIERGLYQSANGRIVNADLNGAANILRKVASKLGLDLNQLGRRVLTTVARVRLWVLPKPTLSAESQRMKDLRVSTKVNLGLVQKYRPDKYSDQSEIGHSNAMSLPTEGDFKCY

SEQ ID NO: 49552 - protein, 423 aa, Natrialba sp.
MQKSLTKTLVFQLQPDEDGQRLLDDAFLEARRVYNETIWRAKNGEDWDEIRQDLESDANLVNNTAQLVVQKSLEAMENYYEYDDYNQPSHTKDGTYPLWSNYEEGYNLFLKDDCIRYRVSAKPYNPVKGTLSGSLDSLEQLRQAIQSDEWRVGTAEAMQRNGNYELHINITHTEIEVQDKAESRTVVGVDSNEDCIALAALHENDIVDSVVIDFPEIKKERHRYFTMRKRMQNAGKSSFDRAFEQKEERFVHDQLHKVSRQVVEWVSLFETPVIVFEDLKEMRDSIDYGTRMNRRLHSLPFRKLRDFITYKAAFQGIPSEEIKPEYTSQACSLTKCEHTTRANRNKKRFKCVECGRQDHADRNAAINIAKKELEKLDRNVPALKTLPTVRKLRRQASGCVDQPTVTHDTARGHHADGVAGVSD

SEQ ID NO: 49553 - protein, 414 aa, Natrialba sp.
MYYAYKYRLEPSDAQRKELDRHRDICRQLYNHTRYRLNEYRENHGELPSMTTLRSELPDLKKWWDDLNDVYSKVLQTIVERLFDNLSSLSALKQNGYGVGQLKWKPPREFRSFTYNQSGFKLDKKGGQTVLSLSKLADIPIRLHREIPDDAALKQVTLKKEPTGEWFATFGVEVDRELPEKLDRLKNVVGIDVGILKYAHDTDGHAVESVDLSNERERLEREQRKLSRKDHGSNNYEKQRRRVAECHADLKNKRRDFLHKLSNYYAREYDLVAVEDLDAKGLVELDGNSRNRAGAAWGTFLQMLEYKCEREGTRFVAVDPAGTTKECAACGVSSEKPLWVREHACPSCGFTADRDWNAAWNILSRGIKQVGAGRSESTPVETALPTGTTSVPAKRVVEAGSPTLKERTASAVSE

SEQ ID NO: 49554 - protein, 525 aa, unknown
  TnpB Polypeptide
MARAPKPTFITELPLVVSHAQDAVMMGRFESARRLNNAVLGDGLKALALMRESKAWAAAKAMPKGEAKSAARNARNEAFKACNLHFGFTEYALQALATAHKNAAGLDNRLGAHETQKIASRVFASLQEYAFGKRGRPRFKGKDRPLHSMEGKSNAAGPRWHADTATVSWGKGFVLPVVMPTKSKDPYIHACLQAKTKYCRIVWRMEGAKRRWFVQIVQDGVAPAKYEFLSSGQAVGLDIGPSTVAIVGDDAVGLEKFAPSVEQPWKAMRVLQRAQDRSRRAMNPDNFNADGTAKKGSKRWVKSGHYERRQHKLADLERCLAAARKRDHGELANKVLGLGNLVQVEKLSYKGFQKNFGRSAKVRASGMFVSLITRKAESAGGKVVELNTWKLKMSQYDHTTEVCTKKPLKQRWHTLGKSNTLVQRDCYSAFLARNVIENQHKPSHLREDWATAELLLRRAGLCVEQSGIGERLRFPTVEFKSLPSDRIARRKRFVRGHARDVVAEAARSMREPANPSQSASRTPCL

SEQ ID NO: 49555 - protein, 459 aa, unknown
  TnpB Polypeptide
MSDNTYPSNNTRDYKAQFQKKAENAARRASMMDIKVFQLKIQANHLNQTQKQFLHNVFLEAKWYYNSCIAFGKVEGNKPYKNDCKAKTVVHYDKNKNPIISEYTCLSAASRQEINKQIGTACKSIKSNLKAGNIKHTKGLSFVSEVNSVSFRQFGNSWKFDGTKVKLSGLKKSLKVFGLQQLNIEGIEFANARLVQKPTGWYIQVTCYVPKQERKHNYQTVGIDFGCETSFTTFVDETKQSRKLSYCFEQSENEKRVQRKLSRRRSKKFSNRTNKGLRLTNKLRKQKQKRSNQKKDAANKLIFWLKQFETAVIQDEMLANWQKSGHGKKIEKGILGRVKAILKTLSNTFVLDHSLPTSKYCFDCFHKNDDLKVWEREFVCPNCGCITDRDVHAAQNMIAFYKLIQMVPMECRDPKRIKETLIDIEKRVETNLSRSLEEVIQLMIQGLSKKHEALDLSQG

SEQ ID NO: 49556 - protein, 421 aa, unknown
  TnpB Polypeptide
MALASFRGLRCAGRRSILKAEGRRTEIRMIRTYKYRLYPTKAQARALDVLLWQGRTLYNAALEQRITVYRETGEGVSYYQQWAHFRDLRHEQPDTLGLLNATSVQQLLRRLDKTFAAFFRRVKAGETPGFPRFKGRDRFHSLEYRHGDGCKLRFDDRHRALFYVQSVGEVKVKYHRPLPDGAAIKHVVVKRRANRWYVCLMLDLPDPVVPAHAGPAVGIDMGLYHLLALSDGTLVENPRWLRQSLAQLRVAQRRLARRKKGSTHRRKAAAQVARLHERVANQRRDFWHKTTRQLVDVYGLIALEDLSLAFMTANHPLALSAHDAGLAEFQQLLAYKAEEAGTQVVTVNPAFTSQACSACGGVVQKDLSVRVHVCPDCGLTLDRDVNAARNILMLAVNPARTGPPERNVAHLRERALGSSPL

SEQ ID NO: 49557 - protein, 588 aa, unknown
  TnpB Polypeptide
MFFTGENMRAGRNFQPLSYDVRLPDEAQADALRLLDASRAVVNALLTRLWPRLDEFMGERSGPAWKQVIAMTGSPGPHGDRQFRCESETAGRIMRAQAERKQVFALIQPILTEGFIRPTEGKRPAGKHRKQIKEAIEALQTRLSDDETAFVTMQNVVEQACNHFLIHGTFPACYEEMQAIPLLNVGMLTYAGDDGGNKGQSYRLSFDLQAGTASLRFRFPDEAGRWQWKQDPILLPLPTCVVERLKQGLPMAPTLRELIKPDGSRVAVLDVIVQVKKSTLPDWTQVERVLGFDWGVNTLITAAIYQQNPAEPEHPIQISRPLFVHTGGLDGHQARTRRQIDQLKAVRDQVAAEDPRRAIYEEEIRRCWRLYEARNRELAHLAANLLLLFASVWGCSLICGERLSTLKSTGRGRGVRGKWRNWRNNTTVRSEIWHILRYKCHLLGIRFRSETPAGTSHTCPHCGEQARTYRSPRPHHRADPVKWGRWLWCPHCGFNGDRDYCAALNIARLGIAFLTSMQRTGIGKAFSVTEIVSVKPYPYIAYGAVPLFPPHTDLHRLMDSGKLYINGWKKSVTLRSSYATPVLLRLCS

SEQ ID NO: 49558 - protein, 355 aa, unknown
  TnpB Polypeptide
LRKEAELASTLVLKRKRNKWYAVFVFDVAPERKPPAEVVAFDVNENSIAVARLSLLATVDAVARWNRRHIGPAVYFIKTDFGRLAKRYEAVRNAKLEELKRKYPYAGRDDEEKVQNVTDTREFRKFARRLRERRRKEARVRQVAREMTKSPAVIITEELGKNPQEEMIGVEEKRVKKRELRHRVKQTPFKKLVRAVEEKAAEGGSAVFCVSSFRNSKVCPIHFALLKNGGGWHTLYCPHGHAVDRDAAAVLNMLWKTTPTGWVKGVWWDLRDVKRRLEKGRGLVPRDFAKRRNPLVTWPVVHAVWTSLGAQKAGNKWPAVLARAAPMTPAQGADEGGTRTPPRGAPVLGEEVSSI

SEQ ID NO: 49559 - protein, 232 aa, Ruminococcaceae sp.
VSKQIEGRIISATVSQNPSGKYFVSVCCYVEHPQLESTGSNIGLDLGIKDFAIDSNDEKYENHKFYRKEEKKLAKLQRQLSRKPKGSNNGNKARTKVARLHEKITNQRNDTLHKLSTKLIKSNDFIAIETLKVKNMVKNHKRAKSISDVSWSEFVRQLKYKAEWYGKTVVQIGTFYPSSQLCNVCGYKNAEVKDLKIREWDCPECGTHHDRDVNAAKNILNEGLRLYAIQTV

SEQ ID NO: 49560 - protein, 152 aa, Sphaerotilus sp.
VDVPKSAGTGSVGIDLGLKTAATCSDAMHKFSTGLVERNAAIFVGNVQAGAMVKTRMAKSTLDAGWSMMKTMLEYKSHQAGIVFEEVNEAYTTQTCSRCGGIPASSPKGRTGLRMRRWTCCDCGAEHHRDVNAARNIAARGHARLAGGIPVL

SEQ ID NO: 49561 - protein, 415 aa, Methylobacterium sp.
MARTDRDHRTRIQVQVGLLPEQDALFRQFAGMCRLVYNLGLEQKATWGRKHRLCYVAQAADLTKLRAEFDWVRAVYVSCQQQALRDLDRAFRNFSAGRASFPRPRRRGVDDSFRFPGREVAVKRLNGNWSAVRLPKIGWVKFRDSRPIRGVVKNVTVSLDAVGWHVAFTCEIVHEALAPGSEVVGIDRGVATTLALSTGEMLTMPASLEWIEARKRKAQCVVARRKRGSNRRRRALARVARLQARQARIRRDFHNRAALDIARRYGVAVFEDLNTRGMTTSAEGTIAEPGRNVRQKAGLNRTILAAGWHLFATILTYKMEQRGGQVVTVPARFTSQTCAACGAVDARSRESQARFVCVGCGHTDHADINAAINIRRRWNTSLLDVKGVHRQPVEASTGRDLPISENPHPSGRGRC

SEQ ID NO: 49562 - protein, 420 aa, Methylobacterium sp.
VEADPTLAVAEIVNRFKSRSSRLMRQEFPALRSRLPTLWSRSYYPGSVGHVSAKVVEAYIAAQKGTGAVAVRSYKYRLRPNRAQTAALDAMLRDFCGLYNACLQQRVEAYRRRGLNLRYGPQASELKACRACDPDGLGRWSFSALQQVLRRLDQTYAAFFKRGHGFPRFRASARYHAATFRIGDGLTVKKDRRIGVVGVVGVPGGLKVAWHRDLPDEAKLGTAILTRQQGKWFMVLSVEAEFAETCGTGTVGIDLGLNSLIATSDGETVEMPRFARKAQKAQRWRQRALARCKRGSKRRLKAKARLAAGSAKIARQRRDHLHKLSRSLVSRYWGIAFEDLTMTGLNLSRVWDSQSQDTRDPNPRLQMWRGSGPGCCCGDRRASAGFRAGTRPSGHKPAGCRIAVPRSRLLQRAELSRLGS

SEQ ID NO: 49563 - protein, 392 aa, unknown
  TnpB Polypeptide
MKAYKTEIKPNKEQIKLIHQTFGNTRYVYNQFITLNFQRLDENQGIISGYDYSKMINNDPERPDWLVKSSSKAIKQAIMNAEKALRDYLKGNKGKPKFKKKTQNNSFYLIGTIKVERHRIFLPKLKWVRLKEFGYIPENVKSVTVSMKNGRYYISCLVHETKDERIATSDQGIGIDFGLKNQFITKNETIPSINNSKEIKKLEKKLKREQRSLSRKYENNMTNKVYYKSGKKKGQLKSFEYVRPLRECKNLNKQRLKVSKIYERIAKIRTDYNQKALQSIMKQKPRFIVIEDLNIKGLMKNKYLSKAISKAQWYMSRLFLTHQCDKLGIELRLAPRFYPSSKLCSNCGYKNVDLKLKDRIWTCPKCNIVHDRDINASINLEQCSEYTVLTTV

SEQ ID NO: 49564 - protein, 421 aa, Halorubrum sp.
MEKSLTKTLVFQLQPDNERLLSAAYHEARWVYNQTIRLGKNGTDWDDISPRLEDEADLVKNTTQRIVAKALDALQQSYDRDDYNTPSHEKTGPYPLRMNFTEGYNLSLNDGGIDYRISAKPYNPVKGTLRGSPDDLELLEQAIESDDWRVGTAEAMTRNHNHELHVNVTHLEATVQNKQDAQTVVGVDINEDCVALSALREEGIADSVVTDYPEIKEERHRYFTMRKRMQNAGQTAFDRVFEDKEERYVHDQLHQVSRRIVEWVQQFESPLVVFEDLKHMQDSIDYGTRMNRRLHSLPFHKLRSFIAYKAAFEGIPSDDIDPAYTSQTCSFSKCEHTAQSNRRKKRFKCNACGRQDHADRNAAVNIAKKGLESLNRNVPALNTLPVVRKLRRQASGCVNQPTVTHATVRGHQADGRVGVSD

SEQ ID NO: 49565 - protein, 456 aa, unknown
  TnpB Polypeptide
LRCGRLSSKSSAFRGGYPVLQRREEALRAGRHGWPVSVGGGLYSRSMSRFRMHPTPAQEVVLRGHCGHARFVWNLAVEQHSWWTPRRGAAPGFVAQSNHLTEARAAFPWLAAGSQTVQQQALRDFAQAMKYYFAGTHRRPTWRKAGRNEGFQIVGRHAQKVQRLSKHVGQVWIPKAGWVGFRWSRTVPDAKSYRVALDRAGRWHIAFAAIHEPKPTPGNGILVGVDRGVAVSAALSTGELLTVPGLAAKQAERLVRLQHRLAKARPGSQRRSRLKAAIAKLKARETDRRKNWVEQTSTHLTRSFDLIAIENLKIGNMTRSAKGTVEQPGRQVAAKAGLNRTVLASGWGLLAQRLEEKAPGRVIRVDPAYTSQMCHRCGKVDANSRKSQAEFACTSCGHREHAGVNAARNIAARAHAVRDATTHAVAVLAAGHAVTARGGNPVGKPANREPQHAFTS

SEQ ID NO: 49566 - protein, 394 aa, unknown
  TnpB Polypeptide
MCRYRLELSRGQEEILQRHCADARYVWNLCVEQESWWRPGRGTMPGSVERCRQLTHARADNPWLADGSVIVQQQAVRDHAQAMANFFAGTQRRPRWRKAGRNEGFRIVHLKQRDVRRLNRHWGEVKIPKAGWVRFRWSRAVPGNAKSFRVTYDRAGRWHIAFAAIPAPVDGPGTGEAVGIDRGIAVSAALSTGEMLRVPGLTAAETARLRRLQRILARARRGSRRRRKVKQAVGRLKARDADRRKDWCEKTSTDIARRFDVIRVEDLSIKSMTRSARGTISAPGRNVAAKTALNRGIRRSGWGLLARRLEDKARGRVQRVNPAFTSQRCSACGHVASESRESQALFHCVACAYTDNADVNAAKNIAAGHAVTARGGLGIARPVNREPQPAPLAS

SEQ ID NO: 49567 - protein, 381 aa, Cupriavidus sp.
MTPVTRTLYATSSCVPALRAVCRATAFVRADLWRRYGALGNVGKSAADIRKEVTAGGWYASLAVDGTIRAETTKDAVNDILTYKAAACAKVRQAIAKRTCDEAERKRLYTLLKSDKWLEDKYLHRMMRKYFRHGVSSCDNQFIVRSDKHESRVRDGHLVITIHIARQYGPPIELTTNSNGKNVDLTGCNLRVIVKGDAVEIHYATAKAHGRPCGSGEIGVDKGYTEAFADSDGEHHGQTFGAVLSAFSDQVSRTGKARNRLHALEKAHRKAGRVAKAERIRKCNLGRVKLQARRDRTKQRLRTSAYQSAHTIVDKAAVVGSEDLTSPIKGRGQWRHYNRRMSAWAKGVLAQALDEVCTQRGATHALLRGVCGGAGLAPAVA

SEQ ID NO: 49568 - protein, 386 aa, Actinomadura sp.
VKLVVQVKLLPTPEQAPALEHTLHRVNTAANEVAAVAFEEFGLRCREMPLRRLCYGDLKAAGLGAQAAQHVIKRVVDAYTTLRGTIRNGRLGGPASKRRRKVESKPITFRPDAAHTFDDRNLSWQFDAGTVSIWTTAGRCKNLRFACSPDQAKMLTAHRKGESDLVHRDGKWFLLATCDVPEPEVFEPVDWVGVDRGIVNLATTSDGDNHQGRRLGRYRRWQARKRAELQAKRTRSAARLLKKRARREARHATHVNHTIAKQVVAVAARTGRGIALEELSGIRGRVTVPRDQRARLSSWPFHQLGAFIAYKARRAGVPFIEVDAAYTSQRCPRCGHTARNNRPSRDHFCCRRCGLAGPADVVAGVNVRDRACSAWVFVNMPQPTPA

SEQ ID NO: 49569 - protein, 388 aa, Microtetraspora sp.
VEKAKQTRAHVARLELSTAQVAVLDGQAHTARALWNLLHEYVTFRQGRFATLKECDTAIRVARHEIDWMGQLPAQAAQAVLKTYRQAWANFFNPDHPAKRPTFKARFGSRLAVDVPQARDLQIKRINRRWGAVNLPKVGRVRFRWTKDLPGVTKGGPTGRITGARLVKDAFGWQIMFRTENEAAPVTDTHPGPAVGIDRGVTVALALSDQTTREHGPWLTGGEREHLRRLEKKSARQRAARTPGQHASHRLTRTYGQIARLRATAKRRAVNWQHQTTTELADTFSVVVVEDLKIANMVRSAKGTIEAPGRNVRQKAGLNRAITGEAWGRTLALLEYKIRDRGGLVVKVPASGTSQTCHRCGHRDAATPCGSSGAPLGRSSAWAPSAAV

SEQ ID NO: 49570 - protein, 320 aa, Cyanobacteria sp.
AISRFYDNCKSKKPGKKGFPRFQKDNRSVEYKTSGWSLHPTKRRINFTDKKGIGELKLLGKWDIHTYPAKSIKRVRLVRRADGYYCQFAVDVECVNIQPKTGNEIGLDVGLESFYTDSNGYQEPNPKFLRKAEPAIKHAGRQIYKKQKGSNNRRKARARYSKKHLRVSRQRDEHAKKLARNVCKSNDLVALEDLVIRNMLKNHCLAKSIADASWSKFRKWLEYFAKKFGNLAVAVGPHYTSQECSQCKRVVKKSLSTRTHICQCGCILHRDWNAAINILRKAKSRGGHPRSNAKGVGTSTLLGANLVEQVLTLNLESPCL

SEQ ID NO: 49571 - protein, 305 aa, unknown
  TnpB Polypeptide
MSVLHSRTSSAGSRPGTRSRAIRSSRGKGVHDSFRADNGPQTAGADAVPVAAKKVKLPVIGWVRMREAVRFQGQIKSAVVSKMADGWHVALAVETEAKLERTAHHGPVGVDLGVKTLAALSTGEAVEGPKPHKGLLKRIRRLNQSLSRRVEGSANWRKAKTKLAKLHKRIADIRTDAAHKLTTRLATEFDAIAIEDLNVSGMAKNHRLARSVMDGGFFELRRQIEYKAKMTGSSVVVVDRWFPSSKTCSSCGQIHDMPLSVRRMVCGCGNDMDRDMNAARNLAKYAASSAVSACGVLSAGVAQAA

SEQ ID NO: 49572 - protein, 422 aa, unknown
  TnpB Polypeptide
MSSEKLLLSRKHIVKNDDVNNRILRHMGYAAYKLWNIGNYEKRNYKELKLEKYPDWYDQKKRLKTNFFFKNLPSQTAQEVLKQLEESYKSYFTLRKKYPESNYRPPRFKNNLIDITFLKDAIKSENGVLRLTIPKQLKTYLKSQEKIESDYIYLKVKRFDKLNKIKTIEIKFIDEKSFAVIAVYEDREIELKSDNGKYLSIDLGIKNPFTCFDSSKGNAFIVNGFLRATHYYDKKIAYYQSINAAQQSKAGVKYPKLSKRVKKLYEKKSYSVFNFIHKASRTIAEYCYENDINTVVIGDIKGIRSTSDGKGRNIGRNNQQLHSLPYDLIYQKLEYKLKRMGIRLIKVKEAYSSSCLPDSEKVSKSYADKSLRVKRGLIKDNKDRIFNADAVGAYNILRLYFQKTEKTAIGYTNLSSLNKVTV

SEQ ID NO: 49573 - protein, 563 aa, Polaromonas sp.
VQLSFQTRLTLAPVVDQCFDAFGALFGSVERTLYADIARGRKAHDLKSFYCAEYGLSARQFNGLRIQLEGKISSTVELLKLRKTELKRHIDATKRFLKKLATSLETQSKAAKKARPSPAMIKQCVKWRDQVFNKTRRLESLQQKFDQVMVRLKAGVPGICFGSRKLFRQQFHLEKTDFGTGEAGHQNWRRAWRDARSHQFFLVGSGDETSGNQSCEARVVHAPPTTGVAPPATLTLQVKVPPALVRKGYPPFLTIEDVTFAYGHDQVLDALKNGTALSYRFHRDHHGADGWRVFVSTDVVDAPVRSMRRDFGILGIDFNADHLAWAITDRFGNTVQAGRVDLPLDGKSTGQRTAILSDAIDEVIVLARDHGVGISIEDLDFTKKKQELRTMGVERARMLSGLAYSAFRRLITAKASRTGVALHVVDPAWTSVAGAVKYATRQGRTVHQAAAGVIARRAQGYSEKRPRSGAHRVPLLGGTAELSLPDRNRDESPRAAWGAIRKCLTLQVRARKRLSSCHAKGQPGGAAPGSSHLLAGGGTTVSPVREPGTLLARRLPDFPDVPF

SEQ ID NO: 49574 - protein, 376 aa, Nitrospirae sp.
MLRTASIRLEATPQQSAALHALRSAYADACNLLVSVVRAHRVALHQRAYTMLRQNTPLGAQMCCNAIFSVCKAYRAQKALGRIKSDAPVPNIRFDRASVHFDQRTYTLKGETVSLNTLCSRIAVPMRLGEHQRQILKSGQAKEAELLVRKKRWDFNLVVESSDKEPVASGPGVGVDVGENTLAAPSTGKVFGGGKLRDKRDRYLALRRRLQSNGSQSAKQKLRQVSGKEARRSHHINHETSKAIVEEAKRLGVAKIVMEDLTHIRERIKAGKRVRARLHRWAFRQLQTFVEDKAKAAGIAVEDVEPAYTSQTCSCCGGLGQRVKHRFVCGHCGFRAHSDVNASRNLARIGGTAVPSRAVVHTPDVGSADNHVCASQ

SEQ ID NO: 49575 - protein, 508 aa, unknown
  TnpB Polypeptide
MPKLKVKTDSFVLELPLVVQPGDDRVMIGRLEAGRRLFNTVLDEALKRLDRMRQSTEWQAARSMPKGAAKNAAFKSCNEQYGFSEYALHAAAIRHKNAASFADRLGAHETQKIGTRVWNAVAEYAFGTRGRPRSKGRNRPLHSLEGKNNATGIRWSAGTGCVTWNGLVMPAKLPTKQQDPYLHEALAAKTKYCRIVWRVEAGQRRWFVQMVKSGKAPAKYNFNAKGEIVGLDVGPSSTAIIGYDTVALEKFAPSVDQPWKEIKKLQRAQDRSRRATNPQNYNTNGTSKKGAKGWVRSTRYQKRQIELTEQERKLAAGRKNDHGHLCNKILSLGNVVQAESLSYKSFQKNYGRSAKTRAPGMFISMLNRKAESAGGKLIELDTRRLRMSQYDHVTGLCVKKPLSQRWHPMGWSDVLVQRDCYSAFLAKHAVGSEHNPSQLAEGWAAAEPLLRRAGLCVQKSASGFPSGSPTVLLPSERIARQRRFVRGLSQCSVVERPVEPGGPTHARL

SEQ ID NO: 49576 - protein, 455 aa, unknown
  TnpB Polypeptide
MVEANRTVVIPLNVPEEYKGDFHHTITPYAYCQQETVEHCWPDNPKQPSKLETSKQAAENALYDRLRDETDEQLNANLVQKAIKDATAAISSCKTSWENGDRISKPDFYDRDYAGYTMTYDKRAATYNRYEATFSTVNGTVTCRYELPRELAGTPYAEYVLDRRWSFSTSKLVFDRERFWLHAVMKRQFGDDTVYAPKTNGSDTHNEDTHRVLGVDLNVDGATAVTSTGHFYGNADALNAYRDDQERLRGELQQTGTRSAHLRFQERRGTEWRYYDQYAHYVANSIKQEALRVRATHVAFEDLTRIRKRISNLPKFQQWLFKKVRKYTEYKLERYGVPVDTVKPKYTSQRCSHTECDCVDEDNRDGKHFECIECGYTLNSDYNAAKNIGFRYLSDEVASPASHKCSSGQAARQLALLSGTLTPSGTFAEHEWVSTDKPLPQQASESLDSERSRVG

SEQ ID NO: 49577 - protein, 416 aa, unknown
  TnpB Polypeptide
MPSLFSKLAVSSPRSDDVQYIALTLSVPHLSKRKRKILENYQKAFTKCVTFFLDKSRELNTSSPYKLHMMCNAEAREKFDLGSAAIQSARDKAVSMQRIFWSRVRHRKHTTRPETAGLVPIVLRQDAYVWGRTHRGNRVIRFLIEAGRKKYLVVPVSPRPYALKYLDADFKSGPAELYRKPDGRWCLSVSLRILIHYDKFSSVTGVDLGVRHPAVTSGGKFFRSGVLSGIFHGLTAGKFQSRSERRKNMRRADNVNHHISRNLVNLVISQGAAIALENLNGLKERLLGRGGHDRSLPPQVVWRWSYRRLAAMIIYKARLAGIKSVTVDPGGTSITCAVCGWRAGKNRPSPEKFSCVNCGHTVSADLNAARNIASRGAAMLGIAPSPAVAEPKKSSQASPNPADKEINEPRAEEYQV

SEQ ID NO: 49578 - protein, 402 aa, unknown
  TnpB Polypeptide
MNSSVKSLFLFFAGKGINKIYILLFQLIVYLFSVFFPEFLKNCRFEWTFVDFKLFHAICNSNHKNWEALSPAERGAEPKMGFPTIYELTFYKQERRLNFSEGVMELKLYDGTKWDWYAFRINKSESEYIAKMSKTRKLLSPVVEKVKEKYRVRFCFEEKRQLVQNECPLKYRILVVDLGINAPASWSVLTADGTVHARGVIHLGRDEDRLNRRINRKRMYQQAGKKSKNIYRAITSANQQLSIDTAKAIMDTAVAYDVDCIVFEYLDFTGKKKGRKYRERIHMWRANDVQSRVELQAHRMGMRISRVCAWGTSKYAFDGSGTTNRRSVYHYEHGNKKYNYSVCKFQNGMIYNCDLNASYNIGARFFLREYEKLDGCPKLPPVPMRTLDTLLTLLYSSGEKAA

SEQ ID NO: 49579 - protein, 419 aa, Bifidobacterium sp.
MSYKNCAMIITMSSDGVVQRAYRFRFYPTPQQEDLLRRTIGCCRLVYNKALAARTEAWTTRHERMGFAETSRQLTLWKNTEELSFLNDVSSVALQQSVRHLQAAFSNFFNQRGDYPEFKKKSHGGSASFMRTAFTWNGRDLKLAKMGEPLNIKWSRTLPRNAKPSSVTVILDAAGRWHVSILVEEHVKPLPKAGTQVGIDMGLADFAITSNGEKTANPRFRKRDAQRLRKAQRDLARKRKGSNNHRRAMLKVARIQARIADRRKDFLHKLSTRIVRENQTVVIEDLAVKNMSRRCKPKPDPANPDLYLPNGQAAKRALNRGITDAGWRMFRTMLAYKCEWYGRQFVVIDRWYPSSQICSTCGKNTGRKPLNVRAWTCPACHTTHDRDVNAAKNILAAGLAVNVCGDQRKHRDALSQCEA

SEQ ID NO: 49580 - protein, 407 aa, Sphaerospermopsis sp.
MKLVERHIIKKAHQFYQQIDELCWRSKNLYNYANYLVRQSFIFEGRYLDNTKIYHQVKQHESYKALPSKVSNQVLIVLHRNWKSFLHATEAYYQDPSKFLGRPKLPKYKDKTQGRNILIYELGTISKPALRTGIIKLSQTNIQFPTSASNIKQVRIVPRCGQYVIEVVYEMEAKPQQLDPNSVAGIDIGLDNLAALAANKPGFKPVLINGKPLKSINRHYNKVKAKLQSQLEGNAHTSHRINTLTCKRNNQIANYLHHASRWIINYLVKAGIGTLVIGKNEQWKQEINLGKTTNQNFVSIPHARFIEQLKYKAELVGITVFIHEESYTSAASFLDLDPIPVYKKGETYNFSGKRIQRAWYKSQDGGLIHADVNASLNIARKVVPAAFSLGIEGIAVCPFRVTPGKVA

SEQ ID NO: 49581 - protein, 319 aa, unknown
  TnpB Polypeptide
LRSEGRSGFKKVKYCRLVRKTIKGKNRFYLQVVLEGQAPIKHIYASTSERLSIDPGPQTIAVFSDVWAGKIKVSPTAQVDEKRLRCIQRSMDRSLRKSNPDCYESDGTLRKGCVLKKTKGYEKRIQRLQECHRKAAATRRCEHGQLINLLLSMAGDIRVEKNQWKAFQRGHFGKSLSKSGISGFIERLKSKAESAGLKVTEVKPYKLKLSQYDPYTDQYRKKSLNERWHSLGESSEWIQRDVMSALLLQCADLEEEKHIPTEVIKTLEGVKQLLRDAGYVILKPSSNGESNPTFASEPKAVTPEKVRLEIFCGASDSYL

SEQ ID NO: 49582 - protein, 508 aa, unknown
  TnpB Polypeptide
MKRTGTSTFVLTIPLVVKPGEDRILIGRMEAGRRLYNATLGEALRRQGLLKQSKDWQHTRTISDKKARGTEFNRLSKEAGFTPAAIITFARTCKNEAGWKDRLGSNVTQRIAEQVFAAMQQYSFGKRGRPRFKGANRPLHSLEATTNAANIIWKAETGCIEFGDLTLPAKLPTKEQDPYIDQALANRTKYCRVLWRNVNGVRRWFVQLMQEGLAPAKHAVSAGSVVGLDIGPSTIAIVGDDSASLVKFCDTVIQPWKETRRLQRAMDRSKRATNPHCFNANGTWKKGQKFTPSKRYTAKRTEYAEVERKLAAERKRAHGELANQILGLGNIIQSEKLSYIAFQKNYGKSVKVRAPGMFVEQLRRKAESAGGKLIDLHTWSLKMSQYDHITQNYTKKPLSQRWHVLGDGSGVVQRDIYSAFLARCVISNTHHPSHLETMWAAQKPVLLQTGWMCDEPAKIEPSGKITVVIPSEQVVCRRGLASGHGSDVVVERREPRDPAGSVLRTPCL

SEQ ID NO: 49583 - protein, 326 aa, unknown
  TnpB Polypeptide
MKRGIIHLYKIGILFQNRDFEHDVYELIKAFYPGNEIVSLYEEDDADYDIRFRVSRDEEGYTISYNNGIEKKTAHGAVIEGQSSGEASDALISCNDAHDIRRKNKDAIKYALYQMLSKATGKTLPWGNLTGIRPVKMAMGMLESGMKNTEIARYMRDQYLVSPEKTALAVTIANRERDILKNIDYENGYSLYVGIPFCPSICLYCSFSSYPLERWRKYVEAYLDALVKEIRAVSGMMKNRHLSKAAASQKFYEFRTKLKTKCAEYGIELRVVDRWYPSSRICHCCSCIKKDLKLSDRIYRCTCGYIEDRDLNAARNLRDAETYEVA

SEQ ID NO: 49584 - protein, 411 aa, unknown
  TnpB Polypeptide
VLAHRALVFPLAWEDLRLDWLLAEFRLLVNESIRVALKDDLRSRARLTRAAYKDLSQRHAVYKQYIPSAFEVALAALKVYRRRLRKGKRTTIPFMRRSMLKAENQSYRLDRETGRLRIPIRGTEGLQLQLPLSEWHRSILGDPSWDLGSLTVVPGKIIVVVRKEAPKPYEPQGAIALDTNKDSLDGVLASGDSAGLLSLPFDGVRCIQEIHFRRRRRLARKKANDRRVARRLLDREGRRERNRVRQRLHRVSKGLVRLATEARAAIVLEDLTLHGAGGRSRRMNRRLSSWPRGEIHRQIEYKAALEGVPIIKVNPQWTSKTCPACGARRRDRVGKVFECLQCEWRMDRQLNAGMNILKTALASNEALARAVRFQPGALRDDVVSPLYDLLRGGVGARDEPSGVELDASKIT

SEQ ID NO: 49585 - protein, 489 aa, unknown
  TnpB Polypeptide
MASTVMFLTNSRMKISAMSNSLFSKLKNLKKHLPKDRTNIVKGFKFRVYPTEEQKQWHDQIFGTTRYVYNWALQRAEEYRKESRDQGETKKYLSEGDLIKEMQELIKDRTRGYGWISNHIQANTRNAVIKNLSEARLRAAKGISEWPKIKSGKKGKQSAYFHNQTFIIEHPDCRCTCKRSTCLWHFRKKGASYKLPRVDDIGEARLLVSYAQSDGAVPLKVVFHRRLPVGGYINSMTLSRDSAGREYVSFSVTYDGGLAKPDLTNIKADEILALDLGISRLATLSDGTKIDNPRWYVKYQERLAHAQRAISKKVGPDRRSRRRPSNRWLKQNKAINKIHRKIADKRKDYTHKFTRETVDRAVEGGYKAIAMETLNAQGMSRNKNLAKHVLDANFYEVARQFEYKCEEAGLHFVKIPQFFPSSKVCHKCHHKFDQLTLNMRHWVCVSCGSEHDRDLNAAKNIQEVGHIMLSTDKNTVNQMLDHLDITAKV

SEQ ID NO: 49586 - protein, 387 aa, unknown
  TnpB Polypeptide
MTTPTGHKTFKYKLRPTPEQSTQLVTTLRLCRELYNAALQERKEAWQKCRVSVNYYQQKAQLPEIRAYREDCAAVNAQVLQDVILRMERAFKAFFRRVANGDKPGYPRFKGRNRYHSFTFPQVGPHGCAQVDNEFLVLSKIGRIAVRWSRPLEGTPKTVSIIQEPDGWYACIACAAVPIQPLPLKGEETDIDLGLESFLTLANGEPLANPRHYRKAEKRLVKAQRRVSKRKRGSKRRSKAVRLLQRAHQKIARQRRDFHHKTVLLLIQQYDTIFHEDLQVANLVQNGQLAKSIHDAGWRQFCTILTFKAANAGKRAIAVPPAYTSQVCSGCGVLVQKGLSVRWHECPDCGASLHRDHNAAQNIQRAGQTHRGVATRKRHDEPRIPSL

SEQ ID NO: 49587 - protein, 374 aa, Acidimicrobiaceae sp.
VPPARSSRPTPSLGPTARLRAERQPWRQASGALQAFSRTFGALDQMSHLRTSVRNMHRAFTYRLEPTVKQCQALRRSMLLQCELYNAALQERRMTYEWLRRGISTKKVPSKYDQFRTLTGLRELQPEFGPFGVTVCRGTLTRLDEAFQGYFRRVKAGQAAPGYPRFKSASRWDSLSWCYLNGWKFEEGSRRLYIQGVGHVKLNIHRPLRGTPKTLTVRRRGRHLEATVFCAGVPKAELAPTGKAIGIDLGVGVLAATSEGTLYVNPRHRRELAAALARAQRQRSRHRRGSHRYRRASVEVARLKQKEADRRKDALHKLSRRLVDNYDLIVHEDLKISNMSRSAKATLESPGVNLAAKSGLNDASWTLPGQGSSP

SEQ ID NO: 49588 - protein, 475 aa, unknown
  TnpB Polypeptide
MANTGVLNRGWVFRLETTPEQDIALLAQTNGRRGIWNMLHEWWQMSSSHRLPSMKDLDTVVRQGRKDIDWMAAVPAQAAQQVIRDYLGAWRRCWAGHGTVGPPRFRSRHHDRPSLDTPQARDLCITRISDKFSTINVAKIGKVTFRRHRAIPSSARITGATLSYSQGHWWVALRMQLLRPTPLPTDRPAVGADRGITIPVALSDATFIDHPDWLTPAEKRRMLLLERRCARQRHHRWNTRGKKTPLGANEAKTSAAITVLRERVARRRRDWQHNLSRYLANTYSAVAMEKLNVMGMSASASGTVAEPGTNVAQKRGLNRAIRAEAWSSLQQKTAYKVDEVGGIFATVRAAGTSTECHHCGSNAPGQRESQALFTCADPQCGWTGNADYNAALNIEHRAFGRATPSALTPGLELCPDVGLTAAARPGHTPGKPTRKGDVAEAHRQVSRGCGNNTQAQNAHASPRTASLEATPFKAW

SEQ ID NO: 49589 - protein, 359 aa, Mycobacteriaceae sp.
VVGSRSGKRRGKRVGFPRSKKKTRSIASFRLRNKHPQGRRPAIRVGDNDRPRSVTLPGIGVIGVHDDTRRLRRMLAKSRAKILFATISQRAGRWWIALNVEAADLHPALQHPPGDPADEGAWVGVDRGLSAFLVAATADGTEVARICDAPKALAAGLKQQRRLSKSLSRKTKGSHNRKDAAARLGRHHHHVANIRRHFLHQVSGALVKTHDRIVIENLNVAGMLANHRLARAISDAGWSEFARLLNYKQAWRGGQLVEADRWYPSTRLCPHCGTVDSEMTLADRVFACSCGHTADRDANAAVNLARWGQAHHDSHRSPDPQAGGRATKARRRDGADQHPRVGETSPKDAGTDVHTAPAA

SEQ ID NO: 49590 - protein, 365 aa, Roseburia sp.
MQKGVKFRIYPNKEQQTIINQTLGCCRLIYNKGLAMHNEAYQNGNKIGYSQTSAMLTDLKKSDDFAFLKAVDSIALQQSLRDLDRGFVNFFQKRASHPTFKSKHNHHQSYRTINQGDNIRIVGKYIKLPKLGFVKIRQTMGVEKINNVTIEHTPTNKYFAVLNVKFEPQPMSNKGSKIGIDVGIKEFYSDSNGNVVYNPKYLEKSMRKLIREQRNLSRKEKGSTNRNKQRVKVALVHEKITNQRNDFLQKQSTMLIRENQTICIEDLKVKNMMRNHKLAQHIGSASWSKFFDMLSYKSVWYGNDIVKVPTMYPSSQTCSCCGFKNPLVKNLAIRKWECPECHTKHDRDTNASINILNKGLQMQSA

SEQ ID NO: 49591 - protein, 534 aa, unknown
  TnpB Polypeptide
MDITRKKFDELYNFAVRIRNHKNKVSQQVNEHLLHYLDCRKFQFLNEMRAKFKGVISSSFYDRLYTDVFTCYQNKFKAIQRKLKFEVHEFNGFEFYQRDSKNHKKGELKRVLVKNKQTPLSNCLTYLSRYGNEGIIDYIKANIDKCDDKKREFYQNILRCCEKYGFERLYNLALSKRKRILNHYANSPIEFKSLSFGGRSRKKYIVGFNKRFGSKINSFISLSGFDRKSFDIPVKYHKGFHGNMKDYRKDNPNYEYVIIFDEKNHQVKVNLCKDGERYIPEPNGKTIGIDVNCKHNLFSLSNETTYDYDRTLVNDYCKLLRDIDSLKSKDKNYVVGKRKQWKLDKLKEKVIKFEQQTISTMCKNIKEQGFGHIVMEDLDNSFGKCYVTDKDNENINYNRKVKFLGLSSLKGEVEHISRKYNIAVSTVHPSYTSKMCPVCCCIDDGNRATQETFECIECGHKDNADFNAAKNIRNRVLVTVLRELLLKQLDNGAFKPRSFNREKVKDELLSFRRTLQDFARSECIESSLVTFDYV

SEQ ID NO: 49592 - protein, 377 aa, unknown
  TnpB Polypeptide
LARAFGCARVVFNDAIAARRAAHEVGARFPIDGELSKALTAAKRTPERAWLGEVSAVVLQQALADACTAYRNLFASLSGARKGRKLGAPRIRSRRDRAQSIRFTKAARFRVLPNGRLRLPGIGDVPVRWSRGLPSEPSSVTVTIDAAGRYHASFVVEVPGVPLLPVEREVGIDLGLTHFAVLSDGTKVDAPRIARKAAAKLQRAQKEYARRQKGSANREKSRRKVARAHVRVGDTRRDWLHKLSTTIVQENQLVAVEDLAVSGLARTRLARSVHDAGWSTFVAMLEYKARRAGRAFVRVDRWFLSTRACSVCGAIGEAKPLHVRTWTCGCGTMHDRDVNAARNILAAGRAVMPVETTSGLGLPGRLSAKQEPAGSAA

SEQ ID NO: 49593 - protein, 443 aa, unknown
  TnpB Polypeptide
MGMGCIKTSMQRLQAYKYELMPTCEQQRDMRRFAGSCRFVFNKALALQKARYERGEKKLGYAGLCKLLTEWRHSAETAWLADAPVHPLQQTLKDLERAYTNFFARRADFPRFKKKGQSDSFRYPDPKQIKLDQANSRIFLPKLGWLRYRNSREVLGAVKNITVSQSCGKWFVSIQTEREIEQPIPQGGAVGIDMGIARFATLSDGTFHAPLNSFKRHETALRRAQQAMSRKTKFSSNWKKAKTRVQRIHSRIGNARRDYLHKCSTTISQNHAMVCIEDLQVRNMSKSAAGSPEKPGKQVRAKSGLNKSILDQGWFEFRRQLDYKLAWNGGHLIAVPAQNTSRTCPCRGHVSAVNRQTQARFECVACGFEENADLVGAINILSRGMQLLRDEGQDTADASAGRETAARIACEVSGAVMPPAAGTRRSDLCQLDAGMSAVGIPRL

SEQ ID NO: 49594 - protein, 391 aa, unknown
  TnpB Polypeptide
MLVTKKIKIEVSDQDVQALEFMQDKCRGLYNWWIGKLRSGEHWNLEQAKKSLKESKAYDPELRFVYGKLLAEVYFRLDKAMHAFFHRLAKGTKKPGFPRFKPRHQFFTLCYPAMYLEVQGSTLILPTGGGHSWGPKHYPNIVAHLTEDPPEQFREVAVSRDARGSYFCSFVYEESKPQIAHEGIVAFDLGIKTLATGYTDKGRFYHIGGFKGYRWYNKQLDKLRSKRDKCKKKSRRYIHLSKVYQRVSEQKRNKQRDCLHKASHLIADTLAERAVVIGELSQQQMVVKKHENETPKERKKRQIRNRMMHNDWGLSSFVQMLVYKCLLHGKELHLISERDTSKTCHVCKQKQAMPLWKRTYRCENCGLVMDRDDNSAVNIYERFVARRGPHT

SEQ ID NO: 49595 - protein, 207 aa, Microcystis sp.
LANRWFISFKIDVERQTTDKYIDGIGVDLGVKNLATLSTGEVIKGSKSYRKHEKKLARLQYLNRHKVKGSNNWKKAQKQIAKLHFKIANIRKDTLHKLTTYLSKNHGKIVIEDLNVSGVLANRKLAKAVQDMGFYQFLADRWFPSSKTCSNCGYKKESLSLTERVFECEQSLKLRVKFGRFLDRIFPQVGMEKSHPHTLSIYRFCLN

SEQ ID NO: 49596 - protein, 782 aa, Bifidobacterium sp.
MSPRSSLRSPDGPADRHSQQTPQRHQRHQWHQPVGQPLHRTGVAVRRSIRALAGDEEPLRVHPVWRAGVEGHEVPPLLDGERPHVVRPGDPDVRHLVTQPLPLHVDLEQVAFLGEPKVREHQPVRQTPVGRDDRVRGFASHRQRRPVEVPRRPLQRGGVRAVAHRQADVQPRIADRPHCALAVRVEQPTVLLVSPAVRGPREGVPGLAKHRLRPCRKALVVRLGLLDHPPAVWCGQGRGLGARGLPGGVDGLQDEWCAERQPAEQQEDDAEPSVDVTFHNPPSKRAMEKATTGGTRNRGLGFRRGLGSMLSSKFSCSRRRKGSFRGAPFSYACFRRSFCTVLLIKEPRMYEAVKVALDPTPCQSRRLESHAGAARFAYNVTLSHIKDSYMAGEKQGWSFYSLRNWWNSAKDALTLNEESGEVWWPENSKEAYNSGLESLANALKNFSKSRKGQRKGRRMGFPRFKSKDKAVPRFAYTTGSFGIIDHDPYALKLPKIGRVHCFENVAKRVGDAKIVRMTISQRAGRWHASICVEKPDAEPKSPLKGGTVGIDLGVKELATLSDGTVAHNPHALRRNLRKLRYEQRNLSRKTKGSNRRAKARLRVAKTYKRVSDLRSDSMHKLTTAIAKSWSDVCIEDLNVAGMLRNHHLAQAVADASFAEFRRQLTYKTARTGARLHVIDRWCPSSKTCSNCGTVKAKLSLSERVYHCDKCGLDMDRDLNAAINIQVAGSAPETLNARGGSGRRADASRRATRHPMKREPSGGESRVRLGAGLGNEAMQMTSL

SEQ ID NO: 49597 - protein, 422 aa, Symploca sp.
MRTAYQYRLRPTQKQAAKINRWLSMLCAQYNYLLADRFNWYEQNRSPINACPLVCHLPELRINPDYYSQKKTLPQLKKDRPWYKDIHSQVLQDVVKRVKVTFDRFLKGDSKGKRSGRPRFKPLNRYRTFTYPQAKQDCLEVNKINLPKLGNIKVVVHRPIPEGFKIKTVSISKKADGFYVTLSLEDKTIPEIRPNINLSSITGIDVGLKDFLTTSSGETVSIPQHYRKAQKRLQLLQRKVSRRQKGGSRRLKAIKLLAKQHKKVADQRLDFHFKTANQLLSKYDVIAHEALNVKGLARTKLAKSVLVCAAWCDSSIAGWSNFLSILTNKAEKAGLLVLPVSAHNTTQECSSCGEKVLKKLHIRWHHCPNCGCSLDRDVPSEPLREHNAAINIKNRAVGHPVLKAQLMSDGLPGVAEKPTLTR

SEQ ID NO: 49598 - protein, 380 aa, unknown
  TnpB Polypeptide
MHKNFQYRIYPTKKQLTLLEATLEECRWLYNHLLENRKKAYEQEGKSLSCYGQINTFPMLKAERPSLYTVHSQVLQNVAVRVDLAMKAFFRRVIRGMSDRVKAGEKPGYPRFKGYGRYDSFCYPQSGFSITQDERVSLSKIGSVKMVYHRPIKGSIKTATLHKSSTGKWSITFSVECEPERLPECSEQVGLDVGLKTFATLSTGEEIENPRFFRQEEKALKRVQRKHAKLEKGTHERRKHRKVVARVHERVKFKRDNFTHQESRKIVNRYGVICVEDLNVNRMVHNHCLAKSISDAAWSAFFFQLSAKAEEAGRQFIKVNPAYTSQTCSSCGHRQKMPLSERVYQCSCCLLSIDRDVNAALNIRAVGLHSLGLSLEAPCL

SEQ ID NO: 49599 - protein, 392 aa, unknown
  TnpB Polypeptide
MLIYEYKIDANKKQRQAIENALRVCQFIRNKCIRLWMDSRGVSSNDLQVYCSTLAKQYDFAKCLNSQARQASADRAWLAIQRFYENCKAKKSGKKGYPRFQRDNRSVEYKVTGWKLEPDGKHLSFTDGCGIGRIRLIGSRDIETFPVKHIKRVRIVKRADGYYCQFGVQADRVIEHVPTGKQVGIDMGLNAYYTDSEGKTLANPRFLRKAEKKLKRLARKHSRCARKSKNRNKAQKKLAKMHLKVSRQREDFARKSANALITSSDVIVYEKLSIRNMVKNHHLAKSMSDASWGAFLRWVNYYGTIHNVPVIAVAPNFTSQDCSVCGTCVKKSLSVRTHVCHGCGMVLDRDHNAAINILNKAFCTVGQTGTARASTLDNASGHTASTHTSKGV

SEQ ID NO: 49600 - protein, 417 aa, Kitasatospora sp.
VHLRYSYRIYPTAGQRASLARTFGCARVVYNDALAARKEARKAGRPYPGSADLQKLVITGAKKTAERAWLASVGVDPLIQSLRDLDTAYRNFFDSVSGKRAGRPIGLPRFKSKRDGRQSLRFTRNGFRLRGNGKLNLAKIGDVRVKWSRALPADPSSVTVVLDAAGRYHASFVVDVEPGHLPEVDAEAGIDLGLTTYAVLSDGSVIDNPRFLRKAEKRLKAAQRELSRKAKGSKNRAKARRKVARAHAKVADTRMDWLHKQTTRIIRETQAVYLEDLNVRGLSRGRLAKSVHDAGWSTFRRLLEEKAARYGRTIGIVSRAFPSSQLCSECGHRDGPKPLHVREWACTACGVLHDRDLNAARNILAAGQADRLNAPGGPARPGVAIPRRARPVERGTRLGDLPRTGVCAAGAGGIPVR

SEQ ID NO: 49601 - protein, 473 aa, unknown
  TnpB Polypeptide
LVVPLDPTPAQEQLLRSYCGASRFAFNWTIGKVKENLDARSHERGDGVGKDDLTKSLPWSTYSMTPLWNSVKDEVAPWHHDVSMQAFRSGVTNATVALKNFSESKNGTRHGRSVGFPKFKGRHSKLSVTFTEARNQAAWLAEDSHHVRLILPRSTTDPRIARRREQLQWLHTTESLRRLKKKVGSGEWRVQSVTISFTGGRWQASFSVRQFILPSLPSRRMLGTVVGVDLGVKHLATLSVPIPGVSDEHGHVVNPKHLEAELERLAKINRQLSRCVKGSKNRAKLLKRRQLLYGRITRTRKLNLHRLSTTLAGSFETVVLEDLNVVGMVKKSKHAKTRRLSRSILDAGFYELRRQITYKASDRGHLVVVVDQFYPSSKRCSHCGETKAKFALSERLFECNTCGIRLNRDVNAARNIHREGLRLLGDQETVAGHQPETLNADSRDRKTITPTCEGGDRYQGRTTQPIRKLFVST

SEQ ID NO: 49602 - protein, 473 aa, unknown; identical to SEQ ID NO: 49601
  TnpB Polypeptide

SEQ ID NO: 49603 - protein, 362 aa, Clostridium sp.
MLKAYKYRIYPNEEQRIYLAKTFGCSRFIYNKMLADRIKSYEENKNLDIKQIKYPTPAQYKTEFPWLKEVDSLALANEQLNLDKAYKNFFRDKSVGFPKFKSKKINYYSYTTNNQKGTIYIESNKIKIPKLKTMIKIKQHRQFDGLIKSCTISKNPSGRYYISILVDTENIILPNTDKKIGVDMGLKEFAICSDGYREPNPKHLRKSEKRLAKLQKDLSRKRKGSNNRNKARLKVAKLHERIADQRADFLHKLSIKLIRENQSIVIEDLKVKNMQQNHRLAKAISEASWSEFRRMLEYKAEWYGRELVIAPSNYASSQLCSECGYKNEEVKNLALREWTCPQCSAHHDRDINASKNLLKLAM

SEQ ID NO: 49604 - protein, 413 aa, unknown
  TnpB Polypeptide
MGKRKLPDNSPKKAIKVRIYPNKDQATLLYKTFGCCRKIYNSLLELQQKKLPCPTEAQFKIEFPFMTEVDSIALQQSRINLQQANNNYSKSLKGTRKGRKIRPPKFKSKRTGKFSYKTMNVTDNIKINFDTRQIKLPKVGWVKFRDDRIFSTKIRSVTISRDPSQRFYASVLIDKAVPKTKVPVEKILGLDMSLQHLIVDSTGHKTDYPKYFRKYESKLAWEQRKLSRKQKASHRYQSQKIKVARVHARIADSRRDFLQKLSTQITNEYNAVCVESLNMKAMAGSLTLGKSVNDCGWGEFSRMLEYKALWKGKHFIKIDKWFPSSKLCSVCGFKNVALTLADRVWTCPGCGTVQDRDCNAAVNVRDEGIRILNHNLNSSTVGTAGIHAQGDCVRPVHLQNSASGAMLCTGNGR

SEQ ID NO: 49605 - protein, 366 aa, Acidobacteria sp.
MADHKITERTFKFRIYPSKAQTTRLNKTLAFCCELYNAGLQERRDAYRLERKSIRYVEQANQLPEIKEIRPEFNEIHSQVLQDVLRRLDKAFQNFFRRVKERKEKAGFPRFRSHKRYDSFTYAQSGFALRDGKLRLSKIGDVRIKLHRPIEGKVKTLTITRSTTGKWYACFSVEVEARALPKCDRSVGIDVGLSSFCALSTGEQVANPRFFRSDEKALAKAQRKEKRKAARRIHERIANRRRDFAHQLSRALVSMFGLIAFEDLNIKGMVKNHCLAKSIQDAAWKQLIQYTTYKAADAGREVRTVDPRGTSQRCSACGAIVVKDLSQRIHDCSCGLRLDRDHNAAINILSLGLQRLGINAKEAPSF

SEQ ID NO: 49606 - protein, 406 aa, Sulfolobus sp.
VKLRVKVDYKMYSALKEVEEEYRKILEDAINYGLRNKTTSFTNIKAGIYKTEREKHKDLPSHYIYTACEDASERLDSFEKLKKRGRAYTDTPTVRRITIHLDDHLWKFNLDRISISTKKGRVFISPTFPKIFWRYYNKGWRIASEARFRLTKGNVVEFFIVFKKYDPKPYEPKAFIPVDLNENSVSVLVGDKPVLLETNTRMITLGYEYRRRLITTGRSTKDRDVRRKLKRLREKHKKADIRRKSAKLIVKGAYEIRSAIVLEDLPKRVPEHMVKNVKDKQLRLRIYRSAFSSMKNAIIEKAREFGVPVILVNPSYTSTVCPVHGCKIVYQPDGGYAPRVGACEKGKEKWHRDVVALYNLRRRAGDVSPVPLGSKESHDPPTVSRWMRAKSLHSIMIEYKMSEMKV

SEQ ID NO: 49607 - protein, 282 aa, Sulfolobus sp.
MKESLIEAKVIDYGKLKDIQKEIVYYKLYVDALRKKGIKEKVDPPPTLPKSIVTSILTGGIPRDGPLQIELVDNDMIKIKEYNTLVKIKSDSRPPLYAIVEYTDTDVRVYLAYQENPSIVGVDLGLRHLITIVALKDNKPWKVRFFNEPKLMEQFANFLSENQGIIKLEEMKTNARKILYEAVSFIEELEPKIVAMENLEYFETKTGKGLRALQNMLENEIRKRGIRYRKIDPYNTSRVCAKCGYKKGEILGSLFVCPACGYKADRDYNAAYNIALKCYYTC

SEQ ID NO: 49608 - protein, 406 aa, Sulfolobus sp.
VKLRVKVNYSTYSALKEVEEEYREILEEAINYGLSNKTTSFTRIKAGIYRNEREKHKDLPSHYIYTACEDASERLDSFDKLKKKGRSYTDKPSVRKVTVHLDDHLWKFSLDKISISTKRGKVFISPTFPKIFWEYYNNGWRIASEARFKLLKGNVMELYIIFKKDDPKPYEPKGFIPVDLNEDSVSLLLNGKPVLLETNTKRITLGYEYKRRSMTTGRSTKDREVRRKLKKLRERDKKADIRRKLVKLIVKEAYEGRSAIVLEDLPKRVPEHMVNGMKDSQLRLRIYRSAFSSMKNAIIEKAREFGVPVVLVNPSYTSTVCPVHGVRIVYQLDGGNAPRVGVCEKGGERWHRDVVALYNLLKRAGDVSPVPLGSKESHDPPIVSRWLRAKSLHLIINERKMIEMKV

SEQ ID NO: 49609 - protein, 198 aa, Sulfolobus sp.
MSRKKKGSRNYEKVREKLAKLHEHVKNLMSDYIHKVTSWLIEQYDEIYVEDLSVKEMVEDSESKTLRKHILHSNLSKFMSYLSYKASRAGRRVVKVDPRNTSKTCAKCGYVKKDLTLADRVFVCPKCGWTVDRDYNASLNILRAGSGLPLEPVDRKSLLYIPFSEGVYSKFPGRSRKSSPRGGDAPVRNGTPKIILQK

SEQ ID NO: 49610 - protein, 386 aa, Sulfolobus sp.
MVRRIKAIRATVSMKIALSHSLLALVNNYVKAVRFTLFWLKENVPNPNEKEVLGKVHEELYTRLREEYNLPSKVAEDCYRDALSIYKGWYNNPKKGRFPRVYKPTVWLTPKASYNVDFETMTVRIASVGELQILGYPRNLKEYLSWRMKEARLVVKDGKAFLKVVFEKEEEEKVEPRESIAVDVNMSEIVVGKDDINYVRIPTRLHEVHHWKSLAESLQKKYPKRWRENKGILYGVRSFHQKAKRIMEDFARKVGKWVVEIAEDFGANVIRLENLENLIKNVDKLPKEFRDKLYLMQYRRIQYWIVWQAKKHGILAQYVNPGYSSVSCPKCGKRMEEKGYRWFRCSCGYENDRDVIAVMNLNRRGSLTLSSAHHMRDVVPNRWWEL

SEQ ID NO: 49611 - protein, 294 aa, unknown
  TnpB Polypeptide
MEKAYKFRIYPTSEQETLLQKTFGCARYVYNYYLNKRMTAYQTDKTTLNYYACSADLTHLKKEKDWLREPDKFALQSALRNLDDAYQRFFDRVKKGEAPGHPKFKSKRDRNRSYTTRYTNGNIRVLDKHVKLPKLGLVKCRISRQVEGRILSATVSQKASGKYFVSITCTDVVQESLKSTGAIVGIDLGLKELCITSDGQHFDNPKHLARSQKKLARLQRPLSRKPKGSKNRDKARIKVARLHEKIANQRRDAIHKSTTQLVHGYDLICMETLMPKNMVKNRKQAKAISDHEPE

SEQ ID NO: 49612 - protein, 442 aa, unknown
  TnpB Polypeptide
LARRERRSSERANPAPRSGRRPAGAARRGGRPAVLGRCKAGFSFAMAEDIAGIEHLRYSIAMLKAFKYRLYPSHTQARLLEQTLETCRRWYNACLEERKTTWEREKRSLGKFEQLRSVKDLKANNPYATPIHSHILQVVVSDLDKAFTAFFRRVKAGETPGYPRYKGRDRFDSFGLKEYGNGFKLDGRRLRLSGIGRVRVRWHRPIEGTIKAVRIRRHAGNWHACFACEVEANPLPATGNEVGIDVGLHHLATTSDGETIENPRWCRAEQAKLRVLQRRVSRRQRGGANRRKAVAALQRQHERIANRRADYLNKLAHGLVERFDRIALEDLQIANMAQNGHLSTSILDTGWGYLKQHLAYKAAEAGRVVYWVNPAYTSKSCSQCGCLFEHLTLSDRWVECACGLSLDRDHNAALNILRRAGHARWGESTAVGLRLPQEAPGL

SEQ ID NO: 49613 - protein, 369 aa, Halorussus sp.
MYYAYKYRLMPSDTHREELDRHRDICRQLYNHTRYRLNEYQTNHDEPPSMTTLRSELPDLKQWWDGLNDVYSKVLQTVVERLFDNLKSLSKLKEKGYDVGQLKWKPPREFRSFTYNQSGFELDKKGGQTVLSLSKLADIPIRLHRPIPDNAQLKQVTLKKEPTGEWFATFGVEMDRQPPEPPENPERCVGIDVGILKYAHDTDGRGVESLDLSDERDRLEREQRKLSRKQHGSNNWEKQRQRVAECHADLRRKRRDFLHKLSAYYAREYDLVAVEDLDVKGMLKSPSNSRNTASAAWRTFLRMLEYKCERAGTHFVAVEPAGTTKSVRPAASRRTSRCESANIPVRRVDSRRTGTRTRRGIFFLAVSKM

SEQ ID NO: 49614 - protein, 409 aa, unknown
  TnpB Polypeptide
VPLITLKAQIHADPQTEAVLKDAMFCATKVYNGLLWHLRKEYQETGKVNISRKNLNRILKGLPRAKGYYSMSVQLTRDEVREAYKSFFALKKKGLTQHEAPSFRRKGQLSPLKYVQSGFKVEGDKVTLSLGTGREDGVREVTFRISHRTDIEYERVRELSITYDKMSGRIEARLVVEVKANPCPGTKRVALDLGETVLMAAAFDDGTVLLYSGRFVKSVRRYWQKVRASLRQNSRRWREVAHRERLQVEYLLHTATSHLIEECVRRGVGEIAIGDLCGIREGIDCGDKLNQRLHAWPYRKLINMLKYKGALAGIVVRDDVDERNTSITCHACGKVMPSNRRHRGLYVCSCGWRTQADINGALNIFERVYQVSPVKGSSGRVARPAVVSYRLGWHGVAEPKRRGKTLRAS

SEQ ID NO: 49615 - protein, 375 aa, unknown
  TnpB Polypeptide
VKLIAQVQLVTSSEQTADLKRTLRRAHAACNWISEQAWKSGAFRRFPLHKLAYYAARKKFPDLSSQVIVRAIAKVADAYRARRENIATFRPTGSFAYDSHMLSWVSDNESVSIWTISGRQRIAFLCGPKQRALLRFNRREALLVFRSGKLYLHVSVEFPVGDARKISDWLGVDLGIVNIATTSDGDNFSGSHLNNLRARASRIRSKLQKKGTKSAKRLLKKRRDRENGFSRHVNHCISKQIVAVSERTGRGIALENLEGINERIWASRKQRRRLRSWAFSDLQSKIAYKALRSGLPVCYVDPRNSSRECHVCGHTEKGNRKTRDLFVCCSCGHSECADVNAARVISSRAPVIAPNVVSVEGVHVDPGAELQNQAN

SEQ ID NO: 49616 - protein, 302 aa, Scytonema sp.
VLVLEYKAKGNKTQYRAIEEAIKTTQFIRNKCLRYWMDASKEDNINNAALSRYSTVLRADLPFVAALNSMAVQAAAERAWLAISRFYDNCKKNKQGLKGYPRFQHDNRSVEYKTSGWSLHPTKRRITFTDKKGIGELKLMGKWDIHTYPVKFIKRVRIVRRADGFYVQFCVDVECKEVVQPTGQEIGLDFGLEHFYTDSNGHHEPNPRFLRKVEKQVKHAQRRIYKKEKGKNGRSSARNRYARKHLKISRQRTEHAKKAARHVIRSNDLVVYENLQVKNMVRNHHLAKSINDAGWRQFRSYP

SEQ ID NO: 49617 - protein, 314 aa, unknown
  TnpB Polypeptide
MKRIERLKLYPTRRQTLRLQLCLDVCRQLYNVALEQRRSAWRERQLSITYKVQYQQLTQLRAADRRMAAIFRELQDATLHKLDLAFAAFFRRVRAGQTPGFPRFRAAARYSTLEFPHGNRALKLSSAQSKVRVPGVGSVRMRGGREVPAFGRAMIVRNPRGWYVLFECKRETAPLPPTGRSIGLDVGVATLYATSDGDFAPHAALGEKRSAALASAQRRVARRRRGGSRRRKAVMLLARAHDALRWARRDWHHKLARKLVQAYDSITLEQLKVSNMTRSARGTVENPTQRVRKGHLEPKNTRRRMASIRKHAAR

SEQ ID NO: 49618 - protein, 387 aa, Anaerolineae sp.
VLRTYKYRLYPNKHQGQTLDHLLETHRTVYNDALHERREAWMRCGISVSYGTQAAQIKDVRAFDPDGALCNYSSLQHTMRRLDKAFRAFFRRVKAGQKAGYPRFRGKSRFDSFEYTYGDGCKLRESDGRIRLYVQNVGELRIKYHRPIPDDAKIKHLVIKRRLDKWYACFQMEMPEPESAPHGGPAVGVDVGLLHLLALSDGTFVENPRWLRESQRTLRVAQRRLARRKKGSQRRRRAARQVANLHDKIANQRCDFWHKTTRELVNAYSLIAIEDLPLGFMTHNHHLALSAHDASLGMFRQMIEYKAEEAGTRIVAVNPNGTSQVCSKCGSVVRKALSVRLHLCPECGIVIDRDVNAAMNVLQRARTEPLGHKVDGCVMPALRSFPL

SEQ ID NO: 49619 - protein, 415 aa, Clostridium sp.
MKLSFKFKPNFTVEQLKIIEELSFHTTKLYNIINYDLRENGFKSYVDIENAFKSNWHCDFLHSHTRQQAFKVLEQNWKSYFASIKDYKVNPHKYNGLPKPPKFKNMQDRKNEIIFTNLAIRFQDNILKLSLSKAIKSIFEVESLNFEVLSKLQSLINWDGLQQVRIKWDNSLKQWYLIVIYKKQELEQTDNNTNVMAIDLGLDNLATLTFKENQNSYLFCGKKLKSVNSYTNKRIAELQSIEMKKCGSDKFKNTKEINRLRRYRNNYVNDYLHKVSKNIIDKAIEHKVGKIVIGKLKGIKKDMNYNKGFVQIPIQRLAELVEYKAKLQGIKVKYKEESYTSGCSAFDLELITKNTYDKSRRVVRGLFKSSFGLVNSDVNGSLNILRKEEKCIPKLVETMRDKGKCSRPLRIRVAC

SEQ ID NO: 49620 - protein, 415 aa, unknown
  TnpB Polypeptide
VKLNNHKGGENMKVNRIEQHNINKNNKNFKIIDNLCFKSKNVYNFANYIIRQEFINNNIWIGYNQIANIVKESEPYKDLGSNVGQQTLKILDKNWKSFFVAIKDWSKNPKKYLGKPKLPKYKEKDGRFVLGIDNIKAHLENGYLRFSWKPLKPLNNIYKTNIKGKLIQVRFVPHKSHYTMEIVYEIEVPECDLESKRIVGIDLGVDNFATVSNNAGLQPFIVNGRIIKSMNQYYNKKKAILQSDLIKQNGLHWSNRLQQLTVKRNNKVQYFIHKASKYIVDWCVLYGIDTVVIGNNVGWKQESQLSKRVNQNFINIPYLMFINQLSYKCENNGIKFIITEESYTSGTSFIDKELPIKENYNKARRIQRGLFQSNSGMKINADLNGSYQIIKKVFPNAFSNGIEGAGSHPVRVNIN

SEQ ID NO: 49621 - protein, 412 aa, unknown
  TnpB Polypeptide
MRSQKIRLKLTKEQERLAWWYSKVSRNFWNLLVDIDKRNNEGEFDEVLSRNGNKIYYSKYYNRDIYSLNQTDYRNLAKIVVANNYEKDKEKWSWYYQPNQSFIYSFLSRELVKIRRQNKGKLNFRSIDKSQANFNVRCDVFPSRKRPSRIYLKENGKLQIPTIGDVSLGSVRKGFDLSCKKQVANISFDGKHWYLSYTEDIETQITNLPNYTDGIGIDLGIKTLATVSDGTKVPNNKTFRRVRILNKRLKRLQRKVSRKYIINKCNKHNKTKNIIKLEKRIKLIHRSLRNIRINHIRKFVSELVKRQPQYIAIEDLNVKGMMRNKHLAKDISNCSFYTIRKYLIRKATDRNIVVRLVDRFYPSSKTCSNCGSYKKDLKLGQRVFHCNNCKEKIDRDFNASLNIAKTDQYILA

SEQ ID NO: 49622 - protein, 341 aa, Micromonospora sp.
LTAVQRRRCFGLLRSAGDVWACVLEINAWRRRRRDVPLTGYQQLRRELAASGPGTFAELDSVGARSVLRRFSDAWFAAAKRRKDGDLSAGFPRRRRGLVPVRWYHGTFTLDGRRVRIPTAKGTPPLWVRLAREVPYPVEQVRSITLLCEGCRLFLDVTAEVPVAVYPPGEEPDPGLVAGVDLGIIHPYAVSGRDGEGLLVSGRAIRAERRMYLADTKARRRPPGTEAGAEGFAALAAVPPPRAPRRGPASAAGSPGSARSRPHRDLLGRATADRCAARRRPAWRAQHPGGAAAQPAAVAGRPPPAGPHRQGHPRRDHCAAGGRARHLVHLPRLSAAGSETS

SEQ ID NO: 49623 - protein, 500 aa, unknown
  TnpB Polypeptide
MRLSRSLSRPASAGSSSIVRSVTKTSRRCPAFRPGRNPVPRKAGWHEGEVLAARLGRRDGACGHPVGVRMAYRCRAYPDDAQRAVLARTFGCVRVVWNRTLAARHARWHRERKGTSYAETDRALTVMKKDPDLAFLNEVSSVPLQQALRHQHKAFSAFFGKRARYPRYKSRRSRQSAHYTRSAFSMRDGVLRLARANGPLRFIWSWPDVDLTVLNPTMVIVSREPDGRWYVTFAIDAAEPGKLPPAGHAVGIDLGVKHLAATSDGEKVANPRLLERKARNLARYQRRMARCRRGSVNQRKAAAKAARAHRKVRNARRDFLHRASTRLVRSADTIVIEDLNVSGMVKNRRLARAISDCGWGEFRRQLEYKCERAGRELVVIDRWYPSSKTCSACGHLLAELSLSTRHWRCPRCRTRHDRDINAAKNILAAGLAVARGSPGDACGADVRHSGSSWVQSAAKQEPGPVRAGIPVLYGGEYSRDQYAVLGVIFPRGVVSATIGP

SEQ ID NO: 49624 - protein, 362 aa, unknown
  TnpB Polypeptide
MPELIKTLKLRIKDKHQSALSSMARQVNTVWNFCNETSSRAVRERNKFLSGYDLQKLTDGFSKCDGIAIGSATTQQVCEEYATRRRQCKRARLNWRVSNPKSSKRSLGWIPFKSRTVRYKAGQVHFFGQKISLWDSYGLANYNLRAGSFSEDSRGRWYLNVQVKIPELVGPAMPGPTAAIGLDLGLKTCATVSDGQKIEGRFYRALESKLGIAQRAGKKRQTKAIHAKIANRRKDMLHKFSTALVRNNAAIFVGDVSSAKLIKTKMAKSTLDAGWSSLKTMLEYKCHQAGIVFEEVREAYTTQTCSCCGSITHSSPRGRAGLGIREWTCSDCGSVHDRDVNAARNILALGHRRLAGGSHASA

SEQ ID NO: 49625 - protein, 427 aa, Cyanobacteria sp.
MLHKAIKVRLYPTLEQQVLLSQHFGCARWWWNYALNKSIETYKETGKSLGQSALNAFLPKLKKTEETVWLSECYSQVLQATTLNLTTAYKNFFAGRARFPRYKSKHGKQSIQYPQNVKILEGFVQFPGKVGKIKAKLHRKIEGTIKTVTVSLDPSGKYFASILTEAEGDNPTVSTDGRVIGVDLGLTHFAITSDGYKVSKYDNPKHLARHEKNLKRKQQKLAKKQKGSNSRNKAKKTVAKVYERVTKSRQDFLHKLSRKLVNENQVVVVENLNVKGLVRNHNLAKAISDSEALASLRASVGWGTFVNFLAYKLEKKGGKLVEIDRWFPSSKLCSNCHYQIREMSLDVRTWTCPSCGTHHDRDGNAATNIRAEGIRMLQTDGTAVSANGGEVRPRLGRKSVLIAKRASVPARRHSPAMLEAYTIVAST

SEQ ID NO: 49626 - protein, 511 aa, Syntrophobacterales sp.
MAEHLATFQGRLVLSSEEDAFLADYADRYGRVERTLYADMRRTGLKAAAFKNAYLVRFGITARQFNAISRNLEGKITSVLERLPQLKSEMEQRIQRAEKVLTKIRDPFKRHQKQRRLALLKFRLSSLDKQLAAKDPGICFGSRKLFRAQFALRENGYADHDEWKADWRTKRAGQFFVVGSKDETAGCVGCVLGVRLDGSFTLRLRSLSKEARYLTLPVRIPYGQDVLREALRHGRAISYRFYRDDKGWRVFATTTRSEGERRSIKNAGTLGVDVNADCLAVSEIDRHGNLVGTAIVPLVTYGKTTSQAKAAVGEAVKTVMAWAERVGKPLVLEKLDFGKKKAALEAERPRQARILSSLAYSAILNGLQARAFRAGIEVIAVNPAYTSLIGLVNHAKRQGLSVHQAAALVIARRGCGFREHPSGEAACVPTPQGDHVTFSLPARNRGKHVWSFWACARNIHKAVLAAHLRPSREEPSSPRPAKRNGPGFTVRPRDANHRQNCSVGVLGDLPS

SEQ ID NO: 49627 - protein, 410 aa, Planosporangium sp.
VQLRYSYRVYPTPGQCEALARAFGCARVVFNDGLRARQQAREAGLPYISDGELSKWVITEAKKTPERAWLSEVSAVVLQQALADLNVGYRNFFASLSGKRKGRRVGPPRFRSRKDNRQAIRFTVNARFTVRDDGRLRLPKVGDLRVVWSRPLPADPSSVTIIKDAAGRYFASFVVQATDEPLPELDTEVGIDLGLTHFAVMADGTKVAAPRFLRRAARKLRRLQQDLSRKQKGSNNRKKAVVTVARAHAKVADTRRDWQHKLSTTIIRENQAVYVEDLCVVGLGRTRLAKSVHDAGWASFDGMLAYKAARYGRTFAKIARFAPTSQTCSACGRLDGPKPLSVRSWTCPCGAVHDRDVNAARNVLAQGRWDNSNDRGVHVRPAPVPAARREAVIHPGAARSPRSAEGIPVL

SEQ ID NO: 49628 - protein, 465 aa, Streptomyces sp.
MLTGRKYRLDLTPEQIAYAERIGDICRFVWNTALEQRRLYRQRGSWMNYVPQARELAEAKQVFPWLADAPANCLQQTLMDLDKACRTHGTFNVNWRDKHRWSPAFRFPEGKKIRVERLNRRWGRVKLSKVGWVRFRWTRPLDGEIRSATVSYKSGQWYISFLVEDSMTTPERHAGTPVGVDRGIKVCATTSTGEFHDREYITVGEAKRYRRLEQQLARCGKGSANRAKVRAAKQKIMARVRDRRTDFCARTASDLAMRHSVVVLEALNTQGMTASGKGTPEAPGKKVAQKAGLNKAILAKGWHRLEIALRNAARYTGTAVVLVDPAYTSQTCYLCKHVDTKSRESQAVFRCTACGHTDHADTNAAKNILNAAGYAVSACGDLVAGRSVKQEPALPRGLAHQPAFELVGIPEPLRRGGNQELQPGGPGPSEGAKRERAFVLHNLMPAAALLPAPPECPAQPSASCR

SEQ ID NO: 49629 - protein, 392 aa, Streptomyces sp.
MLTGRKYRLDLTPEQIAYAERIGDICRFVWNTALEQRRLYRQRGSWMNYVPQARELAEAKQVFPWLADAPANCLQQTLMDLDKACRTHGTFNVNWRDKHRWSPAFRFPEGKKIRVERLNRRWGRVKLSKVGWVRFRWTRPLDGEIRSATVSYKSGQWYISFLVEDSMTTPERHAGTPVGVDRGIKVCATTSTGEFHDREYITVGEAKRYRRLEQQLARCGKGSANRAKVRAAKQKIMARVRDRRTDFCARTASDLAMRHSVVVLEALNTQGMTASGKGTPEAPGKKVAQKAGLNKAILAKGWHRLEIALRNAARYTGTAVVLVDPAYTSQTCYLCKHVDTKSRESQAVFRCTACGHTDHADTNAAKNILNAAGYAVSACGDLVAGRSVKQEP

SEQ ID NO: 49630 - protein, 480 aa, unknown
  TnpB Polypeptide
MKTILVNLTNEQKALIDQMMLVFCTAIRFSFKRQLEGQAIGDLEKVVAHTYNLNIRQAKDAVESARQTIVSQHELVKLNHENCRKKVEVLVKKLKNPKLSERKVKALKSKLAKRQRKLGYWAAFLESKTFPPVTFGTKEMFLRRCKGLITKQEWQNRRNNRFYSRGDKSKGGNPNLRVVFKEGVSFLEISTLEKTETNRAVKVLMPIYLPQKLSKKTAKINGINYRQLFIDSLERGEAYQVELLKRDDKYYAHITFEELVAKVIHTGHISIIGTDTNADGFGLTEVSKQGNYQGHAYLKQHELTFCRGNRRENLCGELAAQAVGKAEKHHCGMAAEDLKFKDDRDLSSKLARVSSQFVYSKLLRMVERRCLRRGVEFVKVKPQYTSKIGLYKYCHQYGLDVHNGAALVIARRSYGLKEAVPKLLQDKLVPTKKLSAFKKMNAWGQWSLISKQVAKLFKKRKEVNTPGLWLVRRKRLLGIA

SEQ ID NO: 49631 - protein, 385 aa, Streptomyces sp.
VKIVTQVKLLPEAGQAAALGATLRTVNEAACWVSGVAFERGVPREYELRKHTYAELKARGLGAQAAQHVIKKTRDAYTTLKATIRAGNLGKPGSKRRDKARSKPITFRPQAAQPFDDRCLSWQYDAKTVSIWTTAGRLRGVRFLCSPDALKMLREHRKGESDLIERDGVFYLIAVCDIPEAEQYEPSGFIGVDLGITNIVTTSTGYRAAGRGLNRHRKRQLDLRKKLQAKGTKSAKRLLKKRSRKEARHSANTNHIVSKTIVTTAERTGSGIALEDLTGIRSRVRLRKDQRTPLHSWSFHQLGQYIEYKAKRAGVPLIYVDPAYTSQQCSECGHIDRRNRQSQSTFACRSCGAFMHADDNASHNIGRKGETMWTAGRESRVPATP

SEQ ID NO: 49632 - protein, 411 aa, unknown
  TnpB Polypeptide
MYLTAKAKIPELAKLKEAGNLCTKIWNKANYYCRQQWEKTGQIPSYYELQRVFKDDYWCRRVHSHTAQAVLHKLSESYRSWFKLRKTDASANPPMFRKKSSISTVTFTNYAIKISATQMDLTLKKGVHVQLSYQLQPGVEINQKNIVRIEVKHGFANIVYRVEEPPLNQKGQVMGIDLGVINTATTVKEDGEARIYTGRSLLSTQRYFNKEIGRVQGIVMAQSRGKRKWSKRLSKLSRKRTRQIKHILHAQTKAIVDDCVKSGVNVVVVGDLHNIRKLRSDTKRPEKLVKARSWGRVNNQKNHAWSFSQFTATLAYKLRREGILLVQVNEKGTSKTCCSCGEVRKRNRKTRGLYICSTCGLVINADVNAAVNILATYLQPLGRSSANVNLAKVIRWDKTHLSLEAPPFKVG

SEQ ID NO: 49633 - protein, 404 aa, Streptomyces sp.
MIRAYKFLMRPTVRQEQALGEMLRDHCSLYNGALQERRDAYRHGSRTSVTYGIQSGQLKEIRAFDPQRQGRWSFSSQQATLRRLDKAMQAFFRRVTSGETPGYPRFRGVNWFDTVDFPKDGDGCRWDSTPHDPVTRVRFQGVGHVKVNRHRPVVGRVRTVSVKRERRKWHVVLTAEQPRPEPLPGTGSVVGIDLGIASFLTTSHGEHIANPRHAHTAAAKLETAQRALSRYPRRKAKDRTKNHQRAVERVAALHGTVRRRRLDHAHKTALDLVRRHGFIAHEDLRIRNMARSPAPKPDPGQAGAFLPNGGAAKAGLNRSINDAGWGVFLTILHAKAESAGREVIAVDPRNTSRECPECGHTAKENRPTQEKFHCQACGHTAHADTVGAINVLRAGLVRRNANPA

SEQ ID NO: 49634 - protein, 350 aa, unknown
  TnpB Polypeptide
MAKIFGQVRFVYNLGLETKISAYLGNKVNLTCFNLSNQVKELKDTECPWLNESPAQALQMSLRNLDNAYTNFFRGYGFPKFKNRYGKQSFQLPQGIHLSNDKKQIFIQKLKYVNIDLHREFKGEIKTITVSKSITNKYYVSILVENNISKPEKKKINDSTSIGLDLGIKDFVITSDGMKFKNQDFFKSAMNELRIEQRSLARKIKGSNHYLRQKMVLALLHEHIHNQRQDYLHKISRYLVDNYDTICMEDLNVSGMVKNHKLARAISDMGWSEFKSMIEYKCDWYGKNLSVIGRFDPSSKTCNVCGTINKDLTLNDREWTCKKCGSIHDRDNNAAINIKKFGLRIRPSTT

SEQ ID NO: 49635 - protein, 413 aa, unknown
  TnpB Polypeptide
MAYFHRTKILKVKEQSGFSEIQSASASVWNECLYFMDMYQWRRGYPHAHDNFWFGKNCEGWVDKNLSKTQPLHSQSIQAVRKQYFKSWKSYSALKKSGGVVNPKPPNKRKSYMTTRWLKSAITFVDNSLFGKRLVLSMGSDNPKLGIQLPSNFNMSETQHIATIDLCYKQGQWELHFSYRYEVAETETGEGVIGVDIGEIHPMVTYEGSEVRIYNGRYIRSLYRLRNKVLSELSHAISRCKRQSKRWWKLTRRKWKRIKKIDNQIMDGLQKHTTKFVKYCHTKGIGTIILGDLTGIRDKIDYGKRANQRLHQWAFGKITSLITYKSKVLGIKVVQIDEAYTSQTCPACGNRKKPNNREYVCKCGFRYHRDGVGAINILRKYQGCLDDPVVAAMDSTRMAPPLGFRLEVPVALA

SEQ ID NO: 49636 - protein, 369 aa, Chloroflexia sp.
MQKTYKYRIYLTKEQRRLLEQQLELCRWVYNETLAERTRAYEERGKRLRLYDTQALLPVWKVAKPALKGVHSQVLQNVSVRVDLAYHAFFQRVKRGAEQAGFPRFKGKGRYDSITYPQYGNGVRLEGNRLLLSNVGAVHVVLHRPVEGTPKTVTIRRSRSGKWFVSFSCELETHEQRPTGEVVGVDMGLASFATFSDGEQIPNPRFYRRDEADLGRVQRRKDAAKQAANWAEHTKQKLILAKIHERIANRRSDFAHQASRTLVNRFQVIVFEDLAPQAMGTSSGMRKSIMDVAWSQFIAMTVSKAAEAGRRVMLVDPRNTSKMCSRCGTLVDKTLSDRVHRCPTCGLVMDRDVNAAINILQRGLATLRT

SEQ ID NO: 49637 - protein, 332 aa, Halomonas sp.
MTTVFRAYRYRFTPTPEQADQLARTFGCVRYVYNHFLRERTDAWFERQERTGYNATAKALTALKKQPDTAFLAEVSNVCLQQSLRHLDRAFANFFKGQARYPSFKKKRRKQSATYMANGFRWRDGQLWLAKQKDPLNIRWSRRFSGEPSSITVSLDTAGRYHVSFLVEEEQAALPVTPKMVGLDLGLTHRVITSDGNKIPNPRFIRQTERKLARAQRALSRKQRGSNNRAKARLKVARLHAKRADQRRDATHKLTTQLIHENQVIAAESLQVKNLLQNRSLSKAISDVGWHQSRSSLPTRPSGMGAISCRSTSGIPARSAVSTVATSPSRCR

SEQ ID NO: 49638 - protein, 392 aa, unknown
  TnpB Polypeptide
MIDLMLIYEYKLQGKDKQFLALEEAIRTTQFVRNKCVRYWKDNIGINPYDLYQYCAVLAKEFDFAKKLNSQARQAASERASSAIMRFYKNCKEKSVKKKGYPQFQKDCRSVEYKTTGWKLSDDYRRITFSDGFGAGTFKLVDTRALSAFNREQIKRVRVLRKADGFYVQFCLDADRKEELSPSGKTVGLDMGLTSFYTDSNGERVDCPKFLRKAEKRIKFLQRRVSRKQKGSSNRKKSRNRLARKHLQVQRQRKEFAIKLARCVVTSNDVVAFEGLQVRNMVTPINPKNHHFAKSISDASWSLFRDYLIYYGKVYGRVTVAVPPAYTSQDCSSCGKRVRKSLSERTHACSCGCVLDRDENAALNILAKGLELSNISINGTGGQPETNAILIA

SEQ ID NO: 49639 - protein, 550 aa, unknown
  TnpB Polypeptide
VAGQLGKVLSHAAGGHTFEAVDQSGDRHLRREVHQQVHVLAFTVELHQFALEVRAHRPHDLLQPIQVRVGEHTVPELGHENQMSVQHKNTMPTSPNITRYGHKPSIVEGMDTVVRYRYRAYPDADTHRALSRTFGSCRVVANDAIAARRQARALGQPYPSLAHLSRTLITDAKHTPERAWLDEVSAVALQQSLADADRAYRNYFASLNGTRAGAKMGSPRFRSRHDSRQAARFTANARFTITHTGDRAAVLTLPKIGRVPFVLSRPLPSTPTSVTIIREADGRTYLSFLVRVTETTRQPTGRVCGVDVGLTSFAHILTVNESTGAEHTTQITNHRYLLRKARALARSQRSVSRKKKGSTNRGKAKTRVAVLHRKVRETRLDHAHQIAVQITSDHDIIAVEDLAVTGMTRTNLAKSVHDTAMAQFLRILAEKAARQGRTLIKVGRWFPSTQLCSHCHQLTGPKGTPGLKVRHWTCTTCGTDHDRDINAARNILTEGLRLLAASSTDAPEQPLPVADGRSETVNACGAEVRPPETVAPSDEPGRSRKVLQRC

SEQ ID NO: 49640 - protein, 382 aa, unknown
  TnpB Polypeptide
MMRTASIRLEVTAEQAAALFALRTAYAEACNRLVPVVREHRLWNRVGLHQRTYADLRESTPLGGQMCCNTIFSVCKAYQAQSVLGRIRKDAPVPEIRFDRASVHFDKRTYTLKGDRVSLYTLDGRITVFLRPGEHQRRLLDGGTPKEAELVVRNGAWFFNLVVESGDVKTVASGPVLGVDVGENNLAAHSLGKVFGGEHLRDRRDRYLALRRRLQSNGSQSAKQKLRQVSGKERRRVKHVNHETSKAIVAIAIRAGVAKITMEDLTHIRERIKAGKRMRSRLHRWAWRQLQTFVEYKAKAAGITVEYVNPAYTSQTCSGCGELGKRVKHRFVCEKCGLRAHADLNASRNLARIGSGAPLSRAAVNTPDVGSVDRGNHVCASQ

SEQ ID NO: 49641 - protein, 477 aa, unknown
  TnpB Polypeptide
VRRAGPRAPLRPRSLARPDGPPSLRRPARQPDRRRSRPRAGSRLSLKTTGGAPALRGGEEARTARLPLIYGHRSSPVSMRMAYRCRAYPSPGQQATLARTFGCVRVVWNRTLAARHERYATEGEGTSYAETDRALTAMKRQPEWAFLNEVSSVPLQQVLRHQHQAFRAFFAQRARYPRFKSYRGRQAATYTRSAFCMRGGVLRLAKMSEPIPFVWTWPRADVASLDPASVTVTRDPARRWFVTFHVDVPDPVPLPAAGQDMGIDLGLTDLAVLSTGEKISHPRDWERHERNLKRWQRRLARCQKGSRNRAKRRVKVARAHARVADARRDFLHKFSTQIIRSNDVIAVEDLAVRNMVRNRSLARAISCTGWAELRAMLEYKAQRAGRTVVVVDRWHPSSKTCSACGHLLAALTLSTRVWQCPACGTRHDRDINAAKNILAAGLAVTACGADVRHSETTPMRSAAKQENLGATPGIPVL

SEQ ID NO: 49642 - protein, 388 aa, unknown
  TnpB Polypeptide
MKRATKVRLYPTDEQAAFLNAQFGAVRFAYNKALHIQQHMYRHHSVSLKPKRDLKPLLAVAKRSRKYSWLKLYDSLALQQAVINLDKAFANFFNPKLKARMPTFKSKRGRQSSYHPNGKVLDDAILLPKMTPIRAVIHRDIIGEVSSITVSRSSTGKYHASILCDDGCEAPAKPSLITEVTGYDMGLSHYLIQSNGKKTDNPRHLINASRNLRRKQKALSRKKKGSANRSKARTRLAALHERVANARADFQHKLSHTMVDENQAVIVETLKSANMMKNHNLARAIGDAGWHGFIMKLEYKAQAAGRHLIKLDQWFSSSKPCSECGHKMSEMPLHQRQWVCPVCGAEHDRDINAAINIRQQGILELKAAGLAVSAHGGQCKSVNLTVAA

SEQ ID NO: 49643 - protein, 185 aa, unknown
  TnpB Polypeptide
MKLVERHIVKDNRFEDICLKSGLLYNYVLFNVRQGIFDGNDLKEYEFSTKLCKENQIDFRNLPAAVSQQVIAQVFSSIRSWIRSKKEYENNPSKFKSKPKLPKYKRGKKQNMVVFTTSSCRLKDDGCIHFIKSVIPPIKTKIGDSKLCQVRIVPQATCYVVEVIYEKKDRILILIRIIFFRLIWD

SEQ ID NO: 49644 - protein, 661 aa, unknown
  TnpB Polypeptide
MYLQKNSKLFFKYLNLLSINGKERKKLISLLLHQVQFVIESTQFIKKTLKMTIKKQNELNQKHQTKLIKQAKQQIKTKEQFILEFLLQNKETVLKDKKFICPTNIPILEFLKTLDQELISRDHNSLIYWNMLSLGQSTKLPFLAKTDYVDLPLIYSTGTLNNSIVNCWWKTKVIQPKQKIGKTNYFPLSKYFVIDGMVEEDTLKKTDSLIRSYKIKLQPSKTQQKQFKEYFGSDRYCYNYSLAKLKELDELKKLEDMNDKNLFRNMCMGYKSKNYCIKHKEFNSECEICKFKNNLQYDSFEDNLNTKKWLSEYVTVKKEAIYEAWKNYKQFMNVRTFKENSKIKFKNSKHTKNHQFRFEYKFLKLIQKQNKFKNKNIYKLNIFNIKNIKFFYGRKRKQLSLLNQYFQNPKDAMIEKNEFGDYYLILPIYKGDQVTVINSNGKREQMNMDKAKRYKKKMIKENEEVIIERSNQEYIETKECFIDPGIRDFYTLYDKQTHNIFSIGVGSCKKINEMNEKMRMTSKKDLRIKLRRRIFNLKNEFHHKISNWIVTNYDLIYLPKFQKSQMVRNKGRKLKTKTIRQMHTLRHFGVMQLIKEKCKLRQKKVLICNEQSTTQTCGNCYFKNLNIGGAEEYTCPICKKIILRDQNASRNIGILNLIQLF

SEQ ID NO: 49645 - protein, 661 aa, unknown; identical to SEQ ID NO: 49644
  TnpB Polypeptide

SEQ ID NO: 49646 - protein, 610 aa, unknown
  TnpB Polypeptide
  misc_feature (202)..(256): Xaa can be any naturally occurring amino acid
VTERLQAIESEESTGAISDATATELVYKIARLETGDPNQTPPGDDEFDIGKQDLRVLRGHGVTIETPSWSTVARIKGAGGISLGDSYAAALALEVEATVVVGADQNSATCLRTSICITYATILSDCTGDHLFASIPSPPLTPSTVTPAVVRVVLGRAVDNRTASFGEIRIAQRCVVGPSGEVLCRCSRCTDDDTPDSVGRGXXXXXXXXXXXXXXXXXXXXXXXXXXXXXXXXXXXXXXXXXXXXXXXXXXXXXXXDALERHYNEEDYGHPRQNHQESYPIRMNNGEGYDLSVNEGTGEVEYRVSALKYQHVRGMLNGSKQHLNRLKTALFTDEWRVGTAEVVSKYGRYELHINVTHETAEVADKQEATTFVGVDVNEDCVGLAAVTENGVADTFVIEFPEVKRERHEFFTIRKRMQSAAQTSLEREIRGREQQFVHDQLHQVSRRVVEWVQQFENPVVIFEDLKDMRDNIDYGTRMNRRLHSLPFAQLQEFVSYKTAWMGILSDTITPEYTSQECLECGHKSQANRRGKRFDCVKCEFQDHADRKAGVLITARGLKKQNRNVPALNNLPVVRTREVRQRGNGERKPPDHNPFLTIQDHQTDGRVGSVSD

SEQ ID NO: 49647 - protein, 352 aa, Seinonella sp.
MSTITLRIELHKPTLAKQVMYQKMTEMNTEFANWLLLHPPINQATSKIFKEFSNENFPSAVVNQTIREVKSQKKNQNARTFRKIWCCFNNQNLKIEKNCAFYTVSFPTLEKRVGVPVVAKSFQVAWLNKIINGTVKQGAGKLYQKKKKWYFAIPITWNVESTQDEKIMGIDLGLRYLAVASIGTKSIFFKGSHVASSRRRYASRRRKLGQAKKRQAIKKSQDKESRWMKDQNHKISRQIVNHAISNGVGVIRMEDLTDIRNTAKSKKTDPGRNLHSWSFYQLKEFIQYKAEMVGIRFELVNPEYTSQTCKNGHQAKANRNGLKFRCKECGHTCHADLNGAINVGKAISGLAT

SEQ ID NO: 49648 - protein, 536 aa, unknown
  TnpB Polypeptide
VNNEGYNKNLKQFHKLSDRHTLVVETEMPYSDVLKVFALSEKIRKAGNELVGIMRKKYDQLMRTKRYRKLLKLYSGTENKEKRKSYAKQLNEMQVAYNVTWDFCRTSMIPIGKKYGIDAVFALTKAEDIWRGIEKCLYGQGKTFHFSKYGELPCIRAKQINRGICMSVKDNTLKFKLGRSIFSIKVTDRFQTDEVNAILSYLAEPDIVDAKAVNTLVEGAYCIDTYRPCYVTLVPKIIRGKYRVYLHLTIEGKAKPKYDKFANPRHTYGKGMIGADIGTQTVAYTSDTEVGLKNLSERGNNIQISEKKERLLYRAMDRSRRSTNPQNYEDNGTIKKSCKIWKYSNHYKKLKAKHVELCRINAVNRQLAINQDANHLRSLGDIFVTEPKNSSKLMKRVKKTTVNDKGKFNRKKRFGKSIKNRCPSGFQTTVEKKFNGTGGAYIEVPNNYKASQYDHTADDYIKKKLSDRLYKLKDGTEVQRDLYSSFLLYCYDYKTQAINKNKCRTAFENFYSKEKDLIAWIKEKKIKILNSGIKVV

SEQ ID NO: 49649 - protein, 374 aa, unknown
  TnpB Polypeptide
MPGRVSLRESGDKSRPTVGPRFIGGPTAGGYAEQGTFPTKYDLTAQFKGRGGEQVPATTVQMLADRLSKSLKRFLAARELGIPDVGFPRFKKPNRWHSIQLRQYGYGKDVRLAHENKYLIVPAKLGTSLKIKLHRPIEGTPKTVHLVHRADGHWYALIVCETEPHTAHAPSDCTHPDIGIDVGLKSFLTDSESRTVENPRFYRTSQKTLRRKQRQLCRRKKGSNRRRKTARSTAQTHLKIARQRRDFHYKTAKPYAERYQLIAVENLSILNMVQNHSLAKSIMDASWGAFLAILEEKAARAGHQVIRVNPRFTSQKCYTCGEIVQKSLSVRTHVCPFCGSIADRDVNAAQNILKRARPGHGLQEPTYTDGCSVS

SEQ ID NO: 49650 - protein, 616 aa, unknown
  TnpB Polypeptide
MAHFCKLFYNQMLYLPRLIIDAEYYKYELENISKEGKRDDRFERYIAYCIKLDNGEFDEKEKDEKRFAKYNTDRNLWKGLYWIWAKELQRMFYQHQLKSKKEKIGKWNEEHPQMIGELLVVKKGETISFRDTIEKLKVGDIMPFLDKMARHYQDKWTGNHLLENRPDLLKDWTGTIENAEKFNWFEANPWNKRVTESIIKAIRTDFSNTFKSFSAWKKNPESFLGRPGFPNFKRDYYMTFSVDNRDCEIVRGKAGLDIVIKIRSGTKILKNGKKRNIYDRFVTIPVPEMYNDLFLEGRFTDVKFAPLNHKYFDISIGYERRNDFTFLNGKRSVLVVIPNPSLDYGRYLGIDFGDRIICGCVTNFENKPFLLDSSKIHEINEWKKVARARVQSKHDKRMHPNGTRKGDKPPYRQINAIEQKRKRVIDTELHAISNCIVQFCVRNKIGNIVYGYSKDWKQNTKKKAKEKTAKKGKESAGGFYYKDVRRRHADIPHSKLIHQITYKAQANGINMIAQEEGYTSMCSAFDKEPIEWHKKYLGMRGNGKNGLPRALFRTATGIVVHSDINGATNILRLVIGDSFLDSEEFRTPINPTKTTDPHNPNPSIASSLQRDRTQLA

SEQ ID NO: 49651 - protein, 311 aa, Caldicellulosiruptor sp.
IFVKNLEQAFERFFKKQAKYPKFKKKKTHHFLYTTNFTNNNIQVDFGKLAINTKLNRCWGRIKLPKLGWVKARIHRVFEGKIKTATVKLLPSGHYYVSITVEQEMIVNPKIKQTLSTFAIALDLGVKNFLVDNRGKHIENPKILLKYEKKIKRVQKELSKKKIGSKNFEKTRKKLAKLYEKVTNIRTDFLHKNSSQIICENQVIICEDLRVKNLVRNHHLAKRILDVSWSKFVEMLEYKSVWYSRVFLKVSSNFPSSQICSSCGYKNITVKDLKVRTWQCPECGAVHDRDKNAARNILKQGLSQLGISVVV

SEQ ID NO: 49652 - protein, 394 aa, Deinococcus sp.
LEAVTQDLGWRSLLGSATLEGLVRSFGRHLQSLGSVARPAAIVLEPPSDFALMLGGLARPVGELHVEIVGIPDLVLAPLYLLPGPAQAAVRVWRAAFDDRLTAARAVLEAALLAGDPAADAGYLAHIARYGALEPHLAAQAGPPQPSLVSLCLAEAARLHRTPAGDYEIDWGFRVLDLLPPRHQALIALDPGERNLWTWATAHQGCGRVHNPLKLRRAWVAPQPAAPVGLIQHPLDHNYARMRRHQLLFHAQVQPVLEQALRHLLLYAGIGIEHTTLERMARRGLDYAPFVAFTGLRVYETFLAELARLDPVRRALIWVPPEGTSADCSACGARRTMRYARREGRRRTCASCGVRLNRDLNAARNIYWRAAADWPDTLPWRPAALPCVQPWTRQ

SEQ ID NO: 49653 - protein, 327 aa, unknown
  TnpB Polypeptide
MLEAQRVVREYIDILWVSKQMHGRFVNIKVDTWLSARMQQNLGKQALEIVKSQRKRKTRTKPQFNRLTFNLDSRFVDIKATGNSFDLWVKLGSLGNKLSIRLPFNRHRHFNRFAGWTQSKSARISCVRGEYYLDVFFEKDAPEKKTTGKHIAVDIGYKKLLVTSENQRAGDDSIYEKIARKQQGSKAFKRALVERDEAINTACKQIMSGDVSVLYAENLKSVKTGSKGKLRKRFNNKLQRWSYSKVLSRLSMLCEEMGVTMILVPPAYTSQRCSKCGVICKSNREGGNYRCACGNSMDADYNAALNILHMGEYGPHAFNPIPLYSSG

SEQ ID NO: 49654 - protein, 400 aa, Aneurinibacillus sp.
MIGKEGGRMIRAKKVYFHASKAEQDRLFACNRESARVWNECLRLAKNFYLEHKKWMSKSELQKQTKGKFHLHSQSIQAVCHKYLFARDSSHQAIKKGHTTTRYPYKKKNHYNTKWVKDGFKIHPNGKIELSMGIHNGKREKPIVVHASNLPQGHIKEIELCYDNGLYLAVSFEDGQEKKEYQSGQAVGVDLGEIHTLAAFCENGQALIITGRKIRTLHRLRNKKLAEIQRLQSKCKKGSRQWKKYQRAKQYMLSKSGKQLQDALHKATRNFVEWCVKQAVSDVYIGNPEGVQRNTRKKKKTSRKQAQKLSNWSFGKVKAYLKYKLMQDGIHMQEVDESYTSQTCPVCKKKKKVSSRNYVCSCGYQEHRDIHGARNILSKAIYGDIRHFDVPTTQKYLRIA

SEQ ID NO: 49655 - protein, 386 aa, Oscillochloris sp.
MTQTLSTRTVCCKLSLAAAAVTAIRATAEAFNAAATYCASVAWNERITNKNKLHHIVYGPTRVQYGLGAQLACCARDKAAEAVRAARANGHTTCPTFKPDSAIRYDARTYRLMSLDRVSLNTRTGRVMGQLVLGDYQRRHLYDMSWKIGGAELVQRDGAFYLHITQTKRNPTPDEPIGFLGVDLGIVNLVADSDGETYSGATVQRVRARRFRHRQRLQQATTRRARWRLRQLARKESRFQRDVNHCISKRLVHKARTARKALAVEDLTTIRARVTVRRAQRRARHSWAFRHLRSLLTYKAAQAGVLVVAVDPRNTSRTCAVCGHCAQANRVDQSHFRCLQCGHTAAADTNAAVNIAARAARQTAYGAASPPGEGASTSPAASALGS

SEQ ID NO: 49656 - protein, 430 aa, unknown
  TnpB Polypeptide
MASSIEDPLRRQLFTINRAAAWFDLRRSVRVENEEVPRSARLLARKIMSHVLGRHRKPSMKRIGMVVDQRIAELSEARAATAHDLWLRMTVKSGARGSRRIAIPMRSNGYFSARKGERKKTFQIIEDRHSSRITVGVVTDVGKVFEERRNAYASEAQGPKALDFGLATMFASDDGDLMGREFLRKLKSIDATISGIARHVQRSGGKPRDSKRYVAHVTRLRGFITTELRRILNRFVAVRKPTTIFLERLNFQSPDLSRRMNRILQNCGRGVLRAKLQSLKEEFGVETTEVVSAYTSQTCSCCGYVDRRNRKSQASFACRWCGRSLHADVNAARNIGSERFRSIGSAKRGVRSNVIDMLVAQHVERNTGERGAPADPRMSNPHFAAWADEARLSAKRRECQTRVKQMWDWQQSATTYATSPTPVTTRPRGW

SEQ ID NO: 49657 - protein, 167 aa, Escherichia sp.
MDALHKATRKLINDNQVFCVESLKVKNMFRNPSLSKAIADAGWGEFTRQLQYKCEWTGRTVVAIYQFFPYSKRCSCCGFTMQKMPPDVRKWPCPECGTDHDRDINAARNIKAAGLAVLAHGEPVNPESHKAAQVRLREVGILALQGGEQSRVVRSSAASFSNRRTLA

SEQ ID NO: 49658 - protein, 256 aa, Shigella sp.
  misc_feature (53)..(60): Xaa can be any naturally occurring amino acid
MASWLVEWKNATETQWLKDSPSQPLQQSLKDLERAYKNFFRKRAAFPRFKKRXXXXXXXXMRYRNSRQVTGVVKNVTVSQSCGTWYISIQTESEVSTPAHPSASMVGLDAGVAKLATLSDGTVFEPVNSFQKNQKTLARLQRQLSRKVKFSNNWQKQKRKIQRLHSCIANIRRDYLHKVTTTVSKNHAMIVIEDLKVSNMSKSAAGTVSQPGRNVRAKSGLNRSSIGIKTPKRLKKHHKTDVSSTPLLLHMNGTDD

SEQ ID NO: 49659 - protein, 263 aa, Clostridiales sp.
MLSINTLEGRIKVSFAIKGMEQYFDGSWSFGIAKLVTKYGKYFLHIPMTKEIVTPDINLVNKVVGIDLGINFLATAYDSKGKTIFFNGRTVKHKRAHYEQLRKKLQQKGTRSARKRLRSMGSRENRWVCDLNHKITKALVNQYGPNTLFVIEDLTGMRSAAEKVHLNNRYTSVSWAFYQFRSFLEYKAAMSGSSVIAVDPKYTSQTCPKCGHTEKANRDKKKHIFKCKTCSYTSNDDRIGAMNLWTTGIEYVSKVTLQASFTA

SEQ ID NO: 49660 - protein, 468 aa, Chromatiaceae sp.
MASASKTARRYLVTKTKCTCRLKTQCLPVLVCLLSSIDQSIIRSMKRLQAFQFRLEPNGEQQRLMRQFAGCCRFVYNRALALQEERHAAGQSHFGYSKLCAALKQWKADPDMVWLNAADSQILQQTLKDLGRAYTNFFEQRAEHPTFKKKGCSLESFRYPQRVQLDQGNRRVYLPKIGWVRYRNSRAVEGAIKNVTVSRRAAHWMVSIQTEREVDMPLPVATSAVGIDVGVARFATLSDGSFIVPRNSFKHHEEALRKAQQAMSRKVKFSRNWIKAKAKVQRLQARIANVRRDFLHQTSTTISQNHAMVIIEDLKVSNMTASAAGTLEQPGKRVRQKAGLNKAILDQGWGEFRRQLDYKLAWNGAHLIAVPPHHTSQTCPACGHVSAENRQTQARFACVVCGYENNADVVGAINIRARGMQQLRDEGQDTADASAGCFGTARIACEVSLVRGQQQEPTEATIRELACA

SEQ ID NO: 49661 - protein, 385 aa, unknown
  TnpB Polypeptide
MMIDQVLTVRCKLAPSDSQARSIEEALLVFANACTWINQNVDPKVKGGIKMQYLIYQDARETFGLSANLTIQAIRRVAANRKTAGKNKIEEFQPTSISYDQRIFQYREADEQVGLTLLHGRERIPLDIGNYQRNLLKGQKPTSATLVKMRSGYYIDIQVKSEAPDTIETDKVIGVDLGITDLAVTSEGEIYSGSEIKTVRDHFAQLRTDLQRKASKGTRSTRRRCRQLLKRLSGKEQRFQRWVNHGISKIIVQRAIETESAIALEDLSGIRQTSNRRIKSLHKWAFYQLKEFVSYKALAAGIPVILVEPAYTSKTCHQCHHIGDRNGKLFSCPSCGWGGDADYNGAKNIADLGAVVNQPGGPGLFCLIEAEKIPGLQKASLFRGG

SEQ ID NO: 49662 - protein, 576 aa, unknown
  TnpB Polypeptide
MSSTHLSLPLCLPDEERERYDRLATLTTQTANTLIEQYWTPDHLTEINETSHQAWKYFDEQEAFAEFDIYLPSRYKRCLLQKVGETLRSHADKREAFQTVKPLLPDHKIRRIHTRRIKNRLWDSDEYLSSGYVDILINQLNAYYDVHGTYPATYFDFQDCPQYSSGVLPYSADDGPTSGQAVKYQYDETTQQLTVELKTPDTLEAETWSDWTWTKYTLEGYESFYELVEHGSLSAPEFQPSTSKRGDDYYELSFPVETEHADTPDDVETVLAIDGGLRKDATAVVVDSDGEQLSTPYFIQNTEQERMRNLNRERNQLNSKLAYLRRQGRDHTDEFKHVQSEYERVNNKIRHKREQLVHDVSNQILALALVYDVDAIVHEDLRSLSPPRGEGQLSWELSSWARREIIESIEYRADIAGIHVERVYAGNTSRSCPRCGSTGHTTKSPDHFFEVWHGGHFRCDNSRCGYQADRDYVGAVNVARVFFAESDSLDSDFTSSYIGDCEIELAGRSAGSRPTFGNALVAYTGQSRVTAGGGSCLIAPAVTPIGTKNVVSSKSSVSSPATHSYSRFVRDAAVCC

SEQ ID NO: 49663 - protein, 484 aa, unknown
  TnpB Polypeptide
MIVSYQFKLKPKLSQVAVMEQWINMLRAHYNFCLRDRIESYEQVTSPKLGDYCYLDTEAECCPLTCSVSKNSNLGYPYKTNGKKRNAYEQQSSELTTLKKARPWYREIHSTVLQQNLKRLEVAFKNFFEGRGYPKFKTKQRFKSFNYPPNQVQVEENRVYLPKIGWMTFFQSRSFPEGFALRSVCVRKKADGWYVSIGLENKDVPQSSPKTIEEINSVVGGDLGSNKLLALSNGKQIANPQFEKLLERTKTIRQRRASRKKRSSKNQKRAYQKLARLEQKIVNQRTDYQWKAAYQLVRLADVIVLEDLNIKGMIKRCQPKKDENGKYIKNGQSAKRALNRLIRDCAWGELKLKIQSVAEKFGCLVIEVNPKHTSQQCSACGHTDKQNRQGEKFACVECGHIADADNQAAINIAKRGIEQLNLSLSKLLGVTQEVTANLEATGNTRNGKETSVLLETEPSNPKQLSLFEWIGGQVTDFPESPTIA

SEQ ID NO: 49664 - protein, 303 aa, unknown
  TnpB Polypeptide
MSLAKRKVVYRLYPSRRQLSLLSQTLRLHQQLYNGALEHRISAYKKHKKSIGFSQQCRELTALCHAMPEYEALNAQSCQVTLKRLDFAFQAFFRRLKAKDKRAGFPRFKAYERYSGFGFKTHGDGWKIMPGERGQHGLLRLSDIGHLKIRGKAKHIGTPKTCEIQHKQGNWYASITVECSPARPSGKEAIGIDWGLETFATIAKHDQSTERIENPRLLRKRLKDLRSTQRALSRKKRGSQNSKKSKEVVAKIHRQVANKRKDFLHQATANMVKSSALIAVEKLNVKGMSSHGGARKKGLNREI

SEQ ID NO: 49665 - protein, 379 aa, Halorubrum sp.
VNRLGVKPLAYDSVRKHTDLGSQHAILATHQAAQVITSCIGRKAKGKKVSKPTFTAPTVKYDTWTMTLFDDDTVSLSTTESRVRCPLALPDADDGYQRQYLDSDKWSVTESTLTARDGDYLLHIGFRRPKTDTERNTAEDGTVLGVDLGIEDLAVTSTASFVSGRELTHDLHEFENVRTGLQQTGARSAHRTLEQSSGRELRYVRDVLHRASNAIVDEALRYECDVIAFEDLSHIRDRMGASWGHKWAFRTLYEQVEYKAEAEGISVKQVGSAYTSKRCAECGFTADENRATRNDFQCVKYESEANADYNAAKNIGMRYVRRGQQSSRRTGNSQLALKSGTVTPIGGFTAHPEGGLRPNSWTSPTLHERTRQGERSRIV

SEQ ID NO: 49666 - protein, 456 aa, unknown
  TnpB Polypeptide
MQTCSQAADSTRKTRSEMTRLRYFGTKTKCAVSRKTTCRPARNSLLLSTDQPIILRVLIRKGFRFRVYPTPKQQARLRRWEGSLRFLWNLGLEQRRMGLARPRGEKRFPTAFDQINELTALRAELPWLADVPRNVCAQLLVELDKASQRAFKKVALPPRWKRRGRDFVGLCEPHPKAWRLDGAVIRFPKLGNLRAVVHRPLEGKPKTCTIRRDGDQWFASILCEIEIADPAPRPEPVVGLDRGVVNIVADSDGAVFPAPRCFERARKQLARAQRTVSRRRKGSQNRDKAKLRVATLHRKVRRQRQHVVHLLSARYAKSHGTVVIEKLNVAGMTHANRGLARGILDAGWSMFATCLRYKLAWSGGNLVEVPAAYSSQTCSSCGAIDKASRRSQSEFCCTACGYHDHADLNAAKVIKARANRSCQPAEGSCPETPRRSRKVNVALRVPRRSSSQSLAL

SEQ ID NO: 49667 - protein, 400 aa, unknown
  TnpB Polypeptide
MVKSLMAISYKYRIYPNKATEQKLNEALDTCRWLYNRLLQEMTEAKERGITLGKLDTQNMIPSLKLVNPDLQKVYSKALQMVNYTLWSNIKALSASKKNGRKIGHLRFKGKDWYKTINYNQSGFKIDQDHSLLHLSKIGDIKIKLHRKIEGSVKAVLIKKSGKEWYAIVQIEPELNVPDPETRSVGLDVGLKSFVVDTDGNSVENPRFAEKVVTKVKNIQRRLSRSEKGSNNRKKLRDTLDKVHERINSQRSDFLHKLSRSYINNYDIICVEDLDVKGLKEKGYNKGMHRNIHDASWSKFLFMLSYKAESAGRKLIKVDPRNTTQRCSACGSIVKKELSDRVHECPYCGFSCDRDYNASRNILIAGMEQPVAPIESKPLHHVSVMQVLAMKWEALPFRVG

SEQ ID NO: 49668 - protein, 405 aa, unknown
  TnpB Polypeptide
MQNKLTGPDGWKQRWPEWKDVYSKCLQMAIRRIKQSETVLESLQDRGYDVGRLKWKPPREFRSIVYNQSGFDVDHNTDRTGHAIVNFSKIGDFHLTYHRPLPDDGDITQVILKKEKTGNWSVSIVVDYDPEYPDKPAVEDIDPVDTVGIDLGITKFIHDSDGRSFESLDEQRDRDRIERRHRDLSRKTYGSNNWEKARQKLAQAYSRLQNRREDYREKLAHEYTTRYDAVFLEDLDVKAMKEDDGNSRNVASMSWRQTIQAFKRHGKKNGCHVIEVPPEGTTKRCSQCGCETDKPLWVREHSCPACGFEADRDYNAALETKRLGLEKLGVEAHTMTVGQGMAESTSPEIEDFWCANESRSDSLTPAETALPGETEETSDDVSPKRVVETGSPCLKVPPKAASRQG

SEQ ID NO: 49669 - protein, 593 aa, unknown
  TnpB Polypeptide
MFVTGVHMRAGRNFQPLNYDLRLPDAVQAAALRLLDGSRAVINATVAALWDRLDEFGERETKYAYKQVTAMMGSPAFHGDRQWRCEAEQAGRILREQAARKKQFALILPLLEQGMILPQTEHTSAGKNRKAIKAALADLREEDSDGGSAVELQSLIEQACNFYLKNGCFPDTYEDMQALPVQKRGILPYAGDDGGEKGQAYRLRIDLEGRCCYFAFRAPDQAGSWPASWTEPQLRLPLPSPVVERLQAGEDLAPTLREIALPDGTRYAVLDFMVEVPVAPLPDPKQVRRVLGWDWGVRTLVTATILDLAGNPLFLDTGSFDGRQAHTRRHIDRLKSKVAKLEARRDQFPVGDKRRAPSESKLVVLRREIACCWRKYEARNNDLAHLAANILILLATVWEAELISGESLKSLKSEGRGRGAKGRWVHWRNNSQIRGALWRILRYKCHLSGLHLVWQHPRGTTHTCPHCGKPANTYASPALDAPVLDAGPWLRCFACGWNGARDYAAAINIALLGVAFLKQSLTTAQADPSSHPTMQEKGLNSESYSGSGLALRLPPTSPRGRLISSGKMYVNGWIKSVTLHSALPPESMLRLCG

SEQ ID NO: 49670 - protein, 429 aa, Pleurocapsa sp.
MMINMLRQAQKVRIYPTDEQKQQLAGAMGCSRWWWNFALNKSIETYKETGKGLSRAGLNALLPNLKEEHEWLRTEVYSQSLQQTSLNLSRAFINFFEKRARFPRYKSKHGKQSVGFPQSVKITGDGIKLPKIGLVKAVFDRRYFGTIKTVTITKDSSDRYFASILYEIEACFVSGNGDKIIGLDLGIKDFCIAHDGTKTSKYANPRHFKKYERNLARKQQKLFRKQKGSKTRQKAKKLVAKVHVRISNARQDFLHKLSRKLTNESKVVVVENLFLNGSLMGETPKTAPVRNVKGMVRNHKLAKLISDVGWGMFVNFLSYKLERENKRLVEIDRWFPSSHICPDCLTQTPKIDLSIREWTCLNTTCGKTHDRDEAASRNIRAEGIRIIKADGTAVSASGGSVRPDRGRKTKVRQHPAKLETQSSPLGRAE

SEQ ID NO: 49671 - protein, 631 aa, unknown
  TnpB Polypeptide
MLDAAPALAFASPDPAPAAGEASPSATVTRVYRYRLWTTKAQDGLLHVLLELLRLFYNACLQERREAYKKLGTTVRGGEQEKAVKEIKQTCPDFADLHTHLFQDVIRRLDLAYEAFFRRCKAGEKAGFPRFKSFGRYHTFTFKDVAHNNGARVLDGGKRLRIHGIGEIRVKLHRPLVGRVKQVSLTLSSDGHWYAAFVCDQVPVQPLPTTGKSVGVDVGITTFAALSNGNKTKSPHPLRRARLELERAQRRVSRKKRGSKRRGKARKILAKKHLKVQRVRKDFHFKTAKTLVEKYDLIAMEDLNIKGLAGGMLAKDVHDAGWAQFAAIVSCKAASAGREQIKVNPRGTSQQCSACGGDAPKALSVRVHRCPHCGYTADRDVNAAQNILHRALQQKLVADRLTPVASARVGRSGRGPSKGHQLRSLRDSASEKPPPRPKGRWGSDHVQRPSPRFSPRPRQGPPARRRRGRRLPGRRLAVGEGDARALDRRPPPPPRPGRRSPSRQDRSLPRDRARRRSPHRPPVPGRLHLAGGQKRDPSAPRPRASRAVDGRARRSHGRPPHRPPSGGHRRPPGGCGGSGLPHPTRFPRRTWPPPSSPLGRASHGGRVRGPRRGLGGPPSCAGSDGRSDGLC

SEQ ID NO: 49672 - protein, 480 aa, unknown
  TnpB Polypeptide
VNSAYNEALNFGLRHFEYMKQNSTYQGLLETRQDLFQKTEKEKKTKSFKIQKKEIDKALTEIRKDYSLTEYGLSVHLSKQRRKSCSPYKHLNSGELQVVASQAYKTLEKVLFYQIKPDKVRFRSKFDLDVSYRNRVNNTGTRLEESNKKGIAYRLYLHKASTFIDIPVKAFNNHQQMNLLRSERIKYVQIIRKTIRGKKVYYLQIVCEGYPHTKTSKGEGIVGIDPGVSTVAYVTSTEVAIVDLVPSNINQKEKKIKYLSRYIERSRRVNNPDCYHDNGTIKKGSNFKPLSKRAQRLLNRSQKTYRSLSEERKKLQGKLITHLVSQASVIKIEELNVKGLQKRAKDIRINPKTNRPFRKKRFGKSIFRAAPSTFREALRKRAEQLGIELVMISPKDVKPSQYNHISKTFEKKSLSTRIFDLSPEWTGLQRDLYSAFLIRNIENNHYKQKNLEEDFPIFYTQMKDFLQQPRQTKRLSWYLS

SEQ ID NO: 49673 - protein, 392 aa, unknown
  TnpB Polypeptide
VKRAYKLRAYPTRPQQGRAVRLLADHCDLYNAALAERREAWRMHKVSVSYGDQSAQLKEIRAADPGGQGRHSFTAQQQTLRRLNTVFAAYLRRARDLKRSPRRIGFPRFKPYQRFDQVMFVAGDGARWEPADPGRRAHATFQAVGRVKIRQHRPVLGRVKTLQFKREGRRWYVIVITEAEPVPLPATGRSVGIDVGVARFLTTSDGEVVANPRFLDAAQERIIDLQRRKARARPGSGNRRRLRRALAKEWRKVRSQRRDFHHKIAHGLVDSCDVLALEDLRVVAMTTSAAGTVEAPGRKVAAKAGLNRSILDAGWGQFTSILVAKAESAGRRVVLVHPAFTSIDCHACGARCTRPRQDTVVCPVHGDLDADLNGARNIATRAGLGSGQAPAA

SEQ ID NO: 49674 - protein, 439 aa, unknown
  TnpB Polypeptide
LTGAKQRKLYETCVAFKAIAAESFQTIHSTTPRTYAILHHLVYEKNRATGIASQLVEEAQRYAWQRRRICGNINHPTVRFDKRLFSFKATGRGNPVLSIRANHDRLGLPICQDGAYRRIQEHQADGWRVTSVLMTRRYRFLIVLQKQAPTPHTTENVLGIDQNSNGVAVTVMSGKGRVLKQLYLGRDISLRQIRFENRRAELQQYRDGNGHRGRAGLKLKRLSGSQRNYVRTKTWLLAKQLTGLASQYNATIAIERLYKLRRKKGQMSRKSRRKTNRIPYGFLRHALTHKSTQLGIPVIQVPAKYTSQTCPRCGHISRQNRKNWRYFRCVRCSFEANADRVASVNICRRAIQATYPVTKDQFPLTGAPVSVPVRQDEEASWQHPTPQSCKLPPSVAEKLTSRIVWMCPHSVGLFCSRNGQAYSFPDDMRSRSTMSMTGF

SEQ ID NO: 49675 - protein, 405 aa, unknown
  TnpB Polypeptide
MRNTKDKLFKDKMLRHLHDELNICGVVRNHFIALCMRYYRRYGKETLSYRKMSAHLTKLKKLEKYQHWNIPYAWALQNILKRLSQSFREMKTLGRGHPQFKSCKKHKGMTFRGEQVKFEYLLPKQKNQRNHPTYRIRLNGRWYRFALHRPMAGRIVQVQVTRDALGDVYITLTEACNEVKPEPKTGKAEGFDFGIKDFLTGSDGHRYTSPMFYKHNADKLAALQKVHSRKVKGSNNSARERKNIARIHKKTANQRTDHHWKLAIELCQKFDVLFFEDLNLEGMKHLWGKQISDLAFGDFMQKLKHQARKRLRSVLKIDRWSPTSKCCSVCDQKNETLTLADRHWQCPKCETHLDRDQNAAMNILKEGVASFGLGVVRPIVLFNKIVGCSVEPSSLVLKSTNASVV

SEQ ID NO: 49676 - protein, 327 aa, unknown
  TnpB Polypeptide
LNIAYRFRIYPTEEQKILLGKTFGCCRFLYNQMLNDKIREYEKTKKMLKNTPAMYKKEYPFLKEVDSLALANVQLHLEKAYKNFFRDPKIGFPRFKSKHHSKNSYTTNVVNGNILVESKRIRLPKLKWIAMKKHREPAEGLRLKSVTVSMEPSGKYFASLFYEGYSCENQAAEPDYSTAKILGIDYAMQGMAVFSEKVETEEAGFFRKNEKRLAREQRKLSRCVRGSHNYELQKKKVARCHEKIRNQRRDHLHKLSRKIADGYDAAAVEDIDMKAMGQCLHFGKSVQDNGYGMFREMLDYKLAWKGKKMPETPAFCAAVRWPITRAP

SEQ ID NO: 49677 - protein, 306 aa, Salmonella sp.
LPILAGSLLTGAHARVHRPFRPAQHQNQRLGGQNDVFHYPQDVKAGQANSHITGWIRYRNSREVTGEVKNVTPSQSCGKWYVSIQTEYEVPEPAHNATSIVGLDAGVTRLATLSDGTVYQPVNRFKQASASWQKQKRKIRRPHSHMANIRRDYLHKVTSEISKNHAMIVIEDLKVSNMSKSAKSTAEPPGRNVRAKSGLKRSILGQDWYEMRRQPEYKQHWRGGQVLAIPPAYTSQRCACCGHTPKDNRQSQSKFECQICGDTANADVNGARNILAAGHAVLACGGRMKSGRPLKQEPTGARQAPV

SEQ ID NO: 49678 - protein, 397 aa, unknown
  TnpB Polypeptide
MILRKAHKFRIKTNVSTQSVFSQYAGCCRFVWNKALAIQKQRLDDGEYCLSYKDLANHLPTWKREEPTAFLKIPPAQALQQKLKDLDRAVKDAFDKSQPDKRFPVFKKKFRHDSFRYPQGFKLSGSRIFLPKVGWVRFFKSREILGKPKNVTVSRQGKHWFVSIQTEQKIADPVHPSGSMVGIDLGVKRFAALSTGEFVDPVNSFKRWQDKLAREQRNLSRKVKFSANWRKQKARISALHTKIANVRNDFLHKVSTTISKNHAMIVMEDLRIKNMSTSAKGTVEQPGKNVRQKAGLNRSILDQGWGNFRRMLEYKQGWNGGEVMLVPAMYTSQRCPECGHVDKDNRRSQAVFKCVTCGYEKNADLNAANNILAAGHAVLACGGTGISHPMKQEPLAA

SEQ ID NO: 49679 - protein, 417 aa, unknown
  TnpB Polypeptide
MKVYKTYKIPVECSNNKEELDKLQEYWFLLVNASVKMTVRLGVIDLHRLQNKLYLTLRKYTKEKWNLHSYYLPSAFKIASEIVRACVEACKSNCRTRFPAVPKDLPISLTANTVKFQEGENVYAYIAFQPHNSIKVKLNFPRNTDYYQELNLALENKVFRIKGVKLLKRNSKWFLYVSIEKEVYIPNWNYCETLVGVDVGMNYLVAITGVSRNIKTIHPTVYVKGKLWKHLQKYKRNKVRKLQSKGANTEKLYQYYNERFKEILNSAANKVIAYAKQFPKPLIVMGNLKRFKANGNKTFNFLLSNWQRRQLEQLIEYKAFWNGIPVRYVNEYYTSITCHICGNKGKREGTLFYCPTCNRKFNADGNASINIALRGSNFSDDKSMDDRGRTTGLISSVGADSPMPQASFCLTGQERCN

SEQ ID NO: 49680 - protein, 407 aa, Streptomyces sp.
MQLRYSFRLYPDTAQRTALAEAFGCARVVFNDAVRAREDARKAGAAFPTAGELSKRLITEAKRTEARSWLGEVSVVVLQQALRDAEAAYRNFFASLKGARKGTRVGAPRFKSLKDNRQSIRFTANARWSVTGSGQLNLPKIGAVKVKWSRTLPTQPSSVTVIKDAAGRYFASFVIDTNPAADATAMPDSDQMVGIDLGLTHFAVLSDSRVIDSPRFLRRAEKKLKKAQRELSRKQKGSKNREKARLKVARVHAQVTDARREFHHQLSTKLIRENQAIGVEDLAVKALARTRLAKSVHDAGWAQFVAMLEYKAVRYGRTLVRIGRFEPTSQTCSACGVKDGPKPLHIREWTCPACGTVHDRDHNAAKNVKTAAGLAVAACRAQVRPGLVPAQRDEAGSHGFSPESRAA

SEQ ID NO: 49681 - protein, 237 aa, Klebsiella sp.
VDKIQTIARCERQNQKCTISQSAGKWYVSFQVEIETDKPKHESTSMVGLDAGVTKLATLSDGTVYQPVNSFKASQRKLAVLQRQLSRKVKFSANWQKQKQKIQRQHLHIANLRRDYLHKITTTISNNHAMIVIEDLKVSNMSKSAKGTAERHGRNVRAKSGLNRSILDQAGTKCAVSLSISSSGVEVRFWRYLRHTPASVVPAVVIQRKRTVCHKVNSSVKYVATPRTPISTVHVIF

SEQ ID NO: 49682 - protein, 372 aa, Bacillus sp.
MMLAKKVRIKPNKEQELQLWKSVGTARWAYNWTLAKQEENYKNGGKFISDGFLRKELTVLKQTEEYAWLYDVSNNIAKQAIKDACEAYKRFLKGLADKPRFKSRRKAKLSFYNDNVKLKVKEKQVLIEKVGWVKTSEKLPVGVKYSNPRVSFDGKYWYLSVGIEQKFTKEKLTAVSLGIDIGIKELAYCSDGQRKNNINKTKMVRQAEKRLRRLQRQVSRKYEMNKEGNRFVKTSNVIKIEKEIRQLHRRLSNIRKNHLHQSTSEIVKTKPFRIVMETLHMKGLMKNRHLAKAIAKQCLYEFKRQIQYKCEKYGIEFVEADTWYPSSKMCSSCGSINKELKLSDRVYKCTCGHEMDRDLNAAINLSRYELAS

SEQ ID NO: 49683 - protein, 384 aa, Lactobacillus sp.
MLAGIKLRLYPNKKQQGQLFQMFGNDRFIWNQMLAMMNERYKNNHHLPFLGKYKLDILLKPLKHQYSFLKNSDSSSLQIVNANLNQAWKNFFDKSIRARKPKFHSRKSTKNSYTGKSTVRVIGRRYLKLPKLGYIKTSKTGLLKDAKIKRYTVSLEPTGKYYISFQVEVEKKELPKTNKEVGIDIGLADLAILSNGIKYDTFDGSYFDKKATEWQKKFSRRRHLAQRLVLQDKNKKVLNPRNLESFSNWQKAKIVKARYQNKVKNQRKDYLHKVTTELVKNYDVIAIEDLKAKNLQKNHHLAKSISNASWRMFRMMLEYKCEWYGKKLIIVNPKNTSRICSNCGFNSGEKPLNIREWTCQKCKVHHDRDINAAVNILNKAKLTG

SEQ ID NO: 49684 - protein, 470 aa, Lactobacillus sp.
MLFAKEVKIMRKTEMKYMLGLKMRAFPNHKQKKIIKKNTDASRFVYNQLLANSYTDSAIHRNKLDKKYPIPKYTVRFNRIKKCFIVHQNWRYNKKGTLITKSTKRKTGLDRITADKYPWLGDKDLDSLTAYNAQINYQSAWKTFRQVHDAGVPKFKRKSASKQSYSTNCQYVGLDKKHGEVPNLFNGTVRFLKQNPHGYCHIKLPKLGKIKVYLSKELPKAKEIRIARVTISVHSSGEYYISMLIKSNDPLASLYPKTGSALGYDLNIKNFLIDTNGNEVANPKYYRRMRDKLAKEQRILSRRCRRAKKTKHKLSECKNYQKQKLKVAQLYRRIYRQRNAFLHNLSTALIKNHDLVVGENLKSRNMLKNHALAMSISDVGWRTFIGMLEYKAPLHGKTFVLVNPAYTTQTCYDCKFVMGKKGTKKLTLQMREWDCPNCNAHHIRDYNAAKNILGKGYMALKIPDYEYKFS

SEQ ID NO: 49685 - protein, 484 aa, unknown
  TnpB Polypeptide
VSKKTLKKSRFFALHPETNPGKIEQLEALHKEYVSYVRICVQTMLEAQRYTLLQSEWQAFFPKATGLTSQIVKNARSHAIQIVSGWTANQYTTRLRKVIKDLRRVGDITDDDAKALYTIGKFFLFKPWKFATQDHIDTYYTLLDKHRGRHPEVRSKIPIRLSEMTSRLEDPDEALFPDYWLRVSTLKFRRSLWLPLIGNPYVNQADQVSKGIQARKTKQGRWRFEALDKREWKVPEASPSDSKLGMDVGLNVLAATSDGDLYGSDFKPKFDKIYRKVRSVSSNRRRQGFKKNSPRLDRLESRQTGQIKTATNTIANRLVGQHPHTVFIIEDLDLSGCRGQKRFAYRALQTALGTKAPIEVVNPAYTSQECPSCGYAHRSNRNGIKFSCRSCGRQAHADWVGADGTLRRSEDKGITCDDHPNSVKQVLRERYLRRRRDSSLGSGGSRPPPCAPLPSGQRLTTGGSTVKVGTGTASNTVSGEDQDN

SEQ ID NO: 49686 - protein, 237 aa, Caldanaerobacter sp.
LYGHTTYFVHIVYKKDIPKVEPADKKMMGIDFGIKNLAAIVIEENPETFIIDGGYLISRLRLLAKEKARIQSVISKQGYKTSYKLHNLIIKEKNFVKDYIHKVSRYIIELARQNGVSKIIIGGMSNGITDMDIGHKNNEKLHKIPFGRLFDMIKYKAGEYGIEVEKVDEAYTSQTCSVCGIVEKNNRIYRGLYVCSRCRTVMNADINGAVNILKRVTLNPRLDRGRGFGNPRRIRVA

SEQ ID NO: 49687 - protein, 502 aa, unknown
  TnpB Polypeptide
MSRLVSEVRGISTYATYTVRNDTQLAADLAQVTVSQPAVAGRRAGVTIPPELVVKGKVYKNKAGKLVEEKVFGRSRKELLFRHRVVTEHRSWQERVKAAKGESSKYVSRGWERTVDASAPSYGDGDFINLGAVDKQYAVIENNPVVDGEIVLRMVIQGQWYRLIFTFDNKRFPEGKVTLPVVKIENNQPVFIFSVVTDNPVVQFSGDYTIGVDVGINDYATVVVRNTKTGCIVKETTLSQRVHSLWNSVRASEKQVKQLNKKADKLLYDRQAHMCAFDEAQLHREAASRKKRELAILAAQEIAYLSHQYGNAVVAVEDLGWVSNTMQNGRWNRGAFTQWLNHYVTQNGGWVVAVNSANTSQLCHICNEKVTHPTHRVSLCPKHGEMDRDVNAAANIAAHAAPKMGKARKTRAKNRKLQGKAPLKTPVTRETLKYPGRDRTKNCPTPKRKKRTSKGVNLPLSPARVIMTTVLADWDAFGILETNKAAINQDYATHECRLCNLN

SEQ ID NO: 49688 - protein, 505 aa, unknown
  TnpB Polypeptide
VSPRHILDLNGELLDSATILARLAAEVRDISAYATYVVRNDVALGERLALAGAVQPATAGRRAGVTMPDFLAFGRTGRSRKEALIQHRVVTEYRSWQERIKAANGESSKYVSQGWKRTVDASAPSYGEGTVNLGAVDKQYAVIENNPVVDGEIVLRMVIRGKWYRLIFRFDNKRFTEGKVTLPLVKVENGMPVFIFSVVTDNPIAQFSGDYVIGVDVGINNYATVVVRNSPTGQIVRKTTLSQRVHSLWNSVRASERQVRALNKKADKLIYDRQAHMSAFDEAQFHREAASRKKRELAILAAQEIAYLSHSYGNAVVAVEDLSWIVNTVQNGRWNRGAFVQWLTHYVTQNGGWVVAVNSANTSQLCHLCGEKVTHPEHKVSICSKHGAMDRDVNAAANIAARAVPKVVKARKTRAKNRKLQGKAPLKTPVTRETLKYPGRDRTKNCPTPKRKKRTSKGVNLPLSPARVIMTTVLADWDAFGILETDMAAINRGNVAYECRLCNLN

SEQ ID NO: 49689 - protein, 370 aa, Methanosarcina sp.
MKRGNRYRIYPNMEQKVLLEKHFGCTRFVYNKLLNIKSTLYKQCRISISEFELNNHLLVFKEIYPWLKEVNSGALQQASRNLNSAFNHFFKDGFGYPQRKKKKDNRFSFQLPQNYDLNIEKSEIKLPKFGWIKVKIHRDIFQGEMKTLTVSRTPTGKYYISILTDDEEAYPEPEPFSHTTMIGVDVGITTFATLSTGEKIDNPRFLKTSLDKLKYLQKSVLRKVIGSKNRRKAVYKLAKLHELISNQRNDFQHKISNRLISENQAIAVETLNIQGMMKNHKLAQATGDVGWYSFVLKLQYKAQWLGKTILKIGQWEPSSKTCNVCGYHNSKLILDVREWQCPECQLIHDRDINAAINIKKFSLISVGTTV

SEQ ID NO: 49690 - protein, 527 aa, unknown
  TnpB Polypeptide
MKERLTISAQEADTDAMMLKATSKANPNQLPLFATVEYPAQSKETILNDKLSIYEASIPKQKLSETSEVVSTSKKKGLEPYWNGFCEVISSKLLLPIGIDSPGSVSTLYDTSLNKTVANSWFWTKQHTVRKKNSQRIFSQSCLSSVADCTRSEVTMTKSKKIRVYPTTAQRETLRQWFGTARFVYNKTVDILNTTDTQANWKEIKTDILHNLPEWSKETPYQIKSVAIRDACIAVREAKKKYKQTGEYQSVSFKSKRHLSDSIFMPKSAIKPRGVYHTVLGDLKMTESLPENICDSRLVKDKDKYYLCVSYTATTPKRKPNGRVVALDPGVRTFLTYFHERGFGWLGHHAINRIQRLCSYLDDLFSRASKATRQSRKNMRRAAHHIRKRIRNLVDELHKKVARYLVDNFDIILLPTFETSQMTCKAARKLAKKSARQMLTLSHYRFKQFLKHKAKEVGCIVFDVCEAYTSKTVSWNGEIRKSLGGRKIIKDSAGLKMDRDLNGVRGIFLRALVDEPWLLSISNLQTV

SEQ ID NO: 49691 - protein, 421 aa, Arcobacter sp.
MTLTQKNRLKLSPKKLEIVRLLSYYSARLYNVGLYSVRQHYFKNNEYLTYAKNYHECKDNENYKLLLSDTSQQILKIVDRNFKSFFALLKLKSAGKYSEKIRIPKYKKQDELVNIIVQGRSARVRNGYVIISLSKAFRQKHPFNINELKFKLPKNIEATKLQEVRILPLFGGMEFDIEYVYQKQFKPISVDKNSYLSIDMGLDNFATCFDSSDGSSFIIDGRYIKSINRHYNKQKAYYQGILDRQKIKTSKKLLSLSRKRYNKINNYFNLAVNKITNIAISKNIGSIVIGDFKDIKQESNLGKRNNQNFVSIPYNIFKRKLKSKCEQLGLAYHLQDESYTSKCSYLDNEPIQKLTSYQGKRVKRGLYKSSKGILWNADVNGSANILTKFLTSNGLKLPQVISNRYGCVNHPKRLKLNDLVA

SEQ ID NO: 49692 - protein, 363 aa, Saccharothrix sp.
MFTALKRDMWTGDPYLCRLMRQHTRRGRNRTHNQIVVRSDQYRTFTLAERGNVWLAVPGLERRRLVTIPLNTTVAPTGTLRLILRADRVEVHYTIDATTLTSSKRPCGDREIGVDKGYSEVLTDSDGHHHGTELGELLTGESDHRKTKNARRAKLRSIAGKAIERGDHAKARRIRDNNLGVIKRRRRSAAWQRRVRDITFKAAHAVVDKAALVVAEDLTRTFTGRKRLGRNTNRRLAAWTKGVTAEALANVSERRGSALRLVNAAYTSQVIPGTDSFGKRAGDRLHCTRCGAVWHADHAAAINILERAADPDIGLHTPHTRVKQIIQERDRQRSRLPDQDSNTAGHCRCGEQNIRIRSTLIKE

SEQ ID NO: 49693 - protein, 538 aa, Catellatospora sp.
MADLRSIAAPFVVPGPSGVAIRTRLKGLSAEDEYVLAAVGEHLGSVAAADLKQRCADGLGHDIGRWAQRKRGLTGLSSSRWAGSITKSTHDQWALARRGLAAHVQGLQAGIDMLAHRLCLPVGQKGSKRAPGGYRSRREWHAKARRLACLTDRHAAALADYDSGRVRVVRGGRRLLNTRHHLDQAQLSQEQWRQRWRAARWFLSADGESGKRYGNETIRVTDDGRLSMKLPAPLADLANAPHGRYLLTCRVSFAHRGQQWTDRIAADRAVAYRISFDAQRGRWYLTASWQHPPVPTIGLAAALAAGCVGVDANDDHLAAWHLDAHGNPVGAPRRFSYDLSRDADHRDAQVRHALTRLLHWARACGVKAIAVEDLDFAAEKTREKHGRRKRFRRLISRFPTGRLRARLTSMADQTGITIVAVDPAYTSKWGAEHWHKPLASPTRRITRHDAASIVIARRAQGHKARRRTSPPPTDQSDRVGHRSAQARPDVPGCEGPRRRIPGPRTRCPSPDSDPNAGDQCAQHRSGHTTEPVQLMHSQ

SEQ ID NO: 49694 - protein, 462 aa, unknown
  TnpB Polypeptide
MHGTHLFAETMWKTDWKISEHPAKMGSQRHLTRIPEPKDCVLIKTSFGRRHWERMWKMIKAHKIRLHPTPEQAVYFAKAAGTTRFVWNWALAEWNRQYATYAAIKEGRACRWPQDAEPLSRPTALSLKKQFNALRREQFPWTWDVTKNACDQPFLDLGKAFTAFFSKKAHYPKFKSKKKSKASFYLANDQLEVKDHHVWIPKLGWVNLAENLRFTGKITGARVTKKADWWFISITVEVPDEAPQKRPAAVGVDVGLNRVATLSTGEKFENQAFLKTNLKKLRQANKRLHRRKPGSKNREKARRQVARLHYRITCMRDDVLHKLTTRLADGYGIIGIEDLHLKGLLKNRSLARSFSDAALGKLLDLLTSKVAQRGGQVVHVGRFFPSTKLCHACQWKWNEITLADRVFVCQNPDCAYYEFGQDRDHNAGQNILREALRLIGLIDQVVNGSGSDEDANLPVDLG

SEQ ID NO: 49695 - protein, 366 aa, Deinococcus sp.
MHITYNLRILRDADSALSTLVNHRDLLPCPTEKIQGANGTVYRPSPSLNGAIEAANDLQFRLGETVINCQTYALPPEEYAGLLLKSPGFRQHKLAHLLPPLTTQMDAAAREKWLNDLAERLQVPAQIDNEAHLLPTRPSHVATWLPGDTRLIKTATGWFLCLAFEVSPPPVRYHIKQAVVGIDIGLRTLAVAVHKESLQHHAAGIADLQVTQSDLKRYLPNRPDLWQGMQRTCVMLQHAAAREELARMLDLIVSGASLVGFEKLNFGGDMCPLFTRRARELGLRDFLKVWLPRRLQMHRIEYIEVPSDLTSRLCNVTGRLGQRSKTDVSVLTNGNGEVVAADANAAKNIGEIALVRSWQRRIEKGA

SEQ ID NO: 49696 - protein, 389 aa, unknown
  TnpB Polypeptide
MLAMKAVQQQYTPTSETLWLLDQFRQMLNHCIQIGLAENATSLKSLSLKAYRQLDRYDVISYYKLCAISAAAGILRNYHKAKRKNKRSKEPYARRLRLATCYGFKIMEGYLLLPFKPKQPIQVPLNKHTMQVISEPSLQVRSITLTDQTLNISYAKNMELIKPRGLLAIDRNLDNLTTADTDEHIVQHDLSNATRIKATYREVRSHMKRNDIRVRRRISGKYGRKQREKVKQILHHASKQIVADAKMRQFGIVMEKLTGIRKLYRRGNWQGRDYRCRMNSWSFAELQRQIEYKARWEGVRVIYVNPSGTSVKCSMCGSRMARIPEENRTLKCQSCGFMVDRDVNAAKNILARAPRFRAFAPAKEAMVQELAQQQAAIMKVDACELTQKP

SEQ ID NO: 49697 - protein, 251 aa, Lactobacillus sp.
MKYLNILNIVVTVRLNVAGQYYITVLVESENQTLPKTSKYIGGDLGLKSLLNLSDGCKEPINHFEDKYHKKLYRWEKLRSRRFLKAQQEIAWDHHNKVLVPRQLDDFKNYQKARIMVAKYRQKIANQRLDQLQKFTTKLVKKYDIIVLEKLNTKGMMKNHHLARAIANASWSKLVDMLQYKCDWYGKKLIQVNPSYTSQICANCGKNNHRLGLNKSEWLAVREWDCPNCGKHLDRDINAAQVILQKGLAIR

SEQ ID NO: 49698 - protein, 215 aa, unknown
  TnpB Polypeptide
VAVATALSTGETTSPGRLSGKEAGRLLRLQRRLARAQKGSNRRAAVRTAIAHIKAREADRRRDWVEKTSTDLARRFDVIRVEDLNTAGMTRSARGTVAQPGRGVRAKAGLNRGILASGWGLLVARLEQKAPGRVEKVNHAYTSQTCNACKHIASESRKSHADFACVACGHQDNADVNAARNIADRSTAAGLTVAARGDRAQSARSVKREPQLVAS

SEQ ID NO: 49699 - protein, 377 aa, unknown
  TnpB Polypeptide
MTTLKAFKYRIYPTKQQQVLLNKTFGCVRVVWNHHIEVFNQYDKNLTEQAQALTSTQLKQQFAWMGEVSAAALQQKEMDFKAFKKNYFSKTRKIKIGRPAFKHRDSRQSYRLPNQKFTLNEHSIRLEKIGKVKLVRDRAVPDACKFISVTVSKNACGQFFVSVLVEMDIAQKPKTGRKIGLDVGLKTFLTGSDGFTVENPRFFRESQAKLTHAQSQLSRKVKGSVRRKKAKLKVARIHNTIANQRNTFIQQITTQLIACYDVIAIEDLNVAGMMKNRKLAKSLSDAAFSEFFTTLSDKAAWYGKEVVKIDRWFASSKTCSCCGWKNEHLTLADRVFHCQVCGLSKDRDLNASENILQQALGVNSALRTQSEYQTEIA

SEQ ID NO: 49700 - protein, 219 aa, unknown
  TnpB Polypeptide
VVLGVDLNVTGTFAVTSTGEFIGSADYLTHKRDEYERRRGRLQQTGTRSAHLTIQSIGSRFSDWSLDWLHNRANDLIAEARDADVDGIIFEKLDHIRENIANGSKFQQWAYAKFVELVEYKVESTALFVDTVTPAYTSQRCSHCGFTHEDNRDDKQFACQDCGYEVNADYNAAKNIAVRYCGYIHRGQKSRGGWGTSQLALKSGTLNMNGDYTPTELLG

SEQ ID NO: 49701 - protein, 340 aa, unknown
  TnpB Polypeptide
MLDQRRLGRNRPPEHDELTALKNSERYDDLRKVSEFCKNSLKRSTHGTANEPTEPRAIPATANTATNTHGSTITFKNKGFKLDTENNRVRLSKGKNTKDYWSDFALCARPDVDLPTVESVQQVRAVWTGDEWELLRLPRRNRNAGAPGESTVGIDLGIFTFAAGNRGIVPAWLSERRRLLLRHIANCGDSSSGGQSNSTVSGRIAVTHSLSRNTSSNGVEKRVGSITIGDLSGVREDEDDEVKNWGTHGNLDLHGWAFDRFTNILTYKAEMQGVENPVSSVTRRKRARVVGGDSNRVSVGCTYVIRELVAECECERVASESVGWPRIECPLVGAAFDSLV

SEQ ID NO: 49702 - protein, 376 aa, Lachnospiraceae sp.
MRRAYRYRIYPDPEQQTQIAKTFGCCRFIYNRMLTDKKEWYEKHHEMLRTTPAQYKKEYEWMKEVDSLALANAQLHLEAAYRKFFREAKAGFPRYKSKRHPKQSYTTNVVNNNIRLEGKRLRLPKVGKVKIVLHRQIPQEAILKSVTITKEASGKYYASILCELPEPKNQRPAVSTKDAKILGIDYAMQGMGVFSDGTKAEYPGYYRKAQERLAREQRKLSHCEKGSRNYEKQRKRVAICHEKVRHQREDYQHKLTRKLADGFDAVAAEDLDMKALSQCLHLGKGIMDNAYGAFLQKLSYKLEEQGKELIRIDRWYPSSQICSGCGSMHPEVKDLSVREWFCDHCLQYHDRDINAARNIREEGRWILSKRDARISA

SEQ ID NO: 49703 - protein, 217 aa, Microcystis sp.
LHPSGRWHISIRFDDPTIKPLPVTDKAIGIDLGISSLVITSDGDKVSNPKHFKKHYRRLRKNPKSLSRKQKCSNNREKAKIKVARIHAQITDSRKDHLHKLTTQLVRENQTIVVENLAVKNMVKNPKLSQAISDVSWGEITRQLAYKCRWYGRNYLEIDRWFPSSKRCSNYGYIAEKMPLNIREWDCPDCGTHHDRDINASKNILAAGLAVSVCRAT

SEQ ID NO: 49704 - protein, 379 aa, unknown
  TnpB Polypeptide
MANKAIRYRVYPTTEQSVMFAKTFGCCRKVYNLMLFDKIEGYKITGKFPTVTPAKYKKDYPYLKEVDSLALANKQMDLQAAFRNTFSKSRKKKNGFPKFKSAKHSRKSYTTNNQKGTVAIIDNKHIKLPKIGKVKAVIHRIPNDSWVIKSATVSQESDGKYYISVLFEFDNTINSYVADKTNAIGLDYASNGLYVDNNGNIGTNHKYYRESHDKLAKAQRRLSRMRGSKKYETKSNNYIKQLRKVNKIHSHIANQRLDNLHKISTEIANQYDVVCVESLNMRTMANKGFGNGKATLDNGYGMFLSMLDYKLSDRNKYFVKVDKWFPSSQICHCCGALHSEMKNLGIRKMMCGCGLTISRDRNAAINILNEGLRLLNNTT

SEQ ID NO: 49705 - protein, 376 aa, unknown
  TnpB Polypeptide
MLRAFKTEINPTKAQMIKINQSLGVCRFLYNRYIRENINAHQINNPFITANAFDKYVNHTLKKELTWINNCSSKARKQAVRRAEAAFKDFFLNKKGFPNFKKRKSNNMSFYFVKNNKTDCLVERHRIKIPTLKWVRLKEKAYIPVNTKVVSGVITKDAGRYYVSVIVDIDYKSKNNNTGSGIGIDLGVKEFAVCSDNAVYPNINKTKKVKRLEKRLKRQQRKLSRKLSKYKKGESTRNIDKQQLKVQKLHQTLRNKRHDYINKIINDIMKRKPSFITIENLNVSGMMKNKHLSNAIAKQCFYLFKRKLYDKCKVSDIELRIADRFYPSSKTCCKCGLINKNLKLKDRLFSCACGLHIDRDLNASINLMNTVSYTTA

SEQ ID NO: 49706 - protein, 408 aa, unknown
  TnpB Polypeptide
MLNIQVRLYPNETMKAVLNSLCNYRRYCWNQGLELWNTLYEQRLIGLLDELQAKIKASLTDKTIKFSEEEQTMRTLFPLPSERIVRDELVAQKADWQFALSSRVLQLAIKDLSVAWKLFFNNPKTANKPSFQSSKKHKQGFKTDSARIENGRLMLDKPHAYKGKWSSIRFRGASILDGKLKLCSITKTKGKYIATIAIDIETIAFPKTGKTTAVDANVDHFDTTEYQVSLNPKSLAHLYTKVRTYQRQLARKRNINENYICSKSYQAMRTKLQMTYERIHNIQNNLIHQFTTNLYRQFDTVVIEDLDVKSMQMKKKAKNLHRSLFGRFRQFMEYKAKKFGKTLIVADRFYPSTQRCSNCGHVKTGDEKITLSGNTTHGTKHHEYVCYKCGYEDDRDHNAVLNLLALVK

SEQ ID NO: 49707 - protein, 427 aa, Escherichia sp.
MHQENTMLPRRISVSLFIDQSIIWPVKRLQAFKFQLRPGGQQEREMRRFAGACRFVFNHALALQNENHEAGNKYIPYGKMASWLVEWKNATETQWLKDSPSQPLQQSLKDLERAYKNFFRKRAAFPRFKKRGQNDAFRYPQGVKLDQENSRIFLPKLGWMRYRNSRQVTGVVKNVTVSQSCGKWYISIQTESEVSTPVHPSASMVGLDAGVAKLATLSDGTVFEPVNSFQKNQKTLARLQRQLSRKVKFSNNWQKQKRKIQRLHSRIANIRRDYLHKVTTTVSKNHAMIVIEDLKVSNMSKSAAGTVSQPGRNVRAKSGLNRSILDQGWYEMRRQLAYKQLWRGGQVLAVPPAYTSQRCACCGHTAKENRLSQSKFRCQVCGYTANADVNGARNILAAGHAVLACGGMVQSGRPLKQEPTEMIQATA

SEQ ID NO: 49708 - protein, 347 aa, unknown
  TnpB Polypeptide
MKLVARIQLLPDVESAAKLKATMEAFNAAADFVGSIAFGQRTANVFDLRRLCYEQVRERFGLSSQMSQLAIKAASDAYKRDKSKRVRFHKHAAVPYDQRTMSIKGIDRVSLLTMAGRVVVPYITGSYGRERMQLPRGQSDLVLAKDGKWFLLVTVDVPDGTPINSDDFLGVDLGVANIATDSDGESPLRPTAVGPTPGRTSRRSASGTTWIASGSPARTPRGARRRSGEPTRRKLGSAATKTTLSARRSSSPPSAPDEGSPWKSSMASANGSRLGAETHGTGSRVGPSPSSARSSPTRPGWRVYSWSMSTRGTPVEPAPSANIANAPTARASPNSSARRVATRPMPM

SEQ ID NO: 49709 - protein, 227 aa, unknown
  TnpB Polypeptide
VVPAGDGRRPGRNADQLRRLPWRRPGRCQYRDRFRWRVAAATDGGRTYTGEDVEKVRKRHNLDRKRLARKNTKGSKKKIRRTNQKEARFRRHENHVISKKIVESAKRTGRGIAMEVLHGIRERVTARGGDARNRLSGWAFAQLGAFIAYKARLAGVLVVYVDPRNTSRTCAECQHCERSNRKSQSEFQCKACGHEAHADVNAARNIRALALLSVSIELGNHPGDRVA

SEQ ID NO: 49710 - protein, 359 aa, unknown
  TnpB Polypeptide
LAKKIIKCKIVELTNIKKELLENEYNNLQTFLQGKDAKLYSANKQQAIRFYHKAIGKAEREYPISVRKDLIEVEKQNTKIAEYWCRIRVRGRRNFWVAIKPHQDIPEDVSFCESKILKKGNDFFVYLTIEKEIKIIREYDDILAIDFGIRHIASVVQMSTKKPIFYGKELRKVRGHYFYLRKRLGEKKALETIKKIGRKEHRIVNDYLHKISREIVEQAIKTNSLIVFGNLKEIRKQNKGRRFNRKLNSFPYFKLAQYIKYKAEWKGIKVMKISEAYTSQICHRCGEKGIRNNGLFKCECGLEDNSDRNGAINIGKRALGYISKVGDVSEPSLNSAEMTEPLKANVQDLVGKPSLLVGW

SEQ ID NO: 49711 - protein, 391 aa, unknown
  TnpB Polypeptide
MIYIVVIRAFKYKLTPTKEQSVLLEKHFGCTRFIWNWALNKKMETYQTTKKNVSRYELQAELPKMKKGEQPWLTEVGSLSIQSKLEDLDKAYTSFFRHKNKYPNFKSKKNRQCFRVPQNTKVDFEKGKVIIPKFLEGIKCIYDRQFEGIISSSYVSKTTTGKYFISILVEDGKELPIKPLVKEKTTIGIDLGLKHFATISDGTKVENPKPLKRFLKKLKKQQRQLSKKTKGSNNRNKQRIKLAKIHEKITNCRKDFHHKLSHKLTHDNQVKTICMETLSTKDMMEKSYMARQIADVGWNSFTNILKYKCDWYGKNFIKIGRYEPSSKLCSCGYVNHSLTLKDREWTCPLCNITHDRDILAANNIKFIGLEQPESKASGLEKSGTKEETHLL

SEQ ID NO: 49712 - protein, 448 aa, unknown
  TnpB Polypeptide
MEIVYRTLVLKYDLLRLPPEIAEKISALLKVQEEFRRWATGWALSGGSLPPPEHNPSRYFAKKFLHAGKMLDWFKGLKKNVEVKKMRPPLVFDAQLRLKSERDISRGVFIDLPKKVIRIRKWSNRRGNTIVLPLREDAEKWILARVREGGRLVLAAVWVGERRSRGAGLYVALVFRREVAAVEAKRLLVVDFNALHNGVAWAVVEGERIVTKGVMKPNVSKILHLQKAASRLDSACAERDKICSSAMATKKRVWRLLRSWEDEVTKKLVHLALQYRATVIVDVPEDSSVRALKEGGYSPERKALLNFGRLRRRLKGLVEWYGISYREERLYSTMCPHCERKMRELPNRRVKCQCGFEAHRDEVPALWGAKRFHELTSFSNSPTFGGFPAALDPWQHVCSNRGLRVDGSARGAARFALRCGSEEDRCAKARKLTENDPRPRNARTPFSN

SEQ ID NO: 49713 - protein, 424 aa, unknown
  TnpB Polypeptide
MTRVTRTEHIWLKQNASLSHLCHLSKNLYNEANYAIKQSLKAQGRWIRYTQLYQLLKLSSNYRQLPAQTAQQILRLLDKAWKGFFRAIKEWKRHPEKFKKKPRPPKYKKKNGEHLLVFTNQQCRIKNNVLLFPKKLSFDCDITTRLADTTALREVRVLPKGVGYVCEIVYQKVIAPKAPDKGRIAGIDLGVSNIITLVNNIGKRPIVVKDDGKGIKSINQFYQKEKTRLQSMYDRQGIPDGTKMKHLRFKYERKSKDYLHKLSRSLITWCAQHGIGKLVIGYNPEWKQQVELGKRNNQTFVLIPYMKLINQLRYKAEEQGIAVELVEESHTSKCSFLDNEAIEHHEQYLGKRVRRGLFRSAQGLLINADVNGAGNIVRKSEPNAFSGMKADGVGGCVMGLHPVRWNVFNDELARSHLNQTAQIA

SEQ ID NO: 49714 - protein, 249 aa, Bacillus sp.
LIIKLPKLGLIRFAKSREVEGRILHATIRRNPSGKYFISILVETNVQEMPKTQSTCGIDVGLKDFAILSDGTIYKNPRFFRTLEEKLAKAQRTLSRRTKGSSNWNKQRMKVARIHEYIANARADYLHKLSTEIIKNHDVIGMEDLQVSNMLKNRKLAKAISEVSWSQFRTMLEYKAKWYGKQVVMVSKTFASSQLCSNCEYKNKDVKNLTIRKWDCPSCGAHHDRDRNAALNLRNEAIRLLTVGTTGIA

SEQ ID NO: 49715 - protein, 462 aa, Kineosporia sp.
MISSVAKAPRFGSGRAGGKLVVDGRDETVFRKAQIAFKPAGARQKRSLLALLDATRDVYNAGLQERRDAYRHSSQTRIALFDQFNQIKDLRGARDDVLVWGISPLRWALRRLDEAFGGFFRRVVAGETPGYPRSRVSPGGTRSATTKPLAGACTWTRPRVQGTRLLPGRFGLTCMSRASVDPPVEVRHPPTEKVCHPRWCPDDTDADPHQPGRHGLAREHRFQEPRRRDAAHGSHGRLGGGHRPGRRRAPGHRGRRQLHRRSGQLLHHTDDLMTNLAALGSQIEELQRQRSSRKKYGRAWRQLSRRIRRLHRRQSNIEENWARHTAKALVAQHEVLVLEDLNLQGMTRSVKGTIQEPGKNVAAKTGLNRALAEAAPGRLARWITVKAESAGLGHRVWLVNPAHTSQQCSACGVIDAASRVNRQTYYCGAVAGTSTPTPMPPVTSVPVEWPRRRHGRQPAAHR

SEQ ID NO: 49716 - protein, 396 aa, unknown
  TnpB Polypeptide
MLTATKIRIYPNAKQEESLAKAFGCARWLWNNSLAETQKVYKETGKGLSHFDLNNRLPELKKEHEWLAEPYAQVLQAVSLNLSRAFVNFFKRRAKYPKFKSKHDKQSIQYPQGVKIVEGRKLYLPKIGHIKAVVHREIVGKIKTVTMSRNQSGQYFASVLTENGVDAPAASFDGKIIGIDVGLTHLAVTSDGTKFDNPRYFAKSLKNLKRKQQKLSRKVKGSKTKNKARILVAKAHNRVANARKDWLHKLSRRLVDENQVIAVEDLNVKGMMKNHCLAKGIGDAGWGMFTRFLEYKAAKAGKGFVKVNRFFPSSKTCSCCSHVQNSMPLNIRSWRCEQCGTLHDRDINAAKNIALEAQRMIAAGIVVTANRGTVRQGKRQKPAVLARAVEIRSSVL

SEQ ID NO: 49717 - protein, 428 aa, Lachnospiraceae sp.
MQITSSYSVEIRKQDLCFRKTFEVYRSAAAYLIPVFDSVWEELEETGSAKRRFNAAEHLVHNTKKNTARFDFDLRFPKMPSYLRRAAIQFALGTVSSYRTRLEAWKKEAPFQGEGGRDASGKTAKGRPVLQAGNHAMPVFYHDVMYKAGEAGSDQAKLKLFDGHDWVWKEVRLKHTDMEYLRKHWRGKEASAPALEKRHRKYFLRFTYTEEADLPDRPAAEQTVCAVDLGINTDAVCSIMRSDGTVPARKFISFPGEKDHLKHVLGRIRRAQREHGSENTGSFWAYAVRLNEELSKKTASAIVSFAAEHGADVIVFEYLEMKGKIRGSRKQRLHMWRKRDVQKRCTHLAHRKGMRVSRVCAWNTSALAFDGSGKVERSAENHSLCRFSTGKQYNCDLSASYNIGARYFIRELIKPLPETARSLQKSLQ

SEQ ID NO: 49718 - protein, 181 aa, Geobacillus sp.
MSNFCSPPGHENDSSGRMHFHGKVKEIELVYDRGLWLCLSYEDGKKPKENPCKNRVAIDPGEIHTIAAICENGESLIITGRKIRSIHRLRNKKLKELQKLMSRCKIMVKSAHWNLRSNRLRIDGLLRYEVVDGEFPPLSIMDTHVACGSQRDGCQVLPADRLPTSLSCIHLRRGNRKPPLR

SEQ ID NO: 49719 - protein, 355 aa, unknown
  TnpB Polypeptide
MLTRELKLKLTRKQEVTLASWLWHLTGIYNWAKRKIELDAKDNFYYSKKDFQNLLASQGKNFGIPSHTIQGTLIQSWNAWDRCFKKLAEEPHLKSVRRKLKSIPFPDVIPRSRLTPKKIRLPNLGDVRYYKQEIPEGNIKQARIVKKASGWYVQLWIDTNHIFRVKDTEEKVGIDTGFKNVAVLSNGVKYENERNFIKGQKRLAQAQRGKRKQLAARLHERIKNRRKDHNHKISKEIVQNYKEIYITNDNLRGQVTIFGKSVSDAGISQLRQFISYKGDNHGRKCVLVDSPYTTKTCSSCGSRTGPTGLNGLAVRNWVCSVCGTLHDRDTNSGKVVLNFGLGYNLANLESSGGAR

SEQ ID NO: 49720 - protein, 341 aa, unknown
  TnpB Polypeptide
MILTYKIKHERDFSEELNLAKKIAIHGHYTGSRSSADVKHIGLKSMIANQILKKYSNHKTLKNVKSVKLTIPNQGIKVIGNQIYLPCVKLNLDIYFDRNFEKINQVELGGEYAYISASYSDTKIIEPTSYFGVDRNSTCHVLVASNTKTGKVLKLGKSCKHIHNKYKEIRRKLGKKKKLKKLKSIKNREQRIVKNINHQISKALVDKCKKDNSGIVLENLRGIRKTAKSRRKNRYTLNSWSFYQLQQMIEYKSKKQGIPIFYVEPQYTSQRCSKCGHIEKANRQGKLFSCKKCGKVENADVNAGFNIAELHQLSISQFNKESDLLKGNTDIPKEAMVMKSN

SEQ ID NO: 49721 - protein, 410 aa, unknown
  TnpB Polypeptide
VRKRYIVRSDRYYLEPINEGEGYLVLVDFGLRIRYVGRIRWEGKQGRLEIIYVNGRRFAHLPIEAGREPPKSNRRGYVKPNYRDKKGRIINPRSIKQRDPIGDKEAFMDMGLNNLFAVVTTEGSAMLIKGGKIKSEYYWWKREIATYQAVRDMLKNAGFPTRITYHEKVLEAMYTRDERLRYLYGTSIRFLAETPWSRGIRKLYIGYPMMLSQNNGNEYNTKNIWWYRRIVDIFMEYGIDVELVPEDYTSKECSICGIRHKNGEIYRGIYMCRKTKKKINANINAALNIARKLGYRIKITRKIESYLVTYNGVRPLIPRQGANTRDPVIGNPPLEWGGVMVFVNICDVVSRVTPRCGLTSFTHTSWVPLESNATGLLSEGSGALSIIASRGLYTPRSSRDYRLIIKMARN

SEQ ID NO: 49722 - protein, 514 aa, unknown
  TnpB Polypeptide
MKGEFHSKHPLKKEGTKLITAVQFRLFPSPSQEKGLNAICTIYNKMRRVGYKLLFNNAENIQQKLMTVCKNNSYVNTILSENEMRLKQQETWLKKKKAYLASKIKVIQNKIEQVKAKDEKDKRLKGLYSRLSSIMNRLANLKLEPIVFGSKQLFRERLLQKISRAEFKMKRDASFKCTGKAQYRQKNPNLKILPDQHLKIRTFRNERGKKWLKVPFSVNQRQAHWLKELEQADKYTATVKRKLVKGKIQYYLLISYEVPVPELRFSHDNGIIGIDANYNFATLANVDKEGHLLSYQKITYRNINTYRKNKRNNHASYQADKILNVCLNKRKPLVIEDLALEQSFSYNKSSNRKLANFKKSILGLLERKCIKKGVPVLKVPPHYTSIIGQLKYARSYNLSIHYLASYVIARRGLGFEEALPTDYEWLLSQVGDLVKPRLKKSSTYYNWARIHDFFKQSGMTSFRPSEVVRKVLLGKNGLNSVTNVQPDNLRAGLSKQREIDDYHKFWSYINNPNL

SEQ ID NO: 49723 - protein, 414 aa, unknown
  TnpB Polypeptide
MIQRGYRFKLHPTSQQSELFGQFAGVCRLVYNLAFEQRREHWRNFQARTGKGLNYTAQSRELTALRAEYDWIAAVSQTCQQQALRDLDRAYGNFFKGIAKYPSPRKRGLNDTFRFQGREVSIRKLNAKWSIVRLPKIGWVKFRDTRQLIGKINNATISLVPNGWHISFSLAIEHDTPVNDMPSVGIDRGVAQTLALSTGELMALPDSLAELDRSKRRAQKILSRRKRGSNRYAKARRRVAAIQSRTARIRKDWHHRATLNLSKRFGTVVLENLNTKGMTASAKGTAEAHGTNVRQKAGLNRSILNQGWHIFETLLNYKLEERGGHMCKVPAHYTSQTCSECGAVDKRSRENQATFNCQHCGNHMNADHNAAKNILRRNTSSKVVEEGHWLSCEAITGRGIAIPENPLPLGGGRC

SEQ ID NO: 49724 - protein, 395 aa, unknown
  TnpB Polypeptide
MRKRSHVIQMKPNNQQATYFEKACGCQRFVYNWGLSAWKAEYEAGNKPTGRGLKKQFNAIKHTDTPWIAEVTKCVVDTAFENLNTAFRNFFRTKNGKTYPKFHKKGVKDSFTVDNTKFAVDGKRIRIPKLGWVRMTEELRFDGKLMSATVKKRAGKWFVSIAVETTDAVSENQATGAVGIDLGVKTLATLSDGTVFENPKTYYKYDKQLRRTQKSLSRKKKGSKNRAKAKLKLSKIHYRINCVVDDYIHKMTRHVADNYNTVVLEDLNVKGMLKNRHLSKAVSRSNFHKIKQFLQYKCGDVRLVDRFYPSSKTCSSCGRIKDMPLHLRTYECECGLRLDRDLNAAINILGQGLPEVKPVEMEALAVGNDSETIVREAGNAHKQVMGDKCTHYSFL

SEQ ID NO: 49725 - protein, 436 aa, unknown
  TnpB Polypeptide
MTQPQIIRRGYVFRLRGNAQAEAKLRRFSGCCRKVWNLALAEQQARRERGEKYAGYVDMAKWLTAWRSDPATAYLSEAPVHALQNTLKSLDDAFQRLFKKQGGYPKFKRYGDPVGVRETDVACFAVDQINWRVKLPKLGWLRYRNSRNINGTPKIVTVTRQIDGWSVSIMTELQIGTQIPAATAIGAADRGVTNFLATDTGRLVAPLDAHKKSLHRLRRYQRAVARKIEAAKAAAGIQKNASFPKGFKLQPSCRLRKAQARVARIHQKIARQRADFLHKLSTGIAGTHAIFCIEDMKVRGMIASAKGDAVSPGRSVRQKAGLNRSILDQGWSMWAWMVEYKLQWRGGRLIKVPAAYTSQRCSSCGHTHADNRKGEKFRCLQCGHEEHADTNAAKNILAAGHAVLSGEQPGHAVVEDAAQQGRPGKRLPAEELRRAA

SEQ ID NO: 49726 - protein, 483 aa, unknown
  TnpB Polypeptide
MDQEYRTRAVLVPLDPTPAQAQLLRSYCGASRFAYNWTISTAKENLDKRADELRAGINEADLTKSLSWSAWSMTPLWNSVKEEVAPWHHDVSVHAFRSGVTNASAALKNFNESKKGARKGRPVGFPKFKNRHSKQSFTLIEFTRTWSWFSEDSRHVRLILPRFATDPRITRRREQLQWMHTTESLRRVKKKVTAGEWTVQAVTISFTGGRWQASFSVRQFVVPSPSAIRLKGPLVAVDLGVKHLATLSVPVKGLTDENGHVANPRYLDAELDRLAKLDRQLSHCVNGSKNCAKLRKRRQRLHGRITRTRNLCQHRLTTTLAGRFETVVLEDLDVAGMVKKSKKKKTKAAPRSILDAGFYELRRQLTYKTDDRGHRVIVVDQFYPSSKKCSHCGETKAKLARSDRVFECSTCGVSLDRDVNAARNIRDEGIRLLTNEALTVAGHQPETLNADSRDRKTGAPRCDGGDRYQSRTTQPARGLSPLA

SEQ ID NO: 49727 - protein, 357 aa, Paenibacillus sp.
LLKAYKYRIYPTHEQQQYLAKVFGSVRFIFNKMLADKIEHYKQTEKMLYNTPTRYKKAFPWLKEVDSLALANVQLNLEKAYTHFFRDKNVGFPKFKSKKTNNNSFTTNNQNGTIAIKDGTIKIPKLKKRIRIKVHRPYTGRIKSCTLSKTASGKYFVSVLVETDIAPMPKTEKKIGVDLGLKDFAITSDGEVIANPKHFRKSEKRLAKLQKNLSRKKKGSHNRYKARLKVAKLHEKIANQRKDFLHKTSTQMICDNQVIVMEDLRVKNMMQNHKLAKAISEASWSRFRSMLEYKANWYGRTLIIAPKNYASSQLCSCCGYKNTEVKNLAVREWTCPECLTQHDRDRNAAANLLKLAM

SEQ ID NO: 49728 - protein, 201 aa, unknown
  TnpB Polypeptide
VETAHEELQHIDHNIGLDLGIKDLCITSEGKKYINPKILRKHEKKLAKLQRQLAHKEKRSQNYYKTKKKIALCHEKITNTRKDYLHKMSHEIISENQVIVSEDLQIKNMVKNHRLAKSISDVSWYELTRQLEYKAKWNGREYVKIDTFYASSQLCSICRYQNRETKDLSVREWICPVCGTKHDRDINAAKNILAEGLRKIV

SEQ ID NO: 49729 - protein, 180 aa, Lactobacillus sp.
LPAKLQKLYKRIKHYQRMLARKREVNGKLATKSNNYFAVRTKLQRDYRKVANIQNDLLQQFTTKLVDNYDQIVIEDLAVKQMMMTHVASKGMQRSLFSRFRQILTYKCDWYGKELILADKTYPSTQRCAACGYVKKGEEKITLQGNKKHGTKHNEYICYECGYSNDRDENAVLNLLALVK

SEQ ID NO: 49730 - protein, 396 aa, unknown
  TnpB Polypeptide
MIVLEFKLVGAAAQYAAVDEAIRTTQFVRNKCVRKWVDERGVKPYDLNKYCAVLAQEYDFAGKLNSQARQAAAERAAAAIVRFYDKCRAKTPGTKGYPQFVRDGRSVEYKTTGWTLDAARRALTFTDGFKAGTFRLKGTRDLMGYARAQIKRVRVVKRADGYYSQFCIDAERRVAVAATGRAVGIDLGLTHFYTDSEGATVENPRHLRRSERALKRLHRRVSSKVKGSKNRAKARKRLGRKHLKVRRQRRDFAVKAARALVMSNDVIAYEDLKVAHMVKNRRLAKSISDAGWRAFVTWLSYLAHVYGKVVVAVPPRYTSQDCSGCGERVTKTLSERTHVCPHCTTILDRDHNAARNILALGSRRLDKTTAGHAERNAWGQSALYLSGASSIDTAAG

SEQ ID NO: 49731 - protein, 374 aa, unknown
  TnpB Polypeptide
MPLRSYKYRLRPNRVQAAALDAMLRDFCGLYNACLQQRIEAYRRRGISLRYGHQAAELKACRVADPDGLGRWSFSALQQVLRRLDQTFAAFFKRGHGFPRYRASARYHAATFRVGDGLTLKKDRRIGIVGMPGGIKVVWHRDLPEDAKLGTAILTRQQGKWFVVLSVEAEFAEACGRGTVGIDLGLDSLIATSDGATVEAPRHARKAQKAQRRRQRALARCKRGSKRRLKAKARLATGSAKIARQRRDHLHKLSRSLVSRYQGLAFEDLNMAGLKRGMLARSVHDAAWSLLVQLVQYKAESAGAEVVMVDPRGTSQTCPECGTIKAKTLSVRTHACDCGAVLDRDVAAAMVVHQRAFGLGPGHGLRRVSGRVAA

SEQ ID NO: 49732 - protein, 373 aa, unknown
  TnpB Polypeptide
MKTYKYPLGKQSNTIRIGNLLDDMWQVHEYFHKWQRQRYKDGLPYVGFAGMCDHVKVLKDTTHPHWKSLPSQAIQQELKRIDRAYERFFKKLGGRPRIKKRHKFKSITFPGHAGWFLKNNRITLTFRKWNPKTRKWQYDKVAYTFHKHRQWHGNPISRITLKRDNCGDYWLCIITTYTDFRPLPTTGKSVGADFGMKDAYLTLSTGEKKQHPEPLKQSLKKLRTLNKSLSRKVKGSNGWWQCVRQIARLYRKISNQRKDFHWQLASELCKKFDTIAIETLNLDGMKRLWGRKVSDLAFYQFVEILKYKCQKHKRLLKQVGQWTATTKPCSDCGFHNESLTLNDRQWKCPDCGSYHDRDINAAINILRAGIAVI

SEQ ID NO: 49733 - protein, 377 aa, unknown
  TnpB Polypeptide
MIQAIKYELKPNKTQQKQIKMFCGSCRFVYNIMLERKIAAYKTDKTVLSEFDLINQLIPLKEEYSFLKDCPSQSLQQAIHNLNQAYIRFFKQGNGFPKFKKKGYKDSFKIPRICKIDFNKWTVNIAKLGSTKIYKGNNKQIKGIIKSYTVSYYSNTDRYYISIIYETCNKSKLNNGKCVGIDLGVKDFAVLSDGTVFGNPKYFKSNLKKVQTLQKAISRKFKKDKPFEEQSNSYKKLIKRYAKLQEHIAFQRKDYLHKVSSKISNNYSTVCVETLAIKKMLKNPYLAQAISDCGWGMFISMLENKCDKLIKIDKYFASSQLCSVCGYKNVEVKDLNLRKWTCPQCGTTHLRDLNAAKNIEREGLSLCEHKTSKNVCS

SEQ ID NO: 49734 - protein, 406 aa, unknown
  TnpB Polypeptide
MTTIRKGYRFRLRPTRVQRLGLVRMAGARRWVWNWALARRIDHYREYGAMLTRGALCRELTILKRQPTTLWLQKIDAQALQASVRDVDQAFQNFFARRARFPRFKSKKWDRPTFRIPQRVKIANGRVFIPKIGWVRLRQSRPIDGRITSTTFTEDKLGHWGVSFGTAIEMPDPPSRPLDPERVVGIDQGLANFVVLSNGMRIAAPRYFRKSERSLCRAQRRLSRRRPGSRRRHRARLRIAALYRRVSNRRLDFTHKVTTQLVRTYDALCLQDLAVTGLARTKLAKSVQDAALGQLLLQLRYKTKWNHRQLALVDRWFPSSQLCSQCGTRNNRLSLNDGIWRCACGALHDRDINAAINIRTQGLRLLGVAAGHAETKNARRETVRLSTRAGLDETRISGLIRRECQG

SEQ ID NO: 49735 - protein, 449 aa, unknown
  TnpB Polypeptide
MRFAYKRLLEGYDRKTLKRDLQGMFDLNSRYVDDAIMKARSTLESSKELGNNPKKVIFGGKDLFKKLQKRHINGKEYKKLKTKWQERRKGNLYSRGDKSKKGNLNTRIEVKENGTFLRINVGERKYVYARIQAGYKKNKRRGELLQEIAEADIPYSVELKLKNGNIYAYFAIEEEYPEVKITKEKGVIGIDINAYPDNISWAEVDEKGNLIGYGSITMPELASGNKDKREYFRWQYAHEIVKIAKQKRKAIVIEGLEIKDKGKRGDFSGRKSRRIRHNFSYKSILSKIKTLAKREEIEVIEVDPYYTSIIGMLKYAPQHMITKDVAAAYVIARRGLGLQEKIPDNYIKFLNALTVEELEKLKEYVKKTVRNKHIKKKHIREINKAIEFLQSLESESGRVLKPLEGTSFSIYDFWRVLKVAVVTPLSPEKVPRDFSILKELLIQGKWGDP

SEQ ID NO: 49736 - protein, 500 aa, Arthrospira sp.
MKEHSKDGMKMDQSRPSELLLGNDDTTLSLMLPSQAVTNVKSLSIPELVVAPTKATSTDGLPDSQACIPKPKLSQKSEVDSTSRERKCLLYWDKFCQEMSAWLSLHTKTDWQDMPDGRTGLTCFDGGANKTGVNSWFSIGQVSVQNEKWLRTSSPSSTALAPDSSEQVNTKLRSKKIRIYPSPELNKVWRKWLAACRYCYNQAIALQKSGKRLSKLKLRNEVMQSDLPEWVKETPCHIRQNAIFDAHLAFSASPGARFRSCRDSSQAIKFNDANFSSGSWYPRLTKGLTFKVSEPILSTCDQGTQLVFSKGQWFAVFPKPVAVTPTEATGVIALDPGVRTFMTGFDGSKFLEFGSGDIGRITRLCQHLDDLMSRIASCPSKKRRRRMRRAAQRMRIKIRNLVDEAHKQIAHYLTRNYSLIFLPTFETSDMVAKAKRKIRSKTARAMLTWAHYRFKLTLRHKRGNNWNHSCRCDGRIHQQNLYSLWSCAFPARWLKSVPMS

SEQ ID NO: 49737 - protein, 232 aa, Arthrospira sp.
MSGFEWEGMEVTPFSTPIIVLEFKARVKPAQATAIDDAIRTAQFVRNKALRYWMDSQDVGKYDLSKLCKALAEEFPFAKKLNSMARQASAERAWSSISRFYDNCKKGIKPVGFPRFKKHSRSVEYKTSDGSVVEAPQFYRKSERRLNKANREKSRKYRKGAKPQSGNYHRARNRYARKHLRVSRQRNEWAKSIAYCVIQSNDLVAYVDAKRRAEGRLECERVSTQSASSQVD

SEQ ID NO: 49738 - protein, 257 aa, Arthrospira sp.
MVSEPIPKTCGQGTQLVFTKGRWLAIFPEPVAVTPTEANGVIALDPGVRTFMTGFDGSRFLELGSGDIGRITRLCQHLDDLMSRIAKEPCRSRRRRMRQAAQRMRTKIRNLVDEAHKQIAHYLTHNYSLIFLPTFETSDMASQVKRKIRSKTARAMLTWAHYRFKLTLRHQAEITGTTVVDVTEEYTSKTCTHCGHVHSQLGGSKVFRCPECGFTLPRDWNGAFGIFLKALRDTASVTLTGNSAIVALSGNSRINVA

SEQ ID NO: 49739 - protein, 451 aa, Arthrospira sp.
MPNFPDDILIKSDSWYNQIMPYKAFRTKLKLNDRQATLMAKHAGYARFVFNWGLHLWMSAYEEGLKPNVNSIKKVFTHYVKPQYPWMSELSSKVDQYAFINLGDAFKRFFKGISSYPKFKKKGHHDSFTLDNSGKPFNLSGTRHKLPFVGWVSTFEALPESWVKKVTLTRQAGDWYMSFFVEITPEITPKYRERIGVDLGINNWATCSDGTQFSNPKAYKAATKKLARLQRHLSRKVKGSKNWAKCLLKVQKLHQRVANIRRDTIHKITTFLAKNHSQVVIEDLNVSGMLKNHGLAGSIADASFYEFRRQLGDKAERYGSKLIIADRFYPSSQLCSNCGYRQKMPLVRRTFECPNCGLKIDRDLNASINLEKSLSFRRLHLWTGCCRQSRTKQEININIRLYPVLFKFYRAAAGIDGYTHLVESIRFTISTAEFSSFHSIMGKTNPRCSTV

SEQ ID NO: 49740 - protein, 147 aa, Arthrospira sp.
LCYNFTKGTWYSKLTKTLSFKASEPVPVRCEYGTQLVYRRGLWFAIFPEPVIATHTSSPKIIALDPGVRTFLTGYDGDKVIEIGNGDMGRIVRLCQHEYNLISRSTKVSAKQRRSMRKAANRIREKIRNLIDEVHKKTAHYLTNNYG

SEQ ID NO: 49741 - protein, 492 aa, Arthrospira sp.
VAALSNLYPEAEVVSEIRGGLNFKGKKMLALLGHHLSGDVRMVVVAHPDRLAIWGFDLFRWLCEQNRCSLMVLNQTSLSPDKWLRTSSPSSTASVPDYTDGVNTKLRSKKIRIYPSPELNQVWRQWLAACRYCYNQAIALSRSGKRLSKLKLRNKVMQSDLPEWVKETPCHIRQNAIFDAYQALTASPDARFRSCRDSSQGIKFNNTNFSSGSWYPRLTKGLTFMVSEPIPKTCGQGTQLVFTKGRWFAVFPEPVAVTPTEANGVIALDPGVRTFITGFDGSRFLELGSGDIGRITRLCQHLDDLMSRIAKEPCRSRRRRMRQAAQRMRTKIRNLVDEAHKQIAHYLTHNYSLIFLPTFETSDMVAKVKRLIRSKTARAMLTWAHYRFKLTLRHQGEITGTTVVDVTEEYTSKTCTHCGHVHSQLGGSKVFRCPECGFTLPRDWNGAFGIFLKALRDTASVTLTGNSAIVALSGNNRKMSRKCISSSTVVTK

SEQ ID NO: 49742 - protein, 340 aa, Arthrospira sp.
MLVFEFKTYGKPSQFIAVAEAIRTAQFFRNSCWRYWMDNPQKNKYDLNKYCAVLAATFPFADELNSQGRQASAERAWSAISRFYENCKKKIPGKKEYPKFQKDCRSVEYKSTGWKLADDRKSITFTDQKGIGKLKIKGTRDLHFYQVSQIKRVRLVKRADGVYVQFCINVDRKENTAPTGNTIGLDVGLKEYYTDSNGVTVENPKFLRKGERLLKRSHRRVSKKVKGSKNRGKARQILGKHYLQISRQRKDHAVKLARCVVQSNDLIAYEDLRIKNMVQNHCLAKSINDASWYQFRVWLEYFAKVFERVTVAVNPQYTSQECSNCGAIVKKTLSTIRARL

SEQ ID NO: 49743 - protein, 544 aa, Arthrospira sp.
MKEHSADGTTMAQSTPSEPPLGNDDTTLSDILLPNQAVTNAKSLSMPELVAAPSSPTSTDRWPHCPTSTPKQKSSQKSEAGSTSRERKCWPDWDIICQEMSAWLSLPIKTDWQGLDLTCFDGSVSKTGAHSWFSTRQVSVQNQKWLRTSSPSSTALAPDYTDGVNTKLRSKKIRIYPSPELNQVWRKWLAACRYCYNQAIALSRSGKRLSKLKLRNEVMQSDLPEWVKETPCHIRQNAIFDAYLAFSASPGARFRSCRDSSQGIKFNNTNFSSGSWYPRLTKGLTFMVSEPIPKTCGQGTQLVFTKGRWLAIFPEPVAVTPTEANGVIALDPGVRTFITGFDGSRFLELGSGDIGRITRLCQHLDDLMSRIAKEPCRSRRRRMMRQATQRMRTKIRNLVDEAHKQIAHYLTHNYSLIFLPTFETSDMVAKAKRKIRSKTARAMLTWAHYRFKLTLRHQGEITGTTVVDVTEEYTSKTCTHCGHVHSQLGGSKVFRCPECGFTLPRDWNGAFGIFLKALRDTASVTLTGNSAIVALSGNSRINVA

SEQ ID NO: 49744 - protein, 375 aa, Arthrospira sp.
MPYKAFRTKLKLNDRQATLMAKHAGYARFVFNWGLHLWRSAYEEGLKPNINSIKKVFTNYVKPQYPWMSELSSKVDQYAFINLGDAFKRFFKGISSYPQFKKKGHHDSFTLDNSGKPFKLSGTRHKLPFVGWVSTFEAQPESWVKKVTITRQAGDWYMSFFVEITPEITPKYRERIGVDLGINNLATCSDGTQFSNPKAYKAATQKLARLQRHLSRKVKGSKNWAKCVLKVQKLHQRVANIRRDTIHKITTFLAKNHSQVVIEDLNVSGMLKNHCLAGSIADASFYEFRRQLGYKAERYGSKLIIADRFYPSSQLCSNCGYRQKMPLVRRTFECPNCGLKIDRDLNASRNLEKSPGSDDYTCGRGAADSPGRSKK

SEQ ID NO: 49745 - protein, 325 aa, Arthrospira sp.
MQSDLPEWVKETPCHIRQNAIFDAYLAFSASPGARFRSCRDSSQGIKFNNTNFSSGSWYPRLTKGLTFMVSEPIPKTCGQGTQLVFTKGRWLAIFPEPVAVTPTEANGVIALDPGVRTFITGFDGSRFLELGSGDIGRITRLCQHLDDLMSRIAKEPCRSRRRRMRQAAQRMRTKIRNLVDEAHKQIAHYLTHNYSIIFLPTFETSDMVAKVKRKIKSKTARAMLTWAHYRFKLTLRHQGEITGTTVVDVTEEYTSKTCTHCGHVHSQLGGSKVFRCPECGFTLPRDWNGAFGIFLKALRDTASVTLTGNSAIVALSGNSRINVA

SEQ ID NO: 49746 - protein, 325 aa, Arthrospira sp.
MQSDLPAWVKETPCHIRQNAIFDAYQALSASPDARFRSCRDSSQGIKFNNTNFSSGSWYPRLTKGLTFMVSEAIPKTCGQGTQLVFTKGRWFAVFTEPVAVTPTEANGVIALDPGVRTFITGFDSSRFLEFGSGDIGGITRLCQHLDDLMSRIAKEPCRSRRRRMRQAAQRMRTKIRNLVDEAHKQIAHYLTHNYSIIFLPTFETSNMVAKAKRKIKSKTARAMLTWAHYRFKLTLRHQAEITGTTVVDVTEEYTSKTCTHCGHVHSQLGGSKVFRCPECGFTLPRDWNGAFGIFLKALRDTASVTLTGNSAIVALSGNNRKNVA

SEQ ID NO: 49747 - protein, 325 aa, Arthrospira sp.
MQSDLPEWVKETPCHIRQNAIFDAYQALTASANARFRSCRDSSQGIKFNNTNFSSGSWYPRLTKGLTFMVSEPIPKTCGQGTQLVFTKGRWLAIFPEPVAVTPTDATGVIALDPGVRTFMTGFDGSRFLELGSGDIGRITRLCQHLDDLMSRIAKEPCRSRRRRMRQAAQRMRTKIRNLVDEAHKQIAHYLTHNYSIIFLPTFETSNMVAKVKRLIKSKTARAMLTWAHYRFKLTLRHQGEITGTTVVDVMEEYTSKTCTHCGHVHSQLGGSKVFRCPECGFTLPRDWNGAFGIFLKALRDTASVTLTGNSAIVALSGNSRINVA

SEQ ID NO: 49748 - protein, 437 aa, Halobacteriales sp.
VRRTNTFAVRPLSDDDKRLLLDLLDASASLWNELNYERRQQFFDGESVWDTADYRKQYVDVTGSGTAQQVIRKNKSAWKSFFAAQDKWHNGERDERPSPPGYWGNEDDGRELRTLIRNDLYTLETGERSRIEIPVGSDLKDKYDHTGRLRLEVCGAPKWDGKQGRLEIQYDEIDDTFRAFQPVTVPDSQQDSPLASEEAALDVGANNLVACTTTTGQQYLYEGRDLFDCFRETTDKIARLQSKLREGRYSSHRIRRLYRKRTRRRDHAQDALVRDLVERLYAEGVATVYVGDLTDVLSTHWCAEVNAKTHQFWAFRTFIERLSYTAEEYGITIEVKSEADTTRTCPACGDQDNTDRDGDLFRCPCGHEAHADLCASRTFLEQQAGEIAVRSMARPVRLKWDDHNWSELPHSPERASPNEKRTNRSTGDGKLASVGAA

SEQ ID NO: 49749 - protein, 356 aa, Natronococcus sp.
MEVRRTVPVKLVVPDEYHDDLHETAEQFLYCANEASNYCWDNTNYEDCVTSNAKARDALYDRLREETDLTANLVQEAIRRAVHAVDSGVDRWKKGKRTNKPEFSSWSMVYDKRSATFYRNKISLSTVNGRVECDFELPADSPSPYEEYVLSEDYEFRTSTLQYDQATGEFSFHVKTRKVDEDGDAVEIEGSDDTEHQTVLGIDLGVNSLAVASTGTFWSGDEYDHWIREFEKRRAEMQERGTQAAHNALLRLGKRERAWRKQYIHTVVNEIVDEAVDHDCDVIVFEELTDVRERLPCDDWHHIWTFRRLVEYVEYKAPDRGVAVEQVEPDHTSQRCSHPPVALPTKTTVTAISSSV

SEQ ID NO: 49750 - protein, 451 aa, unknown
  TnpB Polypeptide
MRDTNLYSIASTYKMKLTGDLKALETSINIYRDALRMLIPIINNNWDLLSEYEFTNQKYNCIGNWIHNTKEHQALYDFDEQFPKFPSYLRRSAVAQALGIVSSYRSNLANWENAPKGQAPQLSFTHYAYPAYYKKNLFRNFDPIRQTIELKVFKNGDWVFEVYQLKTSDCGYYLTHLTGKKQNVPVIRKKGRRFYAAFSYEEEVSLVKEESISKICAVDLGLNTDATCTIMGQDGTVYARKFISFSKEHDRLNTQLGRIKRNQKRGSLHNKTLWRSVAGISQDIADKTVKAILDFGNEHGVDVFVLEYLDFKGKNIVKRAHFWRYKRIYKVLAQRAHQYGLLMARVNARYTSRLAFDGSGWSKRGREIAPETPYAEMQFPTGKTYNADLNASYNIGARYFIRHLLKTVTVTQRLALEAKVPQVAKRSTCTLSDLINLRSEFVALTTTKTQA

SEQ ID NO: 49751 - protein, 434 aa, Streptomyces sp.
LARSARTRSRSTSTPSGNAPGRRSRRRRRLSVHRAYKFLLRPTVRQTQALSEMLRDHCSLYNAALQERRDAYRHPSKTSVTYGMQSVQLKDIRAFDPERQGRWSFSSQQATLRRLDKAFAAFFRRVTAGDKPGYPRFRGVNWFDTVDFPKDGDGCRWDSTPHDPVTRVRLQGVGHVRVHQHRAVRGRVKTVSVKREGRQWYVILACDEVPAEPLPATGAVTGIDMGVAHFLTTSEGEHQPNPRHGRRNADALADAQRALKAFPRHRRENRTARHRRAVEKVAKLHRKVRRQRTDHAHKTALAMVRTYDVIAHERLSIANMVRTPKAKPDPDQPGAFLPNGAAAKAGLNRSIHDAGWGVFLGILAHKAESAGRRLIPVDPRNTSRTCPECGHTSGENRPTQQKFECTQCGHTANADQVGALNVAIRAGLVLPDAA

SEQ ID NO: 49752 - protein, 419 aa, unknown
  TnpB Polypeptide
MLIQRVEQQVIRKSHPKYKIIDEMCFRSKDLYNYANYIIRQEFICKGNYIGYYDMNKELKTHQQYKDCMSQPANCILRNLDKAWKSYFAAIKDWKKNPGKYLGMPKLPKYLHKDGRYPWMIPNNSCFYNDNGTIRFKISRLQGYIWKSQCFGRLIQIRFIPKGSCYVMEIVYEIEVSDEKETESKRIASIDIGVDNLVTMTNNIGEQPIIINGKGIKSINQFYNKQIGKEKSLLKIRHNKDWSKKLDNISFKRNQKIKNYMHNASTYIIRWCLENNIDTLVVGHNKEWKQGSSMNKKSNQKFIMIPFNMLLWHLEYKCQNVGIKFILTEESYTSGTSFLDGEDPVKKNYDKSRRVQRGLFKSNSGRLINSDVNGSLQIMKKVFPNAFNECYGIEGVLAPMVISVAKVARFTINAIEKLQ

SEQ ID NO: 49753 - protein, 407 aa, unknown
  TnpB Polypeptide
MQRFQAFKFELMPSGSQQRDMHRFAGSCRFVFNKALAMQKENHEAGNKFIGYVAMAKHLTEWRNGTEIPWLKNAPVHPLQHALKNLERAYKNFFAKRAMFPRFKKKGQGNSFRYPDPKQFKIDQASSRLFLPKLGWMRYRNSWDVLGNARNITVTQSGGKWYASIQTARKVEQPVPTATGAVGIDMGIVRFATLSDGSYVVPLNSFRKHEARLRRYQRRMSRKVKFSNNWNKAKDRVQRIYARIGNARHDYLHKATTTISKNHAMVCIEDLQVRNMSRSAAGSTETPGKNVRAKSGLNKSILDQGWFEFRHQLKYKLNWNGGMLIAVPPQCTSRTCPVCGHVSADNRHTQARFACVECGFEEHADVVGAINILARGHRVAACGESAQSGHSVKQEPTEATMREVAHV

SEQ ID NO: 49754 - protein, 395 aa, unknown
  TnpB Polypeptide
VQIAHKIELKANNKAQTYFRKACGTARFTWNWALNQWGEQYGAGQKPSGFKLKKEFNAIKKEQFPWTYEVTKYASQQPFLDLQDAWSRFFKKLAGKPKFKKKGKSHDSFYIGGDQIKVEGRKLWVPNLGWVKLKEELRFIQFKGKINSVVISRTADRWYAAIQVDVDLKIPQHENQVSVGVDLGILRLATLSNGVEFEAPKPLKKLLWKLKRKGRALSKKQRGSNNFQKEKMALARLHARITHIRKDTLHKITSWISAHNSHVGIEDLNVKGMMSNSKLARSIADIGFYEFRRQLEYKMSWKGGKVLVHDRFFPSSKKCSQCHAIKKELSLSDRIFECECGLILSRDVNASINLCPVPRVTREFTPVEMTALWKQAGLVFVTSINETGNQLQTAR

SEQ ID NO: 49755 - protein, 403 aa, Prochloron sp.
MIILEFKAYGKKQQYLAIDEAIRTARFILLSCIRYWMDNKGINKYALSKYSKVLADQFPFAKELNSTARQASSERAWSSISRFFDNCKKKVSGKKGFPRFQKRGRSVEYKQSGWKLSPNKKSIIFTDKKEIGKLKLKGTWDLWRFEKSEIKRVRIVRRADGYYVQFCVAVDIKEELEPTGNKVGLDVGLKDFYTDSDGNTEPNRSFYRTGSKRLKFYQRRVSRKKKGSSNRNSSINRLGRQHLKISRQREEHAPRLARCVIRSNDLVAYEDLKVRNLVKNHCLAKSINDAGWYQFREWIEHFAEKFGRVTVAIKPAYTSQECSECGEIVKKSLSTRTHICKCGCKLDRDHNAAINILKRALGTVGHTETLVLDQNACGELSSTLLGSGLVGQDSSMKQESPSL

SEQ ID NO: 49756 - protein, 383 aa, Nonomuraea sp.
VQLRYNVRLYPTPGQRTALARAFGCARTVFNDGLRARQEAREQELPYLSDGDLSKRVITEAKKAPQRAWLGEVSAVVLQQALADLNAAYRNFFASLTGKRKGPKIAPPRFQSKRDRRQAIRFTKNARFQVTAGGKLRLPKIGDVPVRWSRSLPAEPSSVTVVKDAAGRYFASFVVEVCDEPLPATAAEVGIDLGLTHFAVLSDGRKIGNPRFLRRAERRLRKAQQALSRKAKGSDNRRKAMVRVARAHAGVADARRDFAHKLSTSIIRDNQAVYVEDLAVKGLARTKLAKSVHDAGWGQFTAMLAYKAARHGRTFVRIDRWFPSSKLCSECGALAGSMPLNVRTWECACGAVHDRDVNAAKNILAAGRVERLNACGGTVRPAA

SEQ ID NO: 49757 - protein, 378 aa, unknown
  TnpB Polypeptide
VILSYKFRLYPNRAQAAALDGMLVAFCDLYNAALQQRIEAYRRQGRTLRYADQAAELKAVRAADGRLAGLSFSAEQQVLRRLDKAFAAFFRRLKKGSKAGFPRFRAKSMFDSSEMRVGDGLTLRKSKRLGVVGIPGEIKVKWHRPLPENAKLGAAVLSRSCDRWFVCFQVELPDVEPRQDFAPVGIDLGLSALVALSTGETIPTLQITRNAAAALRRRQRKLARAKRGSRGRKIARRSVARFQAKIAAKRRDGLHKLSCELTRRFSHLAMEDLNVKGLARGMLAKAVHNAAWSTLAGMIRYKVERTGGVVVLVDPRGTSQTCPECGLVAAKALAERIHRCECGCVLDRDVAAAYVILRRAGFQGPGTGLGTPSQRVAA

SEQ ID NO: 49758 - protein, 665 aa, unknown
  TnpB Polypeptide
MELEEKPLDPSEQVYRIIKCPLKCVLKRYDTLHPIIEKAVMDMNEIVILSYQFIRIYLLNKFNKNQELPTINKQFVLDVIKTISSPNTKRGQKTKQENIKNATGKSDMKQFYNDEFSKLVSLSETKKPSYSNKTHILAITANEMITCINTNISTHFVKHLFKYINCLFKEPKSIEIKKETNKEKRKELYKELNQEIRDLKSDLINNKIENSKEEYHSWIRENKGFLFPNKVNKSIAYDVKCNPEKYIKYSFYINQKIEELGKRPYQVIPQRNNIVPKSITLNSNGIVDLIDDKKQSIFQYNKSELVLHAKKHQKHIWSKILKLEKKDIFKQKEYVFYNQIITDGFSCSLLFILKKYKDKVFGDKIPKVNDEFEFTKVEDLSKEKCDEYLTDKYKLVSLDPGKIRPITMIDENNKFFKYTACRRRFETYTKRSNYIILQEKKKNGLIEKETKLSNFKSRTTKVEEYKNFIINKTILNNEVKDFYQKTLFRKLAFRRFIRTKQSEVKLLNDIENTYLTKEEIKQGKKIIILHGDYSRTNQMKGCISTPNIGMKKLLLSRFDIIEVNEFNTSKLYNKTLKEMENVSVKRKKHKKSLHEILTPKEETNCRIFVNRDVNACKNILLLGKCYLESQTRPEEFTRKVIKSAKPQASPLEKVKKPKKQTSKTK

SEQ ID NO: 49759 - protein, 353 aa, Acinetobacter sp.
MKTLKLRIKDKHCKVLGQLASEVNFVWNYVNDLGFKHLKRKGEFLSAYDVAKYTKGASKECSLHSQTIQAVTEELVTRRKQFKKAKLKWRVSNKKSARRSLGWIPFKKVAVKYSDGLIQYGKNKFGMWDSYGLSKYTVRTGAFVEDSRGRWYVCLVVDLPKQEKPKATKAIGIDLGLKDIATCSDGTVISNPKFYRKYEQKLGIAQRARNKKRVRALHAKIANRRKDRLHKASTMLVRNNALIVVGSLSAKKLVKTKMAKSVLDTGFSKLKTMLKYKCENASVLFEEVNEAYTTQICSCCKRISSSSPKGRVDLGIREWTCQNCGTVWQRDLNSALNILALGHKRLAGGILLL

SEQ ID NO: 49760 - protein, 231 aa, unknown
  TnpB Polypeptide
MHEALRFENAKLLFATISRVADDWYISFQLELQDLKHLTPAKNHGRVGVDLGVKQMVTLSDGHVFEAPKPLGKYLQKLKRLQRKMSRTKAKGSNRAKLGKVIARLYRRIADIRNEALRKVTNFIASNYSTVVIEDLNVKGMLKNHKLARCISDVGFGEFRRQLSYKMQLRGGELIVADRWYPSSKMCRFYHCKNEDLTLSDRDWICPHCGSKVEDRDLNAALNLCQYTESW

SEQ ID NO: 49761 - protein, 500 aa, unknown
  TnpB Polypeptide
VAGRDPCPSGRGRPGPRCCPVYRCGGRRGRARRGKTGSRSARCLTARLPGNGAGVRYRVRCQRPGSVLPPPGTVPRRLARPGAGGIDRMAHRYRLTPAPEQEAALGEHCAHARFVWNLAVEQQSWWWPGRGSTPGAAVRMRQLAEARAAEPWLREGSSSVQQQALRDFDKAMAAFLDPQNPAGKPSYRSKRGTQGFVIRDTKVHRLNRNHAEVFVPKCGYVRFRLSRDLPADLGMTRVTMDRAGRWHVSFQGPQPALDREPTGGAVGIDRGVRTALVTSDGQHYRVPRISDRRAARYLALQRRMARQQKGSRKREKTRRAMARITAKVTDRRKDWAEKVSTRLVEDHDLIVFEKLNVKGMTRKPQPKPDPEHAGNFLPNRRRQKAGLNRGILASCWGYLARRTEQKAAASGAAVTYVDPKHSSQECRSCGHIASSSRESQAVFRCVSCGHEDHADANAARNVLARGLAWLAVPAQAPGPRGVRPRKTPANGAAGTTRQAA

SEQ ID NO: 49762 - protein, 448 aa, unknown
  TnpB Polypeptide
VAVDWEDGPGCARRPEPPVQGQLVRVWGPEKVTVGVVPAGYDRHVMVVDTDGVGVRRAYKFRLRPTARQHVALGQCLASHRELYNAALQERRDAWRLRRMSIFYGDQSAQLKDIRRIRPDVAAWSFSSQQATLRRLDRAFAGFFRRVKAGERPGYPRFRSARRFDSVEWPKDGDGCRWQPSARRVYLQGIGHVKVTVHRPVKGRVKTIQIRREGRRWMLVLSCDDVPTRPLQPTQAVVGIDVGIASFLTTSDGQHLPNPSWGRAAGARLGTAQQVLARKERGSSNRQRARETVAARHRKVANQRRNFHHHTARALVVRYDLLVVENLKVRNLVRRPPRRPDPDQPGSFLPNGAAAKTGLNRSIHDAGWGRFVLILRAKAEEAGRVVVDVDAWHTSDRCEACGHTATENRASQVVFSCRACGHTVNADEHAARNILRAGLARLAANPAA

SEQ ID NO: 49763 - protein, 347 aa, Bacillus sp.
LRYEDGNILWGDRPTKKHPNPKNWLCLPIAPKANDEYAHLALMDKTKYVRMLKREIRGKARYFVQLIQEGYPPKKRNRKVANDETKRVGIDIGSSTIAFCSENTVELRELAPECNADFPKLRRIQRAMDRSKRSTNTHNFNKDGTFKKGRLEWNYSNTYKKLRKKRKELYRKIAVQRKISHEKLANDILALGSDIRVETMRFQSLQKRTKKTTRNRNNGKINSKKRFGKSIANHAPAMLLTIIDRKLSYQGRSLKKIDTYATKASQFNHKTGKYTKKQITERWNDFEKHLIQRDLYSAFLIGNTNETLNSVDVDLCNAKWYNFVQLHNREIARLKQSPSKILRWFVA

SEQ ID NO: 49764 - protein, 412 aa, unknown
  TnpB Polypeptide
MQITYKFRLYPNEEQEQKMEWTLDKCRLVYNDMLEGMNEQEKPDRVELQNSIPELKEKYPELKGVYSKVLQYEVYRLFSNLGSLSELKKKGRKVGKLRFKGKGWFKTFTYNQSGFRIIKTDNRLDNLHLSKIGDVPIRIHREIEGEIKQITIKHKQTGEWFACITTSTEIEAETKNEKEEIEKEDKPIQNPVGIDVGIESFSTDSEGRKIENPRCYKKGLKKLEREQKKLSKKKPKSKNRDKQRKKVAKVHEKIVHQRDDFLHKLSRSYVSNYDLIIVEDLNIKGMNHRLSQSILDCSWSRFIQYLEYKAERADISVIKVNPKNTSQTCSKCRHELEEHLSLSDRTFRCPKCGMEMDRDMNASRNILKRGLEKKLLPQGLREVTPVEIKPLRKLETISASSIIETGSLFQNQ

SEQ ID NO: 49765 - protein, 402 aa, Escherichia sp.
VKRLQAFKFQLRPGGQQEREMRRFAGACRFVFNRALALQNENHEAGNKYIPYGKMASWLVEWKNATETQWLKDSPSQPLQQSLKDLERAYKNFFRKRAAFPRFKKRGQNDAFRYPQGVKLDQENSRIFLPKLGWMRYRNSRQVTGVVKNVTVSQSCGKWYISIQTESEVSTPVHPSASMVGLDAGVAKLATLSDGTVFEPVNSFQKNQKTLARLQRQLSRKVKFSNNWQKQKRKIQRLHSRIANIRRDYLHKVTTTVSKNHAMIVIEDLKVSNMSKSAAGTVSQPGRNVRAKSGLNRSILDQGWYEMRRQLEYKQLWRGGQVLAVPPAYTSQRCACCGHTAKENRLSQSQFRCQVCGYTANADVNGARNILAAGHAVLACGEMVQSGRPLKQEPTEMIQATA

SEQ ID NO: 49766 - protein, 372 aa, Moraxella sp.
MKTLKLRIRDKHTNQLNKLSGLVNFVWNYVNDLSYKHLQKTGKFFSAYDLNQYTKGSGELLGLHSQTIQAINETHAKNRKQSKKVRLNWRTNSLKAKRKSLGWLPFKQSAIKYIATHQTGNCLSKSKGLKSTLQLSLAKGQKLIIDLWDSYNLSLYQINTCELVQDSRNRWYACITVKDYPKQSCGTGSVGIDLGLKKSATTSSGDKLTIKQTLKYAKALAIAQRANNKQRVKAIHAKIKHTRQDLIHKFTTQLVKDNALIVVGDVKTNQFNSKKGKLAKSVYDAGWFELKRQLEYKCKHADCHFEVVSERMTTQTCSCCGTRNSNLSGRTGLGIREWTCGACHTTHDRDINAAKNILAVGLNRLVEGIPSL

SEQ ID NO: 49767 - protein, 421 aa, unknown
  TnpB Polypeptide
MNEAKITRAAVLRLYPNQQQVSALRRWQGGLRYVWNAALDCVFTSRDINGCWPSKAEIQSLIVAMKKMEGTEWLSDIPAHSLLTLADDLHKALANWFNSISGKRKGPKIARPRFRGKYARQFSVYMVNQNTSFGDGLVKLPKLGLVKFRAGDLPAGRLLSSRVYREADKWFMASIFECAAPEMNAAPIECVGIDMGLKTLATIYDGQSIREVPKLGALRKHEQRLKRYQRRMSRRVKGSNRHNQAKQAVARLHQRIANIRNAYAHKATSEIVACAQTIKVETLNIKGWAKNRSISKSTADASVGMFLSMLRYKADWAGRSLVEVGQWEPTSKTCSNCGLHEQGVVLGVSRWVCSACGAIHDRDHNAAKNIYAYGEERRNVTGNTVESAWTGGDQAGAIPPVPQEETRILKRAASDSDRALV

SEQ ID NO: 49768 - protein, 377 aa, unknown
  TnpB Polypeptide
LGDRRVPRSVRRYARLFDRSTDRAQEPRSVALVLRTQRKGRSQRQARLLGQPRRGRELRTYIRNTSYSVEWGEHSRLEILVGQDLKEEYGLGYQERLRLEVQGDPNWKEYDKQGRLELYYDDVSETFRAFQPVIIDNSRLAHPLADETAALDIGANNIVACTVSTGDQYLYEGRDLFKRFRETTQRIAELQSKLREGRYSSKQIDSLYRRRTRRRNHAMDAIARDVIERLYDEGVSTVYVGDLTDVLETHWSVRTNTKLHNFWAFRRFIGRITDTAEEFGITVEVRTEAWTSQTCPNCGSTENTTRHQDALTCTCGFEGHADLAASETFLKRHETVARPMARPVCLKWDSHEWLESPRSPRPNEEHTNPQVASVDSA

SEQ ID NO: 49769 - protein, 262 aa, unknown
  TnpB Polypeptide
VRSFTLTRSRLCLSIARNVPTVECTSTVGVDRNLRNLTVGNDEGTRHYDLSETVRIASTTMHIVASFKRDDARIRGRIASKYGLRRTARIGHLLHTATKIVVGLAVQWREAMVSEDIRGIRCLYRKGNGQGRKYRGRMNGWSFSEAQRQLEYKARWVGLPVVRLSRRETRGSSMTCPRCGERLQSDKRLERMLWCGKCRIVMDRDMVAAVNLARRGRVRFARSRPPTVMEAQGGAVEAVMGNPTPTVIPGVDAPKLTHSTES

SEQ ID NO: 49770 - protein, 468 aa, Caldilineales sp.
VTRILRSQGLNQAKYDRLARIAGLCGRVRSDAWQRCSGLSTVRQFHYDIRDAWMAEGYGWHGLPARIGKATLADALGDIRACREAAKVPVKKAIWHRTRGDGAERHRLYSLLKQNRWDEDPFLHRQMRKQWKGGQSRVTNQIVADADSYTAQVWHGRAWLYLQGLERGQRIAIPLRGTHLPTGTLRIILQDNGQVEVHYAVAEEDVCSTRPCGETTVGVDKGYTEAYTDSDGQRHGAGLGDLLTAESDDRKVKGQRRNRMRDLEQKHRDAGNVQKADNIRRHNLGNKKWDRRQGQHNARVRDHLCQAAHSIVDRAGTIASEDLTAPMKSAKVMHRDTQRRLNGWVKGIMVDTLTSISRRRGSALVLVNPAYTSQIDSRTGLLQGKRCGDRFYGLDGVVLDADTNAARNILARMYDTEISLYTPFREVKRLLRDRSGTPVGTAPPGLEPAGAATAARTAESELPQTHSF

SEQ ID NO: 49771 - protein, 472 aa, Caldilineales sp.
MAKPAKVTRILHSRDLNRSQYDRLVEIAALCGRVRGDAWQRCSGWSTAQQSPRAIRDDWMAEGYDWHGLPARLGRATLLDALGDIHAGREAAKVPVKKAVWRRTEGDEEERHRLYSLLKQNRWTEDSFLHRHMRKRWKGGTARVTNQIVLEPGAYTAKVRHGRAWVHMQSMERGQRIAIPLREKHTPSGQLRILLQDDGPLEIHHAVDEEDACSTQPGGSETVGVDKGYTEAYTDSDGARHGPGLGDLLAAESDARKVKGQRRNRMRDLEQTHRDAGNVKKADSIRHHNLGNRKWDRRQKRHNAQVRDFLCQAAHSVVDLAGTVACEDLTASMKSAKVMHRDTQRRLSGWVKGVMADTLTSISRRRGTALVLVNPAYTSQIDSRTGLLQGARRWDRFYGLDGVVLDADTNAPPATSWRACTTTRSRCTRPSERSSDGSGIEAGQRWGRLHPDSSPHRRRKPPDGRERITPNP

SEQ ID NO: 49772 - protein, 415 aa, unknown
  TnpB Polypeptide
MYLTVKQQLKHLSKEEYLILRELCHSAKNLYNQAVYNIRQYYFDEGKYLNYVENNKLLKSSENYQILNSNMAQQILKEVDGAFKSFFRLLKLKSKGEYKEKVKLPKYLPKNSFTTLVVGFVRLNENTFILPYSQSYKKNHRPIKINIPPLLLDKNIKEIRIIPKFNARFFEIQYTYQVENEQRNLDKNNALAIDLGVNNLATCVTNRGKSFIVDGKKLKSINQWFNKYNAKLQSIKDKQGYGKTLTMKQKYIWNKRNNRVNDYLSKSARIIINYCLENNIGTLVCGYNNDFQRNSDIGKKNNQNFVNIPFSKLQSKLEYLCEFYGIKYVDQEESYTSKASFFDMDIIPEYKEKDNIEYSFSGKRVRRGMYKTLKGYILNADVNGALNILKKSKVVDLEVLYHRGEVDTPIRIRVS

SEQ ID NO: 49773 - protein, 379 aa, Sharpea sp.
MANKAIKYRVYPTAEQGTMFSKTFGCCRKVYNLMLSDKIEGYKATGKFPAVTPARYKDEYPYLREVDSLALANVQLNLQAAFRNAFSKSRKKKNGFPKFKSAKHSRRSYTTNNQKGTVAITDSKYIRLPKIGKVKAVIHRIPDSSWIIKSATVSQESDGKYYVSVLFEFDKAGNTYIADKANAIGLDYASDGLYVDSNGNVGTNHKYYRESYDKLAKAQRRLSRMQGSKKHEDKSNNYIKQLRKVNKIHRHIANQRLDNLHKISAEIANRYDVVCVESLDMKSMANRGFGNGKATLDNGYGMFLDMLEYKLSDRNKYLVKVDKWYPSSQICHCCGALHPEMKDLSIRKMTCDCGLTISRDQNAAINILNEGLRLLAGAA

SEQ ID NO: 49774 - protein, 411 aa, Planktothrix sp.
MFQGYKFRIYPTIEHQIVLAKSFGCCRWYWNYALNLCQETYKQTGKGLSRKAIQGLLPQLKKEYPWLKDAYSQCLQVVALNLSTAYKNFFEKRARLPQFKSKHGRQSISYPQNVTFEGDYLKLPGKIGLIYCRRHREFEGTIKTVTISKNRDGKYYASILVDDGKEIPNSSTNGKAIGIDLGLTHFAITSDGDKYSNLKHFAKHQHNLKRKQQKLSRKQKGSNSRQKARLKVAKLHAKIARCREDFLHKLSRKIVNENVETCHGTSVLAVEDLAVKNLVRNPKLAKAISDCGWGMFCTMLKYKAEKEGKTYIEIDRFFPSSKTCNVCLNQVGSLPLDIRSWTCENCQTLHDRDINASINIKNEALRILSLGTSDTANLRGCKSSGKTFVLSDAIPVEVGSPYRRAMARLYS

SEQ ID NO: 49775 - protein, 508 aa, Scytonema sp.
MPRSSKPSFVLELPLKADSKQDSELQARFNAAMRLYNNVLGEAKTRMELVRNSEAYQTGRRISHDRKKELREAFNKAREAYRFTDYDLHSYANRAAKNSKWIAQKIDAQVQQKLATRAFKAVERVLFGKAKDVRFKVESRFRSVEGKTNKQGIRWKDDRVVWSGLELEAIIDHENEVVKHGLSCSVKYCRLIRRTFGGKRRWFVQLVLEGVPLQKPQNYVSDGLIGLDLNVSNIAFVANNHAGLLPFAEGVLAFQTQIHKLQRKMQRSQRVNNPDNFEPNFQARKGRKTVVKKGKPKKGKRQWKKSANYHKSAQKKRELERRKTAYAKSQNRRVVNEILRHGKDIKTENVSVKGWQKRYGKAISAKSPGLVQSELQLKAERAGGSFTKFSTQKTALSQTHLDGSRIKKPLSERVHRDVTGIPLHHRDLFSAFLSRSVNQDKLSLQDAINEYPGLEPVLLEAWQRHLTRKQVSASESRMSDSPLERVSNEPLISNHDAAEGEKLDEDVA

SEQ ID NO: 49776 - protein, 270 aa, unknown
  TnpB Polypeptide
MRGINFMEQITITAKVQIVATDTDKVLLNKTMSVYCDACNYVSDYVFRTHDLKQFSLNKILYSTLREKFSLKSQMAQSVFKTVIARYKTILENQNEWIKPSFKKPQYDLVWNRDYSLTQNCFSVNTLNGRVKLPYFAEGMSKYFNHSITSGTAKLVNKHGKYYLHIPVTYEVEESNISDICNVVGIDRGINFVVATYDSKHKSGFVSGKAIKQKRANYSRLRKELQMRHTPSSRRRLKLSVSEKTVGCRILTIRYRRHSPPVIQSILSLY

SEQ ID NO: 49777 - protein, 465 aa, Streptomyces sp.
VDSADQHIRVTGEEAKRVKREALGIPDRRKHHGRASTRLKSRTKEPGTQQRVYRYRFYPSPAQSEQLEKTFGACRWVYNEGLALRATAWERHRVSVGFAESCRALTGWRQAAETSWLREVSSTVLQQSLRHLDAGFSRFFQQSARYPKRKKKHRSRDAATYVRTGFRWVEDPERPGTGAVTLAKQSAPLDVRWSRPLPVGVMPVKLSVTRDRAGRFFLSVLVEEQIEPLPSLFVPGGREPKAVGIDLGLAALVTLDDGTKVDHPRLLRKYEKELARLQRRLHRKQKGSKNRGKARVRIARLYALIGDVRRDMLDQLTTRLVRENQVLVVEDLAIANLLRTTVGKGRRRKSRLNESISDAAWGELLRQLRYKCAWYGRTLVIVDRFFPSTRRCSCCHAKGPSLDVSVREWTCAACGAVHDRDVNAARNLRDEGMRLYWLVVSALPPNRVPPPVIKASELPEVLLAA

SEQ ID NO: 49778 - protein, 524 aa, Streptomyces sp.
VAVRDRLKHLTPEDERVLRAVGEYQGALASRDLKARCADGLEHSADTWAARKRDLTKESSSRIAGAITKATHDQWALARRCQATHIQKLAAGINMLRHRLSLPIGEPGTKRNAGGYRSKNEWFRKSRRLAMLEDRHAAAVAEWQAGRVRVVRGGKRLLNTRHHLAQAELTEEQWRERWKAGRWFIGADGESGKRFGNETIRVTPDGEVSIRLPAALAHLANARHGRYSLSSRIAFAHRGAEWADRIEANRAVAYRIHLDVDRGRWYLTASWQRPVVKTIPLETARARGMIGVDTNADHFAAYRLDRHGNPIGDPHRFPYDLSGTAGHRDAQMRHALTRLIHWAGRVGVAAIGIEDLDFTTEKTREKHGRKKRFRQLISGIPTGSLKARLVSMAAEHGLSIVAVDPAYTSLWGAQHWQKPLATPRRKMSRHDAAGIAIGRRALGHPVRRRTAPPPHDRSDRAEHRTVQAGPSTRGREGTRPPATDRPPGGPSPSGTRKREPSASNTVRDAPSTQQWVQDSLTHTG

SEQ ID NO: 49779 - protein, 391 aa, Silvanigrella sp.
LQDLITTYHYRIKDSGKANRVLSQMSRSVNMVWNFCKQTQQEALKNKSVKLIDDKKSGDKISIPYFLTKFEMNNLVSGSSKELELHSQTVQFVSEEYITRRKQFKTLLRWRGKKSLGWVPFKSSAIKINNGKISYNKNEFSFWNSRELPEDAKIKTGSFCQDKIGHWYLNVSFESEQIGIKRDDDKKIGIDIGIKTLATCSNGEKIERPNLRKNALAKMRYLKRCQKFAQRKQSKSKKYHSLPKAKQERKLHVKVANIRQDYLHKESTKLVKKCSLIVVGDVPCKFMNRNKKLSGISLDSGIGMFKNMLKYKAVRAASIYKEISERDSTRTCSKCSEILPRIGLGVRTWTCEKCNTIHDRDVNASINILNAYKNMFPIGHDRPTRTKKNSS

SEQ ID NO: 49780 - protein, 245 aa, unknown
  TnpB Polypeptide
VSRNPSGQYHASILFEDGKEKPSPSTEGKAVGVDLGLNHFAITSDGSKFDNPRWMAGHEKNLKTKQRQLSRKQKGSNNRNKARKKVAKVHNKVTRCREDFLHKLSRSLVNENQVIAVENLNVKGIVKNHNLARAISQVSWGQFLTMLKYKAEQEGKTYIEVDRFFPSSKTCNVCLNQVDSLPLDVCNWTCSNCGTEHDRDINAAANLRDEGLRLISCGTRDKAYRPDVRPSRGGRKKSTVGLSAG

SEQ ID NO: 49781 - protein, 485 aa, unknown
  TnpB Polypeptide
MSQKVRIDGVKHVGASVFLGVDHCGNPCWTRNPERVMVWLCDGWRARFNQRREQRPHNVPVKDEAGGIVDWVKEPLGGPDVAESLSDREARLQCSWMAGIPAPILSSTDRIESVEWFAGLKRRKTIGGRIPGFKSRRRGLGFVCWRNASKTGNALFHQTGRKSGVVIIAGMNPSRWVKPGEKAHWRVIIHVRVSQPIRPYTSVHVDWTHRSLVFVNMPLPSPRTGDGRVGIDRGCVHTLALSDGTFMDMPKPLKAELKRLKHLQRKMARQDRTNEARGGRTAKFASKRRRRTLSEFNALQGRIVRRRNDWIEKTTTSLAKANILIAMEDLDVQAMTKRPKPKPDPDKPGQYLHNGAKAKAGLNRSILSNNWSRLMKRLKDKMDANGGRLAIVPAAYTSQTCHQCGHVAKENRESQAVFHCVECGYQTNADVNAAMNILDRALRKTGGDTASDVEEPQWRPDEASTPSTQAGSSVGVRSVKGIPRL

SEQ ID NO: 49782 - protein, 254 aa, unknown
  TnpB Polypeptide
LKFVRLKEYGYIPKNANIKSGTISKETDRYFLSLVLEIEKKFKNTKNLQIKNGIGIDLGIKDFAICSDGKVFKNINKTCKVRKIEKELKREQRKQSRKYLVCKKSGKKLYECKNFQKQKLVISKLFFRLNCIRNDYINKIVSEITKTKLNYITIEDLKVSNMMKNKHLSKAISNQKFYEFRMKLLNKCKENNIELRLVDTFYPSSKLCSNCGHKKHNLKLKDRIYKCDNCGIEMDRDFNASLNLKNAENYKILA

SEQ ID NO: 49783 - protein, 423 aa, unknown
  TnpB Polypeptide
MDRLEKNKNIAQTMRETYAKRKFQICKCFKFKVDKSNLSKHQAEQLKMQFVEAKWIYNYLLDKDIYHFDYKELNTIIHKDKNKNDVQVNISYISSALKQGIIKQIINQIKGLSKLKKKGYQVGKLKYKSEFNCIELKQYGNTHSIRGKKFKIQGIKKPIRINGLKQLDKYNNIDYANAKLIYDGLDYYVCLTCYIDKDNTDKIYKNDIVGIDMGVSTSLTLSNGTKYDISIGESEKLKQLQVKMSRQKKGSNNRYKTIKRIRKEYIHINNKKNDISNKIVSDILNNNKTIVIQDEQIGEWRQDGLSGTKIQHSILGRIKNKLSMNDRVVILDKWFPTTKYCSKCGNKVELELKDRIFECPNCKTKEDRDIHAANNMIYFYLQNNKLDRSGTDQTSIKGPVKIAYKKFISNLVKQEDTTSLALC

SEQ ID NO: 49784 - protein, 467 aa, Streptomyces sp.
MARFRMYPTSGQEQQMLLHCAHARYVWNLAVEQHAHWRRDKAHHRPDGKRTGAPSFAEQCRQLTEARAASAWLRAGNQTVQVQAIKDFAKAKAARFTSGFGEPTWRKKFVHEGFRVIGDDRVPEYEPDGRPRINPKTNKQVMGRAVTVHKLNRRWAQVKVPGCGWVRFRLSVKGKGARLPAAKTFRVTYRNGQWHIAFAVIPDPIDKPGTGEAIGIDRGVTITAALSDGRKLNCPQLTTRERAQIRKQARTGLFEMAYGAAHGTCTRGRGRPVRTLGAHSAPDRRLAHRAQRGDGAGGAARGRPRPLRRGDPGPRTARSRRVRGPEDAARHHGRAGDRGHGPGRRDGDRPAAERGSGRLPDQALLCRAPVGPDGGRAAPRPLRSGRRGAVPGDPGRRSDRRPAAAPGRAGRRAARPHPPRVRPARLPGPPARCRRPPQGAARRGVAAVVRRRPDHRRPSVLAAQEVG

SEQ ID NO: 49785 - protein, 201 aa, unknown
  TnpB Polypeptide
VEAEHEVLPHTKQNIGLDLGIKDLCITSDGRKYENPKIIKRHEKKLKKLQRQLAHKAKGSNHYYKKKKQIALCHEKITNTRKDYLHKISHEIISENQVIVSENLRIKNMIKNHHLAQSITDASWYELTRQLEYKAEWNKRQYIKTDTFYASSQICSVCGYQNAEIKNLSVREWICSACGAKHDRDVNAAKNILAEGLRQLA

SEQ ID NO: 49786 - protein, 433 aa, Cyanobacteria sp.
VNQVLNLTYEFKAIPTPEQVQIIEHTLTVCRQVWNYALRERKDWINSRKCHTLACSLESEYIVSADAPYPNYAQQCKTLTKAKTEFPELATVNAQALQQVLKRLEAAFVDMKRKGMGFPRVKNRYRMRSFVYPQLGKGQLLRGNQVKLPQLGWLEYVKSREIPDGFVVKQARIIRKASGYFVQLSLECDVSVPDTMPHGYPVGIDLGLDKFVATSDGLVVDRPRFLNSLHRKLKLLQRRLKHKKKGSNNRHKLNWKIARLHQRISDTRKDWHFKLAHKLCDSAGMIFVEDIDFRVWAKGLFGKHTLDAGFGQFVSILKWVCWKRGVYFGEVNKDYTSQVCPQCDAHTGKKELKDRVHSCPECGYTTHRDVAAAQIVRNRGLLAVSKVELSGVGRILDVKENACGDGLTGTGNPLVKSPRSKKKGGEALDKSAS

SEQ ID NO: 49787 - protein, 371 aa, unknown
  TnpB Polypeptide
MLSRKAIKYRIYPTKSQERLLNNNLEGCRLLYNKMLEQRKEGWENNKQSFSCYEQQKHFRYWLDKNEFDVHSQVQQNVAVRIDLAYKAFLRRLKNGEKPGYPRFKGFGRYDSFTYPQTGWKVFEDKIHLTKIGKVKAVIHKSIDGNIKTCTVKKEGNDWYVIFSIESETKQYDSETKESIGIDVGLKSFAVYSDETVIDNPRFFKKEEKKIATLQRRKEKATGNKKKKIAKAIQKRHKKAKNKRKDFCHKLSRNIVNKYKTICVEDLDINQMKESNKYLSKNIHDASWRLFIDLLSYKAEDAGRIFVKVNPAYTTQDCNECGYRVKKKLSDRIHHCPNCGLIMDRDLNASKNILRIGLYSLGNQTIEAHAL

SEQ ID NO: 49788 - protein, 365 aa, unknown
  TnpB Polypeptide
MLTNKAVKYRLYPTKAQETLLENTLEGCRLLYNQMLAQRKNGWEIDNKYFSCYEQQKIFKNWLSSDYIIYAQVQQNVAVRIDLAFKSFFRRLKNGEKPGYPRFKSFGRYDSFTYPQNNHGFKIFQNTIYFSKIGKVKAVIHKSIDGNIKTCTVKKEGCEWYVIFSIESETKQYDSETKESIGIDVGLKSFAVYSDETVIDNPRFFKEEEKKIATLQRKKEKATGVRKKKIAKAIQKRHKKVKNKRKDFCHKLSRNIVNKYKTICVEDLDINQMKESNKYLSKNIHDASWRLFIDLLSYKAEDAGRIFVKVNPAYTTQDCSECGYRVKKKLSDRIHNCLNCGLAIDRDLNASKNILRIGLYSLEQS

SEQ ID NO: 49789 - protein, 395 aa, unknown
  TnpB Polypeptide
MLKSIKFRIHPNETQIELLEKQFGCCRFIYNWALDYSTWEYKTNKTNTFKKNWEAKLPELKLYIPWLKDSNSQSLQHELKNLESAYKRFFKKLSGYPKFKSKYDKQSFHVPQNFKLESQFLSIPKIKQIPIVISKNLSSFEIRSVTISKTKTNKYFASVLYEDGMDIPDKFSIEKKSTIGLDLGIKDFLVDSNGNKISNPKFLEQNMKRLKRFQQSFSRKKTNSSNRSKAKYKLALLHEKIANQRIDFLHKTSSTICKNQEIKTICMENLNVIGMMKNHKLAKSISSVSWSEFVRQITYKLEWTGKNLVLCDRFFPSSKICNECGLKNEQLKLSERHWICPCGANLDRDLNAARNIRDIAFYPKDIGKVKSVERKDRKASSMLFESVSMKQKTYL

SEQ ID NO: 49790 - protein, 274 aa, unknown
  TnpB Polypeptide
MKLNAVLSYLENPDKMDADAVNTLIEEACCIDTYRPCYATLVPRLIRGKYRVYLHLTIEGKAKPKYDRSGNPRHKYGKGMIGADIGTQTVAYTSDTEVGLKNLSERGNSIQTSERKERLYYRAMDRSRRATNPQNYNPDGTIKKGKKTWKYSNRYKKLKAKHAELCRINAVNRQLAINEDANYLRSLGDTFVTEPKNASKLMKRAKKTTVNSKGKFNKKKRFWKIYKESLPSGFQTTVEKKFKVTGGAYIEVPNNYRASQYDHTADDYIKKKAV

SEQ ID NO: 49791 - protein, 359 aa, Lactobacillus sp.
MKKMSDLEYHYGLKMRIYPSTNQKKIIKINGNIARTVYNKMVAIDQELYKLKQVKLPIDIVKERIKELESRKNAGNLSNHYQYMQDKNIDSLAKANAIQNYQKAWKMFRKVHSSGTPKFHKKSYRLNYQTNAQYGKDAKMDIYSASVKFLDKNHISLPKLGRLRVSGSHRRIIDNKDDIRIGTVTISKDTADRYFVSMQLGSDTPFVKKLAKTNSQVGVDLNTENFLTDSFGKVVANPRYYRTIKGKIAKAQKVLSRRQRRAKKEKRSLRDSKNYQKQRVLVAKLHDRVRNQRNNFLNHVTTALINNHDLVVVENLRSKNMLKNHALAMSISDVGWRSFLQKLDYKANLYNRTVISVNP

SEQ ID NO: 49792 - protein, 412 aa, Lactobacillus sp.
VKGGEKNMEQTVNIKVKLNILEPNVGMKFSKTMEQYRLACNYVSEYLFNNNFPLNKNEVQKVIYNTIREKFNLKSQMTISCIRSVIARYKTVKTQMARRPYKYQDQNTGEWYREVRDLNWLHKPISFNRPQVDLQRNRDWSYLSSGQLSINTLDGRVKVEPICRGFNQYLDGTWKFGLAKLLKSSGKWYLHISATKEVADFDKQTVKHVVGLDRGLRFLATSYDEQGKTTFFDGQAIMRKRAKYQKLRATLQAKGTKSAKRRLKKLSGRENRWISDVNHCLSKTLVQKYGANTLFVLENLNGVSFERTDLPKALRNQNKSWAFYQLEQFLTYKAHLHNSEVVEVSAKYTSQRCPKCGVIKKDNRHHEKHEYHCTNCGYCSNDDRIGAMNIQLLGTQYISGQEQPKFELTTNA

SEQ ID NO: 49793 - protein, 554 aa, unknown
  TnpB Polypeptide
MGSKKHPQQSTPPTKKAPTFLLELPLAVQAGQAARLGGHLETGRQFYNAVLSEGQQRLRRMKADPAWQAARAIPRTHTQERRAAFSALREQYGFSEYAFHELAKALRVTWLAEHLDAVLAQTLATRAYQALNRVCVGKAHRVRFKSRGRGLSSIENKRNDTGLRFVVQTQDGGRRKGYLLWHNDQLEALIDWDDPVVTHGLSQRIKYARLLRRRASSPRAQGADSQGGRYFVQLALEGVPLQKPEHAVGSDTVGLDLGPSSIAIVPREAEARLEPLCAELRPDARAIRRLQRRMDRQRRAANPEHYDEKGRPRKRGKGAPRWKQSRGYQASRRRKAARERKLAAHRKSLHGRLVHQIVAVGHTIVTEKISYKGWQKRYGKSVGLRAPGMLIDHLRRTVASTGGTLHEVPTRSTKLSQFCHGCGQTVKKPLWQRWHHCSCGIGPVQRDLYSAFLAAYLDPAEPLPSCAQYVVPWEGAEARLRAAHERVKERAKEGQVLPRSMGIPRAGARLPESRSEPTQEPAFSLRRGRLEAWRGRENPRGLGPGSIQYFTSNV

SEQ ID NO: 49794 - protein, 437 aa, Thermococcus sp.
MKRSVTVKLQPSKEQEKTLFQLAHASAVIWNKLNYQRLKQFKEFGRIDFSGTEKEAYHEFKNWIGGSTVQQLARKNAESWRSFFTLNKKRKNGGLPEWFGPKPPGFVREENGRKIFIIPLRNDQYKIDGNVIELRRLGKFGRLRIQFKGRIHLKGKQGRLEIIYDDVKRKWYAHVSFTVEEKIIGDEWVEIPRKPLGDLSAGIDLGVNNLMAVYVENGESFLVNGRPLKSIAFYWRRRIAEYQSKLNRSGAKKSRKLKRMHEKAKLQAKHYINTVVRQTVERLYHLGVSRILVGYPKGIARNSEKGGRQNFLLSHVWRFNTVIKRLKEVAEEYGILVVVVDEAFTSQLCPLCGQRHENARFVRGLFKCRREDVVMNADLVGAFNILRKVVETITPSLSALSGGGGNWGKTLPEGFSEPSSKRVVRITPQTSPPLARG

SEQ ID NO: 49795 - protein, 443 aa, Thermococcus sp.
MKRSVTVKLQPSKGQETTLFELASVGAKIWNHVNYLRRQQYFQGKIVDFNKTEKTVYEKYKHEIGSATVQQICRKNAEAWRSFFALLRKKRNGELPEKQNPKPPKYRKKGEKRRPLIVLRNDQYRIEGNKLILKGLGKFGKLEIQFKGRIHLRGKIGRLEITYDDVKRKWYAHVSFSKVKERLEKNEWVKLPRQPKGSLSAGIDLGINNLMAIYVENGESFLVSGRPVKAIDFYFQKRTAEYQSKLNKSGGTRSRMLKKLHPTAKLQARHYINAVVRGTVRKLYELGVSRIVVGYPKGIAQNLKGEERSGKRSKKQNFLLSKVWRYNYVIKRLTEVAEEYGIQVELVDEAYTSKICPVCGRPHEGARFVRGLFKCPETGFVFNADLVGAFNILKKRVETITPNLGGLYAHGRGNWPKARPGGFERTALTGSLMKTPQTFPPVG

SEQ ID NO: 49796 - protein, 434 aa, Thermococcus sp.
MRRAVTVKLQPSKEQEKTLFELADIVAKVWNRVNYLRRQEFFEGKPVDFNKTEKIVYEEYKREIGSATVQQICRKNAEAWKSFFSLLRSKRNRELPEWLKPKPPNYLKEDEKRKPLIVLRNDQYKIEGNKLILKGLGKFKRLEIQFKGRIHFKGKQGRLEIIYDEVKWKWYAKISFTVKEKLINGKWTSVPRTPKGNLKAGIDLGVNNLMAVYVENGESFLVNGRPLKAIDFYFRKVIADYQSKLNKSGAKTSRKLRMLHQKAKLQAKHYINTAVRQTVERLHRLGVSVIVVGYPKGIARNSNGGARQNFILSHVWRFNYVIKRLKEVAEEYGIVVEVVDEAFTSKTCPVCGKPHDGARFLRGLFKCPATGLIFNADLVGAFNILKKVVRTITASLPALTGGRGNWGKTVPEGFSEPSSKRVVRITPQTSPSLS

SEQ ID NO: 49797 - protein, 259 aa, Thermococcus sp.
VEEKLINDEWVKVPRQPLGNLSAGIDLGVNNLMAVYVENGESFLVNGKPLKAIDFYFRKVIAEYQSKLNKSGCKRSRKLRRMHEKAKLQARHYINTAVRQTLERLYQLGVSRIVVGYPKGISRNSEKGKRQNFILSHVWRFNTVIQRLKEVTEEYGISVIVVNEAFTSKTCPVCGKPHEGARFVRGLFKCPATGLVFNADLVGAFNILKKAVETITPSLSGLYAQRRGNWGKTVPEGSKTRFLVGLNETPQTSPPLARG

SEQ ID NO: 49798 - protein, 487 aa, Actinophytocola sp.
VKVTRIAYSADLNTGKYVQLEEQARRLGRVRSKVWRQFGSVNGAGVSDRAIRDEWMADGTAGSFAVLANAWKETVRDAVADITANREAAKAKVRKAINRRTQDPAGRKRLFTALRRDTWTGDPYLRRLMRQHCKRGRNRTHNQIVVRSDQHKTFTLTEGGNVWLAIPGLQRRQLVTIPLNTTIAPVGTLRLILRGNRVEVHHGSGLGELLSSESDHRKVKNARRAKLRSIAEHATERGDHAKARRIRDNNLGGIKRRRRSSAWQRRVRDVTFKAAHAVIDKAAVIVAEDLTKTFTGRTRLGKNTNRRLAAWTKGVTAEALANVSERRGSASLAGGLVRRSSRCSLCGRRRSRRGSASLAGGLVRRSSRCSLCGRRRSRRRSALRLVNAAYTSQVIPGTDSFGKRAGDRLHCTSCGAVWQADHAAAINILERAADPDIGLHTPHIVVKQIIQDRDRQRSRLPDQDSNTKGHRWCGERNIRNRSTLLKE

SEQ ID NO: 49799 - protein, 346 aa, Lachnospiraceae sp.
  misc_feature (306)..(330): Xaa can be any naturally occurring amino acid
MQKGIKFRAYPNKEQQNLINQTLGCCRLIYNKGLAMRNAAYENGSKVGYSQTSAMLTELKKTSDFAFLKEVDSIALQQSLRDLDRGFVNFFQKRASHPTFKSKHNNHQSYRTVNQGDNIRIVDKYIKLPKLGYVKIKQSMEVGKINNVTIERTPSGKYFVVLNVDFEPELQANKGGSIGIDVGIKDFYSDSNGNVVHNPKYLEKSMRKLAREQRKLSRKQKGSINRNKQRIKVALVHEKITNQRNDFLQKQSTMLVRENQTICIEDLNVKGMIRNHKLAKSIASASWSKFFTMLEYKATWYGNDVXXXXXXXXXXXXXXXXXXXXXXXXXNLRLWRLCKTKVLATM

SEQ ID NO: 49800 - protein, 410 aa, Nitrosococcus sp.
MEIVRTTKTRLDWDVAAAKRTVEAWSAACNDISQQAFAQGCLSNTVRLHRLVYRDIRTRFGLSAQVAQNAIRHVASKYAGARIKKIQLKRPVTFSKQCAVALQGGERGRDFGFRHKGVSLWTVDGRIKGLPFHGEPRLCEYLSEWKMGDGRLFIGKGKVYLSISFKREVETVFKPNDAVVGVDRGIRVLATVTDGQRQLFFGGGHTHHVRNRYAKTRASLQKKKARTGSRSTRRTLKRLSGRERRFMRNDNHVMSRRIVDFSRDTGNPTIAVEDLGGIRNGRKLRKQQRTDLNRWAFYELEQFIRYKADTFGMEVIGVDPKYTSQGCSRCGHTEKDNRHQHRFLCKACGYELHADLNASRNIRLRGILARQVLCEDGSLSCGPEARLVDPGSKPGEGAGKPSALAVTVHD

SEQ ID NO: 49801 - protein, 490 aa, unknown
  TnpB Polypeptide
MFVSLQFRLELKKEDKEKLIKLMRKQSSAIRTVYNMLKELEKEKTKNPHAQVYHRLRQLFPDLPTKHIDLAIYKAKQYPTDKPVVFGSKRLFEKLCKNHIAGKAREKLKKQWRELRQGTLISIGSKADKGNRMARFEDLNGQLHLRITTGNRDFIYAKVLREPSNSKDKWIAFMAMLLESWQTQNYFAYTVELKLRDGEVYGSVSFEIPTPEVKYTKENGVIAIDTNASPIHLAIAEVSKTGELLSYQTISLHHLLGLSQNSEDHQELILAHKIVDLAIQKNKAIAIDNLKKLKKGVCEDGKAELRKRFHQWNAKKFLQKLKRVAMIKGVEVVEINPAYTSFIGMLKYAPQLSIDKDVAGAYVIGRRSLGFKEDMPENYEKLLKDRVYLEFALKRYEEREKELRELVEKETNEYKRNALESELGSVENSKKLLTNLIQSLQGESSECEGANGRNPELASSEGSPPLPCSWKGLAKGPFSSEARVGGRGVG

SEQ ID NO: 49802 - protein, 196 aa, unknown
  TnpB Polypeptide
VDVGLKSLLTLNNGDTIDNPRWLRHSEKKLAIEQRKKDRKVKGSCNRHKQNMKVARVHRKIRNQRKDFHHKLSRKLVNSYDLIVYEKLTITNMVKNHHLAKSISDAGCGQLMRFTEYKAEEAGTLVEYVSAYNTTQLCSRCGKLVPKTLATRIHRCPYCGLVLARDYNSAITVLHRSTHYLDARLSSGQELPVEPG

SEQ ID NO: 49803 - protein, 359 aa, unknown
  TnpB Polypeptide
MKLTLKIKLLPTDEQANFLISTIKEANNACDAISEIAWDRKAFNQFKLHKEAYYTIKSKFNLSSQVIIRCISKVTDSYKIDRKTKRQFRPCGSIAYDSRILSYKPSNIVSIWCIDGRLKIPFICHNTNYLPYIKGEADLVFKKGKFYLFQTVEIPDEEIKDVEEFIGVDFGQTDIAVCSDGKNYNSKELKQVRKKYNKVRASVQSKGTKNSKRLLKRLSGKERRFVSINNHTISKQIVEKAKAENKGIAIENLTNIRKTAKTKNKAQKTELNRWSFYQLKQYMTYKAQMSGVLLVSVPPAYTSQNCSICNHIGIRKGKHFGCENCGNIMDADYNASHNIATWGCVINQPENSHILSCSI

SEQ ID NO: 49804 - protein, 516 aa, unknown
  TnpB Polypeptide
MQTISIPYGIVDGDPEHLTLWRRLYAAAVRSGYRAAGSGASEKDIRDGLKQRFAGQGIDAWLLHCATREALALRKRVPDGSMVFGGKKNLERRRKGLITNAEWKALRLRPMTSLGDSFQKGNRHFRLSPDGRRCELMVLGTKLVLALPALVGKWAKILPAVARSAAAKEMNVTFRIGSKMLDISFDEMDLRKLAPGVTLRATKDAEIAAGTRLRRGRPRSDNYVVPKLTSIGERFVHPEWRNPIGAVITRVLGIDLNPDWIGAAVVENRVDLTKLSATTLLTHKLFHLGLESDASDESVREMLAKICDQLISLARAWHCGVISMEQGLGKLRSGGRNRALNRKLNFWARTVFEQMLRRRCALAGLTLELVWSAYSTTIGNLTFPAPDACAAAAEIGRRGLALRAIRAGAIPPEQGLLPVFEPETVSIPWKDEVQLATTWVEAHGRIKTAQAAIPRERRVGYRRPHHDAGTLRRDPTGRTTELALSGHAVVRIGHKHRPGLALKPVTTGAMRVSAST

SEQ ID NO: 49805 - protein, 414 aa, unknown
  TnpB Polypeptide
MNRTNTILLAPTEGKEQELLGLAEASARLWNMANYERRQALFKNQQVPTYAQQCKRLKDADAFKQLGTCKAQAALMKLREAWGSYHALKRLKRRGQLPPHIRCVCPPRYMKDRQTRRLVAESIYVRNDGYKQQENVLTLSKGLRVPFRAGDLWVGKQGRLELHYDRLREKWYGRIPVKVRWPRKGKPHHSTRKRASIDLGICNLATCVVEGAEKAYVYSGRAVLSDWRYWTKRIAQTESELKRTNGRNASKRLSGLYRTHRRRLDHAVKAMLRDLYDHLENEHVTNLVVGNLKHIRDNNDHGKVGNQKLHNFWPFAQIRQRICELSEEYGIRVRFKSERGTSKRCSICGHKHKNGRVKRGLYKCAETGARLNADVNGAYNILYGRKVAADSGSRPMAWPLLLKWNSQEWEVSAA

SEQ ID NO: 49806 - protein, 398 aa, unknown
  TnpB Polypeptide
MKINKAFKFRIYPDNTQKQFLAQSFGCARFVYNRFLRQRIDYYAENVKGLTYHNNALALTKLKKLPEFEWLNDINAQSLQASLRNLDVAYNNFFNKKAKFPNFKKKSNKQSFGVPQAFSIHENMLDIPKCKGIKIKLHRTIEGTMKSITISKTPSDKYFASVLCELEIPEPIYSGGEIGIDYGIKAFITTSEGEIIESPNYLRKSELKLKKLQKSFCKKQDNTKNRYKAQKQLARQHEKVSNQRQDFLHKLSKQLTCDNQAIYIESLAIRNMIKLHTLAKSISDSGWNTFVNMLKYKGSWYGCRIIEIDRFFPSSKRCHVCGYINDNLTLSDRSWLCPECNTNHDRDVNAAINILTFGRAGIARTAVLETENACGEGSPSVSLSSPSLKQEASAFMRG

SEQ ID NO: 49807 - protein, 421 aa, Oscillatoriales sp.
MLNMTWEFKLEPTPEQVTEIDRILEVCRNVWNFALRERKDWLNSRKSPVNACSIVAEYIPPADAPFPGYHVQAKRLTAAKSEYPELQTVNAQALQQVLRALDRAFEDRKSRGCGFPRFKQRGRMRSFVFPQMLKNCISKEGIKLPQLGFIRVRWSREIPELFQVKQARIVRKASGYFVLLSLEADINIPAAMPHGDPVGIDVGLEYFLSTSDGEQVKRPRFFNDLHRELRSLQRRLRNKQKGSANWLKLQRKIGRVHQRIADTRKDWHFKLAHHLCDQAGMVFVEDLDFRIMAKGMLGKHTLDAGLGQFTNQILPWVCFKRNVYYGKVDAHGTSQECPDCGAEVKKDLSVRVHHCPECGSTKPRDIAAAQVICTRGQRGIENACGVEVTGAEVTQSSQLAVKQELFGATQRISSHTVRLVG

SEQ ID NO: 49808 - protein, 376 aa, Clostridium sp.
VIKAIKIRLKPTNEQEILMFKSVGCARFAYNWGLSKWEEIYKQGGKPSKAKIRAEFNNTIKKDDSYVWLNEVSAQVTQHAFEDLDNAYNNFFKGLSKYPKFKTKRHSRKSFYVRYDAIKFKNGMVNIEKIGKAKYETNYNIPNLPKYINPRCYFDGRYWYLTLGFEHNENQVELDKDLSVGIDLGVSNLAIVNCLDKPIKNVNKSVKIRKLKKKLKRLQRQVSRKYEANKKGKEFVKTKNIIKLEKQIKLIHRKLNNIRLNHIHQATNMIVKLKPYRVVMENLNISGMMKNKHLSESIQEQKFYEFIRQMKYKCEFNGIEFVTADRFYPSSKICSCCGSKKENLKLKDRVYVCDKCGLEIDRDKNASINLGNYQIA

SEQ ID NO: 49809 - protein, 374 aa, unknown
  TnpB Polypeptide
MQAFKYKMYKTKRTKHIDDMLREAAFTWNKALAIQKRYYALFGKYINKYQLIKWFDKRYKRYYLGSQVRQEIINRLDTSYNRFFKKIAQRPPKFKKAIDFVSIVYKQAGYKLYSNELILNRKFRFKFSKSREYKGKIKQVIIKRSRVGEYYLIIVTDANPKEYRKTHNGASVGIDFGLKMYLTMSDGSEYSNPLFFKQYLSKIRQKSRNLSKCKKGSHNRKKKRIELARLHEDLHNKREDYQFKIAHELCKKYDYIFIEDLRLIGMTKMWGRKMNDLAHAAFINKLEYIASKYRVVVHKIDRWYASSKTCRCGYVNKSLQLNDREWFCPECGSINHRDLLAANNILRKGISELESMSKTSSEASYACIQESYSL

SEQ ID NO: 49810 - protein, 357 aa, Paenibacillus sp.
VLIAYKYRIYPNHEQQQYLARVFGCVRFVYNKMLADKIEYYKQTEKMLVNTPAQYKKEFVWLKEVDSLALANAGLHLDKAYKNFFREKNMGFPKFKSKKTNRHSFTTNNQNGTISIRDGHIKIPKLKTKIKIKLHRPFTGLIKSCTISKTPSGTYFASVLVETELTALPKAEKKIGVDLGLKEFAITSGGEVYANPRHLRKSEKRLAKVQKELSRKKKGSKNRYKARLQVAKLHEKISNQRKDFLHKTSTQMIRDNQVIVMEDLRVKNLLQNHKLAKAISEVSWSMFRSMLEYKANWYGRQLIIAPKNFASSQLCSCCGYKNAEVKNLAVREWTCPECSAQHDRDVNAAKNLLKLAI

SEQ ID NO: 49811 - protein, 179 aa, Paenibacillus sp.
LGLKEYAVCSSGEHFANPRFYRQYEKKLALWQRRLARRTPGGSNWKKAKKHIARIHEHIANSRNDFLHKMTTKLIRECQTISIEHLRVANMIQNPKLSKSIADASWGEWVRQLTYKASWYGRTLRVADTFEPTSQQCHVCGMIHPEVKNLSIREWTCVACGTHHDRDENAAHNIKQVAV

SEQ ID NO: 49812 - protein, 367 aa, Paenibacillus sp.
MGVSHMIVHQAYKYRIYPNTGQQQLIRRMFGCCRFVFNHFLEEWNQTYAETGKGLSYQTCATQLPVLKTQYDWLKEVDSIALQSAVRHVADSFDRFFKKQNQAPRFKSRKHPVQSYTTKFTNGNIAIEGNRLKLPKLGWMRFANSRKLEGRILSATVRQNASDKYFVSLVCEVEKTPLPQADAHIGIDLGLKEYAVCSSGEHFANPRFYRQYEKKLALWQRRLARRTPGGSNWKKAKQHIARIHEHIANSRNDFLHKMTTKLIRECQTISIEHLRVANMIQNPKLSKSIADASWGEWVRQLTYKASWYGRTLRVADTFEPTSQQCHVCGTIHPEVKNLSIREWTCVACGTHHDRDENTAHNIKQVAV

SEQ ID NO: 49813 - protein, 370 aa, Lachnospiraceae sp.
MKAQRAYKFRLYPDKCQETLFHKTFGCCRFVYNRLLADKREMYEKTGKTRRLTPAMYKKDYPWLKEVDSLALANVQLHLEAAYNRFLKDKKTGYPKYKSKHRSRKSYTTNVVNEIIRLEEGRLRLPKAGFVKIRQHRPVPEGYVLKSVTISMDGSGRYYASLLYEYPARESQAAGRSAEEMDILGIDFAMRGMAVFSDGERAGYPMYYRKAQEKLSREQRKLSHCRKGSRGYEKQRRRVAKCHEKVRDQRRDYLHKLTRRIADRYDAVSVEDIDMRAMSRSLHFGKSVMDDSFGMFRTMLRYKLEEQGKELVRVDRFFPSSKMCSRCGNVKKELRLDERIYHCGCGNCMDRDINAAVNIREEGRRLLKAS

SEQ ID NO: 49814 - protein, 500 aa, unknown
  TnpB Polypeptide
VARSKTPSFILELSLVVDSQADAELLSRFQAGRQLYNACLNEAMKRKEKLRDSVEYQSAKRLPLKSKQRNEALSNACKQYRFTDYDLQAFATLTANRSIWIAQKIDSNSVQTLASRAFKAAERVLFGKAKKVRYKVPNRFNSIENKTNKQGLRWKDERLVWGKLELQAMIDWENPVHLHGLSSKVKYCRILKRELNGKRRWEVQLILEGEPFHKPNNTVADGVIGLDLNISNIAFVGNAKAGLLPFAESVPTFEREIKALQRQMQRSQRVANPDNYKPDFKARRGRKTVTKKGKVKKGVRKWNKSKTYLRAAKKKRELERRRAAYAKSQNRRLVNEILRYGKHIKTENVSVKGWQKRYGKAISAKSPGFFQSELKRKAGSAGGSFIKFSTQTTALSQTHLTGERIKKSLSERVHYDQTGVVMHRDLFAAYLSRFVTDNMLDVQMAQQSYDGSESILAAAWQAYQSSKRVGESESPQSQSPVERTAVKLGTVSQIKQTLKS

SEQ ID NO: 49815 - protein, 476 aa, unknown
  TnpB Polypeptide
MCSTVKAICYNTTMKYTYQYKALPTTEQKLELNLWLRTCQYWYNRQIGDRFDWWEQNRCYINSCPLVCQLPELRENPNYYSQKKYLPEIKTDIVMVGWSSELLDFSRVPANTLQEVCKRVDKAFDRFLSGDNNGKRSGKPRFKSSDRFRSMVFEGAGLDLHSCSLGGKYLFIKMPKLGLLKVRMHRDIPDGAILKQVQLIKKADGWHVNIRLDDPTVPINADGVDLNWDKSLGMDAVLHEADYLATSDGNKLPSLKSFRKSEKRLAKVSNRKAAKRKGSRPRRKLAKREAREHQRIARARRDHAFKTAHKIVRTGKTVFFHENLNLKGLSKRNGAKQDEQGQYLPNGQAAKSGLNKSWNDAAFGQFFTILGNIAEKAGAVVIGVNPAYTSQLLAYRDEFIFTDCSIREYWDEVENLWVDRDINAAINIKRVGLDEFPTINRRKGKAVVGRSTTNSTLKEVLSTLRSLEKPTLDAKH

SEQ ID NO: 49816 - protein, 427 aa, unknown
  TnpB Polypeptide
MHQENTMLPRRISVSLFIDQSIIWPVKRLQAFKFQLRPGGQQEREMRRFAGACRFVFNRALALQNENHEAGNKYIPYGKMASWLVEWKNATETQWLKDSPSQPLQQSLKDLERAYKNFFRKRAAFPRFKKRGQNDAFRYPQGVKLDQENSRIFLPKLGWMRYRNSRQVTGVVKNVTVSQSCGKWYISIQTESEVSTPVHPSASMVGLDAGVAKLATLSDGTVFEPVNSFQKNQKTLARLQRQLSRKVKFSNNWQKQKRKIQRLHSRIANIRRDYLHKVTTTVSKNHAMIVIEDLKVSNMSKSAAGTVSQPGRNVRAKSGLNRSILDQGWYEMRRQLEYKQLWRGGQVLAVPPAYTSQRCACCGHTAKENRLSQSKFRCQVCGYTANADVNGARNILAAGHAVLACGEMVQSGRPLKQEPTEMIQATA

SEQ ID NO: 49817 - protein, 297 aa, unknown
  TnpB Polypeptide
MPVFYRDVMYREGAEGKDEAYLKLYDGHDWKWSCVRLDHTDMEYLRKCWSGKKASAPTLEKRHRKYFLRFSYKEEVTLTKTPVKEQIICSVDLGINTDAVCTIMRADGTVLGRRFIDHPSEKDRMYRTLGRIRRSQREHGSAQTQGRWAYTKRLNTELGKKTAGAIVRYAEENHADVIVFEYLEMQGKISGKKKQKLHLWRKRDIQKCCEHQAHRKGMRVSRICAWNTSRLAYDGSGAVTRDWENHSLCTFQTGKRYNCDLSASCNIGARYFIRELLKPLPATERSLLEAKSPSCKA

SEQ ID NO: 49818 - protein, 435 aa, unknown
  TnpB Polypeptide
MKVALTAKLKLLTTPEQFKQLRATQLAYRDALNYVSRYAFEHGKMSNKVWLQDGTYREIRARYAIPAQMACSIARQVGATYKGLWTKAKKHAALRKAGLTKKRYQGLDAAPKYVSPTLEYQLGHDYSFKTDQRVSILTLAGRVIVPYTGYRQHTALIQHGATIGAAKLCYDQPRKQFYLLVSLEIDIPDPTPDTQSSVVGVDVGIRYLAVTSDTRGKTSFHSGKRLVPKSNHYARLRKRLQQKGTRSATRRLRVIAGRERRLKADANHVISKRIVSRHPHSLIGLEDLTDIRERTKRKRGKRASQKQRKANATRSKWAFASLHGLLAYKALRAGSMAIKVDAHYTSKACPMCGHRADANRPNKGLLFVCQVCHYTLHADLVGARNITMRTLLARQDWTSTGILSVCPDASDSEAKAARLARYAELRWSPDASPRL

SEQ ID NO: 49819 - protein, 372 aa, Halorubrum sp.
  misc_feature (296)..(296): Xaa can be any naturally occurring amino acid
MAIKATRTYVGSIKNHQQVCDGLDSLGDSASKIWNVARWTADRIWDATGEIPDSGALKSYMKNQPCWKDLNAQSSQKVIEELSDAFQSWFDLRHKFDEANPPGYRKHGNTRPRSTVTFKEDGFKHDPENDRVRLSKGSNLKKHFSDFLLCEYQTRPDVDLSEVNSVQNVRAVWNGDEWELHFVCDVELESADTAGDGIAGIDLGITNIATVAFPDEYVLYPGNSLKEDKHYFTRAEYDTEGESGPSEQSMWARRKLSKRETHYYHTLTDAIIAECVERGVGTLAVSWPEDVRASDXVRLGQDREQEAPLVGVRPHLPVPRIQRRDAGCRGTERERVEHLENVFTMWRRHEIEPCRTWPVRLFVVRVGSQRRL

SEQ ID NO: 49820 - protein, 453 aa, Anaerolineae sp.
MTQTNEARNHLLERARYAGIFGQVNLHKSACYDTQATFPDLSLQIIARSISDVADACKLDRKGKRPFTQYAAITCDQRILRWYTDRQEVSIWTVEGRLHIPYQCSQQQRLMLKARQGQADLVYRNGGFYLHQTCDIEAPDPDDPDGWLGIDLGMVNLAVDAAGETVCGAQLEAKRRWYAERRKKLQSVGTRSAKRRLKRLSGRQARFQKDTNHCIRKTLVAKARRHNPGIALEDLNGISKRTTVGSAQRSRHYKGSFCPLPSFLSHKAELFGVPVRLVDPCYTSQACSICGDVSKAHRTTRDTFLCERCGFSGPADGVAVVNIAARAAVNQPMVSTEMPKGYSPIAASLKSGASFPLKRGVVDRAVCLHPRHPAPQRWARFPPRPARTTRGGSPRPTGSTWRVRGLHWTRNGCARRRHASLRYSFGPSGVARRTPNKLEQHMRHQALERRRGE

SEQ ID NO: 49821 - protein, 356 aa, Methylobacterium sp.
VNDLVLKTHSYRVKDATRGRQLVALANAVNTVWNYVNEISARSSERSKVWATKKQLRYLTKGSGKLLGLPSQVVQEVIDEYVIKRRAAHRPKLRWRASRGPKRALGWVPFTNQDITLDGATVLLRGERFRLWLHRAVEGRIKSGNFLQDARGRWYCNLVCEVPRSQGRGRDDIGVDLGLKSVAKCSDGAALEQARFYRDLEPKLAEAQGKKRKRQVKSIHAKIANRRKDALHKFSRALVDRARKITVGDVSASAMTKTRIAKSVLDAGWSMLRGMLRYKCDHAGVAYAEVNEANTTRTCSSCGCLSGPTGRTGLGIRRWTCGACGAEHDRDRNAALNIARLGCETPCPSGRGSPAF

SEQ ID NO: 49822 - protein, 409 aa, Methylobacterium sp.
MIARGFRYKLEPMPEQEELFRQFAGVCRLVYNLGLEQKVTWGRKHRLGYVAQAADLTRLRAELDWVRAVYVSCQQQALRDLDRAFQNFFSGRASFPKPRRRGLDDSFRFPGREVATKRLNANWSVVRLPKIGWVKFRDSRPICGGVKNVTISLDALGWHVAFACEIEHKAPIPSAEVVGIDRGIATTLALSTGEMLTMPGNLGRIEDQKRKAQRVVARRKRGSNRRRKAQARVARLHARQARIRRDFHHRAALDIAERFGVAVLEDLKTRGMTASAKGTLADPGRNVRQKAGLNQAILNAGWHQFATILTYKMEERGGQVVTVPARFTSQTCAACGVIDARSRESQARFVCISCGHADHADRNAAVNIRRRWSTSLLDVEGLHQRPYEASTGRDLTVSENPRPSGRGRC

SEQ ID NO: 49823 - protein, 188 aa, unknown
  TnpB Polypeptide
MLIRFPHAVTPALPIRTDVDRRASARKVNGSANWKKPKARVHRIHARIANARADLLHKASNTIGKDHAMITVEDLQIRNMVKSASGTVATPGCNVRAKSRLNKAILDQGWYEFRRHISADSRKTQALFACVNCGHEANAGPVGAINVLHRGDAQLSGEGLELARIACGESVQSGHSMKQEPTQVACDG

SEQ ID NO: 49824 - protein, 389 aa, unknown
  TnpB Polypeptide
LKAKTYKYRLYPTKKQVQKLEWTLDMCRILYNSCLLDRRNHYEQTGKGLSRIKQQEILKSDKQIVESLKEIHSQVLQDVLFRVDRAFQGFFRRIKEKNGKAGYPRFKGEGRYDSITYPQQPAFQITPQGLKLSRIGTIKIKLHRNIDGTVKTCTIKRECNRWYACFSALYEPVKKPIPDKAIGIDMGIKSFAVTSDGEVIENPKYLVKSEKKLIQKQRQLSNKKRGANNRKKARQSVARLHVKIRNQRSDFHHKVSRKLVDTYGFIAIEDLNIKGMVKNHHLAKHISDAGWGQFLNYLTYKAEEAGCKIEKVSPQYTSIKCSVCGQPVDKTLADRIHRCPFCNVVIDRDYNAARNILLKSTAGTAGSNAWGEVWMQTSTNQEALPVRAG

SEQ ID NO: 49825 - protein, 274 aa, Anaerolineae sp.
MRLLNHVSTSFGLPSDYARMAVNAAVSRARSYYGLRQSKSQKRTSFPKVAGSQGLGLSVNAYAVVENDGRWDLRCSTGPRGGYVCLPLCVPAKWCDRMQSVYGDAPPVCDGGPTFSGVDLGLVCWATVSTPDAVECIAGKAVRHRREHVSDLRRRYQKHKRLHRVKAMRGQERGWMRDIYHQMSRPIGDLAATYERPVMVFETLDGTRSRVGGSRRFSRMMSWWAFRQWIDFVTYKAARADIPVVLVDPRGTSKACSRCGHSWRSNRPDHSRFR

SEQ ID NO: 49826 - protein, 407 aa, unknown
  TnpB Polypeptide
VKRIERVRLYPTFRQAERLRFALNVTRELYNALLQERRDAYRLRKVKISARMQYAEITALRKPIDRLDGRLAAVYRECEDAVLHRLDLAMQAFFRRIERGKTPGFPRFKPAARWKQLTFPHGNRALTFDVAQRSVTIPGIGRVRLRKGRSVPPFGRAWILERNGRWYACFECERAQVQGPVDLRRIVGVDRGIRVLAATSEGRLHDNPAHAERNRQRIAHHQRALEAITQRDSRGRPLNRHDPARKSAILRLARAKEREANRRRHTLYTLAGKIVAGTGVIAIEALNVRNMTRSAKGTLQEPGRNVAAKAGLNRRMLDASFGLLRGFIIAKAAEAGRMVVEVDAHFSSQTCAKCGACERESRRRRRFTCVRCGFSTHADVNAALEIRRRAQLALSRLPDTGAEPVAA

SEQ ID NO: 49827 - protein, 451 aa, Sarcina sp.
VLLSQDVRKAGQAGGLSGHAAVRRALKRAEPVPYPARDNRMLTYEVLDAVFKFTQNPVYYSLPAQVNQNAMRKTFEAWKGYFSALKDWRKHPGKYAAKPRIPGYIRSAETTAWFTNQTAKLKDTGKGHVLSFINTKVTVGCGHIPGTYVKTEVQPYHGDHRLLITYKDGKAQAPEVPEHPSRIYGIDTGVDNFLAVANNFGRTPFLIKGGAMKSWNQWYNKKRAALMSDLTAGRDSTRSAKHSRRLYALSRKRDERMRDFFYKCAHFVCRRASEDRVDVIVCGHNDRIKDGTCLSKKENQNFVCIPERKFLRILSGVGPQYGIPVVIREESYTSMASAADLDAVPTYGQGQEDGSIPVFSGKRIRRGLYRTKDGYLMNADINGAANILRKEYPEAFGSMTDLSWLWKTTETISYRDIYKIRPVKEKTDAGRRSRPGRASRERSVPREWNSW

SEQ ID NO: 49828 - protein, 349 aa, unknown
  TnpB Polypeptide
MLLTYRYRLKDGSRARKRELRRMARAVNRVWNYCNEAQLHALKHNKRWPRAFDLNNLVAGSSKLLGLQSHTIQAVCEKYAASREAKRKAKLRWRGKRSLGWVPFKASGIKQDGAGWVYLKRRFPCWLHRALPDGGAIKYGSFSEDACGNWFINIVVELPDVEQSDDGADIGIDLGLKDLAALSTGEKIENPRHLSKLAAKLARAQRANKKKLAARTHRKIARARADHLHKASRRITDAARVIVVGDVSSTKLVKTDFARSVLDAGWSSFKEMLRYKATARGASFVCAAEHGTSRTCSCCGDTASGPKGIAGIAVREWTCSNCGASHDRDVNAARNILRVGLNTLKGAPL

SEQ ID NO: 49829 - protein, 403 aa, unknown
  TnpB Polypeptide
MIIRRASKFRLYPTPAEAERFAAYAGAARFVFNLGLEQRRDWWRQKMVSTGSGITLFTQDKELTALRAECDWLGEMPRVVQAQALRDLDAAFKAFFAGRARYPQFRRKGEAESFRLENRTVHVRKINARYGEAKLQGVGWVKFRQSRPIEGHVEAVTITREANGWHIVFQSRVEIADPVPLDNAVGIDRGITATLALSTGNLYASPAALTQLDRKARKAAKALARKRKGSARREKAKRKLGKIKAKAARVRAHWAHERTTEIADTFGTVAIEALAVRNMMRSARGTADQPGWNVRAKAGLNRSIAERGWHQIERFLDYKLAERGGKLVKVNPAFTSQTCACCGTVDKASRESQARFVCRSCGHEDHADVNAARNILRLSRSEANARGVDPVGLPAKRVIPIAA

SEQ ID NO: 49830 - protein, 423 aa, unknown
  TnpB Polypeptide
LNKFSETIKLTANFKLDGDSSRVEPLFSTFMGMVNELLEFAHKNHITSFKRLKTSKYYEFRRKFPDLPSHYIYTACQMACSVYKAFRKCKRRGCIKVDKPRFRRKTIMLDDHLFTLDLKRWEVSIATPNGRVKFRVLHGTYHEKFRDMRLGQAWLVRRNGELWLKAVFRRRVKLKEPNGRALAIDVNENNITIASPNSFKQIITRERPIRTAYFLKRRRIQTAIKYGKCKQKLLAKYRSREKRRVEDIYHKVANQIIEQALNEGVSTIILEKLTHIRCKIHYTRSMNGRLHRWSFRKLQTVIEYKAKLVGINVVYEDAYKTSSLCPICGEELSPNGYRELKCGKCGLVADRDVIGAWNLLKRHVGSSVPPERLQMKALMPDGGRPTEKLRKLTVGQNGFQGTVCSSGWLLNVWEGCFSPLLGV

SEQ ID NO: 49831 - protein, 382 aa, Escherichia sp.
MRRFAGACRFVFNRALALQNENHEAGNKYIPYGKMASWLVEWKNATGTQWLKDSPSQPLQQSLKDLERAYKNFFQKRAAFPRFKKRGQNDAFRYPQGVKLDQENSRIFLPKLGWMRYRNSRQVTGVVKNVTVSQSCGKWYISIQTESEVSTPVHPSASMVGLDAGVAKLATLSDGTVFEPVNSFQKNQKTLARLQRQLSRKVEFSNNWQKQKRKIQRLHSRIANIRRDYLHKVTTTVSKNHAMIVIEDLKVSNMSKSAAGTVSQPGRNVRAKSGLNRSVLDQGWYEMRRQLEYKQLWRGGQVLAVPPAYTSQRCTCCGHTAKENRLSQSQFRCQVCGYTANADVNGARNILAAGHAVLACGGMVQSGRPLKQEPTEMIQATA

SEQ ID NO: 49832 - protein, 496 aa, unknown
  TnpB Polypeptide
MARARHWSFKQIHALGRDVASVKKEAQRHFGLTARQFNGVRFDLDQAVNAWRGTAKFRVTNLKDSIEATVERIAALGRQMEKAKTEKRLNRLRFVRVGKKQRLDVLKGRLSVAEAELRTDRPKVCFGGRELLRKDEVWAWREKRNTRIFLVGSKSEGPNGNQSVHWDGAALSLRMPDSLGGGVQRIDGVRFRYGQAEMMRLLERNRDKNLRVAMTWLIFRAEDGRWHAHVTVDEPVAEVVTDIRHGVIAVDVNVGHLAVTIVDHFGNPTSRLTLGFPDSSVDEGRAAVIIGDTVRALCLLAKSRSYGIAVEGLEFSKKKAGLREYGAAHARRLSGWAYAKLFQILEARCARDGVDLCKVNPAFTSVIGRTKYARGRAMSTHHAAALVIGRRAQGYGERLVTMDGVTLSGPARNLARNEWRRWRGVRRLPREGARAPVRTAGSGVGVAERGGRKRPASATGDPAFGRVAASGQRTRTVPLQVRGAVAQAAETVSPSG

SEQ ID NO: 49833 - protein, 446 aa, unknown
  TnpB Polypeptide
MLIHKAYRYKLEPTDEQLSLLYRMVGCGRYVYNASLDLMLDEARKELGFEGERKALYERLNALKPADRIALARKMPSVTQLSKYTTQWKKTPERAFLTDAYTDNLQQRQRDLRDRALKDWCSGKRGFPRHRTRKLAHHSTLRFVNFPKYCVLDRKHIKLPNKLGWMRYRNSRPVMGVPRSCTVTLDACGVWHISILCELDITPASKAATAVGIDMGVARNMTLSTGEPYEGVASYAWHKEQLAKAQRKLSRKIKGSANWQKQKKQVARLHRRIANIRLDYQHKHTTLISNNHAMVVVEDLRVSNMSRSAKGTLEQPGRMVRQKAGLNRSILDQGWHTIRQMLEYKVSWSGGIFLAVPPQYTSQTCPVCQHVCKDNRKTQASFVCVKCGHAGNADVIAAQNILSRGMQILQEQGQDYARFACEVNGAVMPSAAGTCQPSDQLAPCTL

SEQ ID NO: 49834 - protein, 398 aa, unknown
  TnpB Polypeptide
MKRRWTFRAYPTPAQAEHLAQTFGCCRLVYNGMLAARTAAFQRGERLTFVGTSAKLTGLKKDPDLTFLNAVSCVPLQQSLRHLQTAFANFFAKRSAYPTFKKKGRVRDRAEYTRSAFRFDGATQRLTLAKLGVLELNISRRVEVDPSTVTVTRHPSGRYYVSMVIEVADPTIKRVKTGQSVGIDFGVSRLATLSTGETIPNPKHLFHRTALLARAQRRLFRKQRGSNRYRAQRRRVARLHEKIADARKDSLHKLSTSLVRRFDSIYLEDLHLRGLVQNHRLARSLSDASIGTAIRMIEAKAEASDVSVVTIDRWFPSSKTCSVCGHLLDALPLSVRQWACPRCGTDHDRDVNAAMNILAVGQTVTVRGGGIRAVRPSGRKAGRLRSVNHSRGKHAISS

SEQ ID NO: 49835 - protein, 671 aa, Rhodococcus sp.
VAWIERYLSAVGVKVEVLREHGDKSLVEELMDDFMALLASFSGRFHPLRSKQNQRRLAGDAAARWEMDQLMADAGFTALRQFSFTTRPYLAVDDATGAPIGRGDLDVRVGWMLDLISGAEAHLLSRLWQPATFDVLAAGCDSHGRTLPMQGHVAAARLGWTPHYPDGVYVPSRVTRVVTAQAVGTLRALAYRDTAITALSARFDPATGRIAAPTTAAEYVPSGFARGVVRQLTARSHAAAGAADARLRITDVQAPPQTSAMARLSAADRQLAHITVTDAVMTLTVKLPTTVAPTGRAQWRRVRLTAAIPPHLHRRPISEWHLPTLHLDHRGLLLRCAATEAVPAADLTSGTTAVGVDWSPSTLGAAAITADGPEGLVSDYRGWTYDDRGLGIKLARLQAEGQLLHRKAARLTRLAATAPPEVRVQLEAKIAVLDAHREAVGVKRGRTNRELAFHFARQVTDYAADAQAQLIAVEDLSTLETRGHGRVNNNRAAQSARRQAAAALAHTAAGVGVTVVSVPARGSSALCPGCNEPLSRPGGYHRAWCVRCKVGGNRDHVAAVNLAKRALLGRGKAVRKRGENPQIRVIEHAPVRRCRDKMCPTPSRPRHRRVRRSAPAATPPAGVNQMRIVPAPQASVWDTVKPATPQGVTGSREVHTSPTPATSVVGSMRSM

SEQ ID NO: 49836 - protein, 360 aa, unknown
  TnpB Polypeptide
MTTDNATATKTLKVRVRDKHVKGLRRQAAAVNFVWNYVNDLSSRSIRERGVFLSAYDIHPYTKGAGKELGLHSQTLQVVAKEYVTRRKQFHKSKLAWRKTHGVRRSLGWVPVNTGAAKWKNGQVFFSGQHYRVWDSYGLNQYQFRSGCFVEDARGRWYFCVVVTAKPDQRCGTGSVGVDLGLKTTATPSRGQPLEAGHFYRDQERKLAIAQRARNKKRVQAIHAKIRNRRSDALHKFSRKLVNDNGLIVVGNVSSSGLAKTKMAKSVLDAGWSTLRTLLSYKCEHAGGVFLEVDERYTTQACSCCGSLSPSSPKGRAGLGIRGWTCECGVTHDRDVNAAKNILALGHERLAVGIPHQNAA

SEQ ID NO: 49837 - protein, 412 aa, unknown
  TnpB Polypeptide
VYTKKTTLIRAKGGDSVRISYQYRLKPTKAQSVVIDNTLDMLRCQYNYQLAQRFNWYEQNRCPIDRCSLFVCHLPELKEQPSRFTQQASLTQLKKDRPWYKEIHSQVLQEVSKRVEIAFDKWLTGDSNGKKSGRPRFKAVGQYKTFTYPQFKQHHFVNNKITLSKIGDVKVIVHRPMPDGFEIKTVSVTKKSNGYYVTLSLDDKTVPTIKPDFNPENIVGIDVGLIDFYVASDNTKIVAPKFLRKAERRLKSAQRKVSIRKKGSNRRKKAITALGRQHKKVADTRKDFHFKTANNLLKVYDVVAVEKLNVKGMVRTLHLGKSINDAGWSQFTTILTNKAENAGLKVIAVNPNGTSQECSSCGHKVKKPLSQRMHNCPVCHISICRDLNASINIKNRGAHGLKAQIMSPMESL

SEQ ID NO: 49838 - protein, 472 aa, unknown
  TnpB Polypeptide
MIPLILNKDIYCPISTKEIVRTEQIWIESIDILNELCHISKNLWNESNYVVRQLFTQKDKDGNNCGSYMKYSDLDYLIKNKSENYKKLNGATSQQILKILDRSWKSFFEGIKDWKSNPSKYLGRPKLPGYKKKDGEFLLVFTNQQVKIKDGYLRFPKKLKKLNRDIKIGIEGIKTRLDDETNLREVRIIPKGNLEENIKKNKVGYTIEIVYNIEEQQLDLNKDRVIGIDFGLRNIVTISNNIGEQPICIKGGVLKSINQFYNKKRSKIQSAYNRQPIMCLLKDKKIVCRKTGHAIQILTDNRNRKIKDVMHKYSRYIIDYCLRWNIGTIVMGHNPGQKQEIGLGKITNQNFVNIPEYLLRKMISYKGEEIGIQVLNQEESHTSCCSFLDDEPVGHSGRYMGKRIYNATCHGGLFRSSFSPLCKGKIINADVQGAYNIIKKAIPKAFMNLTVIRTDGIEGVGLHPIRINPLIY

SEQ ID NO: 49839 - protein, 414 aa, Lactobacillus sp.
MAKKMADLNYHYGLKMRLFPSSAQKRVIDNNINASRFAYNEMVAIDKELYALRQVKIPITIVQDRIEYLQRRKNNTQMLFAIHPWLAGAGVGTDVIDQARRAYQSAWRLFRQVHRSGVPVFHRKRADGSYQLPTRYTKSKIGLMEGSNRFIDKKHVVLSGLGKIRVSGSQKRLFNDAENIRVGTITIRRDATGQYFLSMQLGSDTPFAHATKPVQSAVGIDLNTENFLTDSNGIIVLNPRYYRAIKGRLAKEQRILARRRLRAKKEHRALRNAKNYQKQRVLVANLQRIVANRRNAFLHLVSTTLIKNHDLVVAEELRSKNMLRNHALAMSIADVGWRTFLSMLAYKADLYGRQFVTVDPRNTTQTCSDCGFVMSGNQKLTLADREWTCPQCGAFHIRDHNAAKNILAKGLALN

SEQ ID NO: 49840 - protein, 355 aa, unknown
  TnpB Polypeptide
VRTIKLLILIWHNRFLKKIDGSFKSFFGLLKKKNKGMYNAKVKLPNYLPKNSFSTLIIGFVRLNEDTFVIPYSNSFKKNHKKISIKIPPILLDKKIKEIRIIPKFNARFFEVQYTYEVEEEQRNLDKNHALAIDFGINNLATCVTSKCKSFIIDGKKLKSINQWFNKENARFQSIKSKQKYGKKPTLRQKYLYSSRNNKVNDYMSKTARKIINYCLENNIGTLICGYNKTFQKNTNIGKANNQTFVNIPFGKLREKLEYLCKLYSLRFVEQEESYTSKSSFFDMDILPKFESDKPQTYSFSGRRIKRGLYQTSKGYIFNADVNGALNILRKSNVVDLEVLYSRGEVDTPVRIRIA

SEQ ID NO: 49841 - protein, 364 aa, Acidobacteria sp.
  misc_feature (18)..(28): Xaa can be any naturally occurring amino acid
MEKLQQSVKAKLVVTPHXXXXXXXXXXXRPRRYDLHHATYNQIREQTNLPSQHVVNAIAKVSEAFTRERNKQHKFKQLSSVRYDSRTLTFTRDFREAGLTICPKGKVSGELQMSAAMREKLRTWKIGSADMIFRDGEFYLHIAVNTDAPEVSEPSGSLGVDLGVKRVAVTSDNAFHTAKFIRHKKRAFQATRSSLQANGSRTAKRVLRRVSGRENRFVADANHCISKSIVAQALANGQRIVLEDLTGIRGRARAFMTKHLHGWSFAQLRRFVEYKAAAAGVEVATVNPAFTSKGCSRCLHIGSRSTQSNFNCAHCGLRINADLNGARSVAMRHDLLATGRYFCALEVCQPPQSVVAGQTQAATL

SEQ ID NO: 49842 - protein, 382 aa, Nocardia sp.
VQLRYRYRLNPTPGHRVALARAFGCARVVFNDAVAAREAARRAGLPLPKDGELSKALTAAKATPERAWLGEVSSVVLQQALADANTAYRNFFASVTGKRQGPRLGPPRFRSRRDNRQTIRFTRNARFAVTASGKLRLPKIGDVPVRWSRQLPAPPSSVTVIKDAAGRYFASFVVEVDPEPMPEVDAEVGIDLGLAVFAVLSNGKTIRSPKFFRQAERRLRKAQRNLSRKEEGSKNRAKARVKVARAHARVRDARLDFAHQQAMAVIRENQAVYVEDLCVSGLARTRLAKSVHDAGWGLFLRLIREKAARYGRTVVKVNRWFPSSQICSTCGRVDGPKPLQVRTWTCPCGVVHDRDLNAAINILAAGRAERRNACGETVSLPA

SEQ ID NO: 49843 - protein, 383 aa, unknown
  TnpB Polypeptide
MYTTKKIKVSPTPELDMLASESGRVYSKVVSLIRKVKRKKGFWLSEKAVKKYMKLRGYQLHSQTIQAIVESYFDSLKSYFRVVKSNPDAKPPKRTRKFFKVRWKSSAISLKDGVLRLSNGKGNPPITLHSTVEPVYVELYFQQGCYYFSLVYKVHTPPKRETGKVVAIDMGEIHPIVSHDGQHTIIYNGRALRAIKQYLNKVKTIFQSKMDKCNKYSNRWYRLKRVKQKILAKLNAQIKDAEHKITSRFISDCLKAKADTIVIGKLKGIRQRAKFSKKSNQKVHQWAFARLQFMICYKAELAGLKVKFVSEAYTSQTCPRCGNRKKPANRNYHCNHCGFEYHRDGVGAINLWNKVLGFMLSPVVGAMASPIGVRFNPHLSKLG

SEQ ID NO: 49844 - protein, 406 aa, unknown
  TnpB Polypeptide
VLKVQSQPAFSEINAASASVWNECLQLMEWYQWQRGYPHARADFWIGPDCEGWMDKNLSKSQPLHSQSIQTIRKQYFKSWQSYWEIKRTNSIESPKPPHKKKGHMTTRWLKSAIRFQDGTPFGKRVVLSMGKGRKALDIPLPDSFDMSKVDAIATIDLCYNHGQYELHFTYNLEVEITQVGSNVMGVDIGEIHPIVCHDGLHTYILNGRYIRSLYRLRNKVIAGFQSKIDRCQRGSKRWWHLVKRKWKRINRIDNQIKDALHKHTTTFVRLCQSADVGTVAIGDLTGIRTDIDYGKRANQKLHQWPFAKLTDMITDKCKAVGIKVKQIGEEYTSQTCPSCGQRHKPSNRNYKCTCGFVYHRDGVGAINIRKKYQGHFGVPVEAAMAPPIGIRLEARCCSAGAENVG

SEQ ID NO: 49845 - protein, 391 aa, unknown
  TnpB Polypeptide
MNMAYRCRAYPAEAQQKVLNRTFGCARVVWNRTLAARQARWQAERKGTSYAETDRALTAMKRDPDLEFLNHVSAVPLQQALRHQQAAFTAFFQKRAGYPRFKSRRGRQSATYTRAAFRLRGGALWLAKTAAPLRYVWTWPEVDPARLDPTSVTVARDPAGRWFVTFQVDAPVPEPLAATDHSVGVDVGLSSFAALSTGKKIAHPQDWERHERRLKRWQRRLARCQEGSRNRARRAVKVARAHARIADARRDFLHKTSTRLIRENDLIAVEDLNVSGMVRNRRLARAISCTGWGEFRRQLAYKCGRYGRDLVVISRWYPSSKTCSACGYLLAELSLDTRHWTCPSCGTRHDRDINAAKNILAAGLAVTACGAGVRHLEASPVRSAVKQEPDP

SEQ ID NO: 49846 - protein, 421 aa, unknown
  TnpB Polypeptide
VSNQVVTRTLKASLTNHSQVRDDLDSHGFAASKLWNVGRWTISRVWDATGHIPSADELCSYLKTHDRYADLHSQSSQRVLQELGEAFESWYEQDDPDANPPGYRKHGDDHPRSTVTWKNQGFKLDTQYNRLRLSKGTNMKESRYAADYILCEYTLQTSDDQTLASVENVQTVRAVWTGTEWELHFVCKMRVVTPETPGEKTAGVDLGICNTAAVSVGSETVLYPGNALKEDAHYFRQEEYETEGPDGPSDHAEWARQKKSRRQEHFLHALSKDIVEQCADRGVGTIAVGHPKNIRDKENWGRHGNKRLHDWAFETILSHIEYKADERGINVERVDEAALKTSKTCCECGTDADSNRVERGLYVCENCELIANTDLNAAENMRKTVTPNPAQDRSNGCLARPSVRLFDKSTGRVAPQEQVVS

SEQ ID NO: 49847 - protein, 400 aa, unknown
  TnpB Polypeptide
MKKRKQERRTYKKKIRNHPQNMRLGNMFNDLEDVHNHFLAVEKRYYRIYDKYAGRYRLQPHLTKLLQRTKQHWAWVPRDTLDAVIIRIHIGYERFFDWIKKGRRGRRVGPPKFKRRGRLRSAKFQTGYTIFEAPTDDKPSPVPKGTVRLSFKEWDAVKQKFVFKKRNILYHHHRDWEGNVLYIQIGRDATGEYWLYIVTDSTSKEILSATGESVGIDFGMETYLTLNTGEKIHHPQPLKHSLNQLRKLNKAVSRKVRGSGNWWRAVRALARLYTKIANQRRDWHYKRATDLCRRFDTIVTETLNLEGMKRLWGRKVSDLAFYQFVEILKFKCIKHNREFVQIGQWTPTTKPCSDCGHRNENLSLSDRQWRCRECGSHHDRDVNAALNILRAASGPSVEQT

SEQ ID NO: 49848 - protein, 401 aa, unknown
  TnpB Polypeptide
MAGSGAVQVRYRYRIYPSPGQEQALARAFGCARVVFNDCLRLRDACHAAGEKISDTEVQRRVITLAKRTPDRAWLGEVASVALVQACQDARRAYRNWFGSLSGKRKGRVVGHPKFRRKHGRQSIRLTRNGFALRSQRLYVAKVGEMQVRWSRPLPSGPSSVTVIREPDGRYYASFVVERKTAPLPACAREIGVDVGLDRLAVTSDGEVIANPRFLRVKERRLARAQHVLSRKQKGSVNRRKARQRVAVLHRKVREARLDHAHKTALRLVRDNQAVYAEDLAVAGLARTRLAKSVHDAGWSQLLRLLDEKARHYGRTFHRIGRFEPTSQVCSACGVKDGPKPLSVRTWACGGCGAVHDRDVNAAKNILAAGRADRLNACGGDVRPGLPPAVAGEAGTHRGAV

SEQ ID NO: 49849 - protein, 423 aa, unknown
  TnpB Polypeptide
MRALKTKIKGLKKPQFERLKELSHNAKNLYNQALWTLRETFEVTGKYFSYPQMDKAMKQVENLEGEVNYRLLKSAVAQQTLRRLDKNFKGFFHALQDFKKNPNKYPGKPRPPKYKQKKPDNLIYNTCAFQVKNKVNIAKEPFYAELKMPSGKFFLMAHQIIFVQLVVLEKGLEIKVPSNLWNNDIKQVEIIPKPHSFQAIFVYEENIDEFKKITPNDKVMSIDLGLNNLATCVTNGVIKPFIIDGRRLKSINAFYNKRKARIQSTLEKVNGRKWSQKLQNLTNRRNAAVNDYLHRATHVIVKTCVENNISKVVVGDVAKSLNNILLGKKTNQNFVNLALGQFVDKLSYKLGSHGIILEVTDESYTSKASFVDGDKMPKKYNPKAKKKQVFSGRRVKRGLYKASDDTLLNADANGAYSTHFKEE

SEQ ID NO: 49850 - protein, 270 aa, Enterococcus sp.
MLKAFKFRMYPTEEQKQQLIRTFGCVRFTYNHLLKERQKSWQQTGVADFSLTPATLKKEYPFLKEVDSLALANAQLNLDRAFRNYFKGRASFPKLKTKKSMWQSYTTNNQTHTVYLKNGHLKLPKQKELIKINQHRPVEGTIRSATISARYNEEFYVALLCDVSSIKKESSAKWIGIAYHPKTLIETSQPIEVTLPKFDQTEEKLQHAQRKLSVKVRSAHHRKTRLDKASNYQKQKRKVMDLYLKQKNQREDYLEQLSGKLVKQYDYLFV

SEQ ID NO: 49851 - protein, 446 aa, Halobacterium sp.
MKRTNTFAVRPLSETGEQLLRDLLDASAALWNEVNYQRLMRYNDEDGFEGGIWDADTGRLEGRYKGVLGASTAQQVIRKNSEAWRSFSHLKDQYHDESNTSVTEHPNPPGFRGNEDDGRQLRTVIRNDAYTTEWGDRSRLEILVGSKLKDRYDHTGRLRLEIAGNPNWPDYEKQGRLELWYDETESTFRASQPVTVSDSARATPLADETAALDIGANNLVACTTTTGEQYLYEGRELFQRFRETTREIARLQSKLPEGRYSSERIRRLYRKRTRRRDHAQEALCRDLLDRLYAEGVDTVYIGGLTDVLDTHWSVKTNAKTHNFWAFKKFTERLACTAEEYGISVEVRSEAWTSQECPRCGSTDRTTRHQDTLTCPCGFQGHADLTASETFLERHTKQAVRPMARPVRFQWDDHTWSESPRSQESPKEQRTDPSTVHHGNVALRESA

SEQ ID NO: 49852 - protein, 268 aa, Paraburkholderia sp.
LRGEERRGGNPQQGGRFDIRGGPRERRAGDHHGFQCASVRCALTQESETARRRASGGRERSAMILGHRIALDPNNAQATYLARAAGTARFAYNWALAEWKHQYEAHKADQTQPKPSQMALRRQLNAVKREQFPWMLDVTKCAPQLAIIQLGEAFKRFFSGQNRYPTPRKKGVDDRFSVSNDQFSVDGSRIRIPNLGWMRMREPLRFKGNQFEDHGREFHGFSLWRGRLWPSSQDGGETGLSEAGTRQQARCIALVSYAAVCIGSGERL

SEQ ID NO: 49853 - protein, 389 aa, Williamsia sp.
VRPPLRASWRAQPGDARGHRHQDRYRDAVMAEKFEVPDGWVCQGYQFALDPTPAQCAALQSHAGGARFAYNTMLAAVKSNLSQRDAERSYGIDTADLTPCLSWSFQSLRNDFTRRKQQVAVGEDGTPWWPENSKEVYANACKNLAAALKNWDDCRSGRRQGPRVGFPSFKSKRSTKKFAFTTGTINVEADRHHVTLPRLGTLRVHESTRKLARRLEQGRASAQSYRQIRPRPVAGELLLSRATHRAAARPPQARRVDSRCGCRRQRFGCRSHPTGRRGHARPGAERVQARLPQAAGAAAQSSPPARSVGRDDQGPAGTVGWLAAHAADHRETACAGGGSAARPAAQADHRVGAVFRRDRHRDPCGEEYDGLRWRPQEGTQPLDWRCWFG

SEQ ID NO: 49854 - protein, 370 aa, Bacillus sp.
MTKHNKAYKFRLYPTEEQAYLMRKTFGCVRFVYNRMLAERKEVYEKYKGDKEQLKKQKLPTPAKYKEEFEWLKEVDSLALANAQLNLQTAYKNFFSGQNDFPTFKSKKDRKSYTTNVVNGNIMLLNGHIKLPKLKMVRIKQHREIPQDHIIKSCTISMTPTGKYYVSILTEYEKEIVQKEVETVVGLDFAMDGLYVSSEDERANYPKFYRKMLNQLAKAQRVLSRRTKGSERWNKQRFRVAKLHEKVANQRKNFLHHKSKKFATNFDVVAVEDLNMKGMSQALNFGKSVADNGWRMFTSFLAYKLHEQGKQLVKIDKWFPSTKTCSNCGSVKDMPLSERVYSCICGVNLDRDYNSAINIKNEAIRLVALA

SEQ ID NO: 49855 - protein, 368 aa, Blautia sp.
VRKINRAVKIRIYPNAEQRVQIEKTIGCSRFIYNCMLADKIEHYKKEKKMLRNTPASYKKEYPWLKEVDSLALANVQMHLESAFHKFFREPSAGFPRFKSKKSSRKSYTTNVVNGNIFLKGKYLKLPKMSAVRMKLHRPISEKWKLKSVTVSREPSGNYFASLLFCCENQTAEKRPAEKFIGIDFAMHGMCVFSTGESAKYPMFYRNTEKKLAQEQRKLSRCQKGSQNYKKQKKRVALCHEKARNQRKDFQHKLSTSLAESYDAVCVEDLDLKGMAGGLHLGKGIYDNGYGRFLSMLEYKLEERGKYLIKVDRYFASSKICSACGKKKAELSLSERIYYCECGNRMDRDVNAAVNIMNEGKRIFGECA

SEQ ID NO: 49856 - protein, 463 aa, Mycobacterium sp.
MAKFEVPDGWTVQAFKFTLDPSDEQSASLARHFGARRKAFNWTVAALKADIDAWHATGVETEKPSFRGMRDRWNTVKNEVCVDAQTGLVWWSECSKEAYADGVRGAVNAFWNWQQSRAGTRAGKRVGFPRFKKKGRDADRVCFTTGAMRVEPDRRHLTLPVIGTVRVHENTRRIERLIAKGRARILAISVRRNCTRLDATVRVLIQRPQQPHVALPDSRVGVDVGVRRLATVADADGVVLEQVPNPRPLDAALRELRHVSRARSRCTKGSRQYRERTRELSRLHCRVNDVRTHHLHVLTTRLAKTHGRIVVEGLDAAGMLKQKDLPGARARRRGLSDAALGTPRRHLTYKTGWYGSQLVVADRWYPSSKTCHSCKHIQDIGWDETWVCDPSDGGCGVVHQRDDNAAINLARYEETVSVVGPVRAAVKRGADRKTEPRSAGGREARKGLRRKPGKQPRDGVQVA

SEQ ID NO: 49857 - protein, 522 aa, Bacillus sp.
MKTTRSCKIKTITREQREQLLDLIRTFESAKRYSFNRLTEGHHDKELIKKLQHVYSLNKRYCEDAVLQAQTIISSQKELLPVYLENNQKKLEQTIQKIEEYESGRKRPKKVSLDVCLNGLRKRKQKLEQKVAMYETHITNGTLPPVIFGGRRAFYERMKQNISNQEWKDLRTRQLYSRGDKSKKGNLNIRITMDDNGQGWLEIANPLGLTLGKRTSPRIVVPITIPYRYYKEITDVVMGTQTGVNPKGNPMIDHQAYSVELLRKKDEFYVNITFEETETGRMLDFKEVPISDVIAGIDVNPDRIAVSLCTKQGNFKGSKIFYLHNLDTFSTDKRATVIGQMTQQIKDWLFSQHVGAIVLEDLHFQQSHDTDKYSNRKFHQFTYKKMLSSLIRMGLRNGFSVKMVNPAYTSVIGKLKYSKKYGISVHETAAFTIARRGLGLQEKLPKEMISLLQNQIATKLRILIASLEESNKNTKKIYKKWLQTIATWEDHHNWKLWSILHKTVYMSNQQILFQIKKGGKLV

SEQ ID NO: 49858 - protein, 419 aa, Anabaena sp.
MLLTYQFKLNPTSEQVVILETWGELLRRHWNYALGERLDWLRRTRSLLDRCSLVSEPIGGIPDKPDYYTQASDLQQTKDLFPDYKNIYADCQQQNLMRLDKAWKRWLIPDKKGNRGGKPRFKKRGDISSFTFPRVNSPKAGAHLTGNILKLSKIGEIEVILHRPIPNGSEIKQATILSKSDGWYVSFSLEDKTVPELLPIDEIKTATGIDVGLEKFLTTAHGQSIEVPQYSRKTQSKLARQQRKLARKIHGSKNYQKQASRVARIHLHVARQRKEFHYQVAHWLVKSYDLIVFENLNIRGLARTRLAKSILDVAWGAFLQIMQAVAVRRGKHTRGVDPRGTSINCSGCGQRVEKTLAVRVHNCSCGLVIDRDWNSAINLLNYGSVGLPIPGCGGLGVSQPVKQQVSYVNLRCSRYTACS

SEQ ID NO: 49859 - protein, 553 aa, Anabaena sp.
MTLIPSYQLKEQTKQSSSRAGFLATLNSLTWKDKYSFLSLVTPVVKSSKKSEADSTSEEKSYLPYWNEFSQAMSEWLWSAIKTDYADLDLNSSNGCAKNAIVNSWFSTKLSYLQSEKWLRIFWQSSMSSVADCTDSENTNRKSVKVCTQYRMILTLEQEQLLMKWVRLNRKTYNMAIAYLNQKQGFDRTGIGGTGKQAFKTFFKAHIRPDWLKNELPAAILDQAVMEAYSAWSTTQRHPKTISKGKDKKPHPQAGLKIAKFRSIRDSSQTLQFKIASDLNKGRLLPQYWGELPAFECVDNGVRFCPISNPYTPEVTYKHSRFYISLPEDVEVVDNNKDAFIAFDPGVRTFLTGFDGQKMIEFGNGDIHRIVRLCQWLDKLRSFRDLSKGFKNRHLRYRLSQKMKRVTRRIRNLVDEMHRQVASWVAKNYRVIALPTYETSQMVCRAVRKIKSKTARSMLSFAPYRFSQVLEHQCTRNGSVLIRHTEEFTSKTCSRCGHIHYSLGGQKIFKCSNCGNHLPRDWNGALGNFLKALWDTTLLNSASFDCVQMTVFV

SEQ ID NO: 49860 - protein, 408 aa, Anabaena sp.
MRLVERHIVKTNHQFYKEIDDLAWRSKNLYNYVNYLVRQSFIFDGKYLNNAAIFHLVKHHESYTALPRKVSNQVLMVLHRNWKSFFETHKAYKQNPSKFKGCPKLPKYKNKEKGRNIVIYELGAISKPLLKQGVIKLSQTEIQFPTKASNIQQVRLIPQCGQYVVEVVYLQDATPQQLNPDWVAGIDIGLDNLAALTSNKPGFKPVLVNGRPLKAINQQYNKAKARLQSQLKGNAKTSRRIQALTCKRNNRIDNYLHNASRWIINHLASAGIGTLVIGKNDQWKQEINLGTTTNQNFVSIPHARFIEQLKYKAELVAMTVLINEESYTSASSFLDLDPIPVYQEGVKHSFSGKRIKRAWYQSANGRFIHADINASLNITRKVVPAAFSLGIAGIAVCPSRITPGKVAI

SEQ ID NO: 49861 - protein, 407 aa, Anabaena sp.
MQRAFKVTLIPNHNQEVLINKSIGCARFVYNHFLALKQELYQSEQKTLNYNACSQRLTLLKKEIEWLKEVDKFALQNSLKNLETAYKNFFADLKKVKGKKGVGFPKFKKKHGCKQSYKTNLTNGNIQVIENRLKLPKLGWVKFHKSQEVTGKLINVTITRTSSGKYVASILCDTEIEKHPQVSQNIGIDLGIKSYLVTSNGEVVDNPKYYRTQTRKLRKAHKKLSRSVKGSTNRVKAKIKLARSYERITNLRDDFLHKLSTRLIKENSIICIEDLRVANMVKNHKLSLSISDASWSKFVAMLEYKAFWHDRIVQKVGTFYPSSQTCNHCGFINPLVKDLKLREWACPGCSGYNLRDNNAALNILGEGLRLIAAVGIPEALNACGELVSPGAIQAEIVEAGITRLQVV

SEQ ID NO: 49862 - protein, 389 aa, unknown
  TnpB Polypeptide
MPNGEQTRRINQFCGCSRFVFNRGLDWQNAQDNSVTFSYTKISKLLPQWKKAFPWLEDCHSQVLQQSLKDLDRAFKNFFQKRSNFPKFKKKGVKERIRFPQGCKLEQHNNRLYLPKIGWVRYRNSRNVVGEIKNVTVSKKCGRFYVSIQTEYEVEISQHQGGEIGIDMGIVRFATLSNGEYFEPLNAFKTYKGKLAKLQRQLKNKIKFSKNWQKLQAKIAKLHHKIANCRKDFLHKISTTISKNHAMIYIEDLQVSNMSKSAQGTVEAPGQNVKQKSGLNRAILDQGWAEFRRQLDYKSQWQGGVLVAVPPQNTSRTCPCCGHTDKENRPTQAKFECVECGYRNNADVVGAINILERGWATVQRNPRRGHRRCACEVNLKGSAAGTHRE

SEQ ID NO: 49863 - protein, 363 aa, Clostridium sp.
LKIKKHHKGNDTVQLTIKIKLIPMKEQKLHIQDTCLEYIKTVNDIVSLMVAENKSLKLTSKDIIANLPSAVKNQAIRDSKSVYSKYKKTKIQNFLKKPMCIWNNQNYSIGENYIAFPVMINGKSKKIKVKAIIEQYQKDLLTNKLGTLRITKKANKLMAQISIDVVEKENVNNKAMGIDLGLKIPAVAVTEDKKVKFFGNGRQNKYIKRKYRSLRKKLGKAKKINKIKSINDKEQRYMKDQDHKISRGIVNFAIQNNISVIRLEKLTNIRNTAKTNRKNEKNLHTWSFYRLAQYIEYKALLEGIKIEYVNPCNTSKQCPICGKLNTAKDRKYQCSCGYKAHRDLNACINIINATVVDGNSLQA

SEQ ID NO: 49864 - protein, 372 aa, unknown
  TnpB Polypeptide
MKHRAYKFRFYPTDEQAALLVQTFGCVRVVYNSILRWRTDEYYQSKAKIGYIQASAKLTQLKKQPELSFLNEVSCVALQQSIRHQQTAFKNFFERRTKYPTFKSKKHKQSAEFTNRGFRYRNGNLYIAKNKEPLNIRWSRLLPSEPSTITITKDRAGRYFVSCLCEFENKVLPKSDTSIGIDVGIKNLFVTDTGSKVDNPRHTVKYAKKLAIAQKRMSRKKLGSANRAKARLKVARIHAKISDCRSDNLHKLSRKLINDNQVVCVESLRVKNMIKSPKLAKHIADASWGEFVRQLEYKADWAGRSISMIDQFFPSSKRCSSCGYTLPFLALDTRRWICPECKTDHDRDTNAAINIKTAGLAGLAFGENVSLV

SEQ ID NO: 49865 - protein, 436 aa, Bacillus sp.
MKLTHKFKIPYDIDLYNKLKTKRLEAGKVWSDIVLYGNEYYRIFKNWISKSDLEKITSQRVWSDIVLYGNEYYRIFKHRIPMSDLEKVSSQIKYELHSQTVQAIVAKYDTAREITRKKQMSGDTKAKYPWKEKKYYTLPYKQAGMIVSEQTVVLKHYRYEMDFKRNKMKRINDYIEIPNLAQKDISNISYAEIVYKNGFYWFHYGISVQKKEPFSVFKPAGCDLGEIHSLAIATEDKALIISGRAIRAIKQYRDKVLAELSKEMSRLKKGSRKWEKYNRASQEVKAKCRQQIDYLIHKSTKMVIDFLVNENVSDLVIGDPAGIEKGTKTDPEKRIKKVRRQQLSKWSYGEFKNILKYKCELNGIKVHFVSENFTSQDCPFCDGRHIVNGRRFICNVTNSEIHRDVNGAQNICRKKFELAVKSVDVLFKQPMWFRKK

SEQ ID NO: 49866 - protein, 387 aa, unknown
  TnpB Polypeptide
MQHTSPNYDLMEMMDVFTRMVNKCIRIGLKENTHNMKRLSGLCYHELRDYDILSSYKICAISRAAGILSNRSQSVRRGRDVRDPVVRKPFITNCYGVRHNGCLLTIPYRRGNPINILLNAHTQKVLADTSMAVRSFSLTENRVSICVSKEPDEIECVGTVGIDRNLRNVTCGDAKGVTVYKTNKLVSMKENTIRARAGFKRNDRRKKEPFWKQRQRRLANRTRQYINRVSRDIVETAARNKTMILMEDLKGIRKLYRRGNGQGKNYRRRMNGWPFYELQRQIEYKAAWIGLPVGFVNPKRTSTRCPGCGKKLQEDAQRRRKMSCTNCGLCMDRDVIAAMNISRKLPIRFGGSRGDIGEAQSDAFESAMPAPRIRIVDMSQSSRTGTR

SEQ ID NO: 49867 - protein, 508 aa, Pyrobaculum sp.
MGGRDMEKVRRAVAVEVENPSPELYAVEEPYRRIVEEVAVYVAERGRLEKEKYNELYRRFRMQYPLPAQLIQQAMNQGVETGKSFLKLKRNGRVHKPHPEVRRVSMRFAKDSWSYRKTAASAAPVKIAVSLPGGRREVWIKPHRRLWFYWWKALRKEADLASTLILKRRRNKWYAVFVFDVVPKREPPAEAVAFDVNENSVAVARLSLLATVDRVVSWNRQYINPVVYSIRTDFGRLVKRYEAVRNAKLDELKRRYPYAGRDDEEKVQNVTDTREFRKFVRRLRERSRKEGRVRRIVREMTRSPAVIITEELGKNPQEEMIGVEEKRVKKRELRHRVKQTPFRKLIRAVEDKAREVGSVVVYVSSYRNSKVCPIHFALLRDGGGWRTLHCSHGHVVDRDVAAVLNMLWKITPEGVVKGIWWDVKEVRKRLRKKVVPKGVVKKANLIIPRPIVHAVWASLRSLKAGDKWPAVLARAAPMTPAQGADEDGARAPPHGAPARGEEVSVVLS

SEQ ID NO: 49868 - protein, 394 aa, Microcystis sp.
MLKAFKYRIYPTSEQSVLLAKSFGCARWFYNYALNLTSETYKQTGKGLSRNEIIKLLPSLKKEYEWLSEVPSQVLQQAALNLSSAFLNFFEGRAKYPNFKKKQNKQSIRFPQHCKLKDDVLVLPKIGEVHCQVSRQPEGTLKSVTVSVNPSGEYFASCLYDDGQDLPQKSSEGKAVGIDVGLTHFAITSDGTKHGNPKYYRKYEQRLARRQKKLSRKQKGSNNRNKARIKVAKVHSKIVRCREDFLHKLSRKLVDENQVIVVENLAVRNMVKNPKLAKSISDAGWGQFCTMLKYKAEWDGKTYIEVDRFFPSSKTCSNCLNRVDSLSLDIRSWQCPKCGENHDRDINAAKNIRDEGLRILAVGHTATASGGRVRPSKSTAFARHLPVNEESPRL

SEQ ID NO: 49869 - protein, 505 aa, Lampropedia sp.
MFLTWHDRSVCMPLWPATTASAKYTAQTRTRPKEKRCPAKPRTTWQPAGSAPRISVVDSSGALAKGLAGCETTRTARLHPIARETPSFRACPVLDTGAGRDSAALVECPLSRFLSGIAIFAWFMDNAQVDIKRAYRFRFYPTPEQASTLARTFGCARFAYNHMLRLRTDAWMQRQERVGYHATSAALTALKKQPEYEWLNEVSSVPVQQALRHLQTAFGHFFAKRARYPQFKHKDGKQSAEYTTSAFKWDGSALKLAKMNAPLNIRWSRPIPKVAKITTVTVSKDTAGRYFVSLLCDDAVAAKPEASGKVGIDLGLTHFAILSTGEKVAAPNTYRKNQAKLAKLQRRLAKKTKGSNRRRKAKLKVAKLHAKVADSRKDFLHKLSTRLINENQVIAIESLSVSNMQKNRCLSKSIADAGWAEFVRQLEYKAHWYGRELVGIDQWYPSSKRCSDCGYTMPKMPLNVRQWTCPECGEHHDRDVNAARNVLAAGLAVSARGEAVSPVAF

SEQ ID NO: 49870 - protein, 344 aa, unknown
  TnpB Polypeptide
MAVLTASRRLYNDALQELVEHDRATGKHMNLFEQDKRHGAKEHPDLPAVVVDTTLKRLHRSFANFFRGRKEGRRVGFPRFKSANAWNTIQFRDAANCLDGNYLKTPKICGGRIRVNVHRPLGGAFKFARLVLRPSGWYVQCVTDYDGERLEPNDKAVGLDMGITYLVADSDGGFIKNPKSFRQSAKKLAHAQKQLAKCRKGSHRRRKAKKQVARVHERIANQRKDRLHKVSRSYVNGYGTIAVEDLKPANMVRNPSLALSISDASWGLLRFFLSYKAESAERRFVAVPPHYTSQKCSRCKELVQKSLSVRTHVCPQCGYVADRDTNAARNILRIGLDETFAEGR

SEQ ID NO: 49871 - protein, 382 aa, unknown
  TnpB Polypeptide
MQTLALKTKLIFKNEEDKRALFEVLESSRLLFNEISPLHFSVNENGYLNCKNGIKNLHDKAYRRVRNKFPEIKSQLVIKAEQAVLSAYRSAKSNKHKITKPCEKKRLSLTLDKRLYSYKNTAFRITTLKKRVEVSLYIYERLTRFLEKYLFSDPTIFCENNDIWICLPFKVSTLVIEPKLALGVDLGCRRFAATSDGRIFLDKDYKKQLRKIRFLKRRLKAKSATRQLKKLRHKERNINKEFRHKLVNVLLKTKANVVVVENLNAKSIKTKKHFKDNVNRRSQVGFAETLDVLTYKAALIGKLVVRVCPKFSSQIDSVTGKREGKRVGCRFYSKSGLVYDADVNASHVLAQRSNLPYLGGNILEGQAIVNSPITGLISRKLT

SEQ ID NO: 49872 - protein, 451 aa, unknown
  TnpB Polypeptide
MVQTYKYRIYPTKSEESRLENHFSMCRHLYNWSLTERDNNYKLWKQAKTIEKSLNSDVKKKVIFSSFLGQIFYRKENEEAVVNILTTIEGIFGIQFSSTVMNVQRNINYNYQQDNLPALKKERPWFKGVHSQVLQDVLWRIDDAYDGFFNEGKGYPKYKKKGQWTSITYPQYKAHPVNNMITVSKIGEVKIVYHRHIPKEASIKTLTIEKDGGKWFACFSFEVIHTHIEPEQDLSKSIGIDAGLIDFYYGSDGSHIEVPKYLRKSEEKLKKLQRRFQKAEKRSKKWYKILKSLQKGHYKVRCQREDFLHKEANRLLKDFDVIIHENLNIQGMKRRPKVKQDENGKYLPNNASAKAGLNKSISDVSWGKFFEILKYKALIAGKTVIAIDPKYTSQICSGCRNVVEKSLSMRTHICPICNLIIPRDYNSAIYIKDLGLESLSMDALEAPAILP

SEQ ID NO: 49873 - protein, 292 aa, Okeania sp.
MRARYKYRIYPTKYQQTKLAQLFGCVRVVWNDSLACCKEKHAQREKKPTNSELQKQFITSAKKTEHREWLSEVSAIPLQQSLNDLNQAYQNFFQSTQGHRKGKPVKPPKFKKRKSKQTARFTKGGFKVGQDKVYLAKIGKLKIVWSRDLPATPSSATVIKDSAHRYFLSFVVEIQPEELPQIDNSVGIDLGIKTFATLSNGEKVDAPKPLKKRINKYRKLSKSLSHKTRGSKRHEKARLRVAKFNGKLKDTRTDFLHKLSTKIIRENQTIVLEDLNVSGMLKNRKLSRANSD

SEQ ID NO: 49874 - protein, 389 aa, Nitrospira sp.
MKHRLTFRAYPTGDQAIQLAQTFGCVRFVWNWALRLKSERFSIDKQKIGYAETDRRLTQLKKRPQTIWLQDVSCVPLQQSLRDLQTAFANFFDKRASYPAFKKKSLRQSANYTKNAFTLDRANRILSFAKIGTLKIRWTRDDIPMPSSVRIVKTTTGKYFVSMVVDVEPIQWPKSNASVGLDFGLVHLATLSTGEKIENIRLAEQEQKRLSMLQRRLAKKQKGSRRRVRARHRIAILHERIRNARMDALHKLSTNLVKRFDMIYMEDLNVRGMTKNHRLARALSDAAIGLAGRLIESKAERYGKTVVHIDRFYPSSKTCSACGQRIETLSLSVREWTCVACGTGHDRDVNAAKNILAVGQTVSAHGAGRRTRRGQPQRATRRRSANHSR

SEQ ID NO: 49875 - protein, 560 aa, unknown
  TnpB Polypeptide
LAPLGDIAELAHHGIHPTFALHQVPVDERILTRARRVHEAYPALILPRVERVHDLDLESLVVEEGDVPVDGDVFAHPFTDERRHLLGQRYRVFHTRYHPFMIPHERKPTALAVGGIESVTICVIKYSYENHIRMVKTIKIPVGDVSFLKEQASRYAEVFNHVISYGLDNGVTNGVELHHKTYNIFSKREDFLPSQLIISARVKATETIKGWLTLKKKRDKQIVKQQEAIARGKHIRHPLKEISRPLSKGILSVRYDARSFTVDFKNRIISFSSIQGRQRIGFNENPYYAQYTNVTHKVCSADLCWSKKSHCFFFHVVLEFPDVPVQSPSKVLGVDLGLNNLAVSSDGKFYLKHHVRDRVSRFRGLKSRLQSKGTPSAKRHLKSAAGKEHRFRRDVNHCVTKQIVGHVVRQGFDTIAIEDLDGIRDRKKELSKSFRARLHSWPFEQFREFLTYKALSVGVGVREVSPRYTSQRCSRCGHVDKSQRDGNLFRCLKCGYREHADLNAAFNISKSGTPRYCLPEVQPKETPGYGRQVCPNRAVDQPAYCSDGDLTVTVDRKPRL

SEQ ID NO: 49876 - protein, 382 aa, Escherichia sp.
MRRFAGACRFVFNRALALQNENHEAGNKYIPYGKMASWLVEWKNATETQWLKDSPSQPLQQSLKDLERAYKNFFRKRAAFPRFKKRGQNDAFRYPQGVKLDQENSRIFLPKLGWMRYRNSRQVTGVVKNVTVSQSCGKWYISIQTESEVSTPVHPSASMVGLDAGVAKLATLSDGTVFEPVNSFQKNQKTPARLQRQLSRKVKFSNNWQKQKRKIQRLHSCIANIRRDYLHKVTTTVSKNHAMIVIEDLKVSNMSKSAAGTVSQPGRNVRAKSGLNRSILDQGWYEMRRQLEYKQLWRGGQVLAVPPAYTSQRCACCGHTAKENRLSQSQFRCQVCGYTANADVNGARNILAAGHAVLACGEMVQSGRSLKQEPTEMIQATA

SEQ ID NO: 49877 - protein, 539 aa, unknown
  TnpB Polypeptide
MGYRKAETNLHVQVVHLHLNAAQRAHCAALRQEAGRCWTALLHAHLASRDGLWLGEAALKAQFKGQFPLHSQTVQALAEKLIANVDTARELRKTDPTAQYPYRDKLYQTVVWKQAAIRRAGPSLRLSNGRGHAPLVLPVPQQYATADICKCELTWRADHYELCLTLDTGVVNPPLDRHVKAAGVDLGEINIAAAVTDAGAGISINGRYLRSVNRLRHKRHTALNVRITKCTPGSRRHKKLLKSKARASATFYRQSRDVLHKASRQLVTFAQAEGVAHLAVGDVRDVAQGIDKGRQHNQRMSQWAHGQFFGYVKDKARQHGITTEYLPEDYSTRTCSVCRHCHNTAPRGRVFTCAGCGAIVSRDGNGAANICSRYRYGAYGQVQVQALTYLRATAVVPRTRPRAVAPLALPCWPPSPPRPRDRPPPDRRVHAARRPGFHPVVTRIHRVPLPSFAIIGYAGPGIWNSIARWPERAARSRPGRPRQGAATTRSQVCFNLIRPSRVRSPRTARRLARPRPPPPDRSRRSYSPGCTVTGRPPTT

SEQ ID NO: 49878 - protein, 389 aa, Prevotella sp.
MKLRYNYRLYPTPLQEQTMLQIAGNNRWLWNHFLRLNIEEYTKSKKFIFRYDLQKLLPGLKKNHLWLKESYAQTLQALTLDFDKALKFKKSGKKFPKFKSKHKNHGSFTYVQGTSVLDNQLYLPKIGNIRVKLSRDLPHYTSVVIYQDGDHWYASFVIEKAEESTKEIKTVVGVDINADLIVCSNGATFITPRPTRKYRNRIKLLQRRIARKKLNSKNRKKARVKYQKLMRHIRNVQHDFAHKISSEIANQADLISMETLDIESMKSNHYSAKAVQDNNWRSILNMIAYKTKLRGTHYVFISQWLPSSKTCSHCGEKKDKLNIKQRVFACDGCGNTESRDLNASKNIMFWGYQSYTGKAIPEAPVDVLLSRLSNDDETNTTTKQELRII

SEQ ID NO: 49879 - protein, 549 aa, unknown
  TnpB Polypeptide
LAQGAAVFSKKVFFFILILINMIRKEESFMHMLRLRLLVDYRTEPIVEKRFRILAHISNQLRKHVKKQLSRLEKDKVYQELKKEYGRLKKLDPDNHKEVAADLARISGLMDGTIKELGLTKSGLEKYASVMQRRYKKNISSHQVQAEVAHILKGLEKVLYGDGKDIHYKKERDFTTIPGKSCSNGVILHFDQDDEKHEVNCYITWNGITIPVRYDLSKADLPGGRNYVNESLSSGKICYCEIKRIWFRSGYKYYVDIYMKGEAPKKVEPGKSVMGIDEGTSTVAAVSGDAVFLEELAPQCVDYNKEITKLQRQIDVSTRKTNPDKFNEDGTCRKRSEWKEKHWTFSKNCLRKKAKLRELYRRKSAYAKCRHENLLNRMIQSASSFVNEPMEFSALAKRSKKTERQDKLSEVKKKDGTVKIVRKYKRKKRFGKSVNDRSPGLFQTRLKQKCVQYGLAYMETDKWKYRASQYDHVLDAYIKVELSRRFKTVAGQVVQRDLYSAFLQSCMGTPEKPDREKCLQLFGQFVKMQAELIMKMKTSGQSRPACFGF

SEQ ID NO: 49880 - protein, 231 aa, Prochloron sp.
LISNNGNYYLCVWNKVASSPAENQGRVVALDPGVRTFITFFSENSVGKIGSGDFSRIQRLCQHLDDLKSKISKAIAGQKRRIPKAARRMVIKIQNLISELHHKTARFLVDNFDVILLPTFETSQMSKKRDRKIRSKTVRNMLTFAHYRFKEFLRFKAQETGKMVVDVCEAYTSKTVSWTGEVLNIGGSKKIKSKVDGQVMDRDINGARGIFLRALGDTPWLRNQLALVSQV

SEQ ID NO: 49881 - protein, 623 aa, unknown
  TnpB Polypeptide
MSKFKEKPIVQPGPQNTPFKTFKIPLKTVLLNQNLLPKINDLVLKINNLTTLTYQFIRLYLLHCYLNNIEVQINDEFIRYSIKTLGVSIERKPPKNSQLKDRLEYFYLTEFQPIFNHQKIDLSNLSHFIANISVQVLTCISNNCQERFISHVRRFINLTAKDIGSNQDLVQFKNDLLSGNSTNPIYNQWKNNFFHVILPNEIKVSVYYDLKCNPLKYLKCMCYMSHILEINGIKTFQFFPLRNDIIPKNIMVDKSSLVDYFYENLNLVEKKKYCMAHLNETKNTIWKQLLNLDHKIFGSKRYTFYYNIQTDGIDCSLLFIRKDLENKPKTSNEFKFSEGTDFPDIENLSDEFRSHFLDPTKVNLVGCDPGKRSLVYLVDDKGTKLQYTAPQRKFESTAKRSQKILELEKIKHGISLIEVDLSKENSKTTDFSKFKSYIFEKNKLNYLTHTFYSDPKWRRMKMRRFVYTKKSEDKFVSRIGQMFGWDGRQVVIGYGNWCQKEQMKHYMPTIGKGLRKLIHRKYCTLTVNEAYTSKRCSNCYRDLNNYIGSIKNFKTGVIEEKSIHRLLVCSGCVSREGKKITFKSRDINAAINILQVTKFYLKHKTRDPNFCLRENYSNMRHSP

SEQ ID NO: 49882 - protein, 287 aa, unknown
  TnpB Polypeptide
MRKLLKSFKTEINPTVEQKIKINKTIGTCRYVYNFYLGHNKVLYDKGEKFMTGKSFSVWLNNEYIPNNPDKIWIKEAYSKAVKKSIEDGCTAFTRFFKHQSAFPNFKRKGKSDVKMYFVKNNPKDCRCERHRLNIPTLGWIRMKEKGYIPTTKDGWNIKSGTVSIKAGRYYVSVLVEIPDAKIANNSNDGIGIDLGLKDLAIVSNGKTYKNINKSARVKKLEKKLRREQRGLSRKYENSKKGESTKLKNSKSHITLTINTLHIHNHLFSPLNDLINKHFVTFFITFA

SEQ ID NO: 49883 - protein, 371 aa, unknown
  TnpB Polypeptide
MKRTVKVKVNPPKDIALRTLKTAKAIFDLHVSIGKEHGTWNKLKLHRLAYRTARDLYPNMPSSLVQTIRDTASEAMKRDKLRTTPTKRLRSGIRFNLRTFSLRGKRVSFSLAGMRWKEEVSVPTFQEPVWTKGVAKAATMTYDGHQFWLNVVFELPIPAKIEGHAVGIDRGMLNLAVTSDGLFFKSKKIRAAQRNALYTKRQLQSQGTRSAARRLTRVSRKEQRRTKDWNHVVSKRVAQLPFAVFILEDLSNIRERVCRRGKHFRTRFHRWPFRQFETFLSYKAEALGKAVTFVDARYTSQKCSSCKTIGERSGGRFSCANCGLRLHADLNAAKNIRDNYLSSLSSAKQASVNTPNAPRRGVSKPRGLSLR

SEQ ID NO: 49884 - protein, 355 aa, unknown
  TnpB Polypeptide
MEQIITYKFKLKNGSSKLNNLSTKVNYVWNYCNEVSHTAIKTNRKWLSEFDLNNLTSGTSKILNLGSSTIQSITETYVKSRNQAKCNKLNWRHSKGSRKSLGWVPFKGNSIRIQDNTIIFMKSKFRFIKTREIVGQYRCGSFVQDSCGDWYVCLVYKVNTKPSINNLSVGIDLGLKSLVTTSDGQVFENPKLTNKYAQRLAMSQRSNNKKRTKRIHRKIARTRKDNLHKISSELTKTYSNIIVGDLNLKSGKQTNDASFRGLIPLLKYKASMLGGNVIEVNEAYSSKTCNVCLDESGPIGLTGLSVREWTCGSCGTIHDRDINGAKNILVFGYKHLKTSNELRTSSNEGSLGGAR

SEQ ID NO: 49885 - protein, 310 aa, Crocosphaera sp.
MKSLLFPQFRSNPLTGWQLKLPKLGKVQINLHRPIPNGFVIKQVRVVKKAMGWFAVISIQSDINLPEIEAPFGHPLGLDVGLSSYLATSDNYIEKGRKFFKSEHRKLKLLQRRLSRKSKGSFNYEKARKRVEKQHNHIAFKRKDYQFKLAHFVCDMGDSIFMEDIDFRTMAKGFLGKHTLDAGFGQFRDILKYVCKIRGKYFGLVDHRGTSQTCPNCRAEMRKTLSDRIHDCPECGYRCDRDVASAQEICNRGIETTTLGLRGKETVCQVEVSGVMSLDPRFRTSKCSIKKYIVLKSPKIIPGQEYFSFH

SEQ ID NO: 49886 - protein, 996 aa, unknown
  TnpB Polypeptide
LVQLTRAWPIEAGSSTQAPTRLDGPTGVGEHQFEMVVGSSTPQVVHRTARICLRTTPAQANRCYRLLRAAGDVWAWLLDSNRDRRQQGDPAMVGYQTLCRQLTSRGGFGELSVVGARSVLQRYSDAWFEAARRHNRGERAGFPRRKRFLVPIRFYNGTFLLDGDRRVRLPVAKGHPELWVRLARPLPYPPDQVRSVTLLHDAGRLWLAVTAAVPVEQHDPDPDQVAGVDLGIIHPYAVVTQDAGLLVSGRAVRAESYLHLQDQQARQARAAGRAPKPGQRGSRRWRRYRRTQQRAEARHRRRVHRAHHQAAGQVIAFALSHQVGTLVVGDPTGITRRNAGRVQNWRLRQWRRTHLLGALRDKAEQAGIRVHLVEERGTSSTCPACRQRVPKPRGRRFSCPHCRFQGRRDLVGATNIAAKLGGGHPSTASPALVEHRRVGIVPARRDRRRHLHDQRRRSCLASGHPTRILAGMGVARRTHPLSCVWRGSSSVAQPGQTPLEEALDPDEGHRRGQDEREGEVDRPPGAPVVGEAAQGGPAGRPHRRRPQDHGRARGRDGHAPGHRLEARRQERARRGQGEQPSLGVDELEGRGAEQPERPRHHRPPGPVAGGDPGRQVEQVGRADHLQGQVDAGHRQEHHPDPGGHGEDQGAHAHGGPGHMARRPAEPEAAPGGQQQRVVRPGGDGADQREAGQAEQLVHPAGGVVGRVMPEVDNGREVPVLYDPVVSSRPQPSGPEWVRAWKPVVAGVDEVFHARFVDYAYPPHVHDAWTVFIVDDGWIRYDLETRHRGAGGERVTILPPHVVHDGRAGAGGGFRKRVLYLSTDVLDERLTGRAVDQPDVSEPALRQAVHALHHALGHPDDALEAEARLALVGDRLRAHLGDPPSGVRDRYSGRLAGDLRDLLDERLFERTTLAQAGRDLGASPSHLVHCFTGSFGIAPHRYVTARRIDAARRRLLDGEPIALVAAGVGFYDQAHFTRQFKRHVGTPPGRYALSTAT

SEQ ID NO: 49887 - protein, 447 aa, Cyanobacteria sp.
MKQVITAKLKLNLSTEQKTLLREVSLCYRDAMNYTSQVAFKNNRTSSANKLQKLVYYDIRDKFRLPAQMACNVCRQVGATYRTLWTKVKQNNQHRKQGYTKKRYKGLDQPPQFISRTCNLNYGRDFSFVREGVSIITLQGRIKVSFSGYQKHLDLIQSGIAKASGAKIFYTSSNKTYYLLVSLEIQKPDIQPSDIKRVSGVDVGQRYLAVETDTKNQTNFYNGKAVVHKASHYQRKRKQVQRKGTRSAKRRLKSLSGRERRFRADINHQIAKSIAKPSSLIGLENLTHLRERTQPRRKSKKASTKQRKANHKQASWSFAELQSFIDYKAVLNNSMAVKVDADYTSQSCPCCGHTSRTNRPNKGLTFHCENCGFDLHADLVGARNIAMRTLLVRQDWVSTGSLSACPSTERSRSADVSPNEAKAMRLSRFMELRWTAETSPNHIAFSD

SEQ ID NO: 49888 - protein, 436 aa, unknown
  TnpB Polypeptide
LFPLIDDYAFKSKNLYNYANYIIRQVFLITTRLSKDKQISIEQQQYLEEINVKVDEYNNKKQELAEQKNKKFKPLAYFGKEHKTVGYDFLEFICAKALDYKALMAQVAQQTLIVLSQNWKSFFTSIQDWSKNKDKYTGMPSLPQYKPKTTGRFNIYFTNQNCSILDNCIKFPKCFGGYKLPTKVKNGLQQVRIVPKNQVYIIEIVYSIKCVEERLDNGKYISIDIGLDNFATIVSNTGMKPVIISGKGLKSENKYYNKLKAHYQSVSKQMNKVNNTNKLDKITLKRNNKVENLIHKASRRVIDIALENDISVIVIGNNKDWKRESEMGSNVNQSFVEIPHQRFIEMVEYKAQNNGIKVILTEESYTSGTSFIDNEMPTTENYNKSRRIKRGLFKSNKGTLINADVNAAYQIMKKVFPNVYTDGIEGIGLCPVRVVI

SEQ ID NO: 49889 - protein, 409 aa, Anaerolineaceae sp.
MKITRAYKTELHLNNQQRTACLKHAGAARFAYNWGLGKKIEAYKLGEKTPSAKDLHRELNLLKKGELSWLYEVSKCAPQEALRNLDKAYANFFRRVKTQKGKKAGFPQFKNKKGGAGSFRLTGAIRIEERLIQLPRLGKLRLKEAGYIPTSGMHVLSATVSEKAGRWYVSVQAEVELPDPSPKSDVVCGVDLGITRLATISDGAVFENPKALKRSLTKIKRLQRVVSRRKKGSANRKKAVQKLAKAHQKVANIRNHSIHQVTSFLAKTKSVVVLENLNVSGMMKNHRLAQSISDVGMYEFRRQLQYKANWYGCKLHFADRFFPSSKTCSSCGTVAAKLSLSQRTFHCATCGFEIDRDLNAAINLSNLFFTTASSAGSHACGEDVRPAFSQADLVEAGTKPQTTPVSMFV

SEQ ID NO: 49890 - protein, 381 aa, unknown
  TnpB Polypeptide
MLRTYKYLLRPTLERARRLDFMLWQSRLVYNAALEQRISTYRGTGQGIGYRAQWAHFREVRRGSSDTLGQINASSLQHLLRRLDKAFAAFFRRLKAGEKPGYPRFKSRNHFKSLEYTYGDGCKLRQNECGRRSFYLQNVGDLRLCCHRAMPAESVIKHAVVKQVGERWYACLMLEAPAPEKRAILTGKQVGVDVGLKSLAALSTGELIENPHWLRQSLAKLGRLQRQASRQVQGSCRQRETYRQVARLHEHVAAQRADYLHKVSHRLVTENDLIAIEDLRLGFMNRNGHLSLASHDAGFGLLRQMLEYKAESAGIQVMPLKPSNTTQACSGCGRLVRKDLSVRVHACPDCGLVLDRDVNAARNILSLALQTPLGRSGQPGT

SEQ ID NO: 49891 - protein, 472 aa, unknown
  TnpB Polypeptide
MPASTQLISDEERGPISPANSDAGVHESEGGKEEFLVRAVRASKKRADAVRLLPSGAQERKLRRLADLSAKLWNELNYERRQQWNGGQRVDLEGTEMKYHEEYKGALGPHNAAAVIAKNNEAWGSFFSLLKAKKEGKLPKHERVSPPGYWKDREEEKRKTIFVVAGDSYAVDEVNHIIKINIGKRKKLLEIPFAGRLRWYGKQGRMEIHYDGAKRAWHAQISVEVGAEETRNKKPARRIVRGERRSIRIAEPRGNEAAGVDLGINILASVVTGGGAWLLYRGSRAKEDFFYLAKEIAEVQSKADIARKSGDTEEFLRQNRRRRRLFRKLTERIAHLYRNMANHLVRSLWELGVSKIYLGYPRDIARERGNKLTSNMWRYKELMRAIELKAQEYGIRVYEVLEYNTSNHCAVHGTEVTRGPRGVVTCPLGHRLHSDLNGALNILKRGVGSIPTTLKKPLSFLVDHSGVAPKGA

SEQ ID NO: 49892 - protein, 213 aa, unknown
  TnpB Polypeptide
LSFLTVTAPFDTGAQVGLDRGIRVLAALSDGTLIPNLRPGSTCAAVVALHARHLDALSKKDAAGHVLNRRDPARIAAGRRLARAKEHEANARRDWLHKKSRDIVNTYDQVAIEDLRARSMTRSAKGTVEAPGTNVRAKAGLNRALLDAGLGMFATLIREKAAHAARSWSALIQGTHRRRVRSADTLRKKVGKERNSFALAAAIRPTRTSMPRA

SEQ ID NO: 49893 - protein, 213 aa, unknown; identical to SEQ ID NO: 49892
  TnpB Polypeptide

SEQ ID NO: 49894 - protein, 422 aa, Halococcus sp.
MKRSNTFDVAPRSSEDAELLHRVLDASASLWNALTYARRQNLADGESVWDVDVASIRGRYKGVLGSAAAKEMQRKSDESWKSFFAAKENGEPTGPPGYWGNEEDGRTLRWYGRCDQYTLETGERSRLEIPIGSDLKDEYGFGYQERLRLEVRGKPKWSGKNGRLELNHDDRTDSFKAIQPVTTDGSRQDSPLADETAALDIGANNIVAASTSTGKQYLYEGRDLFARFRETTREIARLQSKLRNGRYSSHRIRRLYRRRTNRRNHAMDALARGLIERLHADGVATVYVGALTDVLETSWSVEANAKTHNFWAFRRFVERLAHTAEEYGLSIEVRSEAWTSQECPQCGSTDRTTRHKDTLTCECGFEGHADLVASETFLRRQTAVSRPMARPVRFEWDNHDWLEIPHSHESPKEVRTNRSILA

SEQ ID NO: 49895 - protein, 405 aa, unknown
  TnpB Polypeptide
MLVRSLAFRLKDPLPNEAKFLMEDFRLAVNNTIRFGMQTGATSRNSLTKLAYKDFRKEHPNMYSQHLVSAFEVAGSILKNHRRRLRKGFPSQVPFVRRLFMKAENQAYKLDRENGIIDLPIMAGLHIHLRLDMSDYHRRYLDDESLSLGSLTLLPDKVIVTIRKHAPKPYAPASVLSFDTNERSLDGVLAKDYNIEIVVKAEFPEVSVIQDRHHQRRRRLQKKKSHDRRTSRRLCAREGMREHHRIDYQMHEAANAVLSFAEEQKSMIVLEDLTGIKPHKGKKLNRRISMWPRRKLHQIIEYKAAWQGIPVIKVDPRYSSRKCPMCGRIQDSRKGTEFVCGCGWHIDRHINASINLLQTAASEKAAGGLWFSPGAFQHDVVMVLCGPNKAVRPEPNGTSGIRVMA

SEQ ID NO: 49896 - protein, 436 aa, Okeania sp.
MLVYEMKLEGEKVQYEKLDEAIRTGRFVRNSIIKAWIDGQVKSRSDAYKYCKILADNINFPWAKKLNSMARQAHAERAWAAIERFYKNCKAKVPGKKAVRPRDDGSRKGTRTKRGYPKFKKYQVRASVEYKTSGWKLSEDRRYLTLTDKFEVGTFKLWGSRNLHYYQLKQIKRVRIIRRHDGYYAQFLIDHIREEKKELTGKQTGLDVGLNHFYTNSEGNQVDNPRFFRKDERQIKKLQKRLSGTKKGSKNRIKARNRLGREGAGADAGSAHRAPSHLKVSRRRNDWACKEAQHVIESNDLVAIENLKVRNMVKNHHLAKSINDAAWYKFREWLEYFGSIYGVPVIAVEPFNTSQNCSNCGKKVSKTLSTRTHKCPHCGYEADRDENAAINILQSALKQLSTTPGRGESNISGETGLCLDGETQTDKPTRRKRKSG

SEQ ID NO: 49897 - protein, 447 aa, unknown
  TnpB Polypeptide
LVIIYNLAHNGFIPSEIHNLIRIYKIFFLLCVMRLVERHIIRRSDSRYKAVDHACWLAKNLYNAGLYAIKQEFLRSGKWARWMDLNKEFVQNDNPDYRALSANSSNRILKRLDENIKSYFGSIKAWKRDNKKFTGCPKFPRYKDKERGRAILSYAYNQISHKGDVIKLPKKEGLGYVRTRCPEGSVKEVRFVPRPGYYVCEVCYEVADVVPMGDNGRYMSVDLGLGNLATCFSTVSQSFIVNGRPLKSINQYYNKRRASIQSVLEKENRRKSSKRLDRLTLRRNNKVRDYLHKASKRVIRACVENNINTLIVGYNEDWKRGIALGRRTNQSFVCVPHGDFVGMLRYKCMRLGLRFVEVNESHTSKCSSIDGEAVCHHEVYMGSRVRRGLYRSSRDGYLNADINGAVNIMRKAVGDGLGGCLFPADRGFWRNPVRINADKYVSVQTCI

SEQ ID NO: 49898 - protein, 442 aa, unknown
  TnpB Polypeptide
MPPRIFQPWTGVSSPAAIVSSETVPLMPPAPSVFSTRTATSLGPVADQAAPQKRTRAWYSDSMDRTVRVLLRTTPEQSETLWRTAQKFTAVFNAVCALGWRLREGGAYSLQRFCYHENKAAWPELVSDLHIQCLHKAAESLKSSFAIQKKGRKVGCPQSTLCPPRYNRHTFRVDWQQSTVNLSTVAGRMLLPFRLPPYAEYAKDCKVATADLCYRKGKWHLHIVVHCDEAVFVDNHTALGVDLGVCRPAVTSDHRFHGKKHWREVEKRRFRLRRKLQSNGSKSAKRRLRSLAGRSQRFRRDCDHVLSRSILAGLLPGTTVVVENLTNIRTRVKASRGETKRRLHAWSLAQLRGFLEYKAASKGCRVVGTDPRHTSQRCNACGFTCRGNRKSQSQFSCRSCGHQQNADLNAAKNIRDKHLVGWASGPPDGPPSNGLLSQSLLA

SEQ ID NO: 49899 - protein, 517 aa, Anaerolineae sp.
MRRFSAAMRFAYQRLLEGKEESEVLKELSPLFDLNSRYAYGALVKAKMTIASLKELGQSPANVVFGGRKLFEELAKKHLSGKRRDKLLEKWRERRQGLLFAVGQKHSKGNQNLRLVWVDGWLFLRVTIGEKKWVYAKVIRKVKRDRDKWKVLLARLIRAEARGDWFPYTVTLRRKEGKLYAFISFDEELPPVSITKAQGVIGLDLNAVPQHVAWAEASSDGNLVSHGALPIPDLSGKPKKVRDYILWLTAWQVVRLAKEKGKAIALERLRRMPKGERGDGKPALRRKLGNWAYRSLREKIKVLAQREGIEVIEVNPAYTSVIGALKYAPQYLLDKDRAAAFVIARRALGFEEKMPEHYECLLSDGEFLGYAVAYWEEKAAELRARKKGEKNKWKRNAVRGSLEKARKSLQLLRSWMETKESVGGEPVGATCRVVPSQETANRWKEPVRGGPLGSQKAWQVAYAALAESLLGRSFRDLSPLRPVLVLGDWERPAKRLAPDLVQGRDYQHYGGRPGKIH

SEQ ID NO: 49900 - protein, 397 aa, unknown
  TnpB Polypeptide
  misc_feature (382)..(390): Xaa can be any naturally occurring amino acid
MRTGRTVLTHRIELKPNQRQEALFRQCVGAARFAYNWALAEWQRQFEAGEKPHEAALRRQFNAMKPVEFPWILDLPKSVPQQAIKNVGRAYQRFFQKQSKFPRFKRRGVHDSARLDNGPGTFAFDGWRIRLPKIGGVRLREELRFDGKPLSATLSREADRWFISIPVEMERPEPVCESQASVGIDLGVSTALTLSTGEKIDSPKPLKKHLQRMKRRSRWHSRKQKGSANRDKSARKLAKLHARIAHVRQDFLHQTTTDLTRRFGLIGIEDLNVRGMMANDKLSQAISDIGFYEFRRQLEYKAALSGGTVVVVDRWFPSSKTCSACGGSCEAMPLSVRQWTCAHCGTEHDRDVNAALNIERQALATVSWTGSHACGEEGTGRXXXXXXXXXRYAPRPA

SEQ ID NO: 49901 - protein, 412 aa, unknown
  TnpB Polypeptide
MTTKQRAYKFYFEPTPEQRHQLAVEFGNARFVWNRCLELRTKAWEERQERNNYVSLNKQVTAWKRGEFPWLADSSSGALTQCLIDQDKAFQNFFRRVKAGQKPGYPRFKSRYDRQSVRYQLDQRHIASTFSAGEFLKLPKLGYLKIRWSQVPAGIPKMATVSKTPDGRYFVSFACEVAIDVLPLTGVALGLDLGIKDVVVASDGVKSGNPRHLKKQLRHLKKQQRRLSRMQKGSNRRRRQRGKVARIHAHIAAMRSDFLHKTTTALIRRADTLALENLNVGGMMKNHHLAGAIADVGMGEFRRQIEYKAAWYGRKVIIADRFAPTSKTCSHCGSYRKKMPLSVREWTCPDCGTRHDRDVNAAQNIYRFATGGEPGIARGGSLNLSDHRSGTPVEARTDAKKFTEADRRERAA

SEQ ID NO: 49902 - protein, 304 aa, Alicyclobacillus sp.
LNERKKYIPALKQVHSQVLQDVVKRLDKAFQAFFRRVKAGETPGYSRFKSAGRYDSFTYPQGGYSMSGNKLKLSKIGEVKIKLHRLPQGKIKTCTVIVKNGKYYASLSCEVEPNTLPESKETVGIDLGVKHLAMTSDGEFYEHPKFLRESERKLHRKQRAVSRKKKGSARRRKAIRELARLHEHIANQRRDYAHKISRKLVNGYGLIAFENLNVQGMVKNHHLAKSIVDASWNQLVQYTTYKAEEAGRRVVLVDPKNTSQLCSNCGEIVPKKLSERMHHCEHCGYVQDRDINAAQNILKRALAG

SEQ ID NO: 49903 - protein, 391 aa, unknown
  TnpB Polypeptide
MKTIRGYKTELDLNNEQITACKKHAGCARFTYNWGLKRRQEVYKATGRSTWSIELHKELNQLKQSDFPWMYEVSKCAAQEALRDLDNAFRHFFRRWQLKKEGKYRGKLGYPQFKSKKKGLGSFRLTGAIKVFEKAVQLPRLGTLRLKEYEYLPTSGVHILSATVSEHAGHWFVSIQVEEEVPEPTPATGQPLGVDLGIKTLAVCSDERTIENPRALRKNLKRLIRFHRRTSRRKKGSKNREKARKQLARQYYRVGNVRRDILHKATSTITATTKREKKGSQRKQTVRTRPKTIVMEDLNVAGMLKNRKLSRAISDVEMYEFKQQMRYKTQWNGEMLLLADRFYPSTKKCSRCGHVKEQMDLTERVYICEREDCGLVLDRDLNAALNLVALA

SEQ ID NO: 49904 - protein, 263 aa, Erysipelotrichaceae sp.
MAQIKVFRNNDWVWDTVRLSKTDVDYLEKRSRNAEISAPVLEKKHGCWKLRFAVTETAELSKKPISEQKICAVDLGVNTDAVCSVMDSRGTVLARKFIMRGREKDSLSNALHRVSVFQSLHGSHDSGRLWNIAKRRNRNIAHQVAREIMNFAIANECDVIVMEYLDTRGKKRGSKKQKLTMWKHADIQNTVESLAHHYGIRVSHVNARGTSRLAYDGSGRVKRGREDEEEKYPKIRPMTSAYSKAERLTTVIFPPVTTSEPVI

SEQ ID NO: 49905 - protein, 426 aa, unknown
  TnpB Polypeptide
MNKKKIDIGCQQNLLHPDKELLAILEYLCGEANKVFNCSVYYARQIWFKENRFVGKGELCRQMKWNRHFRAMYASSAQQICNGVVESFASFRGLLKRFWDKKLEDKPKPPKYRKKGLFTVSYPKRWLKLDEQGIKVPLGRSVKAWFGLENFYIPLPSNLDWDKIKEIRILPRNGCFYVEYVYQKNPQSITTTPKNIMGIDHGLNNWLTCVTNVGTSFIVDGKHLKSVNQWYNKQIATLKKGQPQGFWSKHLSCLTEKRNRQMRDAVNKAARLVVNHCLENGIGRIVFGWNKGQKKGINIGAKNNQKFVQIPTAKLKERIKQLCQQYGIEFIETEESYTSQASFLDDDFLPKYGEKPTNWKPSGKRVKLRLYQTQNLTLINADCNGAANILKKVAATLGFCLKGVSSGALTTPVRVRLWTLNESPSL

SEQ ID NO: 49906 - protein, 399 aa, Thermoanaerobacter sp.
MEKVVKRAEQIQINRNHEMWKYFDKICFATKNLYNYANYIIRQEFINNNKWIRYRQLNRELKNHETYKNLPAQTAQHTLKLLDRNWKSFFKAIKEWEKDKSKFSGRPRLPKYKKKNGRAIAIFTNQQCKIKSGYLTFPKTNLRLKTMVEGNLKEVRVIPKGNIYIVEIVYERVLINKTFKKPQRIAGIDLGLDNFVTLTNNIGIKPIVINGKVIKSINQYYNKKKAELMSYVGSKGTSRRIEKLTLKRNNKIKDFMHKASKFIVNWCKEHDIDTIVIGYNKGWKQEIELGKVNNQNFVGIPYYQFINMLQYKCEEEGINLILVEEGYTSGCSFLDSEEVCKENYNPKRRITRGLFKSNKGILINADVNAAYNIMVKVFPNAFAEGIEGVGLHPVRQNVA

SEQ ID NO: 49907 - protein, 296 aa, Prochloron sp.
LGKPRFKGKGRYRSFTFPQIKQDCIQGKWIKFPKIGRVKLIQHRFIPDGFKIKTATISRKADGYYVTLSLEDRSIPIFTADIKPTLENTLGIDMGLKDFLVTSEGESIDIPQYYRKSQKRLKVLQKRLSRCQKGSKRRVKAVKAVGKQHKKIADKRKDFHFKTANKILLKSEVIAHEDLNIKGLAKSRLSKSINDAGWGQFLTILSVKAEKAGQLIIVVNPSGTSQDCSNCGEKVPKKLSERVHSCPHCKIVIDRDENAAKNIKNRAVGHSVRSARGVRRDTGTAKREAHTIPLCG

SEQ ID NO: 49908 - protein, 408 aa, unknown
  TnpB Polypeptide
MRTYEYRCRPNKQQEAQLMAVLIASRRLYNDALQELVEHYKATGKHLNLFEQDKRHGAKEHPDLPAVVVDTTLKRLHRSFANFFRGRKEGKRIGFPRFKSADAWNTMQFRDAANCLESSGGISRAEGTLPRGDCLPNGHGNYLKTPKLKTPKICGGRIRVNVHRPLDGVFKFARLVLRPSGWYVQCVTDYDGERLEPSDKAVGLDMGITYLVADSDGGFVRNPKSFRVSASKLAQAQKRLAKCRKGSHRRWKAKKQVARVHERVASQRKDKLHKVSRSYVNGYGTVAVEDLKPANMVRNHSLALSISDASWGLLRFFLAYKAESAGREFVAVPPHYTSQKCSHCKELVQKSLSVRTHICPYCGYVADRDTNAAQNILLAGTPPSLRDAEGLVKTSESSVPLKREAIGL

SEQ ID NO: 49909 - protein, 465 aa, Bacterium sp.
LIRPRQVKLKLSKSQFHHCQQLSKESAKVWNFVKNFFWRTYRKKGIWLSEGSLKRYTKQRFALHSDSIQAVIEKFCGNLSSERTLRKENSSIRYPYKGKSWFCVHWKQKAIKVKNRYIHLSNSKGRQGIVFKLPVYLIGCQPRCVELIWRNGYWLSITLDLGKFDTTTSGDNSKQQNEQLQLKYNTTAVDLGEIHAMTITDGNEAIVISGRQLRSVKRNRNRRVGQLQKLQSRCQKDSRRWQQLQAVKAKVMAECHRRTRDLSHKITRLAVDWCFDHDVSTLVIGDVTGISKNTKSKKRLNKKNRQKISQWSFYQQRQYLQYKCDEIGIETVLEPEHSTSKTCPRCSNKYKPKGRNYHCQACSLKMAVHEVTAERSEHRDVVGACNIRTKHLTGVLSGKDNFDSPTVKYLRIDYPKGESKSSSVAGVNRRKRRKPFRRRLGVPEQLTLLLPTNVGTIQSRMLGKT

SEQ ID NO: 49910 - protein, 361 aa, Escherichia sp.
  misc_feature (254)..(352): Xaa can be any naturally occurring amino acid
VKRLQAFKFQLRPGDQQECEMRRFAGACRFVFNRALALQNENHEAGNKYIPYGKMASWLVEWKNATETQWLKDSPSQPLQQSLKDLERAYKNFFRKRAAFPRFKKRGQNDAFRYPQGVKLDQENSRIFLPKLGWMRYRNSRQVTGVVKNVTVSQSCGKWYISIQTESEVSTPVHPSASMVGLDAGVAKLATLSDGTVFEPVNSFQKNQKTLARLQRQLSRKVKFSNNWQKQKRKIQRLHSRIANIRRDYLHKVXXXXXXXXXXXXXXXXXXXXXXXXXXXXXXXXXXXXXXXXXXXXXXXXXXXXXXXXXXXXXXXXXXXXXXXXXXXXXXXXXXXXXXXXXXXXXXXXXXXQRPSAKTTQ

SEQ ID NO: 49911 - protein, 736 aa, Actinomadura sp.
VQVKLLPTPEQAAALSATLHVCNAAADHASVVAYREFGLATRQVPLHRAVYTELRARGLGAQAAVRAIRKTVDAYAMLRGQIKAGHLGGQGSARRVKAEAKPIRFRPDAAQPFDDRNLSWQYDARTVSIWTVHGRLKGVAFTGSAAHLKTLTAHRRGESGLLQRGGKWFLTATCEVPEAPLDTDPVDWIGVDRGIVNLAATSDGANHDGRGLEKYRRRMARVRAELQAKGTKSAKRKLKKRARRETRHAAHVNHTIAKSVVADAERTGRGIALEDLQGDRDRTRVPRHQRATHSSWPFHQLEAFIGYKARWAGVPVIKVDAHYTSQTCPRCGMVSRRNRPTRDTFCCVVCGLAGPADHIAAVNVRRRARTAWVFVNMPHAAVSPSPGQGLSRAASPALQLQGRVVDRAPNCRRRGRRRGRVRLRWAREDEGRRRPGAARAPGGPRARVLRVQRGLAVGRRRRRVPADVVDRPRRGHGRRARWAVRLDARLAGVPRRARVAAAGARDVPDLRGVPARQVRAGQGVGARHADRDDPRAQGAAGAQLRLDAARGGDVHGLRARGRGGDAAADVRDGPRDVLVAVPPRARHAGDAAPEDRDVGARADAQADPAAAAGAPGEPRRHAEGGRLDGPRLEPVRRPHLAALRRRRRRRDGLAVHRDRGLRAGVRRGLPRVHRAGRHRGAGGRADRGAVAGAARGRAGRGGDRVPGAADRRRPDQRGRRVPARPDGPEGRRGRRE

SEQ ID NO: 49912 - protein, 378 aa, Actinomadura sp.
VQVKLLPTPEQAAALSATLHVCNAAADHASVVAYREFGLATRQVPLHRAVYTELRARGLGAQAAVRAIRKTVDAYAMLRGQIKAGHLGGQGSARRVKAEAKPIRFRPDAAQPFDDRNLSWQYDARTVSIWTVHGRLKGVAFTGSAAHLKTLTAHRRGESGLLQRGGKWFLTATCEVPEAPLDTDPVDWIGVDRGIVNLAATSDGANHDGRGLEKYRRRMARVRAELQAKGTKSAKRKLKKRARRETRHAAHVNHTIAKSVVADAERTGRGIALEDLQGDRDRTRVPRHQRATHSSWPFHQLEAFIGYKARWAGVPVIKVDAHYTSQTCPRCGMVSRRNRPTRDTFCCVVCGLAGPADHIAAVNVRRRARTAWVFVNMP

SEQ ID NO: 49913 - protein, 100 aa, unknown
  TnpB Polypeptide
MVKNHHLAKSISDASWSEFTRMLEYKAGWYGRNLASINRYYPSSQLCSACGHYGEKKALNVRSWLCAKCGAEHDRDINAAININTAGLAEIGLNPKVCQI

SEQ ID NO: 49914 - protein, 372 aa, unknown
  TnpB Polypeptide
MKVIRSTKCSLKFASESKQKQLSIVLAEYGKVVNLFINYFWNNPDAASKTCLLKPVVDIPETWLSARLRKVAAREAIDMVSAAKERWKEKAVMPTHRGNRMYVSCTIADLIPSKNAHEFDAWLHLASIGDKIILDLPIRYHKHFNKQYLSGKRLNSYLITKNYVQFSFEITTAEKRTGTKAIGIDTGINALALLSNGKQYGLDVKKCIERVKRCKHGSNGQKQVRRALKQYIDETVKAIFMEENPDLVVVEQLKNMGKNSKAKRLLAKNIRRSIGIWNWKYWLKRLQEWTELNRVSFRSVSPYYTSQACPRCGHTDRMNRNGEMFACLKCGHTDNADNNAGVNILLRFIMGQYGAHYKQDNLNELGFVPSFS

SEQ ID NO: 49915 - protein, 425 aa, unknown
  TnpB Polypeptide
MKKALKTKIRGLDKSQFKRLRELTHHAKNLYNQTLWTLREAFEATGKYFTYPQMDQAMKPVENLEGEINYRFLKSAVSQQILRRLDKNFKSFFEASEDFKQNPSKYKGQPRPPRFKKSQYDNLIYNTCAFQIKNGEVILDRTKGKELKIPLPLPLIGKTIKQVEIIPKPRSFQAVFVYEENQATYQQVVPNDKVMSIDLGLNNLATCVTNGVIKPFIIDGRRIKSINAYYNKRKAKIQSQLEKSRGRKWSNRLQQLTDWRNAIITDYLHKATAHVVKTCLTHEISKVIVGDVANSLDHINLGKKTNQNFVNLSLGQFIDKLRYKLGQHGIKLKVANESYTSKASFVDGDQMPKKYDKEAKPTYSGKRIKRGLYRSQDGTLVNADANGAYNILRKSESKFSFKKLVQQVGDYVRIWLHPTERVFIK

SEQ ID NO: 49916 - protein, 343 aa, unknown
  TnpB Polypeptide
MYEVSKCAPQEALRDLEKAYKNFFRRVQLKKEGKWKGKLGFPTFKKKSKGIGSFRLTGSIHVFADSIQLPRLGRLRLHEQDYLATSAKVLSATVSEEAGRWFVSVQIEEEQDESDRTAMPAIGVDLGIKTLATLSDGTTFHNPRALKHAQKKLRRLERQKSRRTKGSQNREKTVKHLAKVHARIAHIRKDAAHQLTSYLVKNHALIAIEDVHVAGMLKNHKLAQAVSDSNFGEIRRQLEYKSLWHGTHLVTVDRFYPSSKTCSSCGWVNEKLTLADRTFICEQCGLAIDRDLNAAINLKIVAVSSIDTRNACGQKSTGAFNGMRETVLVEAGTNHLYGLSVKV

SEQ ID NO: 49917 - protein, 253 aa, unknown
  TnpB Polypeptide
VPDSQQDSPLASEEAALNVGANNLIACTTTTGQQYLYEGRDLFDHFRETTDEIARLQSKLREGRYSSNRIRQLYQKRTRRRDHAQEALARDLMERLYTDGVETVYVGDLTDVLSTHWCAEVNAKTHQFWAFRAFIDRLLYAAEEYGIRVEVQSEANTTRTCPVCGEREDTDRDGDVFRCPCGHEAHADLCASRTFLEQQTCELEGGSMARPVRLTWDDHNWSETPHSPERESPNEERTNQSTGNGKVASVGTV

SEQ ID NO: 49918 - protein, 418 aa, Okeania sp.
MRIAYQYKLRPTKTQAEKIDKTLEMLRFQYNYMLAQRFDWWKQNRCSINSCPLICHLPELKDQPTYYSQKQSLPKLKIDRPWYKDIHSQVLQEVPKRVELAFDRWMKSDKSGKRLGKPRFKGLNQYKTFVYPQFKQHWFVNNQVKLSKIGDVKVIVHRPLPDGFMIKTVSVTRKSNGYFVTFSLEDQTVPEIKPDIKRGKIVGIDVGLIDFVVTSDNESIPAPKYLRKAVSVCGSMTIGKLCVSKCKLKSAQRKVSRRKKGSKRRQKAIKQLAKKHRKVADTRKEFHFKTANNLLSNYDIVAVEKLNIKGMAKSKLAKSVHDAGWGQFNQILTDKAGRAGQLIVKVKPHGTSTECSNCGHKVKKTLAQRKHNCPQCNLSIGRDLNAAINIKNRAKALIKNLLPTTRFEGYEGVQLSLF

SEQ ID NO: 49919 - protein, 343 aa, Okeania sp.
LKSRYKYRIYPNHIQISKLNQLFGCCRYVWNQSLAYCNQLYAGGQKKPSYVDLTKQFITQAKKELLWLKDVASTPLQQSLKDLDQAYKNFFDSRTGKRKGIQVKPPRFKQRKSRQTARFVGANYKICQDKIYLPKVGNIKIFWSRKLPSQPSSVTIIKDSSNRYFASFVVETCSEHLPKSGNSIGIDLGINTFATLSNGEKFKLSLPLKKNLKKLGKFQRKFAKTQLGSKRREKARVRVAKLHAKVKDISYGMLRKRTDFLHKLSTDLVKKYDTIVLEDLNVSGMVSYGMLRKRNRKLAKAISDLGWREFRTLTEAKCEKYGREFGTISRWEPTSQKCSKLWF

SEQ ID NO: 49920 - protein, 432 aa, Okeania sp.
MRTAYQYKLRPNKKQLATIELWLELLRQQYNYRLGERFSWWDENRCPVNACPLVIPIPQLRDNPDYYSQKRDLVNTKDKFPSYKLIHSQVLQDCIKRVKLAFDRWFKKDKNGHKLGKPRFKGIGRYRSFTYPQIKQDCMEENKINLPKIGKVKLIKHRLLPDDFQIKTVTISRKADGYYITLSLEDKSVPASTTEVEPTLKNTLGIDMGLKEFLVTSQGESVPIPQYYRKSQQRLKTQKKRLSRKKKGSKRWLKAIKAVAKQHKKAADKRKDFHFKTANELLLKAEVIAHVDAERGVPEANLNIKGQALTRLSKSIKDAGWGQFLTILTVKAGNAGQKTIGVNPKNTSQDCSSCGEKVKKELNIRTHSCPHCGIVIDRDLFAFAQHPVGKHDLGNAAINIKNRAVGHSVLKARGARCNSRAGKREAHTIAQA

SEQ ID NO: 49921 - protein, 239 aa, Bacillus sp.
VKFAKSREVKGRMLSATVRRNPSGKYIVSLLVETDVQELPKTGSSVGIDVGLKDFAILSNGNTYKNPKFFHTLEKKLVEAQRILSRRIKGSSNWNKQRMKVARIHEHITNARKDYLDKISTELIKNHDVIGIEDLQVSNMLKNGKLAKAISEVSWSQFRNMLEYKARWYGKQVVVVSKTFASSQLCSNCGHQNKDVKNLNLREWDCPSCGTHHDRDVNAGLNLRNEAIRLLTVGTTGRA

SEQ ID NO: 49922 - protein, 605 aa, unknown
  TnpB Polypeptide
VPWFEPHHRDLFDEIPPPTAAAADVAREGGWWATRTWSELPQPSTAAPLRPRVGNLEQFKGSGPYAREHWITDMVAQEKRNLVGGCGRGKKRTADGADAPPPEPTYLRTIKTRVRFVGTPEERNRQIRAIKSWMGSARYTYNAALRGVRAGMPLKKEELRERYVTAKTQPNNGMKPTTDDGWARKAARDDRKKAVRESNGYEVGELIRAKPWLKFTPNVIRDGAVLDLVDAENAMQKKAQLARQRGDSDFQKWTLAQKDRSDPSGWTIKVQHRYIEKVETLPRPTAKAVTTDAHNPNAKRRNWTRITMFSRSKCADGKPLGSIWLSEDFLGKFGPISHDCRLTRDRRGKFHLLVPVATTLPPTKPEAQREPCALDPGVRTFQAVHSRAGHGTYGDGDVERVLEPICTKLAALQSVRDRAVAKWEAGQWTVDGPQETSWLPGTEHGALASYRHVVRRLNDRMEKLRKRLSNLVDELHKRVALDLCTKFDTVLIPTFDTSKMAKRDQEGGGRRKLLPKTVRALLGWAHYRFRAKLKHKALMLGKEVIVVGESYTTKGCSRCGEITEIGGSKTFKCKNVTCGFCAPRDPKSARDILTKHILPLTTMGG

SEQ ID NO: 49923 - protein, 339 aa, unknown
  TnpB Polypeptide
MRLTDKYRLRPTKSQRRQLEQALELCRFVYNETLATRKHAYEQRGETLCYYQTAKLLPFWRADKPDLARVHSQVLQNAMIRVDLAFQAFFRRVKAGEKPGYPRFKSFGCYDSLTYPRYGNGVKLDGDRLRLSKIGSVQVRLHRPIEGEIKTVTIQRSADKWYACFSCGVDKQALEPTPNVVEVGLGLKTFAVMSDGTHIQRQRWMWRNNFAHQASRKLVNANQLIALEKLDIQTMMRDGKRVINRNIADAAWGQFVQHTTYKAESAGRSVVLVNARGATQACSGCGQAVPKDLSVRVHDCPHCGLKIDRDLNAALNILARGLARIRPRPVEAPGFSRGE

SEQ ID NO: 49924 - protein, 371 aa, Clostridium sp.
MRTLTIRLYPTKEQEILFKKHIGTARYIYNWGLALNNGLYKVEKKKYSTTELGKMLTQYKKECIWLNEVSNATLKDSLRSLDKAYSNFYKKYSKLPKFKSKKHCKLSFYSRYEKIYFKDTVVNLEKIGKVKYKSSYDMDLTEISKFSNPHISYNGRCWILTVGIENTIEEVNLTNEVIGIDLGIKHLAICSNGVEFKNINKTKVIKNLEKRLHKLQRKISKKYEMNKKGKRYVKTSNIIKLEKRIKKLHLKLKNIRKDYILKSTTSIVKNKPCRVVMEDLNISGMMKNKHLSKAIQQQNLYEFIRQMKYKCEWLGVEFIQVSRFYPSSKTCSCCGRIKKDLKLSDRTYICSECGLVIDRDLNASINLANCR

SEQ ID NO: 49925 - protein, 408 aa, Klebsiella sp.
MLIQKAYKYRLNPTDAQAQRLRQMCGCARFVWNYALAETQRILEAGQKLPSAFELNKMLTGWKKLPELAFLSDAYTDNLQQKLKDLHGAWEWCFDKKLAAKAPVFKHKSHGNDSVRFVNFDKYCQLQHRRVKLPSGLGWVTFRQSRAVVGKIKNATVSQHAGGWYISFQVEMVVEQPTHPSTSAVGLDAGICKLVTLSDGTVFEPVNSFKQNQSRLARLQRQLARKVKFSANWKKQKAKISRLHAHITNIRRDYLHKVTTTISKNHAMIVIEDLKVSNMAKSAAGTADEPGRNVTAKSGLNRAILDQGWYEMRRQLEYKQRWRGGEVLAVNPAYTSQKCACCGHTSKENRQSQATFVCVACGYEANADVNGACNILAAGHAVLACGGTVQSVRPMKQEPGTERSVVTH

SEQ ID NO: 49926 - protein, 379 aa, unknown
  TnpB Polypeptide
MNLIYRSYQFRLYPNDEQIGIIQKIFGCTRLVYNYYLEKRKESGLTCLSAIRNLTNLAQTYPFLEEIDSCSLRCALFDLDDAFKRYNRKQGDYPKFKGKYTAKRSYRTNYISNVYKGRKYENIKIDLKKRVISLPKLGEVKIRGYRNLQSLEARIISATVSQLANGKYYVSIAVEEKHPVVKIIPKKIIGIDLGLKDVVITSDGEKIKNNKIIEKYEKRIKRKQRELARRKKGSSNYYKTKQKIAILYQKLKNARKYFIHKTTKKLVLENDIIISENLNVKSLIEGKKLSKQLSDVSLSRLCSVLAYKATYFGKRYIKIDRYYPSSQECSHCGYKNIKVKNLAVRTWRCPSCGYGHDRDINASINILFEGLKIYMEELV

SEQ ID NO: 49927 - protein, 448 aa, Halorubrum sp.
VKRTNTFAVRPLSDDGEQVLRNVLDASAALWNEINYQRLMRYNDEDGFEGDVWDADTGALEGKYKDVLGASTAQQVIRKNSEAWTGFFELKDQYHDEPNTSITDHPSPPGFRGNKDDGRQLKTVIRNTSYSIEWGERSRLEIIIGDELRDRHNSPGSRLRLEVVGDPNWPEYESQGRLDLWYDETDDSFRASQPVTVSDETRATPLADETAALDIGANNLVACTTTTGEHYLYGGRTLFQRFRKTGQEIARLQSKLEDGQYSSERIRRLYRKRTRRRDHAQEALCRDLLDQLYEEGVDTVYLGDVTDVLETHWSADTNAKTHNFWAFKKFTDRLACTAEEYGISVEIRSEAWTSQECPDCGSTERTTRHQDTLTCPCGFEGHADLTASRTFLERQTDEAVRPMARPVRFEWDDHEWSETAYSPVRDSPKEQRTNRSTSDGKLASGETA

SEQ ID NO: 49928 - protein, 313 aa, unknown
  TnpB Polypeptide
LALANVQQNLRAAYNKFFKQGTGFPNFKKKGVKDSYTTNNQKGTVATTQNSVKLPKIGHINAKFSDKINGLIKSATISRTPSGKYFVSLLVETITEPLPKTQSNIGIDLGLTDFIVLSSGTKVANPKFLSKLQDKLTREQKILAKRREVAKADQRKLSESRNYQKQKLKVAKVYERISNCRRDFLHKLSFNIIKNHDVIAIEDLNIKGMVKNRKLAKAISDSSWSSFTTMLSYKAEWYGKTLVKIDRWYPSSKTCSNCSHLLTKAELPLSVRTWNCPNCLQKNDRDLNASINILHQGLILAKQSKTVGAPGLA

SEQ ID NO: 49929 - protein, 233 aa, unknown
  TnpB Polypeptide
MVQVNVPDKEVVKKEDVKVLGIDRGVKNIAVLSNNLFFNSKHLREVKGRYQYLKRKLQHLGTRSAHRKLKKLSGRERRFVRDVNHLISKNIVSLPYDVFALEALNPAYMKQKDQYKAIRKMLGSWSPSELQKFIEYKAKDAGKTVIYVNPKYTSQKCSKCSYVDKNNRHGSVFKCQNCGFELNADLNASRNIEVLGRSEYFRLMSTSQSLRFNESPLTGGVENSNKLRSFSEE

SEQ ID NO: 49930 - protein, 449 aa, unknown
  TnpB Polypeptide
MRCSEKVRLDPTRRTKPELRLLGDRVSRLWNAANYKCRQAFLAKTGVPVGATLEALMKDEPDYRQLPSDIAQEVLKKLSEAWKSYFELRQKWTGGKLKDKPGLPAYRKDRKTGERPFDLIPIKHSRSYSVDPRDAHIVLPRDRRRASGGGRLHVSYRGRVRFPGKMGRAEVTWDKVRRRWYMAWSVTVEDLKPREGGLRAAIDLGVRISVSLSVEGQPQALHFEAREALKDWDWLGREIAKEQAHIAGTRGPAREDRAPSSRAIARLHQLRRLRVEHAMRCMAKRIAEECDHLGVTQVFMGWPKNILRDAKYGSSAWAGRIHAFWSFDKVLGYLAAALGNFGIAAARVGERGSSSTCPTCNSGEVVRNPRWSLRCRSCGERMHSDQAGSRNILRQQVADAGFGEVPGADRDGLEASPRTVTLRWDTHLWRERFVNPGREESLPEFKKAA

SEQ ID NO: 49931 - protein, 478 aa, Caldilineaceae sp.
VTEAVSAETLHGFLTGRLQMPTRTATSDSTTPASVIRAERYRVRFDSPMQAALCAQIAGACRYVWNHMLADCQGRYRMWKAYRIGPRPSVSFFTLGKRFTALRHDPDHAWLKALPFHAVRYTLKYLADAYTRAFDSTDAGLPHFKSRHRTTPGFTLPDNVRLDGTRLYIPKVGWVRLAGNQGRYLGCPAKQVRLLKEGDARHPRWYAHVFHEVPADRLPPPAATGALGVDRNVGQATDSDGRVYAVPDTANLEANIKRKQRKADKARERSRRNGQPLSHRGRRICGQLSKLRRKQKRKRQSAAHRHSRRMADTAHTVVVEDLDTKAMTQSAKGTVEAPGRNVKQKAGLNREILKSNWGLLERQLAYKAGELVQVDPAYTSQTCAVCQHVDKANRKTQALFQCTACGHTANADHNAARNILARGLTLVRPARGVGASARRGAFPSGTPTTREPGRQGDPPPARAGPDGPAPVPGVNPSV

SEQ ID NO: 49932 - protein, 374 aa, unknown
  TnpB Polypeptide
MKQITYKYRLFPTKKQQSFLNKALEECCWLYNHFLEKRKNSWEKDKKGISNFDQCNSIPALKKERPSLSSVHSQVLQNVATRIDLAFKAFFRRVKAGKKKVGYPRFKGQGWYDSITYPQVGFMIEKNTLNLSKIGSIKIKLHRLIVGDIKTCTIRKQNNKWYACLSCKIEPKPLRKSKKAVGIDVGISTFATFSTKERIENPHFFKADQKTLAKAQRKLFKQAKKSPERKKAKKIIARIHERIANRRYNFCHQEARKIVNKFGIICIENLSINKIQRGNFRSINRSISDVAWGQFAQCLSYKAENAGRQVIKVNPAFTSQDCSRCGYRQVKKLSDRIHHCSSCGLKIDRDLNASLNILTLGMQSIGSIRRSPLL

SEQ ID NO: 49933 - protein, 390 aa, unknown
  TnpB Polypeptide
MLRATKIRIYPTEEQARFLKGQFGAVRFVYNKALHIKSHMYKVRGRSLSPKKDIKPLLAVGKRSRKYRWLKEYDSIALQQAVINLHAAFGRFFDQKLQSGYPRFKRKHDKQSSYHCVGVKLLDGAIKIPKLEAIKARVHREISGTVKSITVSLSRTGKFYASILVDDGRASPALVNIVDTVTGIDLGLTNFAIQSSGKKEINPRFVKRAEKNLKRKQRQLSRKQKGSRNRSKARLRVAKCHEKVANSRADFQHKFSRTLIDENQAVIVETLTSANMLKNRRLAKHIADASWHSFVQKLEYKAEERGRHVVKIDQWYASSKTCNCCGYKVSEMSLSVRVWNCPECGRKDINRDLNAALNIRDKGILELKAAGQVVTACGGLRNSRQERVAA

SEQ ID NO: 49934 - protein, 423 aa, Streptomyces sp.
VSQGILVKRQFGHRARLVLSPARTLKTDGQAHATRTLWNLLHAWWRMMPKEKRSLANADAAIRQAREGIDFLAVLPAQAAQAVLKTYFRAWKNCWEGPADAPNFKGRIRTVMSVDIPQGRDLNITRVHRRWGMVSIPKVGRVRFRWTKDLPVGKRADTENRITGARLVKDALGRHIAFRVQTLEAEPAPRQGPEVGIDMGFSVPRALSDGTVYEHGEWLTGKEKVRLLHLEQRAAQRKRHRRPGERASRRLQHTYDRIAGLRAKAKRRAMDWQHQTTTRIARTYGTVGVEALTITNMVKSAKGTVEEPGTNVAQKAGLNRSIHAEAWGRTVTLPAYKTARRGGTLAKVPAPGTSRRCSACGLTTSGSRESRAVFVCKNPDCGWSGNADHNGARNVLHLYRRGLALVPAAGRAVVRRAKPAAAR

SEQ ID NO: 49935 - protein, 403 aa, Actinomadura sp.
MARQVKRAFKYRFYPTDEQAAELSRTFGCVRLVYNKALAERTRAWESERRRVSYGQCSAVLTAWKKTPELGFLNEVSSVPLQQALRHLQAAFTGFFAGRANYPRFKARKKSRASAEYTASAFRWRDGELTLAKMAEPLAIVWSRPLPDGAQPSTVTISRDAAGRWFCSILCTDTITRLDPVEAAVGVDAGITSLVTLSTGDKITNPRHERRDRERLTKAQKDLARKANGSANRDKARTRVARIHARIADRRRDFLHELSTRLVHENQVVVIEDLNIAGMVRNHRLARAISDAAWHQLRTMLEYKTDWYGRELVVVDRWYPSTKTCSRCGATREGMPLDVREWECEVCGARHDRDVNAARNIVAAGLAVSACGAGVRPQRDSSRMGQSAMKQETQPATVGTPRL

SEQ ID NO: 49936 - protein, 560 aa, Planktothrix sp.
  misc_feature (229)..(229): Xaa can be any naturally occurring amino acid
MIVLEFKAKGKTTQYAAIDEAIRTAQFVRNKCIRFWMDNRGVGQKELYRHNTALRAEYPFVKALNSHACQVAVERSYTSIARFYDNCKKQVSGKKGYPKFKKNNRSVEYKISGWSLSETRKQITFTDKKGIGKLKLKGTWNLNYYQIEQIKRVRLVRRADGYYVQFLIKTDIKVEVKPTGKTIGLDVGLKEFYTDSNGHTEPNPRFYRTGEKRLKFYQRRVSRKKKGSXVERSYTSIARFYDNCKKQVSGKKGYPKFKKNNRSVEYKISGWSLSETRKQITFTDKKGIGKLKLKGTWNLNYYQIEQIKRVRLVRRADGYYVQFLIKTDVKVEVKPTGKTIGLDVGLKEFYTDSNGHTEPNPRFYRTGEKRLKFYQRRVSRKKKGSANRKKAINKLGRTHLNISRKREERAKRIVRCVIKSNDLVAYEDLRVKNLVKNHCLAKSINDAGWYQFRKWLEYFGVKFGRITVAVNPSYTSQNCSSCGTIVKKSLSTRTHICQCGFVLDRDWNAAINILNLALGTVGHTGTWIFNPNASGDLASTVLGVNLLQQAESLNEESSSL

SEQ ID NO: 49937 - protein, 212 aa, Archaeon sp.
VGIDVGINPLVALSNKDKKSPPKFLLQSEHKLAKEQRKLSRKQIGSHNRNKQRIKVAKVHRHVRQQRADFHQNLSRKLVEKYDFIAFEDLKIKNMMRNHHLAKSISDVSWNMLQSFTAYKAEWAGKVVTFVNPKNTSQECSSCGKIVKKNLNIKIHHCPYCGLVLDRHVNAAINILHRGLKKIGLGYTDLMPVRGLALDTPMTQEANEFSRG

SEQ ID NO: 49938 - protein, 234 aa, unknown
  TnpB Polypeptide
MRESLRFEGKITCATVSCTAGCWFVSISVETDLSIVPCENQAWTVGVDLGVKRLATFSDGRFVDGPKPLRSVLRRLRRLSRGLSRKTKGSRNRDKAKLWVARCHARVAGIRSDALHKLTTNLVRTYGRIVIEDLNVKGMGRNRRLSRAIADMGFGKFRRQLEYKQALSESEVLVADRWFPSSRLCTRCNALNEGLTLNDRIFNCDGCGHREDRDLNAARNLERYPGLRGNRYAS

SEQ ID NO: 49939 - protein, 431 aa, unknown
  TnpB Polypeptide
MYGCQQNRVKPNSDSIPVLEYICRIANNLTNCGIYLARQTFFNENRIIGKFDLEKSLKQQENYKALYSQCSQQTLRSVAESFKSFKKLRKCFFNGEIDKHPKLPTYREKGGLAVATYPKQALQLKNDHVRVALGKTAKSQLGKKDFFLPFPSNLDFKQIKELRILPRNQQFYLEWVYEKPEVETTVNSTEALGIDPGIDNWLTCVSSLGESFIIDGRKIKSLNQNDNRRVSSLKEGKPQGYWDFELARITEKRNRQIRDAVNKAARIVIDYCLSKNIGMIVFGWNQGQRQGINIGKKNNQNFVQIPTAKLKNRIQQLAEEHGIEFVETEESYTSKASFLDRDELPVFGGEKPTNWKPSGKRVTRGCYQDSQGRIVNADAQAAANILRKVEIQLNISLAKVSRAVLTLPSKLYIWNSKRITRSITALEGAVC

SEQ ID NO: 49940 - protein, 382 aa, Escherichia sp.
MRRFAGACRFVFNRALALQNENHEAGNKYIPYGKMASWLVEWKNATETQWLKDSPSQPLQQSLKDLERAYKNFFRKRAAFPRFKKRGQNDAFRYPQGVKLDQENSRIFLPKLGWMRYRNSRQVTGVVKNVTVSQSCGKWYISIQTESEVSTPVHPSASMVGLDAGVAKLATLSDGTVFEPVNSFQKNQKTLARLQRQLSRKVKFSNNWQKQKRKIQRLHSCIANIRRDYLHKVTTTVSKNHAMIVIEDLKVSNMSKSAAGTVSQPGRNVRAKSGLNRSILDQGWYEMRRQLEYKQLWRGGQVLAVPPAYTSQRCACCGHTAKENRLSQSKFRCQVCGYTANADVNGARNILAAGHAVLACGEMVQSGRSLKQEPTEMIQATA

SEQ ID NO: 49941 - protein, 397 aa, unknown
  TnpB Polypeptide
LYSCQQILLYPDSELKAVLEFLCNQANSLTNCGIYYARQLYFKAGKIIGKYDLEAEYKNSRHFKALHSQAAQQVLRSVSESFESFKKLKQAFNRGEITDKPRPPHYRKSGGFALVSYPKQALKLVDNQIRIPLGKQVKCWFGLDCFFVPMPSNLKFEDIKELRILPRNRCFYVEFVYKTNVIEVDVDPNNVLGIDPGLSNWLTCVSNVGTSFIVDGRHVKSLNRWYNKQVSTLKEDKPQGFWSNRLAAITEKRNRQMRDAINKAARLVVNHCIENRIGTIIFGWNQRQKQGVELGKTNQSLVQIPTARLKERIRQLCQQYGIRFVETEEANTSAASFLDGDSLPKHGEKPANWRASGKRVKRGLYRTANNWYVNCDAHYALQKFFNKQQQQRRYFLT

SEQ ID NO: 49942 - protein, 390 aa, Deinococcus sp.
MEDTALKAFRYRLSPTKAQTALLETTLVLCQRLYNGMLEERKGAYTKAGKTISAYDQMKSLPEVKEALPEYQGVNAQVLQDVAKRLEKAYKGFFRRLKVGQKAGFPRFRGRDRYDSFTYPQPSQNSVTADGKHVYLPKIGNVRIKLHRPFAGKLKTLAVKREGSEWYAVLTCEVPRAEPLPPTNSSVGIDVGVTWFFVTSDGEHCENHKLFQASSKKLRVAQRSFARKPKKHSNRRKKAGARVAKLYRKTARQRLQLHHEEAKKLVVAHDFICHEDLNMKGLGQGNLSKQIHDVGWGQFFQILASKAEWAGKRVVAVDPRFTSQRCRVCGHTERGNRASQAHFKCLSCGHTENADVNAAKNILAQGLRFVAQRVSTETACHEKPSALAVG

SEQ ID NO: 49943 - protein, 455 aa, Deinococcus sp.
LCIIFLFVKITLTAKLKLRHSPEQKIALDAVTLAYRDALNYTSGIAFAHNKLSAGMRLQTLVYEDLRAKFGLPSQMACNAPRQVATSYKVQWTKLRQDQAARASGRSKRRYRGLDTPPKFVSRTLTYNFGRDFSWKKDQQVSVQTLDGRIVMPFEGWNKHLGYIADGAKVGGARLYYQRSKKQYYLLVSLEIDLPDPQPSDHKSVVGVDVGQRYHAVTTDTRNHSQFFSGKAINHKKEGFARVHQSLQRKGTRSATRRLVAFSGRERRFIADRNHSLSAQILKTYPQAVIGLENLKDIRDRTEGRSHPKASKTARRARRRRSQWSFAELQTFIAYKAGLVGSMAIPVDAHYTSQQCVKCGHTSRANRPGNGLMFVCEVCRSTVHSDLLGARNVTLRTLAVRQDWTATGALSVRPGRPQSADPQAGSAGRDVSDVEAKAERLQRYSELRWNPDTSP

SEQ ID NO: 49944 - protein, 412 aa, Anabaena sp.
VIFLYKCQQNLIQPDKSLKTILEFICSQSHRLTNCGIYYARQIFFKTGKIIKKFDLINEYKNNKHYQALHSQAAQQTLLSVFESFKSFKALNSKYRKGELEDKPRLPKYRKSGLVAISYPKQALKIVEGQIQIPLGTTINRWFSLKNFLLPMSSNLNCDDIKELRIVPRNRCFYVEFVYQSSEIEKQQISPDRCLGIDTGIGNWLTCVSNVGTSFIIDGRHLKSVNQFYNKQIATIKQNKPQGFWSKRLAAITEKRNRRMHDAVNKAARLVIDNCLKHGIGTLVFGWNKGQRQEVNLGTKTNQTFVQIPTAKLKNRISQLCEHYGIEFVETEESYTSKASFLDNDFLPKYGEKPVTWKESGKRVKRGLYHTANNILRKVKTTLGLNLDGVYRGALTTPLRVRFWASSESPRL

SEQ ID NO: 49945 - protein, 387 aa, Oceanobacillus sp.
VNEVLVNKAYKFRIYPNKEQAILIAKTIGCSRFVFNHFLVKWKNAYVETGNGLTYNTCSSQLTQLKKELVWLKEVDSIAIQSSLKNLADSYIRFFKKQNKAPRFKSKKNNVQSYTTKHTNGNIAIRGNKIRLPRLGLVKFAKSREVEGRILNATIRRNPSGKYFISILAEAEVQKLPKTGSTVGVDVGIKDFAILSTGEVFGNPRWFRTLEKKLAVAQRVLSRRQQAALKRKCKLDEAKNVQKQKRKVARIHEKIVNARQDYLQKLSTAIIKNHDVIGIEDLQVSNMLKNHKLAKAISEASWSQFRTMFAYKAEWYGKEVVVVSKTFASSQLCSNCGYRNKDVKNLSLREWDCPACGIHHDRDINAGQNLKKEAIRLLTVGTTGLAY

SEQ ID NO: 49946 - protein, 294 aa, Cyanothece sp.
MTERAYKFRFYPTTEQKNLWRRTIGCVRLVYNKALAVRTEGWYERQERIGYSQTSSLLTEWKKQEDLEFLSEVSCVPLQQCLRHLQTAFTNFWAKRAKYPNFKKKRNGGSAEFTKSAFKWRDGKLFLAKCQEPLNIVWSRFLPEDSKPSTVTVRLDPSGRWFVSILVKDSIIKPLPKTGKKIGIDVGITSLITTSDGEKVANPQQFNRLYKKLRRKQKALSRKTKGSNNRYKASLEVAKVHAQIKDARTDFLHKLTTKLVQDNDLIAIEDLAIRNMVKNHKLARSISDASWGEF

SEQ ID NO: 49947 - protein, 706 aa, Cyanothece sp.
MTERAYKFRFYPTTEQKNLWRRTIGCVRLVYNKALAVRTEGWYERQERIGYSQTSSLLTEWKKQEDLEFLSEVSCVPLQQCLRHLQTAFTNFWAKRAKYPNFKKKRNGGSAEFTKSAFKWRDGKLFLAKCQEPLNIVWSRFLPEDSKPSTVTVRLDPSGRWFVSILVKDSIIKPLPKTGKKIGIDVGITSLITTSDGEKVANPQQFNRLYKKLRRKQKALSRKTKGSNNRYKASLEVAKVHAQIKDARTDFLHKLTTKLVQDNDLIAIEDLAIRNMVKNHKLARSISDASWGEFKFFPDYNFMTSPLSWTELEALTDFKIDPINGPTNSQARSRLFGGSESDIRVILYRDNHAWCPYCQKVWLWLEEKQIPYRIEKVTMFCYGTKEQWYKRKVPSGMLPAIELDGKIITESDDILIALEQIFGVLNQGMKDPQVIPLRQLERLLFRAWCSWLCYPTRSVQQEQHNREQFIKVVAMVEDALSRHHGPYFLEEFGTVDVIFTPYVERMNASLYYYKGYSLREENPHLAAWFDAMESRSTYRGTQSDFHTHAHDLPPQMGGCYENGEPQMLINKARVDQGPWFGLPDVAYREPETSRSEALQRVLKHRTNIIRVNPSDNNLVDQALRCALTQMMTGQKCTPPQGADIALRYLRDRINVPRDMSIYAAKRLREALETTASLAGDRQGSPIPLNHRRDQDPANFRGVAPLL

SEQ ID NO: 49948 - protein, 364 aa, unknown
  TnpB Polypeptide
MALKAHKIALRATDGQRSWFAQQCGYARVAFNYGLSDFKDGLSKDEWRSARTLRKRFNAEKREKFEWCGACDQRAAAYAFENLGDAITRWRKGQNGFPQYKKRSHRQSYTVEGAKVEVKGKHIRLPKIGRIRMFEALRFEGEIRKVTISRKAQRWFVSILVETGTPNVPRDTRGLPVVGIDVGINTLATLDNGTKYHNPRPLKSLERKLKREQRKLSKKVFRSNNWYKQKRQVERIHYRIACIRADAHHKATTYIVRSASGIGIETLKITNMLKNRNLAKALSDAALGGFLEKLKSKAKVLGIPIIAAPQFFASSQTCSRCGDKKTDLSLSERQYHCQRCGFRADRDVNAALNLRPLAVGSAER

SEQ ID NO: 49949 - protein, 369 aa, unknown
  TnpB Polypeptide
LKIHKGYKFKLEPTEEQKIKINKTLGCCRFVYNSMLDRRIKGYKRRGESMSYIDTQNLLPKMKQYLPWLAEVDSQALKYSCRQLNDAYKGFFKNGRGFPNFKRKRGEEAYTTTNPKGIKVDDKYIQLPTLGKVRYRKSCNIEGKICKATIRRSASGKYFVSILCEVEVVPLPVTDTVIGLDVGIKSFAVDSNGNEHPNHKYLQKAEAKLKREQKKLSRKKKGSANWEKQRIKVARCYEKVTNKRKDTLHKLSSALVKENQIICVEDLNIKGMVRNHSLAKSISDAAWGEFFRQLEYKSSWAGRVVVKVSTYYPSSQTCSCCGYQNKEVKNLNVRYWVCSQCGTSHDRDKNAAENILKKGMDMLAVPASS

SEQ ID NO: 49950 - protein, 372 aa, unknown
  TnpB Polypeptide
MLKTYKYRLFTTKKQTTKLVQTLEECRWLYNHFLEERKTSWEQEKKSFNYHSQAVSIVKLKQDRQTLSDVHSQVLQNVAIRIDLAFKAFFRRVKAGEKTGYPRFKSKGCYDSITFPQTGFEITDNGLNLSKIGTLKIKLHRQPEGTIKTCTIRRSATGKWYVSFSCITEAKPLPKSDKAVGIDVGLTSFVTFSDGGKIDNPHFFRKDEKDLAKVQRKLSKAEKGSPERKKRRKAVAKVHERISNRRNNFCHQEARKIVNQYGVICIEDLSVNQMVHNRCLSKSISDAAWSRFAQYLSYKAESADRALVRVNPAYTTQTCSKCGHREAKKLSDRVHHCSCCGFVCDRDHNASLNILALGTQRLGFALEAPSNL

SEQ ID NO: 49951 - protein, 544 aa, Desulfurella sp.
MIKSVLFTSKYYNKTKGEDVFAVLKRTTEIKNNLSECIYANRHLLLVSDGIKKLNALYSSVNLYNDETAENPTKDPLILSWNIQKEHQMLVDKYKNALNKRLQNFKVRLQSEMIIERYKKDTKYAKKGDTKRFEIKFKSTKLTKFVKYLVYLELDKDILPQLKNEGITALYEYYKTKPYFARIVNLAKNIQTRILNKLKLIKFTETSSLLLDHTVNKARIDYDNENTLYKYWFVFRMKNGREFRLPLQINGDYHNETRKPKAKEFVIYPSAKGNKINIATVYEAKKPEFKPYSKSIGMDLNLKNNFATLSDGYIVDYDRNYMKRIVSNLKELDQIGYQNLTAKQLKKLKKIYRQLDWYVSYLIYSLLNYLEKNSITDLVIEDLLLSGKFGINEEFDIKYSRLSKLLHLSNVKNKLITQAEKRGIRVHITPSHYTSQTCPVCGHISRSNRKTQEDFECENCGHKANADLNASKNILLRFVSDVLKTNLHNTDDYGRLTPKKLNKWTIKNILNRYYEGIRQCCITPFVPDPLGGGNTEFIKNANNV

SEQ ID NO: 49952 - protein, 375 aa, unknown
  TnpB Polypeptide
MKCYRFRIYPSKTQEKQMNTHLWLAKNLWNDLLEHSKTTYQNFDKFPTKSTFAAMTKDSGLHSQVAQEIGFRVEKGIWRYVKLRKAGDRKAGFPRFRSIDRIKSLHYSQSGFSVDQKLKVTPFGEIPIVQHRQINGKIKTLSLKKETSDKWFACFAVEETPTIKASNGKPKVGIDLGLKILATLSDETIIKNPRHLKKHADHLASLQQLLSRKKKGSRNRWKAKREVALAYEKVVNTRTDFLHKATTNLVNSYSLIALEKLASQEMSEQNFGKSINDAGWGMFANMLAYKAESAGCQVVFVDPKNTTQECSCCHQIVNKNLTERTHECPSCGLTMDRDLNAAHNILARATQGHWGSNAFGDVPQGTSLKEEAHAL

SEQ ID NO: 49953 - protein, 331 aa, Paenibacillus sp.
MANTYIRTVNKLTKQAVASGTFPKLTSKTVHANLPSAVKNQLIRDAKSIFKKANKLKKLPILKKRVYYVNNQNYSIGNRSISFPVVIEGKVQRLVLPARLSARDRDILYKGKLGLLRVVQKSAKWFVQVSVECPTEQANGDIIMGVDLGIKVPAVIVTSSGKTKFCGNGRKNKYIRRKYHSHRRKLGKLKKLAAIRKHGNKESRYMKDQNHKISRQIVNIAIQENVSLIKVEDLKDIRKTTSKSRKNNKNLHHWSFYQLQRFIEYKAAISGIKVAQVNPAFTSQTCPSCDNRNKTTDRTYQCNCGYTAHRDRVGAINILRQPLADGNSLSA

SEQ ID NO: 49954 - protein, 386 aa, Acrocarpospora sp.
VSDRQSLRQGFRVALAPTPEQRRRLGRHAGLSRVVENFCLERVKAALDQREAEKSYGVADKDLAPVPWSAPALERAWRAAHPDRYPWFLDEGLSSRVPKEACRVRAAGFKNFFDSRNGKRKGKKAGFPDWRKRKHGSRFRYDADRARPESDRLVRLPGIGKVRALEGMSWLTGRIADGRARLLGATVKEVAGRWWVSFQLEIDRSDIGRRRTVASDAPACGIDVGVKRFATIVDDDGTVTEIYAPKPLKTALRKLRKANKALSRKAHGSSNRAEAVKRLGKVHLEIASQRGDFLHKTTTRLARTKRAIAVETLNVAGMVKNRRRDQRPRVRGVLPPPRVQERLVRLERVGGRPLVPVVAPVWRLRCGQHRSDAHRPRMDMWLRARA

SEQ ID NO: 49955 - protein, 381 aa, Mycobacterium sp.
MALAEQCRHARFVWNRAVEQQQHWQPGRRAPGYNEQCAQLTTARAEHEWLAAGSQTVQQQALRDFAQAMRNYFNGTHRRPTWRKAGTHEGFRQVGFKARHLKRLNRRQGQVWIPKIGWVWFRWTRAIPATVKSYRVTLDRSGRWHIAFAVIPEPVSGPGDGSVVGVDRGVAVSVALSNGELLRAPGLSVGEARRLRRLQRRLARAQRGSRRRTGTKRAIARWRVRETDRRRDWVEKTTTDLARRFETIRVEDLNARAMTRSTRGTRECPGTNVAQKRGLNREISRQGWGLVAARLKHEVKGRLEFVPAAYTSQRCSHRGHVAPENRKSQAVFQCVACGAGPCHADVNAARNIAAGRAVTARGDLGTGRSANREPQLCSPAA

SEQ ID NO: 49956 - protein, 367 aa, Lachnospiraceae sp.
MNQAFRFRIYPTKEQELLLAKTFGCCRFLYNQMLNAKIEEYKKTGKMLRNTPAMYKKEYPFLKEVDSLALANVQLHLERAYRNFFGNPAAGFPKFKSKHRNKNSYTTNMVNGNIQVDGQRLKLPKLKWIRMKKHREIPEYCCLKSVTVSREPSGKYYASLLCEAPDCENQTAGKTYGDARILGIDYAMHGMAVFSEETGEINAGYYRKSEKKLAWEQRKLSRCVKGSQNYLRQRRRLALCHEKIRNQRRDFLHKLSRKIADRYDVAAVEDINMKAMSRCMHFGKSVLDNSYGKFREMLEYKLRRQGKRLVKVDRFFPSSKKCCKCGAVKKELKLSERIYICPCGNRMDRDLNAAINIREEARRMLCA

SEQ ID NO: 49957 - protein, 374 aa, unknown
  TnpB Polypeptide
MKIRQKFRMYPNKEQERILNQWIGCARFVWNRFLEKNNERYKNEKKFVFYNEMNAQLTQLKGVEEFAWLKDAESTSLQQKLRDLEKALKDSSPKKKNPKKYPHFKAKKTDESGVRITNLKGHFQDGKIHLPKINTLFKAVFHEPLKGKPSSVTIIKDRCGCWFVSYVVEWNCDIEQIQPSDVKNCVGLDLGVKSFAISSDGEIFESPKYLRKSEKKLKKLQKRHSKKHKNSKNREKARKRLAKQHKRVANKRKNFIKQTASSIAKTNDVVVCEDLNVRGMLKNHHLAKSISDSGFGMFLLELEWQCKKRGKIFHKVSRWYPSSKTCNCCGYVNKNLTLNEREWVCPQCNSVLDRDYNASLNILEQGLRDLKISL

SEQ ID NO: 49958 - protein, 362 aa, unknown
  TnpB Polypeptide
MKSRIIGSKEALDNFQFVTINGRVLFNEKERVVRIARAYSQVVKSAIKPLFDGKSVDELTKEFYNILPNYIYLETALKQARTITDGLLDREDEKGKIRHARIRKFWFGSRGNKSDKGNRNIKFHVLEYHVLIKVKDPWGKWVYGKAYFGKEYLPLLHELEELAERKEEGYGAVISFKHYPMIHLQIPLWLYLKYFSSLKPNGYGLVAGFDLNSDRLNVVVVNKEGSIVTTKTWWYSEVVSHGFPKGKAMALRLNALSQALNFLSRVGVDYVVFEDLFLVKNRRFTKSKSGNRKITRFAKRQMLIHGVIKALRLGFNVILVNPKGTTNSEEHDRVMREKGFDRHTASAYLIALKGLGMLNDIK

SEQ ID NO: 49959 - protein, 153 aa, Crenarchaeota sp.
VAVAVQRREAIVLEDIRGIRALYQKGNGQGRKYRGRMNGWSFGEAQRQIEYKARWIGLPIIHLSRRETRGSSMTCPRCGERLQSDKRLQRKLWCGKCRIVLDRDRVAAVNLSRGGRVRFARSRPPIVEAQGGVAEAVKGNPTPTVIPGSMLRS

SEQ ID NO: 49960 - protein, 286 aa, Burkholderia sp.
MILVYRYRVKSLNGLLNKQSRAVNYVWNFCNDTQKHALKWSKKWPTGFDLNVLTTGSSKALGIHSGTVNATCEQYAKSRSQHRRPYLRYRGRKSLGWVPLKGRDLKREGDAFRFAGNTFRVFNSRPLPEGKIKDGSNFAQDARGNWFLNIVIEMPDVQARPIRSGVGIDLGLKDFATLSTGEKLPNDQFGRRAAEKLAKAQRARKHKRHIAKLHAKVANARADFQHKLALACGSKDSTTRPKGIAGLRVREWACSGCGVVHDRDINAALNILRCGRASPGVGITCL

SEQ ID NO: 49961 - protein, 465 aa, unknown
  TnpB Polypeptide
MTQRTTTPLISSSGQVLSRAVTFQFALDPNVEQRIIFAKCAGARRYTVNHHLARVKANLDARSTEREALSECGESPEPSTPSLSWSAFSFINEFNAWKNGEAEDSPVNEDGSCGLAWRHELPGDVFECASVDAAQALENFAASRRGKRSGSPVGFPRFQAKAKVTPSFRLRNRATPGRAPSSQPIRFSGPSHLRLPKFGPVKLFGSTRKVRRMIDAGRFHVYSVTLTQRAGGWTVSLTGVATEFHQAERSRANRHALPVGVDRGIISLCVAADANGIPFERFEGVKTLKQAHASLKAANQTLARTKPGSKGRQRARARLAKTHRKVANSRRHLVHQTSKALVDRCQVLVIEDLNVAGMVKNRHLARSISDAAMGELSRQLHYKARWHGVEVRVADRFFPSSKTCSGCGEVKTNLGLSTRTYSCEVCGLVIDRDLNAAINLARWRPKEPSEVSLLDSTPALFLSTA

SEQ ID NO: 49962 - protein, 111 aa, unknown
  TnpB Polypeptide
LVSKDPSFYKITMVSDRGMKCLWGRKISYLLFAEFLSILEWMAGSADTTIVKIDRWAPSNKTYRVGGTVNADLTLKPSSWTCEFCHTMMDRDTNAAINIKRMGLTKLGIPA

SEQ ID NO: 49963 - protein, 301 aa, unknown
  TnpB Polypeptide
LEGPPPVKAKSETGELLHALGTGRVGLDIGPQTLAYSANKVVGLLELAEGAQDLQKELRRVNRAMDRSRRATNPGMYTKDGQIIRKSKLPPELRTIYGGRKWYKSKRYRTLEIYRRYLYRKQADLRRERHRQLANQLLAAGSEFYVEDMRWRALARKSRKPRQNKKGKFLSRKRFGRSIANKSPGSFLSILEQKVRAQGGSFKRIITWKAKASQFHHMTGQYKKKKLFQRTDALEDGSRVQRDLYSAFLIQHTNETLDEFDVQLCKKDYANFLRMHNEVMESLASVGKRLPSSMGIRRKTA

SEQ ID NO: 49964 - protein, 329 aa, unknown
  TnpB Polypeptide
MYLTIKQQVKHLSKEDYLTIKELCHTAKNLANEAIYNVRQYYFTEGEFLKYEKNYTLLKNSPNYKALNSNMAQQILKEVDGSFKSFFGLLKLTKQGKYAFRDCKLPHYLPKDGYATLVIGFVRLNGNKLILPFSNNFKKTHKAVEITIPPVLLDKKVKEIRIIPKAGARFFEIQYTYESECIQRNLNKNNALALDLGINNLVTAVSNSGKTFIIDGRKLKSINQWFNKENARLQSIKDKQHFGKKTTNRQKAIARDRNNKVNDYMSKVARKVIDYCVANDIGTLVVGYNETFQRSSKIGKQNKPEFCEHFLWQAAQQTEISVRTEQYRI

SEQ ID NO: 49965 - protein, 421 aa, Rhodothermaceae sp.
MPVAACKAGTPRRSYVTVRYRLRGKKAIYRYLNELAGANRYLWNAALAHIKEDFTETGKSNTSYVSLCGWYKQHKETSAPWLSAYPAAATRTGLKDLADAFTQFFKKVRRFPKFKKKAKTKKSFQIDVSGGSRFTEQGYFRLKRGLFVKMMGRERVHRYVNPIAKSARIFEEHGHWYMAVQYKVDALEYDADETGVGVDRNVGQIAVNAGQMYLLTDVLKRFSRIVQLQRRLAKQKKRSNRWKKTKKMIARHERKIARIRKNDLRHIAKLITSISTLVFLEDLKTKGMTKSAKGTIEEPGKHVKQKAGLNREILRTAWATLERFLKERGYVYKVNPAYTSQTCSACGNRAKENRKSQSEYSCSECGFELNADINAAMNIWASGMASMNGRGAYVRPVLVRQDRQQVTKRQNEHEGLRHQCI

SEQ ID NO: 49966 - protein, 387 aa, Streptomyces sp.
VRRTYKFLLRPTARQEQALREMLRDHCSLYNAALQERRDAWRHSSKTSIRYGQQSAQLKEIRAFDPERQGRWSFSSQQATLRRLHKAFAGFFRRTKAGDAPGYPRFKGVGHFDTVEFPKDGDGCRWDSTPHDARTRVRLQGVGHVRVHQHRAVRGRVKTISVKREGRRWYVVLAFDDVPVEPLPATGAITGIDMGVTHFLTTSEGEHVVNPRFLGAMADRLADAQRVLDTFPKHARKRSKKHREAARKVAKLHAKVRRQRLDHHHKTALALVRAYDVIGHEKLNTAGMSKAPAPKPDPGRPGVFLPNGAAAKAGLNRSILDAGWGLFLAILANKAESAGRRVIAVNARNTSRTCPLADTSPRRIAPPRPSSPASVAGSSRTLTTLAQ

SEQ ID NO: 49967 - protein, 423 aa, Streptomyces sp.
VLGSVAGVKLVMQVKLLPTPLQAAALEATLRACNEAATWVAQVAFEQDVKNNFALRRLAYVEVKARWNLGAQVAQHVIKKTCDAYAAIKANLKAGNLGRPGSKRYRKAMGKPIVFRSEGAQPYDDRMLSWQIAERRVSIWTVRGRVKDVAFTASPEQLATLALHRRGESDLVCRDGMWFLMATCEVPETPPNTDPVDFLGIDLGIVNIVTTSDGEIMAGRELNRSRARERLLRTKLRKKNTPSAERRLKKRRRKETRRAKDINHKIAKHLVAEAERTGRGIALEDLTGIRERVRLRKPQRAIHSSWSFAQLGAFIAYKARRAGVPVVYVDPAYTSRTCAECGHIDRANRVSQAWFACRNCGVVAHADRNGSRNIRARAWELWRRGASSTAPAPPPRQRGGAGRKPGITASDARCASPAPSGAE

SEQ ID NO: 49968 - protein, 399 aa, Streptomyces sp.
MTTCVKRAFKYRFRPTEAQAAELSRTFGCVRKVYNMALAARTEAWALRHERVNYNATSAMLTAWKKSEELAFLNDVSSVPLQQSLRHLQTAFTNFFAKRAKYPRFKSRKKSRKSAEYTTSAFRFRDGKLTLAKMADPLNIVWSRPLPKEAKPSTVTVSQDSAGRWFVSLLCEDPSVKPLPATDAKVGIDAGLNHLVTLSTGEKVTNPRNERRDRAHLAKAQRDLSRKAKGDGANRAKARQRVARIHARIADRRRDMLHKLTTRLVRENQTIVIENLAVRNMMKNSRLARAISDASWSTLRSMLEYKAAWYGREVVTVDRWFPSSKLCSHCGALAAGMPLHVRTWACDNCGTTHDRDVNAAKILLAAGLAVSVCGAGVRPQRRSPGGQSATKQKTSQREP

SEQ ID NO: 49969 - protein, 347 aa, Burkholderia sp.
MILVYRYRVKSLNGLLNKQSRAVNYVWNFCNDTQKHALKWSKKWPTGFDLNVLTTGSSKALGIHSGTVNATCEQYAKSRSQHRRPYLRYRGRKSLGWVPLKGRDLKREGDAFRFAGHTFRVFSSRPLPDGKIKDGTNFAQDARGNWFLNIVIEMPDVPARPIRSGVGIDLGLKDFATLSTGEKLPNDRFGRRAAEKLAKAQRARKHKRHIAKLHAKVANARADFQHKLALELVRRFDYIAVGNVSAAKLARTRMAKSVYDAAWSSFRDKLRYKAMAHGATFEEVDESGSTQSCSACGSQDSTTRPKGIAGLRIREWTCSGCGVVHDRDTNAALNILRCGRASPVVGI

SEQ ID NO: 49970 - protein, 661 aa, unknown
  TnpB Polypeptide
MTSKKKTKIKKKNTKIKKSTITMNHFFNNNISKIIDELGKTSKNTFNHYLFCYKYFLLYKNKVYDEVFIDTVKNKTFDKDIINNLIDVKFKTYFDLFQKDFNKYVLNNDILYQHIKNLKLDIDNVNFMNTYTNLIANCILVDKIDISSPNLLFLYEENIYSILYGFYYYKYCDVKNGLINKKPISVAFDDNFKKHVMKTEKPIKFITVTNKKDILNNYLKYKDQNKDEDKEDNNLQSEQNIIGKLVYSTIKFKKTSSDIINNTMNKTYQAIKSYYALKELGKKASKPKYIKEQFYSIIFCGKTIKDFIDKKKNKENNEENNKENKNDNINMNNNTAKKIKNKDKIKLSYGKDIKHNWFEYFNEELESSTPLLLIRKPSILKDKNIKLKQIEIIKVAKNIYKVHYKFDKEKTEIKDENSVKLSEIASIDLGMVNLMTIHDPSGKQRILKGGHLICINEYYNKKIAETQSKRDKEINEKRKEYFDNEMKLLNDMRLRKLKGKMNEIVSKLKELYSHKKLIVIGYNEGWKNKVNMGNKNNRKFYEIPYAKLISKMQNAFEATTKIEVINESYTSICDALGNEEVKKHDMYKGNRIKRGLFSSSVGKLINADLNGAINILRKYAENKYNKIKGEGLCNPERIKLTNKSKMNLTKSQDQQVIHKSV

SEQ ID NO: 49971 - protein, 422 aa, Actinomadura sp.
LWGVTSAVVKRAFKYRFHPTPAQAAELVRTFGCVRKVYNLALAVRAEAWSRHRERIGYNATSAMLTAWKRTDELAYLNEVSSVPLQQTLRHLQAAFTNFFAGRARHPRFKSKRRSRASAEYTASAFRYRDGRLTLAKMDRPLDIVWSRPLPDGAAPSTVTVSRDRAGRWFVSLVCEDPGVRPFPVTGTAVGVDLGLDRLVTLSTGEKILNPRHERRDRTRLARAQRELTRRTRGSANRRRAALRVARVHARIADRRRDFLHKLTTRLVRENQTIAVEDLAVRNMVRNRRLARGVSDAAWREARSMLEYKAAWYGREVVVVDRFLPSSRLCSVCGALRGEMSLDVRVWRCGCGAVHDRDVNAARNILAAGLAVSACGAGVRPQRESSRAGRSAVKQETLRRERRESPCLRGGGSQPVNLTVLP

SEQ ID NO: 49972 - protein, 372 aa, Marinithermofilum sp.
MMRTYKFKLEPKKGQIEKIEWTLSLCRWLYNSMLEQRKFAYKRRGITLTYHKQAIELPELKKEIPEFKEIHSQVLQDVAKRLDKAFQAFFRRVQHGEKPGYPRFQGKNRYDSFTYPQLGFKIEGKFLKLSKIGNVRIKLHRQIEGKIKTCSIKRKNGKYYACFSCEVEAKPASTNKRVGVDLGVKHLAVSSDEEYFDHPKYLRKSERKLKWLQRMVSRRKKGSNRWRKAALMLAKCHEYIANQRKDAAHKISRYLVDNYDLIAFEDLNIRGMVKNHHLAKSIVDAGWRMLVQFTAYKAEWAGKQVIAVDPRNTSQVCSECGRIVKKTLKERTHRCPCGYVADRDVNAARNILHKAIGYVPKPRYEQLELNLF

SEQ ID NO: 49973 - protein, 239 aa, unknown
  TnpB Polypeptide
VLQDVALRLDKAYGAFFVGLRRYPCFRRRGRYDSFTYDYTGFSLRGDRVRLSMIGAVKIVVHRPLLGRVKRLTVIRDIDQWFAAILVEGHPGIEQSGEGEVGVDVGVSNVVALSDGTVVENPHFLDCSLERIKTLQVRLSRKKRGSRNREKAKHSLAKAWRKVGRQRDDFAHKLSHELAEKNNLIAFEDLRIQNMVKNHSIASAIMDASWGKLRKLTASKAERRGGRVILVDPRGTSQK

SEQ ID NO: 49974 - protein, 193 aa, Oscillatoriales sp.
SGQAIGLDVGLSDFYTDSFGLTVENPRFLRQGERRLKQAQRCVSRRVKRSNNRGKARVILGKRHLKISRQRKDHAVKLARCVLTSNDVVAYEDLRIKNMVKNHCLAKSINDISWYQFRSWLEYLGKVFGKITVAVLPNGTSQECSSCGAIIKKSLSTRTHACRCGCVLDRDHNAARNILSRGLATVGHTGASC

SEQ ID NO: 49975 - protein, 220 aa, Bacillus sp.
ILTIGWTRLKEYGYIPTNATVKSGTVYQRAGRYYVSILCEVKEVKPNSILNAVGIGIDLGIKDFAVRSDGKTHKNINKTVQVKKIEKRLKREQRSLSRKFENIRKRGEQPVTNKRANINKNILRVQKLHARLANIRLAYVKSIVNDVVKTKPTFITVEDLNVKGMMKNKHLSKAVAQQCFYAFKTWLSTKCREYGIELRQVDRFYPSSKICSCCGQKSRI

SEQ ID NO: 49976 - protein, 409 aa, Methylobacterium sp.
VIARGFRYKLEPLPEQEALFRQFAGVCRLVYNLALEQKATWGRKHRLGYVAQAADLTRLRAEFDWVRAVYVSCQQQALRDLDRAFGNFFAGRTAFPRPRKRGVDDSFRFPGREVAVKSLNGKWSAVRLPKIGWVKFRDTRPMRGDLKNVTVRLDASGWYVAFTREIAHEAPAPSLEVVGIDRGVATTLALSTGDMLTLPASLERIEVLKRKAQRIVARRKRGSNRRRRAQARVARLQARQARIRRDFHHRAALDIARRYGVAVLEDLNTRGMTASARGTVTEPGRNVRQKAGLNRAILAAGWHLFATILTDKMEERGGQVVIVPARFTSQTCAACGVVDARSRESQARFICIGCGHTDHADVNAAITIERRWNTPLLDVEGVHQQPCEASTGRDLTVSENPRRSRRGRC

SEQ ID NO: 49977 - protein, 485 aa, unknown
  TnpB Polypeptide
MSQKVRIDGVKHVGASVFLGVDHCGNPCWTRNPERVMVWLCDGWRTRFNQRREQRPHNVPVKDEAGGIIDWVKEPLGGPNVAELLSDREARLRCSWMAGIPAPILSSTDRIESVEWFAGLKRRKTIGGRVPGFKSRHRGLGFVCWRNASKTGNALFHRTGRKSGVVVIAGMNPTRWRKPGEKLYWRIVIHVRVSQPIRPYTSVHVDWTHRTLVFVNMPLPLPRTGNGMVGLDRGCVHTLASSDGIFMDMPKPSKAELKRLKYLQRRMARQDRTNEARGGRIAKFESKRRRKTLSEFNALNSRIIRRRNDWIEKTTTRLAKANILIAMEDLDVQAMTKRPKPRPDPANPGRYLHNGAKAKAGLDRSILSNDWSRLRKRLKDKMDANGGNLVIVPAAYTSQACHKCGHVAKGNRESQAVFHCVKCGYRANADVNAAENILSRALSETGGDTASDVEEPQWRFREASTPSTQAGSSFGVRAVKGIPRL

SEQ ID NO: 49978 - protein, 401 aa, unknown
  TnpB Polypeptide
VFKAYKYRIYPTNSQKELIAKHIGSARFVYNLALETKNTAYLGSKTNFSCFDLIKQLPDLKKECPWLKEVNSQSIQQAIINMDIAFKQFFKGSGFPRFKSKHQGKQSFPVPQNVIVDHDKSELIIPKFKKKGIKINLHREIMGEIKSATISVTPTGKYFASILVDTNTDAPTKASINEQTTIGLDLGIKDFAITSDGEVFDNPKHLREAMDRLKFVQRKYSKHKGKRTKKRLTQLHEKVANKRKDFLHKLSTQLIRENQTICLETLAAKNMVKNHNLAQAISDASWSTFVSMLEYKADWHGNNILRIGTFAPSSKTCSCCGKLNKELELKDREWTCGGCGTVHDRDINAAVNIKSFALKKIFSGTERKNQEELPTLVGVLTPEAQPIASGVGGSFTDVLPS

SEQ ID NO: 49979 - protein, 328 aa, Clostridium sp.
LPLYTSLSYCILFTNIIIIIVKGVDIIEITITSKIQIYPTNEQIDILNNTMFQIRKALNYISKYIFNNNCLNQKKINEDTYYYLRETYGLKSQMAQSCIKTTIAKYKTNKSNGHDFTLVHFKNLEYDIVWNRDYSIKSDIFSINSLQGRLKIPYETKGMEKYFDGSYSFGTAKLVFKFNKYFLYIPMTKDYPQTTPFEINKIVGIDLGINFLATIYDSYGKTTFYNGRHIKAKRGHYKILRKQLQQCGSKSARRKIKSIGSRENRYVNDINHTITKALVDKYGANTLFVLEDLTNVRNTTEKVNINNRYVSVSWTSINLGSCLNIRLK

SEQ ID NO: 49980 - protein, 264 aa, Clostridium sp.
IFNNNCLNQKKINEDTYYYLRETYGLKSQMAQSCIKTTIAKYKTNKSNGHDFTLVHFKNLEYDIVWNRDYSIKSDIFSINSLQGRLKIPYETKGMEKYFDGSYSFGTAKLVFKFNKYFLYIPMTKDYPQTTPFEINKIVGIDLGINFLATIYDSYGKTTFYNGRHIKAKRGHYKILRKQLQQCGSKSARRKIKSIGSRENRYVNDINHTITKALVDKYGANTLFVLEDLTNVRNTTEKVNINNRYVSVSWTSINLGSCLNIRLK

SEQ ID NO: 49981 - protein, 522 aa, Nitriliruptoraceae sp.
MMDTMISEAAAERGHVSRAVEVVLDPSPSQQRWLRSYVGSMRAAYNWALVEVRDNLDVRRVERDRGVHEDELTLALLWSGFGLAKRWRAVRDEVHPWHRAVSIHAFETGLNNAALALENFSESRSGKRRGRRVGFPRFKNRHSRQAVTFVELADGIDHRHWINPGTREHVRLMLPRRAGDGTWERRHTRPRSEQLAGRDRRSEVAWLHTHQSDAVREVWRLCETGRVKVQALTIKFEGGRWKAVFRLRLLDGSRRLRNPGEPVRHHGGAVGVDLGLKHLVTLDRPIEGLTDERGHVPNPRVLERHLTRLRRLDRAIARCEKGSKNRAKLLRRREKLHGKIAATRKLVLHELSRRLAGGFDVVCVEDLNVAGMAARKGLRNGRSVAEASMGELVRQLGYKTDDRRAALVKVGRFYPSSQICSKCATRTKLAPWQRIYDCGSCGLVLDRDVNAARNIRAEGQRLMREQQQVASIRGETQNGAPRSGETEPAQLSCVGGHGSSEAATVPASPPRAGSRDLSVPAA

SEQ ID NO: 49982 - protein, 416 aa, Lactobacillus sp.
MNPAFFVIFVEFSGFAFFALLYFCLKGGETMLKGIKLRLYPNKLQQDQLWQMFGNDRFVWNQMLAMMNERYKNNKKLPFLSKFKLDCLLKPLKQEYPFLKNSDSSSLQVVDASLNQAWKNFFSDKTGKVGKPRFHSRKYLKYSYTGKSVIQVIGKRYLKMPKLGYIKTSKTKVLKDTKIKRYTVVLEPTGKYYLSLQVEARPVEKFNQTGKSVGIDVGLADLAILSNGLKYPSFDSSYYEKKAVCWQKKYSRRRNLAKRLCLQDKYRKVLCPRNLDSFSNWKKAQKTKAVYQAKVAFQRKDYLHKLTTHLVKQYDVIVIEDLKVKNLQKNHHLAKSIANASWSIFRQMLEYKCQWYGKKLIAVDPKNTSRICSKCGYNSGEKPLDIREWTCPKCKTHHDRDINAAINILNKAKPVL

SEQ ID NO: 49983 - protein, 526 aa, unknown
  TnpB Polypeptide
MPKNRHRKETAFQNTVTRSVFLYGEPNTGKRSVLEHMVSAFTELVNRDIRLLDSTPGIFLQLVKNDKKDPEMRKLEKTLRVPGYNSAFCQNAFDQAVTHLSNRLDSIRMEMNPMFGIFARSKVLFAMSVSGSSREQMVSVLASIGQKFHKDCIREIQGLTDMEFSFLMKESRDQYAMLSLEYRVPQLKSASVPLDSRLMKIETSVNTSFPYVISITDPFTKRKRIAVPLDTSRHSLHKIHSRRMAGTVLLRMEGQKARIGWSYDTRMETPEEDSFTGVDTGILDAFSVSDGRAIGSMTEVLEYYHDEVEPAFAVLSDLRNKKDSIKHYLHSHDLPADVGRSLIRKLDRLDQMMQSMEAPYRKKRRYYGLLEEEISKDVREYISGLEKGTVTVLEKLDIREFKKSRKLNGKFSTFARGKLQQKLMEELNEKGYAFQEVEPDYTSQLCPVCSNLDPDNRGGKTFLCTCCGHRDDADHNASVNIRDRASDREIQKVCSDYRYDHKSMQEHLKIVYVSRHGRYRTHTASA

SEQ ID NO: 49984 - protein, 397 aa, Leptolyngbya sp.
MHRTVKLLLQPTPEQRQALSKTLEQFTACFNHVSKTGWTTQEKNGVKLHHATYYPLKEQFPQLVSDLHIQARMKATEALKSAFTRQRQGRKTGQPRSRLCPARYNNHTFRVDWIKGEVNLASVTGRLKLPFTVPAYVAKYLSQSHQTVMGDLILRKGRLWLHTVIEVPEPQINSSTEVIGVDLGINRPAVTSTNKFLGERRWKELEARTFRLRRSLQSKGTKSARRHLRRLSGKQLRRRRDHDHVLSKRIVQAALCAVSPRCSDCRQVTKAGSTIVLENLTDIRKRVKQRKKGGHQRRLHAWSFAQLAGFVGYKAQEQGIRVAFIDPRNTSKTCYKCGYGHRSNRRSQAVFKCRQCGYELNADLNGSRNIRLKHLANLGMSLVSASESVGASSQPLG

SEQ ID NO: 49985 - protein, 358 aa, Staphylococcus sp.
MGQAMTVKLKLEPNKAQLELIKSASQEYINVINTLVDEMVKSQAPTQKTTKDIDALINSAVKNQAIRDAKSVFKKAKKTKYKTVPVLKKPIIVWNNQNYTINHESVKMPFVVNGKSQRIEIKANISDYERGLIKTASKLGTLRITRKGRKYVAQIAIERNVKEHTGTKIMGVDLGIKIPAVCCTDENKVKFVGNGRNNKYVRRYHNQRRKKLGKDKKLNAIKKSQNKEQRWMNDKDHKASREIVNFAIQHNVGIIRLEKLANIRKQTSKSRKNNHSLSNWSFYRLAQYIEYKANLVGIKVEYVDPKYTSQLCPKCSRRNKSKDRQYKCSYCGHLDHRDIVGAKNIINAPVLDGDSQVA

SEQ ID NO: 49986 - protein, 396 aa, unknown
  TnpB Polypeptide
MKNLKIRGVVCRIYSPSTKEEKLWQSCNTNRFIWNFFLARRIKRYENNKPTSYKEDATFLVKLKNKKYKWLKDVSSITLQQTLRDLDQAFQNFFRRIKKGEVPGFPKFKKKFKCRNSFRIVNKLEIRLEKDVLNIPKIGNVKVNISQKFNIDNVKSYTIFEDCNKWFVSFTEYFKPKKFKKTNSKIGIDLGVKKLIYPSKGKYIKPFKNKVLERRIKTKQRDLSRKTLRSNNWIKCKQELKILHQKLRWKRKDYLHKISTTLVKNHDLIVVEALKTRNMIRSAKGTIEEPGKNVRAKSGLNRSILKQGWNILLTMLEYKCNWYGKTFIKVDPKFTSQTCSSCGHISKKNRRSQKSFKCISCGFVRNADRNAAKNILNKGLILNKKRVGLTLCGETH

SEQ ID NO: 49987 - protein, 348 aa, unknown
  TnpB Polypeptide
VGSRHNACLEERRACYRATGKGLTYYDQANQLKEIRCLRPDVATANYSMLQATCRRAHRTFETFYRRAAAGLTGGFPRYKGYHRFDSVTFPSYGDGCKLTDKRLKLQGIGSVKVKLHRPVEGTIKTVTLKRECGKWYAAFSCKVEDAPLAATGQGVGIDVGLTHFLTTDTGATVENPRPLKDAQRKLRVAQRALARCKRGSARRGKARRRVAALHQKVANTRRDFHHKTARSFVDANDTICHEDLAVANMVKNHSLARAISDAAWAQFIAILTSKAEGAGRDVIAVDPRSASQTCVCGERVPKTLRDRWHECPACGLSLPRDQVSAMLMKRLGQSRQALTQRVAAHVA

SEQ ID NO: 49988 - protein, 399 aa, Moorea sp.
MYKAYKYRIYPDTEQQQALAKAFGCCRWFWNYSLDLCQKTYSKTGKGLSRYAIQSLLPGLKKEYPWLRDAYSQCLQVVALNLSRAYQNFFEKRAKLPRFKSKHGRQSISYPANVTFEGDYLKLNRKIGKIYCLRHRDFEGIIKTVTISKNPDGKYYASVLVDDGKNPPKTSTNGKPIGIDLGLTHFAITSDGSKYDNPKHLAKHQGNLKRKQQKLSRKKKGSNNRQKARQLVAKVHSKISRCRQDFLHKLSRKIVNENQVIAVENLNVKGMVRNHNLAKAISDCGWGMFCTMLKYKAENEGKKYLEVDRFFPSSQTCHVCLNQVGSLPLDVRNWTCEHCKTNHDRDINASINIRNEALRILELGTSSTANGGGVRRLGGKISCLLDATPNEIGSPNLLR

SEQ ID NO: 49989 - protein, 401 aa, unknown
  TnpB Polypeptide
MGKINRTYRFRLYPNKAQTELLAKHFGCSRFVYNYFLNQRKEQYRLTGKSDNFYAQCKTLTTLKKQEETAWLKDVNSQTLQFAIRSLETAYNNFFKKRTKFPKFKSKHSKNSFTVPQSASVADNRLFIYKFKEGIKCRVHRDIKGKIGKVSITKTSSGKYFVSVFTEEEYVAPLKKTCKSVGVDMGLKNLLITSEGETFKNNRYTRRYESKLTKAQRHLSRKKKGSRGFENQRLKVAKLHEKIANSRADYLHKCSISLIRRYDTICIEDLNVKGMKRNHRLSKSISDASWGKFVSMLTYKAEWNGKKVVKVDRYFPSSQTCKNCGFVNKDIKDLSVREWECPECHTHHDRDINAAINILHFGLNNISAGTVDYTGGEGVRANLLESHSSVKPEAKEHLAQG

SEQ ID NO: 49990 - protein, 435 aa, unknown
  TnpB Polypeptide
MKINKAYKFRLEPNAEQTVILNNLVGSARFVWNQMLAMSFEMFAKNEFINATNLVNKIMDVKNNPDFSFLKSSSNAVSLQQKIRDLASAWSKFFDPKSHARYKENKKKPKKSKFFKLADGTEIQLRPLMPKFKRKSDGCDSIRLVQFDKYCRIEGNRVKLPNGVGLVTFRKSQEIIGTIKNVTISKKSGHWYVSFGTERELLQNPTHPATSALGLDLGITKLITTSDNQYIKPKNSFKANQRKLAKLQRGLAKKVLFSENWKKQNRKIQKLHHHIANIRHDYLHKITTTLSKSHAMIVVEDLKVANMSKSASGSIEKKGRNVKAKSGLNKSILDQGWGSMTDMLEYKQQWRGGLLIKVNPRYTSQTCFKCKHVAKENRQTQARFECVECGYVANADFNAARNILAAGHAVLSVEGRCSKSRPLTQKTSEIREEVA

SEQ ID NO: 49991 - protein, 384 aa, unknown
  TnpB Polypeptide
MSKPIIKAYKFRLYPTDDQQVSFAKSFGCARFIWNRMLADKIKHYDCHKESLKNTPAQYKKEFEWLKEVDSLALANVQLNLQKAFQSFFKSPTFGFPNFKHKGKKDSYTTNNQKGTIAVGLNSIKLPKIGHIKAIIDRKITGLVKSATITKTATGKYFVSILVETVAVDLPKTQSNIGIDLGLTDFIVLSDGTKGANPKFLARLQGKLAKAQRILSKRARVAKSANRKLSESCNYQKQNTKVAKIHERIRNTRTDFLHKTSFNIVKNHDIIAIEDLNVKGLLKNHKLAKAIADSSWSTFTHMLTYKADWYGKTVIKVDRWYPSSKTCSCCGHILGKAELKLSDREWDCKICLTHHNRDINASINILNEGLRCLQTLKKPLVQGC

SEQ ID NO: 49992 - protein, 289 aa, unknown
  TnpB Polypeptide
MKTLKLRIKDKHAKQLTTLSSSVNFAWNYVNDLSYKHLQRTGLFFSAYDLAVYTKGAGSELGLHSQTIQAVTETHAKSRKQFKKAKLNWRTNNPNSKRKSLGWIPFKNSAIKHIATNQTGKKGLKSTLQLSLAKGQKLIIDLWDSYNLALYTINTCELVQDSRGRWYACITVKEFPTVKGGIGKVGIDLGCKDAATTSDGNVLATKVTHKYATKLAVAQRSNNKKRAKAIHAKIKNTRQDLIHKFTTSLIKGNALIVVGKLSAKTFTSTKLAKSVYDAGWFEMKRHERG

SEQ ID NO: 49993 - protein, 485 aa, unknown
  TnpB Polypeptide
VSRFEIPEGWAAQAYRYALDPAPVQERALRSHAGAARKAHNAMLGLVKAVMDQRAAERSYGIAEAGLTPSLSWSLAGLRKEWNRRKDEVAPWWAENSKEAYNTGLDALARGLDAWGKSRKGERAGKAIGFPKFKSARSRRSVRFTTGTIRVEADRHHVTLPRVGTIRTHESTRKLARRIEAGTARILSATVSEDSSGRWFCSFQVIVHRSVSVPGHVGAGVPAVGVDVGVKADSLLVVAAPDGREIGRVPAPKSLTAVQARLRSLQRNAARQQGPWDPETRTRRQPSKRWARTSRRIGRVHARAAAVRRDVLHKATTSLAQQHQVITVETLNASGMRSAGGARKRGLNRALADASLAEVRRMLRYKCTWYGSTLAEAERYYPSSKLCSACGRRKPSLTLADRTYRCDHCGLIIDRDLNAAVNLARLGGPSLGEQGPAGSGPVAGRGATRETEPARAGDAGGREASTPRRRQPGKTGTASPQGEAA

SEQ ID NO: 49994 - protein, 449 aa, Peptoclostridium sp.
MKVSKTLKNKITTRCDAFVDTLGIYRSALSFAIKVIDAEWSSLSACTTVKSVVPLAELLMHKTADNPNQRYGEFDKLFYKFPSYFRRSAIADAYGIVKSHRSNLSNWELKKAEFEAKGKTLKDKPPTLSYSHYAFPVFYKKNMFIRTGENSASIKVFKGGDWVWQDISFKGDSLKRLVGYKECSPSLVKKGRRFYLHTPCKATVTLCDKKPNEQTIIAVDLGLTNTAVCCAMKADGTVIGRLFINQPVEKDRMLSRLGRLKKAQQQSCINSKNKLPNHWRKINNLQKQIVQDTVNKIVAFAQKYGATAIVFEYLGKFKHPRGKTSKVQKLRLKLQHWAKNRIQDKVKHKAHSLGIRFSRVVAANTSKLAFDGSGAVIRNAKQDLCEFKTGKKYHADLNASYNIGARYFIGAILKTCPEKDRSQAMAKVPELASRTRCVLASLISLVKAI

SEQ ID NO: 49995 - protein, 417 aa, unknown
  TnpB Polypeptide
MLIYKGINLRLKVNKQQEKNLFQQTGACRFIYNHFLALQKESYDQFRCFMTLTEMKSMLPIMKRDPETSWLHNIDSTALQESLRHLDRAFVNFFSSISGERKGRHIDFPRFKSLHKTLRYMSIINTNKSIRVQQVDEHYELKLNTLGYFRIYSWSSELKKVYDAERILSARIYQDSNQHWYVSLTVECEIQTEQPVEIRTTGIDLGLKTTVVLADGRVEDALKPTEKFSIKLKLLQRRAAHKYELCKKRNLRDERNQLIISNKLIKLYKRIGKLHFKIKCIRKDFNHKVSRYIVDNFEIITMEDLQIQQMCKNNSDLARKILDVAWFQLRTFIQYKCEWAGKTFLLASKWLPSSKTCSNCGQLVDLKLSMREWRCPTCNSIHDRDVNAAINLDRISRVYHETKVKITSRDSFLNSFA

SEQ ID NO: 49996 - protein, 444 aa, Burkholderiales sp.
MLIRQGFQYALRLKAQREAVLRRWVECRRFVFKEALAHQRAEFAAGRKRPGYAALCARLPELKKLHPWLAEPPAQALQQALKDLCKAWDAKYASRFGEPRFKKKGESDTLRLPQDCKYDRSSGRVSLPKLGAVRLRHSREALGDLKNVTLRQERGRWVASLQTEREVEVGAPAASVAVGLDFGAATTIMPSDRSLAPIDLPPRIGRYERRMRRLQQAVSRKQRGSANRKKAVARLGAVHNRIAAMRRDFLHQATTKLVADHALIAIEDLSVRSMTASAAGTLDEPGKKVRQKAGLNRTILHNGWSMARSMLEYKAAWSGVMLVAVPPAYTSQACSACGHTAAESRKTQAVFECMACGHSDNADRHAAKNILTKAQLMLGAADAIQSGGCPASTPGHCGELTPVKASASNDARRPRPRLAAQGRSVGLPLAGTISGLSLPGNLPP

SEQ ID NO: 49997 - protein, 374 aa, unknown
  TnpB Polypeptide
MKLTRTIKLKLNIPETEILSTVQAYTKAYNLVCQQGWQDSDYNAISLHHKTYKNVREQYNLPSQLAISARTKAVESLKSVRTKRKKKQKISCPVSKQCSIRYDKNSITIWFDKEKLSLLTVNGRKKYPIQVPDYFKQYITWHKCSAELIIRNHTVFLNITVSTEKTDIPKKDNYVGIDRGIKKIAVTSEKQFFNGSQIKHITNKYEKIKSNLQSKGTKSAKRHLKKLSKKVNSYRRDVNHCIAKQIVQSVDEGSTIILEELTGIRQNVRLRKKQRTELHKWNFYQFEQFLKYKAEEKGIRVEYVSARYTSQKCSKCNHISRSNRKNQSQFKCSKCNYQLNADLNAAFNIKQNYLNSISYLDRADVNQPIVASSL

SEQ ID NO: 49998 - protein, 350 aa, Halolamina sp.
MAEVSVETTFRNPSRSRRQEWQRATHILRECKQWLVDGWEDGSLTSSVTTGDIDNSLYSALQNQSIRNAKSDYDDEPIEYTGEQPIEVNNQNWEIHTTENGSVVVGFPCISDWWYTPIHVHDSIEEPVQTLLDGDAEKTKLSVWREGGDWHCSFTVEHNEQQDGEETPIGVDVGHNYILAATPDNASAESFLVSGKEHKFVRRYYRSLRDSLQETGAHRARNRVGNKEYRRIQDMNHTLSKRLVEYASQFENPVIKLEELENIRDGGEWNGVHSWPFYELQQFITYKAEKEGIRVEKVDPENTSQECSQCDELVGRDGSKFECPHCGYVRHADLNAAENISQREGEPCTA

SEQ ID NO: 49999 - protein, 448 aa, Microcystis sp.
  misc_feature (238)..(362): Xaa can be any naturally occurring amino acid
MEKAYSYRFYPTPEQESLLRRTLGCVRLVYNKALHERTQAWYEKQERVGYAQTSSMLTDWKKQEELDFLNEVSCVPLQQGLRHLQTAFTNFFAGRTKYPNFKKKHQGGSAEFTKSAFKFKDKQIYLAKCTEPLPIRWSRQIPESCEPSTVTVRLHPSGRWHISIRFDDPTIKPLPVTDKAIGIDLGISSLVITSNGDKVSNPKHFNKHYQRLLKAQKNLSRKQKGSKNREKAKIKVAXXXXXXXXXXXXXXXXXXXXXXXXXXXXXXXXXXXXXXXXXXXXXXXXXXXXXXXXXXXXXXXXXXXXXXXXXXXXXXXXXXXXXXXXXXXXXXXXXXXXXXXXXXXXXXXXXXXXXXXXXXXXXCSSSLPFFCSSTCQMARPASGRNVSRPVFCRFSIRKYSLGTCVGIISHSQTIPLYKNQTSLKWYIIKAQVPKYVGLATSEILEAAL

SEQ ID NO: 50000 - protein, 548 aa, Microcystis sp.
  misc_feature (6)..(264): Xaa can be any naturally occurring amino acid
LPTIPXXXXXXXXXXXXXXXXXXXXXXXXXXXXXXXXXXXXXXXXXXXXXXXXXXXXXXXXXXXXXXXXXXXXXXXXXXXXXXXXXXXXXXXXXXXXXXXXXXXXXXXXXXXXXXXXXXXXXXXXXXXXXXXXXXXXXXXXXXXXXXXXXXXXXXXXXXXXXXXXXXXXXXXXXXXXXXXXXXXXXXXXXXXXXXXXXXXXXXXXXXXXXXXXXXXXXXXXXXXXXXXXXXXXXXXXXXXXXXXXXXXXXXXXXXXXXXXXXXXRAVYYSEQQIKRVRVVRRADGYYCQFLIDVERQEYHEPTGQITGIDLGLKEFYTDAQGNTVENPRYLSKSEKRLKKAQRRLSKRFRKGKKQSNNYHKQRIKVARLHLKVSRQRKDKAIKDALALVQSNDLVVYEALKVRNLVKNRKLAKSISDASWYQFTEWLNYFAKIYRIVCVAVPPHFTSQDCSVCGTRVQKTLSTRTHQCPNCQTVLDRDHNAAINILKKGLKYLGNHLNGTVGQTETDPNALGESDLWGFSGDIENLSRLVEQGISNSDVERIPRHSVA

SEQ ID NO: 50001 - protein, 364 aa, Clostridium sp.
MEKGFKFSLKPNKEQEIFLNKMFGCTRFIYNYFLALKKEHYNTYKLQLSYKECSAMLPNLKVQYPWLKEADAVAVQQTLKKLEISYKNFFKGSGFPKFKSKHNYFQSYKTTYSHNNIEIKGNHIKLPKVGLVKFINHREIQGKIVNATISRTNTGKYYVSICCNVNVEPMPKLTQSVGIDVGVKCFATLLNGEEVPNPKFLTKYLNRIKELQRQLSNKTKGSINYHKVRVKLAKLHEKVANCRFDFLQKLSTRLIRENQTISVEGLNIKSIIQGNDLSQSISDVSWSKFFTMIKYKANWYGRTFNKVDTYFPSSQLCSVCGAINKEVKSLSVRDWTCSKCNTTHQRDFNASVNINNEGLRLSLT

SEQ ID NO: 50002 - protein, 385 aa, Actinosynnema sp.
MRNVKVVVQVKLLPTPAQAAALAATLRGCNTAADRVSVVAFERKVFSRNDLHRLVYPELRAGGLGAQAAVRTIKKVVDAYTTLRANLRAGNLGRAGSRRRVKAESKPITFRPDSAQPFDDRMLSWKYDARTVSIWTTTGRLKDIRFTGHPDQLTLLARHRQGESDLIWRNGTWLLIATCEVAEPEAFEPVDWVGVDRGIVNLATTSDAVNFSGRGLSRYRRWQARKRQELQAKRTKSATRLLKRLARRESRYARQVNHTVGKEVVAVAQRTGRGIALEELGGIRDRVRLRRDQRATHTSWPFHHLGEVLAYKARRAGVPVVVVDAHYTSQTCPRCGHVARANRSDRDRFLCCRCGLAGPADVVAAVNVRDRARRAWVLVNAPAPA

SEQ ID NO: 50003 - protein, 417 aa, Natronorubrum sp.
MYVYYQLLSVAGDYLRRTAITRPILTPEQRRALDETLDEWQYACNISTRIGWTVGETRKTQLQQLAYDEIREQTRLGSQHAILATHKAAAALSGIEEIDDLDENYKTSRPTFTSDTLVYDARSMTLFSDGSVSLATLTDRIRCNLALPDDETGYQRQYLEDDEWELTESTISKRDGDWYLHLGFRKPKPEPTTERQDDTGDRTVLGVDLGIVNIATTSTAYFASGGELRHRHRQFERIRSSLQEAGTQSAHRTIQRMSGRESRYVREMLHHVANDILEEAVTHDCDYIAFENLKHIRERAPPVKEFHQWAHRQLVDLVEYKATAAGIRIEFVSPENTSRQCPECGYTSEKNRIRQAAFECRECGTTANADYVGAKNVGLRFVRRGLQSSRRTGDGQLALKSGTVRPNQGFVPTPLSG

SEQ ID NO: 50004 - protein, 388 aa, unknown
  TnpB Polypeptide
MFNEFATYERAEGVLETPSSALTEDAMEPHQSAAGTLATATLTFKFRLRDKHAAELNRQARAVNYVWNFCNETQQKAARSGRKWLSKYDLQDLTAGASKELNLHAHTIQQVCWTYERSRKTHKKAWLKFRGRKSLGWVPFNQGHVTFDGAAFTFRKVRYEPMHSREELKPGTKVLAGSFNQDARGRWYINIPVEVPASEAAERPTVGIDLGLHDLATLSDGNKIEAPRLYRASEERLAKAQRAKKTPKRVRNIHAKIANRRKDHLHKASASIAKTYGLIIVGDVSAKKLAKTSMAKSVLDAGWSSFKSMLAYKAIRHGGCMIEADERWSTQTCSCCGSLPPERPKGIAGLGIREWRCSDCGTVHDRDVNAAKNILRVGQHALAEGASA

SEQ ID NO: 50005 - protein, 412 aa, unknown
  TnpB Polypeptide
MEQDQVIKARHVVLRIEPEQESLLRAFQQEAARCWNDIVSTAKEYYAETRKWIGKGDLQKILKGDYQLHSQTIQALTDKFVANRATTAEIRRQGSKARYPWREKRYLTIPFKQMAIRKSPAGTLELSLASGVHFDTGFVPPEDVNTCEILWRKGRYVLSYTSDYPEAEPEDGVHGGIDIGEIHPVAVCTETGAGLVVSGREVRSIKRRRNKSLGWFSRALSRCKKGSRRWKRLIRAKGRMKSKSNNQVRDLLHQATRKAIAWCKEMGVAELVIGNPAGVEKDTKKRRRLTRKSRQKVSQMEAGTIKKYLRYKAQEAGINSCLTQERGTSSDCPVCGCKNHPAGRTYHCVQCGFKSHRDGKAGFMMIRKKYPDTPLPEKFTFSHVQSIPKYRKRVLPACVDGPGVVPSSLVIA

SEQ ID NO: 50006 - protein, 598 aa, Rhodococcus sp.
MADTGLTALRQFSFTTRPYLAVDDATGAPIGLDDLDVRVGWMLDLVSGAEAQLLFRLWQPATFDVLAAGCDGQGRKLPMHGHVAAARLGWTPHYPDGVYVPSRVTRVVTAQAVGTLRALAYRDTAITALSARFDPATGRITAPTTAAECVPPGFARGVVRQLTARARRTAGARLRITDVQAPPRTSAMARLSAADRQLAHITVTDAVLTLTVKLPTTVAPTGRAQWRRVRVTAAIPPHLHRRPISEWHLPTLVLDHRGLLLRCAATEAVPAADVTSGTTAVGVDWSPSTLGAAAITADGPKGLVSDYRGWTYDDRGLGIKLARLQQEGQLLHRKAARLTRLATTAPPEVRARLEAKITVLDLHREAVGVKRGKINRELAFHFGRQVTDYAAAAGAEMIAVEDLTTLETRGHGRVNNNRAAQSARRKAVAALAHTAAEVGVTVVSVPARGSSALCPGCNEPLARPAGYHDAWCARCQVGGNRDHIAGVNLAKRALLGKNNVTRRRGQMPAILVAEHTPVRKCRDKNGPTPRRPRHRRVRRSQPAAPQRLGVTPKQHVPAPQASVWDTVKPTPPHGDVGSRDTRPSPTPATQVADSMRST

SEQ ID NO: 50007 - protein, 603 aa, Rhodococcus sp.
MTVAGFTVPRQFSYTTRLYRAVDDATDAPIGLDTIDRRVRWLLELIGAAQSELVSRLWQPATFDALAAGRDSSGRKLPMQGHVAAARLGWNPSYPTGVYVPSRVTRVVTSQAIGTLRTLAYRDTAIGSLSARFDPVTGRIAPPTAAGECVPAGFARGVARQLAARSRTTASAGAPTTCLRITDVQGPPQTPVMARLSSADRQLSQITVADAVMVLTVKLPTAAAPTDRAHWRRVRLTAAIPPHLHTRAITDWHLPTLVLDHRGLLLRCAATEHVPTTDLNAATTAVGVDWSPTTLGAAAIVTERPDGLVSDYRGFTYDDRGLGIKLARLQAEGQHLHRKAARLTRLAATAPPQVRTELEEKIAVLDAHRAAVGVKRGKINRELAFHFVRHIVDYAAAAGAAVIGVEDLSTLETRGHGRVNNNRAAQSARRKAVDALAHTAAGVGVTVVSVPARGTSALCPGCNDKLSRPGGYHRAWCARCKVGGNRDHVAAVNLAKRALLGRSRVVRKRGKNPEIRNTEHAPVRQCRDKTSPTPSRPRHRRVRRSVPTATPQAGVNQKKNVPAPRASVWDTVKPATSHGVTGSRDVPTSPASATSVADSMRFK

SEQ ID NO: 50008 - protein, 601 aa, Rhodococcus sp.
MTGPESTAQRQFAFTTRAHVAVDDATGEQIGLDDVDTRMRWLLDLITAAGTELTARLWQPVTFDVLTAGRDRAGRRLPAQGHVAAARLGWNPHYPDGIYVPSRVTRVVTAQVLATLRTLAYRDAAIAALSERFDPATGTLAPPTEPGDYVPLGFARGVRRQLIARSRRTDGAQSARLRITDVQGPPQTSAMARLSAADRQLAQIAATDHELVLTVKLPTSPTPAGRAQWRRVRVTAAIPPHLHRRPISEWHLPTLVLDHRGLLLRCAATEAVPAADVTSGTTAVGVDWSPSTLGAAAITADGPKGLVSDYRGWTYDDRGLGIKLARLQQEGQLLHRKAARLTRLATTAPPEVRARLEAKITVLDLHREAVGVKRGKINRELAFHFGRQVTDYAAAAGAEMIAVEDLTTLETRGHGRVNNNRAAQSARRKAVAALAHTAAEVGVTVVSVPARGSSALCPGCNEPLARPAGYHDAWCARCQVGGNRDHIAGVNLAKRALLGKNNVTRRRGQMPAILVAEHTPVRKCRDKNGPTPRRPRHRRVRRSQPAAPQRLGVTPKQHVPAPQASVWDTVKPTPPHGDVGSRDTRPSPTPATQVADSMRST

SEQ ID NO: 50009 - protein, 623 aa, Rhodococcus sp.
MTVAEAGCTVPRQFSYTTRPYAAVDDATGAPIGLDEIDLRVRWLLDLIGAAQSELVSRLWQPATFDTLTAGRDSQGRRLPAQGHVTAARLGWNPSYPTGVYVPSRVTRVVTAQAVGTLRTLAYRDHAISALSARFDPATRRLAPPTAAGDYVPAGFARGVARHLAARSRRAESASHERLRITDVQTPPRTSVMARLAAADKQLSQIAVTDAVMTLTVKLPTYEAPAGRAHWRRVRLTAAIPPHLHTRAITDWHLPTLVLDHRGLLLRCAATEQIPTADLSGGATAVGVDWSPATLGAAAIVTERPDGLVSDYRGFTYDDRGLGIKLARLQAEGQHLHRKAARLTRLAATAPPEVRAELEGKIAVLDAHRAAVGVKRGKINRELAFHFARHIVEYAAAAGAAVIGVEDLTTLETRGHGRVNNNRAAQSARRKAVDALAHTATGAGVTVVSVPARGTSALCPGCNETLSRPGGYHRAWCAKCKVGGNRDHVAGVNLAKRALLGRRAAIRKRGQNPQIRIAEHAPVRQCRDKTSPTPSRPRHRRVRRSVPTATPQAGVNQRRIVPAPRASVWDTVKPAPASHVVTGSREVRTSPTSATSVAGSMSYVDAARRRSSPRRRTSAPRPS

SEQ ID NO: 50010 - protein, 602 aa, Rhodococcus sp.
MTVAGFTVPRQFSFTTRPYAAVDDATDAPLGLDEIDIRVRWLLDLIGAAQSELMTRLWQPTTFDALTAGRDSSGRKLPMQGHVAAARLGWHPSYPPEVYVPSRVTRVVTAQTVGTLRTLAYRDTAISALSARFDPVTGRLAPPTAAGDYVPAGFARGVARQLTARARRNDGAATERLRITDVQEPPQTSMMARLSAADHQLSQITVADGVMVLTVKLPTTAAPTGRAHWRRVRLIAAIPPHLQGRAITGWHLPTLVLDHRGLLLRCAATESVRAPDLTSGSTAVGVDWSPATLGAAAIVTERPDGLVSDYRGFTYDDRGLGIKLARLQAEGQHLHRKAARLTRLAATAPPQMRAELENKIAVLDAHRAAVGVKRGKINRELAFHFARHTVDYAAAAGAKVIGVEDLSTLETRGHRRVNNNRAAQSARRKAVDALAHTAAGAGVTVVSVPARGTSALCPSCNDTLSRPGGYHRAWCARCKVGGNRDHVAGVNLAKRALLGRSRVIRKRGQNPEIRNTEHAPVRQCRDKTSPTPSRPRHRRVRRSVPTATPRAGVNQKKIVPAPRASVWDTVEPAPASHVVTGSRDVPISPASAASVADSMRFK

SEQ ID NO: 50011 - protein, 601 aa, Rhodococcus sp.
MIGPESTAQRQFAFTTRAHVAVDDATGEPIGLDDLDTRVGWLLDLIAAAGTELTARLWQPVTFDVLAAGLDGAGRRLPAQGHVAAARLGWNPHYPDGIYVPSRVSRVVTAQVMASVRTLAFRDAAIAALSERFDPVTGTLAPPTEPGDSVPLGFARGVQRQLVAFSRRSDGAKSTRLRITDVQEPPRMAAMAGLSAADRQLAQLTAADHELVLTVKLPTSAAPAGRAQWRRVRLTAAIPAHLHGRAITDWHLPALVLDRKGLLWRCAATELIPAGDLTASTVAVGVDWSPSTLGAAAITADGPAGLSSDYRGWTYDDRGLGIKLARLQTEGQMLHRKAARLTRLAATAPPEVRAQLETKIAVLDAHRKAVGIKRGKINRELAFHFARQVTDSAAASGAEMIAVEDLTTLETRGHGRVNNNRAAQSARRQAVTALAHTAAAVGITVVSVPARGSSAQCPGCDEPLARPGGYHTAWCSGCRVGGNRDHVAGVNLAKRALLGKCKATRRRGRLPAIQVAEHAPVRKSRDKTSPTPRRPRHRRVRRSLPTATPRVGVTPKQHVPAPQASVWDTVEPAPPQGDAGSRDTRTSPTHATPVADSMRST

SEQ ID NO: 50012 - protein, 603 aa, Rhodococcus sp.
VTVAEAGCTVPRQFSYTTRPYAAVDDATGAPIGLDTIDVRVRWLLDLIGAAQSELVSRLWHPATFDALAAGRDGQGRKLPMQGHVAAARLGWHPSYPPGVYVPSRVTRVVTAQAVGTLRALAYRDNAISALSARFDPATGRLAPPTTAGECVPSGFARGVARQLTARSRRTDGAATERLRITDVQGPPQTCVMARLSAADRQLSQITVADGVMVLTVKLPTHEAPTGRAQWRRVRLTAAIPPHLHTRAITDWHLPTLVLDHRGVLLRCAATEQIPTADLSAATTAVGVDWSPATLGAAAIVTERPDGLVSDYRGFTYDDRGLGIKLARLQTEGQYLHRKAARLTRLAATAPPDVRTELEQKIAVLDAHRTAVGVKRGKINRELAFHFGREVTDYAAAAGATVIGVEDLSTLETRGHGRVNNNRAAQSARRKAVDALAHTAAGVGVTVVSVPARGTSALCPGCNDTLSRPGGYHRAWCTRCKVGGNRDHVAGVNLAKRALLGRDRVVRKRGKNPEIRVTEHAPVRQCRDKTSPTPSRPRHRRVRRSVPTATPRAGVNQIRIVPAPRASVWDTVKPATSHGVTGSREVPTSPASATSVAGSMRVT

SEQ ID NO: 50013 - protein, 462 aa, unknown
  TnpB Polypeptide
MIAAMQRLQAFRFKLMPNGQQAQQMRRFAGACRFIYNKALALQKERYARGEKKLGYAGLCKLITEWRNSAETAWLAEVPVHPLQQKLKDLERAYNNFFAKRADFPRFKKKGRSDSFRYPDPKQIKLDQGNSRIFLPKLGWLRYRNSRKVLGNLRNVTVSLSGGKWFVSIQTEREVEQAIPQGGAVGIDMGIARFATLSDGTFYAPLNAFKRHEAALRKAQQTMSRKVKFSNNWKKAKARVQRIHSRICNARRDFLHKTSTAISKNHAIVCIEDLRVRNMSKSAAGTADAPGRNVRAKSSLNKSILDQGWFEFRRQLEYKLAWNGGHLIVVPPQNTSRTCPCCGHASADNRPTQARFECVECGFEDNADVVSAINILSRGMQLLRDEGRDTTDASVGMLAGDLPASARMACGSNRVSGRKQEPTETTMHMRSVVGISGLQAGEDVNIPKAEVVKPKQIKIAVK

SEQ ID NO: 50014 - protein, 417 aa, unknown
  TnpB Polypeptide
MKIVRSSKCNIRFATQRKQAELQTILQEYGKVVNVFIEYFWKNGVVGNTELLKGIVDIPKNTWLSARLRKVAAREALAMVGSAKAVVESNKQMMSNRITSVESALKKLKPVNRKLRRKINKLRIELKSKRMRLNSRKPTMPKHSGNSMSVSCTIAELQEVKEAKGFDAWLHLASVGNKISLNIPIRFHKHFNELVKIGIRLNSYVISKDRVVFAFEIETGPKKAVKKMIGVDTGMTALAALSTGELFGTDIKDCIERTKRCEHGSKGQKRASRALRQRTDEVAKKTISDTDLVVVENLKGISTNTKLKGRLSQNMRSSIGKWNQRYWLGRLEQNCETNRVSFRSVSPWNTSITCSACGNVDRANRLSQEMFKCSVCAHTENADTNAAKNILNRFATGKYGSCYKPENQNSLGMCKIV

SEQ ID NO: 50015 - protein, 486 aa, unknown
  TnpB Polypeptide
LVFDVCFEDFQRGSPDGAKKETARPEGAHMFSAVDGAELIEHSRGTLALEHPHYAAENDRGRVAEKHVDMISFPVPLHNLAALFHCEPFHGSFKKVSLLRSECMLTKLSAKDDMGGQVVNTVACTVKVKIPDTLTHRLDSLRPLVVGAVSQMLGNRDQSSSKHYPQIPSVIAKSLIAKYQRNLKCRSVGNVIIPICGDKERQVKFEGEGIRIPALFQKAILPIQLTRPCFADALGRHNISVEFFMRAGQWYGAFSYRTPAAPALKPTGVVGVDRNSVGHVATLADPQTGCVLHLGFNPAPTKVVWRGRKATLQKQGRNRLLFKIKRKQSRRTKHENHIVSKVIVDYAATHRRAIVVEDLGTVRKKGSKIRSYTERSQWSFHQLLQFIEYKAALRGVEVIQVNPAYSSQECSRCHGLTKPAGKSYRCSYCGHNDHRDANAAFTLAQRVSPIGGIARDSEGSCSGLLVAPFLGSGGASLGTASLTTCL

SEQ ID NO: 50016 - protein, 486 aa, unknown; identical to SEQ ID NO: 50015
  TnpB Polypeptide

SEQ ID NO: 50017 - protein, 365 aa, unknown
  TnpB Polypeptide
VKIQKGMKYRIYPNKEQQQKLAIQFGHARFAYNSTLANRKSHYKKTGKGLSAFDSMKLITSAKLATDTLWLTQADSQVLQQKTRDVETAYKNFFKGLAGYPNFKRKHDVQSIRYPQRVKFNDNKTYLPKVGHVKTVFHRPLEGKQKSTTVSKTKTGKYFVAVLCEIELDIKVHEGPSVGIDLGLKDFYITSEGTKVAHPKLLKKSEREVKIAQRKLSKKRKGSANRNKARLRLALKHERLANSRKDFLHKQSAFLTSKYSFIGTESLRVRNMMRNHCLAKSIGDSGWSEFVRQLGYKSAWKGGTVFKIGTFFPSSKTCNNCGYINNNLKLSDRNWLCPECQNTLDRDINAALNILKEATAGTAEC

SEQ ID NO: 50018 - protein, 460 aa, Streptomyces sp.
  misc_feature (236)..(279): Xaa can be any naturally occurring amino acid
MIRAYKFLMRPTVGQQIALAGMLRDHCSLYNSALQERRGAYQHASKTTVRYGQQSAQLKDIRAFDPERQGRWSFSSQQATLRRLDKAFAAFFRRVKAGEKPGYPRFRSGKRFDTVEFPKDGDGCRWDSTPNDPLPRVRLQGVGHIRVHQHRLVVGKVKTVSVKREGKRWYVILTAEQDAPEPLPATGSVAGIDMGIANFLADSDGGFVANPRHGAKSAAKLEAAQQALSSVSYTHXXXXXXXXXXXXXXXXXXXXXXXXXXXXXXXXXXXXXXXXXXXXAKLEAAQQALSRCKRGGKRRRKAVETVARLHRRVRRQRLDHAHKTALHLVREHDFIAHEDLKIRSMGKAPAPKPDPDRPGSFLPNGAAAKAGLNRSIADAGWGVFLQILTAKAECAGREVMAVDPRNTSRRCPVCGHTSKENRPTQETFHCVSCGHHAHADTVGALNVLRAGLARREAAPA

SEQ ID NO: 50019 - protein, 248 aa, Bacillus sp.
MQGVARLRHGMIVRLVDKDNRNFDLLKHKLGALRITQKSGKWIAQISVTIPTSEKTGTKRMGVDLGLKVPAVAVTDDEKVRFFGNGRQNKYVKRKFRSERKVLGKKKKLNAIRRSKDKEQRWMKDQDHKVSRAIVNFAKENNISVIRLEQLANIRQTARTSRKNEKNLHSWSFYRLTQFIEYKANLEGIKVEYVNPAYTSQTCPKCHEKNKAQDRKYKCKCGFEKHRDLVGAMNIQYAPVVDGNSQPA

SEQ ID NO: 50020 - protein, 394 aa, Oscillatoriales sp.
MTQKAFKYRFYPTPEQETLLRRTMGCTRLVYNRALRVRTEAWYKDQQRVGYSDTSAMLTQWKQNPELDFLNEVSCVPLQQGLRHLQKAFSNFFDGRAKYPNFKKKRNGGSAEFTKSAFKFKDGQVYLAKCCQALPIRWSRTIPQNATPSTITVKLSPAGRWTISLLVDLEIEPLPKSSNEVGVDLGITSLVALSTGEKITNPKGFKAKHSKLRRAQKALNRKQKGSNNRHKARLKLARIHQQIGDARKDFLHKLTTRLVRENQTIAVEDLAVQNMVKNRKLALSISDASWGEFVRQLEYKCDWYGRTLIKIDRWFPSSRRCFDCGHIVSKLPLNIRKWNCPQCGTHHDRDVNAALNILAAGLAVSVCGANVRPNRDISIGQLRNTRKGQKQKPK

SEQ ID NO: 50021 - protein, 368 aa, Thaumarchaeota sp.
MLTYKFRIYPTAAQARTIEETLETCRRLYNAMLADRIEKRTGFYDQKKMLVELKRDNNHLKSVHSQVLQDVVLRLDKAYQRFFAGLSRYPKFRRSGRYNSFTYPQSGFRLEGDRISLGTIGKVRVTVHRQVAGAIKRVTVIRDIDQWFVALLVEEPPGLVRSGDGKVGVDVGISNVVAISDGTLIDNPRFSNRSAERIKSLQRRLSYKKNGSSNREKAKLSLAKAWRNVRRQRDDFAHKLSDKLTKENKVIVFEDLKVPNMVKNHSLASAIMDAPWGQLRRLTAYKAERRGGRVILVNPSGTSQKCSECGEMVPKSLSERVHDCPGCGVVMDRDVNAARNILKAGLEQARVEAEPLLVQRRRISKFGR

SEQ ID NO: 50022 - protein, 517 aa, unknown
  TnpB Polypeptide
MVNLTMSKSSLMLPADLTKIDADIKPFWNSLSTAIHCTLWQPHQIESPELVLPLLNGSSNYRVGESNFWKNQIIPNNYATKLRYFVSIPKHLSLSLPASSTPTTATEGQRSSNEAQIDVTTAKKIRIYPENETLWFASLNLYRRAYNLSIEFLRKGRKPTSEFRTQICDWCKLECEEHYITYNSNLIQAAYRKACDTCTAVIKKRIKGEKAEMSFMSRNAPPQYFVVPRLSANKQIFPRILKGCKWTEPVPSEAKGKTVVVTYTNGQWFASVNFNQSIEPTKSEALSVVALDPGVRTFQTSFSGEDAVSYGDGFVNNRLAPLMLELDHLLSKRDKLHCEDKSKQWVKNRLKNINRRIHRVRGKQQNLVADLHRRVAYDLVSSHDVILLPTFETKQMVKKSNETRKRFLRRKTVRGMLGLAHYKFKQTLKWMAKKYGKSVIDVNESYTSKTLWDGSMLKNLGGKASILYRGKRVNRDIHGARNILIRFLTKVIDALSPKGAYPLNITKAGFCGFGVLK

SEQ ID NO: 50023 - protein, 398 aa, Streptomyces sp.
VTTNHVKRAFKYRFHPTHAQAAELSRTFGCVRKVYNLALAARTEAWARQERVNYNQTSAMLTAWKKTGELAYLNDVSSVPLQQTLRHLQAAFTNFFARRVKYPRFKSRKKSRKSAEYTSSAFRFRDGKLTLAKMTEPLAVVWSRPLPEGMAPSTVTVSQDAAGRWFVSLLCEDPSVRPLPATGQAVGVDVGLDHLLTLSTGEKIANPRHERRDRTRLAKAQRNLARKARGEGANRRKARLKVAKIHARIADRRRDMLHKLTTRLVRENQTIVIEDLTVRNMVKNRILARAISDAAWAQFRGLLEYKAAWYGREMIAVDRFFPSSKLCSHCGTLQEKMPLSVRTWTCDCATTHDRDVNAAKNLLAAGLAVSACGAGVRPQRRTPGGQSATRHEPSRREP

SEQ ID NO: 50024 - protein, 442 aa, unknown
  TnpB Polypeptide
MKPRKFTVVAKLHENQNQELIEYVASCFATYSKAKRETFHVLKRDNQFDKSAFNTHLQTKYGVLKRTANSIISDAQGTLNALKELKQYEKSQLERNISSLEILINKLELKVADNKTLLRLNDKTVSLIQHRNLKRKLVSKKNQLNHKKQKLDNLVYQIEHGIYKLCFGTKYLLKRDFNEFIARRDSQLSFVGTKTEKAGNQLLQLAYNRQNNQFDIQLRKDIGGFKDQRGSYVNGKIHFNHHKQELISILANRNSPLSYKIIKKNGRYYLYCTFEIQRDESSFVTRSLNGVIGLDFNKGFVTLTETNQYGHMVDTDLIRYRFKQGTATQTDLEHVATLVKERALATGKDIVIENLNFKDKKAKTISKKGKKYNDMLHSLAYLKFTNIIENVCYRNCIWLRKVNPAWTSWIAKQKYCPQMKLNIHTGASFVIARRGQGYTDKV

SEQ ID NO: 50025 - protein, 262 aa, unknown
  TnpB Polypeptide
VSGQETHGPGLHAGCRQSFPENARLMSPSVVFEYKYDMLHVPVRQNNENTATVRQRMQAECRILCIQFTNSDAFAAGVVLDGTGQEIAVKFWKGGKEYSHHCRKLLEKIQKSQEATGGRQTGRVDQKYWMHLKHLSEHYGHQVTSQILRFAVEQDVSVIVLPRYNQEYSRNVMKGSGNWGPLHLSTRIRQYLDYKAWKNGIIVIEVHATGISTNCARCGAEVIRTDTRTELCCCANGHQTNRYLNAVRNLGKKCLTQFGRRA

SEQ ID NO: 50026 - protein, 383 aa, unknown
  TnpB Polypeptide
MSVSFMSYKIRLYPTKEQENAMFNHIRAARFIWNLMIEKQRNKYLEDGSYISKFDMIRLLTSIKSENLWLYDVSNYTLQGACSDVDISYQRFFKKITKIPNFKSRKRSKNSFCVIPNETYIKKKSGLLHLQKIGDIKFKTDFSFPIGRGKMKLANSRIIFEKFGKWFIYFAMERENQASVLTNKPMGIDLGIKETMVVAYGNKSIIFHNINKSKKVRELKKRIRNLQRVVSRKYEANRVGKKYIKTNNIIKLENKLRKLYARLNGIRYNYIHQCTHKLISLLPCRVVMEDLNVMGMMKNRHLSKAIQEQCFYEIIRQMKYKCEWNGIPFIQVDRFYPSSKTCSCCGAINKRLTLSDRTFICPECGFKIDRDYQAALNLMRYEV

SEQ ID NO: 50027 - protein, 397 aa, unknown
  TnpB Polypeptide
MQKIISLNILEPTVRKRTELSKLYEEYLACSKELFAIWKENKGITQTALHHLTYKSFRKKYKLSADLLISARTSIWNRRKVCDKIDSIPIRFNSKLFRIDTNKGRTLVICLAGYTKYKRIALPIAKDGAYQRLQDYLKQSYVISSVLLFKDFRVQILIKKEFEEPSESKNVIGIDTNANCFAVSVYNTKKQKVLRQLYFGQDLAIRKRNFERRKDKLKSLADLGSQKAFKSLRRLKYKEANFIKTRCWQVAHQVIKLSKSYGNASIIVEDLYKLRTGRKFGNSKGKKSNRKINKIPYAKFFHALSVLCEQNIIGFHKVNPAYTSQLCSRCRALNKITTNYRTYKCKSCGLVMNRDRNASVNICKLFRERSIVTNTFQPSLNRMPVNASLLSNATCNS

SEQ ID NO: 50028 - protein, 312 aa, Okeania sp.
MVKPNNYWYYEVSKCAPQYALRYLSDAWRRCFSKVSGQPKFKKKGKDDSFTLDGSISVGFNRIKLPRIGWVKTFEILPDNVTPKSVTISRASGRWFVSFKVETIPQVTEKSVDVVGVDLGVKTLATLSTGEVFSGAKSYRRLEAKLSRLQYLNRHRTKFSRNWKKAQLKIAQLHSKIANIRKDTLHKLTTYLAKNHSQIVIEDLNVSGMMSNHKLAKAVADIGFYEFRRQLEYKCELYGAELIIVDRWFPSSKTCSRCGTVKESLFLSERVFNCEHCGFNCDCSATLARTRFECSIKFSYGGQFDRDSLRTG

SEQ ID NO: 50029 - protein, 357 aa, Okeania sp.
MYGCQQHLVNSTPEVMAVLEYLCSEANKLTNCGIYYCRQILFKAGNFLTKAELDFELKSNLHFKAMRSACAQQTLHSVIESFNSYARSAKMFKLGELAQKPRPPRYRKKNGLAVVSYPARWVKLVDGMLKFSLGKQVKAWFGIDHFLLLMPSNLDFKQIKEFRFVPRNNCFYLEFAPQQPQPEKGQPIAGNVLGIDPGLNNWLTCVSNVGKAFIVDGQKVKSQNQWYNKQVAKIKSGKSGDYWDDNLAAITEKRNRQMRDAVNKAARFVLNWCIEHQIGTIVFGWNQRQKDSINIGKKNNQQFVQIPTAKLKTRIAELSEQQGIKFVLTEESYTSKASFLDDDFLPTFGEKPVHVGA

SEQ ID NO: 50030 - protein, 445 aa, unknown
  TnpB Polypeptide
MIYSTVMINSIIRTDRWVLSPTPKQAEYLEQTERLYRSYARALIGVVYTHFPQIVSADSPCAAVEKLIHKTAKNPNPRYQYFSRRFYKFPSYLRRAVIQAAIGQVSSFVTRYISWQTGRRKRKDAYGPRLNAVTHLHTVLYRGQCIFFEEDSVQIKVFSGKEWAWERIPVVKRRERHLLPNTKSLSPHLVINRKGVFLAIPFEVTSPKLGKPEKVCGVDLGLNTIAVASIVSPDGTVTARKFFNNCAADIDRRDKRLQAIRHRARLTMGKGGKLYKGFCKSVYRKAQNINRQICQMISKELVSWVQSQGATVIVFENLKNWRPKGGRKGSTLRQRFHGWLKSQLVQLVADKFVELGGQVEFVSPRGTSSYAYDVSGQVKRDKKNYSLATFRSGKKYSADLNASYNIAARFWIKQKPTRRNRSGSVSDRSFRTEPRMPDLLCSLWS

SEQ ID NO: 50031 - protein, 364 aa, unknown
  TnpB Polypeptide
MNKSFKIRIYPTKEQQILLEKSFGASRFIYNHFLKLKQYLYQEFNIKITFNHMSKMLTELKRQKTWLTVPDKCALQNTLKDLDNAYKKFYNGAGYPKFKRKDSKNSYRTNCNIKINNSFITIPKVGLLRYKDKYKLEEENILKVYNVTISKNNIGEYYASISAEVYIPHFERTNQNVGIDLGLKEFAIFNTGEKINNPRILATLEKKYRKLAKAVSRKVYGSANYQKAKLKLTKFHKYIANIRKDFLHKLSTNLLKEFDIICLEDLNIKGLMKNKGKSYQDVAQSEFVTMLKYKAEWYGKTIVQISRWFPSSQLCSECGYKNPALKDTSIREYDCPECGTHHDRDINAAINILREGLRILEENI

SEQ ID NO: 50032 - protein, 419 aa, unknown
  TnpB Polypeptide
MYLTIKQQVKHLTKEEYNILRELCRIAKNLTNQAIYNVRQHYFQEKQYLRYEANYHEMKSCQNYKLLNSNIAQQILKDVDAMFKSFFSLIKLAKQGKYNFRHIKLPNYLAKNDYSNLAISQIRLRKDNFLTIPFSNAFKQKYEGIKKIQIKIPQVLEDKKIKEIRIIPKFNARFFEIQYTYEIQEEEIKLNINNALAIDLGVNNLCTCVTNTGKSFIIDGRKLKSLNQFFNKQNAKLRSIKDKQSIERQTKQQYLIFNKRKNRVNDYINKTCRYIINYCLSNDIGTLVIGYNQSFQCKANLGKKNNQIFTHLPFGKIREKLEYLCKRYNINYILQEESYTSKASFFDNDELPIYNADNPQTYEFSGKRIKRGLYQTKNNYLFNADCNGALNILRKSRAVDLTVLCSRGELDTPKRIRIS

SEQ ID NO: 50033 - protein, 402 aa, Actinomadura sp.
VHRAYKFLLRPTVGQVQALEEMLRDHCSLYNSALQERRDAYRHRSKTSVTYGQQSAQLKEIRAFDPERQGRWSFSSQQATLRRLDKAFRAFYRRVKAGERPGYPRFRGVNWFDTVEFPKDGDGCRWDSTPRDTVTRVRLQGVGHIRVHQHRPVKGRVKTVSVKREGRRWYVVLACDNVPAEPLPATGAVTGIDMGITHFLTTSEGTHVQNPRHGRRNADALADAQRALKTFPRRKRDDRTARHRRAVEKVATLHRKARRRRLDHAHKTALALVRCYDQVAHERLNIANMVRAPKPKPAPQTPGTFLPNGAAAKAGLNRSILDAGWGVFLGILAQKAESAARVLIPVDPRNTSRTCPRCGHVDARNRDGERFQCTSCDHRDHADRVGAWNIAHRAGLVLPDVA

SEQ ID NO: 50034 - protein, 377 aa, Nocardia sp.
LTQARREYDWLADLPAQCAQQVLRRLDTAYDNFWNRDHPAGLPQFKKKRDRQSICFPGQAIEVRKVSRRSAQVKLPKIGWVRFRLSRPIDGIVRNATISRDGFGWHISFGVHQPAPVAPPVNTGPPIGIDVGIACSVFCSADDTARQRPATATVGEQRRLRGLERRRARQLTYAKRHAGGKYSNRLRRTNAAIAALKARQARRRLDWNHKLTTDLAQSHGLIGIEDLKVSSMVRSAKGTATQPGSKVRQKAGLNRSIADQGWFEIRRQLEYKTRRHGGQLVAVPAPGSSQTCSRCGARDPDSRRGCGRLFACTQCGHTEHADKNASVIIRDRAIRTAGRAGTSTGGGAGSQSTRSPKGRGGRRASRMREPSSRGTAA

SEQ ID NO: 50035 - protein, 386 aa, unknown
  TnpB Polypeptide
MKLTLKIKLLPTDVEAKHLLNTIKEANLICNRISDMAWENRIFQHFSIHKLVYHPIKNSCKLSSQVIIRCVSKVADSYKVDRKTKREFKPLGGISYDSRILTYKSNDTISIWTVGGRLKGIPFICHNRNYLPFIKGEADLVYKKGKFYLFQTVDIPDENVSDIEEFIGVDFGLTDIAVTSDGIKHSAEWLNRYREHRQNIRSSIQTKADTSRRSTRRNCRKLSKRLSGKEKTTATIINHTISKSIVKTAKEQNKGIAIEDLTGIRFTSKKRNKTFRIKLGRWNFSQLRFFLEYKSLLNGVRLIIVEPAYTSQTCYVCKHLGTRTNKEFKCVNKNCKENIMDADYNAAKNISLLGAAINQPEKSTMYCSFEHAPVRFKTQSSHCVIG

SEQ ID NO: 50036 - protein, 319 aa, unknown
  TnpB Polypeptide
VTFPAYRSSRRYATSKLLFQTSSRGVPDTRHSKASAINRRLRITDAAFKYRNGRLYMAKSKVPLDVRWSRPLPSVPSTVTISKDAAGRYFVSCLCEFEPASLPISPKMVGIDIGLKDVFVTDTGFKFGNPRHTAKYAARLALLQRRLSKKARGSKNRAKARLKVARLHAKIADCRLDALHKATRKLINENQVVCVESLRVKNMIRNPSLSKAIADASWGEFVRQLQYKGEWAGRSVVAIDAFFPSSKRCSCCSFTLQKMPLNVRKWHCPECGADHDRDVNAARNIKAAGLAVLAHGEPVNPDPHKATQVRLREVGIPVL

SEQ ID NO: 50037 - protein, 225 aa, unknown
  TnpB Polypeptide
MAHKIALDLNDHQRTYMLRATGVARFAYNWALEQWGIQYRAWREDDTLPKPSQFSLRKQLNEIKKESFPWMLEVTKCAPQLAIIQLGEAFKNFFAHRAAYPKFRKKGVHDRFSISNDQFAVQGKRIRIPKLGWVRMREALRFSGKLVSITVSRMADRWFVSITVDTEDRRQQHNENQEAVGVDLGVSALATLSTGEVVQGPKAYSKLVKRLVRLSRSLSRKARGS

SEQ ID NO: 50038 - protein, 345 aa, Streptomyces sp.
LVRRHVRDGRAGRPQEVARHAAGQAVEQGREGHRQPRHAAAQQELGSLLIEGLDPDDLVDRAVEGVPSADRRQLGVPQRLVGDRQHEQAVGYVEHGLELVQEGACGGGRLDAVEFVDADHQAPGRLLPAQLQGGPAEEPLQGVHDLGIGLRLLGERRRPLRRQIPASPSGAESRLVRLGLQVPDRALVPLGLLCRVQTFPDHEVAQLVEEMEHELAPVEEDRDRLARTRLAKSVHDVGWSAFVTMLEYKAARYGRTLVKAGRFEPTSQVCSACGAKDGPKPLDVREWICTACGTVHDRDHNAAINIKRAAGLAASACGAPVRPESVLAQRDETGSLGFPTKPCAA

SEQ ID NO: 50039 - protein, 247 aa, Cyanobacteria sp.
VSVRIRGKAKTWGIPKGCKIVWDGKDWYASITVDCVPERQTGNNALGLDFGGKTAIATSNGGFVKAPRFQTQAQEKVNLLSKKLGRKQQPVKGKSQASRRWKKYQGKIRRVKRIEANRRCDWSHQVAAQMVSSNRLVATEKLNLKGMTRKGKRQKTGLNRSIVDVAIGKTKDGIKYKVEEANGVYLETPTRQLKPTPPCAKRWETKPKTWSDRVHHCQGCGHSEDRDINAAQAILIGARGRNCPLQT

SEQ ID NO: 50040 - protein, 434 aa, Erysipelotrichaceae sp.
MSYHHISSYAVELRNDYALLKELQSVYDSAVSYLLSPVLNEWESIKDIDSSDARMSVMETIVHTTKSHTARYDFDEKFYKMPSYLRRSAILKAVGIVSSYKSNLNNGTNAALSYKHHNCPALYKDNVFKWKDDYTVSIKVYKKNDWVWHDFRLRKTDADYLKMRMTVNNRCKIFAPVLEKKYGKYFLRFALEEMIDFPDVSIFERKACCVDMGLLNDAVCSVMDVHGTVLGRHFINCAREKDSVRNALHRVSVFQRLHGGHDVRHLWNVAVRRNENLANKAAHEIVAYARETGCHVIVFEYLDTKGKKRGSRRQRLHHWKHRAIQKKVESLAHKYGIRISRVCAYNTSKLAYDGSGEVKRGRKVSDDTPYDICCFQSGKYYNCDLNASYNIGARYFIRELINALPGIKAEVPDIGGGTRRVLADLWRINAAVCL

SEQ ID NO: 50041 - protein, 397 aa, unknown
  TnpB Polypeptide
LKIVKLTASFKLDGEIDENLFKIYKEIVNELLGHACSKNITSFKRLKAEKYRELREKYPELPSHYIYTACQMVASIYKSFRKLKRRGKVRADRPEFKKDVVMLDDHLFRLDLEEWSAIISTQNGRLKLRLLHGEYQEKFKGWKTGQAWLVKKGEELYLKVAFSRNVEVTKPENVLGVDVNENNITIASPEGFITFETGEKEIRTGYFVKRRKIQEKIRSRKARSRVLAKYRERERNRVLDIYHKVTNEILEIASETNSAIALEDLSKIRDGMRYSREMNGRLHRWSFRKVQEILKYKAQLSGIEVLYIDPRKTSTLCPICGGKLSPNGRRVLKCDCGLEADRDVVGSWNIRLKALKMWGVSVPPESPPMKWEEGRLSATIVSYAPKAADSQNGSLIP

SEQ ID NO: 50042 - protein, 392 aa, unknown
  TnpB Polypeptide
MKMRTYRFRIYPSKAQEKQMCQHLWLAKNLWNDLLEHSKELYRNFDKFPTRNSLQLMVKDTGMFSQTSQEIAHRVENGIWRYMKLRKAGNKKAGFPRFRSADRMKSLNYPQFGFFLEKKLKVNPFGEIPIVRHREVNGKIKTLTLKREASGKWFACFAVEEPPAIRLANGGSRIGIDLGLRVLATLSNGSKINNPRHIRKHQEKIAFLQRLSNRKKKGGKNRVRAKQKVAVEFEKLKNVRRDFLHKLSKNLVDSYSFIALEDLASQELAEQNFGKQIYDAGWGELADMLRYKAESAGCEIMFVNPKDTTKTCCICGNMADMPLAVRIYDCHNCGNHMDRDLNAAYNILKRATAGSAESNACGDVSKKTSVKQEAIASPSGRLGQFTTLQPLS

SEQ ID NO: 50043 - protein, 485 aa, Streptomyces sp.
VKKFHPQPGFVVQAYRFALDPNASQEAALRSHCGAARAAYNWAVGWVTASWWQRKAEESYGVPQDALTQWRPWSLPSLRKAFNAAKHTDPRFAAWWEENSKEAYSTGLANAAAAFDNYARSKNGKRRGKRMGAPRFKSKRKARLACRFTTGTIRVDTDGRHVTLPRLGTLRTHEPTGKLLARVQAGTARILSATVRHERGRWFVAFQAEVKQDIRRVARPGVAVGIDLGIKALAVLADSTGEIRTVDNPRHYERARKQLRRASRVVSRRRGPDRRTGQKPSRRWEKANAQRNKVHHRVANLREDALHKLTTAVAAEYGTIVVEDLNVAGMLRNRRLARRIADAGFGEIRRRLAYKAQRNATRLVAADRWFPSSKTCSGCGVVKAKLPLHVRTYACDACHLVIDRDDNAALNLAALAAAAVPGTGVAADQDAAPAVSKPRGADRKTRTTRPRRKAEAGRAGGATLPHQRQTETRDRPQAEPLTLWR

SEQ ID NO: 50044 - protein, 408 aa, unknown
  TnpB Polypeptide
MVLVEKHIIKPKHKNYNELDNLCFLSKNLYNSTLYNVRQYYFENKKLLKYQVINKMYVDTNNADYRALPAKVSKCTQMLVEHNFKSFFALLKLKSKGKYDKPIKIPKYLDKKKGRQVVHYEKGAISFKEQGYIKLSKTDIKIKTNLTKDKVQFVRLVPRNDYIVIEIGYNVKEKEVKVNENILAIDIGINNIASCVTSIGDKFLINGKQLKYINHNYNKQNADIQSKVKLTHNKNKSRYRSNIINKRNNRINDYLHKITTYIVNQVVSKNITTIVVGYNKEWKQDTNMSRSNNQNFVNIPFYKFISMLDYKCKLKGIIFKTITEEYTSKCSFIDNEEIGKHKEYAGRRINRNFFKSKGGIIINADINGAYNILKKYMIENATWNEKISQTLVKVCSIPSVRKINIRVS

SEQ ID NO: 50045 - protein, 239 aa, unknown
  TnpB Polypeptide
MGEASSPLSLLLRFLEWENPGRFYHIGGFKGGRWYNKQLDTIRSKRDRCKKGSRRYKHLSQVYQRVSQQKRNKQHDSLHKASHLIAHTLVERTVVVGDLSQRQMVMKEHQERNKHLNRAVFNEWSLYTFIQMLLYECHLYGKDLQILEERDTSKTWSACGHKQAMPLWKRTYRCPNPECRFVVDRDENSAVNILKRYLARLGPHTGDPVRCADVFTAIEHQCAEVSNATDNVLNIFQHM

SEQ ID NO: 50046 - protein, 370 aa, Halobacteroides sp.
MVVREKAYRFRLCPNKEQRILINKSVGCARYVYNHFLDKAKEDEYKTYTKYSKQLTQLKKELEWLKEPDKFALQNALKDLDRAFKNFFNKKYSFPKFKSKKNKKNSYRTNKFTRKSGTTNIEIKDNKIKLPKLGWIKFRKSKEIKGEILNVTVTRNNTDKYYISIAVKEDIKELPKKDNAIGIDLGLKDFAIISDGEKIANSRVLKKYERKIARLNRSLARKEKGSNNWHKVKKKLAKVYEKVRNIRLDFLHKLSTKLIRENQTICLETLKVKNMLKNSNLAKSISDASWSKFVELLEYKAKWYGRNLVKIDTFFASSQKCSNCGYKNKEVKDLKVRKWKCPECGEIHDRDINASKNILNEGLKMKVSTT

SEQ ID NO: 50047 - protein, 372 aa, Halobacteroides sp.
MQTKIVDKAYSFRITPNKKQEELINKNIGCVRFVFNHFLAQSKDDKYLSYSKFATQLPKLKKEYNWLREVDSISLQQSLKDLDKAFKRFFKGLGGFPKFKSKKNNKQSYRTQYFKRSSGTESIEIKDNKIKLPKLGWVKFRKSREVTGKIQNVTIRKSKANKYYISVCVQEEVEELPQTDKAIGIDLGLKDFLITSNGEVVSNPRTLSKYENKIARLNKRLAKKEENSNNWYKVKNKLARVHEKVANIRKDFLHKLSTKLIRENQTIVVESLKVKNMLKNSRLAKSISDVSWSKFVDYLSYKAEWYGKELIKIDTFFPSSQLCSECGYQKKEVKDLSVREWECPKCHSIHDRDINASKNILQQGLQLQLASR

SEQ ID NO: 50048 - protein, 354 aa, Halobacteroides sp.
LHSHNRQQLFKQLAQDWKSYFNSIKDYNNNPNKYQGQPKPPNFKYLNSNPSEIIFTNLATRVRDGNLLLSLSKEMKSNYNVKSFKFELPPAVQSISNLNNLQQVRIKRDNLSKDWYLLVIYKVEPKDKPQGNNIMAIDLGLDNLATLTFKDNPKGYIIDGKKIKSENRYYNRRISKLQKIRMKQVGSKKFKDTKQIKNFRLKRRNFVADYLHKASRKIVNLAIKNKVSTIVIGDISGIKQNNKQNKHFVAIPIQRFKDLIEYKAKLEGIKVIFLNEAYTSGCSAIDEERLSRADYDKSRRITRGLFKSGNKIINADINGSLNIMRKYLKNGTPKMVKQIRDMGLVDTPERLRVS

SEQ ID NO: 50049 - protein, 368 aa, Pueribacillus sp.
MATITYLVKLKKPSKRKHKAWLREQKTFVHCLNDCVTRLLNGEKLTSKNVPFPLKSTIKNEAIRRAKKAVSDYKMEVAKSIPVFKANTPISINNQNWDTQFKKGRWYLGFTTSMGKKYLPVLETDWVNTYFPYLTKLNRNFRGTIQLLRRRRNWYVAIPIEISCDIGQSSQNKETQRTPIGIDLGLRHIAVITELEPGKRQWFSGKEVGYIRRHFRSLRRSLGKKKAQRAIEQIGNKERRWITDYNRKLAHDLITFCLQFNQPMIQIEQLENIRNTCKTTKQADRTIHSWPFYQLKMFIKQKAAKHNIPVTDIDPYKTSQTCFHCGYEDKRNRYKSKFHCKQCGYVCHADLNAAKNIARSARSTSLAV

SEQ ID NO: 50050 - protein, 322 aa, unknown
  TnpB Polypeptide
MYILGCDHGIEYAVYVRLRYNYRLYPTPGQQVALARLFGCVRVVYNDALRARRDAHQAGLPYVTNAELSARLTASKRTPERVWLNDVSAVPLQQSLADLNAAYRNFFESRSGARKGPKIGRPRPKSRKDRRQSARFTTNAQFAVLPSGKLRLPKVGDVEVRWSRSLPSAPSSVAIIKNAAGRYFASFVVQADPAADAERFPAAGSEVGIDRGLTAFAVLSDGAVVRSPKFLRRAERKLKRAQRSHSRKQSGSKNKEESRVRLARMHARVASKRADFPAQGLDMDHPRKPSGVCRGLVRDGARADPTGQEHPRCRLVRLYSDA

SEQ ID NO: 50051 - protein, 385 aa, unknown
  TnpB Polypeptide
MLLSYKYRIHPNRRQREALDEMLYWFCQLYNAGLQQRIEAYRRQGVSLTYKAQADELKLLRTEVPELGNYSFSAEQQVLRRLTKTFNAFFGRVKRSAKAGFPRFKASARFHAADFRFGDGLTMKPGRRLSIVGIPGLVKVKWHRDWPPGAACGAAVITRQAGKWSVVFQLDAPVEHSVTGPVTVGLDAGLSALVALSDGALVERPNWTKKAAKGLRKRQRAVSRSRKPNLRSKRRKKATARLAAYSRKTANRRADHLHKLAADIVARYDRIAVEDLTIQGLARSMLAKDVLDAAWGLLMALIAYKAERAGKLVVAVDPRGTSQECPCCGAKVEKTLADRVHRCPDCGLVENRDVAAASVIEFRAFGHNKFRPGSGLRTPSGRVAA

SEQ ID NO: 50052 - protein, 285 aa, Planktothrix sp.
MTKTSKTMGVQQILLSPDPETRALLEYLCQQSGKLYNTGIYFARQTLFKTGKLLTGKFDLAFEPSVSKSLLARSMPSTPMQQTLMSVTEAFKSFKNLRDLHEKGQLHFRPKPPSYLKGSKLFKVAYPNSGGQRPTLINGQLRFSLGLTVKRWFGVSEFFLSMPSNLDYSEVKEFTILPKNGAFYLEMSYEVEKQNHELDINQALSIDLGTADNLAACVDTLGNSFLIDARDLKAKNQLWNKKVSTRKEGKPQGYWDNWLDRVTRKRNHQMRDGVNKAAKLMISHC

SEQ ID NO: 50053 - protein, 335 aa, unknown
  TnpB Polypeptide
FISDSDLRKKLTQLKKMEELKWLKDYSNNITKQAIKDACDAYFKFFKGLAEKPKFKSRKKSPPKFYQDTEKIKFRDGKVRLEKIGWVNLSEKDRIPEDTKYTNPRLKYDGLHWYVTVGIEVVREPIKLTGESIGIDVGVKDLAICSNIEEPYKNINKTKKIKKLEKKLRRLQRKVSNKYEKNKEGRSYVKTGNIVKLEKSIRKLHKRLDNIRTDNRQKVTTEIAKTKPSRVVMEKLNVSGMMKNKHLSKVIAQQGLYEFKQMMQYKCKRQNTEFIEADKWYPSSKTCSVCGNVKTKLSLSERVFKCECCGAVIDRDKNAAINLSRYAVSERDAAS

SEQ ID NO: 50054 - protein, 291 aa, unknown
  TnpB Polypeptide
MVKAIKVMLIPNNVQKTKMFQYAGASRFAYNWALAREKENYEKGGKFISDSELRKEFTKLRHSDEYAWLLNISNNVTKQAIKDACTAYKNFFKGLQKFPRFKSKKRSMPKFYQDNVKIQFSNTHVKFEGFSSSRKANKQKMNWVRLAEHGRIPTDVKYMNPRISFDGLNWWISVCVEFPDCKETLNDDGVGIDLGIKDLAVCSDAVKYKNINKSQKVKKLEKQKRRLQRSISRSYEKNKKGESYCKTNNVIKKEKLLLKRNHRLTNIRKNYLNQTISEIVNRNQDLSVLKI

SEQ ID NO: 50055 - protein, 403 aa, unknown
  TnpB Polypeptide
VPIVRYRYRAYPRPDQAQMLARTFGCARVVYNDALRARSDAWAAGERITDTEVQHRVVTAAKTTPEREWLGEVASVALVQACNDARRAYRNWFDSLSGRRKGRRVGHPRFRSRKDNRQSIRLTRNGFGVTARGVRVAKVGVLRLAWSRPLPSVPSSLTVIREADGRYYASFVVEVADTPLPVVSTDVGIDLGLGRLVVTSTGEVVENPRHLRRRAKALARSQRNLARKQKGSANRAKAARRVAVHHRKVREARLDAHHRLALRLVHDNQVVYIEDLAISALARTRLAKSVHDAGWASLVRLIEDKAARHHRQVIKVSRWFPSTRLCSACGHNSDPKPLDVRYWTCTECGAVHDRDLNAARNILVEGRKVAAGLADTRNACGGDVRREAVRAVPGEAGTRRGAA

SEQ ID NO: 50056 - protein, 382 aa, Escherichia sp.
MRRFAGACCFVFNRALARQNENHEAGNKYIPYGKMASWLVEWKNATETQWLKDSPSQPLQQSLKDLERAYKNFFRKRAAFPRFKKRGQNDAFRYPQGVKLDQENSRIFLPKLGWMRYRNSRQVTGVVKNVTVSQSCGKWYISIQTESEVSTPVHPSASMVGLDAGVAKLATLSDGTVFGPVNSFQKNQKTLARLQRQLSRRVKFSNNWQKQKRKIQRLHSRIANIRRDYLHKVTTTVSKNHAMIVIEDLKVSNMSKSAAGTVSQPGRNVRAKSGLNRSILDQGWYEMRRQLEYKQLWRGGQVLAVPPAYTSQRCACCGHTAKENRLSQSQFRCQVCGYTANADVNGARNILAAGHAVLACGEMVQSGRSLKQEPTEMIQATA

SEQ ID NO: 50057 - protein, 307 aa, unknown
  TnpB Polypeptide
LFTYKFRAYPTPAQATVFGTTLETCRRLYNSLLADRIENHTGFFDQKKSLVQAKELNKHLRAVHSQVLQDVVLRLDIAYQAFFTGYSRYPKFRRYGKYRSFTYPQMGFKLERSSVRLSKIGRVKLKIHRPIVGRIKRVTVIQDIDEWFVAILTDDQNVSIQARDGQVGADVGVTNVVALSDGTIIEGPRFTRRSVERISSLQRKLSRKKTSSNNREKARLALAKAHRVIKRQREDFAHKLSDALTKDNDLIVFEDLKVGNMMKNHSLASAIMDASWGKLRQLTVYKAERRGGRVMLVNANGHFAEML

SEQ ID NO: 50058 - protein, 400 aa, Okeania sp.
MKSRFKYRIYPTPGQKHRLAKLFGCVRVVWNDSLACCQEKYKLGENKPTNSELQKLFITQAKKTEDREWLSEVSNIPLQQSLNDLNQAYQNFFKSTKGQRKGKAIKPPKFKTRKSKQTARFRKDGFKLGQHKVYLAKIGKLKIVWSRELPAAPSSVTVIKDSANRYFLSFVVETCAEILPQTDNSVGIDLGIKTFATLSDGTKIDAPKPLKKRIKKYKKLSKSLSKKTKGTNRYEKAKLRLAKFHAKLKETRTDFLHKLSTKIICENQTVVLEDLNVSGMVKNRKLSRAISDLGWRTFRTFLEGKAEKYGRDFRVINRWEPTSQTCSSCGFKGGKLDLSVREWECFNCGVKHDRDENAAINILVAGGQSETKNGRGDKRKTTAKVAAVCETSTHQGAKAR

SEQ ID NO: 50059 - protein, 406 aa, Lactobacillus sp.
MKTVITAKVRLYPSQEQVVQFKAVTKEYQRLCNLVSQWYFDNDCRVNRKKFNQEMYHYLRAESKEINSAMVQSTYRTVEARYKTVETQLKQRPYHYQDQNTGEWYREKRDLSWLHKAIKFSRPQADYVRNINYSFVEQGSKISMNVLGQRIKVAFNGDYLNFFDPNYKLGTAKLVQLKKHWFLHIPVTIETTEWKKEHNQHIIGLDRGLRQIVTSYDEKGNTSFKNGKAIAYKRRKYAYLRSQLQSKGTKSAKRKLKRLSQKENRWINDVNHCLSKTLIGFYGQNSLFVLENLAGVTFEKTNSNKNQTRELHSWAFYDLQTKLAYKARKNQSQVLIVSAKYTSQRCPKCGQIRKENRNHKIHRYDCVFCGFKTNDDRVGAMNLYELGKQYIFGIENPKFELTNVTD

SEQ ID NO: 50060 - protein, 410 aa, unknown
  TnpB Polypeptide
MEVRRTVPIKLDVGDSDADLLFETIRQFLDAANYVVDAACDGEWVETRKSLLHDETYSEVRDRTELHSNHVQSARDRAVDALKSVVAKWSKGEYASLPTFTTPFVEYNRRTATFNEDSASLATVGGRITAEYVLPDEARDTPHSRYLLNDDYETTGATLHYRNGEFFLHVRTKADVNDPEPVENGTVLGVDLGIENLAVTSTGMFWSADELNHWRTEYVERRRSLQECGTRWAHENVQSVGQKETGRFEQYLHRVANRLVTEAVEHGCSHIAFERLTDIRERMPRTRKFHEWAFDRLFGYVSYKAEARGISVEQVNPQYTSQRCSTCGFTVRENRPSQDTFCCQSCGYQNHADYNAAKNIGLKLLRSQTGTEGGAPVGVRLNSGMLNTSGVTSAPSESVRVGVHAECHGR

SEQ ID NO: 50061 - protein, 443 aa, unknown
  TnpB Polypeptide
MRYYSLYSVKIKHYNHILKETVSLYRKVTDFFLQVCLKEWDVLSTKTAHQKLLYMEQLCHQTKKNPNIAYKTFDQKFYKFPSYLRRAAITEAIGKVSSYKSNLGNWANEVPTIRGRKPSLPKAGLIYPCLYRENMYQQTGKYTARIKVYVRYTWDWINIQLRKSDVDYIHRHCSNRKQCAPTLQKHGHQWFLDFPFEETVTLNNTSVYEETILAVDLGLNSSATIAVMKADGTILGRHFLHLSKEYDSLTHAVNRIKKAQQHGNRKTPRLWAKANGINTHIATRTATFIMDIAVQYHVNTIVFEYLDTSGKKKGSKKQRLHLWKSQYVQNIVTDKAHRFGMRVSHICAWGTSKLAYDGSGITLRGKDANLSSYSVCQFQNGKIYNCDLNAAYNIGARYYIREILKSLPAKVRLAIKAKVPQLAKRSTCTLSSLFSLNAELILS

SEQ ID NO: 50062 - protein, 450 aa, unknown
  TnpB Polypeptide
MSNVFTITTELKLNKEYNQLTSKYIYDYIEIFNKIQRLTFHRIKNYHIKNCKITQKDRNIIHSQLKEEFDLTSRAIDAILSNMLGRYQSIKKLKDFERKSLERKIFSLEKELIKLKDERTLQRINLKNDYQNFNFTKYKNLKVKIYWKQNRLNTKKQKLKNIESEIETSKYKVCFGTKELLQKDYQKFINKRDNEIYYLGRAGDISCNNNFQVEYNSRINQFYFRIRKEIDLDNDKFVYGQFNFNDKNYTNLLKNLLRTKESALTYRIKFKDNRVFLQIIYNFEHNKDLCVTRNSYGVVGVDFNKGFVSVSETDKYGNLINTFNINYQYGKGNQTINDFQSIATILKDYCLNTDKDLVIEKLNFIKKKDNLISKRGKKYNKMLSSLAYSKFDSIITSKCVKNRIFLSKVNPAWTSWIAKQKYCPKMKLNIHSGASYVVARRGMFLKDKIK

SEQ ID NO: 50063 - protein, 442 aa, unknown
  TnpB Polypeptide
MRPRKFTVVAQLHENQNHDLIEYVDSCFTTYGKAKRETFHVLKRTSDFNKSTFNTHLQIKYSILKRTANSIISDAQGTLNVLIELKKYEKLQLERKISSLETLIGKLEMKVADNKTFLRLNDKSISLVAHRNLKRKLVSKKNQLNNKKQKLENLQYQIENGIYKLCFGTKYLLKHDYNEFITRRDSQLSFVGTKTETAGNQLLQLTYNRKNNQFEIQLRKDIGGFKDQRGSYVNGKIHLNHHKQELISILKNHNSPLSYKIIKKKGRYYLYCTFEIQRDKSSFVTRSSNGVIGLDFNKGFVTITETNQYGHMIDIDLIRYCFKSDNITQTDLELIANKVKERALETGKDIVIENLNFKNTKAKTVSKRGEKYNDMLHSLAYRKFTDIIENVCYRNCIWLRKINPAWTSWIAKQKYCPKMKLNIHTGASFMIARRGQGYTDKV

SEQ ID NO: 50064 - protein, 404 aa, Scytonema sp.
MKFSFIQMQTISVKCKLQVPVEFRSEIDRTLQGFADACNQIYEVAKREKCWNTTKLHHLVYKPIKQATGIKANHVCQAIRRVIGNAKAVKQVHKFRPTSINLDARTFEYFEEPQSVGVTLMCSRKQFKLLIGNYQLALLKGQTPTAATLNKTKRGDYYINICVDLPTDPTGKTPKVIGVDLGRRDIATTSNGKSWSGGKIQATRDRYSKVRANVQRKRTRSSRKLLRRLSGREQRFQKWLNHNISKQLVQEAKQSSSALAFEDLTNIRESLNQKPRSKTERRRTNNWAFYQLRMFVEYKGNIAGVPVVLVPPAYTSQTCSRCHHVHPVKGKSYRSGKSFKCGHCGFEYDADVNAALNIAALGLSVSQPEVPGIACLLEGCDYLFPTGGENWDKDLPLKRKRRVG

SEQ ID NO: 50065 - protein, 186 aa, Scytonema sp.
MLVFESKLQGTNAQYRLLDEAIRTARFVRNICLRYWMDNRNVDKYKLSAYCAVIAKEFKFADKLNSMARQASADRAWAAISRFYDNCKKKVPGKKGYPRFKTQQTNASVEYKTTGWSLSEDRRLITFTDGFKAGTFKMWGTRDLHFYQKKQIKRVRVVRRADGYYVQLCIEQERIEKDSQRITLLG

SEQ ID NO: 50066 - protein, 446 aa, Hydrogenophilales sp.
MERVRIVSLKGLSRRQESIVREGQREAARVWNSCRDLHLKARHEHAPWPGRNEYHSATRGGRFALHSQTIQQVFRAFDAAVDAARENRRNGRKGIRYPYKDKRFFPLMWPAQAMHLEAKRIVLPMGRGRPSLVFPRPEWLTGKAACKVVWNGVHYELHMSVEEMDSTVRPLSATEKHATVDLGQIHQAAVVTNTGEALVVSGRGLRSLKRLHSKQLGEIQKKRSRCTKGSRRWRKLGRARAKRTLRYQRRVRDLHHKGIRQVVDFCRERGIEALFVGNPDGVRRNRCGRHQNQRMSQWEYGRDIDYLKQKAAKDRIVCFTGDERGTSSRCPVCGHRQKPKGRNWRCKACGFEGHRDIVGAVNMHQIAYDQVVPFPKRITYLRPGPVRSGQAAGMKNRRPGSSSRLGTGLPSVLDGSCLAESRNQAPQRTVPLRVPSGNSPRTASLG

SEQ ID NO: 50067 - protein, 380 aa, Thermus sp.
MRKAFKYRLYPTKPQVKDLERTLELCRELYNAALQERRDAYKKAGKSVGLYQQKRYLPQIREELPQYKRVHSQVLQDVLHRVDKAFQGFFQRLKAKKGKAGYPRFKGKGRYDSFTFPQAYETGVKLQEGERRVLLHGIGSVKVKLHRPLEGKIKTATVKREGEHWYIIFITEVDPKPLPPSEGAIGIDLGTNPHFLVTSEGEMVEAPRYFQKAQAKLATAQRSLARKKRGSNRRRQARRRVARLHRKIANQRKDFHHKLARRLVNRYGTIVHEDLNILALSRSYVAKGIHDAGWAQFLQILAYKAEEAGRRVVGVDPKHTSQDCPVCGHREKRPLWVRVYTCPQCSTLLHRDVAAAQNILARAWTGPSGVAIPCPRSPGL

SEQ ID NO: 50068 - protein, 260 aa, unknown
  TnpB Polypeptide
MDHIKQLRIYPPENEKCDLIVIYEIEEPEHLSQNGHYLSIDLGLHNLMTCYDSGNGRTFILGRKYLSLERYFHKEIARVQSVWYAQQSKKGIKYPKSSKHIQRLYRKKQNAVKDYLHKVTRWIAEYCRKEDIRCVVVGDICNIRNGKDMGHKTNQKFHGLPYNRLYIMLEYKLKLYGIQLIKQEESYTSQCSPLSPEVSKRYAEVLNRKKRGMYVTGGVRFNADTVGAFNILRKYLSAFGKQKQLSVTGLKNPEIIKVAA

SEQ ID NO: 50069 - protein, 503 aa, unknown
  TnpB Polypeptide
LCVNDQQDRFLTQAFEFGRTLYNATLGTALGQIKRLRESKEWREARNLPKGKERSQKFAALQRKRGLTENGLRTIANNHRKASGRNDIGAHEAQCIGRTVWRTVERYMFKDSGRPRFKSYRRGLNSIEGTDNHEIIFKPERQAVVWRKQELRILNLDKAYSREALSDPLNPAEYKRTKYCRILRRTLNGVRRWYVQIVLEGLAPVRMIPAPVSEVVGIDPGPSQIAYFHEHYADIVKVAPHVDLQEREIRRLQRKIDRSRRANNPDNYEDDGQIKKGPLKWHISHRMKQLTAVLAEHYRCLAATRKRDHGELVNRLLQIGGTIKIEKNSYRSYQRNFGKSTTRSGMGMFVDHLKRKAASAGAKVVELDAYELKMSQYDPQTDAYRKKPLKERWHRWGNSDILVQRDIMSAFLACYATENGHDRSLLLRKWATAEPLLSGSGLCRRQPRSDQEEPKGSLRLTKPRVTTPAERERGLPRTFCAGSDVRSDCPFGDPAGRAFCRSE

SEQ ID NO: 50070 - protein, 420 aa, unknown
  TnpB Polypeptide
MEKEDIVVKTKKIRIYPNSEQTKIFVKWMGTARFMYNKSLNFVQTNKIYPNYYNIRNKLVPSNTIQQNEQWLLDIPKDIRAEAVHEMCIAYSTNIKKSSKTHKKFDMKFKSKKYSQSSMTITKENFKNGKIYPKILGENNCILNSAEPIKFNKVTKVYNIKQKIKDRKTKKTTEIIVKKTVEKELINGDCMIVRNKVGKWYICIPEKVKCNTENQGMRIGVHDPGCRTFQTIYSPNGVCFKIGTNAVKQIRNFCLGIDKMISLRSTLTGKKKYRLKIAIDRKRLKIKNRIIDMHNKTIKLLMDNFDIIIIPQFDSGKMTNKIYRNINSKTARNLLSLNHGEFRQRLVNKINEYKYKYIIICSEEYTSQTCGKCGKRNLKLGGNKTFKCPFCEFKMDRDINGARNILLKTEVELASDSSLH

SEQ ID NO: 50071 - protein, 391 aa, Hydrococcus sp.
MSSYTVRRINLEKTEQLDILARAAGELYSRTLVTYWRIVRKKGVFLSQYGMEKLCRSSQLHAHTSDAIVGNFYSSIKSANARKRAGSTEAKYPRRRKYFYKITWKSSAIKVKDGLLHLSNGKGNSAIVIPWQWDKPKQVEIGWKKGKGYQLRAVYSTTTIASPTGQKVAAIDRGEVRTATVYDGEKTTIYSGRLIRSKVRYRAKTIAHLDAKISKTKRGSKRRKRLVATKHRIIRQLDNQINDILHKQSTHLVSTLFKAGVQTVVIGDIRDIRNSIKYGAKANQKLHSWSFGKYRWMVEYKAEKFGMKVVLQDEAYSSQTCPACGKRHQPSGRTYKCKCGFQFDRDGVGSYNIRAKYMGNFGSPLVGLMASPSGVRFVPHLQCRLNISNGV

SEQ ID NO: 50072 - protein, 391 aa, Halomonas sp.
MLKAIKIRIYPTTEQADFLNRQFGAVRFCYNTGLRVMSHRYRRHGQSLSAKHDLKKLLPVAKKSRKYGWLKEADSMALQQACLNLDHAFQRFFDPKQKGGYPRFKSKRGKQSSYHCVGVRAGDNWIKVPKLGPIRARVHRKVEGRLKSITLTRTVTGKHYASLLFETEQAAPAPLKDIDAAKVVGLDMGLSHLAIDSAGRKFANPRFLKQAQKNLKRKQQALSRTKKGSANRSKARLLVAKAHERVANARNDLQHKLSRQIVDDNQAVIVETLKVKNMMKNDKLAKHIGDASWHALIAKLEYKAKEQGKHLVKIDQWFASSKTCHACQHKRGAMPLNVRSWECPACHTQHDRDINAARNIKQQGIIQLKAEGLSVSAHGGLRKSGTSPAAA

SEQ ID NO: 50073 - protein, 666 aa, Acrocarpospora sp.
VSRKLPLAEEETSRTACARVVLRMGVDEKSGERLSGAVLAERVGWAADLVSGMVGALLAEHWNSTDVDVLASGKDAGDRTLPSHAWMALRRLGWSAAPPSDIRVNDRILRMAQESAGRTLRSAKWRADLTAGVLASWPNDPAKRTPQEWAAVRDAVPQGRFLPSSVIKSRTRQAAAFARKHGRLPVDVFELEPAPRTARMLPLSACDRQQATIARAEDPGRALLRLQLPTRPDPRSSLDWRWVACPITLPPTIGPGAVLHLPTLRIHHGAHHGTGIVRVDLAFTYAVPKARPIGHTVALGVDWGLNTLLSVGAVRLREDATITPLGAGAMFRAAGVLAKQHRLRRLSEHLHAKAEQYHRLTTGDTEHLTEHPLTAKHQVLTQEIRAVSARRSNLNDALAWAAARWTVDQAIAAGATVIYVEDLRSMEAGGMGATMNTRMSQQVRGQIVDRMRHLAAEVGIAVVMVPARGTSKQCPRCLLPLRHRKAPDRPTMPGWKWAICDSCGYQGNRDAGAWQRIAARGITHQTKTATDRASGTLVIGSVVDELEAKAVVVTPATVTTSRDRSKTGPTRPRSTRPAPRRREAPSPTGPPGPAGKRPEGHAHTDRAGLPRAAHRHQGVTTISTPTSRHKPRGAALGAGFHLHAHAPPPRWAQPEPDAMSDMGSLS

SEQ ID NO: 50074 - protein, 372 aa, Planktothrix sp.
NRIAIETYKETGKGLGRSALNALLPELKKAEETCWLADCYSQVLQATTLKLTAAYKNFFEKRAGFPKFKSKHGEQSIEYPQNVKIVDGNVKLPGNIGVVKAKIHRPIEGKIKTVTIRKTPSGKYLASIVTEVEGEYPTTTEGKIYGVDLGVKHFAVVTDGEKVSKYDKPRQIAKHEKNLKRKQKKLARKQKGSNSRNKYCQVVAKVYERVTNSRQDFLHKLSYKLVSDSQAVIVENLHVKGMVRDRNLAKAISDCGWGMFTNFLAYKLERKGGKLVEIDRFFPSSKLCSNCFYQVSEMPLDVRQWTCPHCGTHHDRDGNAATNIRAEGIRMLKADGSAVSAVGGEVRPKMGRKSHLRHSPLSTEAPSAYAAG

SEQ ID NO: 50075 - protein, 363 aa, Salinicola sp.
MKQTKTLKVRVKDKHAAQLNRMARSVNFVWNYLNELSLRAIRERGLFLSAYDLHPYTKDAGKELGLHSQTLQCIAAEYVTRRKQFKKSRLNWRKSRGVHRSLGWIPVNTGAAKWKNGQVFHNGSYFKVWDSYGLSNYKFRSASFNEDARGRWYFNVVVDAEVKPSTGQGSVGIDLGLKDVATCSDGAKLENGRFYRGMEDKLAIAQRSRNKKRTRAIHAKIANRRKNALHKFSRRLVNQYGEIIVGDVSSQKLAKTKMAKSVLDAGWGQLETMLEYKCAHAGIVFKVVGERNTTRTCSACGSLSGPQGVNGLRIRDWECVECGVLHDRDVNAARNILSLAAGHRRPEVGIPGLKPGEDVKPRQ

SEQ ID NO: 50076 - protein, 487 aa, unknown
  TnpB Polypeptide
MKQYKVLKQKLKSTNGEFFIYRFLSKKCRSAYNIALANIKKHYEEENKYIGKYDNFTELQNHDLTNWLNKEIFQRTIYKADAAYRSYFELLKYQKNNNLEITAKEPDYINGYFPITFSYIGNKYENGKRVFNIPLSVPFKRFLREMAPDINYLKQFINVNRLELPNNYFIKLSIPKVLTNKKIKEISIIPLHNGRKFEIAYTYLEDKETPKAIGNDVMAIDLGINNLATCVTTKGKSFIIDGKRIKSMNQYYNKRIAELRSENPYCLRLKENPITKDLEYKKDLRKNLKQNEKYISIRTKRMINLMVKRNNKINDYIYKSAKMIIDYCMNNEINRIVLGYSNDFQKGFEYSNNYDLKDNYLKHIEKNVIKENNQKFLSIPFGKLKSRLEYLCKNYGIELIIQEESYTSLSSFMDLDELPVYKEENKEYLFSGKRVKRGLYETKEGKYINADLNGALNIYRKSSVCDMEVISNLIRRGVSTPKRLQII

SEQ ID NO: 50077 - protein, 387 aa, Bacillus sp.
MFSSNDVVNFFLAIELINKTIGSARFIFNFFLGKQRNKDTYWYIVEEMVQNGQLPRNNWKGECLNKYETVKAIPELKRKYSFLKEVDSIALQKSVENLADSYDRYYKKQNKYPRFKSKKNPVQSYTTKYTNGNMAVNGRYIKLPKLGLVRFAKSREVEGKILNATIRRNPSGKYFISIGTEVEVNECSKNHLAVGIDVGLKDFAILSDGTNYSNPKFFRTWEEKLAKAQRRMSRRTIGGANWYKAKIKVARLHEKIANARNDYLHKISTEMVKNHDIIGMEDLSVSNMLKNHNLAKAISEVSWSQFKTMIEYKAKWYGKQVVTVAKNFPSSQLCSCCGYQNKDVKNLGLREWECPKCHTYHDRDINASLNLKNEAIRLLTVGATGIA

SEQ ID NO: 50078 - protein, 251 aa, Clostridioides sp.
MYCGQYIKLPKLGMVKIRDKQVPQGRILNATISKEPSGRYYVSLCCTDVDIEAFENTNNHIGLDLGIKEFCISSCGEFIENPKYLKKSLNKLAKLQRELSRKTIGSLNRNKARLKVARLQEHIANQRKDFLQKLSTKLIKENDIICIEDLQVKNMIRKRKLSRLISDVSWSEFIRQLEYKANWHGRQIVKVGKFFASSQICNKCGYKNEEVKNLNIREWICPSCNETHDRDINASRNILKEGLRLITIQNK

SEQ ID NO: 50079 - protein, 408 aa, Acidimicrobiaceae sp.
VWDGRRIGLSTSAQCRTLAQARKEIDWIASLPSAAGQDVLRSLNQAYQNWWNPEHPAARPTFKRRSSALSFSLPHDATDVRHVSRKWSEVWVPKMGWVRFRRHRPINGVVRGATFSYSPGGGWKVSFGVAAKPILAPPSNKGAVGVDFGVACSAYLSSEDAPRLMAPTLTKGEEQRLLGLERRKARQLAFAKRHNDGTYSNRLKKTNQEIAQLRARQARRRNDFTHKLTCDLAKNHGLVGIEDLSVKNMTASAKGTVEEPGTNVRAKAGLNREILNNAPFERSRQLTYKVRRHGAVLVKVPPRNTSRRCSNCAVIDAQNRPGCGRTFACVACGHQDHADHNAARNIELLARTRAHADPTQTAGPAGARSKGRAHDSTGRRKPSQGRKAVGGSVKPIRSEQSGPMGRVA

SEQ ID NO: 50080 - protein, 366 aa, unknown
  TnpB Polypeptide
MKAHRTLLIRLPRDKCDVDYIRRLIALANLACRGYEVWVPDLPKSIQYQLYNFKDFKTSLIFGTTPKRWFMRAWVPLKVLRVYGDGSMKGDKSAPVVLDFRGSVIRLRQVCKNEPRYVVELPMPEWVVERVREGGDVKYTMIGLRGEEPYLALVAEKTVEPYQPSGYRLVVDVNSWRYGIAWGLIKNGKLITWRTERPGTFLINTLYHQAVDRERKAGKLRRLGYGGTAVVNRVRKQAKARRGKIYRITRDKAYFLASKLVRKALRYGALLVIDDMTEESRRELLEEKLPRGVIKLLMANTRKFTKQLTTLAQWYGVPYRFERLPSTVCPVCQHELTQEEGRTMVCTNCGFKAPRDKISIHWAMKL

SEQ ID NO: 50081 - protein, 205 aa, Salmonella sp.
DMGLEHYAITSDAVKVPNPRHLINAGRNLRRKQKALSRKQKGSANRKKARIRLAALHERVANARADFQHKLSRAIVDENQAVIVETLKTANMMKNHHLARAIGDAGWAGFITKLEYKAAEKGVHLVKLDQWFASSKTCHCCGHKMPEMPLNKRIWQCPECGVEHDRDINAALNIRQKGILELKAAGLVVSAHGGQRKSVAQTVAA

SEQ ID NO: 50082 - protein, 431 aa, Moorea sp.
LFEATSYNLAMILTYCYKIKPTPKQVEKIDHWLELLRRHWNYALGQRLDYARQTRSSVDRCSLVSESIGEIPEPVNYYTQQAALKETKILFPDYKEIYSEVQQINLQRLDKAWKKWRVPDKNGKRGGRPRFKKAGQLRSFGFSRVNHPKATIKFEGKNLITTRLGIILVVVHRPIPEGFKLKTASIVKKADGYYVCLSGKDERVPEPLHHDKIKSAVGIDVGLKEFLTTSEGETVPIQQTYRQVQNHLARQQRRLKNKKKGSQNYQKQQHKIAKIHQRIQRQRKDFQYKIATWLTRCYDLIAVEDLKILGLARTRLSKSVLDAAWGQFITLLEAVAVKCGSLVVKVNPHGMSIDCSGCGTKVPKTLSVRTHECPKCSLVMDRDENAAINILNRAIEELQAVGLIVSVCGGLGSSQPVKQETSANWVQLSLF

SEQ ID NO: 50083 - protein, 526 aa, unknown
  TnpB Polypeptide
MPKARVRKDISFQNTVTRSVFLYGNPNKEKLSRLREMESSFADLVCRDIRILDRTPEVFLQLIKNDKKDPEMRKLEKSIRVQGYNSAFCQNAFDMAVTHLSNRLEAIRLGLIPQFGILAQSKVLFAMAVAGASRADMISSMKALGKKFHMDCARELEAVDDGAFSFLTAEFRDQYAMSCMEYRLPQPERVSVPLDSRLMKLEPSDSTVMPYVLTVSDPLRKRERIAVPVDTSRHSLHKIRSNRMAGTVMFRTAGEKVRIGWSYDRHLDTPEDKDSIGVDTGITDALYLSDGKAIGSMKEILDYYHKEVEPAFAVMADLRNKKRSIKHYLHSHDLPEDAGRSLIRKMDRLDHMLQTMEVPFRKKRRYYGMLDHEVSGDVKEYLSHMPKDALTVLEKLDIRKFRKGRKLNGRMSMFARGKLQEKLRAELNRKGRPFMEVLPDYTSQACPVCANLDPANRNGKTFRCTCCGHEDDADHNASVNIRARAGDREILKICEAHRYSHKSVQEALKKLYADRNREYLLHTASM

SEQ ID NO: 50084 - protein, 420 aa, unknown
  TnpB Polypeptide
MLVFRLGSSPDRRTAVELSVHRDCIPLVSRFRLTPTPEQEVMLLGQCAHARYVWNVALEQWSMWSVGRRCSPPRFVEQSRQLTEARADNAWLRAGSQTVQQQALRDFDQAVANFFGGTHQRPTWRKAGIHEGFRIVGPQAQRVEKLNHRWARVLVPKVGWVRFRLSRPLPDAKSYRVTRDRSGRWHIAFAAIPTPIPGPGTGEVVGIDRGVTVSAALSTGEMLKVPIMTAGEKVRLRCLQKRLARARKGSNRRAKTKLAIARLRAREADRRRNWIEETSTDLARRFDVIRVEDLNITNMTRSSKGTVDSPGRNVRQKSRLNRSILANGWGALVERLEQKAPGRVKRICPAYTSQTCSRCGTRDKEARESQAVFRCRSCGHAANADVNAAINIAAGRAVNAQGATAVLVAENCEPQLATSA

SEQ ID NO: 50085 - protein, 483 aa, unknown
  TnpB Polypeptide
MDVSYRMRAVVVPLDPTPAQAQLLRSYCGASRFAYNWTVAIAKQNLVTREEERRAGIDEANLTKALSWSPYSMSPLWNSVKEEVAPWNRDVCKHAFRSGVNNASAALKNFNESKNGVRRGSPVGFPKFKNRHSKQTITMIDISRCGSWFSEDSRHVRLILPRFAMDPRITRRREQLQWMHTTESLRRLKKKVMAGEWTVQTVTISFIGGRWRSSFLVRQFIVPTPSAIRLVGPLVAVDLGVKHLATLSSPMKELSDDHGHVENPRHLDAELTRLAKLDRQLSRCGKGSKNRAKLLQRRQRLYGRVSRTRSLYLHRLSTTLTGSFETVVVEDLDVAGMVKKPKKNSTKSLTRSIHDAGWGELRRQLTYKTEDRGHHVVVVNRFYPSSKMCSHCGETKAKLAISERVFECSNCGISLDRDVNAARNIRDEGIRLLTNEASTVAGHKLETLNADSRDRETKPPRRGRGDRYQSRTAQPTRKLSPLA

SEQ ID NO: 50086 - protein, 244 aa, Streptomyces sp.
MIGVDTNADHFAAYRLDRHGNPIGEPHRFGYDLSGTAGTDPPRPDPPDQAVRAGVAAIGIEDLDFTTEKTRERHGRRKRFRQLISGMPTGKLKARLVSMAAAHGLSIVAVDPAYTSLWGAQHWKKPLATPRRKMSRHDAAGIAIGRRALGHPVRDGVSPARTELRARGRTAPPPHDRSDRAGHRTAQAEPGDRGREGTRPPATDRPPGGPSPNGKRKREPSASNTVRDAPSTQQRVQDSLMCTG

SEQ ID NO: 50087 - protein, 414 aa, Lactobacillus sp.
MQITLTTKVRLYPTPEQAKQFLQVTTEYQRLCNIVSQWYFDQHFQPNQKIFQKNLYLPLRAESPDLNSQMVQSVYRTVKARYDAVETQLRRHPYRYDTGKKDPKTGKSIWKSVPRDLEWLWQPVYFKRPQADYVRGSNYSFVKQKTQISLNVLGERIKVPFNADYVQPWFDQKAKLGTAKLVSVKGHWFLHIPVTLEVAEWQQESNQHIVGIDRGLRQIMTVYDEHGKTRFFNGKRIAYQRKKYAYLRAKLQAAGTKSAKRHLKRLKQRENRWMSDVNHCLSKTLVDHYGANTLFVLEDLTNVSFDEANQGSKDRNRDLHTWSFYDLQTKLTYKAQGNQSQVLSVSAKYTSQRCPKCGQIRKENRNHQLHRYDCVYCGFRTNDDRVGAMNLYELGKDYLAGNEQPKFELTNVTD

SEQ ID NO: 50088 - protein, 434 aa, unknown
  TnpB Polypeptide
MLEAVKVALDPTPRQERLLESHAGAARFAYNNGLAHVKDVLERGDTPEWSYYALRKWWNQAKNGLAVDETTGEPWWPRNSKEAYNSGLESLADALRNFSKSRKGQRKGRRMGFPRFKSKDKAVPRFAYTTGSFGLIGCDPHALRLPKIGRVHCMENVSKRVNGAKVLRMSVSKRGGRWQASLTVERADLPIPSPPKGGSVGIDLGVKELATLSDGTVIHNPHALKSNLRRLKKAQRNLSRKRKGSNRRRKARAQVARLYARVANLRSDVLNKTTAMLAHTYADISIEDLNVAGMVENHRLAQSIQDAAFAEFRRQLTYKTARTGARLHVIDRWYPSSKTCSNCGTVKAKLPLSERVYHCGKCGLDMDRDLNAAINIMVAGSAPETLNARGGSVRQAHPKGGTMRHPAKREPSGGESRVSLGAGLGNEAMQMTSL

SEQ ID NO: 50089 - protein, 441 aa, unknown
  TnpB Polypeptide
LKYTTETRLYNKNNEDVIAYFDEVKEQYNHILRRIYYIIRNNPKLKINLLNTELQNKYSISRRTANSIIKTVQGRINSIKELKKTEVKQNQYRLERISAKLEKLTPMLLDLKLKARENDIKDLTKYRNLKTKVAFLKIRKDKLVNKIKSLNYQLETNKFKITFGTKKLLKQNLEEFLNKRDNGMIFVGSKEETSCNSTFQLEYVSKINQFIMKVRKDFKYKNTKGEERYVYGKCFFNNHKKLLKEILKSKSSPLTYQIIKRNNKYYLQCTFEINSCNLSLTDNTQGTIGIDFNKGFVAISQTNQYGHLVSIDKMTYRFGSGNKTKNDLQFIINKLIELAIHTGKDLVVEDLNFLKTKSKTIKAESKKGKRYNKTLHRLAYRTFLDIAEQICNKRNIGLIKVNPARTSWIAKNKFCNKMKLNIHTGAAFVIARRGMNIKDVV

SEQ ID NO: 50090 - protein, 406 aa, unknown
  TnpB Polypeptide
MKTKTKPQYSVRRVHLGRTAQLDALAHACGQVYSHTLLFFWRTVRHKGLWLKPKHLMRLISTDPDHLLHAHTVDATIQAFFAGLSSWRERRKTDLAARPPRHRKWYFRIEYKSSAIALKDSLLILSNGRENAPLVLFWEWDLPQTVVIHWMGSAYEAIATYQIGEGLPQEEELSLQERRAEHSAGIDLGEVHLAVSYDGQRTHLLNGRVLRSKRQERNKLIARMDAKIARCKKGGKRRKKLIRAKQKRLSKLKHQIQDLEHKLTSSLVNTLYREGVEKLVIGDVRTIRHGLDKGSKVNQKLHQWSFGSIRHKLTYKAERLGMRVVLQEESYTSRACPVCGHRRTSAPAGRVFHCTNQACRWQGHRDGVGAANIRAKYRGEFGSRHVVGAMAPPTGCGYVPQLRVSL

SEQ ID NO: 50091 - protein, 432 aa, Mollicutes sp.
MTKNEKIKQSHKETHLKRKTQYLKVFELKVDCHHTSKEDFQKLNDCFRQAKWVINDVIGSNDIFNYNYKDHRIVVNKDKDGNEVERKITLQTGVHQELVNSVKTDIYNLSKAKKKGIKVGALKFRKNVNRIYLRTGMLKIKSSKTVSIPMFRKLSVYGLEQFINIPNFEVANSNLIRKSSGFYIMVTVFFPKESNIVKTNKTVGLDFGIKTAITTSDGEKFDCNKQETEYLKYLQRQLHKKQKDSKRYYKLLNQIQKEYEHISNQKDDVANKIVSHLLKNYDVIYFQDEQIAKWKKKKMKQKKNKQMKKCGFSFGRQIQSSCLGRVKGKLVALEKSGRSYKISKWLPTTKFCPNCGCLNMVTLDERTYICDCGYSRDRDVHASRNVKLFGSTKRAEWLEQPSVEELVNTSLNASRLDLQINPLKRKQEAITL

SEQ ID NO: 50092 - protein, 414 aa, unknown
  TnpB Polypeptide
MTAEPTATKTLEATLVPPTAHKERRLQRTVATYRRALEDAFESGADTQSAVNDIVTPYTLTSYAKDALKSYVPKLRDTYDASELEDDHPVRFTNRGFRLDHSEDRRHEFCWRVPQAGRGNAFWIPLRINPEQRELWIDLFDDDLSPGEFRLQRNRTNWVLHVTVEYEIEATEMPDDPTPVGFDIGESKLLTGCALTDNGTPKEPLTFEGGRARQLRKEMHTALKRLQERDCSDWRRDERFDYYQNALTDIVEKASRQAVEYAHQFDKPVIVLEDLSYIREDLDYGAYMNRRLHGWAFARLTERIEDKAADAGIPVQLVNPAYTSQTCHACGHVGRRGSQAEFHCTNNSCWVTEYQADINAAANIAGRVDPWGESLPWKPAGDDSSQDGSGCDTATGHHTQSPKPGQTTLVAFQS

SEQ ID NO: 50093 - protein, 173 aa, unknown
  TnpB Polypeptide
LHRKVRNVRKDFQHKTTSSMIVKCSGFVLEDLNIKGMVKNHCLARSISDAGWYEFKRQLRYKSEWAGLPLIEIGRFEASSKTCCSCGWKDIGQTLADREFVCQECGNVLDRDYNAAINIRKIGLKAVPWDSREQDGSPVKTLEDDKRFMSQGRCLSMSQEKECSGLNGFGSLN

SEQ ID NO: 50094 - protein, 385 aa, unknown
  TnpB Polypeptide
MSKDALKHFSQLFTEAKWFYNYCLGLDNVNDADTTTKVVPVKVGEQFEDRPLKVLTGQMKQSLKTRLFGSLSALKSLKQNGHRIGRLKFKGRINSIPLKQLGGNGHSGTYYIDRERSRVKVQGWKPWIRVGGLHQIPADAEIANAVLVRKANNFYFNITTFIEKQERVVSEESIGIDFGCQTQLTFSNGIKAEFQVSVSKKIRRFDRKIKRKDRPDSKKKRQDQLKRQREYQHLTNKKKDIRNKIVNAITNNFRYVCFQDESIHAWHAGNHGRKIQNSGIGGIISDLKHKSATPLEVSKFFPSTKLCPQCDQLNKLYLGDRTYICDCGFSCDRDIKSAQCIEAEAMKAIPTDGRDFKTREISTSTFFDILSDIGGVKVSKLESMN

SEQ ID NO: 50095 - protein, 435 aa, unknown
  TnpB Polypeptide
MFEAVKVALDPTPAQERRMSSHAGAARFAYNAGLAHVKAALEAGEKPEWSSYSLQHWWVENRDTLAVDSDGAIWWRENSKEAYRSGLRWLAEALSNWSKSRKGTRKGRRVGFPKFKSKDRGTPRFSYSISGARDGGLIKGDPKALWLPRIGRVHCFENVAARVDGARVVRMTISRRGGHWYAALTVERDEPVKKALKGGAVGIDLGVKALATLSDGTVIANTHALQADERRLKRAQQALSRKTRGSKRRAKARAKFARIHARIANRRSDTLHKLTTRLAQTYSDISIEDLNVAGMMKNHHLAKAVMDVSFYELRRQLEYKTAKTGARLHFVDRWYPSSKTCSQCGSVKAKLSLKERTYKCEHCGLVIDRDLNAAINIMVAGSAPETLNAHGGTVRRGNHHGCATLDPAKCEPSSGVNRVRLGAGGRKTTLQAGTH

SEQ ID NO: 50096 - protein, 356 aa, Prochloron sp.
MARKWLGVSRYVFNKTVELLRDGEIKANWYAIKTGILNELPEWCKEVPYQIKSMSIRDACIAVREAKKKYNLTGTIQRVRVRSRKNLIQSCFIPKTAIKEKGIYCSKLGEITYAQRLPDAICDSRLMIENGNYYLCVAHKVTAPPAENQGRVVALDPGVRTFITFFSETSVGKIGHHDFSKIQRLCQHLDDLYSRISKAVGGKKRRMRKAARRVIIRVQNLVAELHHKTARFLVNNFDVILLPTFETSQMSKKSGRKLRSKTVRNMLTFAHYRFKEFLRHKAQETGKVVLDVCEAYTSKTVSWTGELVNIGGSKKIKSKVDGRTMDRDINGARGIFLRALGDTPWLRNQLALVSQV

SEQ ID NO: 50097 - protein, 379 aa, unknown
  TnpB Polypeptide
MLLCRKIKVKVRPSDATLLEQQADLCCCLYNVALEQRIKVYKQHKKSLSVYDQKKKLPELKNEISDFGMVYNKCLSATLFRLDRAFKGFFRRVKVGDKPGFPRFKSRQNFFTLEYPAMYIKIMGNTLILPTASKLPAIKVKLTEPSPEKFTTVYITRNSIGHFYASFGYKVAGQEQSGNGVLAIDLGIKTLATCVNDNNKFYIIGGFKGYRWFNKQLDKIRSKRDRCKKYSRRWWFLTRTYQRVSEKKHNKLKDSLHKASHLICHKLAEKAIVIGDLSQKQMVTKSENKKLNRAVQNDWGLYKFVQYLEYKTRLYGKTLHKINERYTSKTCSRCGYIQDMPLYKRTYHCPDCGLKMDRDVNSAVNILNRFFARLEPHIA

SEQ ID NO: 50098 - protein, 365 aa, unknown
  TnpB Polypeptide
MQRAISLTLNSDSDLIATIKEFNSVCNFCLKKGMKTKTYNKLKLHHSTYKTIRRKSKLQSSLVQCARDQASEMLKREKLKRLPVKKEYSAIRYNQRTFSFNLKTNQISLSSINGRKKIKLNIPNYFKKYSLNKIVLSTLSFKNKKLHLKLIIDIETPTKLKVKSVLGIDRGIINPIVTSNNKFYNSRKIRTIKGKYQYLKSHLQAKGTKSAKRHLKKISGREKRFITNINHILAKEVVNMNYEAFAIETLTIKKQKKLGKKFNKALGRWSYGQFQRFLEYKAENLGKTVVCIDPRYTSQCCSNCGEIRRANRKGKIYICNKCGYSLNADLNASKNIAELGKAFFSRLPVNQPIVTSLNKAQLQAT

SEQ ID NO: 50099 - protein, 380 aa, unknown
  TnpB Polypeptide
MDSTIEVIKIHRKSREVNTVLKAYKYRIYPNKEQQQYFNKTFGCTRFIYNQMLADRIKSYEENKDLDIKAIKYPTPAQYKKEYEWLKEVDSLALANAQMNLDKAYKNFFRDKSVGFPKFKSKKNNYRSYTTNNQGGNIHIKDKRVKLPKVGYIKIKQHREFIGLIKSCTVSKTPSNKYFISILVDTENIVSPKLTTKVGIDLGIKDFAITSDGEVFSNPKNLKKSEKRLTKLQRDLSRKKKGSNNRYKARLKVAKLHEKIANQRKDYLHKISNYITNENQVIVIEDLKVSNLMKNHKLAKNIADVSWFEFRRQLEYKCAWKGRELIIAPSNYASSQLCSSCGNKSSQTKDLSCRTYVCPVCGMVMDRDINASINLLKLAM

SEQ ID NO: 50100 - protein, 375 aa, unknown
  TnpB Polypeptide
VGNCPQQTRTMANMLLGFKTELRLNNKQRTALAKHAGVARHAWNWGLGLTKQILDHNQDNPEDKIKFPTAIDLHKWLVALVKPECPWYYEVSKCAPQYALRQLAEAWKRAFKKTSKPPRFKKKGRGDSFTLDGSIKLDPFKIRVPIIGWLRTYERLPVCFQPKSVTISRTADRWFISFKLEYEPVNRPKPHPVVGVDLGIKALAVLSTGIVVEGAKSYRKYEKKLSRMQWLNRHKQIGSANWKRASNKIARLHRKIANIRKDTLHKLTSYLAQNHSRIGIENLNVSGMMANHKLAKAIQDMGFGEFKRQLEYKCQLYGSTLIVVDRWYPSTKTCSQCHTEKDEMPLSERVFRCDNCGFECDRDLNASFNLEQAAS

SEQ ID NO: 50101 - protein, 474 aa, unknown
  TnpB Polypeptide
MEVLKTTMYRTRQYHIKKNSRLHPYCTALCQKSAALYNRANFLIRQYATAVESFNAVKPLYENQMKVYRQVHEILASAKYHSDSRWLNYNAIDRVLKVSKDSAYYALPAQANQQVLKLLMRDYRSFFEAIKSYKKNPSAFTGRPRLPGYCKEKGLKTAILTNQICTVKDGRYIKFPGTKTRLDLGVCEGDIKLKEVRIRPDADRFVIDVVLEVKDRGISPEDHGVILKQLKEMETVDNLRVMAIDPGTDNIAAVVNNFAERPFIIKGGIIKSVNQLYNKELARLSSAAMRCNGRNRTKRINALTGRRNRRIKDQFHKISRQIAEYAKDHHVDVVIMGHNVFQKQEIDIGHVNNQNFVQIPMTIFAGMLEYKLAAYGIRFVTTEESYTSKADFLALDSIPEYKKGDETVHGFSGKRIKRGLYRHYNGTVTNADINGAANILRKVFPKVTRWDRGIVDMPCSAGCKDPAGSYRKAV

SEQ ID NO: 50102 - protein, 386 aa, Rhodothermaceae sp.
MPEVIRTYRYRAYPNAEQRENLARTFGCARWVYNWGLERRTNAYYGEGKSLTYNSLAVELTQVKKREETKWLQEVSSVVLQQSLRNLERAFTNFFEQRAGYPRFKRKSANQSATYANSAFRFDPETMTLTLAKQKTPLKIRWSQKPEGEVVKVTVTLDSSGRYHVCLHCRCCVEPMPKTGKRIGVDLGLNDVVVTSDGFRSGNPKHLRKAYYRLRRAQKALSRKQKGSNNYGKARRRLAKIHARIADQRNDFIHKLTTDLVKNHDVIAVESLAVKNMMNNHCLARSISEASWGEIVRGLEYKCAWYGRTLIKVDRWFPSSKRCSDCGHIKETIPLNVHRWTCEACGVEHDRDVNAAKNILAVGATVAACGDLSKTSVAIELQGIGL

SEQ ID NO: 50103 - protein, 371 aa, Blastochloris sp.
MKVIAHIKLLPTPDQQTSLQRTLEQANAACNHISHVAWETRTFGKYALQKLVYHDVRDQFGLSAQVTVRCLAKVGDAYKRDTRTKRTFRPLVSIAYDDRILSFALPDSSLSIWTLAGRQSIPFVCGERQRQMLHTRQGESDLLFHRGDWYLLVTCAVEEPDPQDVDDVLGVDLGVTNIASDSDGTHHRRRMLNNVRYRQRRRTKLQKRGTKAARRRLKQLAGKERRFAKDVNHTISKRIVETAERTKRAMSLEDLHGIRTRVRARRQQRAQLHSWSFFQLRSCIGYKARRAGIPVVLVDPRNTSRCCLACGHTDKANRPNQSTFRCVSCGCAGHADTIAAENMRVLGRAAVMQPHVSENAGCLSQGQAHVL

SEQ ID NO: 50104 - protein, 383 aa, Actinomadura sp.
VKLVVRVKLLPDATGEAALRETLKLCNQAACHASRRAHATGIKGKTALQRLVYGELKAMGLSAQPAIHCVRKAAEAYATLAQNLKAGNYGPPGSRRRAAVEGAPVRFRKDAGQPFDDRSLSWQLDARTISIWTVHGRLKGVPFVCSPEQAKMLAAHRRGESDLVWRGGCFYLYATCDAPQAPEYVPDGFTGVDLGIVNIATTSDGTVHSGKHINQVRHRNRRLRTKLQAKGTKSAKRLLRHLSGREARFAADTNHRISKSIVTEAQRTTHGIALEDLGGIRARVRLRKPQRVTLHTWSFAQLGAFITYKAQRVGVPVIFVAPRYTSQGCSACGHIHKNNRLDQATFTCTLCGFAEHADVNAARNIAARGAAGWAVSHAADDAA

SEQ ID NO: 50105 - protein, 447 aa, Lentibacillus sp.
MLTYNKKVRLAVSKENKQLLDSQSRMCNWLYNQLLDAVEEDYQNGSKKKLLAGRNLRNEVPGIKAKSPFLYKVHSSPLKNSALRLKDAYDRYFDKTLANNRPKHRSWKTKWFSLYYDEPKKGFKLVNPDELSLTFGKLTDEELKEARKTDEETKKSIHITVGLVEEVTLSDTESIKTLRITKDLDSYYAIFTIEDNREINQVEEQSFIVFDPNHKNLAVGLASDGKSYELKSMNTLLKYWDKRIDEIKSKRDKCEKFNKLVCTENVTYFEPSKHWKRLNRALEKAALKRREQIKTLLYSYAHYFSKRYDGVYIGDYTPTPDVATYGNMRRAMLNQTPIGQFRSTLSWVQTKNGKHYQKVNERNTTKECCVCGHKEKKDPSIRSFTCVNCETLLSRDISSTVNIGKKAKKLLPRAGYTGVESPVYTVWWDYKRAKVACGLTPSAGLGN

SEQ ID NO: 50106 - protein, 458 aa, unknown
  TnpB Polypeptide
MIPAQLLRKKVSSTRTYKYRIYDDLTESFKQVQTVRRLYFNYALKYLYQHYGSKHLAHYLPTGKKRQYLIRNLVEFARKKARIHDVDLKKMDYSVQSIDKMLSELLVAFEKYRRQQYGIQYWSEKNKLNCLTTHNCSLSGYGRISYKHNNEDFKSVTFKQNHNRIDRINNYLMKVPYFGIVHTKRSMTHLKHKKIVEARIIKRSNGDFVLQVVTKFEKQKDLSPKDRQKLVGLDINLAHNYFFQLSKKMKSSEKTWSKSVYEKYLVLDDKARRLQHYLTSKGHRFDGSQTTRRIKGQLARIRARNANLLDAWQLQKAKEFSHKYPILAMEQLDSFTMRMSRRSKDYWLRKNTNHKLATFQPTSFRKMMEYIYQDEGHLLLEVDSYDTSKACNKCGKINEKLKVGEKEWTCPNCGQALDRDYNASLNIRDWAQDITKHPKHGKTINGRKVKDSDLLLVF

SEQ ID NO: 50107 - protein, 497 aa, unknown
  TnpB Polypeptide
MMADKQDTMKLTRLVRIYPNLLMRDFIKRNIRYSQECWNRGIKTWQHMYHEEPNHLKKIVFTPKKDKQKVKIKTKRFYQTHLVVKTTVKRNRQNKIISYKFTPVTRKYTPTGKSVRDNIIDANRTKGIKETIYPNEVFQNVLIYDLDQSYQAFFDPSRPDSKRPKIKQKISDNGSYLDTQAHIRDGKIFPTTNVKMPNRKLYTGGIRCGEDLSDLNDKNKRYRMRFIHRDHKFYVAISVERPIKSLMATGQWDGVDVNVDHFNSTNKVVWLSKQPLYDRKLGKAVYQKTRLARLYDKIAHYQRTLANKRECIIRHAKKAKQKIDKSLWQTKNYQKIQLKLRQCYLKVDHIQHDIVQKYTNYLVKYHDRIYIEDLDVKHMKMGVASKGLHRSLFGYFRQTLTYKCQLFGRELVVVHAKYPSTQVCPNCGFAKAGDNKITLKGNQKHHTKHNEFRCYHCGYTADRDAKVPVSLMRYNADSMAEIMKRQKLGQDYQVLGI

SEQ ID NO: 50108 - protein, 369 aa, unknown
  TnpB Polypeptide
LKLTAQVKLIATPEQADALKRTMQAANTVCDSISAWAWENQTFGQYPIHKGQYAVQRAESGLTAQVIVRCIGKVADAYKLNRRTQRTFQPTGAIAFDDRILTWYTDKGQVSIWSVDGRLKLPFVCGEYQRGLLAFRQGEADLAFVNGNFYLMATVSIADPPLIETDGILGVDLGIVQIATDSDGNQYSGETVKACRRRNRVHRSGLQKTATRRAKRTLKKMSRKASRFCKHVNHVISKQLVQSALSSRKALCLEDLTGIRDRANGFSREFKSKEMRWQMGHWAFDQLKQFVVYKAKRAGVLVIFVDPRNTSRACSCCGYCDKANRKSQSQFLCLQCGFQANADLNASANIARKGLGARATVRTPKVAHA

SEQ ID NO: 50109 - protein, 433 aa, Bifidobacterium sp.
MLEAVKVALDPTPVQERLMLSHAGAARFAYNAGLAHVKETIETGGKLEWTLYALRRWWNANKGTLAVDADGTPWWRENSKEAYNSGLEALSDALSNWSKSRKGERKGRRVGFPRFKAKDRETPRFAYTTGSFGLVRADPKALRLPRIGRVHCMENVAGRVDGARALRMTVSCRAGRWHAALTVERADPTARRTPREGAVGIDLGVKSLATLSDGTTIANPHTLKANERRLKRAQRSLSRRQPGSHRRAHARERVVRLHARVANQRRDMLDKLTTWLADTYSDISIEDLNVAGMVKNHRLAQSIQDAAFAEFRRQLTYKTARTGAGLHIIGRWYPSSKTCSNCGTVKTKLSLSERVYHCEECGLSIDRDLNAAVNIQVAGSAPETLNAHGGDGRRNDASRRATQTPVKCEPSSHASGVRLGADDRKTVLQTKTN

SEQ ID NO: 50110 - protein, 440 aa, unknown
  TnpB Polypeptide
MGKTLKKYLLFDLDTTALKEEFGPKRYTVAYSMIRQFLENCGFEHKQGSGYLSTESISLNQTIAIYQAMTEEMPWLDSCSKTMDVGNVRGFYNLKTLSQNLVADKIAHYEKTGEMLKVTPARYKREFPWLKEVDSFALCNAQLNLDAAYRNFFRRVKAGEKHGFPKYKAKHRSRCCYKTNFVNGNIRFEGDERYLRLPKLGSVRVRQKREIDPSWRIKSVTVEHTRSGRFEVSVLFEFETQEPEQVKPESFVGLDYSSHDLYVTSDGERPGYPRYFRHAERKLAREQRKLSRMQKGSANWRKQKLRVARVHEKMKNQRKDFHHKAANGLVERYDCVCVENLDMRGMSRSLKLGKSTMDNGFGMFRALLGYKLEDRGKRLVTVGRLFPSSQLCHECGYRFSGTKDLSVREWTCPLCGRTHDRDVNAARNIRDEGMRLALSA

SEQ ID NO: 50111 - protein, 373 aa, unknown
  TnpB Polypeptide
MLILEYKLDGKPTQYAAIEEGIRVVQFLRNKCLRAWVDRIEEGKNCFAMNSYTAVLAKQYPFAARLGSQARQASAERAWKAVQRFYDNCTAKKPGKKGYPQFQHNNRSIEYKVAGWKLSLDGKHITFTDGLGIGTLRLIGTRSIETFPLAQIKRVRIVRRADGYYCQFCVDAQRNVVHVPTGKQVGIDMGLNAFYTDSEGETAENPRHYRKAEKQVKRLQRQVSRKKKGSKNRAKARKKLARKHLHVQRQREDHARKLACALVTSHDLIAYEDLQVRNMVKNHYLAKSISDAGWSQFLGWVRYYAALHGIECVAVPPAYTSQNCSGCGTYVKKSLSVRTHSCPHCGLILDRDQNAALNILEAALRILGHRKTG

SEQ ID NO: 50112 - protein, 380 aa, unknown
  TnpB Polypeptide
MIQRSYTYRLYPTKTQAAVLTEMLGAFCDLYNAALQQRIEAYRRQRKTLRYLDQANELKAVRAVDERLAHFSYSAAQQVLRRLDKAFTAFFRRLKTKAKAGFPRFQAKHRFDSAAFRVDDGLTIRKSKRLGVTGVPGEIKVKWHRDLPAASRVGTAVLLRSAGKWFVCFQIAMPETAIVERDGPSVGIDVGLTSLVATSDGETVATPPWTKRTAKKQRRLQRALARCQRGSRRRLKAKQRLARHNAHTANQRRDFLHKLSRSLVERYALIALEDLNVDRLARSMLAKAVHNAAWGHLRRFLEYKAASAGVRVEAVDPRGTSQTCPQCGAQAAKTLNNRTHACSCGCVMDRDVAAAVVILQRVQEMGPGHGLRSPSQRATA

SEQ ID NO: 50113 - protein, 418 aa, Scytonema sp.
MDVKSWFSMKQVYLQRQKWLKISSLSSTVLAADSTDLENTSLRSKKIQIYPDSSLKKEWNKWLAACRYCFNQAIAYQKKNGRISKLKLRNIIMSSTLPEWVKSTPCHIRQNAIFDAHQAYAASKDCKFRSCKAPRQTIKFNHSNYKSGRWYPNLTKGLTFIASEPLPTSSSSATQLIKTKNGWFAVFLEERTVQSRKTSGQVISLDPGVRAFLTGFDGNQFVEFGKGDMGRIARLCQHLDALMSRIAKSESRRQRQKMRQAAARLRSKIRNLVDECHKQVSNWLVNNYQYILLPTFETSEMTNKKRRKIRSKTARQMLNWAHYRFKLHLKQKAELNGCNVIDVTEEFTSKTCISCGHVHQKLGGSKVFKCPVCNHTIGRDFNGAFGILLKALRDTSYTISDDGVAIVALPDNISSCVA

SEQ ID NO: 50114 - protein, 409 aa, unknown
  TnpB Polypeptide
MRFPVVLFNMHPAGPRCLNINRIAGGVLLFMMIKTYRYRLYPTKEQQTTLNDILWLACWLYNRALDYRRKRWNESRKSVTYYEQSRMWRDWRNEPGDNSLRLLNMSAGQQVLRRLDSNHKQFLKGKRGFPRFKKASRFNSVNYKPGDGSQIKANRLYVQNVGFIKMRWHRELPEGKLKNIVVLRKPSGWYVLLQVDIPEQPIDKSTNPPVGVDMGITHALALSDRSTFDSPKSLQASLRKLRVLQRSVSRKKKGGKNRRKAVQKVARLHEHIANQRSDWWHKTTRQLVNAYGVIILEDLSLKFMLQNGHISRAAHDVGLGMFRTMLNYKAVEAGVEIVTVNPRNTSQACSGCGNIVQKSLSVRVHHCPNCGVTLDRDVNAALNILRLGHSRLALTYPVGESVAKEAVRL

SEQ ID NO: 50115 - protein, 531 aa, Nonomuraea sp.
VKWKVPLAEGETGRMACTRVLLRGGVEERSGVRSHGRLPVDLFELEGVPGAARMLLLAACDRQQAALERSEADPRRVVLRLQLPTRPDPRSYADRTWVACPISLPVTVPAGAALHLPTLRVRDGRVRAEITFTHAVPQARHPGHAVALGVDRGLNTLLPAGAARLHPDGRITTLGSGARFRAAGVLAKQHRLRRLSEHLHAKSTQHQHLLDGRAPNPALPGGHALPAEEARRVSARRVSARRAHLNGALAWAAARWTVDQALTAHASVIYLEDLRSLEASGMGRTLNTRLSQTVRGRIAHRIRHLAAEAGIAVVTLPARNTSRHCPRCLTVLRHRKAPDRPAISGWKGASCPNPACGWQGDRDQGAWQRIAARGLTHQTQTSVERTTATMAIRSVSESLEAQALITPNTPKTDRTDRSKTGPTRRSTTRPAPRRRRAPSPARPLAPAGQRPEGPASTDRRQLPRAAHRHQGGATTSTPTTRHRPRGAALGAGFHLHVHATPPRWETIPGTMSSLGSLSWSETLEPTGDCLA

SEQ ID NO: 50116 - protein, 405 aa, Nonomuraea sp.
VVVGKLIGVSRYRLQPSPAQEAALLVHCGHARFVWNLAVEQHAHWRPGRKRAPGFAEQCRQLTEARAESGWLRAGSIIVQQQALKDFAQAMANFFGATHRRPTWRKRGCGEGFRIVAVKAGDVRRLSRHVGEVKVPKVGWVRFRWSRPVPDGVKSYRVTRDRAGRWHVAFAAIPEPIPVPGTGEAVGVDRGVAVSAALSTGEMLNAPGPRATEKARLLRLLRKLARAKRGSNRRGKVKAAIARVKARESDRRKDWVEKISTDLARRFDVIAVEDLKIGNMTRSARGSIDAPGRNVRQKAGLNRGILAAGWGPLITRLEHKAPGRVVKVNPAYTSQRCSACGIVDAKSRESQADFRCRSCGYACNADVNAARNIEHAAGHAVSAREGPRVAGPVHREPQHDLLLVR

SEQ ID NO: 50117 - protein, 368 aa, Nonomuraea sp.
VAQIVKRAYKYRFYPTPEQAEELARTFGCVRLVYNKALEERTRAYTLEARRVSYVESSAQLTEWKRSGEFDFLFEVSSVPLQQALRHLQAAFANFFAKRAKYPTFKSRKKSRASAEYTRSAFRWREGALTLAKMDTPLAIVWSRPLPEGAQPSTVTVSRDAAGRWFVSLLVEEKIRRLPRAERSVGVDAGITALATLSTGEKIVNPRHERRDRRTLAKAQRALARKEKGSNNRAKARLRVARVYARIADRRRDHLHKVTTRLVRENQVIAVEDLTVRTMVKNRSLACAISDAAWRDLRMMLEYKAAWYGRTLVAVDRWFPSSKLCSACGTLHDTMPLNVREWTCACGAAHDRDVNAAKNVLAAGLAES

SEQ ID NO: 50118 - protein, 394 aa, Nonomuraea sp.
VRRSFKFLLRPTARQAAALTACLEDHRQLYNAALEHRRIAYAKAGASIRYGEQSADLKDIRADDPDGQGRWSFSSQQATLRRLDKAFRAFFERVKAGRTPGFPRFKGRGRFDTVEWPKDGDGCRWDSQPAHPTAAYVRLQGIGHVRVHRHRAVKGRVKTIAVKREGRRWYVVLSCDDVPAEPLPATGAVVGIDLGVASLVTTSDSGQVANARHLAATAGRLANAQRDLARKKRGSKRRRKAVGRVATLHAKVRRQRLDHAHKAALALVRAYDVIVHEDLRVTNMTRSASDTVDQPGRNIAAKSGLNRSILDAGWGVFLTILAHKAESAGRELIAVEPRNTSRTCARCGHCATENRLTQAEFACTACGHTAHADVNAAINILRAGLALRQAAEAA

SEQ ID NO: 50119 - protein, 333 aa, Nonomuraea sp.
VGVRRSFKFLLRPTARQAAALAACLEDHRQLYNAALEHRRTAYRKAGVSIRYGDQSAELKHIRAADEGGQGRWSFSSQQATLRRLDKAFRAFFERVKSGRTPGFPRFKGRGWFDTVQWPKDGDGCRWDSQPHHPAATYVRLQGIGHVRVHQHRRVSSTVKTISVKREGFRWYVVLSCDDAPAQPLPATGAVAGIDMGVASLVTTSDGQHLANPRHLQSSADRLAAAQQALARKKRGSKRRRRAVARVAALHAKVRRQRLDGAHKAALALVRAYDVIAHEDLRVTNMTRSASGTVEAPGRNVAQKSGLNRSILDAGWGCSWASSRTRLKAPVES

SEQ ID NO: 50120 - protein, 267 aa, Nonomuraea sp.
VKVTRIAYSRNLNHGKYARLEEQAIRLGRVRSLVWRLYGSTAGAGVGDRTIRDRRAKLRSVAEQAEQRGDRAKAQRIRDHDLGTLKQERRSTAWECRIRDITFQAVHAVADKAGVIVAEDLTKTFSSRKKLGKNTNRRLAAWTKGVTAEALHAVSDRRGSAVRLVNAAYTSQVIPFTDILGVRKGDRLHCTGCGAVWQADHAAAIDILRRDGDPDITRYTPHTRVRQLLRERADRHRSRLPDQDSSTQHLCQCGERNIHPRPTMGKE

SEQ ID NO: 50121 - protein, 398 aa, Nonomuraea sp.
VQLRYQYRLYPTSAQRDALARAFGCARTVFNDGLRMRQEARENGLPYISDADLSKRIITQAKKAPERAWLGEVSAVVLQQALADLNTAYRNFFASLTGKRKGPKIAPPRFRSRKDNRQAVRFTRNARFSITAGGRLRLPKIGDVPVRWSRGLPSAPSSVTVIKDASGRHFASFVVETSDGPLPESASEVGIDLGLKHFAVLSDGRKIDNPRFLRRAERRLKKAQRALSRKAKGSNNRAKAVVKVARAHARAADARRDFAHKLSTQIICKNQAVYVENLSVKGLARTKLAKSVYDAGWGQFTAMLAYKAARHGRTLVRIDRWFPSSKMCSTCGAVAESLPLRIRSWTCPCGTVHDRDVNAAINILAAGRAERLNACGGQVSPPLAVAQVDEAGSLRGTA

SEQ ID NO: 50122 - protein, 383 aa, unknown
  TnpB Polypeptide
MQSQLVKQFCGCARYVYNRTLSLERSLYKKDNKHSFKYAEAVNRLPEWKKKNPFLKECHSQVLQQSLKDLDQAYINFFRKRANFPKYKKKFRHDSIRFPQGVELDEAKQQIRLPKIGWVGYRKSRDIMGAIKNVTVSRRGEKWDVSIQTEYEVSLPAANPSEIGIDMGVKRFVTMSNGDFVEPLNPFKQEREKLAKLQRKLARQKKGSRNSTKTKRKIARLHRYIADSRRDFLHKTSTKIAKNHSIVYVEDLKVSNMSASAGGTKESPGKNVRQKSGLNRSILDQGWYSFFQMLSYKLERGGGKLIKVDPKNTSRTCPRCGLVSAENRKSQATFACIGCGYRSNADEVGAINVLRAGRAQLACAMSGAVWPLSAGTRRDPLQH

SEQ ID NO: 50123 - protein, 217 aa, unknown
  TnpB Polypeptide
MGVKHFATLSDGKVFEPLSPFKREREKLAKLQRKLARQKKGSRNSRKTKRKIARLHRHIADSRRDFLHKTSTQIAQNHSTVYVEDLKVSNMSASAAGTKENPGKKVKQKHSLNRSILDQGWSAFFRMLSYKLERRGGRLIKVDPRNTSRTCPQCGLVSAENRKTQASFACVACGYRANADLVGAINVLRAGRARLACDMSGAVRPLPAGTHRDLLQH

SEQ ID NO: 50124 - protein, 419 aa, unknown
  TnpB Polypeptide
MKQQIFRKAGEKVSDLTKTIKLRISVTPEQIELFRQTTEQYRQACNFVSQYIFDNAFDLAYLSLNRALYADIRSRFGLKSQMAQSCIKTTIARYKTVKEQLFQNPYRYRDENGEWKRINRTLEWLWKPIFFGRPQVDLVRDRDYSFVDGGKTLSINTLGGRVKCSFFGEHFATFLDGSYDLGTAKLIELNGLWYLHIPVTKEVEDFEKENVRHVVGIDQGLRFLTVSYDEQGKTEFISGKKIATKRRKFQEVRRQLQSKGTKSAKRKLKKLSGRENRWMSDVNHQISKTLVQTYGEGTLFVIEDLTGVSFEEQNLKRTKDGRNELRSWTFYQLEQFLQYKALEAGSKVLKVSAKYTSQRCPKCGRIHKLNRKHETHEYICDCCGYRSNDDRVGAMNIYTLGTMYVSGDTHPRFGIRKIG

SEQ ID NO: 50125 - protein, 264 aa, unknown
  TnpB Polypeptide
MRIYPDDEQRHKIDVTLSHCRYIYNKMLERNTVIYNRRKEHLNYYAMQNLLPEMKNYLPWLKEADSKALQYACRQLNAAFDRFFHKQGSYPRFHSKRGKQSYTTTHASVICVEPHRVKLPCLGWVRTPETRIPDGSICYATVSLEADNRYYVSITYKKEVPDITPVVLKPENVLGLDYKFDGLYTDSNGHTEDIPHFYREAQRKRTKLQRRLSKKQGSRKGERKSKNFMKQLRLVNRQESHIANQRKDCMHKLSTEIANRYDAV

SEQ ID NO: 50126 - protein, 385 aa, unknown
  TnpB Polypeptide
MEQALTLVCTIQPAEDERTHIEATLRAFADACTYIHATIPERITNVMRMQTMLYYDVRARFGLSSNLAQQAFRRVASNRKAAKAHGEAVKAFAPTSIPYDQRIFAFRERDWSVSLTLLHERVRFPLHLGNYQHGKLRGQWSTSAQLCKHRDGSYAVHIQIKAPVPTPATPTDVLGVDLGRTDIAHTSEGTAWDGRAIHQCRDYFARMRATLNHKASKGTRSTRRRCRGLLDRLSGREQRFQRHTNHVISKTLVETAQQTNAALALEDLTGIRDRTNQEPRPKTERRRSNSWAFFQLRQFVTYKAALTGVVVHLVLAAYTSQMCHCCLHIGSRKGKRFACTNPACGWAGDADFNGAKNIRTLGLQVTQPRGPWVHCAYRAPESPAL

SEQ ID NO: 50127 - protein, 351 aa, unknown
  TnpB Polypeptide
MKTLRLRIKDKHSSILNEMALEVNFVWNYVNELCSNHTKKTGKFFSAYDVHGYTSGATRDGLKIHSQSVQAVAEEYVSRRKQFKKLKLKWRSAKGSKKSLGWIPFKTSCIKVEESRLRYCGVWLGIWDSYGLSQYQLKGGSFNQDSRGRWYVNLWVESKVQEKKTGTKSVGIDLGLKEFAVMSNGEKIDSIKFYREYEGKLILAQRANRNDRVRAIHAKIKNKRLDFHHKLSNKLVAENSAIFVGNVSAKSLVKTKMSKSVLDAGWTAFRTMLKYKSHEAGVWFEEVNERYSTQTCSCCGSRQDSPKGRAGLRIREWACGECGITHDRDVNAAMNILALGHERLAVGISAV

SEQ ID NO: 50128 - protein, 395 aa, unknown
  TnpB Polypeptide
MINALKMRLKPTKEQQELMLKSAGCARFAYNFMLTYCSEYYKTGEKKTSTNARDVLTQIKHETYPFLEEVSADAWRNTSQDLMQAFKNFFEGRAEYPQKKTRKNKKSFFHDNRKLEFTKTHVKLEKIGWVKYISDQNPPLGSYKKLKIKVSNPRISHDNLHWHLTFGIEQETAKLEPTDLELGIDLGLKDLATLSTGEKVANINRSKKVKRLKKRHKRLSKQISRKYEDNKVEIKEETKKDKPKYKYVKTNNIKKLEHKRRLIERKLTNIRNNYTHTFTKQVCLRKPSKVVLEDLNVSGMLRNKHLSKAISECKWYEIRRQLGYKLLKYLGIELTLADRFYASSKKCSCCGYKYNQHDYNNIPWNLKIRSWTCAECGTTHDRDINAAINLANYTM

SEQ ID NO: 50129 - protein, 298 aa, Microcoleaceae sp.
MKQVLTVSCKLQVAPEQSIKIDETLRAFADACEYVNQTVQPTLMNELAMQSLVDRDVRTKFGLSAQLAIHAIRRVSGNRKTAKKDGKPVKSFAPTSATYDARTFSFREKDWTVSLTTIDGRERFILAIGNYQLGLLKGQKPKTATLCKRKDGSYYLNIQLESIPPEPEKTDRVLGCDLGRTDIVVTSDGDKFSGKEITKIRNHYANLRANIQQKATRGSRCTRRRCRGLLKRLSGKEKRFQEWVNHTISHRIVTKAKTKKQAIALEDLTGIRERTNQFPRSKRERRLSNSCSTNCVNS

SEQ ID NO: 50130 - protein, 545 aa, Microcoleaceae sp.
MDIKYKSNKNITYSCKYQIVWCPKYRRKVLIEGVDIPMKEILLETATEFKSELIEMEVMPDHVHLLVECDPQFGIAKLIRYMKGRSSRYLRQEFPWLKSRLPTLWTNSYFISTVGGAFQWSSSISRIKKMSSYGCQQNLINPEQSLENVLEFVCEESNKLANCGIYYSRQLYFKTDQIPSRFDLHRLMKDNLHFKALYSHVAQQTLTGVAESFKSYIGLLKGISSGTVTQHPRLPGYRKNSLKLATFPKTDVKLKNGQLRFPLGGKVKLWFGIGEFYLPMPSNLEYSKIREIRLLPRNGQFYVEFVYKVESVKVDLDVGRALGIDPGLNNWLTCVSNVGTSLIVDGLHLKSLNQWYNKQISTIKENKPQGFWSNRLAGITEKRNRQVRDAVNKTARLVLNHCLENKIGTVVFGWNKEMRQGINLGGKTNQSFVQIPTDRLKDRISQLVEQHGVRFVETEESYTSKASFLDSDELPTFGAKTEGWKESGKRVNRGLYRSKNGVKINADCNGAANILRKVAATLGLCLEEVSRGALISPLKVRIWTL

SEQ ID NO: 50131 - protein, 387 aa, unknown
  TnpB Polypeptide
MLKAYKYMIYPNQEQKEYLSKIFGQVRFIYNLGLETKITNYTGNKKNIDCFDLNKQITELKNTECPWLKESPSQALQASIRNLDNAYTNFFRGFGFPKFKNRYGKQSFQLPQGVFLSENKKQIFLPKLRYIDIDLHREFKGEIKTVTVSKSITNKYYVSILVETGQPKPDKKPIKVETSVGLDLGIKDFVITSDGMKFKNQDFFKSAMNELRIQQRSLSRKIKGSNHYLRQKMVISLLHEHIKNQRQDYLHKISKYLVDNYDTICMEDLNVSGMIKNHKLARAISDMGWSEFKSMIEYKCDWYGKNLSVIGRFDPSSKSCSSCGAINKDLTLNDREWTCKCGKHHDRDINAAMNIRNFGLRNQPSVTQSEWLHCACGVETTTSLVSQ

SEQ ID NO: 50132 - protein, 367 aa, Caloranaerobacter sp.
MEKAFKFRLYPNKKQVELINKTFGCVRFIYNYYLDKRIKAYQEYGITLNYNKCSSDLTQLKKKKQWLKKVDKFALQNSLKDLDKAFQKFFKEDAGFPKFKTKKNGYQSYRTTFTNNNIEIKGNRIKLPKLSFVKFAKSREIEGKILNVTISKTPTNKYFISICCRIEEVKEKEKANKMIGIDLGIKDFLIDSDGNKIPNPKYLSKLEKRLVKEQRKLSKKQRGSSNFRKQTKRVAKIYEKIKNQRNDFLQKLSFKIINENQVIVLEDLKVKNMLKNDKLSKSISDVAWSEFVKMLEYKAKWYGRTIVKIDTFFPSSQICSICGYKNKEVKNLNIRMWECPKCKTIHDRDVNASINILNEGKRTLGIA

SEQ ID NO: 50133 - protein, 447 aa, Lachnospiraceae sp.
MSTYSVKVSRSADIKKALSATADIYRRAVDFFIGVCDGEWDTVSAGKGPNGKVNAVESLTVRTKKRPSVPYDFGKDFYKFPSYLRRAAIAEAAGKVSSYKSNMANWKSSDPHTRGKRPGYPKAGCVYPAMYRDGMFIRTGTYTASIKVYARNTWDWLDISLCRGDVDYILHHCGGRKECVPTLQKRGKLWYLDFAFEERITLPDTEASARRILAVDLGIGNACTCSVMEADGTVTGRKFLKLPGENDRLTRAVGRIKKAQMHGARRMPQLWAKAKGINDDIAVKTAEFIVKTAVLYDVDVIVMEHLDVRGKKRGSKKQRLHHWRAMYVQSMVALKAHRERIRVSNVCAWNTSRLAFDGSGRVKRGRESEQTAGSYSICEFSTGKVYNCDLNASYNIGARYFVREIIKSLPATAKQQLETKVPSAAKRSTCTLSTLISLSAALAAAAA

SEQ ID NO: 50134 - protein, 397 aa, Natrialba sp.
MASDEYHRRTLITRLTLRSDEDEQLLLNTIEEWLDGCNIASTLAWNDCHTKSDVRQLAKHKIKQETKLGDQHATLACHEVSGAIKSCIERRKNGKKASQPQFTTRSMTFDRRTLTVFPDQEKVTLTTLGDHSRVHADLCLPENEDGYQYDYLYSDEWEYTESTLHYRDGDWYIHLGYRTPTEDGEPEAATENGTVLGVDLGVNQIAVTSTARFFDAGELNHYRRECENTRGSLQQTGTQSAHRTIESLSGRENRYVKHVLHSVANGIIEEALEHNCDGIVFEELDGIREDLPEAAWHSEWAFRKLKDFVEYKAEYEGLFVDTTNPRNTSKRCNECGFTHDDNRYARQFECQSCGKTNHADYNAAKNIAELYLRRGHQSSGRRSVSQYALKSGARTPS

SEQ ID NO: 50135 - protein, 390 aa, Natrialba sp.
MQSSELTHTLSFGLHIDTGSPDDLRNGCLEARRIRNEVNRLDRHGWDWDDLRSVVVDNATHVKNTSQQIVDKILGEIETYHEHKDDGWGRPYPYIDKLYPMVMNHGEGYRLFLEDEDTVRFRISAAPRNHVKGELRGSPDHFDRVRTALENDEWRVGTAEVVHKHSEWRLHVTVTHEQHHVASKNDAETIVGVDVNEDCIALTAMNRDGAMLDSVVIEYPEIKERRHEFFTKRKRMQNAGQTAFESVVQTEERDYVHDCLHKVSRQVVDWVSQFTDPVIVFEDLKDMRDSIDYGTRMNRRLHSLPFAALREMVSYKASWRGIPSDEVDPEYTSQRCPRTECQHTSRSNRQKKRFRCQECGFQDHADRKAAVCVVQNWFAVATIVSELIRR

SEQ ID NO: 50136 - protein, 437 aa, Natrialba sp.
LAHEKRAAFLGTTRGGRHVTELTETLELKLVELNAHKHRKLCETKQAYQDALKAAFNANCTTQTEANDVVVNYDLSGYAKNALKKYVPQLCGDSYNADELHNDHPVRFTNEGPKLDHQPQNALEWYVKIPHHEDYHLWIPVQINPNQREWLEALYADDAEMGECRLIERDGTWYFHVTATRDVEEQSQASVDERTPIGVDIGEASLVTVCHRDESGSPVRPELWANDGKAVRRLRKTYFTAKRRLQKRGSERIAESYGDTLWSQIDNLFHRVTREVIEYAESVENPVLVLEDLTYIRENMDYGKYMNRRLHGWGFAKLHAQIRYKAAEKGIPVETVNPRNTSKACHACGEHGSRPRQATFRCSNDDCWLGEYQADVNGAINIADRYRSGESHRRSDRASRQKAGDDDSATDGASLTGPQDSHADAETQQKTCGPYAS

SEQ ID NO: 50137 - protein, 302 aa, unknown
  TnpB Polypeptide
LHSQTLQAITETHAKSRKQFKKAKLNWRTNNPKSKRKSLGWIPFKKTAIKYLGVKKAGKKALKSTIQFSLAKGKKLTIDVWDSYNLALYTINTCELVQDSRGHWYACITIKEYPKIECGTGETGIDLGCRDSATTSNGEVLKTKVTQQYAKKLGIAQRAKNKQSVKAIHAKIKNTRQDLIHKFTTNLAKTNKIIIIGKLHSKSFTSTKLAKSVYDAGWFEIKRQLTYKCENAGCYYDEVNESYTTQTCSCCGSRQNSPKGRTGLGIREWLCECGVTHDRDINAAKNILALGLERLVVGIPSL

SEQ ID NO: 50138 - protein, 385 aa, Bacillus sp.
LNHHKAYRFRIYPTKEQATLINKTIGCTRFVFNHFLGKQKDKDNYWYIVEEMVQNGQFPHNKWKGEFFNKKESVKAVKQLKQYYPFLKEVDSIALQKAVENLSDSYTRYYKKQNKVPRFKSKKNPVQSYTTKYTNGNIEIKGNKLKLPKLGLVSFAKSREVEGRIINATIRRSPSGKYFISIVAKVDIQSLPKTNQEVGVDLGLKDFAVCSDGKIYENPHFLRKMERKLHKEQRTLSRRIEGSAKWNKQRIKVAGIHERIANARKDFLQKVSTELVKNHDLICLEDLQVSNMLKNHHLAKGISEVSWAEFRTMLEYKCKWYGKQLVTVAKNFPSSQLCSCCGYQHKEVKNLNLREWICPSCSAHHQRDLNASYNLLTEGKRLFSA

SEQ ID NO: 50139 - protein, 348 aa, unknown
  TnpB Polypeptide
MALTNLGYRDYEVWTPDLPKTIQHQLYGSFKNYMGSLVLGTVPKRWFVRTWIPLKTLRIYSDGSMKGDKSAPVVLDLKNNVIEIRWVCKNKVSIPMPDQVVNWINERLREGGDVKFARIGLKGDEPYLALIAEREVGPYEPSEYRLVVDVNSWRYGISWGLVRDGRIVSYKQEGLNLGRYYGLYDELIRLGEKYGELKRSGLHRTTEGRRLWKRIKAIHARLYAITRDKAYFLASKLVRKALRYGALLVIDDVTEETRRELLEEKLPPDVIKLLMSNLKRFVHQLETLAQWYGTPYRFERLPSTACPMCGSKLVQEEGRTMVCTNCGFKAPRDLVPMHWAMRGEYVYA

SEQ ID NO: 50140 - protein, 378 aa, unknown
  TnpB Polypeptide
LRKTIGSCRFVYNWALEQRREAWVKEKKSMSYAKCCKALTELKHLPEHKWLNDTSIICLQQSLSHLDFAFSNFFKRKSGYPSFKRRKRGGSAKFVGNGFSLKENELKIAKIKTPIKIQWSRELSSAPSSCTVSQNAAGQWFVSFLCEEEITKLPASNSKIGIDVGIESFATLSDGRKFSQPKKIRRLRKKLARLQKLHSRKQKCSKNRERARKKVARVHQHIADVRKDFLHKLSTQLVRENQAIALEDLAVRNMVKNRKLSRCISEQGWREFRTMLEYKCEWYGRELLIVDRFYPSSKTCSCCGAKASFGLETRQWTCGSCGANHDRDVNAAKNILAAGLAVSDSGVDGRPMKNYVLRGIRQRKSKSVSQDTQFSSLD

SEQ ID NO: 50141 - protein, 517 aa, unknown
  TnpB Polypeptide
MKTTRHATYNLNYHLVWLPKYRNSVLVNEVADRVRTILHEIADDKGLEILDLTVQPDHVHPFVSSPPKHAPSLLANWFKGISSEVQPPLRRPRRRENRMGERLLRRDSRARIERDGQELHPASRGGRVVTTLTKTLELKLVEPNAHKRRKLRETREAYQQALHDAFDAGCTTQTEANDVVVNYKLSGYAKNALKKYVPQLTTTYNAGELHDAHPVRFTNEGLRLDHKPENAIEWYVKIPHHEDYHLWMPAQPNPEQRDWLEALNAGDATMGESRLFERDGTWYLHVTATRDAEGGSEVSDEERTPIGVDIGEASLVTVCHRDDHGCPTAPELWADEGKTVRRFRKTYFTATRRLQTRGSERIAESFGDDLWNQIDDVFHRVTREVVDYAESVKNPVLVLEDLTYIRESMDYGEYMNRRLHGWGFAKLHAQIRYKAVEKGIPVKTVNPRNTSKECHACGEVGYRPQQATFKCTNDACWMGEYQADVNGAVNIADRYLSGESRFREHENDDDSVEDGGV

SEQ ID NO: 50142 - protein, 347 aa, Xylella sp.
MLDSALPKPSQHSLRRQLNAIKREQFPWMSEVTKNAPQMAIIQLGRAFQNFFAGRAKYPKFRKKGMHDRFTLTNDQFDLEASRIRIPRLGWVRMRETLRFAGKIMLATVSRVAGRWFVSITVDVPDPSHLPQAENQGTVGVDLGVLVLATLSTGETVCGPRPHRALLGRVRRLSRSVLRKVKGSANRHKAKATLANLHARIAAIRLDALHTLTSDLTRRFHTIGIENLNVKGMLRNRHLARSIADIGFFEFRRQLEYKAMMRGGQVVVANRFFASSKRCSTCGHTLNELPLSVRQWACPACGARHDRDVNAAVNLKNMAVSSTVSACGEEGAGPRRKTAVGEAGSQL

SEQ ID NO: 50143 - protein, 367 aa, unknown
  TnpB Polypeptide
MRVTDNPDFFCSSLSKQTAQHVLKDATNDFDNWLKALKSYKKDPSKFLGRPKMPGYIKSDIRTTCLTNQDCTIKNGILKFPLTKAVIEVPQVPDDAKLVEVKIKPYYGNFMILCTIKTESVSVTEDRPFMAGIDFGVDNTAAIVTNEGHTLLFQGGALKSMNQHFNKERARLISCITVGHKTEENVTSKRLRSLSMCRDLFLRDQMHKISSLIVSFCVKHNVGTLVLGVNPLWKQYSSLGDAENQNFVQIPLAVLRFMITYKAQRAGITVMEQEESYTSKSDFLSHDYIPTYGVDDDRADFSGLRVKRGLYKNGTGTYLNADVNGAANILRKAVPDAFMEVNDFSYLKHPYVYGFHEVNPIGISYAA

SEQ ID NO: 50144 - protein, 401 aa, unknown
  TnpB Polypeptide
MTLRAYKYRVYPTQDQKVLLAKTFGCVRFVWNNYVATFNSYDEQTNPCPVYKTSTELRHEMPFMLEVSAAALQQKIRDFQEFKTNYFSKTRKKTIGRCGFKKKLARQSYRLPNQKFKLDVANQQIALEKIGKVRVVVDRNSKKDCSYRSVTISRDRYNCYFVSVLVDELVEPTTTSTGKSVGIDLGLRTYVTLSTGEKIENPRWLRENQAKLRTLQKHLSRKVKGSSRREKCRRRVAALHWKIANQRKHFHHVLAMRLVKEFDHIGIEDLRVSNMVRNHNLSKSISDAGWSQFATFLKYKAAWENKIVQPVDTFFASSKLCSVCGTKHKDLEMKDEHWTCTICRTLHDRDYNAAINIERESLRTAQGVACALRTQSRCKTSSLLEATCCEAPKKPGIHSFL

SEQ ID NO: 50145 - protein, 410 aa, Streptomyces sp.
VAITQLRYSFRLYPEPGQARALARAFGCARVVYNDAVRARRDAHTEGHPYPSLSLLSRALVTEAKRRPERAWLGEVSAVVLQQSLRDAEQAYRNFFASLKGERKGPKSEEPRMKSRKDKRATIRFTANARWSITPDDRLNLPKIGPVKVVWSRRLPAVPSSVTVIKDSAGRFFASFVVDTDPAADAERMPATDQSVGIDLGLTHFAVLSDGTKIDSPRFLRRAEKKLKKAQRELSRKQKGSKNRNKARLRVARAHAQVADARREFHHQLSTQLIRENQAIAVEDLAVNALARTRLAKSVHDAGWGSFLTMLEYKAARYGRTLVTIDRFEPTSQVCSTCGTKDGPKPLHVREWTCPACGTLHDRDTNAAINVKTAAGLAVSACRAPVRPEPVLAQREETGSHGIPTADRAA

SEQ ID NO: 50146 - protein, 328 aa, Escherichia sp.
VKRLQAFKFQLRPGGQQECEMRRFAGACRFVFNRALARQNENHEAGNKYIPYGKMASWLVEWKNATETQWLKDSPSQPLQQSLKDLERAYKNFFRKRAAFPRFKKRGQNDAFRYPQGVKLDQENSRIFLPKLGWMRYRNSRQVTGVVKNVTVSQSCGKWYISIQTESEVSTPAHPSASMVGLDAGVAKLATLSDGTVFEPVNSFQKNQKTLARLQRQLSRKVKFSNNWQKQKRKIQRLHSSIANIRRDYLHKVTTTVSKNHAMIVIEDLKVSNMSKSAAGTVSQPGRNVRAKSGLNRSILDQGWYEMHRQLEYKQLWRGGQVLAVPPA

SEQ ID NO: 50147 - protein, 402 aa, Escherichia sp.
VKRLQAFKFQLRPGGQQECEMRRFAGACRFVFNRALARQNENHEAGNKYIPYGKMASWLVEWKNATETQWLKDSPSQPLQQSLKDLERAYKNFFRKRAAFPRFKKRGQNDAFRYPQGVKLDQENSRIFLPKLGWMRYRNSRQVTGVVKNVTVSQSCGKWYISFQTESEVSTPVHPSASMVGLDAGVAKLATLSDGTVFEPVNSFQKNQKMLARLQRQLSRKVKFSNNWQKQKRKIQRLHSCIANIRRDYLHKVTTSVSKNHAMIVIEDLKVSNMSKSAAGTVSQPGRNVRAKSGLNRSILDQGWYEMRRQLEYKQLWRGGQVLAVPPAYTSQRCACCGHTAKENRLSQSQFRCQVCGYTANADVNGARNILAAGHAVLACGEMVQSGRSLKQEPTEMIQATA

SEQ ID NO: 50148 - protein, 228 aa, Streptomyces sp.
VTGFLGCRPRPSGRSQPIFASFVVRTHPTAVLPETTSEIGIDLGLTHFAILSDGRKVSSPKFLRRAERKLRKAQQALSRKAKGSNNRKRAVAKVARLHARVADARRDHHHKLSTTLIRENQVVYVEDLSVKGLARTRLAKSVLDAGWARFTAMLEYKAARYGRTFGKADRWIPSTRTCSVCFVVGGPKPLDVREWTCDGCQTTHDRDVNAARIVLAAGRADKRNACGG

SEQ ID NO: 50149 - protein, 391 aa, Anoxybacillus sp.
MIRTYKVMLLPNNKQKTKLFQCAGVARWAYNFALAQQQENDKQGGKFLSDGELRKRLTQLKQTKEYSWLNQFSNNITKQAIKDAYQAYKNFFEGRAKFPKFKTKKRTRPSFYQDTSKIKITDTHVKLEKLTPSKKKTKQKLNWVRLAERGRIPHGAHIKYVNPRIVFDGLRWFLTVGVEEAEVKHETYNEGIGIDLGVKSFATVSNGMTFPNIHHMPQVKKLEKQMKRMQRKISRKYEMNKIQTEGGEFRYRKTENIKKLEFLVLKKRRRLKNTQLNYTHHITTTLVKTKPSYVVMEDLNISGMLKNRKLSKAIQQQTFHEFKRQMTYKCAWHGIELIVADRFYPSSKMCSRCGHVKEKLSLSERTYRCEACGIEMDRDLNASINLKNYAK

SEQ ID NO: 50150 - protein, 391 aa, unknown
  TnpB Polypeptide
MRTYKFKMYPTSIEREKLFDNLNTCRFVYNKMLETYNKYDDEVDVKLSGYDLAKFLPLWKKDKYQFLSNYHSKMLQMVTNKIKGNLDGLKESKKKRKVGILRFKSRNRYSSFTYNQSGFKIIETDKRYNKLYLSKIGDIRFKQSRDINGAIKQVQIKLKPSGWYCYISTDGKYECKNIKDNKIGIDMGILNFITTSNKQVIDNPLYMNKSLSKIKLLSKQLSRTLKGSNNRKKVIFKLLRLWEIINNQKHDYFHKISTKLVRENILLVLEDLNIKSMTKKLGKNKYRNMRNIIDSSWGMFINMLKIKVSSTKSEIIFVNPKNTSKICSTCGHIKQDLQLSDRIYNCEECNTIIDRDYNASKNIFRRGQELTFVGGDTIVSSMNQESMSFRA

SEQ ID NO: 50151 - protein, 298 aa, Acaryochloris sp.
MPRFKKRHSTQTARFTLRGFSVGTKLYLAKIGSIKVQWSRALPSEPSSVTIIKDPSGRYFASFVVEKEPELLLWNDTSIGIDLGITTFATLSTGQKIEAPKPLKRYLKKLARLQKTLSRCEKGSNRRQAAKLKVAQLHNRIKDIRTDFLHKLSTQLIIENQEINLEDLNVSGMLKNRRLSKAISDLGWRQFRTMLEAKAIMYGRDVNIISCWEPTSQTCSCCGHREGRKQLGIREWQCLNCGVFHDRDINAALNIKAAGGHSEAINGCRRECKSEVNSAVLSDASTRLVDKQLELFAS

SEQ ID NO: 50152 - protein, 417 aa, Acaryochloris sp.
MFTMTYRYRIYPSLEQETRMLSWLETCRSVYNYALRERKDWIGSRKCQIDRCSLQSEYIIPADAPYPGYYPQKKNLTQAKKVLPHLKDVHSQVLQDVLGRVDASFEAMRQRGHGFPRFKKFGQYRSFLFPQFKTSPVQGNQIKLPKIGWVPITLHRPIPDDFDIKTVRVVRKHSGWYVVLCIQADVSIPEVPPHGHSIGIDVGLEYFLSTSDGEQIARPRFFNKLHRKLELLQRCLKRKQKRSNQRAKLIQRIGRVHEQIAASRLDWQFKLAHHLCDQAQTIFAEDLDFRIMAKGMLGKHTLDAGLGQFLNVVLPWVCFKRGVYYVKVDPNGTSQECPDCGARVKKDLSVRIHECHECGSVKPRDVASGQVINARGLSGVQIASGRDLSGFQVTDARQDRTKLEYFKSNLEKPALYA

SEQ ID NO: 50153 - protein, 395 aa, Burkholderia sp.
MQRLQAFKYELMPTGEQQRQMRRFAGACRFVFNKALALQKERYERGEKKLGYAGLCRLITDWRNSQQTPWLRDAPTHPLQQTLKDLERAYANFFAKRAGFPRFKKKGQSDSFRYPDPKQIKLDQRTSRLFLPKLGWLRYRNSRNVLGEVKRVTVSASGGKWYASIQTERVVERPVPKGGAIGIDLGIVRFATLSDGTFYVPLNSFRRHETALRRAQQAVSRKVTFSNNWKKAKTRVQRIHARIGNARRDYLHKATTTISQNHAMVCIEDLQVRNMSKSAAGSTVQPGKNGRAKSGLNKSILDQGWFEFRRQLDYKLEWNGGHLVAVPPQKTSRTCPCCGHVSADNRRGQARFECMDCGFEENADLVGAINVLRAEHARCACEVSDAARSPAAGTH

SEQ ID NO: 50154 - protein, 407 aa, unknown
  TnpB Polypeptide
LVTTSKDLAVLTARLEAGRQLYNATLSEAKKRLSNLRKSDLYTEAKAVPKSQKKARNEAFQKAKTACHYSDYDIQSFANQTAIASIWIKEHLDANTIQKTGTRAFKATEKMLFGNAKKVRFKGKGQFSSVEGKTNKQGIRWTGKGVEWLGLKLAAMITNDPVIQHGLSAKVKYGRLVRRVLNQKTYWFVQLVCEGNPYQKPQNSIGVGLIGIDLGVSTVAIVGDEETILKPFAEELTSNQKQIRRIQRHMDRQRRAGNPDNFNSNGTAKKGKKKWNNSKRYKQTVAKKRELERKQAATRKSLHGKLVNRTLKLGKNILAEKVSVKGWQRLFGKSIGFKAPASFQFSFEAQSREVCRGKLPPASFARMLAGQFYCFRLGKLHCLKRVCVVISRRNHCHNECMTAQHVV

SEQ ID NO: 50155 - protein, 453 aa, Mycobacterium sp.
MVKTALTARRADPTVVVPWTGFDLINAFNAWKKTEAAGRLWAVGRDGVIELAATGLAWRGDVCQQVFEEAAVDCGRALKAWADSRSGRCNGKRVGFSRFKKKASGPRPFRLRNTNRDGRRPAIRVGDDNRPRSITLPRIGAIAVHNDTRPLRRMLAKDRARILAVTISHRGGRWWASLTVEAADLHPLHCHPTRTDGDHGSWVGVDRGLTAFAVAADVDGTEVARFDAAPKPLRSAMTRHRQLTRNLSRKRKGSRHHQKAVLAVQRHLHRIANIRRHFLHQVSNALVKTHDRLVVEDLNVTGMLANHRLAQAISDAGWAEFARILCYKQAWRGGQLARADRFFPSTKTCAACGSISTHMTLADRRFTCDCGFSADRDHNAAVNPGALGPGPLRRRSIPGLPSRRPGYQCPPTGRRHPARSACRRRQPGRSGNQRSRTPCVNVGRPRRAVTATH

SEQ ID NO: 50156 - protein, 364 aa, Bacillus sp.
MHKAYRFRIYPNRTQRDLIHKTFGCCRYVFKHFLARRKEVYETEGKTLGYNACSALLTRLKRDLDWLKEPDATALQTELRHLDDAFKRFFREKKGYPRFKSRKNPVQSYTSKNNKGTIAIQGNRIRLPKLGWVRFARSREVKGRIISATIRRNPTGKYFVSVLVETEIQPLPACDSKVGIDLGVKNFAVLSTGEVIANPKHLHKHGQQLIRWQRILSRRTQGGRRWEKARLKVARLHEKVSNCRRDFLHKLSTRLIRENQVICLEDLQVQHMQKNHRLAKSISDASWATFRSMLEYKANWYGRSLVLVARTFPSSQLCSTCGYRNKEVKNLGLRALTCPECGTHHDRDVNAARNILQEGLRLLA

SEQ ID NO: 50157 - protein, 228 aa, unknown
  TnpB Polypeptide
MVYHREVPDDATIRRSSSSRNRPASGSPSSESKPRTTRHRSPRIPKCIGIDVGILKYAHDSDGTAVEGPDLTDERERLEREQRKLSRKEHGSANYRTQQRIVARRHADLKRKRRDFLHKLSNYYTREYDLVAVEDLDAKGLMELPSNSRNRAGAAWGTFLRMLEYKCDREGTHFVAVDPAGTTKECPTVALRPTNRCGYANTRVPHADSSRTATSTPPTTSFLADSPK

SEQ ID NO: 50158 - protein, 362 aa, unknown
  TnpB Polypeptide
LVYYWEEWVEMFENAKRMREEAGKRTLPKTPPLLLLVRFIMPDGSMRGKGTASVIVDLRKGELRIPSYGVVQRLPRRLVEALIEENLLEPRPDFVLQVTRKGFLRLIASRYVPAPAALPLRIIAIDENSYNSEALGVWNVLKTSRVVRSRYEEVMPRNRGFLDWTAALFQSAADGNAESLEKVKELLREAGKSEAEIAPLLVSEKLADIAASTKGREERLNRAFAEQLVSLVRKLVREAKARGWSVAIVIDPISHESLKGSKLQRTLLKPRSYLGNLALYEGARLKLYRVSGKQCPMCGEWGIEVAHRRYRCPRCGIEWDRDKCATFWLAKRFLDEHFKEESSDETFINVTGWLLRHPRGLL

SEQ ID NO: 50159 - protein, 246 aa, Khelaifiella sp.
  misc_feature (71)..(71): Xaa can be any naturally occurring amino acid
MKKLKKAYKIEIKPTEEQITKIHQTIGVSRFIYNFYIAHNKEVYEKEKKLISGMDFSKWLNNKYIPHHPDXVKKAEKKLKREQRKLSRKYESLKLRNKKEKGEATRQNIQKQIVKVQKLHQRLTNIRTDYINKTVNELIKQKPSFITIEDLNVSGMMKNRHLAKAVAGQKFYEFRTKLILKAKQNGIEIRIVDRFYPSSKVCSCCGAYKKDLKLSDRVYKCSCGLSIDRDLNASINLANAKEYKIA

SEQ ID NO: 50160 - protein, 415 aa, Pseudomonas sp.
MLFMQPVFEMQRLQAFKYELRPDGQQQRLMARFAGSCRFVFNKALAMQKANHEAGGKFIGYVAMAKELTAWRNGSETPWLKDAPVHPLQHALKDLERAYKNFFAKRAAFPRLKKKGQRDSFRYPDAKQIKLDQAGSRIFLPKLGWLRYRNSRDVLGIVKNVTVSLSAGKWFVSIQTEREVEQPLPQGGAVGIDMGITRFATLSDGTVYAPLNSFKRHETALRKAQQAMSRKTRFSNNWKKAKARVQRIHARIGNCRRDYLHKATTTISQNHAMVCIEDLQVRNMSKSAAGSTEKPGKKVRAKSGLNKAILDQGWFEFRRQLDYKLAWNGGWLIAVPPHNTSRTCPACGHAHAGNRQTQARFACVQCGYEENADLVGAINVLRAGHARFACEVSGAVMPPAAGTHRSDSGAAQCHA

SEQ ID NO: 50161 - protein, 292 aa, Moraxella sp.
  misc_feature (197)..(264): Xaa can be any naturally occurring amino acid
MKTLKLRIRDKHITKLNRLSGSVNFVWNYINDLSYKYLQKTGKFFSAYDLNEYTKGSGEFLGLHSQTIQAINETHAKSRRQCKKAKLSWRTNNPNAKRQSLGWLPFKQSAIKHIATHQTGKKGLKSTLQLSLAKGQKLIIDLWDSYNLSLYQINTCEIVQDSRNRWYACITVKEYPKTQCGAGSIGIDLGLKRQCHXXXXXXXXXXXXXXXXXXXXXXXXXXXXXXXXXXXXXXXXXXXXXXXXXXXXXXXXXXXXXXXXXXXXYQSDTLPKLARVAVKLTAIVRKVAQACE

SEQ ID NO: 50162 - protein, 478 aa, unknown
  TnpB Polypeptide
MLTIKLKYESSKENKQIIFNFQKNQNNVVKFLFNRLQEDETLSHRQLYNLARDKMNNIFIDSWFRDSAVDKARSMYSSMKESENKSVIFGSKKLFTKRCQHKISREKFQKEKVSPLYSLGEKHSFGNRKLELDVANNKILLKLTRDIKIVLSYKNNLSKTHQKYLDKLQELTKLKKLPLTFSIDQEYIYLTFDELELTGVKEINKKKNRIMSLDLNPNYVGYSIIDWTNQDKFKIIKSGILSNKEINDKQKDVRELKWELKKQGVDREARIEFYNKKNSYIKNKRSHEIVEVVKKLVNIAKSYNVENFSIEKLDMKPKDHGKGKRYNRLTNNNWNRNLFKNQLIKRLKFYGIDFYEILPQYSSFVGNIFFRNLRLPDQILASIEMNRRTYCFVQKYVLQNKEIYKVIFPSFCSNKKVISISLEEIGYDPNRTENWKDLYKKIKTLKIRYKVSLAEAKPPAGVFRLSSLKSLVKVFDYD

SEQ ID NO: 50163 - protein, 459 aa, Thermoleptolyngbya sp.
MLAGDNENEIIRELQPKYGLNKRQVNAIRSEVKGAIASAKECRKRHIKILEQQIKSTRAWLKTAEKSLSKLPDACSIRYRQHLRSSKRFVIHQKKRRLRLLENKLQYLKNAVLQVSLGNKGTQYTTVGATKESFGNQISQYDGSTIKFRVPYALEGKYGKTIAAPLRFEYEQGQQWIDEAIQANRALSYRIYCKDFRWFIACSTDVPEPDRQSLPRQYGCLGLDINPGVIGWVYVDADGNLKHHGQFKLNLHSRSSGQIEATLHDVTKQIVLIAQSLQCPIAIENLDFSAKKSQMRERGRRYARMLSGFIYGKFTELLGQKCQLAGIELIKVNPAYSSQIGLIKFMKQYGLSSDTAAAMVLARRAMRLSERVPNQNAYAGVKSAKHVWSAWISLHKKLKPVRRHQYYTLANSQLEVMLCVESQDGIQSKPKGTSRRGATPQRNRKATASNACLDLATLG

SEQ ID NO: 50164 - protein, 420 aa, Selenomonas sp.
MSKKADDSLTRAEKHFIRSSSPWFSMIGDFCHKAKNLYNHGNYLVRSRFIKDEYWTRYKELDQVLKQDLEYPDYRAMPTAQSAQQVLRLLDKNWNSFFTAIKDWKQHKEKYLGRPKLPKYKEKDGKFILVMTNQNCKLENGEIRFPKTFNGFKVKPEFVNNRDDGRKFDTFQQVRFIPHGAYIVMEIVYTIKTMPQVEDNGRYAGIDIGVDNLLTMATNTGAAPLIVNGKVPKSANQFYNKELAHWKSVCMMTSGRYSSARINGLTAKRNRRIDDYMHKASKRIIEECVRQDISTIVIGKNKEWKQESGLSKRVNQHFVQLPFARLIQMIEYKAKEKGIAVVLTEESYTSGTSFLDGEEPVKENYDKSRRVHRGLFKANDGRLINADVNGAFQILRKVFPNVSADGIEGVVLRPVVVVAA

SEQ ID NO: 50165 - protein, 396 aa, unknown
  TnpB Polypeptide
MFRALDASRRLWNDALAHRKMRWENERKSTSYNLQASILTFEREQDVSLGELYSQAGQDVLRRLDKAFKSFFANRARHPRFKKFSQVGSFTYPQAYNGSVKPDAVRKRLFISKIGNVRVIFHRPLPKDARLKTCTLTREADGKWFASIVFEEVVPLQNVETMSISAKTPVGFDLGLLSLITTSDGEKVEHPRFLRKAEKRLQQALSRTKKGSKNRLKARQRVASQHARVKRQRLDFNQKLSTRLVKRHNFLAFENLKIKNMLRNHKLAKSISDASWGQLVTLTERKALGVGSRVVWVPAAYSTQECFHCGALNKISLDTREVVCGCGLNLLRDLNAANVVLKRGLAIAGLAMKVGQDMPELKPVEIEPLLIRTTGGARSLGEAGTTCSTELEAHGL

SEQ ID NO: 50166 - protein, 386 aa, unknown
  TnpB Polypeptide
MNMLKTYKYRLYPSKPQAQQLFQVLAVCRHWYNMCLEERKLAWEAEKRQVTKSEQQAKGKLYRDSFPQANVVFSQTLQSVVDDLDKAFQAFFGRVKAGEKAGYPRFKSHNRFNSFAFKQFGKGAKLDGNRLQVFGIGRVPVRWHREIPKAGTIKTCRIKYQAGQWFVSFAVELPDQSELPKTGRFIGLDMGVSALITTSEGEKVENPNYYRTGQKKLRILSRALARKKRGGKNRRKSLKRVQRQHQHVANQRSDYLHKLSTSLVQTCDGMALEDLATRNMVRNPHLSKSILDSGWGMFKQYLLYKAGSAGREIRLVNPAYTSQTCPRCGKVAKIELSVRWIDCPCGLSLDRDHRAAINILIQAGWDAPVIVNVDHRVKRGLEAAPL

SEQ ID NO: 50167 - protein, 407 aa, unknown
  TnpB Polypeptide
MSLKIIRTEKHTINKSHKMWKICDELCFKKSKNLYNYANYVQRQSFIDTKKIINSVDIQKLLKTHETFKELGSNSAQQTLQLLDKAWKSFFISIKDYWKNPSKYLGKPHLPNYKDKNGRYVCVLTNLQSQIKDGYLYFAFKPLKPYNNMFITKIKDKHMQTRIIPKGSCYVLEIVYETEASEITTESKNIIGIDLGLNNFATLTNNVGALPIVINGKGIKSYNQYWNKQVANLYSDLKKHHNQNWSNKLERLTQKRNNKIEYFIHCASKYVIDYCLAIGCDTIVIGYNKGWKQNSKMNKKVNQEFIQLPYENFINKLRYKCEDKGIKFIQTEESYTSGTSFIDNELPIKENYDKSRRVYRGLFKSNDNILINSDVNGSYQIIKKIFPKAFADEIVGVGLHPIRVNVV

SEQ ID NO: 50168 - protein, 398 aa, unknown
  TnpB Polypeptide
MLCSAARKLGNQAVYIQRQKIFAKEPWLNRAGLDQAVRSGNTELYRSMPSAASAQRQTQIVHEQFVSWHAAKTAYLADPSKFKAMPRLPGYSKKYRTFVVGRNGYKVVEGNLILTDKNDVGFPPLKIRSCDNQPFNAKKKETIIGDVRIVPHGNAFFIELTYEVTCSTTVLLDGSRACLVDIGLRNIVTLASTASGIRPVVVKGGMLKSINAMYNKDVASLQSHGKKTHRRSKVMKRTCRIDDKMHKVSRFVVQFCLRNDLGTIIIGHNEGWKQNINLGKVNNQNFVNIPFNRLIHMICHKAEEYGIKVIVREESYTSRQSALDFDQLPNYGDKNANQVPSSGKRIGGLFIRSNGQKINADVNGCLNIGRKELGDDWLKKLVETDEGCLMQPVTARIG

SEQ ID NO: 50169 - protein, 383 aa, unknown
  TnpB Polypeptide
MKQYKGYVFRLYPNDMQKELINKSLGVSRFIYNYFLDFKKKEYEENNKKYSCYDLIKMIPALNIEYPFLKEVDSCLLRCSIFDLDNAFNNFYKGKGYPNFKKKGVKDSYKTNNMVSNYKGKTYNSIELDLINKTIKLPKLGLVSIRGYRNKNKIEGNIKSATIRKIAEKYYVSVLIEEEIEITKANLTSIVGIDLGIKDMVITSNGEKINNTNKDRLERLKKRLKGLNKALSRSQKGSKNRYKLIVKIQEVNKKMNNLKKHLINDIANTLTKENDIIVLEDLDIKNMYQEHRIARKLIDIPLYKLIETIKWKSYLYGKKVIQINRYYASSQECSICGYKEKQVKNLSIRKWTCPKCNHEHDRDLNASINILFEGLRKYIKEFA

SEQ ID NO: 50170 - protein, 444 aa, Azotobacter sp.
MHLTHKIALRPTPEQADYFARACGTARKVWNWALDEWSKQYAGGGKPNAMALKKQFNAIKYELYPWLKDIHRDAHAQPFTHLGKAWTTFFSDLKAGKQAHEPRFKKKGRCRDSFYVANDKFSLDGKSIRLPKSGTVAMTETLRFEGRILGATVSRTADRWFVAVQVEVPEHQALRRRSGHGTVGVDLGLEAAASLSNGESIQAPRPLKAALRRLRIRSRRLSRQLEAAKIAAGLNPGARLPKGTRLPVSNNRRKSAASLARLHARIANLRADFTHRLTARLCRENQAVVIEDLNVRGMLANDRLARAISDVGFGMFRQQMNYKAQRYGMRLVVADRWYPSSRLCSVCGWKYEALTPGERTWACAGCGTHHDRDRDRDRDHNAARNLERLATATALPVASPAGNGGAAAGMVPAVVGKVTPVSHGCGQQGASGQEERCEHLCSPF

SEQ ID NO: 50171 - protein, 387 aa, unknown
  TnpB Polypeptide
MIKTIKVKLLPNNKQRTKLSACAGTARFAYNWALDYEQKNHQAGNLFLSHYELRRILTDLKKNHPEFAWLNDYSNNIAKQAVIDACGAYQNFFKGIAGFPKFKSRKKSKPSFYADPVKISFTSTHVKLEKLTTSRKANKQKFNLVRLAEHDRIPVNAKYSNPRITFDGLNWWISVGIECEESQEKPENPGIGIDLGIKDLAVCSDGNIYPNINKTAKVRKLKKRKRRLQRRVSKKYSKNKKGEGYCKTRSIVKSERKLLKLNRRLTNIRHSYLHSVTSEIISRKPKRIVLEDLNVKGMMKNRYLSRAVQEQCFYEFYRQVQYKCLWHNIEFITADRYYPSSKMCSQCGNVRKDLKLSDRIYHCSVCGLTIDRDFQASVNLMNYRLTA

SEQ ID NO: 50172 - protein, 400 aa, Tolypothrix sp.
MDTKEDKEMRISYQYKLRPTKQQAIEIDRWLSMLCAQYNFLLADRFDWYERNRSPINACPLVCHLPELRDNPDYYSQKKTLPQLKKTRPWYSEIYSQVLQDIVKRVKVTFDRFLKGDSNGKRSGRPRFKARERYRTFTYPQIKDGCLQGNLITLPMFGIVKVVLHRPIPEGFKIKTASVTKKADGYYLTLSLEDATVPEIKSNFNSDSITGIDVGLKEFLTTSEGETVLIPQYYRKSHKRLKVIQKRVSRRKKGSQRRQKAVKQLGKQHKKVADKRKDFHFKTANNLLKKYDVVAVEDLNVKGLARTRLAKSVLDAGWSRFVSILTNKAENAGLLVIRVKASGTSQDCSSCGVKVPKKLHERWHSCQCGCSLDRDHNAAKNIKNRAVGHSVLKAKSLRAQ

SEQ ID NO: 50173 - protein, 404 aa, unknown
  TnpB Polypeptide
MLVFEFKAYGKPKQFAAIDEAIRTVQFIRNKCIRLWMDNPKTNKYDLSKQSAILAREFPFADQLNSTARQAATERAWTAISRFYDNCKAKISGKKGYPKFQKDNRSVEYKASGWKLAGDRKSIAFTDKKGIGRLKMKGTRDLNFYQPDQIKRVRLVKRADGYYVQFCIKVDREEKIEPTHKTIGLDVGLESFYTDSLGNKVENPRFYRTGEQRMKRAQRLVSRKVKGSRNRRKARVKLARVHLKISRQRKDHAVKLARCVVASNDVIVYEDLRIKNLVKNHCLAKSINDAGWYQFRVWLEYFGKVFGRITIAVNPAYTSQECSRCGTVVKKSLSTRTHICQCGCRLDRDHNAGINILNSGLGTVGHTGTSMLDIGIAWGDLSSTAVGANLRQQDGSLNQESPSL

SEQ ID NO: 50174 - protein, 549 aa, unknown
  TnpB Polypeptide
MAIRQTNEPPFYMPEFQAAVRKTTLSNRFSFSSLVTLTQKSSLTSAADSTSSEKVFKPYWTEFSATLASLLSLPTKIGFVALDSILSHGSVLGSKLKYWFSTKRTSVQNAKWLKIFLPLSMSSVGDCTDSESTKNKSLKTVSYRVYPVKELEFIWKKWVAAVRKVYNISIAYLNENQGFSKVGKKGGKMGFRTMLKASGLIPQWCLDLNVSKILDNAAMEAYKAWSETAKNPKTINKGKDKKPHHQAGLRIAKFRSIRDQKLTIQFDPSAYKNGRWMVSTTKHLPRPEFRGQDFCVLTDGSSELTYNKGRWFAHFPVELQQTASVTNKIISLDPGIRTFMTGFDGSDFLEFGNGDFNKIAKLCSHLDKLKSKHDLSVGHKFKRLRSKLRLAMERLRTRIKNLRSECHKQVGSYLAKNYDVIVLPTFETSQMVVKKKRKLRSKTARAMMTWAFYQFSQTLEHLCNRYGSKLVRITEEYTSKTCTKCGHVHRKLGSSKNFVCPNCGYEIPRDFNGAVGIFLKAMWDTTFTNSVGDVVLDIHDISDVGECLG

SEQ ID NO: 50175 - protein, 370 aa, Fibrella sp.
MKVRYTFRCYPTDAQAQELSRVFGHSRFVYNWCLRLRTDAWANGERINYNQSSAALTALKRTPEHQWLNEVSCVPLQQSLRNLQTAFGNFFSGRAKYPRFKGKRDKQSAEYTTSAFKYSDRVLSLAKIGRLKVRWSRPFLSSPTTVTISKTCTGRYYVSLVLDEQPHRFEKTGESVGVDLGINRLATLSNGERIPNLKFTRTYEKKLAKAQKSLSRKTKGSGRWNRQRIRVARLHEKLTNARIDHLNKVTTDLVRRFDVVAVEDLNVRGMVRNRKLAKHLSDASFGRFVSMLEYKCAWRGKELVKIDRFFPSSKRCSCCGYVAQTMPLNVRNWYCQECHTEHDRDENAAQNILNFALGQRVNAHGATVSL

SEQ ID NO: 50176 - protein, 366 aa, Fibrella sp.
MLQVKTYRYKLKPTPAQQRELGQWLGACRYIYNLTLDYKRTLWEQNKVSIGKHEIQKELAILAKDYPWIEAVNAQTRQEVVERVFNAYEGFFKQGKGFPKFARKGQYQSFAFKQRVSIDATHIRLPKLGKVRYRNSQPCAGTIKRAVVREYADGWYVCVCVEADIQPLPTTQHHIGIDVGIKSLLVTSEGETIENPKHLYKAEKKLKQLQRQVSRKKKGSANRRKAVQKLARQHQRVANTRKDFHHKLTTRLIRENQSISVEQLRIKNMLANHYLAKSISDAGWHRLIQMLEYKAKWYGRTFDKVNARHTSQDCSTCGYRNTELTLAVRSWTCPACGTAHDRDLNAAKNIKNKAVGHTVSACGVQH

SEQ ID NO: 50177 - protein, 512 aa, Actinoplanes sp.
  misc_feature (324)..(324): Xaa can be any naturally occurring amino acid
MPRRRDVDTEPVVHRTARIGLRLTRAQRQRCFGLLRCAGDVWACLLEINWWRRHRGDPPVAGYQQLCRLLAESGPGIFGELDSAGARSVLRRYSDAWFSAAARRKAGALEVRYPRRRRASMPIRWYNGTFTLTGRALRLPTARGCPPLMVRLDRHLPYPPGTVRSVTLLFADGRLCIDVTAELPVTTYPAERAPDPQRVAGVDLGIIHPFAVAGPDGEALLVSGRAIRAEHRLHLADTEHRQRATADRAPSRGQHGSRRWRKTRRRARLVEGRHRRRVRQALHEAAKTVIHWAIQQRIGTLTVGDPRGVLNLQAGRRHNLRLRXWQIGRTLQILHDKATLAGIQLHLVDERAPRRPVPTAGNASPNPPAGPCPARIASSPGIVISPRRSPSPPAPRAAQPPPSASRRLGWLRTVEPDDTSPESPRHGVTPAADHRRPAGPLAGGGPPLSQGSRSPTPVSEDPQHHRTQPGRRSWTHRTSVTAWTSSSCCPSWSCFGFRWGTPISGAIRAGSP

SEQ ID NO: 50178 - protein, 225 aa, unknown
  TnpB Polypeptide
MILAHKIQLDSNNKQSTYLAKACGVARFAYNWALAEWKKRSESGEKVSEVKLRRELNAIKREQFPWMMEVTKCAPQLAIKDLGKAFANFFAKRAEFPQFKKKGHKDSFALSNDQFAIKGKAIRIPNLGYVRMTEELRFDGKIMGATISRKADRWFIAIQVEIPDPSPIHSSESQAVGVDLGVKDLAVLSDGTKITGSKPHKALLSRLRRLNCKRTQRTSPLLIAK

SEQ ID NO: 50179 - protein, 318 aa, Bacteroidales sp.
MSIKKPIIDALPEWSKSVPYQVKSVAVKECCDAVSKAKKKCKNTGTFQKVHYRSKKRGDFSIYIPKSAVTEKGFYTRMLGDMFSSECLRRPNHDCQFKLENGRYFLCIPKDIAVKRPENQRLSACALDPGVRTFQTVFSKEICSKIGEHDFQRIFRYCYALDKLISRKKKERSNKFNKAMKRIRWKIRDLISEIHNKTALFLCKMFDVIYLPTFETQNMVCKLRHKTSRAMLGWAHYRFKMKLRAKAEEYSCTVIDCNESYTSKTCGCCGTENSIGDKEVWTCKHCGCVHDRDINGARNILLKQLFLAMRDTSTPCLV

SEQ ID NO: 50180 - protein, 387 aa, unknown
  TnpB Polypeptide
MNTVRIYQLKNLSQTQVQRLRDAQMEAAQVWNLCMHMHKDARLQHTSWPGRNALQKATKGRFALHSQSVQMVVHAFLANVDTTQQLRQTHPQMRMRYPYKDKRFYPVLWPEQAVSREQGRVVLPMGKGRRSLVLPLDLPGNSGACTLVWNNGYELHVCVEIEQTEHAPGDAHATVDLGEIHLAAVTTNTGKAMIVTGRGIRSLKRQRTMQVRSITKKQSKCTKYSRRWKKLQHAKNKQCRRAERRIRNQRHQATRKVINFCIERQVGTLFIGNPHGVRNQNKGRHHNQRMALWEYGRDIDYLTHKSKQAHMMCFTGSERGTSSQCPACGHKHKPRNRQWTCKKCKFKGHRDLVGSINMHKLAFGERVRFPRSFTYLRPSVLGKVVVG

SEQ ID NO: 50181 - protein, 436 aa, Lachnospiraceae sp.
MLEIVSKNNNLYNVLDTEYGVVESCSFLDIISAMQSGVNIKGVSHVNDEYIFEVDELKVHRVMKGYKFRLYPNKEQQAYFQKCFGCCRFLWNHMLADKIAYYNEYKESLDTQPPVYKSDFPFLKEVDSLALTSEYRNLNTAFKNFFRDTSVGYPKFKKKRDNHKSYTTYNQKGSVSIVDKYVKLPKIGYVKMKLSQLVLGSIKNATVSQVSSGKYYISFNVEIWVQTLPRTDKELGLDLGIKELLITSDKEHFENPKTSYKYEKQLAKLQRQLAHKKKFSNNWYKQKHKIALLHEKISNIRKDNLHKISHKLVMENQLIASESLKISNMIKNHHLAKSIADASWYELTRQLDYKSVWYGRLYVKIGTYYPSSQTCNCCGFENPITKDLTVRDWTCPQCGTYHDRDENAADNILAEGKRIVEVRKITSNSDEFQIAS

SEQ ID NO: 50182 - protein, 397 aa, unknown
  TnpB Polypeptide
MYKSVSSKIISNFVGGGHMKQLKAYKFRIYPSDEQKIFFSKTFGCVRLVYNLMLSDRIKAYEESKGNLDKKIKYPTPAKYKEKYEFLKEVDSLALANAQLNLDKAYKNFFRDKSVGFPKFKSKKNPVQSYTTNNQNSTVNIFENWLKLPKMKELIKIKVHRKIEGTVKSTTISCNGSGKYFISLLCETDIKELSKTNSAIGIDLGVRDMAILSTGEKIQNLKFKSQLENKLKREQRKLSKKFLIAKKENKKLSEAKNYQKQRIKVTKIHEKIMNMKTDFLNKLSTNIIKNHDIICIEDLNIKRMLHNHKLAKSIADVSWSSFINKLEYKAKWYGKEIIKIDKFYPSSQICSICGNNNGKKTLDIREWTCLTCHTHHDRDINASKNILAEGLRIRETA

SEQ ID NO: 50183 - protein, 391 aa, unknown
  TnpB Polypeptide
MEGILCRPCRLQKESVKVQGKTKDAGYLKSAQFTAWYTNQTAQFKIIGSKAYIRFVHCKELFCIGNADLYKDMKYVKTEVKPSHGRYDVLVTFDDKKDDKVEFPAVPDNPKRIIGIDPGVDNFATVVNNFGKEPFLIKGDAIKAKNQWYNKGRAIATSKLTKGSDSTHSVKNSNYLDTLDRKREDFMRDFFYKAAWHICRFAMDNEADVIVFANNKEQKQEINIGKANNQNFVSIAFCSFESILVHTAAKCDIPVVVREESYTSKASVLDGDPIPTYKQGDSQKYTFSGERINRGLYRSADGTLINADVNGGANIIRKEYPDAFKGQNLDYLWKTTKVVKYTDLYKGAKSTCKEKYNNKQHRTSPNSKIRHFYRKNTRLEYRMFWGKSKSA

SEQ ID NO: 50184 - protein, 405 aa, unknown
  TnpB Polypeptide
LSFVVLAVKSVWQYYVPSKDILGLLEMFRKMVNESLRVGLANEVSPLRRLSILSYNQLAKYDSPSYYKLCAISRAAGILAARNKSVKRGFPTKTPYAVRQQLVSCYGFKIEKGALDIPISRGRRLGIPLTKHTQEAISQEGITVRSFTLTINRLSLYIARDTPKIECSSIVGVDRNLRNLTVGNDEQTRHYDLSQIVRIANTTVRIVSSFRRDDARIRTGIASRYGQRRTSRTDHLLHSATKTIVAVAVRKTTAIVLENIEGIRSLYRKGNGQSRKYRGRMNGWSFAEAQRQIEYKAQWLGLPVIRLSRRETMGSSITCPRCGERLQSDKRLERKLRCGRCRIVMDRDQVAAINLARRGRVRFARSRPPTLLEAQGGAVEAVKGNPTPTVIPGVDAPKLTHPRRS

SEQ ID NO: 50185 - protein, 362 aa, unknown
  TnpB Polypeptide
MMVVERHYIDRQHQFDRRFDDLSFLSKNLYKHGNYWMRQHFFKSGPRVGAGLNLKQLYAIVKPTDDYKSLPAKVSNQVLKKVIHDWSAWQKARGAYYREIDQFSARPKIPKYKHKTCGGNWLIYDHQSLGQRGKKKNNGRLHLSQTDIIIATKAQDVIKVRIVPKTATYIFEVVYEKPVTLVDLNPKLIAGIDLGIDNLVAIATNKPTFTPTLYDGKHLKSINQGFNKRLAFLQSQIEKGKYTTRQIQQITLKRNKRVENYLHQTSSLIVKRLVDEAIRQLVIGKNVGWKQNLELGKKTNQTFCSIPHAKLIEMIAYKAELVGIKVTVTEASYTSKCSFLDLEPVGKQESYQGKRVFRGLFR

SEQ ID NO: 50186 - protein, 269 aa, unknown
  TnpB Polypeptide
MFRAQPRTELSKFINAYKSASSRLLKKEYPEIRKKHREPAEGLRLRSVTVSMEPSGKYFASLLYEGYSCENQAAEPDYSTAKILGIDYAMQGMAVFSEKIETEEAGFFRKNEKRLAREQRKLSRCVRGSHNYELQKKKVARCHEKIRNKRRDHLHKLSRKIADSYDAVAVEDIDMKAMGQCLHFGKSVQDNGYGLFREMLDYKLAWQGKKMVKVDRFFPSSKKCCKCGRIKKELRLSERVYHCECGNKMDRDHNAAINIREEARRMLTA

SEQ ID NO: 50187 - protein, 192 aa, Nostoc sp.
LNGKPLKNINAYYNKKKAFFQSRLQGQQTTSTRIQRLTHKRNCKIIDYLHQASRIIVDYLAANPIGTLVIGKNDLWKQSINLGDKTNQNFVCIPHARFIEMLTYKCQLVGIDIIITSENYTSKCSFIDLEPIEKHTVYLGKRVKRGLFRAKNGFLINADCNASGNIIRKVVPNGFSEGIQGVVVPPSRITPG

SEQ ID NO: 50188 - protein, 507 aa, Cellulosimicrobium sp.
LWVPAGSVPVVSRHTTFQLVADPTAEQARALARHEGAARFAFNQGLRLHLDARTAGKRDDVEVKVPWTGFDLINAFNAWKKTEDAGRRFVLDSAGVAELEVTGPAWRTEISAQVFEEAVVDLGKALRAWTDSRRGKRAGRPVGHPRFKKKNHERGSFRMRNKTSKTKTGERATIRLGEAGPRSVTLPGIGAIKVHDDTRRLRRMLDKGRARILFATVSRRGGRWRISVNVEAADLHPGARHPVRDDVDHSGWAGMDRGLHVPVVVALADGTQTLRIDAAPKALRAAQPVTRKLQKSVSRKVKGSVNRRAAVRRLARHHERVRARRHHFLHQVSNLLVKTHDRLVIEDLNITGMLANHRLAAAISDAAWGELARQITYKQSWRGGHVLTADRWLASSKTCSNCENVNQALTLADRVFACKHCGHTIDRDLNAAVNLATWGEQHHSQVLDPEARGQVTNAHRREGSGPRTHADETSPDDVGTLTATAARDVRERRCRTPHRGCSTGFSM

SEQ ID NO: 50189 - protein, 478 aa, Cellulosimicrobium sp.
MARHTTFQLVADPTVEQARALARHEGAARFAFNQGLRLHLNARHVAKSTVDVDAVPVPWTGFDLINAFNAWKRSEAAGRRFVVDAAGQTDVEVTGLAWRAEVCAQVFEEAVVDLGKALKAWTDSRRGKRAGRPVGHPRFKKKNHERGSFRMRNKVSTTKAGQRATIRLGEAGPRSVTLPGIGAIKVHDDTRRLRRMLASGRARILFATISRRGGRWWISLNVEAADLHPAARHVERIDADHGGWAGVDRGLHAPVVVALADGTQTLRITAAPKALRAAQPVTRRLQKSVSRKVKGSANRRAAVARLARHHERVRARRHHFLHQVSNLLVQTHDRLVLEDLNITGMLTNHRLAAAISDAAWGELARQITYKQTWHGGQILTADRWFPSSKTCSNCEDVTTTLTLADRVFVCENCGLTIDRDLNAAVNLATWGEQHFSQVLDPEARGQVTNAHRRDGSGRRTRADETSPDDVGTRTATAA

SEQ ID NO: 50190 - protein, 640 aa, Cellulosimicrobium sp.
VSFDAVDLLRAVEPAWSWYRCGLDGRGILDCGGRVLVAPVRAPVLAAQHGEHTLPQPAAGPSGEVLVRRGPGDGEVVRQRSPGDAFRHDERQRVDVLAPPVLAARAPAAVVDGDHERCDARPGGVGQVGRLAAARAGTVTRTGIVEVGTDIPGSCQCWSLPCWSMTRHTTFQWVADPTVEQARALARHEGAARFAFNQGLRLHLNARHAVKKAVVDVEVPWTGFDLINAFNAWKKSEDAGRRFVVDGSGAAQLEVTGLAWRTEVSAQVFEEAVVDLGKALKAWTDSRRGKRAGRAVGHPRFKKKSHERGSFRMRNKVYTTKAGQQTTIRLGEAGPRSVTLPGIGAIKVHDDTRRLRRMIASGRARILFATVSRRGGRWRISVNVEATDLHPAARHPVRDDADRGGWAGVDRGLHAPVVSALADGTQPLRIAEAPKALRAAQPVTRRLQKSVSRKVRGSVNRRAAVRRLARHHERVRARRHHFLHQVSNLLVQTHDRLVIEDLNITGMLANHRLAAAISDAAWGELARQITYKQSWRGGHVLTADRWFPSSKTCSACENVNQTLTLADRVFVCEHCGHTIDRDLNAAVNLATWGEQHHSQVLDPEARGQVTNAHRREGSGPRTHADETSPDDVGTLAATVG

SEQ ID NO: 50191 - protein, 442 aa, unknown
  TnpB Polypeptide
MQIISSYGVELRKQNIPIRQTLEIYRSAVSYLIGIYVQVWEELAEIPDAKRRFNAAEHLVHTTKKNHACFDFDIRFPKMPSYLRRSAIQHALGTVSSYKTRLDLWEKTDGKSGKPKLVYENHAMPVFYRDVMYREGAEGKDEAYLKLYDGHDWKWSCVRLDHTDMEYLRKCWSGKKASAPTLEKRHQKYFLRFSYKEEVTLTKTPVKEQIICSVDLGINTDAVCTIMRADGTVLGRRFIDHPSEKDRMYRTLGRIRRFQREHGSAQTQGRWAYTKRLNTELGKKTAGAIVRYAEENHADVIVFEYLEMQGKISGKKKQKLHLWRKRDIQKCCEHQAHRKGMRVSRICAWNTSRLAYDGSGAVTRDRENHSLCTFQTGKRYNCDLSASYNIGARYFIRELLKPLPATERSLLEAKVPAVKRRTSCVYADLRELSSEMGLLMAA

SEQ ID NO: 50192 - protein, 407 aa, unknown
  TnpB Polypeptide
VKLTAQLKLLPTPEQADALRRTLEATNVACDSISQIAWDAQTFGKFPLQKLCYTAVREQSGLAAQMVIRALAKVADAYKLDTTQRRTFAQHGAIAYDERILSFNRSQTAVSIWTLDGRQAIPFVCGTRQRALLQTQRGEIDLALVRGAWYLFAVCEVEEPDPQDVDDVIGIDLGVTNIATDSDGMIHSGRTVKSVRYRQRRLRNRLQKKGTLAAKRRLRKLAGQEYRFAKDVNHTISKRIVREAQRTKRGIALEDLKGIRTRVRARKSQRTVLHSWSFFQLQAFITYKALQCGIPVVLVDPRNTSRTCPSCGYIAKANRPSQAIFRCTSCGCAGHADVIAAENIRVPALLRTSPPTASASRTTPPAPLAWSPGSCSAVPGARTSRRGRTSAPSGYELAAAHCGTRRP

SEQ ID NO: 50193 - protein, 318 aa, unknown
  TnpB Polypeptide
MYGFCRENYQLPSEVIIQGMKLVAQTFRGSYKARHVPKIDADDFPIRLTYGKKHLFYLVFDGGLKARISLPDGNGFRKEEVLIHEGELKGGLSELTRHKISDSLLFPDHRLLITLTKDVEIRYEPENAVGVDIGVVNLVTAYCSGEVLQVSGKPILEAHRKGVEHRRLKQKLGSKKFTYNESKFVRDYVRHAANQVIKFARRFEKPVIVLEDLKWLRKKLRGLPHIYAIAPYELIHSAVTEKALWEGIAVRTRKAYYSSQECPMCHHISPKNRKGRRFRCVKCGFEEDADVVAAMNLCLRNSSQAEACGTLAENDVER

SEQ ID NO: 50194 - protein, 564 aa, Streptomyces sp.
LAAAIRRASGRWAQSSASSSAPPSSASTRSRPSWTASSSRDSAAGRMSSEIRAAPSRTTRPVRASRLVTRAWQSWPLGNSGRTCATSSTLSRTTSTRRLASTDRYRPICRFSCFWRGTPGLQAREESPPQPRRRAAAPFRCAPSQAAGRAAIADLGRCCTLPDRLALLSVSRSTVRRVKIVVQAKLLPAAEQAVALRSTLLECNAAANWVSQVAFARGIPREYELRKHTYAELKARGLGAQAAQHVIKKVRDAYTTLHVNIKAGNLGKPRSKRRVQAESKPIAFRASAAQPYDDRCLSWQHDAGTVSIWTTAGRLKGVRFTGSTDQLKTLREYRKGESDLVERDGEFYLLATCEVPEAELNENPDGFLGVDLGIVNIATTSDGEVLAGRRLNRYRARQLRLRTTLQKKGTKSAKRRLKERSRRERRFAANTNHVISKRIVAEAERTSRGIALEDLGGIRGRVRLRRPQRAAVHSWAFAQLGQFLVYKARRAGVPLVYVDPAYTSQTCSECNHVDKRNRASQARFQCRSCGVVAHADLNASRNIARKGETAWKAGRESRVPAASP

SEQ ID NO: 50195 - protein, 399 aa, Streptomyces sp.
MIRAYKFLMRPTQGQQGALAEMLRDHCSLYNGALQERRDAYRHASKTTVRYGQQSAQLKDIRAFDPERQGRWSFSSQQATLRRLDKAFAAFFRRVKAGDKPGYPRFRSGKRFDTVDFPKDGDGCRWDSTPHDPVTRVRLQGVGHVKVHQHRPVAGKVKTISVKREGRRWYVILTADQAQPEPLPATGSVVGVDMGIANFLADSNGEFVPNPRHGAKASAKLEAAQQALSRCKRDSKRRRKAVDTVARLHRKVRRQRLDHAHKTALDLVREHDFVAHEDLKIRNMNRAPAPKPDPNQQGSFLPNGASAKAGLNRSIADAGWGVFLAILAAKAEGAGRQVMAVDPRNTSRTCPECRHVSAENRPTQEKFHCVSCDHTAHADTVGAINVLRAGLVRRDATLA

SEQ ID NO: 50196 - protein, 474 aa, Streptomyces sp.
VRSIRKLGQVRSGSPQTRSFFSCFWRGTPGLQAREESPPQPRRRAAAPFRCAPSQAAGRAAIADLGRCCTLPDRLALLSVSRSTVRRVKIVVQAKLLPAAEQAVALRSTLLECNAAANWVSQVAFARGIPREYELRKHTYAELKARGLGAQAAQHVIKKVRDAYTTLHVNIKAGNLGKPRSKRRVQAESKPIAFRASAAQPYDDRCLSWQHDAGTVSIWTTAGRLKGVRFTGSTDQLKTLREYRKGESDLVERDGEFYLLATCEVPEAELNENPDGFLGVDLGIVNIATTSDGEVLAGRRLNRYRARQLRLRTTLQKKGTKSAKRRLKERSRRERRFAANTNHVISKRIVAEAERTSRGIALEDLGGIRGRVRLRRPQRAAVHSWAFAQLGQFLVYKARRAGVPLVYVDPAYTSQTCSECNHVDKRNRASQARFQCRSCGVVAHADLNASRNIARKGETAWKAGRESRVPAASP

SEQ ID NO: 50197 - protein, 382 aa, Acidianus sp.
MARRGNKAIRATVSMKIALSDSLLALVNNYVKALRFTLFWLKENVPNPDEKGVLSKVHEELYTRLREEYNLPSKVAEDCYRDALSIYKGWYNNPKKGRFPRVYKPTVWLTPKASYSVNFERMTVRIASVGELQILGYSRNLKEYMGWRMKEARLVVKDGKAFLKVVFEKEEEKVEPKESVAVDINMSEIVVGKDDIHYVRIPTRLEEVHHWKSLAENLQKKYPRRWRENKRILYRVRSFHQKAKRVMEDFARKVGKWVAEIARDFGANVIKLESLKNLIKNVDRLPKEFHDKLYLMQYRRIQYWIEWQARKRGMIVEFVNPSYSSVSCPKCGQKMVEVSHRWFRCSCGYENDRYVIAVVNLNGRGSLSLSTAPQMRDVRANR

SEQ ID NO: 50198 - protein, 429 aa, Acidianus sp.
VSKNLRIKSLQPEEEYIYLTYSLENDKKEESKILLENYKTLLQKALDWLWEKVKVERKEVKKGKKVLTKVKITLPKKKEVYKVLRDELEKINNLASHYVDKAINDAYSILRSWKRRAEKGQASLMKPRLKKVYVRVKSTLRKVDGESVRITVRPYEYVKFSWSHTWFSKRVKGLELGEPIIKEDKVYLPFRYRLPWFTPLDFLSIDSNLYTLDAYDGEKFITFSMKELYSMKYGMELKRGRIQSFASKHSRKGKELLRKYSHRERNRVLDYVNRFVNKLLEMYPLTLFAVEKLNKQEMFRDASDKLSKKISKTVWRSIHRVLKYKAPLYGSFLKEVNPHLTSKSCPRCGWVSRKVGRTFHCERCGFTMDRQLNASLNIYLKMCEFPHIRDIPRVWVGVIPLKGRRGNGFPRDSVEAQGLRIRYNFMKIQ

SEQ ID NO: 50199 - protein, 382 aa, Acidianus sp.
MARRGNKAIRATVSMKIAVSDSLLALVNNYVKALRFTLFWLKENVKNPEEKGVLSKVHEELYEKLRGEYNLPSKVAEDCYRDALSIYKGWYNNPKKGRFPRVYKPTVWLTPRASYSVNFERMTVRIAGVGELPILGYPRNLKEYLSWRMREARLVIRDGKAFLKVVFEKEGEKVEPGESIAVDINMSEIVVGKDDKHYVRITTRLGEVHHWKSLAESLQRKYPRRWRENKRILHRIHSFHLKAKMVMGDFARKVGKWVVEVARMMGANVIKLENLKNLIKNVDKLPKEFRDKLYLMQYHRLQYWISWQAKKHGMIVEFVNPSYSSISCPKCGRRMVEVSHRWFRCSCGYENDRDVIAVVNLNGRGSLSLSTAPQMRDVRANR

SEQ ID NO: 50200 - protein, 382 aa, Acidianus sp.
MARRVKAIRATVSMKIAVSDSLLALVNNYVKALRFTLFWLKENVPNPNEKGVLSKVHEELYEKLREEYNLPSKVAEDCYRDALSIYKGWYNNPRRGRFPRVYKPTVWLTPKASYSVNFERMTVRIASVGELQILGYPRNLKDYMSWKMKEARLAVKGGKAFLKVVFEIEGEKVEPGESIAVDINMADIVVGKEDKHYVRIPTRLGEVHHWKSLAESLQRKYPRRWRENKRILHRIRSFHQKAKMVMEDFARKVGKWVVEVARDFGANVIKLENLENLIKNVDKLPREFHDKLYLMQYRRLQYWISWQAKKHGMIVEFVNPSYSSISCPKCGQKMVEVGYRYFRCLKCGYENDRDVIAVVNLNGRGSLTLSTAPQMRDVRANR

SEQ ID NO: 50201 - protein, 380 aa, unknown
  TnpB Polypeptide
VDYRLYPNATQTKVLEHTLDVLCDLYNRLLDIGLESLKEGRRFTAFDMMKQATAIAHSDPVLKKDVYAQCRNGIAMRVVKALSGCFYVESEDRFVHRPRYKSRTRFNSFAYPQSRGFGFEGDRIKLSKIGDIRYRNDHHPKGEMRTCTVKRDAYGHWHAVIIYGMETIAHSEECLDRPKVAEGFDAGLCDILTDTEGSKIKAPDFYMQRENELARFSRRMSETEKGSPEWERARVKLSRIHLSIARERRGFMHRLSCDIVDSCSFIALEDLDVKRMKESDDNHHSTRKRYTETSWGMLYGMIRYKAEGVGTEIMFVDPRNTSRTCCRCGNVKGELPLTERTYRCGCCGMIMDRDRNAALNILSRGSGMRTLRQAVNGQPC

SEQ ID NO: 50202 - protein, 419 aa, unknown
  TnpB Polypeptide
VLVTRAYKTELALNNKQVTACKQHAGAARFAYNWGLQRKQEAYQATKRSPSAIDLHRELNALKKSDLPWLYEVSKCAPQEALRNLDRAFAHFFRRCQLKKEGKLKGKVGFPTYKSKKNGLGSFRLTGSIVIFPDAIQLPRLGRLRLKERGYLPTSSVKVLSATVSEQAGHWYVSVQVEQEHAVPANAGPVVGVDLGVKALATCSDGTVIPNPRHLKRRLKKLKRLHRAVSRKVQGSKNRKKAARKLATLYRKVANQRANTLHQVTTTLAKTKRVIVMEDLNVSGMLNNHHLAQSIADVSSAEFRRQLLYKAEWYGSKVILASRWEPSSKTCSGCGWLKEDLTLADRTFHCQQCGLVIDRDLNAAVNLARLAASSADTGNACGEERAGTRRTPRVKRSSAKQELNALDASAYKGKFGRTA

SEQ ID NO: 50203 - protein, 266 aa, Chamaesiphon sp.
MKLIGTHDLHFYQIDQIKRVRLVKRADGYYAQLLIKAERNIQIEPTGRVIGLDVGLNHFYVDSNGERVENPRFLRKSERAIKRLQRKVSRKFSKSRTQEKIRQSHNYHKAKNKLSRKQLKVSRQRKDHAVKLARCVVMSADVLVYEDLRIANMVKNHKLAKSINDASWYQFRVWIEYFGKLFGRLTIAVAPQYTSQDCSNCGHRVQKSLSTRTHQCPNCGYTSCRDENAARNILNKGISTAGHVGTWVLDTQNASGENTSIDVGVI

SEQ ID NO: 50204 - protein, 419 aa, Deinococcus sp.
MMRAYKYRLSPSRLQELAFQHHLDLSRELYNAGLQERRDAYRKSGVSRSFYDQKRCLPEVKEARPEFEEVHAHVLQGTLETLDKAFKGFFSRVKAGSKAGYPRFRGRGWWDSFRYQECSTAMKAEDGTVLGWKWTTCGRPDPDGKRINLPKIGKVKVKMHRPLEGRPKTLVIKREGSEWYAVYTCEVEARLLPPNDSVIGIDVGTRYLYTDSDGRHETNPKLLAASQRKLTRHSQSLARKKRGSGRRTRVKALLGKAHRKVARQRLDHSHKVANHLLAAHGTIVHEDLKPSKMVHEGAGLSRSIHDAAWTQLFQVLSLKAASAGRTVIRVDPSFTSQRCFKCGFICKENRLNEAFACLSCRHGDHADVNAASNIRELGIDPEGYNARSTKGRIGPAAPDHRALRNMSGDVRLPVLPTPV

SEQ ID NO: 50205 - protein, 501 aa, unknown
  TnpB Polypeptide
VTGESSPRCVPSRHVRRPRRGSSGRPQCRTGLGRRHRPRGRVRRKSGTARHRSRGFGTSPSSLLATFPPEYIHPPPRANLKWHVVMESALRAWKVVVFRLSIEDGHVLQLMRDFRLMVNKAIRFGLMNHCSSLGSICRGMYHGLRVDHHVYSQHVSQACAIGASILRNHRNRSRRSLGPKPPPFVRRLFIRMENQAYDLDRASGRLRFPIRAGQHILIQLPMSEYHRSILSDSNVKLGSLTLTKSGAALAFSKDVQREFAASSLLALDTNESSLDGVLADASGLTSVRASFPEIRQIQATPFRRRRRLSGKKAHDLRTQRALISREGPRERRRVNYRIHELTSLIVQTALERRSAIVIEDLRGLRPRARSQRMNRRLGHWPRHRIHFQLEYKARWQGSPLIKVNPKNKSRTCPACGSLNNSRRVRPLRDGMFRCRCGWIVDRHVNAALNILKTALASNEALARDVRFQPGAMRHDVVSLSRPAMVRGRGAERSESIRVAHE

SEQ ID NO: 50206 - protein, 231 aa, Aeromonadales sp.
MRNDAYVNGKKIGCNQTSARLTDLKKQDGFSFQKDVDSIFFEKRARHPQFKSKHNNHQSYRTINQGDNIRIIGKYIRLPKPGYVKIRQSMETRHISNVTIEHTPAGKYFVVLNADFEPEFRPDAGCMTGIDVGIKEFYSDSNGNTVNNPKYLEKSQRKLIREQCRLSRKQKGSNNRNRQRVKVARVHEKITNQRNDFLQKQSTMPVSENQTICIEDLNMKGMNATINMQCP

SEQ ID NO: 50207 - protein, 404 aa, Microcoleus sp.
VFTLTYEFKLKPTQAQIAIFEDWLEQCRRVYNYALAERKDWFKSRSCQINACSLQSEYIIPADSKRPTYASQCKGLTEARRRIPALNAVQVHVLQQTLKRLEQAFVSMWELSTGFPRFKKVGAMRSFVFPQMGVNPIQNGAVKLPKIGWVKFRQSRSIPNGATLKQLRIVAKASGWYAMLALQWDAQIPDVMPHGEAIGIDVGISHFAAVSNGKLFPNPRPFKKLEGKLKLLQQRVSRKVRGSNNRKKAQVKVSKLHERIANTRKNYYWLLAHNLCDWAGMIFVEDLNLKGLARGFLGKHCLDAGWGQFFQVLEQCCRKRGVFFLKVGSKKTSQICPNCLVETGKKELSERVHSCEHCGYTTDRDVAAAQVVLVRGLAAVGHTVKMLSEGKAVALPVMKESPSL

SEQ ID NO: 50208 - protein, 544 aa, Burkholderiales sp.
VSERPIFTFQTRLWLTESQAMAMDAYASLYGKVERSLFAAMRAGGSLNDLKREFLPKFGITARQFNAVRVGLEGKIDSIKARRPELIVELQSRIKKAEKVVAVLTLRPTQAAKLHQKKRRLNTLQTKLEAMQADHKSGVVRLCFGSKKLFRAQFDLQANGHVDHVAWKADWVDARSDQFFVLGSQDETAGNSSCQAQLQEDGSLALDLRMPNACESEHGKRVLVPVVRFAYGHDKILTALASSQRVSSTTKAGKPTVKRIGSALSYRFVRDAKGWRVFVSCEAQPIEQITNEKLGAIGVDINADHLAVSEIDRFGNLVKSIRIDLHTYGKTTDQAKALIGDAAVMVAEMSKASNKPIVIEKLDFSKKKAELEATHKPLARMLSSFACNKVISNIKAAAFRRGIEVIEVNPAYTSVIGAVNHAQVKGISVHMGAALSIARRGLGLSEKPPKREVIAPTRNGGHVTFCVPARNRSKHVWSHWGKIRTTLKAAHVAHGRSGEPKGKPAPLAPARQSLRANRPVTVQSREANRQQHCSAGVDFQDVPC

SEQ ID NO: 50209 - protein, 385 aa, Deinococcus sp.
MSRRLHPDLHNIQISASSYHAIHQLIAEGLLITAERAPEVDNPIKGINGAQLYVLAADCEFVIRSDIECTMGGVPIRAKLYALPSPAYHAVVRANPFTQYPGLDELRTTIRSSATGAREGLRRAVQQGRQPDQRVVVAAESQQFVASWLPTRTLVQVKSLPTRPAPDMFLTLAFRTSCTGAFPPRREAVMGLDVGLQPHTVVARDDGGVQHFRLSPLAQLPTRSLSSAERELLEVLQYAQGRADSEAVVAYLIGHASHICAEALEHRGMSPTYIARSRRLALQDAFYSHLSQYANAAGIPFTRVDARHSSTTCPVCGAQGDRARDVFRCPACGLQRNAHEVGALNVLARGLVGGAHLRTGQWRTRQQDDFAEWADAYSFPGLRRR

SEQ ID NO: 50210 - protein, 478 aa, unknown
  TnpB Polypeptide
MLRTYRLKHSANRGKQGSAIATIKAYRKVAQNIADFQWRRFYEDARPFGKNLSIKHIPAALSERYKQTCQWEVVSVLNSFIANRKNDFIITVLHSSLSEETKIALLTINKYNLWYRKRLRGIDTDTLKLARKIFNHILSRHRKPSFQNISMHLDNKVALISGKIDSKAVSFDYWVRLSTLDKGNSVYLPVITNQYFENIEGELKNFCQIGLTDNNELTVSFIKDVPDKRDTYKPVTGKISIDTGLKTLFATNTGDLFSRRFYETLLRLDTLIMALAANRQRQGLRIRSSRYDKLVNKLRAYLKNEINRCLNRLVALYMPAEIVVERLDFKHTQLSRRMNRLISRFGKSVFKAKLASLSEEYGIIITESNTAYSSQECSVCGYIDKKNRKDQAVFECGFCGTGLHADVNAARNHLTRSSCGVIDIYKSKKAVLHTLVSRFLPALPDMEQKFGMPHSKAKNLLSGNPYFREALAQSEGFL

SEQ ID NO: 50211 - protein, 382 aa, Spirosoma sp.
MIKAYKYELAPTPEQANHLNRIMGSCRFVYNLALDTKIHAYTKGVSVNCFELMKQLTDLKAEYDWLYESPTHALQHAISNLDNAFTNFFKGRAKFPRFKSKKHKQSFHIPQGVKVDWEKGSVFLPKLKWVKLIVSRQFVGSIRNATVSKTPTGKFLVSVLVETGADVPAKRPMSHETAVGVDVGLKTFATLSDGTSIANPKLLFHSLKRLRVEQRTLKRRSKKGAKAQSKGYHKQRLVVAKLHEKVSNQRKDFLHKASTAIVKEYDTIVLEDLNVAGMVKNRHLSRAISDVGWGMFEGFIRYKCEWHGKHFEQIGRFEPSSKICSTCGHQKGELSLTEREWTCIKCETKHDRDQNAAINIRNFGLSKTFRLGTQPLRVKTGQ

SEQ ID NO: 50212 - protein, 102 aa, unknown
  TnpB Polypeptide
VEDLNLKGIAGGLHFGKGIQDNGYGQFLSMLGYKLEERGKYLIKVDRYFASSKICSECGHKKKELALSERIYLCECGNRMDRDVNAAVNILKEGKRIYKKCA

SEQ ID NO: 50213 - protein, 509 aa, unknown
  TnpB Polypeptide
MWMVNTFSGRLTSCYASHIIYTCIRIHTPPFVFSKRMRRSSRSLPHFHARVCCRVSSAWSSRNMTACKRKEASPMLLTKKIKLEVSEQDAATLEFMQGKCRGLYNFWVMRLRDGERWPGAYAAKKTLKESREFDPDLSGVYNKLLQEVYFRLDKAMKAFFRRVEAGEKPGFPRVRPRHCFFTLCYPAMYMRLENGVLILPTGGRGKNKKYPDVRARLTEEAPAEFGEVAISRDAQGNYSASFSHEVEPHEGASQEDAQAPEVVAFDLGIKRLATGVNEQGRVYTIGGYNKGKRWYNRQLDKIRSKRDKCKKKSRRYLRLTKVYSRVSAKKRNKQQDSLHKASHLIAHRLVERTVVVGDLSQRQMVMKEHEERNKQLNRAVYNDWGLYTFLQMLTYKCQLSGKELVILDERDTSKLCSGCGNKQPMPLYKRTYRCPKCGLCMDRDENSACNIRDRYLTSLTIFVAWYLAWLRPHTLSCEQEECGVLQATDLEVASMGLAPIGQVQQLKLW

SEQ ID NO: 50214 - protein, 224 aa, unknown
  TnpB Polypeptide
VRKRYIVRSDRYYLEPIDDNGGYLVLVDFGLKIRYAGRIRWEGKQGRLEIIYVNGRWFALVPIEVGVEPPKSNRRIYVKPKYRGKKGRVINPRSIKQKDPIGDKEAFMNMGLNNLFAVVISDRSALLIKGGIIKSEYYWWKRETSVYQSIRDVLRRLGISTWIYYHEKYLDAMYKRDERLMHLYITATRFLADELYSRGVRKLYIGYPIMPSQDKGNEYNTNIW

SEQ ID NO: 50215 - protein, 424 aa, unknown
  TnpB Polypeptide
VRKREVVRKCIVLNNLELTSKKARILNDFVSEYKKVLCKHFLQSPLANSSVDLHGLTYSGIRKTSLLPSDIVQEARKDAWKLEQVLERNGFRGININRVSVRLNKRWFRFVETKRKNPCFKITYAKGKTFTIPIRTDNGFERFNRLLGEKWQFTNISLLKSGRIVVVLEQPIAETTNKPIIVGLDIGSEPLASATVFNSNKHKIIKQLYFGQDISHRQRRFEARRTKLESLADKGSHKARQSLRRMSRKQSNFVKTRSGQVASQIIKLAKNYDADIAIEKLNIRADRFTKKSNRKINTIPHGQFREFLISNSHIEHISLHIEDPYHTSKWCSGCGAINDGHHLSNYSLYKCANCGLVVNSDRKASLAVAVKSLLERNAHSFTNLGSFQISKRRVPVNALLRSDAVGVLGSVSHEHQPMESHLTC

SEQ ID NO: 50216 - protein, 480 aa, unknown
  TnpB Polypeptide
MSQKVVIERVQVRGAAPYLGMSATPDGQQVPLYSTNPDIVMRWLCDGWRCRYNQLRSRRTRWDRNTQSAVPLGGKPDMRSDRQVRLECSWFAAIPAMVLQSPNRIENTDWWSANKRRKTLKKKHRNPGMTPRFKKRRDDLYFVCWHNKGSNANYRRLNRRHGEVVITGQNPGAYRLDGQPCRYSIHIRVRVSQPVRDYTSVGVDWTRRTLVFINNPLPIKRERTGAMVGLDRGCVHTLATSDNRFLDLPKQRLERIDREICRRQKAQARRVNMSGKTVREYRRNPSHTYERTGREISRLYAKAHRIIDDWQHKTTSMLVREYDLIVLEDLNLQDMSRKAKAKPDPDRPGAYLHNGQSAKRGLNHALRSAGLAGIVEKLEYKTRLTGQNRLILVNPAYTSQTCSKCGHCAKENRESQADFECRQCHARMNADLNAARNILKRGLDHLLGLDEAEHARTESDVPTAYSSRDASALTCGTSTR

SEQ ID NO: 50217 - protein, 406 aa, unknown
  TnpB Polypeptide
METPTGRKTYQEKLRPTPAQERELERVLRRCRTLYNTALEQRITVWKQRGMSVTRYQQAAELKDIRADMPEYAGIHSHVLQDVLARLDKTYQAFFRRVAHGERPGFPRFQGKDRYHSFTFIEYGNGVRLDNGYLVLSKIGRIAGRWSRPLEGTPKTVTISKEADGWYVSFSCADVPTQPLPLTGQETGIDVGLKVFLITAEGEPIANPRHYRKAERELKKAQRRVSKRKKGSTRRKKAVKLLAKQQQHVRRQRTDFHHKMALALVRQYDTIYFEAIQPANLSRRPAPKPDGEGNGGYLQNGASQKAGLNKSIQDAGWGHFLSILAYKAACAGKRAEAVSPAFTTQDCSGCGERIYKTLSVRTHVCTNCGLVLDRDENAARNIQWRGQRLRGVLALAGAVNREPAAL

SEQ ID NO: 50218 - protein, 608 aa, Heliothis sp.
MPPSCKSCGGEGHSRRSSKSCLNYLPSIRQRSNCDDVSTEDFDVGVVKRGLNGVLCPLLDEDVRRRLTAEIRSDVVELSRLYVLLGVFVNHCWNAYPNNESNGVRTFQDMMNYVYALKGKGPHAHKFDDMVRYHDGITYYNGRLRNYSVQEMAKTYWTVLKTNITTHAYSRLARYFGVKRNDPTLFAAYYHKEFGDDDISRVCRFINVSSDWHSTIPMWIEIQREMYARGEQSFVIFPQPSHGLKHVTYTSRGWHELLRRVTPSNITSNWPSITDHKKELWAPYLDTSVVDMKKFGCCIQTDGVAVSLSMNRPKRKPALRKKPISTLPKSYVTDTFNEDRIVAVDPGSRVPVAACDSHTGFKRITKRWVRSHTLEWKRERYRSRKLRRVELDEAEDRHRVELDMGVQITCRNGHRVKLYTDFRLKWFDARQRPFERTRKLTRLSFDKYVMTARTNERIVRETFLGDTPSDRVLVLYGAGVNFVNVACYSGRKFKHTDLLRRLRSRRNIRVRLVDESYTSKACSDCNELRNGTYTRLRMNHRLRRGVCPDCNADVERDYNAAKNILVNFQRSAVCRPSPSCDSGVTTERDSHSMTIRIIFQCAVSELGS

SEQ ID NO: 50219 - protein, 499 aa, Heliothis sp.
MMNYVYALKGKGPHAHKFDDMVRYHDGITYYNGRLRNYSVQEMAKTYWTVLKTNITTHAYSRLARYFGVKRNDPTLFAAYYHKEFGDDDISRVCRFINVSSDWHSTIPMWISIQREMYARGEQSFVIFPQPSHGLKHVIYTSRGWHELLRRVTPSNITSNWPSITDHKKELWAPYLDTSVVDMKKFGCCIQTDGVAVSLSMNRPKRKPALRKKPISTLPKSYVTDTFNEDRIVAVDPGSRVPVAACDSHTGFKRITKRWVRSHTLEWKRERYRSRKLRRVELDEAEDRHRVELDMGVQITCRNGHRVKLYTDFRLKWFDARQRPFERTRKLTRLSFDKYVMTARTNERIVRETFLNDTPSDKVLVLYGAGVNFVNVACYSGRKFKHTDLLRRLRSRRNIKVRLVDESYTSKACSDCNELRNGTYTRLRMNHRLRRGVCPDCNADVERDYNAAKNILVNFQRSAVCRPSPSCDSGVTTERDSHSMTIRIIFQCAVSELGS

SEQ ID NO: 50220 - protein, 435 aa, Methylobacter sp.
VSVPDGSERFSVSFMYSLIVIPLLADICFSSSFSHFGQMKVNRSESIMIIILVICCGNDYYNTMIIRKAYKFRFDPTEEQKAQLAVEFGCARFVWNHALNLRQCVYANCIDENGKGENINYVGLNKHLTFLKGTENFGWLKNATAGMLTQKLIDLDKAYDNFFKGRAKFPKFKKKGHSESIRYQLDQRNILSTYSAGEFIKLPKLGFINVRWSQLPFGTPKMATVSKTASGKYFVSFACEIEQAPKPKTSRVIGVDVGIKDVVVTSDGFQSGSPKFTYQHQRELRREQRKLSKKTKGSNGWKKQRLVVARVHEKIANCRKDFLHKLTTKLVSENDVICLEDLNVKGMLSNRKLSKAVADIGIFEFNRQIKYKAQWYGKQVIVIDRWFPSTKMCSSCGSIKQIKLSERIYRCDCGLVLDRDLNAAINIKSAVLKAA

SEQ ID NO: 50221 - protein, 446 aa, unknown
  TnpB Polypeptide
MKIKYNTTESNKSLILSYIKNYNNVLRFTYNRIQEGIKETKDLTEKQKIMNNIFVDSHFKNSAIYEAKAFNEKKVVFGGKDLFVKRCQNKISKEDFAIKKLMPLYSVGEANRRGNRKFLILDNTKILFKPNRSDRLELNLESIGKNYKKVLNKLIEIQNIKKIAITYKLDLDYIYISFDNTLLKQSYYKTKKDRIFAIDLNPNYLGYSIVDWKDEMEYKIIDSGVYDISLISRKYNSIKGSSKDPRKIKINHKRNYEIVEITHQLFELCKHYKCEVFSIEDLSIKTEDTKKGKKLNRMINNQWNRNLMINVIKKLVNASSTRLIEVKPEYSSMLGNVIYRIEKLPDMVLSSIEIGRRGYEFNNQYLLKIKAHSKVIICPNLELVKERISMSLEELGIQSQFGDYKTLFSVLKKLKNKYRFLLDLVNKSRVLSKFYKKRMIILYKCV

SEQ ID NO: 50222 - protein, 467 aa, unknown
  TnpB Polypeptide
MPNHGHLFGSAPPQCSPADLVGYFKGIRSRRLIQECPALRRQYGGKNAALGAAGYDAGTAGHVSADRIKRYIEACQQEWIPYLKLPPTCAIIEGMKLMAQVKLLPDTRQADALRRTMEQANAASQFVSDRAWETRTFRQYDLHHLCYQAIRTQFGLSAQVTVRVIGKVADAYKLDRQSKRTFRPAGGIAYDDRILSWRLDKSIVSIWTVEGRLHIPFTCGERQRALLQARQGETDLVTFRGLYLLSATCEVQEPEPIDVAGALGVDLGVTNIAVDSDGEVHSSSQVNNVRHRHRRLRAKLQRKGTKAARHRLRQLSGKEARFGQWVNHNISKRIVTKAKDTQRAVALENLEGIRQRVTVRKPQRATLHSWSFNQLRSFVAYKGIRAGVPVILVDPRNTSRTCPTCGCIDQRNRPSQSKFLCVSCGHAGLADRVAAINIGRRGEVSHPNVSTTPRVNPQGAFGSESRV

SEQ ID NO: 50223 - protein, 413 aa, unknown
  TnpB Polypeptide
MEYSHRYRVYPSDEVADRLEHHLDLHRQLYNHVRWDYQNSPGDDKPSEYDQNNRLPEWRQRWPVFGELHSKAAQATVARFHHNLTVLSELKEKGYNVGRLKRQAPSEYRSVTYNQSGFDLDEKRGHDKYAYVRFSKIGWVKIRYSRSIPDHATIKELTFKKERTGEWFVSFGLETDDADLPGKPDVEELDASNSVGIDLGIQNYIHTSDGKTVDWLDLDDDYERLRREQRKLSRKEQGSNNWEKQRREVAKVQRRIQRKVKDFQHKLTAWLAREYDAVFVADLGVKGLLQGDGSARRKQDAAWRQFITLLEYKAELYGCHVVQVEPEGTTKECARCSVETAKPIWVREHSCPSCGFETGRDANAALNVLQRGFAELGLGWPESTPVETVTATDTEEFSSLSASHAIETGILLS

SEQ ID NO: 50224 - protein, 233 aa, Okeania sp.
VEKPSELHGGLSRMMGNCQVRFLGEKGAVTCPFLPDKKHCRSVEYKTSGWKLSENRKAITFSDKKDIGTFKLKGTYDLNHYKLNQIKRVRLVKRADGYYAQFAIQIDLKIESQPTGKAVGLDVGIKYFLADSNGNTIENPQFYRKSEKQLNRANRQKSRKYKKGKKPQSNNYHKARNRYARKHLRVSRQRKEYAKRVAYCVIQSNDLIAYVDAERRAGGRLECERYGKKSKAS

SEQ ID NO: 50225 - protein, 396 aa, Moorella sp.
VLKDAMHCATKVYNGLLWHLCQEYEETGKANISRKNLNRILKELPRAKGYYSMSAQLTRDEVREAYRAFFALRKKGLTQHNAPGFRRKIFLSPLKYVQSGFKVEGDAVTLSLGTSREDGVRQVSFRISHRSDLKYDRVRELSITYDKLSGRLEARLVVEVKTQQVPGTGKVAVDLGETVLLAAAFGTGETLLYSGRLIKALRRYWQKVRAKVKPPSKEQPHMSRRYRQIARKERRQIEHLLHIITSHFIRECTRRGIGEIVLGDLTGIREEIDWGARMNQRLHAWPYRKVISMIRYKAALTNITVKEVAEDGTSITCHACGTVKASNRKTRGLYRCGCGWSAHADVNAALNIYERAFKVSPVKGSSGLVARPVVLSFQVDRHMVHEPKRIDLRPSA

SEQ ID NO: 50226 - protein, 518 aa, unknown
  TnpB Polypeptide
MIHIVKVPLRVSPKEYKILKARFNAAHSLDNAVKGEGLHRLTRYRSSPEFVKGKDLLKSNNNCTKELDNEISGLFSIARTKSGYYLRSASKYGKDDSLQQYAYKYVRKSWIADHLDSTSCITIADRVFASLETKRKNWKNGKVRFKSKINPVRSIRGKENSCLKWKNHQLVWNTKLHELTLNPGMDLTKDEKYKSILKDPKIVKYVTIIRKMINGVWKYSAIITCEGSPIVKSKHKLGKGEIGIDLGTSTFGYVADKYAKLSLLCQEIDVNEDKIKKLQRVISRQQRLNNSDKYEPDFYDKFGRKKKGKVKKGAKNFEASKRQQVNYDKLAELKRKQAEYRRCLHGKEANEIRSHGNYLKIENTQKKGWQKLWGKSVGNRAPAMFETILKNKFLATNGKVLEINTFVNKGSQRCPNCGNIFKKELKDRLHQCDKCGYTMQREMASSIIAKATDDTSVVNARKAKKLCKDKDPVLRAALKRLTQSSSDEQLRNHFGLKKSELEKIACENGVKIGDGACF

SEQ ID NO: 50227 - protein, 381 aa, Bacillus sp.
MKRLKGYKYRIYPNEQQKEFFSKSFGCVRFVYNRMLNDRIEAYQSVKQNPAIKMEYPTPAQYKKEFAFLKEPDSLALANAQINLNKAYNSFFKGENKFPNFKSKKNPIQSYTTNNQKGTVAVIGDKYLRLPKIKERIRIRIHRPYQGEIRSATVSRHSSGKYYVSILCKHEIAELTKTNRNIGIDLGISDFAIFSDGTKHDNNRFSTDQEKKLKFEQRKLSRRALLAKKSGKKLFDCKNYQKQKIKVARLREKVAFQRKDFLHKLSTNIVKNHDIICIENLNVRGMVKNKKLSKSISDVSWSEFSRQLEYKSKWYGKELIKIDQWFPSSQICSTCGHQDGKKPLHVREWTCTSCGSNHDRDLNASINILNEGLKGILETAV

SEQ ID NO: 50228 - protein, 407 aa, Thiothrix sp.
MIISHKIRLTPNDKQAAYFAKAAGTARFAYNWALAEWQTQYAAWKDDNSQPKPSQFSPRKQLNAIKREQFPWMLEVTKNAPQMAIIQLGASFKNFFAGRAKYPQFKKKGKSRDSFTLTNDQFNIDACRIRIPNLGQVRMREPLRFSGRILSATVSRTADQWFASITVDTDQNHLPPTEDQGVVGVDLGVSTLATLSTGEVVAGAKPHKALLSRLQRLSSSLSRKVKGSANRTKAKAKLAKLHARIANIRQDTLHPLTTDLTRRFHTISIEDLNVSGMVKNRHLSRAVSDMGFFEFRRQLEYKAEMRGGVVIVADRFFASSKTCSACGEKREKLPLSVRQWDCPACGASHDRDVNAAINLANYAVSYTVSACGGEDSGLGCKPKTKPAPAKQEFDSKFDDVQVCISSK

SEQ ID NO: 50229 - protein, 397 aa, unknown
  TnpB Polypeptide
MSQYRLLPTPVQEVALRGHCTHARYVWNLAVEQHLHWHQGRASAPSFLEQCRQLTQARAEYPWLAAGSHTVQQQALRDFAQAMAAFRDRANPARRPSWRKAGRNEGFRIVGRDRQWDVRRVSRHTGQVWVPKAGWVRFRWSRRVPEGVKSYRVTMDRAGRWHVAFAAIPEAIRAPGNGQVVGIDRGVAVSAALSTGELLRAPGLTGREQTRLHRLERKLARAKRGSNRRGRVRQAGARLKARETDRRKDWAEKSSTSIVRRFDVIRVEDLKIGNMTRSGSGTAQNPGQSVRRKAALNRGILRSGWGLLVRRLEDKAPGRVERIKPRFTSQRCSACGHVDPKSRESQAVFRCTACGFADHADLNAAVNIAAGHAVTARGGFRDAGPANREPQLLLQSA

SEQ ID NO: 50230 - protein, 460 aa, Streptomyces sp.
VWLDRADHERAHRACHASALLWNRCVAWVRNEWRSGRRPGREDVRRFVTSLPVKERPVHAHTAQAVAYDLWDAIETARANKASGLPHVRLPWREKAYRPLVFTRNYGWRVTPDGCLSLSLGLGQGRIVLPLPEFTGRGPTRTEIEQWGEIKLCWAHDTGAWALHISHSCPQPGLPGPASGTGDHGPSDEGAPVRVVTVAIDEGIINPLTMAHEAPDGGREVTVINGRSARAIKRERNKTVARLTSMLSRCKNGSRRHRRLVTARRKARGKARTRLRDFNHQTTAKAAKVVRAAYAQHRAAAPQGATVQMRVVAGDVRGIEKRTAERRRVNRSTRQQLSQWERAAHEHQLAYKTGLKIEYVDEAYTSQTCPACGRRRKVRGRRYVCANQACGFRLHRDAVGGVNILTLADNGGTLVPAGPDLAVRVTYLRAQPGWSPLQRELHGHHQHALGRARVAGQGSP

SEQ ID NO: 50231 - protein, 514 aa, unknown
  TnpB Polypeptide
MSSVTRTYPIRPFACHEKKTGKGLDLHTILEELRNDATLCASEAHKHITVENLKIISQYDGLKPAVAGRRMGIRFSVPGRGTGRSRLEWMIREYAVSQLRSWYERRKASTGKTDKYVSTGFKRIANSNKPALLKPRLALSATDKQYHAIRLNGSTLELDMVVNQRWVTFKFKAPERFLEPGVRVIAPTISIDEHDRVMFNWPIEIPVEHTPFSDKYVVGVDVGLTNHTTAVVRDITTGRVVEASFMNQRVRSLENKIKRAKTQINALYRKGRANEVEPHREALSNRRKELAILIGQEVADLSWRYGNALVAVEDLSHMVNTMKYGRWVRGMVIDRITKMVESNGGRVMTVNPAYTSRKCHRCDTNLDVSNYHVLVCVVCGVAWDRDENAAANIAGKLQDKDRHKKACKTRKRHASKNRRKNSKGTLRPLKHPLRKTGSTSKAPQNKPKNRGNHMVHHTQHATRIKEGVYSILCAAGQPLHGVTVPAVAPLSGVSDKKPHDYSHYRASLTGVYKE

SEQ ID NO: 50232 - protein, 517 aa, unknown
  TnpB Polypeptide
VSSVTRTYSLRPFICVDKKTKTGIDLHTILEEVRLDAELCATEALKHITHKNLEQVSKYNGLKPAEAGRQIGVKLSSTGRGTGRSRFEKMVQEYTVSQLRSWRERCKVNTGHNNTYVSTGFKRTATSHKPESLKPHLALSTTDKNYHAVRLNVSTVELDMVVNKRWVTFKFKAPERFLEPVIKIIAPTISIDEQDRVMFNWHIEIPTQLTEFSSKYVVGVDVGITNHVTAVVRNLETGKVVEASFMNRRVRSLENKIKRTKTQIAALHRTGRADEVEPHCKALSNRRKELAILIGQEIADLSYRYGNTLVAIEDLSHIKNTMKHGRWVRGIIIQRITDMVESNGGRVMTVPAAYTSRKCHQCGKNLDLTNYRTPVCFSCQVAWDRDENAAANIADKLKDKHKKACQTRKKHSSKTKRRNSKDTTRPLKHPLKKTEPTPKAPQNQPKRESTHHVHHKHTVIKKREGGVFPVLCAAGRSLHDSNVRVPAVAPATGCSDNQPHDYSYNGAILTDCVYTKE

SEQ ID NO: 50233 - protein, 215 aa, unknown
  TnpB Polypeptide
MGLKDLAITVNSNGESSIYANPSPLRKAEEKLGKLQRQLARKNKGSNRYAKARTRLAKAHTKVRNTRTHYLHQIANQIVDENQVIALETLSITGLAKTRMGKSVLDASWGQLIRLIEEKAAERGREVIKIDRFAPTTQTCSICGTLGGKKALNIRDWICFGCGSHLDRDINAAVNIMLAAGLAESLNEQCGDNVRRRLAGAVVVDSVHPPRVAMF

SEQ ID NO: 50234 - protein, 429 aa, unknown
  TnpB Polypeptide
MIREYAVSQLRSWQERQRARKGQTHKYTSAGFKRTANPNKPESLKPRLALSATDKNYHTIRLQGSTLELDMVVNKRWVTFKFKTPERFIEPGVKIIAPTISIDDRDRVMFSWYIEIPVERAEFSTKYVIGVDVGLKNHTTAVVRNIETGKVMEASFMNRRIRSLENKIQRTRTQIAELHRKGKISEVEPHRKALSNRRKELATLIGQEIADLSWKYNNALVAVEDLSHIKNTMKHGRWVRGMVVDRITDMVESNGGRVMKVNPAYTSQLCHRCGTKLEPNNYRTPICDTCQVGWDRDENAAANIASKLKEKSRHKKACQTRKKYSSKTRRRNSKNTTRPLKHPLKKTGPTPKAPQNQPKQGKTHHVHHKHTVIKKRGGGVFPVLCAAGQSSTYCVGVTVPAVAHASGSDKKPHDYPNSRASLTGCVYKE

SEQ ID NO: 50235 - protein, 367 aa, unknown
  TnpB Polypeptide
MIRQVGPTLELDMVVNKWWVTFKFKAPIRFTEPGVKIIAPTITVDDNNRVMFNWYIDVPVERAPFSDKRIIGVDVGITHHTTAVVRDITTGEVVEASFMNRRVRSLENKIKRAKTQIAALYRKGRANEVEPHRKALSNRRKELAILIGQEVADLSYNYGNALVAVEDLSHMVNTMKYGRWVRGMIVDRITDMVDSNGGRVMKVNPAYTSRTCHQCGATLDMTDYHHPVCTMCNVGWDRDENAAANIAGKLKEKDRHKKACTTRKKHASKKRRRNSKGSLRPLKHPLKKTEPTRKAPQNRPKTSHAIHHKRVAIEKREGVYSILCAAGQPPLHGVTVPAVVHAHGSDKKPHDYPNNRYKPMVCICTKE

SEQ ID NO: 50236 - protein, 389 aa, unknown
  TnpB Polypeptide
MDACASIQRQAVDFAIDNNKTSTFTIIKALYPSLKAQYPNLHSQWFQSACRAGAAVVHSFKNRKRKGKTNLQKPNINRPFVYISKQILKVDWDGKKLTLTFPISPNDKEPIILTFRPHHKYCRLLDDWKAERAKMGEPTLTFNSISIPLKFPKVEPYQPKTVIAVDSNELNLTVYDGVSGKLKEIDTSYAARISRDHERRVRKGTRGKQNPKAKRKVASKHGRIRREKVKNFWHHVALMLIAWAMANKAAIVLEDLKGMKERIASNQKSRRMRQKLLNFWSVMTFHKILAQKAGFYGVPLVFVPPENTSRTCPICGKVNEGLRGHVFECPCGLKMGRHEVAAINIACKGIEILSGSMLLRQGLVGNPCCLSSDFGLKAQSHDRNTQPTA

SEQ ID NO: 50237 - protein, 559 aa, unknown
  TnpB Polypeptide
MVLGYSHVHSHALKKMLLTNFQNFASLHAVPVAQIRAMEACPLPTEPIRCVIRELDVSKLTPDQLTQLNEVIDGYNKDLAFLIEELHKRANRRYCHGKNFIKWRGLLRAAHAVVHAALPPGMQKTHLLSKGGLQGKMWKTALEDACSTMDRYWRSIQVAVYCELRNKEFYSKLNDAEKYYVGCLLNNTGYLFFDMLDGKTPKPALPHKLKGKLSDPRNLCRKVRATVRRHSRRLPRHGVDRSCSLTTECYSVTQDSQGNQTISVITNTRGKRLLIPVKGKGRIGRTIKIVRDNGKFYLHIPLKTPVVPFEHIPRAPLAAGKATLHCTALDMGYTEVFTDDAGNFYGTELGKTLDAIGRKLDEVYRERNRWHARYRNEKDDKKKLNILRFNLGRKKLDAFETRARARVVCLVNKAINDIMAMRPADVYLIERFGQQFNFAGLSKKTRRKLSGWIRGTIEERFFFKASIHGAKVVYVPASYSSRRCPVCGYVHKTNRNGDSFVCKDCGHRAQADANAALNLLLAAHDKDITKFMSKGEVNTVYRNEYVKECKRRGTQPKEA

SEQ ID NO: 50238 - protein, 393 aa, unknown
  TnpB Polypeptide
MPSETIKLTAKFKLKTEPEGLEELFSLYSDIVNLLLDYVFENNITSFYRLKKETYKSLRKEYPDLPSHYIYTACQMATSIYKSYRKRKRKGKANGKPTFKKKVIMLDDHLFKLDIEGGFIKLSTPSGRLELEFYRAKYHEKFREWKIGQAWLVKNQMGVFLHVVFSREVEVREPKVIVGVDLNENNVTLSLPDGEFIQIITHEREIRTGYFLKRRRIQKKIKTGKKRKWILEKYGMRERNRINDLYHKLANKIVELAEKYGGIALEDLTEIRNTIRYSAEMNGRLHRWSFRKLQAIIEYKAKLKGVSVVFVNPAHTSSLCPICGGKLSPNGHRVLKCSNCGFEADRDVVGSWNIRLKALKMWGVSVPPESPPMKTGGGKPTRYEINALHALYW

SEQ ID NO: 50239 - protein, 428 aa, unknown
  TnpB Polypeptide
MTNTEKNKLITASLKATREKRKSQYCKTFKFKVDKSSLNAAQREHLIMFFNEAKWCYNYILNWSKDNPINDFDYKELKNITKLDKDNNIVPITISHISAAIKQSIIEKMKWSIRSLSALKSKDYKVGALKFKSEYNSIPLKQYSVTHKIEGSKFKIQGIKKPIRVNGLKQLSKYADIDYANANLLFDGIDYFIALTCYIDKNKIQHISTNKSIGIDFGCATSLTLSDTTKIDIDIKETERLKKLQRKLERQKKGSNNRNKTRLAIRKEYRHINNIKNDIANKVTHTLLTDFDVIITQDDNFNGWKDSDSKNEKIQHSVLGRIKSKLESSSQTVLLERWFPTTRQCTVCGTKIDIKQSERTFKCPKCGLTADRDVHAAQNMLYYYDTFKDASGTDVTSKPVSDCAFKLSYKKFFKHCSEAGRYNPLGLC

SEQ ID NO: 50240 - protein, 418 aa, unknown
  TnpB Polypeptide
VTIPYSIVTIDTTISSVYHSIMEVKKTYRLKLYPRKYQEEKLRKTFGACRFVWNYFLNERKTAYLERGEKMYYHETAMALTKLKQQDEYKWIGEAQTHPLQQSLRDLDAAYKNFFEKRANYPKFKSKYNPNQSFRKPDRWRINGKKLHIERGLSIYFKGNPPPKDNKNYSVTIKVDACGDWWATIVSEEEMKEPRGKKKDPIGLDLGLTHLAITSDGKKYENIHPKKSLKKEMKKIQQGLSRKQKGSKSRTVAKLKVARLHKKIKNTRSNHLHHISKKLANKNHVVIVCEDLAVSNMMKNHCLAESIGDASWSEFIRQLEYKQKWRGNSVEKVGRFFPSSKTCSQCNFVCQSLPLSIRQWECPKCSTKHDRDINAAKMVLKHWLGANQDAEGGDGSTALRDCVRVTRPVKRRVPQTIC

SEQ ID NO: 50241 - protein, 385 aa, unknown
  TnpB Polypeptide
MHHCSLKLRFYPTITQEDIFSKEFGCARYVYNWALRYRTDKYAAGEKITYVQSSAALTNLKKELPWMKESSSVPQQQALRHLQEAFNNFFEKRAKYPKFKKKDGKQSATYMNTAFKIRNGKIIIAKAGVLDIVWSKKMPDNISSLTISKDRAGRYFVSVKYEEVKKKLPKTGKNVGIDLGINALATLSDGTSIPNPRYTSKYSSLLTRAQRRLSRKANGSKRREKAKLRVAKIHAKIADSRLDHIRKATTKIVRDFDTICIEDLSPRNMMKNHCLAKAIGDCSFFEFRRQLEYKSLWYGKTVVTIDRWFPSSKRCHDCGYIIDSLPLDVREWDCPECGVSHNRDENAAKNILSVGLTDTARGGTLKPRGTSVLQRKGQRNANRTA

SEQ ID NO: 50242 - protein, 372 aa, Methanobacteriaceae sp.
MITKILSYKCRIYPNKTQIQKFEKDLKACRIVYNKCKEKYEQDLKKQEYTKDEPQGKKYFYNLLQQLIKQYPCLQETDQRILIDAYHNLIRAITLYKKGISNHPKKSNTKTLNSFKIRPNPNIYIENQKIHLDKYGTIKIHDKRKITGKILNYIIKKHYDEWYIIVTTRQQTQKYPKTGKAVGIDLGIKELAILSNGEKIHNINLEKEDEKLNKLYKQLNRKDKNSKNYEKILKKVHKANDKRTNKINDYLNKLSARLVKEYDFIAMETLHILDMLNKSNNDKIRDASWRKLIEMTKYKSQAHGKTFIQVPSNYPSTKLCHNCGYKNNKLTLKDREWTCPECKTFHDRDVNAAINILIKAQEIDRQNKIKNI

SEQ ID NO: 50243 - protein, 409 aa, unknown
  TnpB Polypeptide
VRAYKYRAYASKTTTRVLEAQLQAACKLYNTLLHAEEEEYEKNKHTMKRNELRQLALDLRKQNPEFQALHSQVAQQVAERFYWVRQRFFEGLANKPKEKKPHRFLSLVYPQSGWRLSDIREVGQGGNKKKKKARLYLSKIGFFTLVIHREFPLNRVSQVCVKLNPSGKIFVVFLVDESGGEPPEEPTGEPGKAVSVDVGITRLATFSDGRFLDNPKPLERSLERIRALQRNLSRKRKLSKNWFKARRRIAEEHEYVKDFRRDVFFKLGALLAAEYDLLVLEDLNVKGLIRRGETGKRRMRLHDSAFSELRRILEWQFRKLGKAVLAVPAYNSSRECFQCGEINQNLTLQDRVFRCPHCDFTLDRDLNACLVLLKRPGWVPPAVPVCGASPNTSPPIPRVGAEGWAWWGC

SEQ ID NO: 50244 - protein, 419 aa, Methanohalophilus sp.
MQLTKKYKVHPTELQKDMLWELSNACTYLYNIALSERKDTWKNDKKSISYTKQQNDLPQIKEKKPDINVLYSKTCQMVLRKLDANYKSFFGIHKNGDKKARPPKFRSCKYFFTITYNQSGFKVVGNIIKFSHKINNDDLIIDIKQDISNLKIKQIEIFNEDKKGNGDFFVTLSYEPEINVPYIYNHKFQAIDLGITKTVTAINDKGKFFEINNPRYDLYWDSKISAVQSRRDHCKKYSKKWHRLNKTISTMVSKKHNQIKDWQHKTSKKMVENTKANTIIVGKLNVKNMGKSKSRSLNRSTQNNGYLSRFIEFLTYKAEFIGKKVVKIDESYTSKTCYVCGKQHDMPLYRRDMTCDCGNIIDRDRNSAINIMIRYLSQNAIWTGYEHFAHNLRQTGLLTFDVSQMHPMNDITTRRNLHA

SEQ ID NO: 50245 - protein, 381 aa, unknown
  TnpB Polypeptide
MRLRSWKFRLYPSRQQENLLGNYLEACKNLWNALLEYSKSYYEKTGKFPTRNQLNALTKGTPLFSQVAQNVSDRLAKSMRGMVARKRAGMKAGFPRFKPIERMKSFTYPQSGFKLDKCLVLSGMGGIPTRKHREINGKIKTLTVKKSPSGKWFAIFTSEVEKEVRNRKNGGAVGIDLGIGHFAYLSDGETIENPRHLKRAEEKLADAQRHLSRKKKGGKNRRKARLKAAVRFEKLTNRRRDFLHKLSRNLANKYSFIAMEGLNTKRMARGFLAKSILDCGWAEFSGMLRYKAEEAGCEVVLVNPANTTSECSGCGSVQKKSLAERWHECACGASMHRDLNAAINILRRATAGHAGSKASGEETPTRQKWASVFYEGGSPAL

SEQ ID NO: 50246 - protein, 410 aa, unknown
  TnpB Polypeptide
MARLAAFRFTALDDPTLAVEVRRHVGARRFAYNRCLQAVKDSLEKHRARRDVEVLWSGYSLINWWNAWKRSEDAGRRFAVEPSGRAELVDAGLSWRNEVCTQVFEEAAVDLGRALVAFSASKKGTRRGERVGFPHFQNKGEGPESFRLRNKVSSRGRSSIRLGDKGARSVTLPVIGSVAVREDTRRLRRMLRPGPDGVPRARICSATVTLKRRRIVITLTCELADFHPQMRHQNEEGAPRSFVGVDRGLSHLVVVAGSDRSEWGRIDPPRHLVTAGPALVRASRSFSRKVPGSANRTKARLRLGRLHGRVANRRNDFTHRLSSRIAKTHGAICIEDLAVKNLVKNHHLARSINDAAWGELGSQLRLQGGVVRGHLGGGPALFRLHQDLLVVRVGQPKDDAGGSALYLSAL

SEQ ID NO: 50247 - protein, 410 aa, unknown; identical to SEQ ID NO: 50246
  TnpB Polypeptide

SEQ ID NO: 50248 - protein, 401 aa, unknown
  TnpB Polypeptide
MIFAQKYRIYPTEEQKILMEKHFGCSRLIYNLGLECKTMAWNGSKKNLTFFDIANQLKELKTEYPFFAEVNSQSLQMTLRNLDTAFKNFFRGNARFPSFKKKSKNNSFQCPQNIFIEKNILYLPKFQEGIKIILHRAIKGIIKTTTVSRTPSNKYFVSFVVENKKELPTKKTPANVVGLDLGIKSFAVLSDGTKFDNPKHLRKSLDKLKWLQKRLSKKEKGSNRRNKFRLRIAKQHEKIANQRKDFLHKISDSITKKYDTIAIENLQVANMVKNHKLALSISDCGWGMFEQFLKYKAEWRGCNIIQIGTFEPSSKTCSTCGYINSWLELNDREWTCPNCNSVLDRDVNAAINILKFGSRYLPVERRLLTDAELPTIVGAMKRQKFLGTHFNATKKLPALAG

SEQ ID NO: 50249 - protein, 427 aa, unknown
  TnpB Polypeptide
MEQVKRKVTYRIYPSTKQANKMVEIMRLHQRIYNAALEQRIDAYRRCGKSLNYYDQAKELTQLRAEFPEYGALNAQSEQVTLRRLEKAFQAFFRRMKAGEAAPGFPRFKAFDRFKGWGYAAHGDGWKFKPNADFVHATLHLSGVGNLQARGRPRFIDQVKSSRSPGQPKTVELIRKSSGKWFASITFATLRPHRASGTAAVGIDWGTATFVTIVAEDHAQYFIENPRHFRKYDCQLKRAQRQLSRKKRGSKNRAKAKLKLVSCHERLANQRDDFLHQTSARVVRESRLVATEALNIKTMTAHGGAYKKGLNRSILDTSPGKFFALLEFKAADAGIPYIEIPTRKVKPSQSCSGCGVVQKKAMSERVHACACCGIRLDRDVNAARVILNYALTGFVTGREPSLGVEGGVTRPLKHETSTIPERSRERA

SEQ ID NO: 50250 - protein, 610 aa, Nocardia sp.
LRAISGSAPLPSPSAARLASGSAASAINAETSLSRTVVSCGNDSASRSSGPSAPPSDLVSEGGKITSTSRYGNAFRAVPVAAGPVRATVRKAPAYQLVRNWLSVASGMLQAMTRHASFRFCLEPNAEQEIVLARHAGAARFAFNQCLRTVKTALDARRTDPEVRAPWSGFELIKHFNGWKKTGAAGRVFAVDGAGITVVVETGLTWRNQVCQQVFEEAAVDCGRALAAWSESRSGVRKGRRVGFPQFKSKTRSVRSFRLRDKHSAAERPLIRVGDCGIARSITLPKIGTLRVREGTRRLRRMLATGRATILFVTVSRRGGRWFASVNVEAAELHPGHRHQQREQSDAEGWVGIDRGLTTFLVAATSDGREVDRITEPPRALMSGMRRQHRLAKAVSRKRRDSNNRRRAVARLARHHAHVGCRRRHFLHEVSSRLVKTHDRLVLEDLYTIGMLGNHRLARAISDAGWATFARMVGYKQAWHGGQVLLADRWFGSSRTCSRCGTRNTALTLGDRVFACRCGYRLDRDLNAAVNLAVWGETHCAQAREPEARAPVSNVRRRDGSGPHCRVGETGPNDAETEVDVVAKASAEDAREGRCRPINSLGDTLYAVHP

SEQ ID NO: 50251 - protein, 419 aa, Nocardia sp.
VLARYRYRIEPTPSQAEYLSRVFGCCRVVFNDALRVREEARRTGTKLSDTEIQRRVITVAKTTEERTWLAEVPSVALVQAVNDARRAFRNFFDSAAGVRKGRRIGRPRMKSKKDHKQSFRLTRNGFRIRSNGRLYVAKIGDIRVRWSRELPSEPSSVTVIREADGHFYASFVVDVPVLLLPDSGSECGVDMGIARLATVASTAGSRTDIGNPKYLKRSLRKLARLQREQCRREVGSRNREKSRRKVAVQSGKVARSRRDYHHKQALSLVHDNQVIYIEDLNIATMVRNSRLARAIGDAGWGGFTRIIGEKCMRHGRVLHRVSRWLPSSKTCSSCGYVLESLALGVREWTCRECGIVHDRDYNAAENILAAGRAERINDGGAEVSPSREEAHGNEAGSVRGAVVPNARQWQAYVSCGSSS

SEQ ID NO: 50252 - protein, 407 aa, Nocardia sp.
MLLRYRYRAYPTDQQQVMLTRSFGCARTVFNDALRCRDAAYSAGIRLSDSAIQKQVITDAKRTQERAWLAEVSSVVLVQAVNDARRAYRNWLDSITGQRKGRPMGRPRFKSRKDRRQSIRFTRNGFGITTRGVRLAKIGDVRLRWSRELPAEPSSATLIREADGRYYVSFVVEVVETPLPSSELMSGVDVGLIDLAAIARSDGTREKIVNPRHLRRREHALRRAQRALSRKQKGSRNRVKACVRVAAVHRKVRETRLDHHHKLALRLICDNQAVAVEDLSVVGLTRTWLAKSVCDAGWSLLIRLLEEKAARYGRQVVRVDRWTPTTRTCACCGHVDGAKTLAVRVWTCSVCCTSLDRDYNAAVNILDAAGLAESLNACGADVRLRLAGAVGDEVGTLRTGADRTVSA

SEQ ID NO: 50253 - protein, 479 aa, Nocardia sp.
MLLIVTRHTCFRFCLDPTAEQQIALSRHTGAARLAFNQCLGAVKSALTARRSDPAVRVPWSGFDLINYFNTWKKAEDAGRFFAVDPIGVATVVVTGLAWRNLVCQQVFEEAAVDCGQALTAWTESRAGRRQGSRVGFPRFKRKSTSVQAFRIRTKQTAGGRPPIRVGDNAIARSITLPKIGTIRIREDTRRLRRMLASGRAKILFVTVTRRASRWQVAVNIEAADLHPAHRHPPRPASDPEGWVGIDRGLTAFTVAATSDGREVERVTDLPRAFAAGLRQQRRLARAVSRKRKGSAGRRRAVARLARHHHRVRNVRQHFLHQVSTRLVKTHDRLVLEDLNTAGMLRNRYLARAISDAGWAEFARMVGYKQSWRGGRVLLADRWFASSRICSRCGTRNPALTLADRIFTCGCGLRLDRDLNAAVNLAAWGETQYVSQAREPEARAPVSNVRRREGAGPRSGVGETGPNDAETSAHIISMA

SEQ ID NO: 50254 - protein, 412 aa, Nocardia sp.
MRYRYRIEPTPAQAGELGRVFGCCRVVFNDVLRVRDDAYRAGIKLSDTEIQRRVITQAKTTEERAWLREVPSVALVQSVNDARRAWRNFFDSATGKRKGRKVGRPRMKSRKDNRQSFRLTRNGFRIRPNGRLDIAKVGGIRVRWSRELPSQPSSVTFIREPDGKFYVSFVVEVGQTPWPETTNECGVDVGITRLATIADTGGQRTDIANSRHLQRKSCKLARLEREKSRRQKGSNNRDKSRRRVAVQHAKVARTRRDCHHKQALRLVRENQVIHVEDLNIAGMVRNRRLARAISDAGWAQFVRIIGEKCERYGRTLHSVSRWLPSSKTCSACGHQLDELPLRVREWTCPACTVRHDRDANAAKNILAAGRAERRNASHASGRNAESCCGGASVRPESLPAVGDEAGSTPTAA

SEQ ID NO: 50255 - protein, 115 aa, Halomonas sp.
MLKNRKLAKHIADASWHSLIQKLVYKAAAQGKHLVKIDQWFASSKTCAGCGHKVDKMPLSIRAWDCPGCGAQGIDRDINAAINIRHQGIIKLRAEGLSVPAHGGLRKPGHAPAAA

SEQ ID NO: 50256 - protein, 406 aa, unknown
  TnpB Polypeptide
MDLTEKEIIYSTDERFVLIKDLCHLSKNLYNAALYDVRQYYFETKSYRTWQSQKLVFTKNHNPDYYALQSNLAGEVLMQVGRQFIGFFNDKSNKKKRIPKYKNKNGYNIITFPKLAISKYIKFDRYKQLYTYTLCKKSYNLKIQSSKPNIKMVKFVYDEAKDLIKCFKIYEVEQPELKSDNSRYFSIDPGLNNIVSIYNNIGIRPFLYNGRPIKSINQYYNKTNAKLRSELPTNVKSSKRLKQLSFKRNNKIDYEMHKISTHIINEAVKNDISKIFIGNNIGWKSTIKMGKRNNQNFVNIPHTKLFNQLLYKGLLNGIEVIFTEESYTSKASFFDKDELPVYGENDNYKFSGKRISRGLYKDSKGNLWNADLNGGGNIMRKVSDKAAYKGIRKTKELMKQPILVTL

SEQ ID NO: 50257 - protein, 355 aa, Streptomyces sp.
DVYKRQAQTSAMLTAWKQTPELAFLNEVSCVPLQQALRHLQRAFDAFRDGRSRHPRFKSKRRSRASAEYTRSAFRFRDGLLTLAKMAGPLSVVWSRRLPAGAEPTTVTVSRDPAGRWFVSLLFEDSPAPFPEVARAVGIDAGLTALVTLSTGEKIINPKCERRDRVRLARAQRVLSRKERGSANRTKARIRVAKVHARIADRRRDHLHKLTTRLVRENQTLVIEDLSVRTMQKNPRLARAISDAAWRELRSMLEYKTAWYGRELIAIDRWHPSSKLCSICGTLVRDMPLSVRAWRCAGCGTEHDRDENAAINLLAAGLAVSACGAGVGPRRASATPGQRAMKQEGPPVRAGRPPL

SEQ ID NO: 50258 - protein, 392 aa, Bacillus sp.
  misc_feature (58)..(58): Xaa can be any naturally occurring amino acid
VKLISGIAEKTNQSLKNCDKTMILAKKVRLKPNKEQEFQLWKSIGTARWAYNWALAGXKENYKQGGKFLNDGVLRKELTVLKQTDEFSWLYEVSNNITKQAIKDLCNVYKKFFKGLADEPRFKSKRKSKPSFYNDNVKLKVKGKKVLIEKVGWVVVSECIPDKKYYNPRISNDGKYWFISVGIEESKPIVELTNVSLGIDVGIKELAVCSDGIKMKNINKTITVKKAEKRLRRLQRQTSRKYEMNKEGNRFVKTSNIIKIEKKIQHFYRRLTNIRLNHLHQSTSEIVKTKPYRIVMETLNIKGMMKNKHLSKAIANQCLFEFKRQIQYKCEKYCIEFIEADKWYPSSRTCSSCGSLKLDLKLSDRLYKCECGHEMDRDLNAAINLSRYKLVT

SEQ ID NO: 50259 - protein, 412 aa, Chloroflexi sp.
MKVLRAYKTELDLNNQQRTRCIKHAGAARWAYNWGLARKKEAFESGLKTPTAIDLHRELNLLKRTEIGWMYEVSKTAPQEALRNLDRAFDHFFKRVKLKKQGKLKGKVGFPKFKSKKHGVGSFQIWGAIHVHEKSIQLPRLGILRLKEGGYISIEGAHILNATLSERAGRWFVSVQCEVEIPEQIRSEKPKCGVDLGIARMATVSDGKFFENPKALRSNLVKIIRLQRTVSRRKKGSANRKKAVQQLARAHLRVSNIRKESIHQVTSLLAKTKSVVVLEDLNVSGMLRNHHLAQAIADVSFYEFRRQLMYKGQWYGCEVLLADRFFPSSKICHFCGHKNDELSLNDREWDCPSCGTHHDRDLNAAYNLESLVSTTASSAGSNACGEDVRPEDIQVDLDEAGTELQSAKCRFE

SEQ ID NO: 50260 - protein, 471 aa, unknown
  TnpB Polypeptide
MENNSALHIKTVITGVIAALTAFWGWFGWLVIIWVGLMLADWLVGSAVASKEGRWSSAKLREGAWHKGGMIVIVCVALVADWLIGMMMRNLPGIALPFTYTVLIGPLVIVWYVIGELGSLAEHAVHMGAPAPEWLPKILAAGKSAVDAAGDKIGYNQTSSMLTELKKQEDYAFLKEVDSVALQQSLRDLDRGFKNFFAKRAAHPRFKSKHDHHQSYRTMNQGNNIRITGRYIKLPKLGYIKIRQSMEIGHINHVTIERTPTGKYFVILNVDFDPEPRPNAGGKIGIDVGIKAFYSDSNGNTVSNPKYLEKSARKLIREQRKLSRKQKGSSNRNKQRIQVALVHEKITNQRNDFLQKQSTMLVRENQTICIEDLHVKGMIRNHKLAKSIASVSWAKFFEMLEYKAVWYGNEIRKVPTMYPSSQTCSACGYRNPLVKNLRIRIWECPICHAVHNRDTNAGINILKKGLQMQSA

SEQ ID NO: 50261 - protein, 345 aa, Salinarchaeum sp.
VEYRRTAVIKLDVPQDADASLRETVEQFKHCANTASKWCWHGDDGYHVTSMAKAERALYDQLRAETDLTANLVQNGVRRAVEAVKSGVARLKRGERTSQPSFSADSAVYDKRSATFHRDHVSLSTVNGRVACDYILPDDPERHPRTYLEDEGYEFRMANLQRRTGVWFLHASMRKVEADGPEPDTEHRTVLGVGLGVNNLAVSSTGTFWSAGEFNHWRREYEKHRGSLQQTGTRAAHEAIEGVGRKEYGRFEIYLHGVANELTEEAVESGCSHIVFEDLTHIREHIPQATWQHVWAFRRLFQYVEYKATECGIEAVRVPPNHTSQRCSTCGCTTRTTVTAITSNV

SEQ ID NO: 50262 - protein, 457 aa, Thermoprotei sp.
MPASGQLLEYEGREPISPAIPGEGIREVKHAGRRTNVVRLLPNGFQERRLRRLASISARLFNEVNYERRQQFFHGEKVDLEGTYRKYYGKYRSALGVNAQQVLNKNNEAWSSFFSLLKLRKEGKLPPHVKNVSPPRYWKDRGSKERKLILVVRQDRYIVDEQNHRLILKDFGLEIEFAGRLRWHGKQGRLEMRHDEGRGAWHASIPVEVGVETTRNGNESKHIVRGERKSIRMAGPRGDGAAAVDLGINILASAVTSDGTWLLYRGSRAKEDFFYLTRKIAEVQSEADEARKGGDNEEFRRLNRRRRRLFRKLVRRMAHLYWNLANHLVRGLWELGVSKIYLGYPHDIAQDRGNKLTSNMWRYRELMDAIELKAQEYGIRVYEVLEYNTSNHCAVHGTKVTRGPRGVVRCPLGHRLHSDLNGALNILRRGAGSMPATLERPLSFLVDHGGVAPVKGA

SEQ ID NO: 50263 - protein, 381 aa, unknown
  TnpB Polypeptide
MIAYKYKLYRTDRTKHLDKMLHEACFVWNHALALQKRYYRLYHKYIGIGKMKAHFAKRVHRNLLHSQTTQEILERLDTAYQRFFSRLAKRPPKFRKAKDFSSILFKQGGYSLNGNVLTINKIKKRFKFSLSRPYDGKVKTLTIKRSHLGEFYIFMVLDKLTQSIGKTHNGASVGIDFGLKKYLTMSDGTTVDNPQFLKSGLRQLQRKSRNLSKCQKDSNNWKRKRLVLDRHYEKIVNQRSDWQWKLAHQLCQRYDMIFIEDLQLTGMSALWGRKMADLSHGEFVLKLQYVATKYGVTVHKINRYYPSSKTCTCGYVNHKLQLSDRTWTCPKCGIVHDRDFLAANNILRQGIAELESVSKSKNAVGASLRSRLHPRISFLQG

SEQ ID NO: 50264 - protein, 446 aa, Saccharopolyspora sp.
VISMKANTAARFRLYPNQVQAERLTAWSHTCRAVWNIALAQRIWAYKSARRATVRSVEQCIGLTEARKEHAWLRDLPAQCAQQVLRRLDTAYDNFWNPSHPAGFPRFKRKHHRQGVTFPGQAVQVRRVSRRMAHVKLPKLGWVRFRLSRPLGGAVRNATVSRDGLGWHISFGIHQPEPAQRPVNTGAAVGLDVGIACSVFVSGEDTERQRPDILTPGERERLRGLEQRKARQIKYAKKHNAGKYSNRLRKTIAAIAAVKARQARRRTDWNHKLTTDLAKNHGLIAVEDLKVSNMLRSAKGTTEQPGRGVRQKAGLNRSIADQGWFEIRRQLGYKTKRYGSELVAVPAVGSSQTCSKCHTRDPESREGCGRLFACVHCGHTDHADRNAAMIILARAFSTAGRKPTTAWEAGTAASGRGSSQSTRSPHGQGTRTGSRLREPSSNVTAA

SEQ ID NO: 50265 - protein, 213 aa, unknown
  TnpB Polypeptide
MTCYDSENGKTFILGRKYLELERYFHKEIARVQAQWYGQQSGKGVKHPVTSKHIRKLYKRKQDSVTDYLHKITRYLAEYCREQGITCVVTGDIRNIRREKDLGHRTNQKLHSLPYNRIYIMLEYKLKRYGIRFVKQEESYTSQCSPLSPEVGKRYAEPSNRKERGSYRDGNRVYNADAVGAYNILRKYHSVSGVKKELSVTGLKTPEIIKVAV

SEQ ID NO: 50266 - protein, 623 aa, unknown
  TnpB Polypeptide
VAKTQTLSFPIRLPDAMQAESLRLLDASTSAINQMITDLWPDLDLFAAERTGIAWKQVEKHLLRRSGHGSRQERCEMEQAGRILRAQATRKQVFQTILPLLSEGLIRPAEGNRPATKDARAIKEQVRALRAEGDDADTFMAMTNVIEQACNVYLQTETFPTTYEAMQPIPVLSHGQLTFAGDDGPNLGQAYRAQMRVMHVCDVESRQERKSASLWLKLRAPGEEGKWRWGEWSEEIPLPEAMFSYFDQGATTQAPTLREMTSDDGSRVTVLDVMLEVPATSVSPLDQETRVLGWDWGVRSLITVSILEKPEGDEPYRQVSRPVFLDTGGIDGRQARLRREIDCLKACRERYALLVKHALGARDEHETPLPAHFPGWQERIAFYDTRIKRCWKKYERRNRELAHLASNLLILLALLHDCRLICGENLTTLKTEGRGRGVRGRWRHWRNNTTVRGELWRVLKYKCHLLGMRARQVEPRGTTHTCPHCHRPAKTYASPAQADRKTSLKWGAWLCCSNPTCRWNGARDYAASLNIARLGLAFLVTYHDTKRYQSYRMTSEEVKPALYIRAGATLLLPSQGITPRPQEGKHIYYAGWSYSVALRTSQSTSLLSVLSTSKLRKHLLKRS

SEQ ID NO: 50267 - protein, 395 aa, unknown
  TnpB Polypeptide
MQKIISINIRIPTIRKQTELNKLQSEYLACCQDLLHILQSNKGITQTGFHHLTYKNFRRKYKLSADLLISARTCVWNRRKITNKINSVPIRFNSKLFRIDTNQNFIICLSCLNKSKRIALPVIQDDTYQRLVKNLVNGFTISSILLFKDFRVQILIKKEFEKPIENKKIIGIDTNGNNIAVSVYNSKNKKVLRHFYFGKEMFVKRKIIERRKSRLQGFADLGSQKAFKSLRKLKRYEYNFIKDSCWKLAHKIIYLSKEYGNASIVVEDLKNLRVGRKLGNSKGKRVNKIINKIPYNKLFTFISSLCEENVIAFNKINPYHTSQLCSRCGALNKSGKVYKTYVCKSCGLIMNRDNNASKNICKLFGERSILTDTSQTSLNRVVVNQPLPSNEICAL

SEQ ID NO: 50268 - protein, 391 aa, unknown
  TnpB Polypeptide
MLRTYTRKAYLTRRAHTNLDGFLNQARFLYNESLAERRDAWEEEKRSVTYLQQQATLTKRRADPQWSQFSVRIQRSILRRLDRAYQSFFKRGGYPRFKSWRNGIHSFEDSTPAKVKSSGTYYSYTIKGIGRLRFKGALPLGEVKVVRVVRTPRRVKLQFVMEVAEPAVLDIRPPVGVDLGIKDRATLSNGYKVPKNVVARREFKRRQRILSRAEKGSNNREKKRRLLAKAWQRVTERERGKVHEITRALVKGHTCRFVVEDLKIPNMVRNRHLSRSIVEQQWGYFVHYLTYKAASAGGWVVKVDPRNTTQRCSGCGAMPRDKLGLDQRTYHCYACGMILDRDINAAVNILHRGMTSDSAGIQAEMKGGVVRRPHGRRYIKPGSVGKDDPTS

SEQ ID NO: 50269 - protein, 515 aa, unknown
  TnpB Polypeptide
MPVTKKVDTDTLVAKYRAYPNKKNTKVLKKFMAARRFVWNHFLGIQNQYYDKINEYILNQIDQSQLDEIKNTFKECEDKTDKESKKKFQESFKLLKKLKKEVSVPSSVAKDILKEIDPTITDKEIIKELTEDNRDSSQARRLLDSIVLRKQLKHMKKAEDTKWLGKIHSNILSNACIDLDIAWKTFLKDESNRSGKPRFKSWRDEGGFRIDSYKLDYKDGFIISDKFKLKLKFNKHREIIGTPKAVTVRQDKVGDFWASINFRQQTNAELLDIDSIDESNTIGVDLGIKDDLLILSNGTSVKNPKFFKTLERKHLIHSKRFSRKQKGSKSSEKQRKLNSKIDRKIVRMRKDHYHKVSDALTKDSKIKAIVFEDLNVAGMITKNKPKQDDNGNYIPNNQSMKRGFNKATSKAAMSELMQMIEYKAKRNGVVFAKVDRFYPSSKTCSCCGYIKKDLKVEEQYWVCPECNVKHERNYNAAENIKKEGLRIIKEAKQAYDSNDKKYNKLSKNVKLFGNA

SEQ ID NO: 50270 - protein, 263 aa, Hydrogenivirga sp.
LEKEVKKKKPKRPKYVINVDLNVQRNLACIGIFEIDWERKDSKLYGVKFINGEIMRLVCKRDHLLEEIRKKQALTGRKPQKGDNRKLWEKISNLNRDIAMKVAKEINEVALDFKGRGEVVVVFEKLKGLKGRKGRRRKLNRKLGYWMRRSIHERVEYLSLENGYGIGFVYPHYTSKRCSVCGSKGERFSPKGSKALFGCTRCGYEVNADINAVFNQHFLYLSHLLHGGGKARSVVRMGISLKGLRKRRLNFSGVPKATATNVY

SEQ ID NO: 50271 - protein, 409 aa, Streptomyces sp.
MFSLSAEPGGVGWMIRTYKFLLRPTVRQAVAFGEMLRDHCSLYNGALQERRDAYRHASRTTVRYGHQSAQLKEIRAFDSECHGRWSFSSQQATLRRLDKAFAAFFRRVRTAEKAGYPRFRGIGRFDTVDFPRDGDGCRWDSTPHDPVTRVRFQGVGHVRVHQHRPVIGKVKTVSVKREGKRWYVILTAEQFRPEPLPASGSVVGIDLGVANFLADSNGGFVPNPRHGRKAAARLEAAQQALSRCRRGSKRCRKAVDEVARLHRKVHCQRLDHAHKTALDLVRNHDFIAHEDLKVRDMVKAPAPKPDPGTPGNFLPNGAAFKAGLNRSITDAGWGVFLAILTAKAESAGREVMAVDPRNTSRTCPMCGHVSAENRPTQDKFQCTACGHRAHADTVGAVNVLRAGLVRREA

SEQ ID NO: 50272 - protein, 387 aa, Streptomyces sp.
LNSTRTGAGGARPLPVSPSSAASSPRPAARARGSARETPTCSSRHSRTSPKPNARFTSGFGEPTWRKKFRHEGFRIIGADRVPEYNTDGSPKLNAKTGKQVMGRSVTLQKLNRRWAQVKVPGCGWVRFRLSTNGKGARLPQAKTFRVTFRNGQWHIAFAVLPEPTPAPGTGRAIGIDRGVKVTAALSDGRTLNCPQLTTRERARIRKHQRRAARAEKAGPTKTLEYAKVAKLKAREADRRKDWCEKTSTMLARTYDLVRFERLNIKNMTRSARGTVEQPGRTWEVRPEPDDPRPGLGSTPAAHRGQSPRPGRRRTRPLHQSALQRLRMDRQELAQEPSRVRLLLLRLHLQRGHQRSSQRRGRTGRDPRPRRTAGAGGTTPPTAIERP

SEQ ID NO: 50273 - protein, 402 aa, Escherichia sp.
VKRLQAFKFQLRPGGQQECEMRRFAGACRFVFNRALALQNENHEAGNKYIPYGKMASWLVEWKNATETQWLKDSPSQPLQQSLKDLERAYKNFFRKRAAFPRFKKRGQNDAFRYPQGVKLDQENSRIFLPKLGWMRYRNSRQVTGVVKNVTVSQSCGKWYISIQTESEVSTPVHPSASMIGLDAGVAKLATLSDGTVFGPVNSFQKKQKTLARLQRQLSRKVKFSNNWQKQKRKIQRLHSRIANIRRDYLHKVTTTVSKNHAMIVIEDLKVSNMSKSAAGTVSQPGRNVRAKSGLNRSILDQGWYEMRRQLEYKQLWRGGQVLAVPPAYTSQRCACCGHTAKENRLSQSQFRCQVCGYTANADVNGARNILAAGHAVLACGEMVQSGRSLKQEPTEMIQATA

SEQ ID NO: 50274 - protein, 470 aa, unknown
  TnpB Polypeptide
VRDSIDQFFKEIQLSFSSKYNEALGLCGVSTPVKKHSDLPASRLIKILDCFNVSLYSVVKGKVDYDVVERQMRGEVAIPSKYLEGALYSLKSTPLKLVSCISNTLSKEAADEVLKTTQIRGLESDLAPEKVNLILLHDICEYVSAFYGDERVAYLGAQKALNTISMKMGNWNGKIKKFELKFKSKHQITQETFHCNKKALKINLRLFSSRIAQPLRVRNKMKRWWDKNVNNINHDFKIIKEKPDKYYIILTTTRKKVQKTDRKKVVSLDPGVRTFQTFYDTEGSSGKIGDLESLKLMKKAKKLDLLISLRKKIKEIRKRTRQNMKKRCYELRTKVRNIVKDLHWKTCHFLCENYETILLPDFKVSNMIERCPKRLRKINNEVVRRLLCLSHYSFKERLKHLVNCYSGTRLIIVNESYTTKTCGNCGLIKEIGGNKKYNCPSCYSIIDRDINGSRNILLRYMTKHGLDSTR

SEQ ID NO: 50275 - protein, 435 aa, unknown
  TnpB Polypeptide
MRQDAKYRDAMNCYRKDRKSSGIKKELSDIREQYGLSEYVLHKFVKLQQKRYADDIDSLTAQKIASHVWRAAQDVLFDSGKTVHFQKWAEFHSLEGKNNQSGIRFKDGRLQWNGLVIQPKLPKNDHYAREALKNRVKYCRISQKTVEDREQFYLQLVLEGTPPVKHQIGSGRCGIDIGPSTIATVSGTDCSLKVLASEAEFVERKQRILFRKMDRSRRAMNPDNYNKDGTVRKGRKHWKKSNTYRKIQRRYQNLCRKRAAIVKQSHEREANRLMAQEDRFYVETMNFQGLAKRVQETKRDDSDRCKRKSGFGKSIANRAPAMFLSILERKLNAQGGCLRKIDTVRFRASQYNHLADTYQKKTLSERWSLIGEDKIQRDLYSAFLLMNSNADGTAADREFCIKTYENFKIRHDQLIEHLTQSNEPLPKSFGLWKAA

SEQ ID NO: 50276 - protein, 352 aa, unknown
  TnpB Polypeptide
MAVSKKTPERVWLTEVSDVALQQSMRDADTAYRNFFSSLKGTRKGRKVKAPRFKSKHDHRQAIRITGKNNFAIRKVNHHKALLRLPKMGELRLNLSRPLPATPTSVSVIREADGRYYASFVVDTAVIDRPAPVHQHAGIDLGLNHLAVIAYDDGTHEKVENPRGLRKQQRKLARAQKELARRQKGSANRNKSRTKVAALHRKIRETRADHHHKLARKIVDENQVIGVEDLAVAGLARTRLAKSVHDAGWGMLLRLIEEKAVEAGRTLVRADRFFPSTRLCSACGVIGEAKALSVRSWVCGCGVAHDRDVNAAVNLLHVAAGHAETVNACGGDVSLQRAAANPGEAGTASVTV

SEQ ID NO: 50277 - protein, 250 aa, Beggiatoa sp.
MHEALRFSGEVICATISRIADKWFVSLSVKLESATASCENQAVVGVDLCIKSLATLSSGDVFEAPKPLKKSLKKLKRLQRGLCRRQKDSHNRYKLKQQIAKVHAKIVNIRQNSLHQLTNYLTKNFSNIAIEDLNVKGMLANKNLARAIADIGFYEFKRQLEYKSFLRGNYLLTVDKWFPSSKQCSNCGHKKTDLKLSERVYHCDSCGLERDRDLNAAFNLKNVLNTGSSSEINACRQDGSVTTCGSNQLG

SEQ ID NO: 50278 - protein, 396 aa, Beggiatoa sp.
MKATRIIKSKNLNQGKYEQLEAQAKQLGNIRTNVWHDFGSINGVSIKSDRKIRDQWLKDKRQFKVSANAWKETLRDSFGDIKAYREAAKEKVRKVIYRQNLSENEKIGFYKLLSSSLWTTDNYLRRLMRKHWKHGRNHTNNQIVVRSDNYTTFQLGGRAWIKIPSLQKGKRIPIPLNTNVEPSGTLRLILNDGIVEVHYTVDIPETKNCGSRAVGIDKGYTEVFVDSDGIEYGKGLGKILTKKSDQLKEKYQKRNKLKAIANKKPHKKQNIIQNNLGRKKLNRQDRKTKSQVQDIIYKATHQLVDKAEVIAAEDLTSPISSKKFGKNVTRRLSAWTKGVIATALDTVSRRRGSSVILVNSAYTSQMDSRYGILSGKRSGVSTGRCYKLTRMQRETF

SEQ ID NO: 50279 - protein, 418 aa, unknown
  TnpB Polypeptide
LHTGCLEARRIRNETNRLDKHGWDWNDIQTVVTNNAGHITNTSQRIIEKALGELETYHDNKDDDWGRPYPYIDSRYPMVMNHGEGYRLFPEDETVRFRITATRGTHVKGTLQGSPDHFDRLRTALDNDDWRVGTAEVLHKHDEWRLHVTVTHEHAKVADKYDAETIVGVDVNEDCIALAAMNRSGSVTDSVVFEYPSVKEQRHAFFTKRKRMQTAGQTAIDTTVQSEERDYVHDRLHKVSRQVVEWVSQFSAPVLVFEDLKDLRDSVNYGTRMNRRLHSLPFAALREMVSYKAAWEGMPSDTVDPSYTSQRCPRTECRHTERANRHKKRFKCCECKFQDHSDRKAAVCVVQEWFERETENVLSLDRLPGGVEVRRTASGAGGGPDSHGPSGSGVDRYGTSARPETGVREELKSVAPNG

SEQ ID NO: 50280 - protein, 399 aa, unknown
  TnpB Polypeptide
MTKVLDNLCDYRRYCWNQGLELWNDLYDQRIEMVPASLRKKSQLAIKDKTIMFTKEERELLNLFPSPSERVVRDLMVNDKEDWQHKLSSKVLQLAVKDLAQAWSKFFDSKKSNQKVGKPSFRTKKNPRQGFKTYGVRIKNGKLVLDKPWAYKDDWYGISFKGYDLPDGKIKHCSITKINNKYYASLVIDCPKQFLPKTGKNTAIDANVNHFDYTDGSFVVCPKQLDTLYAQIKHYQRLLARKRQANGKKATQSNQYFKVRTKLQRCYERVTNIQNDLLHKFTTEIYHNYDTVVIEDLDVKAMQMSKKAKNLHRSLFGRFRLYMEYKADKFGKELILADRYYPSTQRCSNCGYVKTGDDKITLSGNKKHGTKHNEYVCYECGFEADRDYNAVMNLLALAN

SEQ ID NO: 50281 - protein, 429 aa, Thermococcus sp.
MRVTKTVVLKSERLPKKVSKIFVELEGMYREMLLQTVLFAVQNETTSFVKLKAEKYRFLREFYPQLPSHYAYTVCQDSALRAKSFLKRKRKGLAEKVYPEVRNVSIWLDDHLWRAGLTVIKITTHKGWIEVGLEAHKHYWKTVNSGWKLASQARIKPDKKERRLIIYLTFFKDVEQYKAKSWISVDVNEDNVTALVDFTPVIFETGQKKITLGYYYRRKRVQKKWDKKLGSRNEKKRKILRKLREKDKKRDVRLKLAKIIVKEAKKRNAGIILEKLPKNVPRRMLERVGDKQLRHRIYQSAFLGVQKAIEEKAREYGVPVIRVNPKNTSRICPVHNAVVEYEDGRFGVCSAGGEVWHRDVLAVWNLYLRALQGDGSSALSSGGFFVDGRLVPLASTATSEAIWIEKSRWLRWNSLPPTQSDTLSHKMKR

SEQ ID NO: 50282 - protein, 389 aa, Thermococcus sp.
MPNETIKLTAKFKLKNPPNGLDNLIQTYREIVNTLITHAHENNITSFYRLKKETYKSLRKEYPELPSHYLYTACQMATAIYKSYRKRNKKGKAKGKPAFKKEVIMLDDHLFKLDLDRKIIKLSTPNGRISLEFYPAKYHEKFRGWKVGQAWLVKTPKGVFVNVVFSTEVEAQEPKSFVGVDLNENNVTLSLPNGEFVQIITHEREVRTGYYVKRRRIQRKLKAGKKRKKLLEKYGEREKNRLNDLYHKVANKIVELAEEYGGIALEDLTNIRESIRYSAEMNGRLHRWSFRKLQSIIEYKAKLRGVSVVFVDPAYTSSRCPVCGGKLSPNGYRGVKCECGFEADRDVVGSWNIRLRALKMWGVSVPPESHSMKMGGWKVGRNDVYKSYG

SEQ ID NO: 50283 - protein, 380 aa, unknown
  TnpB Polypeptide
VVKRIQHTTKAKLIVTPRAAEELKATMHEYTKACNYLAELAHRECLRRRYDLHHAAYADLRKQTRLPAQLCITAIAKVSEQLTREPTKLHRFKQLATIRYDERVMTFRDDFQTAALTVAPKGRVTGDLQMPAAMRRVLRESKIGSADLIFRGGEFYLHITTSREAPETDLPRGSLGVDLGVKRLAVTSDRQFVAAKSARHKKACFQKTRSGLQANGSKSAKRVLKRLSGRERRFMTDVNHQISKRIVAAAKARGQRIVLEDLTGIRGRANRGVVKHLHGWSFAQLRAFVDYKALAAGVEVVTVDPRYTSQACSRCLHLGSRPNQSSFRCGHCGLRLNADLNGARNVALRHDLVATGRYFCEVSQPAQSCRPRDEQQAVAF

SEQ ID NO: 50284 - protein, 412 aa, Tolypothrix sp.
MATKRITFRLYPSKVQADKMHYWRRLHKDLYNACVEHRKTSYKKFGKSVDYFDQQNCLPQFKECWSEYKELGSHALQDTVKRVDFAFKRFFKLKSGYPKFKGCRHYKGWTYPCISGWKACTNGKNGYLKISNLGNIKMRGQARDWGKPKTCTIIFKQGKWYTSITVATGVPTRPQTDTGAVGLDFGTHHAIADSNGNVIENPRFVKIAQTKINKIAKTSRRKRPPNRGVKPSRRWRKASVAVAKIQSKVARHRQDWQHKVSTQIVSCNSLVATEKLNIKGMTRKSKGKRKRQKSGLNRSLLDVGIGNLKDLIKYKVTEAGGFYIEIPTQKVKPSQTCPNCGHQKKKILAQRVHHCEKCGYQCDRDVAAAMVMLNYARGMERTSTDADGSTSTWCGSFKQVAQMKRQKRVAQP

SEQ ID NO: 50285 - protein, 418 aa, Tolypothrix sp.
VSERVLVLEYKAKANKAQYQAIEESIKTTQFVRNKCLRYWMDSSKEDSINNAAISRYSTVLRANFPFVAALNSMAVQAAAERAWLAISRFYDNCKKAKPGKKGFPRFQHDNRSVEYKTSGWSLHPTKRRITFTDKKGIGELKLMGKWDIHTHPVKSVKRVRIVRRADGYYVQFCVDVECKETVQFTGQEIGLDFGLEHFYTDSNGYHEPNPRFLRKTEKQVKHVQRRIYKKEKGKNGRKKARNRYARKHLKISRQRTEHAKSRARHVMRSNDLCVYENLQVKNMVRNHHLAKSINDAGWRQFRSYLEYFAQKYRKVALAVEPHYTSQECPKCGTMVKKSLSTRTHTCKCGCVLQRDYAAAINILRKGKEKIATSGHGESKPTSKKKARNARGVGSSTHVGANLHKQLPTLSLESHGFL

SEQ ID NO: 50286 - protein, 481 aa, Tolypothrix sp.
MRTAYQYRLRLTRQQQATIDCWLELCRRQYNYRLAERFSWYEQNRCDVNACSLVCHLSELKDRPDFYWQKRDLVNSKKLFPEYKDLPSHTLQDVIARVEKAFDRWLRGDSNGKRSGKPRFKGQGRFRSIAFPDPLKLEHINGRFIQLPKIGKLKMILHRPLPDGFKIKTAAIVKKADGYYITLSLQDATVPVLAPDTPELDNTIGIDMGLKSFLFTDAGEEIEIPQHYRKAEKRLKRLQRSQSRKKKGSNRRKKAIKRVSKAHMLVSNQRKDFHYKSAKKLLSQGKHVAHEKLNIKGIARTRLAKSTHDAGWGQFLQILSIKAERAGLLAIAVNPNGTSQNCSGCGAKVPKELKDRTHACPKCGLTLDRDYNAAINIKYLAVGHSVNKAQVTSDAIAGVTLVARSVCLSIRVGSMSLLGDGRSSWRSRWRIPIADRKCWWRRSTHKRADAASCLYWWLQQPRGFVSRDSLSSFCGSSAYIH

SEQ ID NO: 50287 - protein, 230 aa, Tolypothrix sp.
MMVRCALRQRTLPEECDHTVTSNGDSWDGKQLTETRDRYSRVRASVQRKASTRTRSSRRRCRQVLARLSGLIRRFQAWVNHNISKTIIQQAKSEQALVAIEDLTDIRERTNQKPRNKTECRRRNSWAFYQLRMFMEYKGLRDGVEVIAVSPAYTSQTCNQCLHIGLRSEKKFKCGNCALSCDADLNGAKMIALLGLEVNQPGGSNGLYCHLSIDSSGLLKAYTVPVLRSV

SEQ ID NO: 50288 - protein, 298 aa, Halomonas sp.
MSSKLPARYPRFKRKHGKQSSYHCTGIKLGQGEIKLPKLTPIKARIHRDITGTLKSITLTRTTTGKYYASVLVDDGEEAPASLQTVGTVLGVDMGLTHLAIDSEGNKTANPRFLKQARANLRRKQKALSRCQKGSKGRAKARLKLAKAHERLANTRADFQHKLSRQLIDDNQAVVVETLKVKNMLKNRKLAKHIADASWYGLIQKLAYKADAQGKHLVKIDQWFASTKTCAGCGHKVDKMPLSIRTWDCPGCGTKGIDRDINAAINIRQQGIIKLRAEGLSVPANGGMRQSGHASVAA

SEQ ID NO: 50289 - protein, 204 aa, Clostridioides sp.
VVDIEAFENTNNHIGLDLGIKEFCISSCGEFIENPKYLKKSLNKLAKLQRELSRKTIGSLNRNKARLKVARLQEHIANQRNDFLKKLSTKLIKENDIICIEDLQVKNMIRNRKLSRLISDVSWSEFIRQLEYKANWHGRQIVKVGKFFASSQICNKCGYKNEEVKDLNIREWICPSCNETHDRDINASINILKEGLRLITIQNK

SEQ ID NO: 50290 - protein, 337 aa, Nocardiopsis sp.
VKITVQVKLTPGADQALALSETLHAVNGAANRVSEAAFERGVPREYELRKHTYADLKAEGLGAQAAQHVIKKTRDAYTTLHANIRAGNLGKPGSKRRVKAESEPVVFRPEAAQPYDGRCLSWQLDAQTVSIWTTAGRVKNLGSACSAEALKMLQEHRQGESDLVERDGVFYPLATCEVAEAEQYEPEGFIGVELGIAHIATTSAGYQAAGRKLNRHRRRQLALRAKLQKKRTTSAERRLRARARKEARHAKSTNHTISERIVTEAERTGCGLVLEDLQGLRSRVRPARRPPPPSNDGLRPRSLSDAPTGRAPFLGLRPARRLPRLQGPAGGCARGLC

SEQ ID NO: 50291 - protein, 424 aa, Bordetella sp.
MQRLQAFKFELCPNGQQQRQMRRFAGSCRFVFNKALALQKANHEAGGKFIGYVAMANHLTAWRNGDETPWLKDAPVHPLQHALKDLERAYKNFFAKRAAFPKFKRKGQSERFRYPDAKQFKLDPGNARIFLPKLGWMRLRLSRPVLGKLCNATVSQSGGKWFVSIQTEREVDQPVPQATSAIGIDMGITRFATFSDGTYLAPLASFKRHETRLRRYQRAMSRKARFSNNWKKAKACVQRIHSRIGNARRDYLHKATTTISKNHAMVCIEDLQVRNMSRSAARSMEKPGKNVRAKSGLNKSILDQGWFEFRRQLEYKLAWNGGMLIAVPPQNTSRTCPCCGHVSAENRKTQAQFRCVQCGHEANADEVGAINVLRAGHARLACGEDVSHATPAKAERAASVKQEPTEATCSGTVPAMSAVGIPCL

SEQ ID NO: 50292 - protein, 424 aa, Bordetella sp.
VQRLQAFKYELRPNGQQTRQMHRFAGSCRFVFNKALALQKTNYEAGGKFIGYVAMARHLTAWRNGTETPWLKDAPVHPLQHALRDLERAHKNFFARRAAFPRFKKKGLRESFRYPDAKQFKLDETNHRIFLPKLGWMRLRLSRAVLGKPCNATVSRSGGKWFVSIQTEREMVQAVPRATSAIGIDMGVTRLATFSDGTFLEPLASFKQHEIRLRRYQRAMSRKQKFSKNWHKAKRKVRAIHTRIANCRKDYLHKATTTISQNHAMVCIEDLQVKNMSRSAAGTAEAPGRNVKAKSGLNKAILARGWFEFRRQLEYKLAWNGGMLIAVPPQNTSRTCPCCGHVSADNRKTQAQFKCVQCGHEANADEVGAINVLRAGHARLACGEDVSHAKPAKAMRAASVKQEPTEAACSGAMPAMSAVGILCL

SEQ ID NO: 50293 - protein, 412 aa, unknown
  TnpB Polypeptide
MRPSLHAADGAIIMMEAATMPTVCLRFRFEEHPRIRALMEACADIQRQAVDYALENGKTATFTLIQALYPSLRAQHPDLHSNLIYGAIRSGARIVHGFRNQQRKGKTRADRPEIRRPSIYLVRHVVKIEWDGETLTVTIPVSPRDPEPIVLTFRPHHKYRRLLDEWKAGRARMGEPTLTAHSLSIPLKFPDPIPYEPEGVIGIDSNEGNLTAFVTSTGELREIDTGYVGKVNRDHLRREIKGTRGKHNPKAKKKIASKHRRIRREKTENFWHHLALALIAWALGMRAALVLEDLKGMKERIGKGKSRRMRQRLLNFWSIMTFHRILVHKARFYGVPVIGVDPQNTSRACPVCGKVNERLRGHALACPCGVRMGRHEAAAVNIARRGMEFLGGSGLRGRGRWATPVAGPLASG

SEQ ID NO: 50294 - protein, 209 aa, Okeania sp.
LASDPASPPGASGQTPRRLQAQGNADQERERASLLQRRLKKKTRGSNNWLKLQNKIARLHEKIANTRRDWHFKLAHQLCDFTDNIFVEHLNFKSWSRGIVRKQSLDSGVGQFINEILPYVCWKRGKYYAKVDKNYTSQECLLCGHIQKKKLSDRKHNCSNCNYQIDRDVAAAKVIRKRGLIAVGHTVKEKACGDGLTGVQIKQVELLSS

SEQ ID NO: 50295 - protein, 654 aa, Acidimicrobiaceae sp.
MPEGQAVSTFVVSLDTSDAHARKRLQSLYFTMFNLRRALQRDAQRLCRTYWARKEERHALGWKFVAEELGLTRQGFEQLAREHARNSRWALDHVSMALVSHMAAAVFEDTVRHLWSDNAGKRHGALHVTAPHQFATIHGRARSHTSVNKWETFRLYGTLEGHFDAYGHGALGKPTLADVAKLSPGSAVLRQHTMTTPGPTKWSTYTGPLVMVFAGGSHSNQTELQLPVRLPQGRGQWDRVVHFLAQPELWHKIDLVRRADSSQPGGWRYEMHLLVLSAGYTSAKNHALLEAAPTDRRACVDVNVSNLAVVSVDASHHDPRSTLVRVDVGERDRLVRAAAKQRRGERRVDRSRRASDAQQYAKSQAQVKRDERRCARGLRGVTDSTPRGGRLTTAAGVPSRAYRHDQLSATYRDLRQRRGERARAQSLTKHTHAHDVAVQLVATHGTHWLIEDCNLTTWAKLWGKSLHAFAPGMVTAELTALVDRRGGCFVKVATGPTALSSHCLCGQRVKKDLSTRTHRCGTCGFRGDRDLVASALGTCVVCTDPSDPFSARVDYTRAAALLAEITTTSTSRRFINPGRQDALTSQTHPLVSQRRSDALHHGARSTRSSRRTARLNARRTVQSTNGPGSASPAKVVHGSVLSCISPPGDFRLSS

SEQ ID NO: 50296 - protein, 425 aa, Clostridium sp.
MGKGKTKDKIYLCQSQQLKHLSKNEYIALRELCHLAKNLYNVGLYNVRQYYFQEEQYLKYEGNYHLCKDNENYSMLNSNMAQQILKEVDGAFKSFFGLINLAKKGKYDFRSISLPKYLKKDGFFSLVIGQIRIKDNGILDIPMSPAFKRLYGKVTVKVPSNLKDKKIKEIRILPKHSGRFFEIQYTYECVEAQRNLDKTHVLSIDLGVNNLASCVTNKGKSFIIDGKRLKSINQWYNKENSRLQAIKDKQKIKGTTNKQAKLAAKRNRQVKDYLNKTARYIINYCLNNNIGTLIVGYNPTLQKDSNLGKTNNQNFVSIPVGQLRSKLEYLCKIYGITLKLQEESYTSKADFFANDVLPNYNADNPQTYKFSGKRITRGQFQSANGKTYNADLIGALNIMRKSNLVDVTILQASGVLDMPLRIRVA

SEQ ID NO: 50297 - protein, 314 aa, Bacillus sp.
  misc_feature (221)..(221): Xaa can be any naturally occurring amino acid
MEVNEMMINKAYKFRIYPNKAQAILINKTIGCSRFVFNHFLSLWDHAYKETGKGLTYGTCSAKLPAMKKEFVWLKEVDSIAIQSSVRNLADAYTRFFKKQNSAPRFKSKKNNVQSYTTKQTNENIAVIENKIKLPKLGLVRFAKSSEVKGRIVNATVRRNPSGRYFVSLLVETEVQELPKTNSYIGIDVGLKDFAILSDGRPYKNPKFFRSLEAKLAKAQXAKAISEVSWSQFRYMLEYKAKWYGKQVIVVSKTFASSQLCSCCGYQNKDVKNLNLREWDCPSCRTHHDRDINASINIKNEAIRLLTARTAGLV

SEQ ID NO: 50298 - protein, 424 aa, Okeania sp.
MKARFKYRIYPTPGQKHRLAKLFGCVRVVWNDSLACCQEKYKSGDKKPSNEKLQKQFITQAKKTEDREWLSEVSNIPLQQSLNDLNQAYQNFFKSTKGQRKGKPVKPPKFKTRKSKQTARFTRGGFKVGQHKVYLTKIGKLKIVWSRELPAAPSSVTVIKDSAHRYFLSFVVETCAKTSSHTDKSVGIDLGIKTFATFSDGIKVDGPKPLKKRIKKYRKLSKSLSKKILGSKRYEKARLRVAKFSYGMLRKHAKLKDTRTDFLHKLSTEIIRENQTIVLEDLNVSGMVKNRKLSRAISDLGWRKFRTLLEGKAEKYGRDFRVINRWEPTSQKCSCCGFRGGKLDLQVREWECLNCGAKHDRDTNAAINILVAGGQSETKKRTEPAPPKGARERGARNGRGGKRQTTAKVAAACETSTHRGAKAR

SEQ ID NO: 50299 - protein, 316 aa, Deinococcus sp.
VTHIQATTHLKTFRYRLRPTKAQEVALLEQLRLCRGLYNAALQERRDAYRKAGKTVTGYDQMKYLTEIKAALPEYAGVYSQVLQDVLKRLEKAFKAFFRRVKAGQTPGYPRFKGAGWYDSICYPQSGFSVSDKTAFFSKIGNIRIRLHRPLEGKLKTATIRRECGEWYVSYVCEVEAAPLPATSSQVGVDVGTTWFCITSDGEFVENPRHFQGAMRKLRVAQRTLSRRKRGSNRRKTAKAAVAKLHRKVARQRLDFHHKTAAKLIRENDLVAHEALNVLGNGQRELGPAASTMLDGVSSFLSCPSRLQAPDGQLSP

SEQ ID NO: 50300 - protein, 388 aa, unknown
  TnpB Polypeptide
MTVRHVAQRIPFRPNGTQRALLEQCFGARRFVYNQQVEAFDSYDKKTNPKPEYPNVTDLKNRFPWLGDCPLPSNAMSQSIRDFALAKGSYFRKGEHGRNRPRFASRNDNIQSFRNCAPIRHMEGNRYLLSKRLGYVRFRKRDWPRFPLERLSSWTVKRENRTYYLVLLFDVDIQPMPEAEDHVGIDLGVKNLLTLSTGEKIDYPNRLRRLEENVKREQRKLSRKTRGSSNYRKQGAIVAKAYAKLRHYRENMQHQLSHRLIEENQFIGLETLAVRNMVRKTKPKKSPDGRYMRNGQGRKRALNRLIHSASWSQFVELLRYKAEWYGRTLIQVDRFYPSSKLCHECGWKYEELKLSEREWTCRSCGTRHDRDVNAAKNILTEAGRLFTL

SEQ ID NO: 50301 - protein, 409 aa, unknown
  TnpB Polypeptide
MVWFMALRKYTYKLYPKPRQSEALLGQLRLHQQLYNAALQERIDAYRKCGKTISYNEQQASLTIIRAEMPEYKALPCTSKRMTLRRLDKAFKAFFRRVKKGESPGFPRFKSINRFSSFELLEPKFIHNESGKHGRLFVAGVGHIKARGQCRITGTLKTSQIQYKHGQWWLSLTVDGDARRQTTATKACAMDWGVAHLLTVVEEDGSFEHVKNPRYYRTGQARQERLQQSVSRKKRGSNGWKKACKRLSTFKRKQAQQRRDAQHKLSAKVAGRYALVAMESLQIKNMSRSSRGTLEAPGKNVKQKSGLNREMLDTAPASLISMIRYKAEEAGNEFVETPTKKLKPSQRCPKCWHTTKENRTSQANFTCVSCGFQQNADVVSGINSLWWALGLGQECVPEVYTSKPLLSMA

SEQ ID NO: 50302 - protein, 442 aa, Ruminococcus sp.
MQIISSYGVELRKQNIPIRQTLEIYRSAVSYLIGIYVQVWEELAEIPDAKRRFNAAEHLVHTTKKNHACFDFDIRFPKMPSYLRRSAIQHALGTVSSYKTRLDLWEKTDGKSGKPKLVYENHAMPVFYRDVMYREGAEGKDEAYLKLYDGHDWKWSCVRLDHTDMEYLRKCWSGEKASAPTLEKRYRKYFLRFSYKEEVTLTKTPVKEQIICSVDLGINTDAVCTIMRADGTVLGRRFIDHPSEKDRMYRTLGRIRRFQREHGSAQTQGRWAYTKRLNTELGKKIAGAIVRYAEEHHADVIVFEYLEMQGKISGKKKQKLHLWRKRDIQRRCEHQAHRKGMRVSRICAWNTSRLAYDGSGAVTRDWENHSLCTFQTGKRYNCDLSASYNIGARYFIRELLKPLPATERSLLEAKVPPVKRRTSCVYADLRKLHSEMERLKAA

SEQ ID NO: 50303 - protein, 431 aa, unknown
  TnpB Polypeptide
MLKAYRYRLYPTSEQETLFRQTVGCCRFVYNLCLDQRKLERHRSNPRRLTAYDQISELTDLKAEAPWLREVPHHALCQAIIDLDKAFKKFFAGAGFPKFRKRGDRNSFRYPDPKQFKPKQGRIFLPKAGWVTWVQHCPMDGKPKAATVSREADCWYVSIQCEMEVDEPRPNLGPAVGIDIGVAKPLTLSTGEVIELPRSTEQGRHKLAALQRKVARKTKGSRNQARARLAVARFQARLARRRKDAAHKATTRIAKSHGVIVIENLMVRNMTASAAGTVEQPGRNVAAKSGLNRSILDVAPYQIRSMLEYKAAWYGSRVIAVNPAFTSQMCRVCGSIHPDNRTSQASFVCRECGHEDNADLNAATNILRLGLKTGGRPGVACESNRAGGRKQERRAARRGSSVLQGRESSRRLLMHERGPSTLTDSGVHRIG

SEQ ID NO: 50304 - protein, 348 aa, unknown
  TnpB Polypeptide
VLLKATENWNGNEEDGRVLRTYVRNDQYTIQFGNRSRLEVPIGSDLKDELGLNRNQRLRVEVAGEPKWSGEQNRLELVYDELADTFRAFQPVTVPDSRLDSPLASHEAALDVGANNLVACTTTTGSQYLYEGRNLFEQFRKTTERIAHYQSLLENQYESSKRIDRLYRKRTNRRNHAQDSLVRDLAERLYDEGVSRLYVGDIKGVLETHWSPRVNEKTHNFWAYRRFINRLEDVCDEYGITVEEESEAWTSQECPECGEREGTIRHEDSLTCPCGFEGHADLVASESFLRQQTEVGPMARPVYLKWNKHSWREHHSPLSLVETTVNEAYTNKSTTAGGNVALGEAQND

SEQ ID NO: 50305 - protein, 573 aa, unknown
  TnpB Polypeptide
MSDHLSLPIRLPDDDVDRFGRLATLTQQVATHVLEDHWTPAHLDGVAGSSYQAWKYFDEHELFDELDLYLPSRFRRCILQKVGETLRSHADRRDAFQSIQSVLPDHKIRRIHRRRIKERLWDDGDYLSSGYVDILIDQLNSYYDQHGSYPNTYLEMQDYPEYDSGVLPFSADDGPTSGQAVKYQYDTETETLTIRLKTPDTHSPETRGDWSWTEYERDGYEAFHDLLAHGDLSAPEFQPSRRKTGDAYYELSFSVEIEHAEATDGTDCVLALDAGMRKDMTAVVVTDDGEQLSTPQFIRFTDRDGMRRLHRERTRLNDRLATLRCDGCAHTDEFCHVQSEYERVNNKIRHKREQLTHDVANQILALALAYDVDAIVHEDLRSLSPPSDEGTLSWELSSWARREIIENIEYRADCAGVAVERVYPQGTSRSCPRCGSTGHTCKSPNHQQEHWWGGHFRCDNARCGFEGDRDYIGALNVARVFFSDTDRLDHDFTSSYTEDSEIVLADRSAGTRLTFGPGIVAYKPEQTTATTGGGSAVIAPAVAVSESNADGSDGRGPVVQQCTRFVRCATESY

SEQ ID NO: 50306 - protein, 390 aa, unknown
  TnpB Polypeptide
MLTLTYEYKLKPTKKQIEDIEHILTVCRKVWNYALRERKDWVNSRKCRVDACSLQSEYIIKADEPFPDYHIQAKRLTEAKKTNEELKSVNAQVLQQVLRTLDRAWVDMKSRKFGFPRFKKYYRMKSFVFPQLSKREVIQGNRVKLPQLGLVKYIQSRPIPDGFVISRARVARKASGYFVMLSLQLNVDVPDVPFHGYPIGIDVGLDSFSATSEGQLIARPKFFNILHRKLKLLQRRLKFKKIRSNNRKKLNAKIARLHQRISDTRKDFHFKIANHLCQNAGAIFVEDIDLRIWSKGMYAAHTLDAGFGQFFTILQYVAWKNGVYFAKVNKDYTSQICPNCGTHTGKKTLDVRVHSCLECGYTTNRDVAAAQVIRDRGVTAVGQTVVENAY

SEQ ID NO: 50307 - protein, 388 aa, unknown
  TnpB Polypeptide
MDRTVRIRLKTTPAQACALSETARQFTDAFNHVCSYGWRAGDKNGVTLHHATYRASKDAAPALVSDLHIQARVKATEAIKSALTRQKQGRRVSCPQSRACPPRYNLHTYRLDWDAGIVNIATVTGRERIPFCVPAYAASFIGHPTATADLIHKRGHWYLHVVVHVPAPDITPTDAVVGVDLGVTRAAVSSDNRFHGARRWRELEARDFRLRRALQKKGTKSAKRHLKKLSGTTARRRRDHDHVVSRRIVDGVPTGATIAVENLTNIRSRVKARRANGSQRRLHSWSFANLRACIAYKAEGRGIRVEGVDPRHTSQTCHRCSFQSRYNRRSQAEFWCRSCGYRTNADRNGALNIATKLLASRGMTAAGGPPSIGLSSPAVAERQAVCFR

SEQ ID NO: 50308 - protein, 366 aa, unknown
  TnpB Polypeptide
VKLIAQIRLNPTPEQAIYLLQTLEAANALCNHISQFAWDNTLFSAFNLHKALYHPLRAETGITAQVVVRMFAKVADAYKLDKKRKRTFKPHGAIAYDDRILRYYTDKKAVSIWSVGGRLHIPYSAGDRQKELLQYQQGETDLVYTKTTKEFFLLATCDIPDPDQRQTDEALGIDMGVTNIAVSSDGQKFSSESIEYTRKRYAKLRKALQQRGSKSAKRHLKKLTGRQQRFQKDVNHVISKQLIIQAKDTNRSIRVEDLTHIRERTTVRGADNRAKHSNWAFAQLQYFLAYKARMHGIKLEQVDPRHTSQRCFVCGHIERANRKNQETFLCCVCGYAAHADVNAAKNIACWAAVKPPIVTSRLGRPS

SEQ ID NO: 50309 - protein, 535 aa, Firmicutes sp.
VKVTFEAKIKDVSLYPLLEAFAALFGRVERALFRDHCVRGEPLADCKRRYLPLFGITARMFNAVAFVLEGKVKAARESQRRHLRTLRNQIRALEGSLAELGDRLGRAWAPGSKWRLRFQIHQKKRRLGCLKARLARVEADLDRVVPPLCFGSGRLFRAQFHLGENGYSSREEWLQRWHSARSSGFLCLGSREETSGNQTCTLFPDGSIRLRVPDCLVPTFGRWVMIRGVRFRRGEEALRHAISAGQAITYCFFRRQKKGKVVWYLGATVDQSPSPLVTDPARGALGVDLNPHLLAVAQVDRYGNPVAWRHLSLRLHGRRRVQVTAALGDAVAEAVAWAKAEGIPIVVEELDFGKKKAELRERNPRYARLLSAFSYRKFWLLLHSRAAREGVEVIVRDPALTSVIGEVKFGPGYGLSPHAAAAVAIARRGLGFGERLRSRSALVLPARNRTRHVWGDWRRLSRRLRAEGACGRRLSERGRGRGLPLSRVARTAVFGPHGPPGDGLSPVPGWESPAQTVGRAVRPASQQCAGNCNYC

SEQ ID NO: 50310 - protein, 361 aa, Enterococcus sp.
MTTMSQAMTVKIKLDPTNAQTELIQTSSLAYIETVNLLVSEMIVAEKVTKKTSKDVYAPLNSAVKNQAIRDAKSVFQKAKKSHFKNIPVLKKPVIIWNNQNFTICPSGIKMPFVIDGKSKKIEIAADIPEYERSLLKNASKIGTLRITRKGAHYVAQIAIEMSEKLNTSTKIMGVDLGIKIPAVCCTEDNEVKFSVNGRMNKYIRRYHNSRRKELGKAKKLSALKKSKDKEQRWMKDQDHKISREIVDFAVNHNIGIIRLEKLANIRKQTRKSRKNNHSLSNWSFYRLASFIEYKANLVGIKVEYVNPAYTSQRCPNCGYQHHAKDRKYYCSDCGYIGHRDIVGAKNIIYAPVLDDKSRVA

SEQ ID NO: 50311 - protein, 394 aa, unknown
  TnpB Polypeptide
MTTPVERTKTIEVRGSGAAFKSSDNDAQIHSGRVAEKEMGAVGFAAKRNPCCRPSRSPSRKQGSKQGKVSENLATELRAEDNRHAKIVDTVTCCVKVKVPDSLRPVLDALVGQARACVARMLARRMESSSKYYKELPCVIAKSLIAKYQKNKKCKQVSNLALPVCGDKGKQIKLEDGGVRIPALFKKEVPPVLWLHLPVGFVRSAEFFERSGEWYAAICYNAKAEKQFSVTGTVGVDRNSVGAVATLADPQNGKVLHLGFNPARTKAVWRGQKDNLQSLGKRRLLHKIRNKQCRRTKYENHVVSKQIVDYAAKHRRCIVLEKLENVRKGKIRRYAEQSQWSFYQLLQFIAVQGRFARRNGNRSRPCVYLAGMLSLPSVDQAQRKEVRLWDVRTQ

SEQ ID NO: 50312 - protein, 541 aa, Streptomyces sp.
VGGLRETAAPFVVPGPSGVAIRTRLKHLSREDEMVLRQVGDHLGTLAARDLKTRCAAGLEHDSEQWAQRKSILTPESSSRWAGSVTKASHDQWALARRGQHAHIKSLQAGIATISHRLSLPVGEKGSRRAPGGYRSRREWHAKSRRLHLLQERLERVRADWEAGRVRVARGGKRLLNTRHHLQQAGLSEPEWRERWQAERRFLQADGESGKRFGNETVRVTPDGEVSIKLPAPLAHLANAPHSRYVLVGRVSFAYRGERWGDRVSANRAVAYRIHEDTTRGRWYLTATWTIPPALAVPLAAARVHGMLGVDTNADHLAAWRLDAHGNPIGAPLRFGYDLSGTTTHRDAQVRHALIRLLHFAARHRLAVAIEDLDFTAETTREKHGRRTRFRKLISGIPTSRLRARLVSMAAELGITVVAVDPAYTSRWGAQHWQKPLTTTTRKATRHDAAAVAIGRRALGHPIRRRTAPPPHDRSDRAGHRTVQARPGTPGCEGPRPRIPGPRTRSVPPDAERKRATRTPNTVRDVRSDHEWVQDPLLLTE

SEQ ID NO: 50313 - protein, 586 aa, unknown
  TnpB Polypeptide
MELSRTINSDKRYYLDENTIENATSFLQTMRVFNNAKIDLYNALYDQKYRKSGPLLDHAYPVFLKEKYKTNDYYNAAIYSAASGSISSQKELKKYYSTTITADLKTRNEKIQTIQEELDKKKAIKNSIRIYQKDGKWITPYPRCQLKVKGLMIVLFNKTIVKLDEYERNVEADIRKLKTRLALVTEARNRKVKKLENIKNLPPDRIVFGGKKLYSEKDTVGGAKFAKNKNAITLQKSSDEWKREFFEKRHQSMVLPGRHTSKYGNFLCKYDGKNLLVTCIDGTTTVFHDFKLPRYNEVFRENFTCKPEKRQSLCYNFTIQRDKKNRQYLILSVTMKLQAYENSYYGNGAISMDINYDHFALAEIDETGKLLDQKLIRFDLMNKSNGQITNILGAAVKEVFHWCAEKDKRLIVEDIDLTIKLASRKYGNRKRNHHMTLFSYQRIASSIENQSLRREIAFCKIDPAYTSQMGKFLFMRRYGMSVHQAAAYTIGLVGLGLYDKLVPDLRMLSLLKTKEGIVPELSQETYKTIWARITKAFSGIQKHFFYRRIPYEVLEERTRPSLKTLAAEMKVRYMPKLMNYKNCERV

SEQ ID NO: 50314 - protein, 465 aa, unknown
  TnpB Polypeptide
MTILSGIKLKLYPNKTQKQTIEQTFGNNRYVWNQFRNMQENRHDAMIDDYNSYKKQAKENGDKIINPIYISDYDMQKMLTELKKEQPWLHLSDATVLQKALSNLDQAYKNFFKKPDQFKKPKFKSRKHRSQSFTGKANKRKSGKTSVYVAGPRYVYVPKLGFIKVSKTTRINGQIKEYTITRESFGEYYISFKIEEPDRELLVKTKQLMGGDLGLTHLLTLSNGLKFPKFSPGQALALSLKAQSKASKSIDHNSKILTTNELIRLIEKGIFDEDKYEVSELSEFKNHEKRMRKSAKAQRKVANKRHNHLHKLTKKLVETYDVIVLEDLKIKNMLKNHKLAKAISNASWATFVRYLHYKCAWYGKLFILVPPHYTSRTCHQCGWDSGKKPLNIRKWTCPHCHKTHDRDINAAINILYRGLETYLQSQLMLLNEQTKNGYFSTVFFQVASQWLKQTITYFNQALEIT

SEQ ID NO: 50315 - protein, 307 aa, unknown
  TnpB Polypeptide
VVCSAAPLAQAVRQDPPGSATKPTRPAWFPQARTVRRVPDRRHRTAGRAALNRRWAQVLVPKLGWVRFRLSRPVPDARSYRVTRDRVGRWHVAFAAIPVPIPGPSTGEVVGIDRGVTVTLALSDGHAHQAPTDRDVKRLQRRLARAKRGSNRRAKLKARHARLHARNADARRDWVEKVSTEIARGYDLIRIEDLNVAGMTRSARGTVAQPGRHVGQKASLNGSILRSGWGMLPPDLSTRPGAGSRRSIPHIRASVARSAGPWIGGLARAKPPSGAGPADTSPTPTTTLHGTSRRDTPRGEARRWPSR

SEQ ID NO: 50316 - protein, 442 aa, unknown
  TnpB Polypeptide
VAKQTPCVLTTLTQAYAYDLDPTLEQISALQSHIGGSRFAYNAMLALVKDNWDENRAKKEEGIEVTQDDWVSTSHFGLLYLWAEHRDELAPWWSENGSSTYNDAAQRLSKAFTNFRKGRAKFPNFKHKGQSGSVRFMGPTVRLVDSQHLRIARIGEVKTYESTRKLFRHLTRGTGKIVAATVTTRSDKWQVSFTVDVTRQVPVTRDPERIIGVDVGITTLYTGASPEGDRVLEVANPHHFQEAEKRLAHAQRIASRRQGPQPGVAPSKRWKKANGRIQNIHTDVRNARKNLIHETTTMLAKNYDVIVLEDLNIAGMVKNHALAKHVSDAAWGEFARQLEYKTTWYGSALVRVDRFYPSSKTCSQCGTVKATLSLDERTYHCGTCGLTLGRDLNAAINLARQGLPGTSSGTGRGGEVRPAQQKLVATAHPDEASTETPPEVGA

SEQ ID NO: 50317 - protein, 429 aa, Bacillales sp.
MNRKVVNNMIRASYFVFKPNNKTNIILSQLGYAARKLWNVGNYEKRNWTKDSNAAFPNWYEQKKKLKEHFWYKNLPSQTAQEVLKVLHEAWESFFELKKTGGIEHPKPPEFKQKNFNVKFLNHGFRIEGNRIRLSISAKQKAHLREKYGIQTKFVYIPIPEHIKIGIVKTVEVKPVANGEYKIILAQEYKDTPTKKNSTKFMTMDIGIANALTCYDYQGQSHIISGRQWLSVERYFHKKIAHYQAISDGQQSVKGIKYPKKSKRTIQLYKKKKNQTFHILHCMTKTVVDIAVKQGVETIVIGDISGIRKEKNLGKKTNQKFHNLPFKKIIQMITYKAEEQGISVVTITEEYTSQTCSVCKPHPSKEHAIKGNRTHRGLYVCRDCKTVINADVNGAINISKKYLKERKAQSVVVLDTPTVYTFNGQQFAA

SEQ ID NO: 50318 - protein, 306 aa, unknown
  TnpB Polypeptide
VDRPAGRPLEGASESRTTSVRQPVDTEGAEGQRLPRRRASVESPAGIPFDQVQSNRLQAQQHERSACTLSSKIGDVPMVYHREVPDDATIKEVVIKQEPTGEWFAVPGIETENDASPKPENPEKCIGIDVGILKYAHDSDRTAVEGPDLTDERERLEREQRKLSRKEHGSANYRTQQRIVARRHADLKRKRRDFLHKLSNYYTREYDLVAVEDLDAKGLMELPRTAATAPERRGERSFGCSNTSATAKARTSWPSIRLERPKSVPTVALRPTNRCGYANTRVPHADSSRTATSTPPTTSFLADSPK

SEQ ID NO: 50319 - protein, 228 aa, Tychonema sp.
DPAKCLMIDHGVDNWLTCVSNAGTSFIIDGKHLKSLNQGYNKRVAFLMEGKSNGFWSKRLANLTERRNRQMRDAVNKAARKVIDHCLKNCIGTVVFGWNKGQKNSANMGSKTHQKFVQIPTGRLKDRITQLCEQYGLKFVETEESYSSKASFVDHDLLPTFGEKPEGWLPSGKRIKRGLYRTAQGWLINADCNGCGNIGRKVAVMLGLDLSGIGRGELSAPLRLKLWS

SEQ ID NO: 50320 - protein, 375 aa, unknown
  TnpB Polypeptide
MWFKVGKIVSGFDLTAEMKTNRHFNAGYASSMQQTCLNVGEAFKSFKKLLAKSRKGELDQKPKAPNYRKPNGLFTVTYPKKWLKLNDGSIKFPLGNQVKAWFEITEFFLPMPSNLDWKAIKEVRILPRNGAFYAEFVYPMPIGSYQLDSTKALGIDPGLNNWLTCVSNIGASFIVDGKQLKALNQWYNKQVSTMKDGKPQGFWSRTLAQITEKRNRQMRDAVNKAARMVVNRCLESGIGLIVFGWNKGMKDSANMGKKTNQKFVSVPTAKLKDRIKQLCEQYGIQFEETEESYTSKASFVDLDVLPKIGEKPEQWQPSGKRVNRGLYRTAMNWRINADCNGAANILRKVAAKLGLDLSGVSRGVLTAPIRLRLWS

SEQ ID NO: 50321 - protein, 393 aa, unknown
  TnpB Polypeptide
MKIHTVLRGHKIEIYPTDFQKEIINITIGAARKMYNSLHEQFLYRANLTKVEKEVHKYQNYTALKNKWDNDANWLKQVSCQALSNTEYNYKKAWNNFKQNPKDFNIPTFKKKGKSKNSYSLCRNTVKNDIRIEGKYIVIPKLGKVKLSQKLRFNGIINKITISKLNTGRYICSVLVEYEERVLSNKGKKSGVDLGLTEYIIDNHGYKVNNPRFYRKLESKLIKEQRILSRKIEQAKKNNRNYEDCKNLQKQKIKVAKLHEKIKNQRIDFLHKLTTQLCEDNQFIALESLTVKNMIKNKKLAKSIQDAAWGEFVRHLLYKSKQYGTTIVQIDRWSPTSKICSSCGCYHPEVVCNLSIREWVCPSCEAQHDRDINAAKNIFHLGIKEHEEMLLVA

SEQ ID NO: 50322 - protein, 578 aa, Rhodococcus sp.
VAVDDATGESIGLDDVDTRVGWLLDLIAAAGTELTARSWQPATFDVLAAGLDHAGRRLPAQGHVAAARLDWNPIYPDGVYVPSRVTRVVTAQVMATLRILAYRDTAITALSQRFDPATGTLAPPTEPGEWVPPGFARGVRRQLVARARREGGAMAGRLRITDIQEPPQVAAMARLSAADRQLAQITATGRELVLTVKLPTCPAPAGRAQWRRVRLTAAIPAHLHGRAITDWHLPTVVLDRKGLLWRCAATELIPADDLGSATVAVGVDWSPSTLGAAAITTENSDGLSSDFRGFTYDDRGLGTKLARLQAEGQMLHRKAARLTRLAATAPPDVRTQLEAKVAVLNDHRTAVGVKRGKINRELGFHFARQVTDYAEAAGAQVIAVEDLTTLETRGHGRVNNNRAAQSARRKAVTALAHTAAGVGIAVVTVPARGSSAQCPGCDEPLTRPGGYHSAWCSGCLLGGNRDHVAGVNLAKRALVGKRRVTRRRGQLPAIRVAEHAPVHRSRDKTSPTPRRPRHRRVRRSLPTVIPRLGVNSKQHVPAPQASVWDTVKPADAGSRDTPTSPTSATPTAESMRSM

SEQ ID NO: 50323 - protein, 346 aa, Actinoplanes sp.
LTDWKKTQELAFLSEVSCVPLRQRLRHQHTAFKSFFDGRARYPRFKSRNGRQPAHYTRSGFRMKNGQLHVAKIDGPLAVTWSWPGIDLVRLDPSMVAISRESDGRWYVAFAVDADEPASIESTGHDVGVDLGIKDFAVTSDGQRISNPRHLERKARSLARYQRRLARCRDGSANRRKAKAKVARAHRKVRNARADLLHKTSTSLVRRADLIVVEDLAVKNMLGNRRLARAVSDCGWGEFRRQLTYKCERTGRTLVAIDRWYPSSKTCSTCGYLLAELDLSVRAWTCPGCRARHDRDLNAAKNILAAGRAVAQHALGDACGADVRRQGSFLPRSAMKQEAPAARRSA

SEQ ID NO: 50324 - protein, 459 aa, Mycobacterium sp.
VAKFEIPDGCCVQAFKFTLDPTEDQARALARHFGARRKAFNWAVATLKADLSAYRNGGLETEKPSLRVLRKRWNQAKDEVCVNAETGQVWWPECSKEAYADGIGGAVEAYWNWQSSRAGTRAGKRVGFPRFKKKGRDADRVSFTTGAMRVEPDRRHLTLPVIGCVRTHENTRRIERLIAKGRARVLAISVRRNGSRLDASVRVLVQRPQQPHVARPDSRVGVDVGVRRLATVAYADGNVIEQVANPRPLDAALKELRHVSRARSRCTKGSRQYRERTIELSRLHRRVNDVRSHHLHVLTTRLAKTHGRIVVEGLDAAGMARQKGLPGARARRRGLSDAALGTPRRHLSYKTGWYGSQIVVADRWFPSSKTCHECGHVQDIGWDEHWQCTGCSLTHQRDDNAAINLARYEETLSVVGPVGAAVKRGADHKTRPSRAGGDEARKGRSRKAAEQPRDGVRVA

SEQ ID NO: 50325 - protein, 440 aa, Streptomyces sp.
MATQRVQEKRQFGHRARLALTPVQVRLIDAQAHAARAMWNLLHDLWTMTPRCRRSLKAADEAIRRARKEIDWLAVLPAQAAQAVLKTYFQAWKNCWEGRADEPNFKARFRTVMSVDIPQGRDLQIKRVHRRWGMVNIPKVGRVRFRWTRDLLVGRNASADNRITGARLVKDALGWHIAFRVQTLQTAPEPRTGPEVGIDAGVNVPLALSDGNHHNHGRPPRLPDGTADRDKWLNPDEKAKLLRLERRAAYRKSFRNRGEKTSRRLQNTYDQIKRLRARATRRATDWQHQTTTRLARTYGVIVVEKLHIPNMVKSARGTIDNPGKNVAQKSGLNRSISQEAWGRTMTMLMYKTARHGGTLHQVPAPGTSLRCSACGFTTPGSREDQATFVCKNPDCGWSCNADHNAARNVLHLYRMGHALIPAAGRAVVGRTRGVKPATAR

SEQ ID NO: 50326 - protein, 406 aa, unknown
  TnpB Polypeptide
MTDYLVERHVIKQSHQDFAFLDNLCFLSKNLYNATLYAVRQHYFANNSHLCYEVINKMFTHSKQQDYTALPAKVSKHTQKLVDQNYRSFFKLKKSKNAEVAKTARIPKYLPKEGRQVVHYEKGALSRIRSGFIKLSKTNVVIKTKLKPEQIQFVRVVPLGNHISIEVGYKVDYPHLKAKLGGVAAIDLGLNNLAALVSSKSCPIVFNGKPLKSINQFANKQIAIENSLIDKKLKTSKKRKDRLFLKRKNKISDYLHKISRQIVNFLVANDIDTLVIGKNIGWKQNINIGKKNNQNFVGIPFNTFIQQLSYKSRLQGIEVVLIEESYTSKCSFLDDEPIKKQDNYAGRRIKRGLFKTSSNKLINADINASANILKKYLQSKEAWNDSIRSNLVEVCSTPIVEKITPS

SEQ ID NO: 50327 - protein, 372 aa, unknown
  TnpB Polypeptide
MGVLMVKSFKYRLHPTKKQATLLKAHIEACRLLYNQLVASRVQAWQNNKVSLSCYDQQATLPLMKQQCPDFVQVYSQVLQQVAARVDKAFDGFFRRVKAKAGKAGFPRYRGEHRYDSITYPQFSNGCRLDDKGLRLGKIGCLRIVQHTDLEGVPKTCTITRSATGKWYASISCDIGQPVPRREDRPPVGIDVGLNSFAVTSDGEHVANPRFFRKEEKNLAKAQRKWDKVKKTRSPVKEKRRKVIARVHERIRNKRHNFVHQESRKLVNRHNFIAAEDLEAQKMQKNKRLAKSIGDAAWSLFRHCLQYKAEEAGIGFKAIDPKYTSQTCSGCGKVEKKPLSQRWHECECGVSLDRDHNAAINILTLGLQRQVE

SEQ ID NO: 50328 - protein, 524 aa, Oceanobacillus sp.
MSKRTIQLVIDRTEDLTELRKLSTIFGSATRYAFNRLLEGEKPSDLIKKVNIKFDLNKRYAEDAVLKAQSIISSQKALLPLRIEEIQRKIAKTERKLEDYRAGKKTPNKVSLETCIKGLDSRLETLRKKENNLLLHQKNETIPKVIFGGRKNFFRRMQGKITNEGWKELRSNTLYSRGDKSKKGNLNTRIVWDEEQAYFLLEVANPLNKKNNRSERLRYKLHTSDKRFSDVVNIVLPQETSFQDSNGNIKTNEAYQPYTVELKYKNGKWYVFLSYDIQTVGEELTSKDKIDADIIAGIDINIDRITVSIITKQGRLLETKTFYCHEMEYVRGNKRSNIAGEIAKEVIDYFLSWNVGGFVLEDLTFQQIHDTNKMLNRLTANFAYRKLHHALMTRGLKYGFKMKQVNPAYTSVIGRFKYSKMYGLSAHEAASYVIGRRGLGFDEKIPRELIKTLKEKVKSHLLQMIRSMEESEKLGETQTQKRNDLVVLRNNIQKFKEKPNWMLWNVIQKTLRMKNQEILLLKEV

SEQ ID NO: 50329 - protein, 421 aa, unknown
  TnpB Polypeptide
VAGIGFQRARLSAFWVREVAVKCTQIPLVQLTNRKSELLEHLLTVYRDVVQRAVDYAIENNIKSRGKLHERLYRELRAKYPELASHYIYTAFTMALGIVRGFNKRRKSGRVRKEKPEVSRLNTIMLDDYHLFKLVEDVLRLNVGKSYLWLPLKPTEFQKRILKNVAQGCSLSKKGDRWFLNVTYEDNPESFKPEGVLAYDVNEKSLDMLVAKDGLHYIHIDLSEVKHIHSRYQRKRQRIQKLGLRKLLAKYRGREVRRVNHLLHEVSKFVSDLSLEERLAVVTENIKNIRRRIDKGKKLNRRLHSWSFGKLNFQVKYKCEWGGVPYLKPVNASNNSRTCPVCGVVASLRGQVFKCPSCGFEANRHLVACLNILRKANSNVPSTTPSSANALDEISQEWLVATVKGLLKREGEPNVRKCKVP

SEQ ID NO: 50330 - protein, 399 aa, unknown
  TnpB Polypeptide
MLIYEYKLDGTKRQYAAIDEAIRIVQFIRNKCLRLWMDTRGTSKNDLQCYCAVLAKDYPFAARLNSQARQASASRAWFAIGRFYDNCKHHKPGRKGYPKFQHDNRSVEYKTTGWKLEVGGKHITFTDGCGIGRLRLVGNSSQKIEAFPLQQIKRVRIVHRADGYYVQFGVQAERRIIHRPSGKQVGIDVGLQAFYVDSDGTIVENPRHYRKAEHRLKRLHRRLSLKQKGGKNRKKARKALAKGYLKVQRQREDFARKQASTLVSSRDVIAYERLQIRNMVKNRHLAKSIHDAGWAAFLRWVKHYGVVHGIPVIAVEPHFTSQECSSCGTMIKKSLSVRTHICTGCGVVLDRDHNAARNILAKALEGTLGHRETSTSVENASGQTSSTRPRHAKMGKWAG

SEQ ID NO: 50331 - protein, 415 aa, Nostoc sp.
MKQVEKHIIKKEHSYFDYCAEITAVSKRLYNTAQFTQRQGFFYGWGTQSQAKLDIMLKENEHYKALPAKVAQLVLKQNADAWSAYYEALKAYKQSVEKFTGKPKPPNYIKGENNLIKFNNQAVGKGEFKKGWIVPSMSPIKIPVKPGLKFEDLCEVRIIPKTGCFVIEVVYSVAEHGEFFCSLNPQLAAAIDIGLDNLATIVFNEPTIRPIAVNGKPLKSVNQFYNKQVAKYRGFIKVGSSRRIANIVRNRNNFVDSYLHQSTKMIVDEFLRLGVTHVSIGKNQQWKTHLNLGKRTNQNFIHIPHARFIEMLIYKLYRVGITVVVGEESYTSKASFIDWDIIPTFDRNTKIKHTFSGLRVARATYVSAYGFKIHADVNGAFNIGRKCNPDGFDCLKSILRDRGCLVVHPRRITPL

SEQ ID NO: 50332 - protein, 401 aa, Nostoc sp.
MLKVVKVRLYPDAQQQQLLAQAFGCCRWLWNYCLNLMNQTYKKTSKGLSGYEIKKIIPQLKKEYEWLSLTYSQCLQQVCLNLGVAFNNFFEKRAKYPRFKSKHGKQSIQYPQNVKVADNYLTLPKIGDVSAIVHRPIEGKVKTVTISKNCSNQYFAAILFDDGKDKPISKIEGKAIGIDLGLNHFAVTSDGSKFENPRLLNKHQKNLKLKQQQLSRKQKGSNNRVKARNKVARVHRKITNCRQDFLHKLSRRIVNENQVIVVENLNVKGMMQNHCLAKSIQLAGWGMFCTMLKYKAEMSGKVYLEVDRFFPSSKTCHVCLNQVGSLPLEVRFWTCEKCHTKHDRDVNASINLRDEGLRILTSGTGDKACCPDVSRSKGGRKKSTTALSVGQEAYTVLEESV

SEQ ID NO: 50333 - protein, 408 aa, Nostoc sp.
MRTAYQYRLRPTKSQAAEIDRWLSMLCAQYNYLLADRFNWYEQNRCPINACPLVCHLPKLRDNPDYYSQKKTLPELKKTHPHYNDVYSQVLQDVVKKVKLTFDRFLKGDSNGKRSGKPRLKSRSRYRTFTYPQVKDGCLQGNLIDLPKLGKIKVILHRPLPDGLKVKTASITKKADGYYVTLSLEDSTVPGIKPDINPESITGIDMGLKEFLTTAEGETVTIPQHYRKAQKRLRIIQKRVSRRKKGSNRREKAVKQLGRQHKKVADKRKDFHFKTANNLLKKYDVIAHEDLNIKGLSRSKLSKSVHDAGWGNFLSILTNKAENAGLLVIPVKAPGTSQECSNCGEKVLKKLHERWHKCSCGYSLDRDHNAAIVIRKRAEGHPVLKAQLMSDGIPGVSEKPTLYAIASV

SEQ ID NO: 50334 - protein, 423 aa, Nostoc sp.
MEQVLTLVCKLNPSQKQAEEIELVLKAWSNACNYANEKVKPQITSKMTIQNLVYNEIRALFGLSANLAVRACARVGANRKTAKQKDKQVLTFKPTSADYDARIFSFREKDWTVSLTLMNGREHIKIDTGNYQRGKLKGRKPTSAQLCKHRDGNYYIHIQIKDKTPEPIKSSNVIGVDFGSRDIAVTSNSAQWDGKQINDVRDKFSRVRASLQKKATKGTRSTRRRARQILKRLSGKERRYQQWLNHNISKSIIQDALKNNAAVAIEDLTGIRERTNQKPTSKTERRRSNSWSFYQLRSFLEYKGIQFGVEIIAVPPAWTSQTCHQCLHIGLRSHKLFKCTNEACSWSGDADLNAAKNIAAIGANLVSHSVAGVPPVEGSGEPARVNSPRGSNCLCCELSVNSSGLLKAHTVPEAGTVWVVYKE

SEQ ID NO: 50335 - protein, 470 aa, Nostoc sp.
MLLSYVYKLKPSAKQAEKMERWLHLLRLQYNFRVRERTEAYEQAKAPVMGNYCIIQIQAECCPLTCSVSKGALYGNPWSTKGKKRTPLAQQDANLVDLKKERPWYSEIYYHVLQQMLKQVDAAFVRFFKGLGRYPKIKRRAKFRSFTYPAGDVGFQGNKVRLPGIGWMRFFQSRQFPPGFKIRSTTVRKKADGFYISVLLQDDTVPHPPVPQQIETALGVDLGIKKLVSLSNGKTIANPRFYKLMERKRSRLHRAASRQVLGSHRRQKTYHRIAKLEQKVTNQREDYQWKIAHNLIKQFDLIVFENLNIQGMMARCKSKQDENGKYLPNGQSAKSGLNQAIADAAWGSLKQKVKVLSERTGVLVHEVNPKFSSQECSACGYVSPTNRDKEKFICEICAHHADADVDAAKVILKRGLDALGINLDAVSGVPRKQGKTTPKEPVARQGKSTALAVEPGNPQKLRFLSEGEIE

SEQ ID NO: 50336 - protein, 386 aa, Nostoc sp.
MLKAYKYRIYPTQEQSILLAKSFGCVRWFYNFALNLTSETYKATGKGLSRNDIINLLPSLKKEYEWLTEPPSQCLQQVALDLSSAFLNFFEKRANYPNFKKKGQKQSIRFPQQIKLDGDYLTLPKLGKVYCKVSRLPEGKFKSVTVSLNPSGEYYAACLYDDGKDKPATLSEGKAIGVDMGINHYLVTSDGTKHGNPKYYRKYETKLAKKQKQFSRKQKGSSNRNKARRKVAKVHNKITRCREDFLHKLSRKLVDKNQVIVVENLAVKNIVKNSKLAKSISDAGWGQFCTMLKYKAERAGKTYIEVDRFFPSSKTCNNCLHQVNNLNLDIRSWQCPKCQTVHDRDINVALNIRDEGLRLLAGGHLAIASGQRVRPSKGTAFRGDVG

SEQ ID NO: 50337 - protein, 255 aa, Nostoc sp.
VAGDKSEPAEGKIYGIDLGLKHFAVVTDGEKISKYDNPRHIAKHEKNLKRKHKKLARKQKGSNSRNKYRKVVAKVYERVSNSRADFLHKLSYKLVSDSQAVIIENLHLLGMVRNRNLAKAISDVGWGTFTNFLAYKLERKGGKLVEIDRWFPSSKLCSNCFYQMSEMPLDVREWTCPHCGTHHDRDGNAAINIRAEGIRMLKAEGDARRLANASLSAVWAFGGEVRPKLGRKSKLRHSPVITEAHTVLGTPSRCG

SEQ ID NO: 50338 - protein, 404 aa, Nostoc sp.
MQLVEKHLINRQHKFWKECDHLALQSKHLYNAANYVQRQYFFKAKKYYNSIDIYHQTKNLEAYRYLPTKVSKQIVRRVSEVWKGWLAALKDWSKHPEKYLGKPKIPGYKHKELGRNVVIYPIDAISKPALTKGIVKLSQTNLQIDTKAKNIDQVRIVPKLNHYVIEVVYTVDEPRKATGKYIAGVDLGLNNLMAITSNHPGIRPLLINGRPLKSINQFFNKRVAASQSIEAWRQIKELNSKRDRRIDNYLHTVSRRIIDWCHLNDINQLIIGNNQRWKQDINIGTRNNQDFTKIPHAKLIHLLTYKAQLSGIEIVLTEESYTSKASALDGDQLPAYNSNSERSPVFSGKRIKRGLYKTSTGSIINADTNGSLNIARKVIPNFMDGIEALPFVPVVLGLWTKRMF

SEQ ID NO: 50339 - protein, 408 aa, Nostoc sp.
VLHKAVQVRLYPATEQQILLAQAFGCSRWWWNYALNKSIETYKQTGKGLGRSALNALLPNLKKAEDTCWLADCYSQVLQATTLNLTTAYKNFFEGRARFPRFKSKHSKQSIQYPQNVKIVEGNVKLPGNIGVIKAKIHRPIEGKIKTCTVVKTPSGKYFASILTEVEANSPTTTEGKIYGVDLGLKHFAVVTDGEKVSKYDNPKHIAKHEKNLKRKQQKLARKQKGSNSRNRYRKVVAKVYERVSNSRQDFLHKLSYKLVSDSQAVIVENLNVKGMVRNHNLAKAIMNCGWGTFTNFLAYKLERKGSKLVEIDRWFPSSKLCSNCFYQMSEMPLDVREWTCPHCNTYHDRDGNAAQNIRAEGIRMIKAEGSAVSAVGGEVRPKMGRKSHLRHSPMSTEARSSGEASCG

SEQ ID NO: 50340 - protein, 418 aa, Nostoc sp.
MRKTTPRQVDTMQLVEKHIINKQHKYWKECDYLAFQSKHLYNAANYIQRQYFFETHKYYNSIEIYHQTNNLEAYRYLPTKVSKQIVRRISETWKGWLTALTDWSKHPEKYVGQPKMPRYKHKELGRNVVIYPLDAISKPALAKGVVQLSQSQIQIPTQAKNINQVRIVPKLNHYIIEVIYTVEEPVKSTGKTSAGIDLGLNNLMAVTSNHPGVKPLLINGRPLKSINQFFNKRVAKAQSIAATRQVKELNSKRDRRIDNYLHTSTRRVIDWCQLNDISQLVIGNNLRWKQDINIGKKNNQEFTKIPHAKLINLLTYKAQLCGIEVVLIEESYTSKASALDGDQLPAYNSKTDESPVFSGKRVKRGLYKTSTGRTINADTNGSLNIARKVIPNFMNGIEGLPFIPVVLGLWTKITNLVV

SEQ ID NO: 50341 - protein, 441 aa, Mycolicibacterium sp.
VTAGGAETTAWAYRFPLAPNRKQAAMFASHAGAARYAYNWGITQISEALDAYAAEKAAGVDKPKTKIPGHFDLCKMWTAHKNSTQGMEWVGDNFVGTYQAALRDAATAWKRFLDARKGGGRNVGRPRYKKRGRARESFQMHGSTLAMPDSAHIKLPKIGVVKINGRGYRGPTDPTDPRARAGRVARRLYRALATGQARMVRVTIAREGDGQWWASVTTERTTTRPDRPTRRQRKGGTIGIDVGVRSLLVTSRGDVVPNPAVLERLLQQLRAASRALSRTQPGSRRREKARKQLAALHSQIAMRRKDYAHRVTTELVRGHAGIMVEGWDVQKTAQNGSRDLPRAVRRLRNRRLADAAIGDVRWQLEYKADAYGAAFQRLPADSPTGRTCSSCGAVRDEPVPLTVEEFTCPRCGLRIDRRVNAARAALRCAIKDSESPTGGSD

SEQ ID NO: 50342 - protein, 384 aa, Calidithermus sp.
MWLFYKREAQSLQISTVPDSCSGRVPGQAVRVLPLRVQLGLGAEVQGVSGEQERAVAVRVGQAARPLKKELPWLSEVASQPLQQALIRLDKGFTRFFRKKKGYPGFKSKRDRQSATFPQGFKVEFEQGVLVLPKLGAVKAVYSRTFEGKVKTLTVSKTPTGKFYASVLVEEENQPSIKPDVEENAVGVDLGLKHFAVLSTGEKVEHPKHLEKHLGRLRVLQRRLSRKQKGSNNYRKAKLKVALLHERVANSRADFLHKLSTRLVREFDSICLEDLNIQGMLANGKLARHIGQSGWGEFRRMLEYKTEWNGKHVRIIGRFEPSSRLCYCGYYHHALTLSDREWDCLDCGRRHDRDELAANNIKRFAYRKPNTGRDTPGELGEVSA

SEQ ID NO: 50343 - protein, 391 aa, unknown
  TnpB Polypeptide
VIKLYRTIPIKAKFTDEEKAYWIDQCQNANSLINCAIYHTRQSHYQWREKKDGCFRPSISKESKPELITQIELPLPEFIDSDWVKEVAIRPYLGELWIDWVIDDGKKLIKFNPNLDYSQAWGFDHGGTNWLTGVSTQGKSLIVDGRKLKSMNQGYCRLVAKYKHGKSEFYWDTNLDRVQCKRNKKVRDAINKAARFIVNRCLADGIGNLVIGWNEGQKNSPQMGKRGNQNFMPIPTGRLIERLKQLAGEYGIVLTLTEEAYTSQASFLDGDLLPKYGEKPEGWTPSGTRVKRGLYRTSDGQLINADCNGAANIIRKVATQLGVNLAKVGRGSLALPKRYDLFTNLKRSYREKCEATVFQAVASHQLRILSLLRRGDVNLNKHPLSHDPISS

SEQ ID NO: 50344 - protein, 379 aa, unknown
  TnpB Polypeptide
MQMSKEYITLHHIKLYKPTNKKRVELNKLSNNWNKAIRSALKIVKHWGFTSYTRSHKEVYRVLRNNYNLPSQIAVEANRKAVESYKSCNKKFRNNVKFNYQAPVDLVKGKSFDFIKKDNGTSLVKINIEPYNNIYMPVCLSEYHLNYLNNDKYSLKTAELYEQNGEWYLNFVVSYETNIQETTTYMGIDLGIVNLATFSVIDNSKNVLHTEHFSGKKLRYKRMRYRDKRKSLSKKSDSVKTTLIAENRITKETNWLIANRIIKVAKKYNSTIIFEDLKHIRKNVTNDNSLNNYEKNSWAYYQLKQFVKHKANLNGLPVVEVKAYNTSQKCSACNHMGKRETQDLFECPNGHKFNADTNASINIAKLGMNKYNDLISKTA

SEQ ID NO: 50345 - protein, 201 aa, Bacteroides sp.
MYFVKNNPKDCCCERHRINIPTLGWVRLKEKRYLPTTKDGWRIRSKYENLKKMKKGETAQRANIQKQKLRVQKLPQRINQIRTDYINQTIAEMVKTKPSHITIEDLNVKGMMKNRHLSKAVASQKFYEFRAKLQAKCNENGIELRVVDRWYPSSKTCHCCGTVKKDLKLSDRIFKCSCGYVEDRDLNAALNLRDAITYEVA

SEQ ID NO: 50346 - protein, 368 aa, unknown
  TnpB Polypeptide
LLPSISQAQALKITLERANLACNQISEVAWNKKLFQKARLQKYVYSRVREKFDLGAQMVVRCVSKVVDAYKLNKKVQRTFKKHGSIAYDSRILTYFTKRKEVSIWILGLGRTKIPYVCGKRQERFLTVQQGESDLVYYKGEWFLNTTCNLEEPEQFKPEDVLGVDLGVTNIAVTSDGKRVSSKMVEDTRIWYQERRNKLQAVGTKSSKRRLKQLSGRQARFQKDVNHRISKELVLEAKRTKRAIALEDLTDIRSRTRVRGSQNRAKHSNWSFWQLRSFISYKAKGLGVPVILIDPAYTSQRCNVCGHTEKANRKSQSEFKCCACHHEVHADISGARNIRTKAQGVWSTAPRSRTARFRDKPLALAGGS

SEQ ID NO: 50347 - protein, 543 aa, unknown
  TnpB Polypeptide
MYKLSYRVRFPKELEEVYEFLQKEMNRVLNNEEMREKISKVDSSLINGEYWRLMRAAIGEETQYSWAKEKIMPNASWYFCAFAEQIRQVQKSQKDQKKLYEALQKFGNEDTNEFYEYCHENNIQYSKNKIKNLQKCKTDPEMTREVKFVLDFAFINKQASYLDGDNVFHYQVYNKDKKIEWKELPIIMHLSSKYEIGRRISKPRFSKDRDGNYYGTIVFDYKRRDFNGEGKNIGAIDLGEINLFAFSYVDPNGEYSEDYYKNSKKLDRLNKKVQKLEIERKALIDKNNIIKDLLKGNEKIKYTTEGLRRKYEVREIEKQRISRKITNMKKNIAREMAVEILELCKMSDCKTLFMENLTWLGTKGGRWNFREQQNEIERILDMNGIDVYYVNAKNTSKEHPVTKAIGNVVERDIVWSNGDRMDRDRVSTLNQVQREGKRRTKNRKIEKKQGYKITQLRKKDKPTPRQLKRSFSTRRIKLKFLDSLLSENTKRNTQMAVFYPRVSVSLTNNKTGRTWSCMEKFSFTSYNNVGTFENIYSHLLPLY

SEQ ID NO: 50348 - protein, 406 aa, unknown
  TnpB Polypeptide
MILVEKHNISKNNQDWKQIDHLSWLSKNLYNFALYTIKTHFELTGKIIRYKQLDKLMQLNENYSLLPNNTSQQILMLLDKNIKSYFALLKMWKKNKSLLNGCPKFPKYKNKIKGRNILLFTSQQFKLKDNLIHFPKKCRIKPIKTKQLTNIKMVRIIPQSSSYKIEVVYDKPVKENNNEEKWSSIDLGVNNLATIALEKPVIINGRPLKSMNQYYNKKKAKLQSQITQTYVNKKGETIQKKTSKKLTSLTKKRNNKIDDYLHKKSRIVVDCLIENKITHLVIGHNIEWKQEVNMGTQNNQNFVYIPHSRFISMVEYKCKLVGITVITREESYTSKCSALDLEPICFSHKYVGNRVKRGMFISAKGIKINADLNGALNILRKETGDKALEIVQTQSSIGQVIWPVKI

SEQ ID NO: 50349 - protein, 406 aa, unknown; identical to SEQ ID NO: 50348
  TnpB Polypeptide

SEQ ID NO: 50350 - protein, 412 aa, Boseongicola sp.
MWWLPHRTASPGRATRPSGTSSNFREEASSFWKRTIFPTGPACDASLPISLPSATPVTASVLVKATRKIRAYPKNPDLLHEMVRQQRRAYNLAIACFREADDGHVDPRGPDLKRTALRATIRDCVRDEVGERGGTFRSADCDEAVNAAFRTRDAVIRKRKAGRKARLDFRSRKHVRQRMMVQKMPGAFVDRNFGLAEPMPDEAWKKLTTIVLERGRWFICAQLRIATVGQDEIQVRSAVVLDPGVRSFMTDCAMDHAASYGDRFHSDKVFPLLLRLDRLIGQRAKAKHDEWKRHFQKRIDTLFIRVRNLVDDLHRRVAHDLVQTFDVILLPSFETKRMSAKDDRRIRSKTVRSMLGLAHCRFRQKLEWMCRKYGKRLVVCNEAYTSRTRSWDGFVNEHLWRREDGQRWQNRC

SEQ ID NO: 50351 - protein, 367 aa, Bacterium sp.
MKDKPSEYKWNMYWLRKRFVNKCNIPKKYSYLLDTPKHVRDSALEDLVGGFKANMEKKKTNPDHQFEMHYRSKKDCQSITIPSTAIKLLINENSPLDPEIKMFPTFLKNVIKFHVRKRDGTVPLVQYDCKLTIDQLGRFYLCIPQHVPVCDNQADTKRHDWVALDPGVRTFMTGYSPTPGVCFQLAPKDINKIYRLCKHLDVMSSKSSKSNNKCKRSRYKMKKVLVRLRNRIQHLVDEVHWKCINFLVKNFRNIIIPPFNTSQMVKRGHRRIGSKVARQMLCWRHYTFRRRLIDKVKLLQDTRVHVRGEEYTTKSCTNCLQLHHKIGGNKRFNCPHCLICVDRDVTGSRNIFMKNISAIEQSMALPR

SEQ ID NO: 50352 - protein, 388 aa, Caldicellulosiruptor sp.
MVVTYKYRIYPNKEQQIQLAKTFGCVRFVWNFFLAWREKRYREEGLSTTESECRKHLNNVLKKQFPWLREVDKFALENALINLDNTYKKFFKKQTKHPKFKRKKSHHFSYTTNFTNNNIQVDFGKLATDINLNRCWGRIKLPKLGWVKARIHRTFNGKIKTATVKLLPSGKYYVSITVEQDKIDNPKIKETPANFATALDLGVKDFFVDSNSRHVENPKILTKYERRIKKVQRELSRKKPGSKNFEKTRRKLAKLYEKVTNIRMDFLHKWSSRVICENQAIICEDLKVKNLVRNHHLAKSIMDVSWSKFVEMLEYKSKWYNRIFLKIPSSFPSSQICSRCGYRNEELKDLKIRTWQCPCCGQKHDRDENAARNILKQGLLQLGMVVSV

SEQ ID NO: 50353 - protein, 398 aa, unknown
  TnpB Polypeptide
MSRYRLLPSPAQEAVLRDHCGHARYVWNLAVEQHAHWRPGRACAPGYLEQCRQLTEARAEHAWLAAGPQMVQQQALRDFAAAMAAFFDPHNPARRPTWRKAGRNEGFRIVAVRTGHVRRLSRKTGQVWVPKAGWVRFRWSRPVPLARSYRVTMDRAGRWHVAFAVIPDPVPAPGNEQVVGIDRGVAVAAALSTGELLRAPGLTGREHTRIRRLERKLARTRRGSNRRRRVRLAIAQLKARESDRRKDWAEKASTDIVRRFDVIRVEDLQVTNMTRSAKGTPQIPGRNVRAKAGLNRSILRSGWGLLVRRLEEKAPGRVEKISPAFTSQRCSACGQVDRDSRESQAVFRCTACRYACHADVNAARNIAAGHAVTARGGFRDAGPANREPHLLASVTRCE

SEQ ID NO: 50354 - protein, 415 aa, Fusobacterium sp.
MYLTLKQQVKHLSKKEFRNLKYLSHIAKNLTNEAIYNIRRYYFRNKKYLSYNENYKILKNSENYKKLNSNMAQQILKEVDGSFKSFFGLLKLVKNGQYDNKKIKLPKYLAKDGFTTLVIGFVRLKDDMLIIPYSNSFRKTHKEIAIKLPPVLKGKKIKEIRIIPKQHSRYFEIQYTYEVKEVQRELNKENGLGIDLGIDNLCTCVTNNGASFLIDGRKLKSINRYYNKINAKLQSIKDKQKIERTTLRQKRIARKRNNRIEDYLSKAARIIINYCLNNDIGKLVLGYNEDFQRNSNIGSINNQNFMNIPYGKLRDKLIHLCKLYGVEFKLQEESYTSKASFFDGDEIPIYDKENPQEYIFSGKRIKRGLYQTSVGKLINADCNGALNILRKSKVVDLSILYNRGELNTPKRIRVV

SEQ ID NO: 50355 - protein, 219 aa, Fusobacterium sp.
MIYGEKAFKRFFKGLSSFPVFKKKGKNELGAYFVKNNKTDFEFCRHKIKIPTLKFVRVKEYGYIPKNANIKSGTVTKIADRYFLSLIIEVKDIVKAENTSTKGLGIDLGIKDIAICSDGKIFKNINKTKKIKKLKKKLKREQRKMSMSIEYSKSKKIKLKELKNFNKKKLKVQKIFYRLNCIRDDYNNKIVDEITRTKLKYITIEDLKVSNMMKNKHLS

SEQ ID NO: 50356 - protein, 400 aa, Actinomadura sp.
MRTAYKCRAYPNPQQAAIFGRTFGCVRVVWNKTLAERRHAWYIEGTPTTYKQADAALTAWKKTEHLAFLSEVSSVPLQQALRHQHTAFANFFAGRARYPRFKTRTGRQSAHYTRSAFRMHGGELRMARTTAPLAFVWSFDEVDLATLDPTMVVISREPDGRWYVTFAVDTGNPEPLPVAGHAIGIDLGVKDFAVTSDGERIANPHHLERKAANLARYQRRMARKQPGSINRRKAKAKVARTCRKVRNARQDFLHRTSTNLVRQADVIVIEDLAVANMVKNRSLARAISDCGWGEFRRQLEYKAARAGRVLVMIDRWYPSSKTCSACGHLLEKLSLSTRHWTCPGCRTRHDRDHNAAKNILAAGRAAAGASPGDVCGADVRRQGPSLPQSAAKQKPLRREP

SEQ ID NO: 50357 - protein, 510 aa, unknown
  TnpB Polypeptide
MYTVRFQLKLNASEKRFLSKSFFYANRMHNQLVRHATNRLSALFHDKEYMDARKAYGEAEFSKKKGSELSVSEKKKKKELSDIMNNKQKEYGLVKEALYKFVSREQKKFKNYINSHQAQAEAEAVYKGVERVLFEDGHHLHYRRYNDFDCIKQKCAATGVRLPRWDTICFMKHYFKVRIPEDRYIQDILSSVDLKEDVVYSFLKRIEFNSGFKYYVVITLRGDSPKRMELSKDSGHRTGVDFGTSTIATVSNNEVHLEELAPESAKYEKEIRHKQNLVDVSMRKHNPDNYNKNGTVKKGKHKWKTTRRCRRLKRQIRVLYRKQSAYIKTSHHTFINRVVQNASEFILEPMNFKALQKKSKKAERQDEATPIKQKDGSSKMVCKYKRKKRYGHSIKNRSPGLMQADLKSKATQYGIPYYEIDIHQYRASQLHHDTGEYIKPALNERFKTIEGHKVQRDLYSAFLICHTDDTLTAPDFKTCHLDFPHFVKMQDTLILNMKKCGHTMKSCFGF

SEQ ID NO: 50358 - protein, 386 aa, unknown
  TnpB Polypeptide
MPLRKTRKTSAEVIRKAYKFQSVLTEEQKVMFAQTFGCVRYLYNRMLDDKSKAYKYFGENLNLTPAWYKHISCCRWLADVDALALANVQLNLNTAFQNFFKKRAKYPKFKKKNDHHDSYTTNVVNGNISYRTSDKYMYVTLPKIPGELMVKNHRPVKQGGNLKSVTVSREPSGKYYISLLFEYTKVKAVHDIDPDNAIGLDMSMHSFYVDSDGNEVDSPHAYLHAQDRLAREQRKLSHMKKGSSNYQKQKLKIAKLYAKTTHQRNDFLHKLSRKLVDTYDIVGIEDLDMKGMSQALNFGKSVSDKGWGRFVRMITYKATDAGKRVIKISRWFPSSQMCHECGCLNKKTKDLSVREWTCPHCSATHNRDYNAAINIKNEAVRIYCTQ

SEQ ID NO: 50359 - protein, 516 aa, unknown
  TnpB Polypeptide
MRPKPTPSFILCLPLQVNSQQTARLHAHFECARQLYNALLTEAMKRLRRMKADPTWQATRSIPRSNKLARTQAFARLRTQYGFSEYGMHEAAKRLRTSWLAEHLDSLMAQKVASRAYQAANRVCVGEARRVRFRSKGRGLDSVEGKTNTSGLRFHLQAAAEGNQGWLSWNGEQIPALIDWQDEVIHHGLLQRIKYVRLLRQRASSPQAQGADCRGFVYSVQLILEGHPLQKPKNGPGKGAVGLDLGPSTLAIVPQVGPARLLLLAEELAPDARKRRRLQRHLERERRANNPQHYDAQGRIKKRPRGQGRRVWQESHRSQQTRRRLATTERKLAAHRRSLHGKLANQIIRLGDDLRIEKVSYKGWQRCFGRSVGMRAPGRFVDAVKCVVARTRTAQLHEIPTFQTKLSQYCHRCEHYTRKPLWQRFHCCPHCGLGSEELIQRDLYSAWLASVLDPITLTFPSRGQLGIHWQSMEACLSAALEATREHASAQGFLRRFGIPGVGACRPAVLSARYKSR

SEQ ID NO: 50360 - protein, 366 aa, unknown
  TnpB Polypeptide
VKINRAYRYELKPNMTQRILLAKHSGCARFAYNWGLAQRITLYQEEKKSTNPMAQHKALNQLKQTEFPWMYEVSKCAPQEALRDLDRAFKNFFTGLKAGTKVGFPKFKKKGVHDSFRLTGTIKIKGKAVQLPRLGVIHLKEEPYVGGRILSATVNREADRWFVSLSCEVEIKEPKPVKGEVVGIDVGLNHFAIMSDGLKIEAPKPLAKYLKRLKRLSKKHSRKQKGSNNRKKSALALARLHRKIRNIRQDFIHKLTTKLARTKSEIVIEDLNVRGMMRNERLARHITDVGWGEFRRQLSYKTIWYGSALTTVNRFYPSSKTCSKCDYVMKEMPFSLREWDCPSCGTHHDRDENAAKNLKKQAKSIA

SEQ ID NO: 50361 - protein, 365 aa, unknown
  TnpB Polypeptide
MQILKAFKFELIPNGAQVRKMTQFCGCSRFVFNRALTYQNEKYQADNSFKFSYNKIANLLPEWKQELPWLKECHSQVLQQSLKDLEASFKNFFSKRSNFPKFKRKGEKDSFRFPQGCKLEQQNNRIYLPKIGWVRYRNSRKVLGEVKNVTVSQKCGKWYVSIQTEYEIETPKPNGGEVGIDMGIVRFATLSNGEYFEPINAFKNLKGKLAKLQRRFKRKTKFSKNWQKLKAKISQLHHKISNIRKNYLHQISSKISKNHAIVYVEDLKVANMSKSANTGLNRAILDQSWSEFRRQLEYKLAWKGGYLFAVPPQNTSRCCPNCGHTAKDNRQTQAEFRCVECGYQNNADVVGAINVLKRGQQIQAA

SEQ ID NO: 50362 - protein, 366 aa, unknown
  TnpB Polypeptide
MNLTYVDRFYPNETQQTQLDGLFRSCFRFFATVFNEKFFGRAKPDLDYKKITHCSQFNIGTKYANSLIKLASDRVKLHKAEIKDKTKQTEKRLKRIAKERENTTDKSKLWELNREEERLNAYLRKNKSVTFGSKKLQAKDINLWKQKRNNFAYGIGEHDVIYGNNTIKLKENELQIQVCNRNVIKIPLNKRHQNKNTRFNQVLGNDDKKTILLIKRNNKYYIHVSFEAPKAIRFNKKMGLDFNYGFISYFVLKNHRSGNIRYEIGKVANKNKESMTEVVKRIINFALANRVGVINIENLNFTKKKQDDKSYMLHKLPYARYIKTMKKECYKVGIRLRLVNPAYTSQNAMKMGLDRHIGAAMLIAQK

SEQ ID NO: 50363 - protein, 451 aa, unknown
  TnpB Polypeptide
MSYRTYAIANIHSQHPFFDKVDEYSFECKNVFNSALYEYRQNFFHGEDLWSAFDMINHLKSLETKVPAKVKQQTIKQVYESMKSSIRNSKLPRYLDKNNGRANIILTNQAISRIKFDKENKISFNFKKETFEYDITNLKRKLQLQFSDIKQVRVVYKKSFKKYQVILIVNEKSKQKIKGRKVMAVDLGLDRIMSVVYGTKKVLFDGKQLKRVNHRFNRSLAKLQSERDLLKNQWIKLQCQLEKMDYDAIFYYELAIQFDFNEEKYKKLIRKQSHIINRLRKLEKIIARTYENRNNRLKYCLHWLSRRLIELCVSNGIGKIVIGYNKEWKQDINLGKRTNLNFVQIPHKTLIDYIQYKAAEYGIVVKLQEESYTSKCSFLDRELVKKHDIYAGKRIHRGLFRSKYGKQIHADINAAYNIAKKAGYNFFCLCPKSLCSWPVLKRIDFGSTKVS

SEQ ID NO: 50364 - protein, 345 aa, unknown
  TnpB Polypeptide
MRITLKYRVRDKHARILDAQARAVNFVWNYCNETQQKVARAGRKWLTGYDLEILTAGSTKEGLNLHSHTVQRICNEYDKCRRQQRKPWLRWRGRKSLGWVPFSAGHVSLRDGGFVFRGQRYDVWLHCRPPAGVKFGAGSFNADSRGRWYINIPVVIEACADTPCAAVGIDLGLKDLATLSTGEKIAAPRLYRATEAKMGLAQQRGQKRRARSLHAKVHNQRKDMLHKASARIAKSFGLIVVGDVNPSKLAKTSMAKSVLDAGWSSFKNMLAYKSIRNGAIFLEVNEAYSTQACSGCGSIAGPKGRAGLNERTWSCGCGLDHDRDVNAALNILRAGHRALAEGAST

SEQ ID NO: 50365 - protein, 567 aa, unknown
  TnpB Polypeptide
MKTYASNYIKKTALATGDADILSGDILTFNTMLHCMVVDLGKPALPNGESIHRRYKQCGLTDYFVTSLERAAGGIRSAAKEALALDIKTKEQQFARIDENIAKKTQRLKVLYLAKESLKARSRARKDEAPLPPFHNSFGCLVKPERKGDDTCFTVKSIHGKRPDQIFENEYLFETLYLDPRIRRLKSAIHNMEHRRHNLQSRLARLKREAKAGIYHICYGGKKIFRQRKFAKNYNEWCDTLRRLRRRDMLLVGRHDAPQGNWLVGYDPTTGTLTYRSIDGRRVKLPGVWFPYGQEDINAAVKASEISKKNKKLPPDQQIEGWPPGPVTWAIRDCGNAFQVKCMVSIPENPDTNTCYDDGCVAFDMNYDHLAVAELGAQGRLLKHYTVPIQMEGRTSDQITNGISEALEKVFKHAVRARKPVAMEDIKHLDKDLLYGNRKANRKISQFAYDKMAQLAENKGQKYGLAVRKSNPAYSSQIGKLKYMRTMGLSIHESAAYVIGRRAMGYKDLVPASMKHLVPAKKRGRHHWSQWASLSTALKKVPIHKFYRKTDYHKYSTLAALKKALAA

SEQ ID NO: 50366 - protein, 196 aa, unknown
  TnpB Polypeptide
MEPSGKYFASLLYEGYSCENQAAESDYSTAKILGIDYAMQGMAVFSEKIETEEAGFFRKNEKRLAREQRKLSRCVRGSHNYELQKKKVARCHEKIRNQRRDYLHKLSRKIADNYDAVAVEDIDMKAMGQCLHFGKSVQDNGYGMFREMLDYKLAWKGKKMVKVDRFFPSSKKCCKCGRIKERTEIIRKSLSLCVWK

SEQ ID NO: 50367 - protein, 410 aa, Bacillus sp.
MTKEKEYATYQIWIKKGHKLYSYFLEMCQNAKNLYNTTNFYIRQVYTALRTDQPLQPLQQEVLHTLQAHIEIMNENQLHAYQKRVQKQKEKPAKKQNEIRYNSFTLPTKENSFLSYNFLDCLFKTMKQQDYMNLPAQTNQAVMKKLYQNWKSFFASIKAYKKQPSTFTGRPRIPKYIKSSMKEIVFTNQVCKLQDKYIRFPKTSMKLNIGKLFGRIENLKEVRVSPAYGKFKVEIVAEQPESASEHVDNNRYMSIDLGIDNIATITTNTGATPVLVKGNVIKSINQYYNKQKAHLLGILRHGKETKEGPHTSKRLEKLHEKRFLKIKDIFHKISYHIVDFAVQHEISMIVIGKNISWKQNSDMGKRQNQSFCHIPYNLLIEMITYKAHRQGINVQVVEESYNKQSILSRQ

SEQ ID NO: 50368 - protein, 373 aa, unknown
  TnpB Polypeptide
MPTLSHKIRLDPTEAQIVQFKRACGCARFAWNWALAKWNEKYAAGEKCSGNSLNKEFNAIKGELFPWMYESPKNANQRPFANLQVAFRRFFKKIAKYPKFKSKSKSHDSFYFANTEFKLVGKTCKLPLIGVVKMREELRLSGKIMSGVVSRTADQWFLSVTVELDKLPRTVKKTSKVIGIDLGLKETIVTDDDDRFKSPKPLKRYGKILARRSRQHSRKGKGSNNKYKSQMKLAKLHAKIANIRKDFTHKATSRLIDENQVIGLEDLNVAGMMKNHCLAKAISDVSWYEIRRQLEYKAKLYGRGVRLVNRFFPSSKTCSKCGSVKKSLELSERVFKCSDCGYTIDRDLNAAINIKHTVGHTGIASQEAYAWGE

SEQ ID NO: 50369 - protein, 382 aa, unknown
  TnpB Polypeptide
MPTLSHKIRLDPTEAQIAEFKKACGCARFAWNWALAKWNEKYAAGEKCTGNSLQKEFNAIKGELFPWISESSTWASKRPFANLQTAFIRFFKKTSKYPKFKSKSKSHDSFYLCNQVLKIQNKICQLPRIGEVRMREELRLSGKIMSGVVSRTADQWYLSVTVELNKLPRTVKTTSKVVGIDLGLKEAIVADDGDTFKSPKPLKRYSKILAKRSRQHSRKVKGSNNRHKAQMKLAKLHAKIANIRKDFTHKATSKLIDENQVIGLEDLNVAGMMKNHCLAKAISDVSWAEIRRQLEYKAKLYGREVRLVNRFFPSSKTCSKCGSVKKSLELSERVFKCSDCGYIIDRDLNAAINIKDTVGHTEINAWGESVQLDNSLNQEVQL

SEQ ID NO: 50370 - protein, 396 aa, unknown
  TnpB Polypeptide
MSRYRLLPTPAQEAVLQDHCGHARFVWNLAVEQHRHWHPGRASAPGYLEQCRQLTAARAEHPWLAAGSQMVQQQALRDFAQAMAAFFHPDNLAGRPSWRKAGRDEGFRVVALRPGDVRRLSRHVGEVRVPKAGRVRFRWSRTVPPGVKSYRVRMDRAGRWHVAFAVIPEPVPAPGNGETVGIDRGVAVSAALSTGEMLTAPGLSAGRRHRLRRLQRRLARARPGSNRRARVKRAAARLRAREADARKDWAEKVSTGIARGFDLIRVEDLRIADMTRSARGTAGNPGRNVRAKAGLNREILRSGWGLLVRRLEDKAPGRVEKVKPHYTSQRCSACGQVDAESRESQARFVCTACGFVCNADVNAARNIAAGHAVTARGGDGVTRPVNREPQLLLQPA

SEQ ID NO: 50371 - protein, 537 aa, unknown
  TnpB Polypeptide
MTEKEFQQALKKYHKASNRHILVVETDMPYCDVLNVVAYANKIRKAGNELIGLMRKQYEQLIQTKRYRKLLTLYGKTKHKNKRKMLAQQLNEMQQIYNVTWDFCRNSMTYIRKKYDVDSIFALTKAEDVWRGIEKCLYGNGATIHFAKYDNLPCIRAKQTNRGIPMSVEESGLTFKFQGIKFGLNVRDRFQKDEIHAVLHYLANVSAIDEKAVNTFLCEGICIDTYRPCYATLVPKKIRGRYRLYLHLTIEGKAVRKYDRYGNHRHHYGKGIVGSDIGTQTFAYTSDTEVGLKNLSEHGNSIQKSERLERLYYRAMDRSRRATNPQNYNENGTIKKGKKKWVYSKHYKVLRYKHAELCRKNAINRHLAINEDANYLRSLGDIFVTEPKNASKLMKRAKETTVSKKTGKINRKKRFGKSIKNRCPGGFQSTVEAKFNSTGGAYIEVPYNYRASQYDHIADEYIKKKLSQRMYNLTDGTKVQRDWYSSFLLYCFDFTTQGIDKEKCHNEFKKHLAKEKALITWIKTNKIKILNSGIKIA

SEQ ID NO: 50372 - protein, 433 aa, unknown
  TnpB Polypeptide
MKLSTNIQKKAISFYSYGLNKEKYKKIEELAKQIQVYQNFISEIYYNNYFQKQKITCSKFITEMKIYRDKDFSSSFFQQICKQVYERYEKKKPPKQRIVFKKLSFVGINLSTKIFIEESKNTYTNGIINFNIPKQGIICIPFRYSEKYHGDLQNISYSMTGANKSQFQKQYTCTLLGKNKLKITIAEDDNRVYSTSINHIEGVDVNVKHNLLQCSDGFSVDYDRKLVRKIIKQRIKYDKIVSTKMKRNISHTMTEKQHQQSLKNTRRSVSMVEQCLVKLFKHCNMQNIDHLVFEDLGKFTGHLKITNKEFDINYKRLMYAVRLVDIKNIAERIGKKYGITISLTNPEYTSQECSCCHHISKKNRQTQEHFRCENCGFELNADLNASINIKNRIFSNVLRKSCHQEIEPNKFIPIGIKHEEFKQIYTQMLNDIC

SEQ ID NO: 50373 - protein, 381 aa, unknown
  TnpB Polypeptide
LYIKTYKEQKGSDILANKAYKFRIYPNEEQKVLFAKTFGCVRFIYNQMLADKIEYYKETKKKLNNTPAQYKTEFEWLKEVDSLALANAQMNLQKAYNNFFTNPKTGFPKFKSKHKNRKSYTTNNQKGSITLENGYLKLPKANGLIQVKQHRQIPSEYKIKSVTISQTSSGKYYASILFEYENQVQEKEDLTKFLGLDFSMKELYKDSNGNEPCYPKYYRKSEKRLKREQRKLSLMEKGSSNRNKQRIKVAKLHEKVANQRKDFLHKQSRQIANAYDCVCIENLDMKAMSQCLKFGKSVSDNGWGMFTVFLKYKLEEMGKRLVKIDKFYASSQLCNVCGYKNTETKDLSVREWFCPTCGTHHDRDVNAAINIRNEGMRIVFA

SEQ ID NO: 50374 - protein, 357 aa, Anabaena sp.
VIIKQWFGVSRFVYNTTIKLLQDGEIKANWKAIKTGILNNLPDWCKSVPYQIKSIAIKDACKSVSNAKNKYKNGGGISKCRFRSRKQPIQSCYIPKSAVLEKGIFYTILGEVKYKESLPKDLGDSRLVLAYGDYYLTVPQVSPRLDTDNQGRVVALDPGIRTFLTFFSEDSFGWLGNAANIKIQKLCFDLDKLISKISQAKCRQKKRLKLAATRLRGKIKNLVSELHKKTAKFLVNNFDVILLPSFETSQMSKKGKRRIRSKSVRQMLTLSHYQFKQFIKHKAFEYKKIVLDVNEAYTSKTVSWTGVVVKNLGGSKTIKSLSTNNMMDRDLNGARGIFLRALVDTPWLRENLNLCIC

SEQ ID NO: 50375 - protein, 361 aa, unknown
  TnpB Polypeptide
MLKLAPPPEQAEALLATMQACNAAASRAAEVAFEHKTANKIRLQPLVYADLRAEFGLSSQMAVRAISKACEAYKRDKTIKPVFRELGAVAFDQRILSWKGRDRVSILTLAGRIIVPVVWQGRWLGTTGTVLRGAADLIWRDGKFYLAVVIDVPEPPAGPEPAGWLGVDLGIVNIAADADGNIHCGKAVRAVRYRNRQFRARLQSKGTKSAKRLLARRRRKEARFARDVNHCISKTLVSEAKDTGRGIKLEDLSGINSRTTVRKAQRADRLSWSFFQLRAFIAYKAALAGVPVVLVDPRNTSRRCPGCGHIDKRNRPDQATFRCTSCGLAGPADIFAARNIAGWAAVMRPDAALSAAASPAA

SEQ ID NO: 50376 - protein, 423 aa, unknown
  TnpB Polypeptide
VGGIALSPLTFIYLYSESIIMKLTKTIVLKLREGAGEGESDLEDTINAFAEGMNYASEIVYRHNKPISSVSLQKLSYRYLRDNIGLKSQMACNVCRQVSGAYKSLKEKIKVKRAKWQLLTFAPTNVTFSYGRDFTINRDMLSITTLRGRKKYQIVNYRYAEQFFDGSWKYLASKLVKHKDGHYYFHLSCEKEIEELDITKVSNFMGVDVGMNYLAVATTTDKKNRFFRGGDIKNVRNIYEKQRERLQKKGTRSAKRVLKRLSGREKRLIRDINHVVSKEVVEFAKENGVEVIGMEDLTGIRERTKVRKNQRYRHNSWAFRQLQTFIEYKAKEARIKVVYVTPKYTSQTCPRCKHISRNNRKGREFRCEVCGYELNADLVGARNIEERTRAFRHDLEAQGCVVDQPDENSLEESLKPANLLVGN

SEQ ID NO: 50377 - protein, 426 aa, unknown
  TnpB Polypeptide
MDREEKNKRIREKGKATRERHANMLCRCYEVKVDSSKMSKKQKNDVSALFREAKWLHNAYLADMENVTWKDTSVTVKAGERFEQRDLTVIGSQIRQSVINEVKSSLKSLASLKKNGNKVGALRFKPACNSIELSQYHVTYDIDKDRSGIRVQKIKKPFKVRGLDQIPENAEIANARFIRKASGLYFHITCFLPKEEKTVTYKSVGIDFGIKDNLVFSDGREPINIHVPESKGTRLASRRMNKALSHNGYRKSKRHCKRLKKVRIAYEKDNNRRKDLAHKAVHEILNNYDFIAIQDEMVHNWHKGLFGRQVQHSAMGVIKAELRKSSNVHVVSRDFPSTQICPECGKLTKHPLSERSYTCGYCGYHHSSRDRKAAISILSEAVRIKMLSGTESSESRGGQSHCCILIMIRYQYWSKLIACETGSPRF

SEQ ID NO: 50378 - protein, 425 aa, Natronolimnobius sp.
MDYSPRFRLLPTSEQRELLGWQRDTVRQVYNHALYRFDQLPERDDQTVRQRVWQVRDELPNWKAKWGKWRQVYSTVLQATVERIYHSITGLAQQRDNGHNIGDLNWKKPREFQSFTYRQRGFELNEKSGPAGRGLLTLKKVRGETLEIPIRLHRDIDPNDIKHVTVKQEATGAWYASFSVERNEPEKPDPEDIDPEDTVGLDLGVLNFVHDSNGRSIDCLDLSDDRERLKREQQSLSGKEYESNNWHKQRQRVAKVHMDMRNKKRDYKHKLAHAYTTTYDAVFVEDLNVKSMLEGDGNARNKAEVGWRDFITILKHHGRKHGCHVVEVEPDGTTKECASCGVETEKPLWVREHSCPSCGFELDRDFNASLNVLSRGLAKLGVGHSEETPVETATSVDTGSVSSSRVVESGSPCLKEPPKAASRQG

SEQ ID NO: 50379 - protein, 471 aa, unknown
  TnpB Polypeptide
MKRTIKIKVNCSNKEKEILLIGEIQRNIKNYVWSRYSGIGSLLKHSGWTIRDELIEEKLLSNKIVGTLSRVAIEKSAGVIKVNWTNTKKEVKRAIRQNENLSEDDRHYLYLCLKHTPTLYGILNYKKVDYKSEHLKDLKVDVHRLNNLLRRYVRRYQKKSHSNKTNVILTSNLYKYKSKGKKFIFSYKNKKPRIEITLDGHIPNLKGTLELVKDKNSNQYYLHIPLDRITSKKKMSRQSETVGLDVGITDLIILSNGSVYGANSAELFYTLSDNLVNKNKSRLWSYKREIEKKIAEEKNEEKKAKLELKLKNLEENNLGYKKRKAKVGRYKSRIFSHINHEINKMIEEEDLREVIREDLNWVSKKKNVSKKQQNRFSTWTKGTLLERLSIKLEEKGIKETIVNPAYTSQVCCRCNHLGERNGKEFKCSNCNLKIDSDFNASINIKKRKEIEEIDIFTSYTQVKEYYENLTV

SEQ ID NO: 50380 - protein, 359 aa, Psychrobacter sp.
MKTLKLRIKDKHANQLNILAGSVNFVWNYVNDLSFKHLQRTGHFFSAYDLATYVKGSGELLNLHSQTLQAISEVHAKSRKQFKKAKLNWRTNNPKAKRRNLGWIPFKKTAIKHLATRQSGKKSLKSTIQLSLAKGKKLIIDMWDSYNLALYNINTCELVQDARGHWYACITVKEFPKIKCGDGQVGIDLGCKDAAVSSDGDQLQTKLTHQYAEKLAIAQRAKNKKRVKAIHAKIKNTRKDLTHKFTNKLVKANSLIVVGKIKSTSFTKGKLAKSVYDAGWFEIKRQLDYKCKHAGCHYIEVNEAYSTQTCSCCGSRQDSPKGRAGLGIRVWFCRSCKTTHQRDVNGAKNILAVGLGRLE

SEQ ID NO: 50381 - protein, 274 aa, Streptomyces sp.
SGFRFRHGRLTLAKMAEPLDIVWSRPPPEGASPSTMTVSQDAAGRWFVSLLVEDASVMPLPARDSAVGIDVGLEHLLTLSTGEKITNPRHEGKDRARLALAQRRLAKKEKRSANRAKACRKVAKIYARIADRRQDHLHKLTTRLVRENQTLIIEDLTVRNMVRNRKFARAISDAAWSTFRNMLEYKAEWYRRELIAVDRYYPSSRLCSKCGSLQQRMPLNVRTWTCDCGTTHDRDVNAAKNLKAAGLEVSVCGAGVRPQRRKPGGQSAVKQKTL

SEQ ID NO: 50382 - protein, 389 aa, unknown
  TnpB Polypeptide
MITSIKVRLHPNKKQLTKLFQYAGTSRFAYNWTILREEENYKKGNKFLSNNELRKEFTKLKKKSEYNWLNNISNNVTKQAIKDACNAYNKFFKKQSKYPRLKSKKHSKLSFYQDNVAIQFTNTHVKIEGFAKSKKRNKQKLNWIKLCEKGRIPTNHKYFNPRFTYDGLYWYISVRIEIDNNSTISLNEGMGIDLGIKNLAICSDSNIYKNINKTNKLKKIEKRKRRLQRSISRRYEKNKKGERYCKTSNIIKREKELLKVTRRLANIRQNHLHQITSEIIKRKPSFICIEDLNVKGMMKNKHLSKAIQQQKFYEFKRQIEYKSKLHNITVIIADRFYPSSKICSCCGNIKKDLKLNDRIYRCNFCNLVIDRDYNASLNLKIYGKNVLKR

SEQ ID NO: 50383 - protein, 507 aa, Acidilobales sp.
MFLRVGSLAGRKFRMSGGGNPRGVSVEGSDPLQSFRELVEKRKKSNKRAVRLRLLPEKHEEEMLFNIGLASVRLWNELNYEKRQLFFKDDLTPEKREEINRRYYHKYKKYKNFLGVNAGQIINKNEETWDSFFELLKMKRQGRLPPHIRKISPPGYWKDRITGEKKIHILIRNDRYYLETVNKGEGRLVLKDFKLNIRYAGRIRWEGKQGRLEIIYEAGRWFAYIPIEVGVDPSKSNLKGYIKPNYREEKDRIFNPRSIKQRVPIGGKKAFIDMGLNNLFAVVVSDGSALLVKGGSIKSEYYWWKREISTYQAIRDLLRNAGFSTWIKYHEKLLKALYKRNERLRHLYRTAIRFLAEMLWSRGVEKIYIGYPIMLSQYNGNEYNNNIWWYRKIILWIIDVFIEYGIDVEIVPEDYTSMKCSICGEIHKNGRIYRGLYICRKTNKKINVDINASLNIARKIGYRIIISRKIESYLITYNGVKPLIPLQRANTRDPEVRNLALKGGEGS

SEQ ID NO: 50384 - protein, 393 aa, unknown
  TnpB Polypeptide
MVKRKNTDVDTIAYKFRIYPDREQRTMLAKTFGCTRYLWNRMLADHTDLYKIIGEVPDNTPADYKTLDECIWLNEVDSIALANVQLAQQQAFEMFYKKKSGYPVFHKKHARQSYTTNWTNGNIKLSTDSIKLPKISAPIKMKQHCKIKAGGKLKSVTVSMDTNGHYFISILFAYPQNTFVKEPAYQPNPETIGLDMQLNSLYVDHNGNSAHMPDFYRHMEMKLAKEQAKLSHMTKKSHNYKKQLRKINKLHMKIKCQRMDFLRKEAHKLASTYDVICIEDLDLKDMASRDNYETSGNGKKIRHGKSVHSIGYGMFIQFLTWDCQKTGHVLIKADRYFASTQICSHCGHQQEMDISDRIYICQACHHTMDRDQNSAVNIRTEGLRLYHEQNKTA

SEQ ID NO: 50385 - protein, 370 aa, unknown
  TnpB Polypeptide
MILEFTITAKLKIYPTPKQAELLLETVFAYRKGCNDVSSVIFNTKILKTKVLHQLTYRSLRDNIGLRSQMAQSVRKTVIARYKSLIGNGHDWKPISFKKPEYDLVWKKDYSLKNKHFSINTLQGRINVLFESKGMEHFFNKAWTFGTAKLVFKHNKWYLHIPMTKEVDEVQSKSIKQIVGIDLGINFLAVTYDSFGKTTFYNGKAIKHKRQKYKRLRKELQKKGTASARKRLKAIGEREKRWMSDVNHCVSKAIVRMYGENSLFVLEDLKGVRKVTEKVHRYSRYLMVSWAFYQLFQYISYKSMMNNSESIIVDPRYTSQKCPKCNHIEKANRNKDIHFFICKNCGYKSNDDRIAAMNLHFKGIEYIDKQ

SEQ ID NO: 50386 - protein, 410 aa, unknown
  TnpB Polypeptide
MPSLRRRTDIYILFDLHTTIDRIGIPGMMISYKFRMYPNKEQTAILEDTLETCRRLWNLALADRKNTYKETGTGRTYNQQAAILTIEKKENPGLKSVFSQVLQNVLKRLDLGVSAFFRRLKEGSKKPGFPRFKSEGQYKSFTYPQSGFNLEDNHLTLSKIGTIRIFKHREIEGKIKTCTITRDRTGCWYCSLAAEKEDVPKVNPQTAIGVDVGLKHMVAVSNGEYIEYPEYYYQTEEKLADAQRELSRKKKGSSNYGKARKKVAGIYKHIANQRADFSHKASRKLTDMADVVVFEDLQIPNMLKNHHLAKAISDHAWGMLTRNTISKAASAGKIVVLVNPKNTSQRCSNCGTKVPKDLSVRVHICPHCGLVMCRDRNAALNILADGLSVSAYRDLASTLGGPLQQATSMK

SEQ ID NO: 50387 - protein, 359 aa, Acidibacillus sp.
MRKAYKYRLYPTKEQEEKIQFTLERCRLLYNRMLEERRFAYETEKATLNYYDQANTLNERKKYIPSLKQVHSQVLQDVIKRLDKAFQAFFRRVKAGETPGYPRFKSAGRYDSFTYPQSGYSVCGTKLTLSKIGEVKLKLHRQPQGEIKTCTVLVKNGKYYASLSCEVESNTAPESKGTVGIDLGVKYLAITSNGEFYEHPKFLRESERKLHRKQRSVSRKKKGSSRRGEAIRELARLHEHIANQRRDYAHKVSRKLVNGYGLIAFEKLNVQGMVKNHHLAKSIVDASWNQLIQYTTYKAEEAGRRVVLVDPKNTSQLCSNCGEIVHKKQSERVHSCNHCGYVQDRDINAAQNILKRALA

SEQ ID NO: 50388 - protein, 208 aa, Clostridium sp.
VPSGKYYISILVDTENFQLPKIDKKIGVDVGLKEFAICSDGYRKPNPKHLRKSEKRFIKLQKDLSRKQKGSNNRKKARLKVAKLHERIANQRANFLHKLSIKLIRENQSIVIEDLKVKNMQQNHKLAKVISEASWSKFRRMLEYKAEWYGREIIIAPSNYASSQLCSECGYKNIEVKNLALREWTCPKRGTHHDRDINASKNLLKLAI

SEQ ID NO: 50389 - protein, 143 aa, Clostridium sp.
MLKAYKYRIYPNEEQKIYLAKTFGCTRFIYNKMLADRIKSYNENKDLDIKQIKYPTPAHYKKEFEWLKEVDSLALANAQMNLNKAYKNFFRDKSIGFPKFKKKNNTNSYTTNNQNGAVSLENGYIKVPKLKSMIKVKQHRQFK

SEQ ID NO: 50390 - protein, 380 aa, unknown
  TnpB Polypeptide
MRVVKSVIQIYQPVSELLSLMEIFKEMVNDCIKTGLENNITSLKSLSNKSYHILEKYDALSYYKLTAISSAVGILRNYRKAQRKNKETKRPYLRKLKLVSCYGLKIESGNLVIPTTKEPIIIPLNGHTKRTLSGYTIRSFSLTPRTASICYAKNINQIKPTGVIGIDRNLNNVTCVDNKLNKNIYKFDKITIMKREYKETKSHLKRNDYRIRTLIYTKYGRRQKRRTVQIFHNASKKIVENAKETNSAIVMERLTGIRKLYKKGNGQGKNYRFTLNSWSFAELQRQIKYKADWEGIPVLYVNPRGTSSNCSKCGSRVIEWADRMVSCNNCGMALDRDVNAAMNIMLKGASWLDADGISKEAMNRNIMTQAMICRVNPQRR

SEQ ID NO: 50391 - protein, 428 aa, Phormidium sp.
MSKEGSHSNLGLSAEMNGDPSTKVMVVWSHKASLLVMFVLEAKLRGSVKPFAVIDEMIRTAAFVRNRCIRHWMDHQGVGQYDLSALCAVLAKEYEWAKKLNSQARQASAEKAWQSIQRFYENCQSPSVKKKGYPKFKKARSVEYKTTGWKLSEDRQSLTFTDGFKAGTFRMRGAFDLNYYQPEQIKRVRVVRRADGYYVQFCLKHDRLEAVEPTEQVIALDVGLTHFYTDNRGNKIENPRHLRKAEKSLKRLQRQVSRKQKGSNKRKKAITKLGRKHLKVSRQRKDFAVKLARCVVKSNDLVVFEELQVRNLVKNHRLAKSISDAAWRQFFEWLEYYGQVFGKIVISVPPQSTSQECSAGHQIVKKSLSQRTHICSCGLVLDRDENAGRNLLAKGLELVSRGGHSRINAQGHLNLCQVSESLLDKFGG

SEQ ID NO: 50392 - protein, 375 aa, unknown
  TnpB Polypeptide
MQYTAIRVRLIPTPEQERLLRMHAGTSRYAYNFAKTYSEAYYKEHGKAILNKDLSKYFRTLYDTIPWIADICKDVSDVAIRDYGIALQRSFQKHGDGYHTQYRSSKHTYQSFAVDARKLRFKGKVYLPKIGWVSVNQTPKRRIYRNPRVVYDGQYWHLSLAMELPECQVELTDEILGVDFGVKTLATTSTGIEFENINRTKRVKSLERRKKQIQRQMARRCVNGAESQSKNYEKSKRAHLRITRKLTHIRENHLHHVSKALVTTKPKAIVIEDLQIRKLRANKRLAKQMRDAAWSKLRWYIEYKAARLGIDVVAAPREFASSQICSTCRTKFDPQKQKRTWGLDIREWTCCSCEATHNRDVNAALNLKWYYNHQV

SEQ ID NO: 50393 - protein, 315 aa, unknown
  TnpB Polypeptide
LPTTRHSISTSTPATSGYPSGTASGPASTCVSPIGTAVLAGRRVKQLRLNENRAVLVFERDAPDPYEPQAVLALDTNERTLDGVLVEPELTKPVVVPYFDVATVQLRHFARRWKLARKKAHDRRVGRTLLSREGRRERRRVVQRLHLLTKLLVAEARERQAVVALEDLRLPRGGGRGRRLRRRLSSWPRRELHRQLEYKAEEQGVPVIKVDPRNTSKSCPRCGEVKERRSRVGRVFVCAKCGWRCDRQVNAGLNICRTVLREVLQGPSNSGLGGLRLDPDALPNDAMRLLYSPGDAGAHGRSGRDGSDRTAFPIG

SEQ ID NO: 50394 - protein, 430 aa, Halorientalis sp.
VGGEEADTRCHKPRSIKYHYHLLKLVGDDYLRRTAITRPTLTDEQKQLLDTTVNEWQTACNISSQIGWEHGETRKTYLQSLAYDMVLEETRLGSQHAVLATHQAAAALQGVEELEDLDEEYKTSRPEFTAETVKYDTRTMTLFDDGTVSLSTVDDRIRCDLALPDDKDGYQYQYLNDDDWELTESTLTRRDGDYYLHLGFRKPKPEKQVEQQGDDEDRTVLGVDLGIVNIATTSTAYFASGRELRHRHREFEQIRSSLQQTGTQSAHRTIQQMSGRESRYVRDVLHRVANDIIEEAVAHDCEYIAFENLKHIRERAPPVKEFHQWAHRQLVDLVEYKAEEEGICTEYVDPENTSRRCPECGHTSEGNRVRQATFECGKCGATANADYVGAKNVGWRYVRRGLQSSRRTGDSQLALKSGTVTPNRGFVPSD

SEQ ID NO: 50395 - protein, 427 aa, Halorientalis sp.
MDYSHRFQAYPEQEGLEEACEYHLDHHRQLYNHVLHDYENAPEDDKPTRYDQNQKVKDWRSRWPEWKQLSSTAMQATVRRFHHNLHGLSALKENGYNVGKLQWKAPRDYRSITYVGKSFDLDEKRGSSDTGYVRLAKIGWIPFRQHRPFPNDAVVKEVTLKKEATGEWFVSFALDYPEDALPEKPDVEEIDVEDCVGVDLGILNYIHTSDGLSVGRLDLEDEYERLEKAQRTQSRRVEGSDNWEKARRRVAKQKRRIQRKVRDFQHKLTRWLCREYDAVFVEDLDVKKMLEDSHNARRKQDAAWRQFITLLEYKAELYGCHVKQVPAPGTTKECARCGVEVEKELWMREHSCPSCGFETDRDWNAALNILQRGLARLGVGCSEGTPVETAAAAGTEANAGDVPASRVVEAGTSVCEDGRSPAPPRAG

SEQ ID NO: 50396 - protein, 289 aa, unknown
  TnpB Polypeptide
MRRRRGCRAGCTPSGCATSTRCKRFGLSTQPAIRVIGKVADAYTTLRANIRAGNYGPPGSQTCMKVAATPIGFRADAAQPFDERCLSWQIPDQAGGRQATVSIWTTAGRLKGIRVLGTPRDLVLLRTRRIGETDLICRDGKWFLHASIEAPRAPLAQPVSGFLGVDLGIVNIATSSDGQRAAGARLNRYPKRQLNLRARLQAKKTSSAGRLLKKRRRKEARFAADINHQISKRIVAEAQRTGRGIAVEQLTGIRARVRLRKPQRAALHSWAFAGRVRRLQGQAGRGGIR

SEQ ID NO: 50397 - protein, 378 aa, unknown
  TnpB Polypeptide
LNRSFKYRIYPTAQQALLIAKTFGCCRKIWNLMLDDKLQEYRAGRKMSRQTPAQYKKDYPYLKEVDSMALINVQLHLEEAFRSYFQQPRKGLPRHKTRKRSSRRYTTNLIKNNIEIGRNWIKLPKMGKVRAKIHRALPLGAHIKSVTVSQDRCGDYYAGVLVEIDPLKTKQNTDRLGAIESTASIGLDYSMPSFFVSTSFPATHPRPMKKNQERLARAQKSLSRKRRGSANYRRQQKKVARIYRKIADQRRDYIHKASREITNRFDVIGIEDINMVAMSRVLHFGSAVFDNGWSLFVHCLTYKAEEQGGTVTKVGRSYPSTKRCSQCGIVNQEIRLGDRSWTCPNCGAFHDRDKNAAENIRQEAVRIMMSRQPQGMRG

SEQ ID NO: 50398 - protein, 453 aa, Moorea sp.
MPVYGCQQVLLSPDQELLAILNFLCTQSQRLTNMGIYFARQLYFKANRYIDKFELEKEYKPNRHYKALHSQAAQQILRSVYESFKSYKELIKAYREGKIETRPRLPKYRKKGGLALVSYPKQALRLIDGNIKIPLGRQVNCWFGIDSFRLPLPSNIKFDHIRELRILPRNRCFYVELVYNKQIETPSVEINNVLGIDPGLDNWLTCVSNVRTSFIIDGKHIKSMNRWYNKQISTIKQGKPQGFWSNHLAAITEKRNRQMRDGINKAARLVINHCLENQIGRVIFGWNKGGKHEIRLGKKTNSEFVPIPTARLKERIAQLCQQYGIEFIETEESYTSKASFLDGDYLPKYGEKPVREACPSGFDWKPSGRRTKRGLYRTTMNWYVNADCNGAANIIRKVSRTLGISLDRLGRGVLTRPHRVVLWSVNKKTAWSDVDSSRHETSLLESPVIYAGE

SEQ ID NO: 50399 - protein, 527 aa, unknown
  TnpB Polypeptide
MRTTLKKQDINSNEELRTLSIRINSTKLNKKILSLVYSYRHFENILLILIKQNYELYIQGKDINDFKYLTNKQTLRNALLDYKTKNSKDSNYLNEKYKDSELWQSLKKTAKTIKQHNFVYIIDRVKSNYKTYFTNMQMWHENLSLFTGMPKPPRPKKLSKLTNYAIDIDRYTALSFVKLENKNLIGVNLSNKMFYINCNSTQVKKLTDLDKLYSAKIVYDNGLLYLNISYLKKTTNFIPLVVKESGIDIGIDNLAAVFVNDKTTPSLIIDGKPFKHYNAKFNRLLSKLNESKSQEVLEWRTSKTGIKYPVKYTQRGKDINKFISFLYSKRNRYFYDQFHKVSKRIVEYLHFNNVTDLYLSKNLAELKNNGKCKLSKLVKQGFIQIPFIRFLKNIEYKAQELGINIHWIDESYSSKSSCVSDDIISIQLNKPKSTNAFNGKRVERGLFLDTLLNKVFNADINGAVNHIKIGVAKSFEWLKNSLFKLCNPIKIRSDYEFCRFLKSLQDSVSGKSVLCTNQSIEASVSTV

SEQ ID NO: 50400 - protein, 395 aa, unknown
  TnpB Polypeptide
MKIIKYTYKFRLKPTKEQEILLNKHFGSVRWSYNYFLNQRKEEYLNNKKSITYTKQSSFLTQLKRQEETEWLKETNAQTLQYSLKCLEMSYQNFFNKRTQFPRFKSRKSRNSFTVPQHVKNEGNKIHFPKFNEGIKMIMERNIKGKIKKATLSKTPTGKYFVSILTEKEYTPSVKTNQSVGIDLGIKDFLVLSNGTKIKNHRFLKHYERLLTKNQKHLSRKTKGSNRYEKQRIKAAKIHEKITNSRMDLIHKTTLNLVNQFDIIYLEDLNVKGMMKNHKLAKAIGDVSWSKFIETLTYKAEWNEKEIIHIDRFFPSSKTCNKCGWINNSLTLKDRNWTCPDCDEVLDRDFNAAINILNEGCRKNISGGTSDYKRRAKIRPSNGTGVEASKEKTLI

SEQ ID NO: 50401 - protein, 405 aa, Lentzea sp.
MSVVRVAYRCRAYPTLDQTAVLARTFGCVRLVWNKALSDCRDRYRADGVHTSYREADAALTAWKRTEQFAFLSEVSSVPLQQTLRHQHTAFRNFFAGRSRYPRFKSRTGRQSAHYTRSAFRLRDGSLVLAKTRTPLRFVWSFDDRDLERLDPTTVVVSREADGRWYVTFAVDTDAPTPAEPTSQDIAVDLGLADFAVTSQGERIANPRHLVRKAQNLARYQRRLARCLRGSSNRRKAKTKVARAHRKVRNARQDFLHRTSTRFVRSADLIVIEDLNVAGMVRNRRLSRAISDAGWGEFRRQLEYKCERAGRTLVVIDRWYPSSKTCSVCGYLLAELALSARHWTCPGCRTRHDRDLNAAKNILAAGRVAARGNSGDACGADVRRQGFSLPRSAMKQENRAVRRSA

SEQ ID NO: 50402 - protein, 380 aa, unknown
  TnpB Polypeptide
MEQCAHARFVWNLAVEQHLYWQPGRKSAPGYLQQCRQLTQARAEHPWLAAGSQMVQQQALRDFARAMAAFYDPANPARRPSWRKARRNEGFRIVAVKPRHVRRLGRKTGEVWVPKAGWVRFRWSRAVPTGVKSYRVNRDRAGRWHIAFAAIPKPIPAPGNGRTVGIDRGVAISAALSTGELLWAPGLTRTERTRLLRLQRKLARAQRGSARRAHLKRVIARLRAREKDRRKDWAEKASTDMARKFDTIRVEALQITNMTRSARGTAGSPGKNVRQKAGLNREIMRSGWGLLVHRLEDKAPGRVEKVNPAFTSQRCSACGQLDAESRESQARFACTACGFACNADVNAAKNIAAGHAVTAQGGFRDAGPMNREPQLLASLT

SEQ ID NO: 50403 - protein, 242 aa, Hormoscilla sp.
LQSLPLNEWTKCLGNTRQEDVCEALSASRKSRKTNGGKDKLRFRSCQNKSQAIQFNPGAYQNVKWFSTKVKGTTFAVEKGHELPMNCEYGTKLVYQHGQWFGCFPQHLPITETGSERVIALAPGNRTFLTGYDGENVLEIGKGDIGRLTRLCLHLDKLIGRKVKASRKVNKRLRYKLNKAIAWLRFKIRSLVDDLHRKAASLLVNSYKLIFLPTYQTSQIAPKAQFLTVRSITLSGMILLDI

SEQ ID NO: 50404 - protein, 413 aa, Rhodococcus sp.
VKRIVVVKLVPSPDQSAALESTLVLCNEVANEVAGWAHSRGLRSRRALQVALYPMVKTRGLSAQPALHVLRKVADAYTTRQANLSNGNYGRPGSTRYTAVAGTAVEFRPHAAQPFDDRCLSWQVDSSTVSIWTTAGRMRGVRFVCAPWQRTLLAARKGETDLVYRDGLFYLYATVDEPAPEPVEPPDTAAGWLGVDLGIVNLAVTTDDDPTALDVRWSAGAVTARRKKNAAMRASLQRVGTKSAKRKLKTRRRKEQRFATDINHQLSKTIVARAQRTGRGIAIEDLSGIRDRVRLARRQRTQLHSWGYAQLRAQITYKAERAGVPVAVVDPRNTSRTCSQCGYCDKANRVSQATFRCRYCQWTGHADHNAARNIAALGHCTYRAAQSTAPIAATPPTASGNVSSKPGPSRPSS

SEQ ID NO: 50405 - protein, 234 aa, unknown
  TnpB Polypeptide
VTIRKQSPSPEHSGNERVLGIDRGIVNIAATSSNDFFSSKHIKNVRAKYAYLRAKLQGKGTRSAKKLLRKISGKEERFVTWVNHNISKEIAAMPFDIFAIEDLTSIRVQSRTRGIEFTRKLNNWSFYQLEQFLRYKAEAVGKSVVTIDPRYTSQKCSNCGHIYKGNRKYYSFHCVKCGFQIHADLNAARNIAQMGISQLSRHNVTMPYMTCNETQARKGIDVEHSYNALHLSAG

SEQ ID NO: 50406 - protein, 386 aa, unknown
  TnpB Polypeptide
MITYKFRMYPNKQQTKKLDFALDICRQAYNIMLGELRDQIIIDKNMIQSILPDLKICEPRFREVYSKTLQYECYKLFSNLSALSALKKQDRKVGVLRFKGKKFFDTMTYNQSGFELKHTFKEKGRLQLSKIGNIKIKLHRVPKGNIKQITIKRINNKWFAFLISDGIIKLEHGDKVLGIDLGINHYLVDSEGNKVEHPKLYEKTQNILKVAHKNLSRKRKGSKNRLKARKQLSRVYERLTNQRNDFLQKITTDLIRKCKIIIVEDLNIKSMMEQKYFNAKNIADSSWNKFIQMLSYKAENSGVQIIKVNPKDTTKTCSNCGHVQKMPLWVRIYKCENCLFEMCRDENSAINIKQKGLGSERAYVEIISDSSSEEQLSMKQEAITST

SEQ ID NO: 50407 - protein, 193 aa, unknown
  TnpB Polypeptide
VENPRHLRQALKRLQRRVSSKVKGSKNRAKARGRLGREHVKVGRQRRDVAVKAARALVMSHDMIAYEDVKVAHMVKNRRRSTSISDAGWRAFVTWLGYLAHVYGKVIVAVPPRDTRQECLGCGKRVKQALSERTHVCPCCTTILDWDHNAARTILALGLRYLEETTAEYSERHAWGQSALYPLGVTQPDKAAG

SEQ ID NO: 50408 - protein, 262 aa, Moorea sp.
MKEGCLERNLINLPKIGKVKVVLHRTIPSGFKIKTASITKKCDGYYLVLSLEDKTIPEIQPNINPDSIVGIDVGLKDFLTTSEGEVVEIPQYYRKAQKRLRVIQKRVSRRKKGGNNRLKAIKQLGKQHKKGSDKRKDFHFKTANHLLSKYDVIAHEKLNVKGLAKSRLAKSVLDAGWSSFLTILASKAVRVAWPTALNAGLLTVPVSPKNTSQNCSNCGNKVPKKLHVRWHDCPHCGCSLDRDHNAAINIRNRAAGFEVTVR

SEQ ID NO: 50409 - protein, 421 aa, Methanolobus sp.
MKKGYRYRIYPDKEQKTLLEQHFGGVRFLYNRSLFIKNLMYSKFKINVSEIDLNNNLTSLKELHPWLRDLNSQSLQQANRNLLTGFKNFFEGNGSYPTRKSKKYNNFSFQVPQNYQINLTTSKIYLPKIGWMKIVLHRDFLDKKFIENELVTKEVNGELILDQKLNKEFKILKTLTVSRTSAGRYHASLLIDNHVPEPEPVVFTEETTIGIDVGIKNFAALSSGEIIENPRYLQKSLDKLKKLQKAVSRKKKGSKNRRKAIARLAKQHQLVSNQRNDFQHKLSMRLICENQAVALENLNISGMIRNHCLAQSISDVGWSEFIRKLTYKAQWYGRTILQIGRFVPSSKLCNVCGYKKDDLTLNIRKWECPSCKTLNDRDINASLNIKKIALDNFNTVGTTERACGLTDTSQRNEARSSSVFS

SEQ ID NO: 50410 - protein, 397 aa, unknown
  TnpB Polypeptide
MMRTFKFRLYPTKPQEQKLLWTLDKCRFVYNTLLERWGKTKMKSTDLQHAILEIKRQHPELCDVYSKVLQYENRRLFSHLRTRSGLKKNGKKAGKLRFKGRSWFKTFTYNQSGFKIIPRNIRYDSLHLSKIDQIPFIMHRKIEGTIKQITIKKHTSGKWFALVGAESTAKTALTHPKKSVGIDLGINNFVFDSDGHRQDSQKPLGKSLKRLKRAQQRLSRTKKGSRNRKKQRKRVARVHAKIVDQRNDFLHKVSRWYVQNYTFIAVEALNIRGIIRSSFNARNIMDASWARFVRMLEYKAESAGARVVKVDPRGTTQTCAECGNKVKKELWQRTHACACGFVADRDYNSAREILKRAVGQDLPEFTPVETRPLPFGASQFVKQEPSSDKFLTGSSVL

SEQ ID NO: 50411 - protein, 303 aa, unknown
  TnpB Polypeptide
MSLIVVFFKKRSKRPPKFKRFDRFNSFVFKQGGFMLNGNIFTINKGKKRFKFSYSRHYEGNIKQIRIIRETCHRFSLIIVTDHNPVNSYRKTHDGASVGLDFGLKTYLTKSDGSEIASPLFFKRYQDKIKKCGKRVSNAKKGSNNRSRRLFELQQVHRKINNLKSDFQWKLAHELCKRYDYIFIEDLNIEAMRRIWGKKISDLCHSSFIDKLMYVSLKYGVIVHKIDKWYPSSKTCECGYINKLLSLKDRKWICPECESINDRDVLAARNILRKGISELESKSNSSDSNIGVSCVCIQESHLL

SEQ ID NO: 50412 - protein, 415 aa, unknown
  TnpB Polypeptide
MFVDWVCGEVARTVVVKSAPLPRRAFKTFTELEGMYRNMVEQLTMCAVRNSVASFTKLKAMKYGELRALYPHLPSHYAYTACQDASTRAKSFLRLKKKSLTSREYLEVGSVSIWLDDHLWKPKDLTAIEVATHKGWVRVGLEPHEQYWRYVNIGWKISSGARIKLDRKARRLIIYLTFKKSIEVYEPRGFVTVDVNEDHVAVLIEDKVYLFKTGFRGIVLGYYCRRKRVQEKKLKNDLRWKLANIIVKAAKEGRYAIVLEELGKSPAREMINHVMDDQLRHRMYQASFRGVQRAIEEEARERGVPVVYVDPKNTSRRCPVRSTPIAYSNSSRVGRCSVGGELWHRDVVACINLLIRARLGDGSSAPSLGGPPVDVPRVPFGATATHDPTPIAREVWARWKSLDETSEYKLMRMSI

SEQ ID NO: 50413 - protein, 280 aa, unknown
  TnpB Polypeptide
MSGKSFSVWLNNEYLPNHPEYSWVKEVSSKSVKHSIECGCTAFTRFFKHQSAFPNYKKKGKSDVKMYFVKNNPKDCICERHRINIPTLGWVRIKEKGYIPTTKDGYIIKSGSVSIKVDKFYVSVLVEIPDGQIANNSNDGIGIDLGLKDFAIVSNGKTYKNINKSARLKKLEKQLIREQRCLSRKYDENLKKGEVTQRANIQKQKRKVQKLHHKIDNVRTDYINKTIAEIVKTKPSYITIENLNVKGMMKNRHLSKAVASQKFYELEQNFNLNVMKTVLS

SEQ ID NO: 50414 - protein, 237 aa, Microcoleus sp.
VKVTFDQYLLGDSNGKRSGRPRFKARNRYRTFTYPQMKEGCLQGKLINLPKLGKIKVILHRPIPDGLKIKTASVTLKADGYYLTLSLEDKTVPEIKPDFNPDRIAGIDMGLKEFLTTSDGETIAIPQHYRKSQKRLQVLQKRVSRRKKGGNGRLKAIKQLGKQHKKVADKRKDFHFKTANYLLSKYDVVAHEELNIKGLARTRLAKSVLDAGWSNFLSILTNKADNAGKVGNPSQRP

SEQ ID NO: 50415 - protein, 399 aa, Microcoleus sp.
MLMIVLEFKLKGKPQQYRVIDNMIRTAQFIRNKALKYWMENQGVKLSDLYKQCAVLAKEFEWAGKLNSMARQASAERALIAIQHFFANCKAKKPGKKGYPQFKKFSRTVEYKTSGWKLSSDKRHLAFTDGFAAGSFKLVGSRDLHFYAPDEIKRVRVIRRADGYYAQFCINVERVEEALPTGKAIGIDLGLDHFLTDSTGTTVPNPRHLRKSEKGLRIAQRRVSSKKKGSANRRKAINRLARKHLKVSRQRKDFAIKTALCVVKSSDFIAYEDLQVRNMVKNPHLAKSISDAAWSQFSQWLQYLGKVYGKIVVAVTPQYTSQNCSACGNTVKKSLSVRTHACRCGTVLDRDHNAALNILAKALRQAGIDLNTAGHAGINAWGQTDLYSLVVTSISKSTG

SEQ ID NO: 50416 - protein, 120 aa, Methylococcus sp.
VSFLNENQVVCVESLKVKNMIRNPKLSKRIADVGWGSFVKMLGYKADWGGRTVVAINQFFPSSKRCSGCGHINDELALDVRERECPSCSTVLDRDINAARNIKAAGLAVLACGENVSLVS

SEQ ID NO: 50417 - protein, 397 aa, unknown
  TnpB Polypeptide
MLRAIKSIKQIIPSNQDLDNMMEIFKDMMNHCIRIGIKENCSTLKRMSMLSYHELRNYDIMSSYKICAISQACGILSKYKKEFKKNPNAKMPYVTKPYITNCYNIKHNNSLLTIPFKYHNPINILLNNHTQKILSNPALRVRSFTITALNISICISKEVEMIECTKIVGIDRNLRNVTCGNDESVTFYKTNKLLSIKQNTIYARSGFKRNDNRKKKQFYKNMQNRMQNRTKQFIHKISKKIVDNAVETKSMIAFENLKGIRKLYRKGNGQGKNYRRKLNGWQFYELQRQVEYKALWEGIPVVFVDPKRTSKLCPICGCRVQEDKKNQRKLMCINCKKSMDRDVLAAMNISYKAWSRFTHARDDTGEAKCSIFEEPMTESKLVIRIVDVSKCISSRSR

SEQ ID NO: 50418 - protein, 388 aa, Actinomadura sp.
MYDSRVRLRYQFRLYPTPGQQQALARAFGCARTVYNDALRARREAHAAGLAYLSEGDLSKQVITEAKKTTERAWLGEVSAVVLQQALADLNTAYRNFFASVSGKRNGRRVAAPRFRSRKDRRQAIRFTRNARFTVTAGGKLRLPKIGDVRVRWSRPLPSEPSSVTVIRDAAGRYFASFVVETADEPLPEVAAEVGIDLGLTHFAVTSDGRKITGPKFLRRAERRLRKAQQALSRKQKGSANRRKAVAKVARMHARVADARRDHHHKLSTQLIRDNQAVYVEDLAVNGLARTRLAKSVHDAAWSQFVAMLEYKAERYGRTFARVDRWFPSSKLCGACGSLAESMPLNVRTWACVCGAVHDRDVNAANNILAAGRADRLNACGGTVSPPA

SEQ ID NO: 50419 - protein, 291 aa, Bacillus sp.
LANAQLHLQTAYKNFFRGQNAFPTFKSKKDRKSYTTNVVNGNIMLLNGHIKLPKLKMVRIKQHREIPQDHVIKSCTISMTPTGKYYVSILTEYEKEIVQKEVETVVGLDFAMDRLYVNSEDERANYPKFYREMLDRLAKAQRVLSRRTKGSIRWNKQRIRVAKLHEKVANQRKNFLHHKSKELATHFDVVAIEDLNMKGMSQALHFGKSVADNGWGMFTSFLAYKLHEQGKQLVKIDKWFPSTKTCNSCGNVKNMSLSERVYSCICGVNLDRDYNAAINIKKEAIRLLALA

SEQ ID NO: 50420 - protein, 359 aa, Paenibacillus sp.
MLKAYKYRLYPNREQRKAIAFTLERCHLLYNRLLGERIHAYKSEGKNVTYYDQANTLSERKRHIPTLKHVHSQVLQDVVRRLDKAFQAFFRRVKRGETPGFPRFKSATQYDSFTYPQGGYTISGNKIKLSKIGEVKIKLHRPIEGKIKTCTIIQKNSKCYVCLSCEVDSVPLPDSAERVGVDLGVKTLAVTSDGEYFESPTYLRKSEKRLKRLQRSVSRKKKGSSRRKKAVCVLARLHERVANQRKDYAHKVSRRLVNRYGLIAFEELNVIGMIKNHKLAKSIADSGWSQLVTFTTYKAESAGRVVKQVDPRNTTQLCSNCSEIVKKALSVRVHRCKNCGFVADRDENAAKNILQRAIA

SEQ ID NO: 50421 - protein, 377 aa, Desulfurococcaceae sp.
MAGEVREPEVTHVTVTGRITPLNSEDHVKLCYLAYRFRKNLVRAVKMYARGVDKQVIVKEITRELNLGYADTIYKMAKLIVEGARGNGSKPLKIKVRKLFIASRGFSANKGNRNIRLESTNTLYVNIPREGWVKFKVSFGEKYIPLVKELIELAKSRKYSYGARIVFRNGRIYLHLSVPVELYLKYFGKGEARGSLIAGFDLNSDRVNMVIVDKSGVIRDARTEWFPEVTSHGFPRNRAKVARLQALSKLIEYAYHHGVGVAVFEDLDRIKRRRFTCSPVANRKMSWFPKRKLLGHGVVMALKHGFNVYLVDPSYTSVVGGYLSRELGLDKHTASAYMLTAKYLGLDLKSLKVTQITRKPKTKQHTDSPRLLYLAVI

SEQ ID NO: 50422 - protein, 323 aa, Desulfurococcaceae sp.
VFRREAYSVIPSRRYADGVVALVRGIYESCRALGVSFRDAELGDWLMFQQSEREYPARNITLKAGYEFHVTVVGYDGSTGRVTVEPTVPKSYRVLLDGVLREKPKYCARVMVKGFGERKSDLWLNGEIHLTLPLELYHRCMAKDTPATGSNVAGVDVNVDRLNVAIVDTSGRLRDTTTFWFREVTSRGYPRRRARCVIGMSVHRMLKYLASHGVGMVVLENPEVIGYLRYCWVRSGERGSRNYNYKVAVFRSSIIEMIALKATLYGLKSVYVDPRGTSSSQEHRFVMEKHGLDRHTASAYLIALKHLQDEKIMNNRKAHEQHK

SEQ ID NO: 50423 - protein, 424 aa, Natronomonas sp.
MAKQVVTRTYTASIQNQQRVSDDLDSLGFSASKLWNVGRWVCDRVWSEIGHIPSHNELTSYLKSHERYDDLHSQSSQRVLQELAEAFNGWYGKRRNGDTRANPPTYRKHGDNHPRSTVTFKQKGFKLDTEYERVRLSKGSNLKEYWSDFVLCEYQTRPDVDLSTVESVQQVRTVWTGGEWELHFVCKVEIEVAEAPGEKTVGVDLGINNFAALAYEDGHSELYPLNCLKQDDYYFSKQIAHCDDPDSKQATRLNQKKSARRTHYFHTLSKHIVQQCVNEGVGTIVVGDLAGIREDEENDESKNWGKHGNLDLHSWAFDRFTDLLTYKAEMDGITVEQVSERDTSKSCSCCGRKHDANRVERGLYVCDECGTVANADVNGAENIRQKVSPSPDGEDRSNGWLAQPSTYLFDSESGCFASREQDSS

SEQ ID NO: 50424 - protein, 350 aa, Caldilineaceae sp.
VSRFVYNRTIAYLQQPGTKADWKGIKTGLLRGLPDWCAEAPYLVKSIAIRDACIAVREAKRRYRETGKVHEVKFRSRKAPVQSVYIPATAIKDRGVYPTLLGDLRYAEALPSPVKDSRLVLRDGRYHLHVSTAAPVQQVENQGRIVALDPGVRTFQTFYAEDAIGQFGDRACGRIQRLCQHLDNLLSQADAAPHRRKRSLYRAAGRIRRKIRNLVDELHHQVAHWLVCNYDIILLPDFRVQGMSGRAGRKIRRQTVRNLLTLSHHRLKAFLLHKAAEFGKQVVIVNEAYTSKTCSWSGEVIPNLGGRKVVTGSDGVSLDRDVNGARGIFLRALVDTPWLQECLQPASRSP

SEQ ID NO: 50425 - protein, 384 aa, Moorea sp.
MIILEFKAYGKQKQYSAIDEAIRTVKFIRNSCIRYWMDNKGVSKYDLNKYSAVLAKKFSFANELNSTARQSSAERAWSSIARFFDNCKKKVPGKKGFPRFQKHCRSVEYKQSGWKLSPEKKSITFTDKKEIGKLKLKGKWELWRFDKKQIKRVRIVKRADGYYVQFCVSVDIKEELDPTGKAIGLDVGLKDLYTDSTGKAEPNPRFYRTGEKRLKFYQRRVSRKKKGSSNRKKAVNRLGRHHLRISRQREEHAKRLARCVIRSNDLVAYEDLRVKNLVKNHCLAKSINDAGWYQFRKWMEHFGTKFSKITIAVNPAYTSQNCSSCGEEVKKSLSTRTHVCKCGCKLDRDVPSEPLREHNAAINILKRALGTTGHVGTGILDPFA

SEQ ID NO: 50426 - protein, 456 aa, Moorea sp.
VKTPTKVIRTDKWKLNPSPGQKILFSETVKVYRQACRYLVGIIYTHWSELGGLTAVQLTPAVEKLMHKTAKRPNIKYPQFNKAFYKFPSYYRRAAIAFAAGQVSSYVTRYREWQSGSRKRKDSKPPRLNADTGCYPALYKGQCYKLHGFDQIEIKAFNGKDWVWTTVQITGLRERHKIATNKMMSPSLIFNVRYCHLSVPFTCKPEKRQPLANITAVDLGINTTATVAVVTHSGTVIHSAKPTLRERDFIHLGRDIDRRDKRLKSVSARASKTMGKGGKLHKGFCSLTYQKCQRINNQIGHIVSKRIVEIAEKFNSEAIVFENLKGWKPIGGRKRSNLKQRFHGWLKAKIRDFTEMKWAELGGKVIEVVASYTSKLAFDGSGTVKRNSQKYSLATFPSGKRFNADLNGAYNIGARGVFKLTRRNDGEGRSSKSSGRPPRSWVCLCDLWAAASPRLA

SEQ ID NO: 50427 - protein, 395 aa, unknown
  TnpB Polypeptide
MIVSYTYRAYPDATTEGRLNTALDTCRWLYNKLLEECNAAKENGSSPTMRGMQARIVMLKEENPFLKGVYSKVLQMVNYTLWSNIRALSQTKKNGRKIGKLRFKSASRYRTLNYNQSGFKIDREQSTITFSKIGTIPFFMHRPYEGTVKGVLITRSGDTWYVIIQAEQEVSEPKKEGRSVGIDVGLTSFAVDSDGTAIENPRFFEQSKEKIKKLQRSLARKKRFSKNWMKGKAKLERVYNHITNQRRDFLHKLSRYYVDTYATICVEDLDIKGLQEKGNSTGLHRSIHDVSWGRFHSYLAYKAESAGTNVIAVDPRNTTQMCSNCGSIVKKTLSDRIHECPYCGFVADRDYNAAVNIHRMGMEQPFEPVEILPLHHIGVMQVLSMKQEATPASAG

SEQ ID NO: 50428 - protein, 384 aa, Lactobacillus sp.
MIRTQKVRLYPNKTMKKVLDDLCDYRRYCWNQGLALWNDMYDSSLILDDKKLKPSERKVRDELVANKEDWQYQLSPRCLQLAISDLGKAWSNFFNKAMPDWGKPKFKSKKATRQGFKTDRAKIINGKLRLDKPRGVKTWYGISFKGAKSLDGDLKVVSIYRENGKYWASLPFEVEITKKTKTGKKTAVDINVGHFNYTEGKVNTLPNHLKKLYKRIKHYQRQLARKRVVNGKKATKSNNYVKTRAKLQRDYRKVANIQHDIIHKFTTKLVSDYDKIVIEDLDVKKMQMTHVASKGLQRSLFGTFRQVLVYKAGWYGKEIVLADQYYPSTQRCSECGYIKTGEDKVGLNGNRKHGTKHNEYICYECGSIMDRDENAVMNLLNLVA

SEQ ID NO: 50429 - protein, 418 aa, Lactobacillus sp.
MKTMSELKYHYGLKMCIHPSTKQKQIIKMNSDVSRAVYNAMVAIDKELYQLKQVKLPIDTIQTRIAELEKRKKAQNYLATHYTYMKHPYIDSHCRSMAMRSYKAAWNMFRKVHNVGTPNFHKKTYEEKYQTSGTYTSKKKPVNMWTGSIRFVDNKHINIPKLGIIRVSGSYRKLLDNKDDIRIGTTTISKNAFGIYYVSMQLGSDTPFVKELPKTNSQVGIDLNTDNFLTTSEGNVIANPRFYRTIKGRLAKAQRKLSRRQVRAKKEGRSLRDSKNYQKQRIVVSKLMNKVRNQRNKFLDEMSITLIKNHDLVVAENLRSKNMLRNHALAMSISDVGWRTFLQKLEYKAELYGKTFVTVNPKNTTQTCSECGHVMGTKDTDKLTLKDRSWACPSCNTYHIRDVNAAKNILDKGLKQLA

SEQ ID NO: 50430 - protein, 329 aa, unknown
  TnpB Polypeptide
VDNKAVNTLIKDACCIDTYRPCYATLVPKMIRGKYRVYLHLTIEGKAKPKYDKHGNPRHKYGKGMIGADIGTQTVAYTSDTEAGLKNLSERGNSIQTSERKERLLYRAMDRSRRATNPYNYNYDGTIKKGRKIWVYSNHYKKLKAKHTELCRINAVNRQLAINEDANHLRSLGDIFVTEPKNAGKLMRRAKETTKNDKGKFNKKKRFGKSIKNRCPSGFQTTVEKKFKATSGTYIEVPNNYRASQYDHTVGDYIKKKLSDRLYKLQDGTEVQRDWYSSFLLYCYNYKTQDIDKDKCITEFDDCYKKEKALITWIKAHKIKVLNSGIKIA

SEQ ID NO: 50431 - protein, 447 aa, unknown
  TnpB Polypeptide
MTRKKAVKVLRKQKKTENIQRFTQKQNIGRASLTAKEFRLLQRMSHSSKALSNVGLYTIKQSYLNNRKTATVKEVDTAMQADINYWGVQSNSVQAIRRTLFSDVKSFFKAFEQWKKNPENFTGRPKFPKYSRSTEKRVIEIYQVPKVDSDGYWTVPMNVEFRKRFGSIKIRMPKNLLNKKISYIEIVPKQKGRFFEVHYTYEMHISQMKKIPTTTFNALSCDLGVDRLLSCATNKGDTFLIDGKRLKSINQYFNKMISNFQQKNSENGISKRIVTNSIAKLWSKREAQINGYFSQAVGLLFKKVKEFNIDTIVVGYNAGWKQESDMGKKNNQQFVQIPFRKLISAIENKCLKEGIRFKKQEESYTSKASFLDRDTLPVWSKDDKINDHFSGKRITRGLYRSKTGICIHADINGALNTLRKSGVVELVEKLKVNNPILLKVQKRKAVA

SEQ ID NO: 50432 - protein, 441 aa, unknown
  TnpB Polypeptide
MIRTYRYRLYPNETHEVAMGNVLYAACALYNHALAYRRKRWNENRRCVWYKEQAGMWRDWRNEDPADNPLRLLNMSAGQRVLRRLDSAYREFLKGKRGNPRFRRLDHFNSVGFTAGDGAALKGNQLYLQNVGTVPVRWHRALPEGKLKHIIVVRKTSGWYVCLQIEIQERTPSHSVNVPVGVDMGITHALALSDGIFFDSPRPLQRSLATLRRLQRSVSRKKHGGTNRKRAVRKVARLQEHIANQRRDFWHKVTRGLVATYGTIVLEDLSLAFMLQNRHLSRASHDTGLGMFRELLDYKAIEAGVELVAVNPRNTSQVCAACGSIVPKVLSVRVHSCPDCGLVLDRDTNAARNVLWLGRSQWALTWPVTACVAQDVLPPHPSCVLRDSGESRHNDQHRTSLSSKGVVTPGEIGEEPTWIRPDDLIRVVRHVGAVEDHGGFI

SEQ ID NO: 50433 - protein, 423 aa, unknown
  TnpB Polypeptide
MKGGSILGVNRYNTLIMRTAYQYRLRPTPSQIALMNEWLELLRKQYNYRLAERFNWWEQNHCDVNACPLICHLPELKDKPDDYSQSRDLRKTKELFPEYKGIHSQVLQDCIQRVERAFERWLKGDCNGKRLGKPRFKGVGRYRSFTFPQIKQDRIQGKFIHLPKIGAVRLIQHRLLPDGFVIKTATITRKVDGWYVTLSLQDASVPEFTPDSPTLGNTIGIDMGLESFLVTDEGEAVEVPQYYRKAQKRLKRLQRSVSRKKKGSNRRKKAIKRLAKAHLKVANQRKDFHYKVANWLLRKRRHIAHESLNIKGLAKTRLAKSIHDAGWGQFLQILAVKAARAGLMTIAVNPKGTTQECSGCGRVVPKKLHERWHHCFHCGLSLPRDRNSARVIKYRAVGHPVLKAQETPDALAGVTVSEAWRQP

SEQ ID NO: 50434 - protein, 416 aa, unknown
  TnpB Polypeptide
MEVRRTAVVKLAVSDEQRDALHRTAEQYLYCANRTSEFCWSDDSFTECKTNKRQVRDALYADLREETELQAQLVQAAIRRGVDAIKGVVERWKKGQRVSRPTFTAETMDYDTRSATFYRNKTSLSTVDGRVELPLVLPSDSPTPYEQYALSEDYEFRESTLRYDPVTDEFYLNISMRRYDNDESEVSTDTEHPDQTVLGIDLGVNSLAVASTGTFWQGDDYDHWCGEFEKRRGKMQQRGTQAAHNALLRLGKREEAWRTQYIHTVANEIVTEAVEHDCDTIVFEELDGIRERLPHAKWHHIWAFRRLYEYVEYKAPERGVSIEQVAPDHTSQRCSRMDCGFTHDNIRDGEHFHCQKCGYQVNADYNAAKNIGLRYARKRKHRLRSSPMSGGGDAPVDVRVNGGTLNGESHQPITGA

SEQ ID NO: 50435 - protein, 451 aa, unknown
  TnpB Polypeptide
MKVLRQNRYHVKPTHPDYDLLLHHMRDSKAVYNFANYLLRQRYFRKTGRNFNENLLDEFADDATLHAEIQAYLDGSKMFSSLLKRIVCAVARRFGCRINAKVVQNVVDKLHADWAAFFELIKRKKDGDYDKKIHPPRYKKEAFNLVEYNPQVVSKVKLADGFIGTAKMVQGIRLRRLRPNETVQSFRVYWENERVFLEVVLVREIDMPKENGCDGQKIASVDLGVDNLMTVAFNYERRPVVVSGRELKSLNRFFNKEKGKLQGKLPSGVRSSRRIRRLLGRRKDEIRNLFGRITNQFVAFLLREGVTKLIIGKAKGWKNEVNLGTVNNQNFVHIPFNSLIRILRYKCEDVGIILVTQDESYTSKASFLDGDFIPTYRKQKEGEEKPTYAFSGSRVKRGLYKTKDGGFIHADLNGALNIMRKAGDLSPKEASSLAYLKRYRHLFPISFECVA

SEQ ID NO: 50436 - protein, 482 aa, unknown
  TnpB Polypeptide
MRYTTFRFALAPTPAQEKALARHAGASRFAYNQSLRLVTGALEARRTDPSVVVPRSGFDLINAFNTWKKTEEAGRIFVVGPDKTTTKLVTGLAWRHEVAAQVFEEAAVDLSRALTSCLKPKAASQKGRSTGFPRSKRKGRCRDSFRLRNKYGTGPASGIRIGEGHPRCVTLPTIGMIRVHNDTRALRRLLRPAAQINTQTGQPFTAPRAKVLFATVSRHGSRWYVQLNIQAPDFHANRRHRPRSHDDSVGFVGVDRGLSTFAVAATSDGTEVVHFTAPKPLSKRIGRLRRRSRAVSRTKPQSRNRAKAVRSLSREHTRIANIRRNFLHEASSHLAKTHGRLAIEDLAIANLVRNRHVARAIGDAAWAEFGRQLRYKTEWLGGELVTCDRWFASTTTCSRCGTVRKAMRLAERTYRCDRCGLAIDRDRNAAANLAAWAEHHAHAPDRQAGGRVTNAHGGEGTGRQSTDGATGPDEVGTQVQVT

SEQ ID NO: 50437 - protein, 397 aa, unknown
  TnpB Polypeptide
MKDDVKIRGVVCRLYPSLKEEKLWQSCNTNRFVWNYFLARRIKRYEKDKSTSYKEDATFLTKLKNKKYKWLKDVSSITLQQTLKDLDQAFQNFFRRVKNGEVPGFPKFKKKFKCKNSFRIVNKKDIRLEDNVLNIPKVGNIKITISQNFNIDNVKSYTIFEDCKKWFVSFTEYFEPKKFKKTKSEIGIDLGVKKLIYPSKGKYINPFKEEVLERRIKTKQRELSRKTLRSNNWIKCKQELKILHQKLRWKRKDYLHKASTTLVKNHDLIVVEGLKTRNMTRSAKGTIDKPGKMVKQKSGLNRSILKQGWSILLEMLEYKCDWYGKTFIKIDPKFTSQTCSSCGHVSKSNRRSQKSFKCISCGFQRNADRNAAKNILNKGLLILNKKWVGLTLCGGTH

SEQ ID NO: 50438 - protein, 472 aa, Crocosphaera sp.
MMGKSKTKRKTKKKKPNSMLRTDVWKLKVKSVEKKLLLLTVAEYRRFLKALVFIVNAEWKLMGNLTDKEKVNYLEKSIHVTSQNTQIKYLYYQKVIDKYPSFRKFPSYLRRAAIADALGIVSSFQTRYREWQSGIRKYRKVRPPRLTAMCQSYPALYKGQQVKYNDDYRNVSLKIWNGSDWVWLEEIPVKGHGLNRHKVIGNQLKSPALVVNSKTCQLSMPVKIKPVKKEDSDYVCSVDLGINNAATCSIVGQDGTVKARKFINPARDIDRRNKRRMMINQKSKQTHKKTKQKFVKGFCRGLYRKSSNINLEISRKVSREIIEFALLHDVKVIVIENLAGWKAKAGKKGTLMRQKFHLWCHQKIVEILSDRWAELGGNVQTINPKYTSAYAFDGSGKVKRNKKNYSLCVFPSGKQYNADLGASYNIGARYWYSVLIGDKYFSRVFVSKSSTNTLRTPVTLETLRSLKASGWK

SEQ ID NO: 50439 - protein, 370 aa, unknown
  TnpB Polypeptide
MKTHRSILIKLPKDKCDVDYIRRLMALANLAYRGFEVWAPDLPKTIQYQLYGSFKNYMGSLVFGTTPKRWFAETWVPLKTFRVYPDGSVKGDRGAPVVLDFKNNTIRVRQVCRNEHGYVVELPMPKWIIERVKEGGGIKFARVGLKNNEPYLALTAEREVEPYQPSGYILAVDVNSWGHGIAWGLVRNGGLSSFKQEGLNVGKIVGLYKQAIKRERRLGALKRLGLGDTVNAKRAGRLVKRLRSRAYRLIRAEAVFLARKLTKKALRYRAMVIIDDVDWESLKELLTRRYGKKIGKLLLSGLKRFVKLLVTQLQWYGVPYESKRLYSRKCPNCKHKLTQQKGRVMICTNCGFKAPRDMVPIYWVLTPSPP

SEQ ID NO: 50440 - protein, 692 aa, Bacterium sp.
LVKLLFKKKSVVTLSHTHQKMPESSDGPKGHRAARRERDRFFEKTVIKMGLRTFCKESRLIGLIEKAVQVSSQVTWEASLLVSFHVLRCLESGIDVEPLEQSFWDRCISAIANGDKGIGMNASEELKESFRLYAQLRPHEYVPVKREGYMNHIFLGLRQTMLTNFKTVFVETFHGRLCRWLRLKVCLSDRERLKHSNVIKSAIALLDRACTNEEGSVESLWPTFRRLEELTSEDIEWMQHLVDDVRQRMSGPLPVSFAPDDMPGYFPFLRDMLKDIEDHILWAKDNEEKSISGIKLFSILPQKKFRAPFIDISTTVLKSLVAVLRGRKRKKMEDYDVTQETANILLESGTESELWNEYFDVKSMVKAGRNQRRSFGHSVKTDGMSVSVVVETPRKIPLPLHPKSRKKQLKQEEAEVSVQIRQKVLKEIKKSEKFLEETRVVAIDPGVKAPFTAVVYNPAAIERLSQPHGHNVHFSSVSWKASKYYDECGITGRTREMRKWTNAAPPIRQFNETVATAKTSSTEAYAERCRQVLMALQTLLNFYVHKRRVRRARWFAYGRKQQATEKMIEEITATKDHAEQRKVLVAYGNAAMHNVKGTKPVVQKALRRKLARRCLLVDVDEFRTSKLCCSCLKEMMGKLVNGDRLHQVRHCENSACHRIYWNRDLNAAINILCKCLRFLWGQQDPPQFSRTY

SEQ ID NO: 50441 - protein, 495 aa, Acinetobacter sp.
MVFKNTTFPCSLFIYFIHLLNLLKVEVGIKLQQPNSKILMILGVKFRAYPTEEQKLILSQWMGCARFIWNAKCDEDKYYRTFAQKFTIIKQYYLTQDQSYSHFKSKDLSPWLSDCPSQILRNTSTNWFNTLSNFKKGLCGRPKRKAKTDKGSIYLTRELFRFEKDQFGQTILFIGAKKNNIGFLKFKAHSHFQIPKSLYIRKERGQYFVSFCYDDLNDVAEIKPSEHLEYLHGFNKEQLNECVIGIDRGITIPVCTNEQEYDFSKKQKNHMAKADRYIKRLQRKLARQQKGSNSRARTKHRIATHHAKKANIRNDFAHKTSHSLVGNEKNKVFIFEKLNTQNMTLKPKPVQDESGCYLPNKAKAKAGLNKAILNVGWYMIENYVKYKAKRLDKAVFKVRAAYTSQECALCGHTHPDNRKSQDRFKCVSCGHTDNADKNASKVIKSRAISLILDTGTVLVEDLLSSASGRGGSRKSVKGSALNRIVDEMSKEMSAT

SEQ ID NO: 50442 - protein, 403 aa, Kribbella sp.
MAVCVLVSMVRYRYRVYPTAPQRQVLARVFGCVRVVFNDSLRLRQAAYEAGEKLTDTEIQRRVVTLAKTTPERVWLAEAPSVALVQACNDARRAYRNWFDSLSGRRKGRKIGRPRFRKKANRQSIRLTRNGFSLRGERLYVAKVGELKVRWSRDLPSVPSSVTVVMEPDGRYYASFVVEVADTPLPKVERQVGVDLGLSTFATVAATDGSTEKVENPRHLRKAERRLVHAQKALSRKQKGSANRNKARCRVAVLHRKVRDSRADHAHKTAHRLIRDNQAVHVEDLSIAGLGRTRLAKSVHDAGWGQFLRVLEDKAARFGRTVTKVDRWFPSTQLCSVCGGLGGKKPLSVREWECGCGAVHDRDENAARNILAAGQAATACGDGVSPDVGPAVVGEAGTPRSAA

SEQ ID NO: 50443 - protein, 423 aa, unknown
  TnpB Polypeptide
MCSEAKLFKNTVIFRCRQLLSANRKGYTGLQNNEKEVLDEFKLTEGIFKKIDFKYYLPGYVHFDYLFKVTKNPDYYNQLPMQSNQQIIKEVLADFKSYFKGCMAYKKNPESFIGKPKLPGYCKSEQISFDITNQDCVIKTSKEGYPYLKLPKTKLTVNLGKLKPGRLKEVTIKPYYDTYKICIVSEEPDMESIDLDYEKHLSLDLGIDNFAASGNDCGLAPFIIKGNKIKAYNQWFNKKNAYLRSQLPKGQYSSRKIQCIWKKRNHKMMDFYNKAASFVIHYCINHKIGNLVIGKNPKWKQGLEIGRLNNQNICYISHAHFIRKLTEMATKYGIRLIITEESYTSKASFLDNDELPVYGEANHPAFSGKRIHRGLYKSKEGVLINADVNAAYNILRKAVKTAFDKVSDFTYLYKTVNTIHVNL

SEQ ID NO: 50444 - protein, 191 aa, Dolichospermum sp.
  misc_feature (165)..(182): Xaa can be any naturally occurring amino acid
MGPRFISVKYEIEKPPILADRPTIGVDVGIKELAVCSNGEIFKNPKAYRRMSKRMKRLQRSVSRKVKGSNNRKKAVRKLAKLHAKVSNIRQDSIHKLTYYLAKNHSVIKIEDLHVKAFLKNHKLAGAIADCGMYEFKRQLEYKTEKFGSELILVDRFFPSSQICXXXXXXXXXXXXXXXXXXFNVSKVFIF

SEQ ID NO: 50445 - protein, 428 aa, Saccharopolyspora sp.
VFSSAHIPAIGHEPWLYDQGVRLRYGFRLYPTLGQQTALAKAFGCARVVFNDAIAARRDADIEGLPAPKSAELSRTLITAAKKTPGRSWLGEVSAVVLQQSLRDAERAFKNFFDSISGKRKGRKMGAPRFKTRRDRRQSIRFTANARWSITLGGKLRLPKIGDVPVCWSRQLPSTPSSVTVIKDSAGRYFAYFVIDTNPEPITGDAPEIGIDLGLGHFAVLSDGTKIAAPRFLRKAEKKLKRAQQDLSRKQKGSNNRDKARVKMARAHARVADARREFHHQLSTRLIRENQAIAVEDLAVSRLARTRLAKSVHDAGWSSFVSMLEYKAALHGRKVTRIGRFEPTTRTCSNCGAKDVPKPLHVRTWQCQECGVWLDRDINAAVNVAKAAGLAVTACEAHVRPEIVRAERGETGTHRSDLAARSPRRQTR

SEQ ID NO: 50446 - protein, 240 aa, Micromonospora sp.
MHLADSKARRRAVARRAPKPGQRGSRRWRQYRRRARLVEGRHRRRVRQAQHEAARQVVSWAVEQRVGVLHVGDPRGVLDSDAGRRHNLRLRQWQIGRLLQVLTDKATLAGITVHLVDERGTSSTCPACRARVPKPRGRTLSCPRCRFSGHRDLVAAASIATRVPGGGPTTPTAVVLPQVVTHRRAGRHLPGAGQSRRDPRRPQQAARGSVGPRRPAPPPGGESLAHPARIHNAHREPGER

SEQ ID NO: 50447 - protein, 379 aa, unknown
  TnpB Polypeptide
MHDMKRAYKYRFYPTPEQSELLARTFGCVRFVYNNILRWRTDAYNEHQEKIGYTQASAHLTTLKKKPELAWLNDVSCVPLQQSLRHQQNAFKNFFEGRAAYPVFKSKRHKQAAELTASAFKYRDGKLYIAKSKVPLDVRWSRPLPSSPSTITITRDAAGRYFVSCLCEFEPVPLPITAKTVGIDIGLKHLFVTDAGFKQGNPRHTAKYAARLALLQRRLSKKAKGSNNRAKARLKVARLHAKIADCRLDNLHKLSRKLINDNQVVCVESLKVKNMLHNPRLSKAIADVSWGELVRQLEYKGEWAGRNVVAIDPFFPSSKRCSCCGFTMQKMPLNVRKWRCPECSADHDRDINAARNIKAAGLAVLAHGETVNPESYKAA

SEQ ID NO: 50448 - protein, 390 aa, unknown
  TnpB Polypeptide
VKQVVQVKLLPTPEQAQALEATLRSCNAAATWIAETIHGTPARSAFNVQRAVYAETKLKFGLSAQPTVRAIKKVADAYKTLRANLQAGNYGRVGSPKRAKVEGKPVVFRPDAAQPFDDRCLSWQHQDRTVSIWTTTGRMRGLAYTGLPAHLELLATHRQGESDLIRRGRNWFLIATIDLPDVAPADPTSGFVGVDLGIENIAVTHNPTTGQHHDWSGKAVKDRRHKNRLLRTRLQKKGTKSAKRLLKVRSRKETRFAADINHQISKTIVAEAKRTGCGIAVEDLTGIRQRVRLRKPQRATHSSWAFAQLGSFLTYKAAREGVLLVQVDPAYTSQQCSACGHIDRKNRPNQAEFCCRACGFSLGADRNASINISMRGQDQYVAAVNQPNAA

SEQ ID NO: 50449 - protein, 400 aa, Granulicella sp.
MYAQGMIERKAAMFRLYPSPEQYAQMAQIAGACRFVYNLALEQRRNWYRPGRKFSFASQCREVTDLRAEVDWLKACPVHTLQQALKDLDRAYQNFFAGRSGYPTPHKKGVNDSFRFPDPVSLIVKRTGKSSGQVKLPKLGWVPMRGWRPLPGDICNITISPRAGQWFAAVQCEREMPEPIPSTLAPIGIDMGVAVFAALSDGTNIAPANHGKKALKSLRKAQRALSRKKRGSANRRKAIRRVARVQKRVANARKDFLHKHSTAVAKKHGVVVLEALKVRNMSASAKGTAEEPGRMVRQKSGLNRAILDQGWLAYKLADRDGRLVEVNAAYTSQTCGICGCVESINRCSQSEFVCVNCGHTANADTNAAVNILRRADSALKPVEGHRSKRPVEAGIRRRAA

SEQ ID NO: 50450 - protein, 291 aa, unknown
  TnpB Polypeptide
MQKGIKFRIYPNREQKNFIHQTLGCCRFIYNRGLAMRKEGYENGEKIGYSQTSAMLTELKKQEEFAFLKAADSIALQQSLRDLDRGFVNFFQKRASYPTFKSKHNRFQSYRTVNQKDNIRIVGRYIKLPKLGFVKIRQSMEVEKINHVIIEHTPAGKYFAVLNVDFEPEPRSNAGGTIGIDVGIKAFYSDSNGNTVSNPRYLERSMRKLIREQRRLSRKQKDSHNREKQRIRVARVYEKVTNQRNDFLQKQSTMLVRENQTICIEDLNVKGMIRNHKLSKSIASVSWAKFF

SEQ ID NO: 50451 - protein, 372 aa, unknown
  TnpB Polypeptide
VWNLAIEQLRHWRPGRASAPGYVEQSRQLTEARRQFGWLAAGSQTVRQQALRDFAQAMRRFFAGAHRRPTWRKAGVHEGFRIVGQRGRQWDVRRLSRKVGEVRVPKVGRVRFRWSRDVPDEAKSFRVRRDRAGRWHVCFAVIPPPVDGPGTGEVVGVDRGVAVSAALSTGELLPVPGLGESEARRLLRLQRRLARTARRSSRRRRVKTAIGRIKARQTDRRRDWVEQTSTRLTRRFDLIRVEDLKIKNMVRSARGTVEMPGRNVRAKAGLNRSIHAAGWGQLVTRLEEKAPGRVEKIDPAYTSQRCNACGHRAADNRESQAVFRCRACGHADHADVNAAKNIAAGRAVTARGALQPPGGATNREPQPVLPSG

SEQ ID NO: 50452 - protein, 422 aa, Anoxybacillus sp.
VGDESDVFLHKTERMCYNYLRQIVAKGGISMLRGQKVAFRASKRDLKRLVACNQGSARVWNECRRLAKDYFLQHGRRISKSELQKHTKGRFHLHSQSIQAVCHKYLFARQSAHAAIQKGLHHARYPYKQKKFFNTKWAKDGFKVYENGTIALSMGIHNGKREEPILVHVSHLPKGTIKEIECCYNHGWYLAITYDDGQKAKTYQPGCSVGVDLGEIHTIGAFCENGQALLITGRKVRSLHRLRNKKLADIQRRQSKCQKGSRRWKKYERAKRYLLSKSERQLRDALHKTTKQFVDWCLAQSVSDVYLGNVEGVQRHTRKKKKVHRKQAQKLSNWSFGKVKQYLAYKLAQQGIRLKETDESYTSQTCPVCQKRQKGSRRIFACSCGYQEHRDIHGARNILSKALYQRMVPWHMPATLTYLRIA

SEQ ID NO: 50453 - protein, 371 aa, Paenibacillus sp.
MLIKKAYKFRIYPTIEQATLINKTIGCSRFVYNRFLARWKDSFHKTGKGLTYSACSAELTCLKLELPWLGEVDSTSLQSALKQLADAYKRYFEKQNDAPCFKSKKNPVQSYTSQIQKKNQSPGVSIVDGRIKLPKLGWVKFAKSREVIGRILHATIRRNPSGKYFVSVLAETEVQALPQTHSEVGIDMGLKDFAVLSSGEVFGNPKFFRTLENKLAKAQRKLSRRMRGGSNWNKQRIKVAQIHEDISNARKDYLDKVSTHIVNNHDRIAIEDLPVRNMLTNRKLSKAISEASWSLFRQMLEYKCAWYGRVLVAVSRTFASSQLCSCCGYRNQEVKNLNVRKWTCPSCGTGHDRDLNASLNILAEGQRLLEM

SEQ ID NO: 50454 - protein, 409 aa, unknown
  TnpB Polypeptide
MTQLKAFRFQLKTKPKHELLMSRFAGCCRFVWNKALALQKERLDKGEPCLSYNKLAGHLKQWKHEEQTAFLREAPSQILQQSLKFLDKAIADAFDKKSPKGFPRFKKKGTSDSFRYPQGFRVDQNNSRVFLPKIGWIRYRKSRSLTGELKNITVSRSSGKWYISIQTEAEAGSPVHPSASMVGIDLGVAKFAKLSDGEEILPLNSFRKQEKKLAHLQRKMTKKVKFSQNWKKLKAKVQRLHQKIAHVRHDFLHKHSTAISKNHAIVAVEDLEVSHMSKSASGTRDNPGRNIRAKSALNKSILDQGWGEFRRQLEYKLAWRGGMLLAVPPAYSSQKCPRCGHAHPDNRKTQELFRCQQCGLTINADYNAALNILAAGHAVLACGEIGSQNYSVKQEPAEASLEAAGIPRL

SEQ ID NO: 50455 - protein, 361 aa, unknown
  TnpB Polypeptide
MGQVEGINMQNIVTQLVKIPPAFTSRLDSLYADATEAVKQMLADSSRHSSKDYPSIPCVVAKSLINKYQRNWRCKSVTHLVLPICGDKGRQVKVVPEGFRVPAVFGKAVIPAEWRHPIEGYIRQAEFSHRGGEWFASVSYNTVGAEPIKAIGCVGVDRNSVGNIAVMADPATGYVEHLGFNPARTKEVWRNRKRNLQKSGKNRLLTKVRRNQGRRTKLENHIVSKLIVDYAVSHRRAIAIEHLKGVISKGSKIRKFSQKSQWSFTQLEFFIRYKAALHGVPVISVPAEYTSQECSRCGFIQKPDGKLYRCGECGHIDHRDANAGFNIAKRGNFILTDGKAQDSVSLRRGLLIAPSLGSVYA

SEQ ID NO: 50456 - protein, 233 aa, unknown
  TnpB Polypeptide
MGLEHFVIFSNGEKISNSKWFRKMEERLKVLQRRLSRRVLYSNNWYKIKAKISKLHEKILNQRDDFLHKVSVVIAKQYSLIAIENLSVKNMKKNHYLAKSISDVSWSKFVEFLKYKSKWYGAKLIQIDKFAPTSKTCSVCGYVIDKLPLSKREWTCLYCNTTHDRDVNASINILKFALSGTEQPVKPVETPHKRVCEAGSPDLFALAKVRVVHCMNHLPSLGNRAYLKFNQAS

SEQ ID NO: 50457 - protein, 506 aa, unknown
  TnpB Polypeptide
MLKLAEVYMDKKEDEKHLFIYTLKLKTSQQDKERLNKRFRMAQDIYRKTLIEIHKRYLNLKKDPLYKKARKLDKGDKEKTALFKELREKYQLQGKFTFGTFANDYRNARNYSFYIPSDVAVKLGFRAYEAYEKVMFAKGAKTVDFRKVVDSMEGRADAGITIRKGFFKMGTKTERAKFSCPVIYEEDNFEEEILRNKVKFVRLVRRLEYGQYNFYAQIILEGTPVIKNSQNDLKTNVGIDIGLTSIAVATDYETQLIELAPFIKNNDKKLAKLNQKMDRQRRANNPQNYKSDGTIKTGRKIWKDSKRYLQTKAEYQELERLGREQRRHAHERLSNKIVEMGDTFIVEQMSFAELAKRHDIPTKNESGKFLSSAGFGKHVKRRAPASLISLIKYKAHFRGRKFLEVDIDKIAATQLDHSTGEKKPLELSQRIKIVDNEVVQRDLYSAFLLKNVYPSAIGVDLDSCKKDFPHFLSLQEDTMNNLELENTTPSMGLKKWKVLKKKNNKA

SEQ ID NO: 50458 - protein, 403 aa, unknown
  TnpB Polypeptide
MYFVCIRQNKIFLFSSFRNFGKTGNSYLYSNRKHISERRKCCVRFCNAKKSDALGMVRSYKSNHENWEQTLPAERGAEPTLGLPSRYELTFYDQERKMSSLADGQIGLKLYNGHTWSWYYFQISRSDAKCIHGLSQTRKMLSPVVDKVRGRYRIRFAFSESKALVSDENRLAYRILAVDLGINAAASWCIMTSDGTVHDKGVIHLDCEEGRLNHMINRKRMYQQAGKKSRCVYRWVKEANRQLSIATAKALMNVAVRYSVDCIVFEHLDSKGKVRGRKYRERIHMWRKNDVQNRVTLQAHRYGMRISRVCAWGTSKYAYDGSGQVDRHSIYHYEHGRKVYNYSLCTFQNGKIYNCDLSAAQNIGARFFLREYVHAGIEGLPATPQRTLSTLWSVVSNGLPVAA

SEQ ID NO: 50459 - protein, 419 aa, unknown
  TnpB Polypeptide
MKKTYEYRIYPSDEQKVLLAKNFGCARWIYNFGLSKKIEHYKQTQKSLSRYDIQNEIPKLKKEKSTCWLKEVNSQSLQAVLFHLDTAYSRFFKKQGGFPKFKSRKSKQSFEIPQSLKIDFDEDYIKIPKFKEPIKTIFHRKFEGKIGTCHIKCSRSGSYYVTILIEDGRMPPVKSKIEKKTSIGIDVGIKSFAVTSNGETIENPRHLINNQRRLNKIQRAFSRKIKKNPKSSPLSNNAEKQKLNLQKLHERVAWQRKDFLHKVSAKLICENQTICVEDLNVIKMLKNRYLSKHIQDLGLGMFFGFLRYKADWYGKNVLTIGRFEPSSKTCSVCGYIKHDLTLKYREWACSRCSSHHDRDVNASINIRDFSFVNINENDNTESTRNTQKSKPTSYGTSLETSVGRSYVSTIKASQSLVEG

SEQ ID NO: 50460 - protein, 383 aa, unknown
  TnpB Polypeptide
MQSQLMKQFCGCARYVYNRTLSLERSLYKKDNKHSFKYAEAANRLPEWKKKNPFLKECHSQVLQQSLKDLDQAYTNFFRKRANFPKYKEKFRNDSIRFPQGVELDEAKQQIRLPKIGWVGYRKSRDIMGAIKNVTVSRRGEKWDVSIQTEYEVSSPASNPSEIGIDMGVKRFVTMSNGDFVEPLNLFKQELEKLAKLQRKLARQKKGSRNSRKTKRKIARLHRYIADSRRDFLHKTSTKIAKNHSIVYVEDLKVSNMSASAGGTKESPGKNVRQKSGLNRSILDQGWYSFFQMLSYKLERGGGKLIKVDPRNTSRTCPRCGFVSAENRKSQATFACIGCGYRSNADEVGAINILRAGRARLACGMSGAVRPLSAGTQRDLLQH

SEQ ID NO: 50461 - protein, 394 aa, unknown
  TnpB Polypeptide
MICYKYPIFPNKITQWKLAENLDACRWLYNRLLQDLNDAKKNGIKLKTYDTQNMIPSLKLTNPKLNLVYSKVLQMVNYTIWSNIKGLSASKKNGRKIGHIRFKGSGWYNTLNYNQSGFKVDQDRGLLHLSKIGDMWIKIYRKIEGCIKAVIIKREGMQWFAIVQADQEPQTLPKTEEAIGLDVGLTSFVVDSEGNDIENPRCAEQSADKLAKLQRKLARAVRGSNNYKAIKDKIAKLHKRINCQRDDFLHKLSRMYVNSFDIVCVEDLDVKGLKEKGHNNGMHRSIHDASWSKFIFMLSYKAQSAGRKLIRVDPRNTTQKCSACGSIVKKDLSVRVHECPYCGFSCDRDYNASRNIFFSGVEQPVAPIEPRPLHRISVMQVLAMKWEAAPFRTR

SEQ ID NO: 50462 - protein, 441 aa, Natronomonas sp.
MEYSHRYPAYPTQEVAAELEQHIDIHRQGYNYTLYEYENVDADDIGSAYKHHYRLPDWKDEFPVFSEVNSKALQRTVTRFYQNLSNLKAQKDNGNRVGKLKWKSPREFRSMTFSQSGFELKNTSGRRATLWLSKIGDIKIRYHRDIPNEADIKEVTIKKETTGEWFVSFGLETDDADLPGKSDVDSLDVSNSVGIDLGILSYIHTSNGKTVNWLDLEDEYERLRREQRKLSRKEEGSNNYEKQRREVAKVKRHIRRKVLDYQHKITTWLVREYDAVFVEDLNVTGMLEQSHNARNKQDAAWRQFITLLEYKAELYGCHVVQVEAAGTTKECARCGVETAKPIWVREHSCPSCGFECDRDANAAMNVLQRGFAELGLGWPEDTPVETALPTDTDDFREVSAKRVIETGSPICSRARSARSHGQRDLRSRTTLKERTASAVSE

SEQ ID NO: 50463 - protein, 365 aa, unknown
  TnpB Polypeptide
MQLTLQIKLLPDELQAKILQSTLREVNRVCDKISQTAWDKKTFNQVKLHHLVYHPIKKSTELSAQVIVRAIAKVSDAYKLDKKTLRRFKPLGSIAYDSRILSYNIKARTVSIWAINGRIKGLPFVCHNEKLLPYIKGEADLVTKKGKWYLFQTVEVPEEKVRDVEDFIGVDFGLVNIATLSTGERLSGKKLELYRIKRQRVRSQLQSKGTKNSKRVLKRLSGRERRTASIVNHTIAKRIVKMAKKQNEGVALEELKGIRKSANNKGKVFRARVGRWNFSDLRAKIHYKARLAGVPVVLVPAAYTSQTCNSCRHLGSRNGESFKCPCGNSQHADVNSARNIRLLGRIVNRPDESQAMSCSVFRHCA

SEQ ID NO: 50464 - protein, 373 aa, unknown
  TnpB Polypeptide
MKLTAKVKLLPDEAQTRLLRETLEMANAACNAISGTAWQTKTFGQYQLHKLAYAQTRASFPLTAQVVVRCICKVADAYRLDHKMRRRFKKHGAITYDDRILNWRLPDRRVSIWCLGGRQEMPFVCGPRQYALLCHRHGEADLALIDGKFYLFATCEIEEPEPIDVAEMVGVDLGVTNIAVDSNGHVYSSSQVNNVRHRNCRLRKKLQSKGTKSAKRRLKKRSKKESRFAADVNHTISKRIVEHAQGTGCGIALEDLEGIRTRVTVRKRQRATLHSWSFLQLRQFIDYKARRAGIPLVLVDPRNTSRTCPRCGCVDKRNRLNQSTFSCVVCGFSGLADHIAAENIRVLGRASVNMPNVSRPDPSRGVAGTSRLL

SEQ ID NO: 50465 - protein, 381 aa, Ruminococcaceae sp.
VQITTTAKIQIQVAPEQCELLDATMDTYRSACNFVANYIFQTHDLKQRSLNKVLYYDLRERFGLKSQMAQSVFKTVIARYKTILENQHEWIKPDFSKPQYDLVWNRDYSLTQNLFSVNTLDGRVKLPYFADGMEKYFDHDAYSFGTAKLVKKHGKYFLHIPVTTDVPKSQNSDICNVVGVDRGINFVVATYDSKHKSGFVSGKAIKQKRAKYKELRKELQQRQTPSARRRLKAIGQRENRWMQDVNHQVSKALVESNPKHTLFVLEDLSGVRSATERVHRKDRYVSVSWSFYDLEQKLKYKAALNESSVINVDPRYTSQTCPICGHTEKANRNKKRHIFCCESCGYSSNDDRIGAMNLYRMGINYLAINSQVPDTVSPQHV

SEQ ID NO: 50466 - protein, 132 aa, Thermaerobacter sp.
MGAGAGMLKNRRLARVLADAALTEIRRQLSYKCPWHGAVLVEAPPFDPNSKRCSRCGAVKPSLPLSQRVFRCEECGLVLDRDENAARNLAALVAAVAGSGPETENARGRDGRPAARQAIPEEAGSRHRRMAG

SEQ ID NO: 50467 - protein, 437 aa, Deinococcus sp.
VKITLTAKLKLRHTPEQKAALDAVTLAYRDALNFASEVAHGENKMSQAAKLQKMVYEDLREKFGLPSQMACNAPRQVASSYKVQWTKFRQNQAARDLGHTKRRYKGLDHPCKFVSRTLTYNFGRDYSWKKNQQVSVQTLEGRQVIPYDGYSKHLAYIQQGCEVGAAKLYYQKSKKQYYLLVSLDVDIAEPRPEHHKQVIGVDVGQRYHAVVSNTRNHALFQSGKQARQRKDHFARLRQHLQRKGTRSATRRLTEISGRERRFIADWNHKLSQRILRRFPHAFIGLEDLTNIRDRTEGRNNPKATKKVRTHKRRRSQWSFAELQSFLAYKAPLNGSMTVKVDANYTSQACTCCGHTSKGNRPKAGLMFVCENCGYEVHSDLLGSRNIALRALVSRQDWEATGCLSTTPDVTHAEAKTVRLLRYAGLRWSAVANPDQTL

SEQ ID NO: 50468 - protein, 380 aa, unknown
  TnpB Polypeptide
MLRAIKIRLYPNKTQEQTLNKVLGSYRFVYNQMLALKQSAYKADKTNLNLTYLSKWFHGTLLKDEQYAWLKEQNTKVMKQAVRQMLSAYDKFFKQHNGFPKFKTKRDRQSALFPYDAISRKNTFETKHISLITSLKHIKFRCSDLYFRRLQKYNKDIRSATLSKTKSGNFFLSILIEMADIELKRFEHTNKYVGIDLGIKDFVITSDGEVFENKHFFKKKENQVKKLQRQLSRKQKGSNNRNKQCVRVAKAFERLTNQKNAYIHSVVNELLTYYDTIFMEDLNVKGMVKNHHLAKAIQDVGFYKFKEILVNKALVNNKQVVFIDRFYPSSKTCSQCGYKKQDLKLSDRFWVCPKCGEHHDRDLNAARNILFEGQRMMVAM

SEQ ID NO: 50469 - protein, 396 aa, unknown
  TnpB Polypeptide
VRIHRGYRYELDPNNRQRTLLSKNAGCARFAYNWGLEQQIKLFYRKRTRFTNAIQQYRELIQLKRTQFIWLYEVSKCAPQEALRDLDKAFTNFWRGRKKGFKVGFPKFKKKGRHDSFRLYGTIRLFEKAVQLPRLGRLRLKEKPKLQGRIISATVSRKADRWFVSVCVERKIPAPSHVTGPRIGVDLGIKSLAFFSDGTKIENPQALVKKLQKLKRLSQQVSRKKKGSHNRRKAIIRLARLYWRISNIRMDVIHKLTTYLVKNHSQIVIENLCVKGLMKNKRLSRAIADVGFNEFRRQLEYKTKWYGSEVIIVSQFFPSSKRCSRCGHTKDELSLSERVFNCDECGLQLDRDENAAKNLVAASWAETINACLETGGYRSSLDQCLSMTQEPNTTKT

SEQ ID NO: 50470 - protein, 349 aa, Micrococcales sp.
ALSQMVQLTEIRSVRPDQGVWSFTSQQQTLRRLDKAFGAFFRRVKARETPGYPRFRAAARFDSVDFRHGDGIKFHRDKKQLYVMGVGHVQIRLHRALPENAALGQVSVKREGSGRRTRWFVVIPVEVQPVPLPMTGAITGIDMGVASFLTTSEGVHVPNPRHLKVAAARLAAAQQDLARKKRGSNRRRNTVSRVATLHGTVRRQRLDHAHKTALKLVQDHDVICHEALQIPNMTKRAKPVPDPARPGAFLPNGQAAKTGLNKAILDAGWGVFLSVLTAKAENAGRDVISVNPANTSRTCPDCGHCAKGNRPSQAVFTCRQCSFTGNADTVGAINVLRAGTALRQTAHAA

SEQ ID NO: 50471 - protein, 307 aa, unknown
  TnpB Polypeptide
MQKGIKFRIYPNREQQTIINQTLGCCRLIYNKGLAMRNEAYQNGNKIGYSQTSAMLTDLKKSDDFAFLKAVDSITLQQSLRDLDRGFVNFFQKRTPTNKYFAVLNVKFEPQPMSNKGGKIGIDVGIKEFYSDSNGKVVYNPKYLEKSMRKLMREQRKLSRKEKGSTNRNKQRVKVALVHEKITNQRNDFLQKQSTMLIRENQTICIEDLKVKNMMRNHKLAQHIGSASWSKFFDMLSYKSIWYGNDIVKVPTMYPSSQTCSCCGFKNPLVKNLAIRKWECPECHTKHDRDTNASINILDKGLQMQSA

SEQ ID NO: 50472 - protein, 422 aa, Bacillus sp.
VFLLSFLFLKLYNNRNKRSEGGYTLGTYHKGFKFRLYPTTEQATQIKKTIGCCRFSFNLALAKQKEKDLLWWITEEMFQNGQLLSNEWKGTRFSANASMKDSTEFKKNTPWLKEVDSTAIQNSIQNLGDAYQAYYKKEKGRPKFKSKKNEIQSYTSKCNYNKGVGTIRIVDENFIILPKVGKVRFAKSKEIKGRIINATVRRTPEGKYFVSVLSEVKTEPTQISAFQTGIDLGLKKFATLSDGSVIHNPKHFYQLEEKMKKEQKILSRRVIGSRNWYKQKIKVAKVHEKIANTREDFLQKITTMLVNENQVICIEDIKVKNLLKNGNLAKAISDVSWSEFRRMLTYKCDWYNKTLLVIGSNYASSQICHNCGYKNKSVKNLALREWACPNCQEIHDRDHNASKNILAEGLRLLSEMNQPQVA

SEQ ID NO: 50473 - protein, 407 aa, Lactobacillus sp.
MMTTLGRTAKVRLYPSEIQAIQLADESQEYQRLATIVSEWVFNHDFPMNYLKINHALYKKFRQESPLNSQMIQSVFRTVVARYKTVLEQMRQHPFRYQDETKEWVKTPKDLTWLFKPVHFSRPQADLVRQSNYSFVDGMTKISLTTLGKRTKMSFTNRDFEQYFQNGWKLGTAKLVHAQGKWYLHIGITKEVADFESTKETKVVGIDRGLRFLATIHDHLGKTLFFDGKKILRKRKKFQETRRQLQSKGTKSAKKRLKQLAQRENRWMTDINHRLAKTLVSIYGSRTLFVLEDLTNVTFNTDNLSKALRNSHRSWSFFQLEFFLSYKAAAIQSKVLKVSPAFTSQRCPQCGLIEKANRHHETHEYHCCQCQYRSNDDRLGAMNIKLLGEEWLRGIKHPKIKKVTAIG

SEQ ID NO: 50474 - protein, 366 aa, unknown
  TnpB Polypeptide
MRKTYKYKLFPTGKQRKALRFSLDACRWVYNKTLEARKNAWEKRKASLSLYDTSKFIPQWKEENPNLSNAFSQCLQNAQQRVDLALKAFFRRVKAGEKPGYPRFRSFDRYDSFTFPQFGFEMTGNGLKISKIGTIKIKLHRKLLGEIKTCTIQRSSTDKWYACFSCEVKPKPLRKVKKVVGIDMGLESFATLSTGEKIENPRFFKTDEAKLKKVQSKLSKAEKETPNRKKQRNKVSRLHEKIGNRRKDFAHKLSRQFVNKYQVIAFEKLNIKEMRENGFKGIRKSIGDVAWNQFIQFTTYKAEGAGRTVVFVDPHNTSKMCSRCGQLVEKKLSDRTHSCSCGLVLDRDHNASLNILRLGMESLALA

SEQ ID NO: 50475 - protein, 268 aa, Symploca sp.
MLVLEYKVKAKQAQYRAIDEAIRTVQFIRNKCLRYWIDMPKEAKIKRFDLNKYSTELRNEFRFVKDLNSMAVQASAVGEAPRRVRAWLAISHFYDNCKSKKPGKKGFPKFQKNNRSVEYKTSGWKLNITKRRITITDKKGIGELKLLGKWDIHTYPVKSIKRVRLLRRADGYYCQFCIDVDCIDVQPKTGNEIGLDVGLESFYTDSNGYSEPNPRFLRKAESDIKKAQRRIYKKKKGSTQRRKARARYSRKHLRVSRQRNEHGFWTSA

SEQ ID NO: 50476 - protein, 151 aa, Okeania sp.
QKAQLKIAKLHTKVANIRRNALHKLTTYLAKNHGRVVIEDLNVSGMLANHKLAKSIADQGFYEFRRQLEYKCQWYGCELVVVDRFFPSSKTCSNCGHVQDMPLNVRTYECDDCGISIDRDLNASINLRNAVGLTVNACGRSAADSSGGSRK

SEQ ID NO: 50477 - protein, 514 aa, unknown
  TnpB Polypeptide
MELSRTINSDKRYYLDENTIENAASFLQTMRVFNDAKMDLYNALYDQKYLASGPLIDHAYPVFLKEKYKTNDYYNAAIYSAASGSLSSQKELKKYYSTTITADLKTRDEKIQTIQEALDKKKAVKNSIRIYRKDGRWITPYPRCQLKVKGLMIVLFNKTIVKLDEYERSVEADIRKLKTRLALVTEARKRKEKKLENIKNLLPERIVFGGKKLYSEKDTVGITKSAEDNKTSQKALKEWKQEFFEKRHQSMALPGRHTSKYGNFLCKYDGKDLSVTCIDGTTTVFHDFKLPRYNEAFQNNFTCKPEDRQSVCYNFTVKRDRKNRQYIIVSVTMKLQAYENSYYGNGAISMDINYDHFALAEIDETGKLLDQKMIRFDLVKKSTGQITNILGAAVKEVFNWCAEKDKRLIVEDIDLTIKLASRKYGNRKGNHHMTLFAYQRIASSIENQSLRREIAFCKIDPAYTSQMGKFLFMRRYGMSIHQAAAYTIGLVGMGLYDKLALALLLPLSGCVSIV

SEQ ID NO: 50478 - protein, 417 aa, unknown
  TnpB Polypeptide
MPTKTLEVQLVNPTANKSHKLTETRREYNRALQDAFSQHCETPSATNDVVVQYDLSGYAKNALKKYVPQLTGDSYDADELADDHPVKFTNEGFDIDHKPQNAFEWYLKVPHHEDYDLWLPAGINPDQRPLIEALSAGDAEPGEFRLLERDGAWYLHITVEFEVADADCSESDEITPVGVDIGEAALATVCHRDESGSPTAPTIWNDEAKTVRALRETYFTATRRLQKRGSEVLAETYGDEIWEQIDDIIHTVSREVVNHVASVDGGVIVLENLTYIRESMDYGAYMNRRLHGWAFATLHSQITYKAAEKGIEVVTVDPRNTSKECHACKKVGSRRHQATFSCTTDNCWVSEFHADVNGAVNIADRYPAGENHPQSDQHSGQKVAGNDSGGDGASLTGPQDSHADAEPQQVTLGTYAS

SEQ ID NO: 50479 - protein, 384 aa, unknown
  TnpB Polypeptide
MRRAYKFRAYPTRRQEQHATAMLDAHRQLYNAALEERREAWRHGVTIRYGDQSAQLREIRRADRDGQGRWSFTSQQQTLRRLDRAFQGFFQRVRAGHTAGYPRFKSAARWHSVDFVDGDGARWHDPQGRWARAYFQGVGQVKVNTHRPIVGNVKLLRCKREGRRWYVIVVAEQQAVPLPATGRQVGLDMGVARFATTSDGQVIGNPRFLAASTRDLAAAQRALAGCRPGSGNRRRAKRKLAKLHRKVANRRRDFHHQTARRLVDTCDTIAVEALNISGMTGSASGSIQRPGRKVAAKAGLNRSILDAGWGQFLVILLAKAEGAGRRVITVNPRDTSITCYLCGARCTRPGQDTVVCPTHGGMDADLNAARNILTRAGLGSGRAA

SEQ ID NO: 50480 - protein, 360 aa, unknown
  TnpB Polypeptide
MATFHKAYKFRIYPNKQQQELIHKTFGCCRFIYNHFLTRRKEVFEKENKTLNYNVCSSELTKLKKELVWLKEVDSTALQTSLKDLDSAFQKFFKEKLGYPKYKSKKNPVQSYTSKMNIKVFDKHIQLPKLGLVKYAKSREVEGKIIKATIRKNLSDKYFVSIVCEVDVQQLPQVENRIGIDLGISHFATLSNGEKIDNPKFLVKYQKQLVYWQRKLSRRTKGGKNREKAKLKVAKIHEKIVNCRKDFLHKLSSKLINENQVIAIEDLNVKGMMQNHKLARHIGDVSWSEFRRQLEYKAQWYGREIKVIGRFEASSQICSECGYKNEQVKDLSIRNWICSECGVEHDRDVNAAKNILKMAV

SEQ ID NO: 50481 - protein, 335 aa, unknown
  TnpB Polypeptide
LKQLSQEYIKIVNQLTKQAVDNDSFPKITTKNIQTSLPSAICNQAIRDAKSVFNKYRKTKKLSVLKKPVYYINNQNYTILDNAIAFPISINGKTKKTYFKAIPTEKDMKLIKKSKLGLMRIVEKSGKWYAQVSIQIPEQEDVNSENIMGVDLGLKVPAVCVTSTGKTRFFGNGRQIKYIRRKYQSRRKKLGKLKKLHAIKKLGNKESRWMKDQNHKISRQIINFAIKENVSAIKLEILANIRQTTRTSRKNAKNLHNWSFYQLQKFIEYKANLAGIKVVYVNPAYTSQTCPCCGTRNRADDRKYECSCGFKTHRDQVGAINIMRQPVTDGNSLSA

SEQ ID NO: 50482 - protein, 447 aa, unknown
  TnpB Polypeptide
MVDANRTIPIPVNPNEEQQECICHTLQDYQYCREQTVEYCWDNPKQPSDLVTSKSQAEKALYHELRDEANEELHANLVQKAIQDVTSAMSSLKTDWKKGERISKPEWNIDEEWAMTYDTKAGTFSKHDAEFSTTTENVTLQYETPARPENTPYGEYVLSNEWSRTTSKLVYDHGQYWLHLTVKRDLSEQHWTQRDDVQVSDTPEEDTSRVLGVDVNVKGYTAVTSAGGFHGNADQLNHRRKQYEQLRGELQETGTRSAYLKMHERSGTESAWFDQYAREVTNNVIDDALRTRATHIVLETLTGIRKRMSNQPKYQQWLFKRIQQYIEYRAVEYGIQVVFVNPKNTSKSCSHIGCGHTSDSNRHGKLFDCEDCGRSWNSDYNAGRRIGLDWLFENVVDTSNSSNSNTSSNSSSGNNSGNNSGNSGSSNSSSSVPACQMCSAGKAKSLS

SEQ ID NO: 50483 - protein, 433 aa, unknown
  TnpB Polypeptide
MRQVERHWIKEGHTLYPICDDLTFKAKNLYNAGLYRIRQSIFERSKYNNKEEKPSVLSWIELVSQFRKEKQSDMLALPSKVSTNILKTLGSSINSYYQLLKCFYDKSNTSLSSKPQLPQYLHKTKGRYIVEFTNQTFSKKRGLNGELILCPKDFSLVIPTKVKNPKCVRIVPKLKAFVVEVVYEVKPTPLKHTENYAAIDLGIDNLASVTFSNNVNPLLVKGSKLKSINQGYNRLIAKATSKLPMSQKTSQHILRLWKNRELKLQSELHKITSFLSFYFDEMAIETVFVGKNLGWKKEVSLGKKNNQTFTQIPFNTFISQLTYKCLTRGIKVVEQEESYTSKASFLDEDEIPVYGKNVQTKPQFSGKRISGGLYKTKDGKVLNADVNGSYNILVKGLLSSGKTLSRKEVSFHTRSLRSNLTSASNANLLLQYM

SEQ ID NO: 50484 - protein, 396 aa, unknown
  TnpB Polypeptide
MQTVRIYRLTYLSPILFGHLKAAQMEAAQVWNQCCELHKQARTTHSKWPGQNELQQATKGRFALHSQSVQMIAHAFVATIDATRQLRATHPKMRMKYPYKTKRFYPVHWPAQAVSVERGRVVLPMGRGRASIVLHLDLPEHSGACTLVWNRGFELHVCIEVPQAKHAPGTNKATVDLGEVHLAAVTTNTGAALVVSGRGIRSLKRQRNMRHRQLARKQARCQKYSRRWKKLQRAKNKMAGRIERRVRDLRHKATRRVIAFCKEQQVGTLFIGNPHGVRNENKGRHHNQRMAQWEYGKDKQYLHEKCAQVGIVCFSGSERGTSSHCPRCDWKKKPKGRNWTCRRCGFVGHRDIVGSMNMHPIAFGSRIAYPTSLTYRRPGPLRDRRQDKELLPSGTS

SEQ ID NO: 50485 - protein, 401 aa, Nostoc sp.
MKHAVKVRIYPSDEQQVALSKAFGCARWFWNNSLAMTNQIYKETGKGLSQQGMNDRLPALKKEFEWLSEPYSQVLQSVSLNLSRAFINFFEGRAKFPNFKSKQGKQSIQYPQNVQITHEGLKLPKIGIVPAKIHRVLEGKLKTVTLSLASSGKYFASLLFDDGQPEIEQSSQGKAVGIDLGLTHFAITSDGSKFDNPRVLKKRSRNLKRKQQKLSRKVLGSNRRKKARRIVARVHEKIANTRQDFLHKLSRKMVNENQVICLENLAVKNMVKNHNLAKAISDVSWGEFTTMLEYKARVDGKCYVEVDRFFPSSKTCSVCLNQVGSLPIEVRSWQCKNCNTKHDRDVNAAINIRDEGLRILALGTSATAKGGSVSPKVGRRKSSVSKATPNEFGSPIRHAVG

SEQ ID NO: 50486 - protein, 340 aa, Thermococcus sp.
VVEAEATELLERRWEKKPLIVLRNDQYKIEGNRLILKRPRQVQNASKSSLRGKYTSKAKQGRLEITYDTVKRKWYAHISITVEEKLIGGEWIEVPRKPLGDLSAGIDLGVNNLMAVYVENGESFLVNGRPLKSIAFYWRKRIADYQSKLNRSGAKRSRKLKRMHGKAKLQAKHYINTAVRQTVEKLYHLGVSRIVVGYPKGIARNSEKGKRQNFLLSHVWRFNTVIQRLKEVAEEYGIVVQVVNEAFTSKTCPVCGKPHEGARFVRGLFKCPATGLDFNADLIGAFNILKKAVEKITPNLGGLYAQRRGNGGKTLPEGSKTRFNLGLNETPQTSLPMARG

SEQ ID NO: 50487 - protein, 424 aa, Halobacteriales sp.
MGDNAPRRTVPIKLDVPDERRDSLHQTKDQFLQCANRTSEWAWRYDDYCITSKSKAENALYDDLREETDLTANLVQKGIRRAIEAVDSGVEKLTQGEKTSQPEFDSWSVVYDKRSATFNADHATLSTPNGRVTAEYVRSPADEREGTPFGRYYESDDWDASSATLQYDEQEDTFSLHVTLKNPDYKVDGTERQEVGSPDDHDKNGTVLGVDLNVTGAFAVTSTGAFIGSADYLTHKRNEYEQRRGRLQQTGTRSAHLTIKSIGSRFSDWSLDWLHNRANDLIEEAHDAGADGIIFENLDYIRENIANGSQFQQWAYKKFVELVEYKVESTPLFVDFVNPAYTSQRCSQCGFTHEDNRDDKRFACQDCGYEVNADYNGAKNIANRYCGYIHRGQKSRGGWATSQLALKSGTLNVNGDYTPAELLG

SEQ ID NO: 50488 - protein, 343 aa, unknown
  TnpB Polypeptide
LKKARLQKHITKLKKVPKFSYFLEFGSQAVQNVTERIEFGYKKFFCKENKRPPKYKKVNKTKSFTLKQAGWKLDEDNHAITINGQKYRYHKSREIEGTIKTVTIKRDAVGDIYVFFVCQVKQNIVIPRLGKSIGFDFGLKDHILIAPTEEDDVDIPRFLQQNRNKLRKMQKKVSRKLLANTDQFVKKGKGLAPVYKKPLHECKNIQKCFKKQARLHRRIANQREAYHWHLAYELCNKYAIICLESLNMKWMQMGHGKKIGDYGFSEFLTILKYVASRCGTTIVQIDKWYPSSQLCHNCGYQNKYIKDVRIREWTCPKCGKHHDRDRNAAINILKEGLKQLKVI

SEQ ID NO: 50489 - protein, 237 aa, unknown
  TnpB Polypeptide
MMKSFKVKLVPNNRQRTRLFQFAGTARFAYNWALRKEIDAYEAGEKFISNFDLRKEFTVMRNSAEYPWLRTISNNVTKQAIKDCVDAYQKFFKKQSSRPRFKSKRRGDFSFYQDTDKIRITATHVKLEAIATSKKRNKQQLNWFRLAERGRIPLGVKYKEPRITFDGLNWWLSVAVEFAEPKPAENCTETLGIDLGIKNLATCSDGTTYPNINRTSAVRRLKKKSVGCNALFLENTR

SEQ ID NO: 50490 - protein, 397 aa, unknown
  TnpB Polypeptide
LKGLNTSKDAGKLVKLTKLNRTVCVRLLVNPEDSVKLSETHALYRDACNFVVPIVCKNKELRLWQRFSLHHAAYPQIREIFPALGAQLACNVIRSVSSTYKTELANHPLQLKQSELKVIRFKNPSVHLDKNTIMYRDNGTVSLYTLKGRVEATLAPGDRQLLLLASGKRKESNLVLHRSYGKRPDCWELHITVENDVQPVSPAELQTKEVMMGVDVGENNMAAASTGKLWKAGKLKHNRDRKQSLRTRLQRKGSRSAKQHLRKASRRERRHVAHVNHVVSREIVNEAKSKNMKLIILEDLTHIRERIKANLRVRARLHRWPFRELQQMIVYKAVQEGMEVMFVDPRYTSQTCARCGKLGARKKHRFQCSCGYRAHADLNASRNLLGLGYLRMSQGLQ

SEQ ID NO: 50491 - protein, 512 aa, unknown
  TnpB Polypeptide
MEMVERGEVAQIIIAHKDRLVRFGYMKKTIKNYCFNATQSKLNELYEIALRYTSVKNEIFQRYGSISGLNYLSYPRQIRNEWVKTNYANKFGLQARYWKQAVDEVFSNIKSNWSNGFRKIKNNIYKNKNYTEVEKHYAFYLLKASILLYKAITFQSFDLPEIFKDKDIRRDKIHKYLKSRLRKYLRTKSYQNKNRSFQIDRNMYDIHKDNKGRTWIGIMGLTPRKRVRLQMTSSTESTGNLRIVLKGKHIEIHQAEDIQVNPIEGKDKRAIDKGFSEVITSSSGRKYGEQFNQLLKKESDRLSEKNKKRNKIRALTDKYEKKGDIVKSEIIKKNNLGKRKYFYQKEINLNEIKQFINLSLNRFITEERPAVMVTEDLRFTNWNKKLSKNVKRYFSSWLKGYLQERIDYKVMLNGVQQVVVNSAYGSQICHLCGRFGVRNGDKFYCEVHGVLDADHNAALNYLARMSDPDITVYTPYRKVKDILQERLRLSNQDSRYSVIKTGQSESERTDYV

SEQ ID NO: 50492 - protein, 395 aa, unknown
  TnpB Polypeptide
MLIRKTFKYRILDPSKQVSSKLDWVLWKLRTLYNDALTERRLAYSMRGVSISYYDQANQLPEIKEALPEYAEIGSHVLQDTLRRLDKAFQAFFRRVKRGEKAGFPRYQGRGRFDSFTYPDIAGWKLEGDVLTLSKIGTLKIKLHRPIEGRIKTVTIKREGEHWCACFSVEIQQEVAPVAIKREVGIDMGLEKFATLSNGEQIANPRFFRLSADNLAVKQQALSRCVRGSNRRNKVRKQVAAWHRKVANQRRDFQHKLSRRLVDTYDAIYVEDLQITNMSKRAKSKVDEAATDIQGETVYAHNGASSKSGLNKSIADAGWGYFLQMPTYKAANAGKLLLKVNPKYTSQACSGCGTVVKKELSTRWHSCECGVELHRDHNAALNIQRLGTSPRLSSA

SEQ ID NO: 50493 - protein, 435 aa, Psychrobacter sp.
MKINKAYKFRLEPNVEQQVILNNLVGSARFVWNQVLAVSFEMFAKNEFINATNLVNKIMDIKANPEFAFLKTSSNAVSLQQKIRDLASAWSRFFDSKVHARLKENKKKPKKPKFFKLADGTEIQLRPLMPRFKRKSDGCDSIRLVQFDKYCRVEGNRVKLPNGVGFVKFRKSQDILGIIKNVTISKKSGHWYVSFGTERELTENPTHPSTSAIGIDLGVTKLISTSDGQYIKPKNSFKANQLKLAKLQRGLAKKVKFSENWKKQNRKIQKLHHHIANIRHDYLHKVTTSISKSHAMIACEDLKVANMSKSASGTVENKGRQVKAKSGLNKSILDQGWGMMVNMLEYKQQWHGGLLIKVNPRYTSQTCFECKHVAKENRRTQAKFECVECGYIANADVNAARNILAAGHAVLSVEGRCSKGRPLKQKTCDGREKVA

SEQ ID NO: 50494 - protein, 373 aa, unknown
  TnpB Polypeptide
MQIAKKIRLYPNKEQEELFWQFAGTSRWAWNESLAYRIERYDKDGSSTTVQQGIEHIQDLKHNNPDYDWVNSIPEAITKQAIKDLDKAYKYFFKSGFGKPKFKKKGKCNISFYQRTDNFHQIDDTHIKITGIKSYIKIKKCTIPNKVSNTRVSFDGKYWYLSYAYEIEEDINNGIEELGIDLGIKDLAIVSNGKKFKNINKTQTVKKLEKQKKRLQRQVSRKYEMNKQGKKFIKTENIKKLEQKIRMIDRRLATIRNTYIHEVTKDLVRTTPKKIVIEDLNVKGMMKNKHLSKVVANQCFNKFRQYLTYKCQMNGIELVIADRWFPSSKKCSCCGNIKKDLKLKDRTYICVACGLKIDRDFNASINLSKYQIA

SEQ ID NO: 50495 - protein, 404 aa, Proteus sp.
  misc_feature (75)..(113): Xaa can be any naturally occurring amino acid
MKRLQAFKFQLRPNGQQEREMRRFAGACRFVFNRALARQNENYEAGNKYIPYTKMASWLIEWKSDTETQWLKEAXXXXXXXXXXXXXXXXXXXXXXXXXXXXXXXXXXXXXXXYPQGVKLDQSNSRISLPKLGWMRYRNSSEVVGEVRNVTVSQSCGKWYVSIQTEYEATEPQPESTSIVGLDAGVTKLATLSDGTVYPPVSSFKVNQRKLARLQRKLSRKIKFSANWQKQKRKIQRLHSHIANIRKDYLHKVTSEISKNHAMIVIEDLKVSNMSKSAKGTTERHGRNVKAKSGLNRSILEQGWYEMRRQLEYKQLWRGGQVLAIPPAYTSQKCACCGHTAKENRQSQSQFECLECGYTANADINGARNILAAGHAVLASGGRVQSNRPLKYEPIEVIKSSLFS

SEQ ID NO: 50496 - protein, 434 aa, Proteus sp.
  misc_feature (182)..(186): Xaa can be any naturally occurring amino acid
  misc_feature (232)..(291): Xaa can be any naturally occurring amino acid
  misc_feature (314)..(319): Xaa can be any naturally occurring amino acid
VTKTKWTCIRNTQCLPRRILVSFFIHQSIIGNMKRLQAFKFQLRPNGQQEREMRRFAGACRFVFNRALARQNENYEAGNKYIPYTKMASWLIEWKSDTETQWLKEAPSQPLQQSLKDLERAYKNFFQKRTAFPRFKKRGKNDAFRYPQGVKLDQSNSRISLPKLGWMRYRNSREVVGEVRNXXXXXSCGKWYVSIQTEYEATEPQHESTSIVGLDAGVTKLATLSDGTAYPXXXXXXXXXXXXXXXXXXXXXXXXXXXXXXXXXXXXXXXXXXXXXXXXXXXXXXXXXXXXLNAMIVIEDLKVSNMSKSAKGTXXXXXXNVKAKSGLNRAILEQGWYEMRRQLEYKQLWRGGQVLAIPPAYTSQKCACCGHTAKENRQSQSQFECLECGYTANADINGARNILAAGHAVLASGGRVQSDRPSKQEPAEVIQTSV

SEQ ID NO: 50497 - protein, 398 aa, Proteus sp.
  misc_feature (186)..(225): Xaa can be any naturally occurring amino acid
MKRLQAFKFQLRPNGQQEREMRRFAGACRFVFNRALARQNENYEAGNKYIPYTKMASWLIEWKSDTETQWLKEAPSQPLQQSLKDLERAYKNFFQKRTAFPRFKKRGKNEAFRYPQGVKLDQSNSRISLPKLGWMRYRNSREVVGEVRNVTVSQSCGKWYVSIQTEYEATEPQHESTSIVGLDAGXXXXXXXXXXXXXXXXXXXXXXXXXXXXXXXXXXXXXXXXANWQKQKRKIQRLHSHIANIRKDYLHKVTSEISKNHAMIVIEDLKVSNMSKSAKGTTERPGRNVKAKSGLNRAILEQGWYEMRRQLEYKQLWRGGQVLAIPPAYTSQKCACCGHTAKENRQSQSQFECLECGYTANADINGARNILAAGHAVLASGGRVQSDRPSKQEPAVVI

SEQ ID NO: 50498 - protein, 402 aa, Proteus sp.
  misc_feature (39)..(46): Xaa can be any naturally occurring amino acid
  misc_feature (243)..(246): Xaa can be any naturally occurring amino acid
  misc_feature (271)..(283): Xaa can be any naturally occurring amino acid
MKRLQAFKFQLRPNGQQEREMSRFVRPCRCFFNRALHRXXXXXXXXNKYIPYTKMASWLIEWKSDTETQWLKEAPSQPLQQSLKDLERAYKNFFQKRTAFPRFKKRGKNEAFRYPQGVKLDQSNSRISLPKLGWMRYRNSREVVGEVRNVTVSQSCGKWYVSIQTEYEATEPQHESTSIVGLDAGVTKLATLSDGTVYPPVSSVKENQRKLATLQRKLIRKIQVSANWQKQKRKIQRLHSHIXXXXKDSLHKVTSEISKNHAMIVIEDLKXXXXXXXXXXXXXRHGRNVKAKSGLNRAILEQGWYEMRRQLEYKQLWRGGQVLAIPPAYTSQKCACCGHTAKENRQSQSQFECLECGYTANADINGARNILAAGHAVLASGGRVQSDRPSKQEPAEVIQTSV

SEQ ID NO: 50499 - protein, 414 aa, Catellatospora sp.
LVFVQLRYNFRVYPTPGQQIELAKAFGCARVVFNDGLRLRQQAREQGETYMTDAELSRRVITEAKQTEARAWLAQVSAVVLQQALADLNTAYRNFFSSVTGRRKGRKVGPPRFRSRKDNRQAIRFTKNSRFRVCDNGRLRLPKIGDLRVRWSRSLPCDPSSVTVIRDAAGRYFASFVVTAGADQTLPPVACEVGIDLGLTHFAVLSDGTKVTAPKFLRRAARKLRRLQQALSRKQKGSANRRKAVVKVAVAHARVADTRRDWQHKLSTTIIRDNQAVYVEDLCVVGLGRTRLAKSVHDAGWAGFTGMLEYKAARYGRTFARIDRFAPTSRTCSACGRVDGPKPLSVRSWTCPCGTVHDRDVNAAINVLARGRRDNSNACGAQVRPASVSAPRREAGIHPDAARSTRSVEGISVL

SEQ ID NO: 50500 - protein, 413 aa, Catellatospora sp.
VLLVQLRYNYRVYPDTAQREALSRSFGCARVVFNDGLHLRQQAREAGEKYLSDGELSRRLITEAKATEERAWLGEVSSVVLQQALADLNTAYRNFFASLTGKRKGRKVAPPRFRSRKDNRQAIRFTKNSRFRVLDNGRLRLPKIGDLDVRWSRTLPADPSSVAIIKDAAGRYFASFVVQTAEDETLPEADSEVGIDLGLTHFAVMSDGTKVAAPKFLRRAARKLKRLQQDLSRKQRGSQNRKKAVVKVARAHARVADTRRDWQHKLSTRIIRENQAVYVEDLCVVGLGRTRLAKSVHDAGWASFTGMLEYKAARYGRTFARVDRFFPSTRMCSACGRINENMALDIRAWDCPCGAAHDRDVNAAINVKAAGQADFNDRGAQARPGLVPAPRGEAVTHPDVACSTRSVEGISVL

SEQ ID NO: 50501 - protein, 400 aa, unknown
  TnpB Polypeptide
LAVKSVWQHYAPTLEVLEPLEVFRRMVNESIRIGLANDVSSLRRLSLVSYSQLAQYDSPSCYKLCAISRAAGILAARKKSLKRGLPTRTPYSVRQQLVSCYSFKTKNRGLEIPVARGKRLSTPLTNHTIDIISRLMVKVRSFTLTKNRLCLCIARDVAVIECASTVGVDRNLLNLTVGNDEETRTYDLSETVSIASTTMRIVASFKRDDVRIRRVIASKYGLRRTAGTGHFLHTSTKTIVAAAVQQGQALVLENIQDIRALYRKGNGQGRKYRGRMNGWSFSEAQRQIEYKARWAGLPIIHLSRRETRGSSVTCPRCGERLQSDKRLARKLWCGNCRIVMDRDRVAAVNLARRGRVRFARSRPPILLEAQGGAVEAVKGNPTPTVIPGVDAPKLTQPTKS

SEQ ID NO: 50502 - protein, 270 aa, Pseudanabaena sp.
VLLGRLCYYLSILSDNTVDKICYNCSMIVREAKLKNGTKEQYSALDEAIRTAQFIRNKAVRFWMDNQGVSKAVLYALSKDLAIEFPFAKKLNSSARQASAERAWAAISSFYTRCKKGEKKKGYPQFKKYCRSVEYKVSGWKLSEDCMHITFTDGFEIGTLSLFCDNKTRADLHTLKINRVRVVHRADGYYAQFCFDATRKEEGEYTGNAIGLDLGLKYFTKDQNDNAVVYPQFLRKSERQLKKGAETIKQKSLLKVLNLNPTIITKHGND

SEQ ID NO: 50503 - protein, 409 aa, Frankia sp.
VRRAFKFLLRPTARQATALTAMLDDHRALYNAALQERRDAYRHPSKVTVRYGDQSAQLREIRACDPDQGRWSFSSQQATLRRLDRAFAGFFRRVKAGETPGYPRFRGAGRFDTVEWPRDGDGCRWNSQPEHPTRTRTRTRTRTRVRVRLQGVGHVKVHQHRPVAGTVRTVSVKREGRRWYVVLSCDDVPARPLPATGVAVGVDMGAASLVTLSDGRQVGNPRFLAAAAGRLARAQRELARKKRGSTRRRKTVAKVAALHRRVRRQRLDLAHTVARDLVRDHDLIAVEALRIVNMTRRAAPRPDPDRLGAFLANGQAAKPGLNRSVLDAGWGVFLAVLRAKAESAGRVVVEVNPANTSRTCAVCGHCHADSRRTQAAFVCVACGHAAHADVNAAINILRVGLARQGAEAA

SEQ ID NO: 50504 - protein, 133 aa, Lactobacillus sp.
VQRLYQRLTNIQIDYQNKLIATVVRAKPQWVALEDLNVGGMLKNRHLAKAIAQQGFYNFRVKLITKCQQLGIPVHLTGRFEPTSKLCHQCGTKKVSLKLSERTYHCPNCHYTNDRDLNAALNIRDTENFALAY

SEQ ID NO: 50505 - protein, 269 aa, Lactobacillus sp.
MTLKGIKLRLYPNQEQQLKIKLNFGYNRFVWNQMLAMMVERYQNNPEAKFLNAFALNNLLPALKTEYEWLKDAESTSLQSTNHDLVESYKQFFKLHKGFPKFKSRKYPKQSYQTKSVNHNIKLVDNHHIQLPKLGKLKFKSGRKPVGKIKNVTIRLSATGKFYAIILVDTDINPLAKTGNPVGIDLGVADLMITSDGVKYPTIRFDKRLSKKKHYWEKRLARRRLQAQKEIAWDKHNKVIEPRELSDFKNHQKAKRMVAKYAEKNSQST

SEQ ID NO: 50506 - protein, 394 aa, Richelia sp.
LLVLEYKIKAKSSQCQAIEDAIRTTQFVRNKCLRYWIDAPKDSKINCFALNKYSTELRNEFKLVAELNSMAVQSSAERAWLAISRFYDNCKKKVSGKKGFPRFQKDNRSVEYKTSGWKLHPIKRRITITDKKGIGELKLLGKWDIHIYPVKSIKRVRLVRRADGYYCQFCIDAQSTDIQPKTGNEIGLDVGIESFYTDSNGHQEPNPKFLRKAEKSVKHAQRRIYKKKKGSSGRKKARAIFARKHLKISRQRNEHAKRIARNVCKSNDLVAYENLQVRNLLKNHCLAKSISDASWYLFRQWIEYFADKFGKLAVAVSPHYTSQKCSNCGAIVKKSLSTRTHICSCGCNLHRDENAAINILNLARQARTGHVQSNAVGLVTSTLLGESLLEQVTR

SEQ ID NO: 50507 - protein, 423 aa, unknown
  TnpB Polypeptide
MPAAEGSIHRMSDATEFRSVTYRLHPGTRTRHRKLLQTAGACRYVWNHFLACNRRDYATYKLRKALFDAGLVLEKPSPPPVSFQSMGVRFTALRRETPWLQRLPYAPVRYALKYQAEAWKRAFAGGGFPRFKARRGDDSFTIPQDVRVRDGVLSVPKVGRVRLSRRGGNPYAEYPPVKVTVKRVNGKWYCVVVYRLSAVARPDNGLALGVDMNCGQVAASTGELLHMPDMARLQARKRRYQRMVARRRKGSNRRNLARHRLARTQRRIATVRHRWHHETSRVLAGTAGLLAIEDLKTKAMTRSARGTAEQPGSNVGQKAGLNREILNTGWSQLRRMLEYKAALVEAVPPMYTSQRCRRCGRVDPASRKSQSEFECVHCGHKGNADVNAALNIMASATGAAGRRGALALATPKNRQHVCKRRAA

SEQ ID NO: 50508 - protein, 566 aa, Mycobacteroides sp.
MTDSGLRKWREVKPVAAAAGVAIETRLRTTVVDDRVLDVVAEHLGRLRRADLAAVSRPVPIDAGLDAGERRQVRRGLLNARKRALTALSSARWASAIIAGSDDQYRLAREAQYRHIGGLRAAIATIETRLTATTSDMLTVSERKTRRSTNAPKGYANQAERFQKQRRAQHLRAELAAAEHDRAVGVVHVVEGGKRVAHTRHHLDKAGLTEAQWRQRWDASRWRIRSTGSPDEPFGNLTITVTPAGQVSIRLPKPLEHLANAPRGRYVLSGVAVFSHRGEAWVQRITGGNSIAYTITRKAGRDGVYLTGSWAIPALPYWSGRDDCEADGDVHATGPVVGVDLNDGHLAVRRLDRHGNPVGAAGRIDFDLTGSTTRRDAQVRHAITQLLHYTRRHGITTIAVEDLDFADARATGRETMGRGMRGKRFRRTVSGIPTAVFRNRLTAMTTAADIDLFGVNPAYSSIWGGQHWQHPYLNVSRHQAAATVIGRRAQGLSARRRKGVTPQRPEDRPVRATNQTGPNSPAATGGRREPGTRGTTPRRPHSTRTRQPGRATVTPAPLGNHGQQQL

SEQ ID NO: 50509 - protein, 535 aa, unknown
  TnpB Polypeptide
MKERMDARRPRQLEPSRRDRNRQPSGDAVPPGAGRLAVLDDLSAPGFRRLGGRGFQHARQPLEFGFHKVAQGPVFPIRERLEPRLQFGVDYDVQVRLSHVATLYKLCYGDCMVTQRAYKFRIYPTAEQQRQLAIEFGHNRFIWNHCLDLRTRDYESYKTAIAAGVADAVKPTWNYVSLSRHVTELKRGEFPWLSDATASTLTQTLIDQDKAFDHFYRRVKNGEKPGYPRFKSRWDRQSIRYPLDQRQIQNNYLAGELLKLPKLGAVNVRWSQVPAGVPKMATVSRTPDGRYFVSFACEVEIQPLPKTGIVIGVDLGIKDVAVTSEGDKTGNPRHLKRRLKHLKRQQRRLARMQKGSHRRARQRAKVARIHARIAASRADFLHKTTTALIRKADGIAIEDLHVKGMVKNHHLAGAIADVGMGEFRRQLEYKAAWYGREIEAINRWAPTSKTCSECGSYQEKMPLRIREWTCPDCGTRHDRDINAAKVILSFSTLGNRGLQARGAGKELVRHVPDTRDEARTDAEKFTEADRMDRAA

SEQ ID NO: 50510 - protein, 380 aa, unknown
  TnpB Polypeptide
MGGRLGMLSTLNYAIRVEVSPEQSQTLSDTCDAYLDCCNMVSKTAWEHRTISQKTLHQLAYRKLRDEYRVGAQMAQSSIIRVIGNYRTIKEMHGSPWATSQPEYHSPGYDLVWNRDYSILKDGRLSINTLDGRIKVPVDWSHVPEAYRHGKFGTARLLNRGGKWLLFIPSTVELPDPAQPQQVVGLDMGVRFLATTYDSDGSTVFYDGKEVKRKREHYKKLRASLQKKGTRSARRRLRKIGRRENRWMRDVNHQVSKALVNRQSKPTLFALENLRGVRRATEKVRVQDRYVQVSWAFYQLRQMIEYKAKKAGHSVIVVDPRYTSQTCPACGLVRKANRRKKTHEYHCSNCGYRSNDDRVAAMNIQRLGYQSIVETQSDKL

SEQ ID NO: 50511 - protein, 426 aa, unknown
  TnpB Polypeptide
MLVQHRVVTEFRSYQERVKAANGESSKYVSQGWKRTVDKSAPSYGEDYVNLGAVDRNYALIENNPFADGEIVLRMVIQGAWYRLIFNFDNTRFTEGRVTLPVIKVQDGEPVFIFTVVTDNPVVQFSGDYTIGVDVGITDYATVVVRDVKTGRLAYKTTLSQRVHSLWNSVRASQRQVRSLRRKAGGLLSQRQERMSALDEAQLHREAASRKKRELAILAAQEIADLSHLWGNAVVAVEDLGWVANTMQNGRWNRGELVRWITHYVSQNGGWVVAVNPSNTSQKCHVCGQRVSHPTHEVSVCVEHGVMDRDVNAAANIAARAVPRVVKARATRAKNRKLQPQAPLKTPVARNSLKYPGRGRAKNGPTPKGKNHRLISKEVILPVRPARAQTHSLEARVLADQGARSALGTSRAALKQGCVTYRCMLL

SEQ ID NO: 50512 - protein, 155 aa, unknown
  TnpB Polypeptide
LKKRNKQKGGNATRQNIQKQILTVQRLYNRITNIRTYYINKIINNLVKTKPKFINIEDLNISGMMKNRHLSKTISEQKFYEFRTKLINKCHQNNIEVRLSNRFYASSKICSCCGSPKKDLKLSDRTYKCLQCGLIIDRDLNAAINLRDNQIYKIA

SEQ ID NO: 50513 - protein, 411 aa, unknown
  TnpB Polypeptide
VTQLVLKAFKYRIYPTKEQSSFLDRNFGAVRFIWNQFVASFNHNFDGPCMPQNEKFIKDLPGKEFLTEVISYGLQQKRMDWIEFKKQFFSKKRAVKLGRPKFKKRGVSNDSFRIPGQCLKFNECVNFETSRIKLPKMSPIKLVIDRPFSGLLKSVTVSKNKTNQYFVSILVEEPLELKQNTGRSIGIDLGLKDLAIMSNGMKISNPRWFRKTQAKLKITQRAFSKKVKDSSRYKKMKFKVAKLYQQVTNQRKFIYHNLSSWLVNNHDTIVMESLKVKNMIKNRKLSKSIQDASWSTLIGMIEYKSRWYGKTFHQIDTFYPSSKTCSCCGHKLESLDLSIREWACPSCGTKHDRDLNAAVNILSKGLNDLYSLTSEELSDYRRRESLNPKVEIPKVDSLKRLVSFIDFYKTA

SEQ ID NO: 50514 - protein, 267 aa, unknown
  TnpB Polypeptide
VEIFQDQRRRWFVAITCEVPVPPYVDNGRYQAIDLGVINLVTAVNPQGKFVQIRNRRPDLYWKDKLREVQSRRDHCRESSNRWWFYQRKLLKMRRKLANQLRDFQHKISKSVVMNTRANTIIVGNLVVKQMARKKQVSGCRRQDAATRTLHHSIQNTDFLGRFVQFLTYKAKKVGKRVIRIDETQATKRCCVCGTVRDRQLSERLIQCDCGTPFNRDQNAAVNLMVRFLLQQPPVNGEPLQAFLHGLHRHTALPHVPRVEDSMETTA

SEQ ID NO: 50515 - protein, 439 aa, Actinoallomurus sp.
VRRGGDGAAEWFSSDTRHDDPGLETRKHTPLPPLIVGGGGWRVGVRFRLAPTPTQEQALLEHCAHARFVWNLAVEQHAHWRPGRASAPGYAKQSRQLTEARREFAWLAAGSHTVQQQALRDLAQAMANLFAGTHRGPTWRKAGRHEGFRIVGKRGNQWDVRRVSRKSGAVRIPKVGWVRFRWTRTVPDEVKSFRVNRDGAGRWHVSFAVIPPPIGRPDTGEIVGVDRGVAVSAALSTGELLMVPGLREGEAKRLLRLQRRLARAKRNSNRRKRVKAALGRLRTRETDRRKDWVEKTSTDLARRFDRIRVEDLKIRNMVRSARGTVQIPGKNVRAKASLNRSIHAAGWGLLVTRLENKAPGRVERIDPAFTSQICNTCGYCASESRESQAVFCCRTCGHTDHADVNAAKNIAVGRTVTARGGWPLGGPVNREPQPVFSSV

SEQ ID NO: 50516 - protein, 285 aa, Actinoallomurus sp.
MADFFAGTHRGPTWREAGRREGFRIVGRRGRQWDARRLSRRTGEVRIPKVGWVRFRWSRAITGETKSFRVTRDRAGRRHVAFAAIPPPVDGPGTGEVVGVDRGVAVSAALSTGEVLSAPGLRETEGKRLLRLRLRLRRRPARARRGSNRKQRVKAAIGRSKARESDRRGTIDAPGRNVRAKAGPNRSVHAAGRGLLVARPRDKAPGRVEKVDPAFTSQICHACGYCDPGNRESQAVFRCRARARADHADVNAAKNIAAGRAVTARGGRPLGGPVNREPQPVFSSA

SEQ ID NO: 50517 - protein, 208 aa, Actinoallomurus sp.
MAVSRFGEVRIPKVGRVRFRRSRAVPEAVKSFRITRDGAGRWHVAFAAVPAPGTGEIVGVDWVEKTSTDLARRFDVIGVEALKIAAMTRSARGTVAEPGRRVARKRGLNRGILASGWGQPEHKALGRVVKVNPRYTSQTRNTCGHTARESRESQALFRCVACGHQDNADVNAARDIADSPAGRAVAARGGSISPGPTNREPQLLLLPG

SEQ ID NO: 50518 - protein, 419 aa, Actinoallomurus sp.
VLSDPAITVSAVEYRDRLTVVQAYRFASDPTPGQVRALLRHAGAARLAYNTGLDQLARALKNWSDFRKGERKGRRMGFPRFKSRRRYAPSVRFTTGTIRLEDDRRYVRLPRLGRLKTHESTRKLQRRIAEGRARILSATVRSEAGRWFVSFTVEVQRSIRAPARPDAVVGVDLGIRTLAVFSDDRPTATNPKHYDAARRKLTRSSRAASRKRGPDRRTGQQPSNRWKSANAARNRVHHRVTARRRDAIHKLTTALAREYGSIVVEDLHVAGMVKNRRLARVISDAGFGEIRRQLAYQTVWNGGTLIVADRWYPSSKRCSGCGVVKAKLRLSERVFTCGECGLSLDRDANAASNLASLVEHVVVAGSGPETQNGRGADHKTRPGRAGGCETSTPHRAAPAQVGRGPSPSDERITEIMRSR

SEQ ID NO: 50519 - protein, 575 aa, unknown
  TnpB Polypeptide
MQSTYQDRLTLDQSQQRWLSAFGELYGSLQRKLYARIAQGESTSAIKPEFCKEHGLSARQYNAMRMELEGKISGKIELLKVRKKDIAQSIKTTTRDVAQLDKRIAGQDKLLDNESKDIAKSKKPKALVFDLAYRDKLLQRRFGKATRLTVLNNKAKAVAGRLLANVPGICFGSRKLFKQQFHLETTEFGAGDAGHAAWKRAWRDSRSHQFFLVGSGDETAGNQSCKASVVHAPPTTEIAARPTLTLAIKMPAALIAKEAPKFLKIEGVHFEYGNEQVLQALANGTALTYRFHSDNHSAVGWRVFVSTDTIDTKLTTLQANLGTLGVDFNADHLAVAKTDRFGNAVQFWHFDLPFTSKASGQRDAILSDALDKVFALAKEHKCPVAMEDLDFSAKKKELTKLGMKHARMLSGLAYASYKQLSLAKASRLGVELIFVDPAYTSVAGSVKYAVRLGRTVHQAAAGVIARRAQGYSEKLPKSDAKGEYTFRAPLMGRMAVLTLPVESSKRTHVSLAVIRRSLSRHCAEQVRLRKESSNGRCKRANVSSNLLDEDPSSSREPVKLLDRRAIPPDFTDVPL

SEQ ID NO: 50520 - protein, 375 aa, unknown
  TnpB Polypeptide
MQLSETVKVYPTEYQKTLIIETMTEYMDTVNSLVCDAVSGHSIAKTTTADINVNLPSALANQCIRDAKSIVRKHYKFCHKAVLKNRSLAKRGSAVRTKAPNLPIVRKPCCYINNQNDKMKDNGMEFPVMRNGKSKRICVAVKLTERQKSLFSDVKFGTMRIVIKNHRLVAQIVYEIAEPEHKTDGNIMGIDFGIKCPAVSYCSDGSVKFYGNGRRNKYLRRQYAYVRKKLQTSKKRKAVKRINDKEQRIMRDIDHKLSHDIVETAVKHHVKVIKLEQLQNIRSTTRTSRKNNHSLHNRSCYKLAQLIEYKARLAGILVEYVNRAYTSQTCPICGHIHHANDRNYSCKCGFHIHRNLLGAMNICNATEFVGNRQTA

SEQ ID NO: 50521 - protein, 407 aa, unknown
  TnpB Polypeptide
MKIQLTQQIIINNKHRWYSMLDELCFKSKNLYNYALYQISQYYKNTNKYLSYYELNTLLSKENQIDYRSLPYAQCSQQILRQIDKQYVSFYKALKSPKMKGGKIRLPKYKDKENGRNIVTYTNQCFKLKNNILSLKINNYNKINIDTNINVQIVRIIHKGNHIVIELIYNKEYTLKEDNNRYAAIDLGLNNLATLTSNVCQSVIYDGKKLKNINHFYNKRKALLQSKLNGNKKTSNRIKRISYRRNNKIKDYMHKVSHLIVTYMETNNLNTLFVGKNSGWKEGINMGKTNNQNFVAIPYNLLISMLDYKCKLSGIKMIILNEAYTSKCSFIDNEKICKHKTYYGKRIKRGLFESKYGHKLNADVNGSFNIMRLGIQKCNCDVLNVVPADKRYVYNPVRIKINYISLR

SEQ ID NO: 50522 - protein, 528 aa, unknown
  TnpB Polypeptide
MLSVRRKQPLFLEDLDLDLLPYERGYLPLERGRLDVSVVDEVVLRVRGELPGLVHDELVVEDAVLLEPLARDLLVLRRPGGEEADEVPELEPLVDLHDDVGVCLGDPHPLDAVLVPDVLADGPVYVDDEDLQGRRLFGTPRRPSLFILSRRGSGPSSEMGGYIVKIAFQDMESVMAMRFRYEASEELSSLFEEFRLMCNDAIRIALEQKPKSRFMLIELAYPRLKEYGLHTHYILSACEVAYSACKNQKRKSRPCVRRPFIKLDSQTYTLNHLIVRIPTRPRHFIYLTLHSSDYHLSFVDDPRLKRGSITLTDSALAIAFTKKSVEISPRGRMGIDVNERNVTWADSAGTVRKEDTSVVAELKERYKALRAKIAQGTSKDRRIQRGLLSKYGRRERDRTAQAFHRVTKRIVEHAKANGQAIIMEKLKGIRKLYRRGNGQGSSFRGRMNSWTFREIQRQVEYKARWEGIPVHYVNPRGTSRKCPRCGSSLTELEGRRLMCPSCKQVEDRDDVAAMNLVACAVPQARPGG

SEQ ID NO: 50523 - protein, 404 aa, Symploca sp.
MKARYRYRIYPTVGQQMALAKLFGCCRVVFNDALAFCIEQYQKGEKKPKNGELQKRFITQAKKTLERQWLTEVSNIPLQQSLNDLEQAYQNFFKSCKGHRKGKPVRPPRFKKRHAKQSARFRQGGFKVTQNFVKLAKIGKIKIVWSRSLPVQPSSVTVIKDAAGRYFVSFVVEIASCVLPKTENSVGIDLGIATFATLDNGQKIDAPKPLKKRINRLRRLSKNLSRKNRGSNRYELARKRKAKLQAKLKDTRTDFLHKLSTQIIHENQTIVLEDLNVAGMLKNRKLSRALSDLGWRQFRTYLEGKAEKYGREFRVISRWEPTSQTCSCCGFRGGKLDLSIREWTCLNCGATHDRDINAAKNIKVAGGHSETQTGRGGKRKTFVKEAVSCETSTQREYVQLALFD

SEQ ID NO: 50524 - protein, 198 aa, Cyanobacteria sp.
MLVREAKLKKGTLEQYQALDEAIRTGQFIRNKCLRLWMDAENCTRAKMHALCKNLATEFSFARKLNSMARQAHADRAWQAVKRFYENCRNGVKPVGYPKFKKHSRSVEYKTSGWKLSEDGYYLTFTDGFGGGTFSLYCNGQAREDILRSKINRVRVIRRADGYYAQFCLDVERVEEGTYTGEVVGIDLGLKYFIKDQK

SEQ ID NO: 50525 - protein, 486 aa, Bifidobacterium sp.
MSQKVCIDGVKHAGASVFLGVDHCGNPCWTRNPERIMVWLCDGWRTRFNQRREQRTRNIPVKNEAGDIIDWVKEPLGGPDVSELLSDREARLQCSWIAAVPSSILASTDRIEGTEWFAGLKRKKTAGGRVPGFKSRHRGLGFVCWYRPSNHSYNAVFHRTGRKSGVVVITGMNPSRWRKPGEKLHWRVVIHVRVSQPIRPYTSVHVDWTHRMLVFVNMPLPLSRASAGEVGIDRGCVHTLALSDGTFMDMPKPSKAELKRLEYLQRRMARQDRVNEARGGRTAKFVSRRRRKTLNRFNALQGRIVRRRNDWIEKTTTKLAQENVLVAMEDLDVKAMTKRPKPKPDPDRPGQYLRNGAKAKAGLNRSILGSNWSRLRKRLKDKMDANGGRLVIVPAAYTSQTCHQCGHVASENRESQAVFHCVRCGHQANADVNAAMNILSRALDKTGGGTALDVEDPHWRPDEASTPSTRAGSSFGVRAVKGIPRL

SEQ ID NO: 50526 - protein, 478 aa, unknown
  TnpB Polypeptide
VIALPIHFFQLSIKAGTDLFEQLPQALDRILVEHGFSVFGDKDQMNVHHKNAMPTCSDIVDLCHRPNYSGVMKRLQAFKYELRPDGQQQRLMRRFAGSCRFVFNKALALQKERYEQGEKKLSYAGLCKELTQWKLDSATEWLAETPSQALQQSLKDLDRAYTNFFAKRAEFPRFKKKGVSDSFRYPQGCKLDQANNRLFLPKLGWVRYRNSREVLGTVKNVTVSQSGGKWFVSIQTEREVETPTPKGDAIGIDLGVARFAAFDRPLLAFEGEDHLKPLNSFKKHQARLRKAQRALSRKTKFSNNWKKAKARVQRIHAQIGNARRDYLHKATTAISQNHAMVCIEDLKVRNMSASAAGTLDQPGRNVRAKSGLNRSILDQGWFEFRRQLDYKLQWSGGWLVAVPPRNTSRTCPACGHVSAENRQTQAQFHCVDCGFKENADTVGAINILRAGHARFACEVSDAPRSPAAGTHRSDSAAA

SEQ ID NO: 50527 - protein, 421 aa, Endozoicomonas sp.
VTLPALSTLNEKGCKPFWNQQCAEIQSTLWLPQKTDSHDQDSSLSNGSLNYQEDKSKFWMTRMLPAKPLMHQSLSVSLPHSAIATMERVPLKGVKIVASKKIRFYPKNEIAYRDALALYRRSYNLAADRFRNDKYKDESGKFINMRPSIKAQVEQEQKDSGRTYNSLISDNGTLATATTFKAVCSKNKKLKGAKEGFSEVGFKSRKGSKHSFSIDRLPKGLNPCVNALGKIHLTENVPDEAIGKSCVITCDKGRWFIQVQQHIKLNTEIQGGVNCVGVDPGVRIFATCFSDKEALIVGDNLAKEKLFPLMKQVDKLIGQKQKVLNAQKGVKFHDMPQWAQNRIVHFDRKINHLKCKKDDIVLDLHNRLAFELVSRYDVIFLPTFRTRGMVTRKDKKVRTIRRNTCRQMLDLNHYGFKMRLK

SEQ ID NO: 50528 - protein, 474 aa, unknown
  TnpB Polypeptide
MEDGLLLKRLVKFMEYRETQFADGQILVLLSLKELQGVHAVILFLNKALLELKKVPQEKTIIYTLESHLKNREKTWIDKKPFFGISTQIILLLKTLDLDSITKEKDFLNYLNFQIKEKSEKLWYTVKTDYVDLDLNYSNSSSQKTIQNSWFTNKLISPQKKNFRKIFLPFYKYLHVDGMERENTKLIRTRKYRLKPNSLQKQLLQKHRNNYRWIYNKAVNILDSSQNKNQEFESLVSSLNTKKEKIEKSSSSNYYSKFELRNLIVPEAVNSRTPWVLESGFQIRANAVFEAHKNFKTNIDLVKKGKKKFFDIKYKTKKDKKWTIDVCKENINYKTYCNKTEFSLYEESGFIKSTEKFEINHDCSIHFDGIYYYLLVPYEKPVKESNSDNFFVSLDPGIRKFQTCYSPDSNINIIGVNASEKIYKLLLMIDKAISNKNKKLEIKLRIRVKNLQKELHDKTSRFLCENYKIFTFQK

SEQ ID NO: 50529 - protein, 409 aa, unknown
  TnpB Polypeptide
VILVEKHNINKSNSDWKQIDHLCFLSKNLYNHALYTIKQHFNETSKVLRYKQVDKLMQLNENYSLLPNNTSQQILMVLDKNIKSYFALLKMWKKNKKSLNGCPKFPKYKDKIKGRNLLVFTYQQFRLRDNKILLPKKCKLSNVTTKQNNIKLVRIIPQSDSYKIEVIYDKAIKENKNLTEKYASIDLGVNNLALIAIQNKPIIINGRPLKAINQYYNKKRASIQSKITQSYINKKGERIQQKTSKKLSDLTKKRNNKIEDYLHKKSRIVVDCLVKNKITKLVIGHNIEWKQEVNLGKRNNQIFVSIPFNKFIDMLKYKCELEGINVTIREESYTSKCSSLDLEELKYQNKYLGRRIKRGMFISSKGIKINADLNGALNILRKETGDKVFLEMKMQTQSSRGQVVWPVKI

SEQ ID NO: 50530 - protein, 409 aa, unknown; identical to SEQ ID NO: 50529
  TnpB Polypeptide

SEQ ID NO: 50531 - protein, 308 aa, Caldicellulosiruptor sp.
LPYKNKKYNKVVFKESAIHLRDNVLTFSNKKGHEAIFLKGVVMKTAPKYAELIYHHSKKRYYLHVVFEVEERKNEKGKGVLAVDLGVIHPMVCFDGRNILIYNGGVLNSKLRYRNKKIADIQQKLSLCQKGSKRFRKLEKAKRKVLRNVRNQIRDVLEKYTSHLIGYCVKKGIGTIVLGDLKGIRDRANHGKVTNQKVHQWVFKKLCKMIERKAQFIDISVQYVKENWTSQICPVCGSKNKPENRNYECSKCGFKYHRDGVGAVNIYKKYTGLDTLVVGVLASPTGVRYKAHLCCPAEWNIHPVGKTD

SEQ ID NO: 50532 - protein, 508 aa, Caldicellulosiruptor sp.
MLLTIKNVKELHAIRGVKDMLTIQAKLIFDSKEDKQKVLNLMRKWSACMRYAYKRLLEGHKRNELKKQLQGIFNLNSRYVDDAIIKAQSVKKSCEQKGENSKKVIFGGRELFEKLQKRHINGKAYRKLQREWQEKRKGNLYSRGDKSKKGNLNTRIEIDGFLTKLRINVGEREYVYATIQPGWKVKGGTYTDRNMLLQGIATSGEPYSVELKLKNGTVYAYFTVEEVFPKSTITGANGVIGIDTNAYPRHVAWVETDSSGQLLSYGEIPMPELESGNSDKKEYYRWQYAHMIVAIAKDNQKAIVIEKLDIKNRGRRGDFSGRKSRRISHYFGYRSLLEKVKLLAKREGIEVIEVNPAYTSVIGMLKYAPQFMVSKDVAAAYVIARRGLGLKERIPHNYMLLLSSLDVNSLEELKEYVKKVVKNPNVRKKQLREIDWAIKILQSSGSEPGRLRPLPLDGTSEDGHRKSSCNLWRVLRVAVVTPLSPDRLLRDMSVLRPLLVSGQVGRPG

SEQ ID NO: 50533 - protein, 410 aa, Caldicellulosiruptor sp.
MDKTYILPVPKEYQVLARELSKQSGKIYSKAVSFLKKMNKKGIKISRETFDRYMEWWIHQKDFVLHSQSKQAAYQQAWTAYQATLRKLKKARKKGKDTSRIRLPYKNKKYNKVVFKESAIHLRDNDLTFSNKKGHEAIFLKGVVMKTAPKYAELIYHHSKKKYYLHAVVEVEEREIEKGKGILAVDLGVIHPMVCFDGQRVLIYNGGVLNSKLRYRNKKIAEFQQKISMCQKGSKRFRKLEKAKRKVLRNVRNQIRDVLEKYTSHLIGYCVKNGIGTIVLGDLKGIRDRANHGKVANQKVHQWMFKKVAKRIEDKAKFAGIDVVYVNENGTSQVCPVCGSKNKPQNRNYECSKCGFKYHRDGVGAINIYRKYTGGKLLVVGLLACPTGVRFKAHLCCPTEWNIHPVGKTA

SEQ ID NO: 50534 - protein, 489 aa, Caldicellulosiruptor sp.
MITIQAKLVFDSSEDKQMVLDLMRRWSACMRYAYKRLLEGNKRNELKRQLQGVFNLNSRYVDDAIMKAKSVKKSCEQKGENPKKVIFGGRELFEKLQKRHINGRAYRKLQREWQEKRKGTLYSRGDRSKKGNLNTRIEIDGSLTKLRINVGERKHVYATIQPGWKVKGSMYTDRNMLLQGIATSGEPYSVELKLKNGAVYAYFTVEEVFPKPTITRANGVIGIDTNAYPRHVAWAETDSSGQLLSHGEIPMSELENGSASKREYYRWQYAHMIVQMAKGNQKAIVIEKLDIKNQGKRGDFSGRKSRRIRHYFGYRSLLEKVKLLAKREGIEVIEVDPAYTSVIGMLKYAPQFMVSKDVAAAYVIARRGLGLKERIPHNYMLLLSSLDANSLEELKEYVRKVVKNPNVRKRQLREIDWAIKILQSSGSEPGRLRPLPLDGTSEDSHRKLSCNLWRVLRVAVVTPLSPERVLRNLSVLKSFLVSGQVGRPG

SEQ ID NO: 50535 - protein, 459 aa, Caldicellulosiruptor sp.
MRYAYKRLLEGHKRNDLKRQLQGIFNLNSRYVDDAIMKAQSIKKSCEQKGENPKKVIFGGKTLFEKLQKRHMNGRAYRKLQLEWQEKRKGNLYSRGDRSKKGNLNTRIEMYGNLTKLRINVGEREYIYAIIRPGWEVKGGTYTDRNMLLQAIATSGEPYSVELKLKNGKIYAYFTVEEVFPRVKITRANGVIGIDTNAYPKHMAWAETDSSGQFLSYGKIPMPELESGSSGKREYYRWRYAHMMVQMAKEKQKAIVIENLDIKDKGKRGDFSGRKSRRIRHYFGYRSLLEKVKLLAKREGVEVIEVDPAYTSVIGMLKYAPQFMVSKDVASSYVVARRGLGLKERIPHNYMEHLSSLDVNDLEELKEHVKKTIKNPNVRKRQLREIDWAIKILQSSGSEPGRLRPLPLDGTSKGSCGKVRNLWRVLRVAVVTLLSPDRVLRDMSVLKSLLVSGQVGRPT

SEQ ID NO: 50536 - protein, 511 aa, Caldicellulosiruptor sp.
MIINVINYKNVEELHAIRGVKDMLTIQAKLIFDSSEEKQKVLNLMRRWSACMRYAYKRLLEGHKRNELKKQLQGISNLNSRYVDDAIMKAQSVKRSCEQKGENPKKVIFGGRTLFEKLQKRHINGRAYRKLQRKWQEKRKGNLYSRGDRSKKGNLNTRIEIDRNSTKLRINVGEREYIYAIIRPGWEVKGGTYTDRNQLLYAIATSGEPYSVELKLKNGKIYACFTVEEVFPKVKITRANGFIGIDTNAYPKHVAWVETDSSGQLLSYGKIPMPELESGNSDKREYYRWQYAHMIVQMAKERQKAIVIEKLYIKDRGRRGDFSGRKSRRIRHYFGYRSLLEKVKLLAKREGVEVIEVDPAYTSIIGMLKYAPQFMVSKDIAAAYVIARRGLGLRERIPHNYMEHLSSLDVNDLEELKEHVKKTVKNLYVRKRQLREIDWAIKILQSSGSEPGRLRPLPLDGTSEDSHRKSSCNLWRVLRVVVVTPLSPDRFLRDMSVLRPLLVSGQVGRPG

SEQ ID NO: 50537 - protein, 450 aa, unknown
  TnpB Polypeptide
LETSVSNVGVVASCECHTSGRDPSEDVSVKRMACVRIYPNKRQKARLRFILDVTCELYNVMLEQRRWVWMTRRRMVSSREQYAQLTELRAVDPRIAAVYRECEDVTLHKLDLAFVSFFRARAKGIKRRFPRFKAGSRWSQIAFSHGNRAIRLDDAQKRLQVPGIGWMRIRRGRLIPSAFGRAFIQERQGRWYAIFECERNVKPLPPTSILIGIDRGIHSVLALSDGLRIPNLAVGEKRRAATASLQRQLEAATVRDRKSRVINRNDPDRLAAARRLSRARERQRNARRDYLHKLSRKIIDGADVLCLERLDLRSMTRSAKGTLTSPGRSVSAKSVLNRKILDTGFGLLRNMIVSKAEEAARTIIEVSARYSSQTCSACGLVDSKSRRGRLFRCVRCGHLGHADVEAAREIRRRAESQLMRDDAGAEPACIARLVQMSPTTRCLSSMKPAS

SEQ ID NO: 50538 - protein, 375 aa, unknown
  TnpB Polypeptide
MKTYKFKLYSNHGNRELHKTIDGHCHVWNHCIALQRRYYAIYGKYISKFRLINHISKLKRLPEFAHWNQLPSQAIQDVAARIDKGYKKMFADRAAGKKCGRPRFKPRRKYKSFTLLQAGWKLLPGNRIKIGKSVCSYFKSRDILGNPKRCTIKRDAIGDIYICVLTDYETPDYNRVMTGKIAGFDFGLKRYLTGHNGHDIDSPQFFKRSLNAINRANRAHSRTEKTSNNRERARLDLARKHRKIERQREDFHWKLAHQLTDEYDEIRLEDLNLQGMKALWGRKVSDLGFADFVKKLVYIAKRKGVKIKFIDKWYPSSKTCSACDVVNETLNLRDRSWQCSDCGITHDRDRNAAINIYRVGASTHAGEVVSPGSPG

SEQ ID NO: 50539 - protein, 381 aa, unknown
  TnpB Polypeptide
MIKGFKTMIYPNKEQSEKIIKFCNAARFCYNWAIALEEENYKNGNKFISAYDLTKRFTQFKKQEGNEWLKEISGRALKVAIINAGSSYENFFKGRAKHPKFKSKKNSKMSCATHEGTTVIEQKQIRCEKLGWIKSHKHNIPIGENIKYYNPKLSYDGVDFWFSVSVEIQDNNIDNNKPITEPIGIDLGIKTLATCSNNIICKKPNIKKTKKKLKRLQKKASRHYQKMLDESKRTKTKFNKLYKSKNLIKLEKQIKKQHIKIKNMLTTNIHMFTKSLINLNPQAIVIEDLNVSGMMKNRHLSKAVQEAKFYEIRRQLEYKCNWYGIDLIVADRWYASSKICSCCGNKKQKLSLSERTYVCENCGCVIDRDLNASINLKNLAV

SEQ ID NO: 50540 - protein, 330 aa, unknown
  TnpB Polypeptide
MAGAINYVWNYCNEVSLLAWRRDKTFLSAYDLHKLTAGTSKDLRLSADTIQQVCTEYVTRRKQFKKIKLKWRSKKRSLGWIPFKAAYIKLQGDAITYCGHRFRLWLSRPVEGMIKTGSFTQDARGRWYVNVQCEVPDATAPVGQVEIGIDLGLTNQIACSDGVIYSRENLTRTHEDALAMAQRAGKKKRVKAIQAKIAHTRADWTHKATTAIARRAKVIVIGDVSSAKLIKTPFAKSTLDASWYAIRHQLTYKANRLAGECISGRETFSSVTCSDCGTRCGPSGLRALGVREWVCLNCGTTHNRDVNAARNILLALPVGHHRPTKGIRPL

SEQ ID NO: 50541 - protein, 403 aa, Planktothrix sp.
VLKATKVRLYPTSEQELVLAKSFGCARWYWNFALNTCIQHYQETGKSLKLASYKGMLPQLKKEYPWLKEDCYSSVLQCVAINLDRAYKNFFEGRAKFPNFKSKHHKQSIQYPQSVTVNGEYLKVPKIGEIKAVFHREVTGKIKTVTISKTSTDKYFASILCEVEGTEVKQSGDRIIGIDLGLKDFAITHNGENATKYANPKHLCRHQKNLARKQKKLSRKTKGSKSREKFRKTVAKVHEKIANSRQDFLHKLSRKLVNESQVIVVENLNVKGMVKNRKLSQSISDVGWGKFVNFIDYKLKQKNDELVEIDRFFPSSKTCSCCGHILDELPLDIREWDCLNCHTHHDRDENAALNIRNEGIRILTEGGGNPVFADGGCVSPPACKSKRHRSVNSEAYTDPIRAV

SEQ ID NO: 50542 - protein, 390 aa, Lactobacillus sp.
MIKTHKIKLYPNATMCRAFQQLFDYRRYCYNLALESWNGMYDESLLMGDKSLRPNERKVRNELVNNKQDWQYELSARVLQLAVHDLAQGWRNFFNPQMPSHRQPRFKSRKRSRNTFTTDRAQVVNNKLRLDRPYGYTSWYDIRMAESVRWIGKLKTATVVEEADGYYVALAVEVDDSVAVKSGHVVTGVDANIARFDYRDATGYQSVSTMSAKLLRLYERITHYQRLLARKRLVNPSHFRSHNYRATRAKLQRDYQKVTRIQMDLLHKFTHQLVQTNDVIAIEDLDNLHMRMNKHLAKNLHRSLFGQFKAIMQYKCSWAGVKLVMVDRFYPSTQRCSQCSFVKTGANKIDLEGNRRHHTGNNQYVCYQCGASMRRDQNAVENLIQYAMVN

SEQ ID NO: 50543 - protein, 362 aa, Kribbella sp.
MWTRDKGPTPGFVEQARQLTEARAVFGWLRDGSQTVQQQALRDFDQARRNFFAGSHHRPTWRKAGRREGFRIVGPQAGRVEQVSRKWARVLVPKVGWVRFRVSRALPESRSYRITRDRVGRWHIAFAAVPDPIPAPGNGAVVGVDRGVTVSAALSTGELLNCPRLSESERRRLVHLQRRLARAQRGSNRRKRVKAAIAKLHARAADRRKDWVEKTSTDFARRFDVIRVEDLRVPQMTRRPKPKPDPAKAGSYLPNRRRAKAGLNRGILNNGWGLLVQRLEHKAAGRVEKITAAYTSQTCSRCGHCAPGNRENQAFRCQSCGHSDHADLNAAINIAAGRAVSARRDKPVRMSVKREPQLTTST

SEQ ID NO: 50544 - protein, 394 aa, unknown
  TnpB Polypeptide
MTMELLTRKSFKYRIYPTKSQENTLENQFSMCRHLYNWNLAERIEAYQEDGTTISYNQQQNKLPTLKEERPWFKSVHSQVLQDVLRRLDNGYQAFFRRVKNGEVPGFPKFKKRGQWDSITFPQYHKRPTDSCIPVSKVGKVKIVYHRDIPEEAIIKILTIIKEAGKWFACFSIEVPITIEPKQAQLPPIGIDMGLIDFYYTSDGSQEPVPQYLRKKEKQLQRLQRRLSKAPKGTKKYLKLLKALQKCHYRIKCQRNDFLHKKANQLLDASDTIFHEKLNVRNMIRRPKPKMDEETGKYLPNNASAKAGLNKSIADAGWSRFFGILQYKGKELCKQIVSVPPKYTSQTCSSCGEIVKKALSTRTHRCECGFVANRDHNAALNILRIGMDTLQAST

SEQ ID NO: 50545 - protein, 466 aa, Streptomyces sp.
MTDTADQPIQVTGDEVKRIKREALGIADRRKHQGRAATAMKSRAKETGTQQRVYRYRFYPTPSQAEQLEKTFGACRWVYNEGLALRTGAWERHRVSVGFAESCRALTGWRQASETSWLREVSSTVLQQSLRHLDGAFTRFFKQLTKRPQRKRKHRSRDSATYVRTGFRWTEDPEHPGTGLITLAKQTVPLNVRWSRPLPAGVAPVKLSVTRDRAGRYFLAVLVEEQIEPLPVVFEPGGRTPKAVGIDLGLAALVTLDDGTKVDHPRLLKKYERELARLQRGLHRKAKGSKNRGKARERIARLYALIGDTRRDMLDQLTTRLVRENQVLVVEDLAIMNLLRPAVGNGRRRKARLSRSIIDAAWGELLRQLRYKCAWYGRTLVIVDRFFPSTRRCSGCHAKGPSLDVSVREWTCTECGAAHDRDVNAARNLRAEGMRLYWLVASALPPGRVPPSVIKASEPADALLAA

SEQ ID NO: 50546 - protein, 361 aa, Syntrophomonadaceae sp.
MLVNKAFRYELKPNNQQQTLLKKHAGCARFAWNWGLAERKKLWEEEKKSTNAIEQHRKLNTLKKTELPWMYEVSKCAPQEALRDLDKAFRNFFEGRAGFPKFKKKGIHDSFRLTGTIKVFPKHIQLPRLGKIRVKEETAKLKGRILSATVSREADRWYVSLSVEVEIPDPLPVKGEPVGIDRGLLHFAVLSTGEKIEASKSLERNLKKLRRLSRQHSKKQKGSSNRKKSALKLAGLHCRIKNQRKDFLHKLSTRLVKTKPVIVIEDLAVKNMMKNKHFSRHIVDAGWGEFRRMLEYKTKWYGSKLATAPRFYPSSRRCNQCEYVLSELKLSTRQWACPECGAIHDRDINAAINLLQYFNSA

SEQ ID NO: 50547 - protein, 363 aa, Lachnospiraceae sp.
MFVRTFGCCRKVWNLMLSDKIESYRSAGKFAAVTPAMYKKEYPFLKEVDSLALANVQLNLQAAFRNRFSKSRRKKNRFPRYKSAKHSRRSYTTNNQHGTIALSDRSIRLPKIGYVRAVIHRRPGNGWVLKSATISQESDGTYYVSVLFAFAEPVSSYIADRTNAVGLDYASDGLYTDSTGHIGSNHKYYRESQRKLARAQHRLSRMQGSRRLEKKSSNYLKQLRKVNRIHRHIAHQRLDHLHKRSTEIANQYDVVCVESLNMRAMANRRFGNGKATMDNGYGMFLCMLEYKLADRNKYFVKVDRYFPSSQLCHQCGRRHREMRNLKIRTLTCQCGLTMNRDQNAAINILREGLRILNESSETT

SEQ ID NO: 50548 - protein, 317 aa, unknown
  TnpB Polypeptide
MIQMIKSIRVQLLPNNKQKTKLFQFAGAAGYAYNWALNKQMDHFCEGHKIQTDSALRKEFTVLRHAEENKWLQDVSNNVTKQAIKDLCIAYKNCFRKQKQPGYIKYASKKIAHYNRIGKSLTVYDMNGHPKFRSKKNGDFRFYQDNVKIQFTETHVKLESLAGSRRKNRQRLNWIRLAERNRIPVRAKYTNPRIAFDGERWWLSVGIQTARKLKPLRGLSFAYRKRRYTRSEGIGIDLGIKDLAVLSDATKVRNINSTDSLVGNRLTSLREQGVSCQSLRSIISNVSSLSFGRAKTDAMNEERNIKVSFSSTGCGFL

SEQ ID NO: 50549 - protein, 412 aa, Moorea sp.
MKTNMRIAYQYKLKPTKVQKILINNWLSMLCAQYNYLLADRFSWYEQNRCSINACPLVCHLPDLRNNPDYFSQNKTLPNLKKTHPWYKTVHSQVLQDVVKRVKLAFDRFIKGDSNGKRSGRPRFKKRHRYRTFTYPQMKEGCLEGNLINLPKLGKLKVILHRPIPAGFKIKTATITKKCDGYYLVLSLEDKTVPEIKPDINPDSIVGIDVGLKEFLTTSEGETINIPQYYRKSQKRLKVIQKRVSRRQKGSNNRLKAIKQLGKQHKKVADKRKDFHFKTTNYWLSKYDVIAHEKLNVKGMAKSRLAKSVLDAGWSSFLAILTSKALNAGLLAIPVSAQNTSQNCSNCGRKVPKKLHVRWHDCPHCGCSLDRDHNAAINIKNRAEGQSVLKAQRLLSNSRIGWEAYTEPNGSV

SEQ ID NO: 50550 - protein, 440 aa, Halorubraceae sp.
MLDVHRTHQAKIRNHSQVDEMLDLHGWDASKLWNVANYHSRNVWEDTSEIPDHGDLKNGLKGHTKYKGLHSQSSQRVLEELAEAFNSWYGKRKSDSRANPPGYRKKNYYDNDGNRVHEEHPRSTVTWKQNGIKHDSKNNRVRLSKGANHKEHPKAWEYILVEYETRPGVEVENLQQVRAVYDKTKGRWELHLVCKDEIETPTAPGTESAGIDLGICNFAAVAYSTEEAELYPGNRLKQDGYYFPKEIAKCDDSGGKESTRLHAKWSERRTHFFHSLAKHIVERCVQKRVGRLNVGKLAGVRDDENGDSKNWGKHGNLDLHGWAFDRFVKILTYKAKVEGIEVVEVSERGTSKTCCMCGRKDDSQRVERGLYVCEECDAAFNADVNGAENIRLDINNESNSESSASLDGDRSTGWLAQPGVYLYDLTRGFSPRDQVVDCKP

SEQ ID NO: 50551 - protein, 416 aa, Halorubraceae sp.
MAIQATRTYVASIQNQQQVCDGLDSLGDSASKLWNVARWTVDRVWDASGEIPDEGTLKAYMKTRHCWKDLNSQSSQAVIEELSGAFQSWFDVRQKDDRANPPGYRKHGESRPRSTVTFKEDGFKHDPENNRVRLSKGANLKENWSDFILCEYQTRPDVDLSAVERVQQVRTVWNGEQWELHFVCKVEIDSVDSAGDGVAGIDLGIKSIATVAFPDEYVLYPGNSLKQDKHYFKREEYDTEGENGPSERSAWARRKLTERETHFYHTLSKAIINECVERGVGTLAVSWPEDVRDSDWGKAGNKKLHTWAFDRIYQYLAYKGEERGVEVLKENEWNTSKTCSNCGDTTDSNRVERGLYVCSSCGLVGNADCNGAENMRQKITPSPHGEDRSNGCVAQPSVHLFDRESGTFQKREQAVS

SEQ ID NO: 50552 - protein, 596 aa, Halorubraceae sp.
MASTHLSLPIHLQFEERERHVRLDTLTANVANALIKKYWTPEHLTGIDEYSYQAWKYVDASDAFADGELYLPSRYKRCVMQKVGETLRSHADRRKAFQSIHSVLSNRKIRSIETRRIKEQLWNAEEYIKSGYVDLLIGQLNSYYDRHGRFPESYFDMQECPTYSKGVLPYSADDGPTSGQSVKYDYDEDTQTLTVKLKTPDTLEPEFRGDWTWTKHELEGYEAFHELLEHGSLSAPSFHPAQTKTGEDYYELLFPVEVEHAEKPDNVETVLAIDGGIRKDATAAVVNDDGEQLSVPYFIQNTERERMKRFARERNQLNSKLSYLRREGRDHTDSFTHVQAEYERVNNKIRHKREQLVHDVSNQILALALVYDVDVVVHEDLRSLNPPRGEGQLSWELSSWARREIISKIEYRAEIAGLYVKRVHPGNTSRSCPRCGATGHTTKSPDHSYEVWWGGHFRCDNARCGYQADRDYVGAVNVARVFFSDSATLEHDFTSSYTGAFEIVPASRSAGESLSERRSSSELASDGGPRLAFGDAPVAYLGQSEKDVTAGGGSCFIAPAVTPTETKTNSSNPCASSPAMLGTTRFARVTPNCYRK

SEQ ID NO: 50553 - protein, 427 aa, Halorubraceae sp.
MEYSHRYHAYPTQTVAERLEYHIDVHRQAYNYTRYEYTHVDADNIGSAYKHHYRLPGWKDDFPVFSDVNSKALQRTVTWFYQNLSNLSEKKQNGHKVGMLRWKSPTEYQSMTYSQSGFELKNTSGRHATLELSKVGDVQIRYHREIPDHAEIKEVTIKKETTGEWFVSFGLKTDDTDLPEKPDVDSLDTSNSVGIDLGILNYIHTSDRKTVDWLDLEDDYERIRREQRKLSRKQKGSNNYEKQRLKVAKVKRRIRRQVLDYQHKLTTWLVREYDAVFVEDLHVQSMLQGEGNAHSKQNAAWRQFIALLEYKGDLYGTHIVQVDARGTTKECAKCGTETTKPIWVREHACPSCGFECDRDANASLNVLQRGFSELGLGWPESTSPEIFDFWCANESHSDSLTPVETALPTDTDSVSAKCVVETGSLGA

SEQ ID NO: 50554 - protein, 264 aa, Clostridioides sp.
MSKGRYLELDFNVENIKTAEIVWRNGYYLYYTFDNELNGVVAKGTNTVGVDLGEIHSIASVTNKGVGLILSNREGRSIKQFRNKMYAYISKRLSKCKKGSRQSKKLWRLKNKIRSKTDNQLMNLYHQTTRKFIDFCVEQKVCEIVLGDIKGVEKDTKKKKRLNRVNRQKISQMEYGRIKDYIKYKAKEQGIEVKLVKENYTSQTCPKCSKKHKPTGRTYSCTCGYETHRDIVGAWNILNKKHKYGLVDFRINHKQPINLKVSTV

SEQ ID NO: 50555 - protein, 416 aa, Helicobacter sp.
MTISHKIELIPNNKAKTYFKKAFGCSRLAYNWGLAKWQEYYKQGIKKSHLDLKKEFNSIKKEQFPFVYEISKYATQQPFIYLNLAFQAFFRDLKKGKLSYPRFKKKKDNQDSFYLGGDTVKIIQKEKAYYLNIPNLGYIKLRENLKFKGKIHSVTISQKANRFYASFSVNIDENEFNATHKQALQTKQGLGIDVGLKSFVSLSNGLSIQAPKPLYKLTRKLKRVSRQLSKKQHPKTKGDATKKSNNYIKQSLKLNKLHAKIANIRSDFLHKLTSSLVRHYAYFGLENLNIKAMVKNHRLAKAISDVSFYEFKRQLQYKSLYYKREVLEVNRFYPSSKQCSQCGSIKENLTLKDRIYECENCGMKIDRDYNASLNLYNHITQEIGQVLPKSTPEDLTALQVDLAINNIATSKVETGI

SEQ ID NO: 50556 - protein, 395 aa, unknown
  TnpB Polypeptide
MIDLMLVYEYKLQGKDKQFQALEEAIRTTQFVRNKCVRFWKDNRGVNPYDLYQYCAVLAKEYDFAKKLNSQARQAASERASSAIMRFYKNCKDQSLKKKGYPQFQKDCRSVEYKTTGWKLSDDYRRITFKDGFGAGTFRLVDTRDLSHFSREQIKSLIKRVRVVKRADGFYVQFCLNVERKEELPPSGKTLGLDMGLSAFYTDSDGQKVDCPKFLRNAEKRIKFLQRRVSRKHKGSSNRKKARNRLARKHLEVQRQRRDFAIKLARCVVTNNDVIAFEDLLVRNMVKNHPLAKSITDASWSLFRQYLAYYGRVYGRVAVAVPPAYTSQDCSSCGKRVRKSLSERTHACPCGCVLDRDENAALNILAKGLEQLGTIINGTDGQSETEAASEKSLAA

SEQ ID NO: 50557 - protein, 476 aa, unknown
  TnpB Polypeptide
MVILAVELHQFRFKVRADAGEHRAQVVKNRFCEDFTAVFGYKDQMHVHHENAVSSVANIVVMTHRQNYNLTMQRLQAYQYELMPDGEQERDMRRFAGSCRFVYNKALAMQKENHEAGNKFISYVAMAKHLTGWRNGAETPWLKDAPCHPLQHALKDLEKAYKNFFEKRADFPKFKRKGSGDAFRYPDSKQIKLDQGNDRLFLPKLGWLRYRNSRDVLGEVRNVTVSQSGGKWFASIQTQREVEQPLPTATTAIGIDVGIARFATMSDGSFIAPLNSFKKHQQRLARYQRRMSRKVKFSNNWKKAKAKVQKIHTGIANARKDFLHKTTTTISQNHALVCIEDLQVRNMSRSAKGNSEQHGKRVRQKSGLNRAILDQGWGEFRRQLDYKVAWNGGMLLAVLPHHTSQTCPCCGHVSKDNRQTQAKFLCVDCGYENHADVVGAINVLERGYRLLACGESAQSGRSMKQEPTEATAQITA

SEQ ID NO: 50558 - protein, 390 aa, unknown
  TnpB Polypeptide
MRTYKVKLLFDDQELHDFWVDRLYTVQKCYNYASKVIFEEKLPSNIKVVHNRLYRELRGVFKTLPSQMCISVERSVIANYKAVRSNNHKIEKPIEMKSFSLQLDKRLFSNLTRESFKIGNGNSRKRSTVRFLRYPKFDELAEKYRMCDPKLTYNPRTDAFYACIPFLDIAPTPHEDSCVGVDLGMRRLATMSNGKAFSDKKYLGTRRRIRHNKRILQMHKKKSHSARKKLDKLRHREHNISKNMCHHLANRILEQKETVVVMEDLSKIKQSTSRTTEGQKRKSHNRAIGQFPFYLLKQILTYKAPLRGKRVETVSPEYTSREDCRTQSADGCTRKGCRFYAADGRVFDADWNAAINICNRYSPTSFSLPVDGRLDLDGRPLQPANSGSGD

SEQ ID NO: 50559 - protein, 435 aa, Shigella sp.
  misc_feature (337)..(410): Xaa can be any naturally occurring amino acid
VKRLQAFKFQLRPGGQQEREMRRFAGACRFVFNRALALQNENHEAGNKYIPYGKMASWLVEWKNATETQWLKDSPSQPLQQSLKDLERAYKNFFQKRAAFPRFKKRGQNAAFRYPQDVKLDQENSRIFLPKLGWMRYRNSRQVTGVVKNVTVSQSCGTWYISIQTESEVSTPVHPSASMIGLDAGVAKLATLSDGTVFEPVNSFQKNQKTLARLQRQLSRKVKFSNNWQKQKRKIQRLHSCIANIRRDYLHKVTTTVSKNHAMIVIEDLKVSNMSKSAAGTVSQPGRNVRAKSGLNRSILDQGWYEMRRQLEYKQLWSGGQVLAVPPAYTSQRCACXXXXXXXXXXXXXXXXXXXXXXXXXXXXXXXXXXXXXXXXXXXXXXXXXXXXXXXXXXXXXXXXXXXXXXXXXXCSASVHKPALRVLWSYSERKSPVTK

SEQ ID NO: 50560 - protein, 266 aa, unknown
  TnpB Polypeptide
VDEHHFLKSLDVSPFLWYIRAGKPSFKEKKRPKQGFKTDRSQIKNGKLVLDKPRQYKGDWYGIPFKGYPLPDGNIKYCSITKINNKYYASLVIDTPIEPLAKTSQNTAVDANVNHFDYTDGQYSINPKRLNSLYAQIAFYQKRLARKRKENGKKASDSKSYTVMRAKLQALYEKATAIQNDLLHKFTTRLYHEYDIIVIEDLDVKSMQMSKKAKNLHRSLFGKFRFQMEYKAKKFGKQLIIADRYYASTQRCSSCGHIKKVMIKSL

SEQ ID NO: 50561 - protein, 393 aa, unknown
  TnpB Polypeptide
VCRFRLFPIPEQAAGLAEHCRHARFVWNLAVEQQQHWQPGRQAPRYDEQCAQLTAARAEYEWLAAGSQTVQQQALRDFAQAMRNFFNDTHRLPTWRKAGTHEGFRQVGLKLHHIKRLNRRYGQVWVPKVGWVRFRWTRTIPGTVKSYRVTLDRSGRWHIAFAAIPDCLPGPNDGSVVGVDRGVAVSVALSSGELLGIPGLRAGEIQRLRKLQQQLARAQRGSNRRARTKLAIARLRARETDRRHDWVEKTTTDLAHRFDTIRIEDLDVRAMTRSARGTRDCPGTNVAQKRGLNREISRQGWGVLVARLKHKAQGRLEFVPAAHTSQRCSQCGHVAPENRKSQAVFQCAACDAGPCNADVNAARNIAAGRAVTARGDLGTSRSVNREPQLCPSA

SEQ ID NO: 50562 - protein, 212 aa, unknown
  TnpB Polypeptide
VEKLLATSDGEYFPNPRPYRKALGKLRRLQRELSRKRFLSHNWLRTKVKLARAYEHLANLRRDMYMKLGRYFAEHYDVVVMEDIDVKQLTGKSNRALRRSLQDAALGMMRSTIGYQVGKYGKGFVLVDPRDSSKTCAKCGFVKADLTLGDRVFECPACGWGADRDYNASLNILRRAGWEPPVAPVELRPLPVALGYGQGGAVKREASPFRVR

SEQ ID NO: 50563 - protein, 408 aa, Anabaena sp.
MRLTYQYRLRLTKKQVDTFENWIELCRRQYNYRLAERFNWYKENRCDVDRCSIVYCSIAPLKDKPNRWSQQKDLANTKALFPEYKELPSHTLQDVIARVDKTFDRWLKGDSNGKRSGRPRFKGKGRYRSLTFPDPIKPEHIEGKFIQLAKIGKIKVILHRPIPDGFKIKTATITRKADGWYIGLSLEDMTVPSFTTDAIPTPDNTVGIDMGLKSFLVTSDNQKVQIPHYYRKAEKKLKRLQRQLSRKKKGSNRRKKSIKRVAKTHLKVVNQRKDFHYKIAIWLLNQSQVIAHEDLNIKALTRSKLAKSVTDAGWGQFLQILNTKAASAGCLVVAVNPNGTSQECSDCGATVSKTLSDRWHNCQCKASYCRDHNAARNIKHRAVGHPVLKARGVLTDGWTVKREACAVP

SEQ ID NO: 50564 - protein, 468 aa, Caballeronia sp.
MNRGKHARVSALLHAWRRVAVLHGREQWRRFYQHGVFDARLKTRTGQDQIGAAFVQMIRHQVVGALESYMSNRQNDFSEMVNRSSLDERTRHQLHFINRWRAWQTLSVPLVMRDGSTIPEAVRRLARNLFRAVMKRHRLPALHRVNMVIDQRAVSITPSRNASHFRLWARLSTLDKGKRVDLPLQTYSHFTTRAGNRALTVQVNQRQDGSFGVGILTDVTDAFAASRAAYRPRCEALALDLGLNTLLATDQGDLVGRQWRSKLDYHDRRITELAAYLQKRGLKPNHSSRYRARVSALRGWLKSEVNRCLNRLVAVRAPAEVIVERLDFQAPGLSRRLNRLISNMGRGFIEAKLKDLEERFGIRCTKVIAAYSSQTDSACGYVDKNNRTAQARFKCRWCGHRQHADVNAARNLVRRRSPGLTDTGRASRDALLSALVRQHVERFTRPRGRPADPRLSNPYFSAWAASVR

SEQ ID NO: 50565 - protein, 478 aa, Caldanaerobacter sp.
MIVIQAKLIFLNQQAKQIVLDLMRRWSSCMRFAYKRLLEGYDRKTLKRDLQGMFDLNSRYVDDAIMKARSTLESARELGKSPKKVIFGGRDLFGKLQKRHINGKAYEKLKIRWQEKRKGNLYSRGDKSKKGNLNTRIEVKENGTFLRINVGERKYVYARIEAGYKKNKRREELLQEIGESNIPYSVELKLKNGNIYAYFAIEEEYPEIKITKERGVIGIDVNAYPDNISWVEVDEKGNLISYGKIPMPELASDSKDKREYFRWQYAHEIVKIAKEKGKAIVIEKLDIKEKGKRGDFSGRKSRRIRHSFSYKSLLSKIKTLAKREGIEVIEVNPSYTSIIGMLKYAPQYMITKDIAAAFVIARRGLGLQEKIPDNYMKFLNALTVEELEELKEHVKKTVGNKHLKKKHLREINKAIKFLQSLGSEPERVLKPLYGTSFSAYDFWQVLKVAVVTPLSPEKVPRDFSVLKELLIQGKWRDP

SEQ ID NO: 50566 - protein, 513 aa, unknown
  TnpB Polypeptide
MTREPHRTKATDGGHVTRAIEVVLNPSPSQERWLRSYAGSMRAAYNWALAEVRDNLEVRRAERDRGVPEDELTPALSWTAFSIAKRWRAVRDDIHPWHRDVSIHAFRTGLDNAANALKNYSESRSGKRRGPRVGFPKFKNRHSRQAVTFVELADGVDHHHWINPDSRAHVRLMLPQRANDGTWERRHTRPKARQAPGRDRRAELAWIHTHQPDAVREVWQLCDSGRAKIQALTIKFEGGRWKAVFRLRLLDRASQLRNPGEPAKWHGGAVGVDLGLTHLVTLDRPVPGLTDEHGHVPNPRMLEQHLTRLRRLDRAIARCEKSSKNRAKLIRRRSKLYGKITATRKLFLHELSRRLAGGFDLVCVEDLNVVGMARRKGLRNGRSVAEASMGELVRQLDYKTADRRANMVRVGRYYPSSQTCSQCGARTKLALWQRVYHCTDCGLTLDRDVNAARNIRAEGQRLAREQHHVASIRGETVNGEPRPDETEPAPSGAGGRGSFEAATDPAAVPVAAA

SEQ ID NO: 50567 - protein, 404 aa, unknown
  TnpB Polypeptide
MISRAHKIKLKPNKAQAVMLSKTAGTARYAYNWALARWKELYDQGVRTSYVDLSREWTKDRPEWASEVTDGAPRRAIMNLDKAYKSFFKGVSKPPTFHKKGRKDSFYVGNIYAKLCGRHIKLPKVGSVRMRELLRYSDCKIMSYTVSHDADDWYVSVQVEMEEEVRSSSSSFVGVDVGCKALAIASDGTECKTPGMLKDLERQLKRKQRLLARKANGSKNRAKARIKVAKTYQRIRNIKQDAVHKFTAAIAKNHGVVVMEDLDVKSMQENADKRTRKGVHNSCMSEVHRQLIYKCNSYIKVDRYYPSSKTCSSCGYHKADLLLGDRTFVCPSCGLTIDRDLNAALNLLHEGIRIYTVGHTGSACGEVDGASKKQEVFLRTYDRKEILLWRVRKRKLQLVVRRSN

SEQ ID NO: 50568 - protein, 578 aa, unknown
  TnpB Polypeptide
MTQLTEQFHIPDEDHDACDRLTTLVQRHARRLLSEEYWHDNHLGALSDHTGQSYTYIRDNDRDDFAGVDEYLYSRFRRCVYQRVTHVLDAHADEYDAFQFATDTVAERKIKRIGWHRLRTRLFDDDDSPYIEWQTLESVVAQLNDYYDRHGRFPASYTDLVACPDPNGTLPYAPDKGDYHIHALSVDEGEVVVTLNAPDSLSPDSYHDWTDHELRFPVHSRFQEMLDTGDLKAPTLHTSEHGYTLDVPVAVPETEYDTVTGRVLAVDLGVKKQVTAVPVEQNDDELTQVAPPEFLDHPAKAKLFRLKADAEGINDRLAELRRQGKTHTDRFDHLLAEFRQTRRKERRLRDQIQHEIANELVWVAAAGGCERIVFESLGQLDSSDTRGTVAWSISSWARGELLDLVEYKAELLGMDVETANPWGTSRYCPRCGERGWTVNAPDDHTDCRHGGHFHCPECEYECDRDVVGALNVGRKHLAGRKMEAANPVAYTEAGNHASFPSCSSECARSTGVQSTTDQQDPASGRQTHLSRFRATPLTSKRDERDTGGLHQNGGRDTGLRRPSGSVTRYVLASATNYG

SEQ ID NO: 50569 - protein, 474 aa, Butyrivibrio sp.
MKGMATVYRTRQYRINSTHNLYSYCRDICGASARLYNRANFILRQYSSAVKAMDEFKPLFSNQMKVLRLVRATLSGTKYQPNGAWMTYGSMDYLLKATRDKAYYGLPSQSNQQILKLLMRDYKSFFEALKVYAKNPSAFTGRPKLPRYVKEGKGKTVILTNQICRIKNDLYLRFPGTKEMLRLSNEPFSGTLKEVRIKPCGRDFVIDVVMDTEMKGIAPRDDSAILKDLAGMTDISGKRVMAIDPGTDNIAAVVNNFCSKPFIIKGGVIKSINQYYNKEMARLSACAMTCNKRYRTRRMSILTEKRNRRIKDQFHKISRCIADYARDNRVDVVVMGHNVFQKQEADMGHMNNQNFVQIPMLIFADMLRYKLAEYGIEFALTEESYTSRADFLAKDELPVYCKGDSTPYSFSGKRVKRGLYRHYDGTITNADINGAANILRKVFPKVTQWDRGIVDMPCSASCTEQTAGSCREAA

SEQ ID NO: 50570 - protein, 384 aa, unknown
  TnpB Polypeptide
MKFVNRAYKYRFYPTKEQIKQLAHSFGGSRFVFNRFLKLKSDAYKETKEKINYNKTSELLTLLKKDVDFVWLNDISSVILQQKLGDLDRAFTNFFAGRAKYPQFKKKHSRQSIRLTKNAFSFSDDKLTIAKCKDPLNIRWSRKFKGEHTSVTISKDCADRYFVSFTVEEQIFEFPKIGKTIGIDVGIKDVCVTSEGIRSGSPQYTRKYEKLLSIRQRELSKKVKGSKNRAKARLKVAKVHAKISDSRSDFNNKLTTKLICENQAIAVESLNVKGMMKNHKLAKSISDSSWSDFFRKLKYKAQWYGRQLLEIDKWFPSSKKCSCCGYINNGLKLSDRTWECSSCKCILDRDVNAAKNILTAGLAGLAFGESGRLGIENSMQSCSL

SEQ ID NO: 50571 - protein, 405 aa, Streptomyces sp.
MQLRYSFRLYPNVPQRAALARAFGCARVVYNDALRARETARTSGEPFPGTGDLSKLLITEAKKTGERAWLGEVSAVILQQSLRDLDTAYRNFFDGLKGKRPRMGVPRFKSRRDNRQAVRFTANARWKITPGGDLSLPKIGDVRVKWSRNLPSVPSTVTVIKGAVGRYFASFVVETEPGTLPETEPVVGIDLGLGHFAVLSDGTKIDAPRFLRRAEKKLKRAQRNLSRKTKGSSNRTKARIKVARAHAQVADARREFHHQLSTRLIRENQAVAVEDLAVKGLARTRLAKSVHDAGWSAFVAMLEYKAAKFGRTFHRIGRFEPTSQVCSVCGVKDGPKPLHVRVWQCAACGTVLDRDINAAVNVAKAAGLAVSACRARVSRALVPAQRGEAGTHRDGQPIVVGTPAL

SEQ ID NO: 50572 - protein, 598 aa, unknown
  TnpB Polypeptide
LAQTEGISGMRRNWATQSLSYPIRLPDVVQVDALRLLDVSREVINATVSALWDRLDAFGMRESTYAYKQVTAMIGSCDPLGDRQWRCEAEQAGRILRAQAERKKQFALMLPVLCQGMILPRTEKKAAGKNRKAIKQALADLRDEHSDGGSGVELQSLIEQACNFYLKHGCFPDTYEEMQAIPVLKVGVLPYAGDDGGEKGQAYRLRLDLEGRSCFFAFRFPDEAGVWAGTWTEPQILLPLPDPVVECLQVGVALAPTLREIREPDGTRYVVLDFIVEIPVTEPAEWKHVRRVLGWDWGVRTLVTATVLDVKGNQVAPPLFLDSGCLDGIQAHTRRHIDRLNAKVASLESRRDHFPEGDPRREPAMRKLAVLRREIACCWRKYSARNRDLAHLAANILLLLANVWGVELIAGESLKSLKTTGHGRSARGRWVHWRNNSQIRGELWRCLRYKCHLAGIRLEWQQPKDTSHTCPRCGKPAHTYASPSHLSTAVDAGAWLSCAACGWNGARDYAAAVNIARLGIAFLKQHLQTGRISHPYMTETEKVKNSASYIGAGLALRLPPTSPRGRLIESGEMYVNGWIKAVTLRSALPQDTMLRLCG

SEQ ID NO: 50573 - protein, 544 aa, unknown
  TnpB Polypeptide
MLIYSKYTKIFHSNDITRQKYDELYHFAVLIRNHKNVVSQYVNDNLLYFLDCSKFQFMKEMRALYKNVIPSSFDAQLYTHVFTCYQNKFKAIQRKLRFDVTEFNGFEFYKHDSKKHKKGNLKKVIINKKQTPLSNCLTYLARYGNENIIEYIKDNINKVDESKQKFYDNILSCCDKFGFERLYNLALFKRGQILNNYTGNPVEFKSLSFSGRSRKTRIIDYNSKFDSKINSFISLSSIGRKSFDIPVTFNKGYHGNMKDYMKDNRSYEYTLTFDEKKYQVNIHLCKGGERYIPEPNGKIVGIDVNCKHNLFSLSDETTYDYDRKLVTDFCKLSLEIDKLTEDKLLYTVSKRKQQKLNKLKEKIIKSEQQLIANMCKTLQSQGVGHIVMEDLDNSFGKCYVKDKDNENINYNRKVKFLSLSSLKQEVEHIARKYNIAVSTVHASYTSKMCPICGCIEDENRPNQETFECIECGHKDNADYNAAKNIRNRVLVTVLRESLLKQLDNGAFEPKKLKREKVKEVLLSFRRNLYKSTRGECTESRVVYF

SEQ ID NO: 50574 - protein, 180 aa, unknown
  TnpB Polypeptide
MARMRLAKLHRRVARVRADFQHKTSRRLVDENQALIFETLRIKNMMKNHHLAGAIADVGWGEFMRQCEYKAKQKGKVFVKIGAFFASSKTCSACGHRLQTQSFATCDWRCPHVHHDRDANASLNIKQEGVRMPKTVEPTICWFYATKPSRSTSDQHSKGSVPAFAWFPWNRAENCNKVIK

SEQ ID NO: 50575 - protein, 347 aa, unknown
  TnpB Polypeptide
MILTYKIKHNRDFSHELQLAHKVAKFALKTGSRSSKDVKHIGLKSMIANQILRKYSKDKRLKRVRRVVLAIPSQGIHIDKGNNKMDIPCLKLELDYQFRNDFKKINQIEINKKYAFISISIEEPSTRKVNGYIGVDRNTTGHIAVVGNPSTGKVLKLGKSAEYIHKKYKNIRKNLQKKGKYGLVKKIKHRESNIVRDLNHKISRKIVDTADKNNTGIKLEDIKQIRRHVKSRRGFRYSLNSWSYYQLEQFIKYKAKLLGIPVSYVEPAYTSQNCSRCGHLGNRNEKKFKCPNCGHVDHADSNASFNIALRQPKDGRLCVDRDAYKGSTDTPQTAMMRTTLTVEPHGL

SEQ ID NO: 50576 - protein, 365 aa, unknown
  TnpB Polypeptide
MELCCCGKYLVKRAGKFGKGTISQEMVDLYWSWVWDIGLSGQPPQVSENLPMMLSEMTCSFGPAEGTTHFGWWIKTSCLVNGRTVKIPLAYNPYLKSVEGLAKSVLAKKREGRWVFQFCEKTEEPEFERSSEKLGVDVGLNMIAATSEGELFGADFKPKFDKLYGRVRTLRANRQRQELKKDSKRLARLERKLSGMTKTATGTVANKLVEAYPATTFVIEDLDLKGSRGQKRFAYRALHHSLSTKAPVEVVNPAYTSQMCPSCGHISRLNRSGTKFHCRSCGRKSHADVVGGIDLLRRSEDKQVNSIENLSEVKILLRKRYLRKRNSSSGELEVNELKPISRKLTTEIFSSEKIGTASNLVRDQI

SEQ ID NO: 50577 - protein, 392 aa, unknown
  TnpB Polypeptide
MIKTYKYKFYNSKSNKHLFEQINTACWIYNHCISLHKRYYKIYKKSLNKYQLQKHLTKLKKLDKYSKWRTLGSQSIQDITDRIERGYKLFFKKQAQSLPNYKGRYKYKSFTLKQAGYKLSNEDNQIVINKKKYKYFKSRDVEGEIKLLTIKRDTLGDLYLFVICEVETPEPIFKTGKTAGIDFGCKTFLTLSDNTTYDNPGYLKNSLNKLKEVQQVLSRKTKGSNNRKKTVKQVERVYKKVSNQRHDYLFKLARQLCFTYDEIYVEDLNLVSMKESKEKNKKLEHNYHRKVSDLSYGKFLNILEYYCSKTGKQVVKIDRWYPSSKTCSNCGWYNDQLKRSDRIYKCENCRNIIDRDLNASINIKRVGTSTLCECNYVFSKKHNYDSIESHDL

SEQ ID NO: 50578 - protein, 296 aa, unknown
  TnpB Polypeptide
MLLSKKTSIKVSREYANLIGHMCYAASKLWNVCNYERQHYKETGMEQYPDWYYQKKAHKEDLWYKQLPSQTAQEVCKLLDKAWKSFYALKRSGGIETPRPPRFKQESIPITYMQMGIVHERDTDRVRLSLPKALKKYMEETYQIHENFLYLENKIFRGMDQIKQLRIYPPEKGSCKIIVVYEVPDQEELPQNGHELSVDLGLHNLMTCYDSENGKTFILGRKYLELERYFHKEIARVQAQWYGQQSGKGVKHPTTSKHIRKLYKRKHDSVTDYLHKVTRYLAEYCREQGITCFIPK

SEQ ID NO: 50579 - protein, 392 aa, unknown
  TnpB Polypeptide
MLSKSHIIKLNPTKAQRVFFAKSCGVARFAYNWGLNKWQEDYKNGIYQSAFSLIKYLNSIKREEFPWMQETGKCASQYALHNLESAYKKMWKEKKGYPKFKKKGNKDSFVCVENNIVFKQQNHKIWIPRLGWVKCYEDLRFEGKVNNVTIKRIADMWFAVVNIEIPVEAPIVSENQATVGVDMGIKSMMVLSDGTVYENPKALKSNLKSLKRLQRRLSKKKKGSSNRRKQQMKVARKHYRISCIRKNAIHQATTDIVKRFDKIIIETLKPLNMVKNDSLSQAVSDVSFGEISRQLAYKAKWYGKELIKADMWFPSSKTCSKCNNKKETLSLSERAFNCDSCGYGIDRDLNAAINLANYRPTQKLGGSEACGVRSNRTMKQEASVNNFNTFNL

SEQ ID NO: 50580 - protein, 460 aa, Micromonospora sp.
VVCRTARVGLRLTRAQRQRCFGLLRAAGDLWACVLEYNSWRHRRQDRPVAGYQELCRLLAASGPGTFGELDSTGARSVLRRYSDAWFSAAARRRAGHGEVRYPRRRRSLMPVRWYHGTFGLSERRLRLPTSVGSPPLVVRLDRAVPYPRDAVRSVTLVFDQGRLWVEVTAELPVATYAAGQEPQRGRVAGVDLGIIHPYAVAAGDGQMLLVSGRAIRAEHRQHLADTKGRRRATAARAPKRGQRGSRRWRKTRRRARLMEGRHRRRVRQAGHEAAKTVIDWAVQHRVGTLTVGDPRGVLDLPAGRRHNLRLRQWQLGRAIAVLKDKAELAGITVYLVDERGTSSTCPVCQRRVVKPRGRTMMCRSCGFVGHRDVAAAFTIATRTPGGVTTTAPDMGAVITHRRAGRHLPGAGLSRRDPRRPPAVSGSVGRLRPAPLPVGSRSLRQRLGEEPQHHRQPGER

SEQ ID NO: 50581 - protein, 249 aa, unknown
  TnpB Polypeptide
LPRREVRIRKWSGGTIVLPLSEDVVRWILERVGEGAAIVFAAAWVSRSWRDGAIAFYVALVFRREVAQMTPKRLLVVDLNALHNGVVLATVESDRVLRRGVLRPDVDRIIHLQREAARLDSLCAEREDGAVYNRAAAVRSRLWRLLRQWEDETAKKIVKLAVRYKAAIVTDVPLGESMRKLKEGGYSAERKIMLNFGRLRRRVKGLAEWYGVPYREERQFSTMCPICGGKMEEMSDRRVKCQCGFETHR

SEQ ID NO: 50582 - protein, 352 aa, unknown
  TnpB Polypeptide
MLVRELKLRPAKRLESTLNEWLWILTGIYNFGIRKIELNAKDKLYFSSFDFCNLCSNHSDKLEIPSHTLQATLMGAYNSWKRCFKKLARKPKLKGIRNKLRSIQFPDIIPVSRFKNGKINLPGLGRIRYFKQDLPKGKIKRGRIVKKASGWYLQLILDANHTFKVYETTKKVGIDTGFKHLAVLSDGTKYENQRNFIKGQKKLAQAQRGNRKKLAARLHEKIANRRKDYNHKISKDLVQNYAELYITNDNLKGQARRFGKSIGDAGISQLRNFVFYKSDNHGRKCVLVDSRNTTMTCSNCGSRSGPTGLSELAVRQWRCVDCGSTHDRDVNAARNTLLAGLGTSHERSRDVA

SEQ ID NO: 50583 - protein, 473 aa, unknown
  TnpB Polypeptide
MITRVKVFRINDKYLDYAKYLIKERQKVWNGLCILYNNEDDDMKKVITSYMMMRSIYAPNSKSITDDKKLKLVNHYHNRMMLYLGIEYVFRNFYNTFSNKLFVDIIKEFNANVKVAIKLENKKPKNLRKKIIMKQIKLRRLFKGSITFDSNILKYEDYYVRTTVFNINYQLNKFGSKNNYLKLSINTKDIAKPKNLKLVWKLGRVYAHVTYEKDTNIHKYDKGYNMSIDPGQDNYYTIFSDNPNAPSLLLRNDAINRYNRIDTNIMTYYKNLRREYNKHSYYGRYAKINNTIINHFDVNRSLIIRNEFHKMTNRIVDYVRKYKITKVIIGRNKHQKNKSSMNRKNNRKFHNIPHYKLNEYLEYKLNDIGIDVVYQEESYTSKVSSLNSDVNVWEFKLGNKYTANDYLGVRLCRSVYLTKTNNGQIVELNADINGAINILQKHIKSHINIDDNWNSIFHPITIRNDKQFLDILV

SEQ ID NO: 50584 - protein, 339 aa, unknown
  TnpB Polypeptide
MRNMRKIIALRLVIRKSQDNSHNGKKVFPWLEDYHSQVLQQSLKDLDSAFKNFFQKRASFPKFKKKGVKESFRFPQGCKLEQHNNRLYLPKIGWVRYRNSRNVVGEIKNVTVRKKCGRFYVSIQTELEVEIHQHQGREIGIDMGIIRFATLSNGEYFEPLNAFKTYKGKLAKLQRRLKNKVKFSKNWQKLQAKIAKLHHKIANCRKDFLHKISSTISKNHAMIYVEDLQVSNMSKSAKGTVEQPGTNVAQKSGLNRAILDQSWSEFRRQLDYKAQWQGGALVAVPPQNTSRTCPCCGHTDKENRLTQAKFECIECGYSENADVVGAINILERGRATVQA

SEQ ID NO: 50585 - protein, 250 aa, unknown
  TnpB Polypeptide
VDFDNNKIKLPKLKWVKCKLHRKFEGKIKSATISQAPSGKYFVSILVDTEMKQLPQNNNVYAFDLGLKEFLTDIHDNHIEDPKAISKYENKLAKLQRQIAKKKKGGKNWNKQRIKIARTHEKISNIRKDFLHKLSSKIINENQVIISEDLAVKNMIKNPHLAKRISDVGWGEFCRQLEYKAKWYGRTYHKINRWYASSQTCSGCGCINKEVRLLSMREWVCDKCGQTHQRDENAAKNILYQGLRELRMVI

SEQ ID NO: 50586 - protein, 176 aa, Cyanobacteria sp.
MNGDQLTIERQRILIILPVFVLGKKGYPKYKKECRSVEYKNSGWKLSADRRQITFTDGFEVGTMDLWSSRHLVWTSEQQTLRVRVIRRADGYYAQFLVDWDRREEHEFQGKMVGIDLGLKEFYTDSDGNTVENPRYLRKSERRIKMLQRRVSKKHVKGKKQSNRYHKARIALASQQ

SEQ ID NO: 50587 - protein, 332 aa, unknown
  TnpB Polypeptide
MLAIVKDEMLVKGVAFHLESGIPSEAKSLLEDFRLAVNNAIRAGLQARVTSRNALVKIAYRDFREQHPRMYAQHLVSAFEVAGSALKNHRRRFRKDVSRRTPFVKRLMMKAENQAYKLDRKSGVIDLPIRAGCHVELRLIVSQYHRKYLDDVSLSLGSLTVLPNRVIVAFRKDAPKPFVPESVLSLDTNERSLDGVFVEGDGAKAVKAGFSEVAIIQQRHHDRRRRLQKKKRHDRRISRNLCRREGAREHHRVENRLHQVADSVLRFAEERRSAIVLEDLKGMRTKRSKELNRRLSMWPRRKLHQIIEYKAQWKGIPVVKVNPRNSSRTCPI

SEQ ID NO: 50588 - protein, 276 aa, unknown
  TnpB Polypeptide
MSEARRSDKSSLLPKDWLGFLSKKPGRARRTEKRYRASVLREWYVSLQTEQVLATPVHPDPGGPLGIDLGVARFAAFSSGESDGIETPNLVKRFEKRLSTLQRSLSRKKKGSNNRSKAKKRLGLFYHRIRNIRLDFLHKATATISKNHADVVLEDLKVKGMTKSGNGNTGRNRDILALSWYEFRRQLQYKLSWRGGRLHLVDPSYTSQTCPRTECGHVSSENRKTQSVFHCVKCHFEANADYVGSLNVLSRAGLARIACSPPKTESPELPGLSLCI

SEQ ID NO: 50589 - protein, 527 aa, Meiothermus sp.
VKARPEVARKCSSQRAKAFTGVQALLVFPSEEDRKAVLDLMRRFSAGVRYAYNRLLEGKDRDKLKRQNSPLSVLFGLNTRYADDAILKAQAVLDSARELGEDPRKVVFGGRKAFEQLKRRHLSGKPLEELQREWKERRQGLLYSRGDQTKGGNLNLRLLVKDGALRLRINLADGSYAHALVRTRHPNLNALVERVYASLPYNVELSLREGKVYAHFTWQEKLPALLHTRKSGVLAIDINADPYHLALAVVSPDGNLRKHLALSLEEVDRAENRGTKELLLWKVAHEVVSLAEEHRVAVATERLKYLPKGRRGDGSGRAFRRKAHRFAYASLLRKIHSLARKRGVEVVEVNPQDTSTIGMLKYAPLLSLSKDTSAAYVIGRRALGFEEKIPGGYEKLLQDEGFRAHVENFYASRAHELRAKKAAEPNPYLKRRLSRQIGKTERHRSLFSSFQGSSGSREGSTGGRNPHGAHPWRVLRAGTFLPLLGREVPRDLSPLKPILFGGSWKGWKGSRGPHPGGGPECANVHFG

SEQ ID NO: 50590 - protein, 376 aa, Meiothermus sp.
MHKAFKYRLYPTQPQQKDLERTLSLCRHLYNAALQERREAYRKAGQNVTYYEQKRSLVEIRAELPEYQRIHSQVLQNVIERVDKAFQGFFRRVKQGQTPGYPRFKGKERYDSFTFPQAGTTGVKLQAGGKRVLIYGIGSVKCKFHRPLEGKVKTATVKREGEQWYIVFTCEVESRPLPPNDQAIGIDLGTNPHFLITSEGEMVEAPRYFQKAQAKLARAQRGLSRKKRGSSRRKQARRRVARLHRKIANQRKDFHHKVARRLVNQYGTIVHEDLNILGLARSRTAKGVLDAGWAAFLQILAYKAEEAGRRVVGVDPKYTSQDCPVCGRREKKPLWVREFTCPACGASLHRDVAAALNVLVKARTEPSGMGTARAVP

SEQ ID NO: 50591 - protein, 330 aa, Haloferax sp.
MFQASSRAGQQNSARPNRAAVFDHSTDRTHAFCWEVPQPGRGTNFWIPLAINPDQRKWWLQLFDGEATAGQLQLITRPRQARWELHVPLKLPTTKPEVDCETCTPVGFDVGEAILLTGCALLDGRPVDPLLVDGGRARHLNQTLQTTLQRLQERDAAEWRIDEQAAYFRNALRDEIETATRNAVEYAAGFDQSVIVLEQLTSIQDDLDFGPHMNRRLHAWAFDQLQTRLADKAADAEIPVRYVDPAYTSQICHACGEIGTRPKQAEFRCPNDDCWVSVYQADINAAANIAGRLNPWGESCPREPGSDDTLRNGRTRDSATGPREESSSQR

SEQ ID NO: 50592 - protein, 437 aa, unknown
  TnpB Polypeptide
MKRTNAFKIVTRSDGDSELLHRLLDASASLWNKITYERRQRFFANETVWTANSYYDEYKGILGAPTTQQIERKSDSAWKSFFAVLETDSESAQPPGYWGNEEDGRELRTYIRNDKYTLEWGERSRLEIPVGLNPKSEYGLSRNERLRLEVAGEPKWHGKQGRLELYYDDTTETFRARQVVTIGETSQKSPMSEKSAALDIGANNLVAGTVSTGEQYLYRGHSVFDEFHEVTEQIGYYSSKLPNQRQSSNRIDRLYRTRTKRRNHAQDALVRDLVERLYERGISEIYIGDLSGVLSAHWSVTVNEKTHNFWAFRRFTDRLRSVSEEYGIEVHEESERDTTRECPSCGEKEQTERDGDFFWCPCGYEGHADLDASKQFLEKQANSEVGPMARPVRLEWNNHEWRSTKDAPSWWTNSKEERTDRSTSHERGNVASEKTVE

SEQ ID NO: 50593 - protein, 474 aa, unknown
  TnpB Polypeptide
MSKTIRTYKMRIKDKKFKSRVIDYIYKYRHFENMYIILLHQDHKQDIGDFKLLTDYKVMRAVFRGTKPKKEKDKIEYLENKYKNHQIMNELIALSKDLKIHNLVEIIKRVKSQYKGFYTKTKNGDHRARPPKPKKLSKLTNYTIPLDSAKGFSLKKKNQLGINLNNKMIKTYINHKHLEKIVGDLSKINAVHLNFSNNELYLLFIYEKAEKEFKEKPYKCAGIDIGINNLLSIYVDDKDTPSLIIDGKRYKTYNANFNRFIGKLNREIMTVKDKNRKRYLEKYRTYLYERRNRYFYDQFHKISKRVLEYLQKYDVTKLAISKNLANLKNNGKCNLNKPIKQDFIQIPFVKLLNYIGYKSKDYGIKVIEVDESYTSKTSSLTEDIKVIQELSQYAIDLTNVFNGKRVKRGLFKDKAINKIVNADLNGARNICILGNKKAQRKYREGGKSRWLIYKLCNPIKVGSDFELCRLIKSA

SEQ ID NO: 50594 - protein, 404 aa, Streptomyces sp.
MQLRYQFRVYPTPGQRISAARVFGCRRVVWNDALARIKPVKASNKLLGNPKGRTAQGPYQFVPKNPDLSKALITEAKKTPERAFLTDCPAPVLQQTLRDLDAAWKAHEDSKTGKRKGPKVAPPRFKSKKDNRQSARFTANSRFKITEGGRLRLPKIGDLKVKWTRDLPSGPTSVTLIKDRSGRYFVSFVVESDPAADILPPVGGDQGIDLGLTRFAVLADGSHIASPKYLRRAEKKLKKRQRELSRKEKGGNNRDKARVKVARAHAAVADARRNFHHQWSHKLTSENQAVHCETLNVRGLARTRLAKSVHDAGWAQFVMFCEYKATRRGRDFAKVDRHFPSSQICSACGHRDGPKPLHVRQWTCPNCKTRHDRDWNAGRNVRNEGRRILAATAPSTPGPGARRR

SEQ ID NO: 50595 - protein, 305 aa, unknown
  TnpB Polypeptide
MAEEVDSLALANAQLHLESAFRKFFREPACGFPRYKSKKHARNSYTTNALNGNILLQDTHLKLPKMSVIRIKLHRQIPSDWKLKSVTVSREPSGKYFASLLFYCENQTVEKRPAERFLGIDFAMQGMCVFSTGERAGYPMFYRKAEKKLAREQRKLSHCEKESRNYQKQKKRVALCHEKIKNQRKDFQHKLSRELAERYDAVCVEDLNLKGMSGRLHLGKGVQDNGYGQFLFMLGYKLEECGKHLIKVDRYFASSKICSLCGHKKKELALSDRMYVCECGNRMDRDVNAAVNIREEGKRIYKECA

SEQ ID NO: 50596 - protein, 458 aa, unknown
  TnpB Polypeptide
MQLGYVYKLKPNKQQEVTMNKWLDMLLAQYNYLLRDRNDSYDQAKSPRLGNYCDLRSKGEACPLTCSVSKSHSVGYPWKKSKKNPSAKPTLCERRTAYEAQSSNLPILKKERPWYKTINSTVLQQTLRQLDVAFSKFFKKETGHPKPKRRSRFRSFKYTPGQVKLDGNRIYLPGIGWMRFHDSRPIPSGFTLKSVTVRRKARGWFVSLQIEDKSVPALPVKNKNEISPDRVKGCDLGIKKLLSISNGEIIQNPANDKVFKRQARRLKLRQRSASRKKKGSRNRKKSFSKVASLHDRIANSRSAYHWKTAKVLTDGTDALIFEDLNIRGMKSRCKPKKNESGGYNPNGQSAKRALNRAISDAAWGELIKKIEVVAAKSGIPVIKVNPRHTSQRCPKCDHVSAENRKKEKFVCTNCGHHNDADVNGAVNIKMRGLKELGIDPTQLPLVRGEVTPMELTAT

SEQ ID NO: 50597 - protein, 407 aa, unknown
  TnpB Polypeptide
MEFEEQPIILFKGGFKILKSYKTEIDPTEEQTKKIKKTIGTCRFIYNFYLAKNKEIYEQSNQSMSAFSFMKWLNNEYLKENPDKLWIKEVSTVSIQKTTQNATDAFRRFFKGQNRFPKFKKKNKQDVKMYFCRQGKNDSIKCERHRIKIPTLGWVKLKEKGYIPTNSNTHIIRKGTVSYKAGRYYVSVLVEEMQPMKEKLNDFGIGIDLGLKEFAALSDGTVYQNINKTKRVKDLEKRLNRERHKWTRKYKEYLNRKELDENCTKENLLKQQIKVQKVFRQLDNIRTDYINKCISEIVKTKPSYITIEDLDVMRMMKNKHLSMEVQKQKFFEFRTKLTDKCKEYGIELRVVDRFYPSSKTCHNCGCIKHDLKLSDRIYKCPECGFKIDRDLNAALNLRDAKIYKVIL

SEQ ID NO: 50598 - protein, 320 aa, Leclercia sp.
WLKKYDSLALQQAVINLDKAFANFFNKELKARFPVFKSKHGRQSSYHPNGKVLTDAIQLPKIPAIRANIHREIVGKVSSITITRNAAGKYFASILADDGQEAAAKPTCITTVAGYDLGLSHYLIGNDGDKVANPRHLVIAYRRLRRDSKALFRKKPGSANRRKARLRLAAQHERVANARADFQHKLSRRIIDENQAVIVETLKSANMMKNRRLARHIADAAWSGFVAKLAYKAESAGVHLVKLDQWFASSKTCHCCGHKMPEMPLRVRAWKCPGCSADHDRDINAAINIQHKGIKELMAAGHVVKAHRGLRKSGSMPVAA

SEQ ID NO: 50599 - protein, 516 aa, unknown
  TnpB Polypeptide
MAKSSTPSYVVTRRIYVEPWQAEVINRKMDLGNRMYNNAVRHYKPIVEALRQDVWFAHCLGEWKKLPDDSPAKKAYSDEISVCMEAYGLREYDIHAYMGAGKQVSYPTGLGINIVQKLGTALYKSVNKSVFSGTEIHFRKYGTTNSMEDKAAGSGIIYKPLTDTVGFAKMKLRLKPIRAADTYLQEAMRGRIKYCRIVREAFHGGYRYFLQIIMKGRAPEKITIGTGSGGLDPGVSTMTLTGDFGVDFYILAEGVEKYERMVRDAATRYERRRRLANPQNYNSDGTIKKDTKTFKKHWKHTKGMDRALMELKAAYRKKASFIKNSHGYLTNRIVETYSLVVKEPMEYAALAKRAKNLAMQEKASEVKKKDGIFKTVHKYKRRKRFGSSIGRRSPAAFIKQLESKELRYGGLIYDVNASVYRASQYDHAADDYTKYSLSDRVKEVGGHLVQRDAYSGFLLWNSDGMDHPDRDKCIQRFPQFLEMQEKAIFDAMANGDPTGNFGLKDFLAANVGQKPA

SEQ ID NO: 50600 - protein, 384 aa, unknown
  TnpB Polypeptide
MFKSYKYRLYPSDKQKELIAKHIGCCRFIYNLALETKQLAYNGNKINLSRYDLQKQLPDLKNEYKWLKEINAQSLQVSLMNLEFAYLGFFRGRAKFPSFKKKQNGGSFGVPQSFRIENNKLIIPKFKEGIGIVLHHSMIGTMKQCTISKTPTGKYFASILCDTKESITPKSKIKNKTTIGVDLGIKSFLVTSDGEVVDNPKYLHKAQNKLKYLQRKYSKHKGKRTKQRLALAHERVVNQRKDFLQKTSTKLIRENQTICLEDLNIKGMMKNHHLAGSISDVGWGTFVDMLEYKAEWYGKNILKIGSFDPSSKTCSHCGNINQELTLKDRSWTCDSCGTVHDRDENAAINIKKFALKNLSVERRLKNQKELPTLVGAMISETHLE

SEQ ID NO: 50601 - protein, 421 aa, Catenibacterium sp.
MRESIRYIGGQYMYLTLKQQIKHLSKEDYRSIKELCRIAKNLTNQAIYNIRQYYFAEGKYLKLESNYALLKSSDYYTMLDSNMAQQILKEVDSSFKSFFELMKQGKSELKDCRLPSYLPKDGYATLVIGLVRVKGNKLLLPYSDSFKKTHKAVEMIIPPILLDKKIKEIRIIPKADARFFEIQYTYEAKCIHENLNTTNVLALDLGINNLVTAVSNNGETFIIDGRRLKAINQWFNKENARLQSIKDKQHYGTKPTNRQKTMARKRNNRINDYMNKTARKVIDYCIDNDIGILVVGYNETLQKDSDIGTRNFVDIPYGMLRDKLKYLCELNSIIFVMQEESYTSKASFWDQDAIPFYNGDDEEYYFSGKRIHRGQYRTARGQVLNADVNGALNIMRKSNVMDTTVLYSRGEVDTPIRIKID

SEQ ID NO: 50602 - protein, 598 aa, unknown
  TnpB Polypeptide
MINTIETRLKLDLTQELDINSCVSLWSEFYRKTWVMFNNLHLEENVIWHNLMNTNLFTSHQVDSIINKVKSEHAKFKALTKSQLNTHKNKLDNINKFINKEDKLIAKLNKDIIKLKSAKNLDYPKISKLFNSIKKKQFVINQKSIKLRRLTKSILILQKRIDNNTFKLCFGSSTLLKQRPGNHTDKFRLNSNQKVYDNLSDWKKDWDLARNNILYSVGNKNKPQGNAEIQYYHDSKTLRLRVTDKTYLNRLEIISKQLNISVNDLDDNKIIKNGIYRMQARFIEINNVEFCAKNQAKLIHSINNKQPIAAKIMKKLTPNGQDVGFYLQLSFSEVVMQQVKLNLKPTTMGIDLNQKGLAYCIVKTDGNKLNVTHKDNNNKSYGFISWELENKSTEQREWLISNAITEALTIAQFFGIYSIAIENLDFSSTINNMNSGYKAKSIKNKRNKVIFNYNIMLTSFAKSKFQELIVRKSERLGMTVNLVNPNYSSIGGFAKYGLLNKLPVDIAASLWLARQSIFGKEFKTENNVSFKKKYQEEISFPYHKQPKQSNRLFVGELKWNEVSSALGKNRNHWYKNIMDYIQPTVVKPLFAQEINPFE

SEQ ID NO: 50603 - protein, 387 aa, unknown
  TnpB Polypeptide
MDDMNETMKGYVYRLKPTTKQIDLIQQTFGCVRKMWNMLLLERKSIYALYGKYPELLNSHDYLNPKRIKEEFPYMYDVDSQSLTTAWLHLKQAYSNFFNKSHDEPKYKSRHNLIQSYTTHTINDNIRLEGSYLKLPKLGLVKINLHRALPQGSILKAATIKKDGKHYYVSLRVEYSHITQPVKALEKAIGLDYTLQGLYMDSEGHKADYPNYYKESLKKLKKEQRILSRRVKESSNYLKQKEKLSTLHLHIKNQRKDFLHKASRYLVNTYDLISVETLDLTEMAKTKHFRKSMSDTSFGLFTRYLEYKTKDEGKTLVKIDQYYPSTKTCSQCGRERDIKLSERTYNCTCGHVMDRDLNAAINIGVQGLIAYVTKAYGTDAIAWSINR

SEQ ID NO: 50604 - protein, 235 aa, unknown
  TnpB Polypeptide
MRQGESDLVYRADEWYLYTTVNYIEPAPDEPDDFLGVDLGIVNLATDSDGAMYMGGAIERKRRIHMHRRRNLQRKGTRSARRKLKRLSGKQARYQSGTNHTISKRIVAHAQGTKRGIALENLTGIRARTTVKRRQRARHANWSFYQLGSYIRYKAQAAGVCVVDVNPRHTSQRRHACGHTKKANRHSQSSFLCQSCGHSALADHNAALNLAFLARAAVTLPMVSVARDQGQEHDL

SEQ ID NO: 50605 - protein, 482 aa, unknown
  TnpB Polypeptide
MYRTYEMKLLANKKKLKIIDSILNEYRKTASSIFNLYWSNFISTGKIPQFIELSSIKSDLSERYKQTCASQVRGVLISYISNRANDFKEIIHKSSIKDENLKIKLLYINKYHKFFNDNIVMKKQEIELEIIKLARKIFHHLLKANSLPTMKYISMALDEKVAAVTESNKNSLVGHWIKLSTLEPRKPIMLPLSKNKYYEAIKAKKANFIQINKNKDNKISISFIKDIAPEKISFKTDRVSIDLGLTNLLTFNEGSMYGRTYFSSKIKEYDKKISTLCARLQRNNLRPRSSHRYRKLVDSLRAFLKNEIGRVMNKSFYRFLPKHIVVERLNFQSQRLSKRLNRLISNFGKSIVKAKLNDFSEKYDVTIEEVNPAYTSQTCSSCDYVAKKNRRSQSVFICACCGLKLHADINAARCIDARSSSSIANIYNSKAFILDKLITKFIERQASHYSLAKITQSNPYFRPYSDKIAMITESYRTSFGVV

SEQ ID NO: 50606 - protein, 398 aa, unknown
  TnpB Polypeptide
MRAYKFRIYPSKKQQKKLQNNFDVCKDAYNFLLCKCNESYKNFHKSLNNRIELNKLIKKFKNDNPKSSDVYSQVLQDTRNRLIKSYQNFFRRVKNKNCKEKGFPRFKGNVKSITYPQNNGSFKIENKRLSVSKIGNIPIIKHREIKGKIKTLTIKRNKSSQYFAIFCCEEFSIKKTKTRGSIGIDVGLEKFATLSNGEIIENPRCLLNSEKRLIKLHRKLSRKKRGSNNRLKSKLKLARHYQKIENQRMDFLHKITSDLSKTYRICKVEDLKIQNMMKNHHLAKSIADASWGTFVNMLSYKVVTNGGQLIKVEPKYTSQTCSNCGRRVKISLSKRIFICECGLKINRDLNASININGRDGLSQTYTLVGDCVRPSKKAVVDEARTIFHGSMIGSPHHL

SEQ ID NO: 50607 - protein, 381 aa, unknown
  TnpB Polypeptide
MARRVKAIRATVSMKIALSEPLLVLVNNYVKAIRFTLFWLKENVPNPEEKGVLGKVHEELYEKLREEYNLPSKVAEDCYRDALSIYKGWYNSPKKGRFPRVYKPTVWLTPKASYNVDFERMNVRIASVGELLILGYPRNLKEYMSWRMREARLVIKDGKAFLKVVFEKPLDNVEPKESIAVDINMAEVVVGKDDEHYVRISTRLDEVHHWKSLAENLQRKYPRRWRENKRILHRIYSFHQKARKVMEDFARKVGRWVVDVAKRMGVNVIKLESLKNLIKNVSKLPKEFHDKFYLMQYRRLQYWISWQARKHGMVIEFVNPSYSSVSCPKCGKRMEEVGYRWFKCSCGYENDRDVIAVVNLNGRGSLTLSTAPQMRDVNPNR

SEQ ID NO: 50608 - protein, 383 aa, unknown
  TnpB Polypeptide
MKAYKFRLYPNKEQLVKLDFALDICRQAYNTMLGELNDQVVIDRAMIQALLPDLKICEPKFRQVYSKTLQYECYRLFSNLSALRVLKKNGKKVGRLRFKGKGWFKTINYNQSGYRLDQESDRLSLSKIGDIKIKLHREVLGNIKHITIKRSIDKWYATIITDAVIKTKCGEKVIGIDLGIIDYITDNEGVKVKNPYNLNKYLSRLKKKHKLLSRKKKGSNNRLKAKKTLGKLYEKIGNIRRDFLHKLTTKLVSDCKIIVMEDLSIKKMMVQKNYNARNMQDCAWGMFGELLNYKAENAGCLVIKVNPRNTTKTCSNCGVLQDMPLWKRIYECDCGLVIDRDHNAAINILKRGQGLSSVETNPSALQGLSMKQEAITSTQGVRL

SEQ ID NO: 50609 - protein, 374 aa, Symploca sp.
MLVYEAKLKGKQYQYRRLDEAIRTGLFIRNSCLRYWEDGHAKSRNDLYKYVTRLAKEHNFPWASKLNSQARQAMAERTWAAISRFFDNCKHQMPGKKGYPKYKRNRVNHGSVEYKVTGWKLSENRDRITFTDGFKAGSFRLYDTRDLNYYQLEQIKRVRVVRRADGYYAQFCIDHDRVEDKQPTGKTVGLDVGIAAFYTDSDGNKVVNSKYLKKSEKSLKRLQKRVSRKFKKGHLQSNSYKKAKQKLAKKHLKVSRQRKDFAVKTALCVVRSNDLVAYVRAACRRQDLKVRNLVKNHKLAKSISVCAAWCDSSIASWTMFREWVEYFGKVFGTVTVAVPPHYTSQNCSNCGATVKKSLSTRTHKCKCGTVLDSR

SEQ ID NO: 50610 - protein, 428 aa, Azospirillum sp.
MCVAKIQSQSVPDVAFLTSQDIVRRLCMIDRKAVLFRLYPTPEQAAQMAQIAGACRFVYNLALEQRRNWYRPGRKFNFASQCRELTQLRAEVAWLKTAPVHPLQQALRDLERAYQNWWADRARAPTPRRKNVNDSFRFPDPVSLAVERTGASSGRVKLPKLGWVRLRGWMALPGDIRNITVSRRAGHWFAAVQCEREGAEPVPSPLPPIGIDLGVAAFAALSDGTSIAPVNHGKAALKKLRKAQRALARKARGSANWRKAVRRVGKRQKRVADAHKDFLHKHSTAIAKNHGVVVVEALPVRAMSASAQGTVVEPGRRVRQKAGLNRAILDQGWGLFRTMLAYKLADRGGTLVEVPAAYTSQTCACCGHVDAANRPSQAVFVCGRCGHRANADTNAAINILRRAGGALKPVEEHRTKRPDEAGTSQGAA

SEQ ID NO: 50611 - protein, 627 aa, unknown
  TnpB Polypeptide
MAKTQTLSFPIRLPDAMQAEALRLLDASTIAINQIITDLWPQLDLFVADRTGPAWKQVEKHLLRRSGHGNRQERCEMEQAGRILRAQASRKQVFQSILPLLSEGLIRPAEGKRPARKDHRQINEQVRALRAHMQEAGEDADAFMAMTNVIEQACNRYLQTEEFPTTYEELQPVPVLSVGQLTFAGDDGMQAGQTYRARIEVSHFCDISSRQEQCRASLWLKLRSPDGQGKWAWGAWSEEIPLPATVFSSLWRGATTQAPTLREIRGDDGSRVAVLDVMLEVPAKYVSPLEQETRVLGWDWGVRSLITVSILEKPEGEEPYRQVSRPVFLDTGGIDGRQARLRREIDRLKACRERYDTLFKQALSAHTQQHLPLPADFPRWQARVSDYEARIKQCWKKYERRNRELAHLASNLLILLALLHDCRLICGENLTTLKTEGRGRGVRGRWRNWRNNTTVRGELWRVLRYKCHLLGIRARQVEPRGTTHTCPHCGKPAHTYLSPAKQDRKKALDWAPWLCCDNPKCLWNGARDYAASLNIARLGLAYLVTYHTTKRYQEYRMTDASVKPASYSGAGATLLLPSQGIQPRPQEGKYIYYAGWSYSTSLRTSQKKHLLSVLSTSRLRKYMLKSA

SEQ ID NO: 50612 - protein, 591 aa, Mycobacteroides sp.
MIVALRTRAQAQKVAGLTSGVQLAGKPKLDGTQTLSRCVDVGADFEAHRTAVESVSVLFELYDGDATSYAQSGSPGAQLPTGWIVTAAKFEVDWPADEERAGLVRSHFGARRKAFNWGLGRVKADLDAKSLDPGYESVRWDLGSLRKAWNRAKDEVAPWWAVNSKEAYSAGLADLAQALSNWSASRNGTRQGRRVGFPRFQSTRRDPGRVRFTTGTMRLEADRRTITLPVIGGLRAKENTRRVQRHVASGRARILNMTLSQRWGRLFISISYALRTPATARTPAQPTVRAGVDLGVRTLATVATIDTATGAETVVEYENPAPLKATLAARRKAGRELSRRIPGSLAYRAAKTKLTRLDRRCVHLRREAAHQLSTELARTYGQVVIEDLDVAAMNRSMGRRAFRRSVSDAAMGLITPMLAYKTVGHGSILTVADRWFASSQIHHGCYLPDGTPCRLVGKGRIDKHLICPITGEVVDRDRNAARNLRDWPDYASCGPVGTTAPSAPGPTTVGTGHGADTRTPDAGGASVRPRHAGPDAARPEPKPRKGTPHERATQTHSTATARKRSGGGADRSVDERDLVVQASRSQVRYCG

SEQ ID NO: 50613 - protein, 455 aa, Sulfobacillus sp.
LHETTVVTYHVSLPPTEWAKASAARRAAGDLWTRLVKIHRFCRRRHWRWPAEAQLKAHFKRCFPLHSQTVQALIEKFCATIDGVRTKRRKGDKKARYPWRFRRYFHPIFKGQALTREGPYLLLPLGRGRDPIRVHLPAALPAGRVVQAELGVGALYLTITRALDDPGVTASDKAGGLDMGSIWLGMVTDGHEALAIAGRGLRSVKQGRAKALARLQKKRSRTQPGSRRRKRLNRARHRLSQKVNQISRNALHHAANQIVAFCVTHDLPVLYAGDLGTLNQNTRHRRSRRTNQEVGALEFGRLEQYLGYKLRRHGIRLIPLSEAYTSQTCPRCGHLNKVAGRTYHCRACGYRAHRDGVGAVNILTKGMHGEIRPGEILVPQRITYRRPVPLKGALRRSPAEPRHVAGGISGSESGGSLPGSHSPRRSDHGSPRISGLQAGEVQCSTNHNFIEEPRL

SEQ ID NO: 50614 - protein, 400 aa, Microcoleus sp.
MTEKAYRYRFYPTPEQEELLLRTLGCVRLVYNKALHIRTEGWYKRQERIDYKQTSKDLTNWKQQEDLQFLNEVSSVPLQQGLRNLQKAFTNFWAGRAKYPNFKKKRSGGSAEFTRAAFRWKDGQLWLAKCNDALSIRWSRVLPDGGVPSTVTVKLDASGRWFVSLLVDDLTVTPLSQVDKAVGIDAGITSLIATSDGEKIANPKHFKHLRHKLRQAQKALSRKVKGSNNREKARHEVARIHAKVADARTDFLHKLTTRMVRENQTIAVEDLAVKNMLKNHKLAQAIADASWSELVRQLEYKCQWYGRTLVKIDRWFPSSKRCGNCGHVVDKLPLDVREWDCPECGTHHDRDINAAQNILAAGLAVKVCGANIRPDGHKSKGQLRKTTERSRSGKKQKPKS

SEQ ID NO: 50615 - protein, 400 aa, Microcoleus sp.
MTQKAYRYRFYPTLEQEQLLRRTLGCVRLVYNKALHIRTEGWYGHTERIDYKQTSAMLTNWKQQEDLQFLSEVSSVPLQQGLRNLQKAFTNFWAGRAKYPNFKKKRSGGSAEFTRAAFKWKDGQLWLAKCSEPLPIRWSRVLSDGGVPSTVTVKLDASGRWFVSLLFYDHTVKALPQINKTVGIDAGITSLIATSDGEKIVNPKHFKRLRYKLRQAQKALSRKVKGSNNREKARREVARVQSSIADARKDFLHKLTTRLVRENQTIAVEDLAVKNMMKNHKLAQAIADASWSELVHQLEYKCQWYGRTLVKIDRWFPSSKRCGNCGHVVDKLTLDIREWDCPECGTHHDRDINAANNILAAGLAVIVCGANIRPDGHKSKGQLRKTTERSRSGKKQKPKS

SEQ ID NO: 50616 - protein, 471 aa, unknown
  TnpB Polypeptide
MQGMRCILIQPRLTKEQEIVLGNLTYNVGKVWNAANHLLINGKASFNLFDLYNNLRNNFFVRNIQSRSAQILMGQLIEAWKTYFDYLKHPDNYKFPVRKPGFSDKKRPHRTVVYDKTGFKVFRTKLRLSIPKQLREYLREEYGHNSKYLWIDTGIDLTAYDIRNVQLTPLKYSGRIFYQIGIVYSVKENSNQHTKKERLMGIDFNKANFAVIVIQNHPTAYIIDGRGLMGLLRKYLKKIYRLQSRKGNLKNKGLPYHKLEERIAKLWKRIKNLLRGFSHKASNLIVELAKKFKVTKIIVGNVYSSKNEESDLPDLVNQMFKLLPHGKVVDHLRYKFREVVEIGEEYTSGVDSVKHEYPCEENYEPWKRESRGLFKSLVGLINADVNAARNIIKKHLVNEGRTDHSFLRDTASGLRRVTRLRVFRSLKGSSKSAVLEQIGVANCVPLGAVRGANASNPSRSPLHERGAIHSD

SEQ ID NO: 50617 - protein, 463 aa, Nocardia sp.
MALHRRDRQRPFSVGGWCDAVAVGRFTSFRFCLDPTVEQQSLLSRHAGAARFAFNQCLAMTKAALQSRRRNQDVRVPWTGFDHINGFNAWKRTEQAGRMFAVDSSGTASLVVVGLGWRNEVCQQVFEEAAVDLGRGLVAWRDSRIGKRAGRRVGFPKFKSKTSTVPSFRLRNKSSPRGRAMIRVGDDHPRSVTLPVIGAVRVREDTRRLRRMIAAGRAKIVSATVSYRAGRWMISLTTEATDLHPAHWHPVRDGDDRGGWVGVDRGLSAFLVAATGDGVEVDRIADQPKPLVTGMARQRRLARSVTRKRKGSRHRREAAARLARHHHRIRNLRAYFLHQVSNRLVKTHDRLIIEDLNIAGMLRNRCLARAIGDAGWGEFARQLRYKQGWRGGEVVTVDRWFPSSQLCSRCGARTVGLTLADRIFTCGCGIRLDRDLNAAINLATRGEHLDLCPSSGARSASPG

SEQ ID NO: 50618 - protein, 349 aa, unknown
  TnpB Polypeptide
LSESLLKAKKTIKAKILELRKGKEEILKREYENFQRYLHGDKSVPLYSATRQQADRLLKRIGKPREGKEYPLILRRDVYRAETKLTRYWLKIPVYGVKGGINVPVKPHTPIIQNMVCREAKIVRRKGEWFVYITVEVEVPEKNPSSVLAVDLGIHNIAATVNSADGKPKFYGKALRAVRGHYFHLRRRLPNRKAVRKVGAHEKRIVNHELHKVSKAIIQEAVKGNSMIVVGKLKGIRRNGKGRRFKRKLNSFPYFKLVSFIKYKACWQGIPVLEISEAYTSQTCSRCGKRGLRVRGLFQCPHCGLNLNADYNGARNILKRALGKLHGEPLSSAGACLTMPELLAEAKSQ

SEQ ID NO: 50619 - protein, 421 aa, unknown
  TnpB Polypeptide
MPSFYRTQTLKIEPQPIFPVVNGASADVWNDCSTLMDFYQYQRGYPHAHRDFYFGKDCEGWIDKQLSNPILQSQSRQAVRERYFKSWKSYSVVKKNGRIQNPKPPSKRKKYMTTRFKKSAIRFVEGTLFGKRVELSLARGQPKIDIPLPSNFDMSKVEHIATIDLCYNYGQWTLHFSYKYETETTATGEEVVGVDIGEIHPIVSDDGQDTHIYNGRYIRSLYRLRNKVLANFSKAISECKRHSKRWWRLTRRKWKRIRKIDNQIKDALHKQTTKFVKYCHAKGIGTIVLGNLTGIRKNIDYGKRANQKLHQWAFGKISKLITYKAKTLGIKVEVLDESYTSQTCPKCGNRKKPNNRNYICKCGFKYHRDGVGAINIRAKYLGHFGVHVVAEKVSDRMTPPLGFRLIVPKVQVALSQIKECS

SEQ ID NO: 50620 - protein, 385 aa, unknown
  TnpB Polypeptide
MRKSCKFKLQNQSNTIKIGNMIDDMWQIHVHIMLLDRRYYRIYGKNVSISRLNRHVTELKKRAKPHWAELPSQVVQDVVLRYGKSRDAFFDNIKDRKNGKTTRKVGFPKIKPRHKYNSLTFTQAGYTLEDNRIKINCINTWFSIHKHREIQGILKTITIKRDRCGDYWICFSCDNVDDSDPKPMTGKSAGFDYGNKTLLTSDTGRKIESPEFLNQSLKVLRSLSKALSCKVKGSGNWYRVCRALARHYRKISRQRLDWQWKLATQLCTEFDILIFETLNLDGMKRLWGRKVSDNAFYQLLEIIEQKCAKHGKTFHKINMWTATTKPCSDCGYHNKELSLSDRQWTCPECGSHHDRDVNAARNIKRAGLAALSGADVRRRTLRVTR

SEQ ID NO: 50621 - protein, 447 aa, Streptomyces sp.
MLRQPDTENRTNYRSISIFGVPCVICVRSVVDMQLRYNYRAYPDVPQRRALASAFGCARVVWNDCLRDRKKAHAAGLPYVTSAELSRLRITQAKRTEERAWLAEVSAVVLQQSLRDLDTAYKNFFDSVKGKRQGRKVGPPRFKSKKDTRQSVRLNTNAFCLHANGTVYVAKVGNLKVTWSRRLPAAPTSLTVTKDSCGRYFLSFVVDTEPDILPGVETDTGIDLGLSAFAVLSDGTKIASPRFLRRAEKKLRRLQRELSRKTKGSKNRAKARIKVARQHAKVADQRRDFHHKASTQIIRDNQAVYVEDLAVSGLTRTRLAKSVHDAGWSAFTGMLEYKAARYGRTFAKVGRAFPSSQVCSACGFRGGPKPLHVREWTCGACGTVHDRDHNAGRNVLFEGRRIVAAGRAETRNACGAPVRRAHVPAQRREAGSHRKGRQTAQAGVPGL

SEQ ID NO: 50622 - protein, 323 aa, unknown
  TnpB Polypeptide
MTRRNNAIRATVSMNIAISETLLVFSKKYLESLRYVLYWLKEKRINPNKGNVISIVHKELYKILKSFNLPSKIAQDCYRNALSIYKGWHNNPKKGRFPIIYKPTVWLTPKLSYTIDFERMVVRISKLGEFKILGYPRNIKEYLSWKMKEARLVIRNGKAFIKITFEKFIQKIEPKDSIAVDINMQNITVGKDENNFVRINTRINEIHRYKSLAERLQIKYPKIWKENRNIKRRILSFHSKAKRIAEDFERKVSKRIIDEAIRMNSNVIKLENLKYMIKKVKKLHKKYRNKLYLMQYRKVQYWIDWQSKKHGLLVKYVYAAILQ

SEQ ID NO: 50623 - protein, 542 aa, Streptomyces sp.
VGGLREVAVPFVVPGPSGVAVRTRLGQLTVSDEEVLRRVGVHLGALAGRDLKARCRDGLAHDAEAWAVRKRELTPHSSARWAGSVTKATHDQWALARRGQFARIRSLEAGVRMIAHRLSLPVGSKGAKKTPGGYRSRREWHAKARRLRVLEDRLARERADCAAGRVRVVRGGKRLARTRHHLPAARLTESRWRQQWEAQRWFVQADGESGKRYGNETLRIAPDGEVSIRLPSPLKELANAPHGRYVLAGRITFAHRGQEWADRVEADRAVAYRIHYDVARGRWYVTASWQIPVFRTIPMAAALTHGVIGVDMNADHLAAWRLDVHGNPTGSPRRFCYDLTGTATHRDAQVRHALTRLLHWAKARGVQAIAVEDLDFTGEKTREKHGGRKRFRQLVSGLPTGRLRARLTSMADQTGIAVIAVDPAYTSRWGAQHWQKPLTSTTRITTRHDAASIAIGRRAQGYSVRRRAAPPRAHRSDVHGHRTAQAGPDAPGREGPRRRVPGPRTRSVPPDVERTRATSASTTVRDAPDAQVWVQDSLLLTD

SEQ ID NO: 50624 - protein, 382 aa, unknown
  TnpB Polypeptide
VEQMKYTFYKGQKFRIYPTDNQIQFIHQNEGNARFVWNTLLAYLIESYEKDKNFKFPTKNELTRMIPSLKGKHEFLKYSESSSLQFVAETLHDTFVRFFNKKAGFPKFKRKSYSGSFTMKENHNNIRKESNHFFKIPKINGLLKSQRIKLDGKIKKATISFTPSGKYYMTVLVECESQTLPKTGDKIGIDIGLIDFAVLSNGIKEKMPKFHNQYKHKRLMWERKCARRRTLAKQRLGDNWRNSKNYQKARQMVAKYREKEANQRRDFLQKLSTYLVRSYDVIAIEDIKSSNLMKNLKLAESIMRSSWRMFREMLAYKCERYGKELIIVNPKDTTRICSACGVNGGKKELSIREWQCQACYTLHDRDINAAKNILSKGLVLTQ

SEQ ID NO: 50625 - protein, 450 aa, unknown
  TnpB Polypeptide
MKINTCYTVDIKSQYIFKDGQAVGIRRVDEAVMKATRTACLDALKFCVNAFLSDWDSLEELSCLMRKRRGDLLIHSTKNNIAAYQGFDESFPYLPSYMRRAIVADALGIVSSYVSNHRNWERLSVFERGSEPKVGYPTAYELTFYDQDRILNLSEGSVGLKLYSGKEWKWYYFRIGESDARYIAKMAASRKLLSPVVEKSKGRYRIRFCFEESRKLIQNEDPFVYTVLAVDLGINAPASWCVMTAEGSVHARGVIRLVGDEDRLRHAINRKRMYQQAGKKSHSIYRRLKHANELLAINTAREIIKTAVLYDVDCIVFEHLDLKGSKVGRRMKERLHLWCADNIQDRVELHAHRNGMRISRVCAWGTSMLAFDGTGRVQRGMDAGLGSYSVCRFQTGKIYNCDLNASYNIGARYFLREYKKLPGCPELPKTSRCILADLRNLMSAYPALAA

SEQ ID NO: 50626 - protein, 299 aa, Megamonas sp.
MIKRQVIVVKTYCFKLYKAKRNKKLHKVINIAGIIYNHCIALHKRYYRLFKKSLNIYKLQKYLTKLKKIGKFSYFKEVGSQAIQDITQRIDRDYKLFFRNLKHKIRTAPPSFKKIRKYKSFTLKQAGWKLLKGNIIEINKQKYKYFKSRDIEGIVKTITIKRDTLGDIYLYFVCETKENKVLARTGKSVGYDFGLKQFLTASDNEDIKAPLFFKQNANDIKKANRILSRKKKTSNHRRLAKIALARLHKKISNQRKDFHFKLANKICSEYALICIEDLNIKGMQNVGVEKYLTMDLVNL

SEQ ID NO: 50627 - protein, 388 aa, Ruminococcus sp.
MIRTVKVMLCPNNRQRTKLFECAGTARFIYNWVLDYEQLNYECDLPFISDYKLRKRLTELKKTHPKFMWLNDYSNNIAKQAVKDACNAYLNFFNGTTGFPNYKSRRKSRPSFYVDTDKIIFTATHVKLEKLTLSKKSNKQKFNHIRLAEKGRIPVNTKYSNPRVTFDGLNWWISVGIEVPENTIKPVNDGIGIDIGIKTLAVCSDKKEYRNINKIKTVRKLKKKKRRLQRKISRKYCKNKKGVCYRKTCNIIKSEKQLLKITHRLTNIRHNYIHKATSEIVNRQPKFIVMEDLNVKGMMKNKHLAKAVQEQCFYEFYRQIQYKCKWNNIEFVTADRYYPSSKKCICCGNIKKNLKLSDRVYHCDSCGNTIDRDYQASVNLMKYYELTA

SEQ ID NO: 50628 - protein, 547 aa, Streptomyces sp.
MAEQTRKPLRQIARPFVTDGPTGVSIRDRLKSLTGEDEKVLRAVGEHMGRLASADLTRRCRDGLDHSTGTWAARKRDLTALSSSLWAGSITSHTHDQWGLSRRAQHAHLKSLDAGIRTIRHRLSLPVGEKGSRGTPGGYRSKHEWFHKSRRLAVLEERYERVRAEREAGQVSVVRGGRRLLKQRHNLTAAEKTPEQWRSEWEAARWFLTADGESGKRHGNETIRVTPDGEVSINLPAPLAGMANAKHGRYVLAARVTFPHRGDQWRDRVTCNRAVAYRIHHDTASGRWYLDASWTRKGLPVIGLDALRSGGVIGVDTNADHLAAWLLDEHGNPVGSPRRFDYDLTGTAPHRDAQLRHALTRLLHWAQATGVQAIAIEDLDFTDSTTREKHGRKKKFRQLVSGIPTGKLRARLLSMCAEAGISVIAVDPAYTSMWGAQHWQKPLTGKNGKTSRHAAASVAIGRRALGHAIRRRTAPPHDDQSDRRGHRTAQAGPRDQGREETRPRVPGPRTRCVQPDAAGTRATSASRTVRNAPVEPVWVQDSLLLTD

SEQ ID NO: 50629 - protein, 403 aa, Lentzea sp.
VRTAYRCRAYPDPGQIAVLNRTFGCVRLVWNKTLAERQHRYHAEGKSTSYRETDAALTSWKHTDELGFLALVSSVPMQQVLRHQHAAYQGFFAGRAKCPRFKSRSGRQTAHYTRSAFRMRGGSLHLAKTCGQLHFMWSFREVELSTVDPTMVIVAREPDGRWYVTFAVDTAAPATLPATGRAVGVDLGLKDFAVTSDGERIRNPRHLDRKARNLARYQRRMARTERGSRNRLKAKSKVAAAHRKIRHTRQDFLHRTSTRLVRAADVIVIEDLAVANMVRNRRLARAISDAGWGEFRAMLEYKAQRAGRVLVVVDRWYPSSKTCSACGHLLAELALSTRCWTCPVCRSRHDRDINAAKNILAAGRAVALADSQGDACGVDVRRQGTSLTRSAVKQETHAVRHTA

SEQ ID NO: 50630 - protein, 433 aa, unknown
  TnpB Polypeptide
VYKRASLGQSNVRLFSYKVRPGKPTVYLTVGRKAGELVHKLVKIKWYNRPIPKKGGNVMRTVTQTYEFKLYDSKKNKYLDEQIEIASEVWNFCVAMCRMYYKVYGKTLSVNKLKKYITKLKKRRKWQHWNKLGSQAIQDVVERIGRSYDAFFKHIKEGRHGRKSPPGFKKRTKYKSFTLKQAGYSFEPNSNVVIISGRKYKFWKSRSIEGTIKTVTIKRTRWGEYFLFVVVKKECNDVLPRAGKSVGMDFGLKHFLTLDDGTTIDSPEWFKASLAEIRLAHRRLSRCKKGSHHRELAIRNLNKVYEKVSNRRRDWFFKLANLLVGEYAIICIEDLNLDAMKRLWGRKVSDLAFAEFVSILEWVASNAGTEVVKIDKWAASSKTCHICGEVNSGLTLKQRSWDCPHCGNHLDRDVNAAINIKRLGLAKLGYSAV

SEQ ID NO: 50631 - protein, 503 aa, Mycobacterium sp.
MSPAVIGWTGTSLLAGGCRCGVRQSLAMDRHTTFRFCLDPTVEQEQALARHAGASRFAFNQCLQVVKSELTRRRTDPDTAVPWTGFDLINAFNAWKKTEDAGRIITVDSAGVAEVAVTGLAWRDQLCQQVFEEAAVDLGNGLKAWSDSRSGKRAGQKVGFPRFKRKTTVRPSFRLRNKQRKSRPAAIRVGDNDRPRSVTLPGIGAIGVHDDTRALRRMLTKGRATICFATVSRHSGRWWVALNVAAADLHPALRHRQRPDGEQDGWVGLDRGLSVFLVAADAAGAELARIVDAPKALAASMKQQQRLAKSLSRKKEGSQNRRDAAARLGRHHQRVANVRRHFLHQVSGEVVKTHDRLVIENLNIQGMLANHRLARAISDAGWAEFARLLRYKQAWRAGQLVEADRWYPSSRLCSICGVRRSDLSLADRVFVCVNEHCLDRDLNAATNLARWGQDHYDSHRSPDPQAGGRATKVRRRDGSDHHLRVGETSPKDAETDVHAAPAA

SEQ ID NO: 50632 - protein, 409 aa, unknown
  TnpB Polypeptide
MLLVRKCVVYDPDSEAILKHMSYSAAKLWNVGNYEKRNYRLLGMERFPGWYDQKRRLKANFFYKNLPSQTAQDVLQELQEAWKSFFRLCETRGVKNPRPPRFKRKDMDITFLQAGICQRNGLIRLTIPKQLKEYLDKLGNGADFIYLKAKSLSNTIIRQLRVKLLGNGKIQLSAVYQKEAPAVLEDNGRYLSIDLGIRNTFTCYNSVTGTAFIIKGFLEIQQGYNKQIAHYQSIHAKRQAALGIRYPKSSKRVQFLYKKRNRTINDFLHKATAWIRDYCVRNRIHTVVIGDISGIREDNTLGRKNNQPFHAFPYRTIYQMLGYKLALCGISLAMQDEAYSSQCAPTSKRVDKAHAAKHKRCKRGLFKDRGIIYNADAVGTYNILRLYLHKTGKEATGFRDLITVSKVTV

SEQ ID NO: 50633 - protein, 527 aa, unknown
  TnpB Polypeptide
MKKCLASRYIKKADLQSEENERILQDLFAFNSMKRTSFLWQRQRRKFLKEDGKELSHQLKLKEVFACNDYFANSARMTAAGMIKSGQELAKLYIEDAKEDIKAIRKVLRKKKKYRKKLLKIKTSIIKYSKDPKNSLKGSANIRYEKDGSVTVQFFQKVWTYETLYLFEHQWLDRKLRQLKTQIAKMKHKLKRLEIRQQRLKAHPLKVRFGGKKLTKNRTISERHRALEKRRNRRMMVSGRKDCKYGNWVFRYDTETKTLEYRSMTDWDGDRICFPNVTFPYGQEWIESWLQERKGAIAWEIIDCGTAWQIRCILTKEAEDMNGYYGDGAIGIDINYDHIAMTETDQSGNLLHHKIFRYGMEGKTSGQIKHQISEVLEKVFEYADQQHKPITAENIKSIQRKKFYDKHRKRHRHISMYASACIRELLTSKAVKYHIGVKFVHPAYTSKAGKMRYLRRYGLSVHEAAALCIARRGQEFKESIPSYLKPYLKNEKVRALIPQQWGSITKLINKVTTQDLLLYMDPVIHRN

SEQ ID NO: 50634 - protein, 276 aa, Campylobacter sp.
MKTLQRVERHIIKPYNKNYNSLLLLANKTKNLYNYVNYLLRQDFITKKPQIKEYDLSKKLASEKQFDYKELPSQTAQQTIKLLYKDWKSFFKCLKSYQKDKNKFTSNPKLPKYKRKGEKGHHIAIFTNQQAKIKQYKNFNKIVFPKSVNIKSIITKIDTNISSLKQVRIIPKATCFIVEIVYETNQLAINYVKNSFLSCDLGLNNFVTTIDTQSKQPLIINGKGIKSINQYYNKKKAYLQAIAKKSNNRFITKQLLKLLNFRENKLNDFYIKQVIF

SEQ ID NO: 50635 - protein, 416 aa, unknown
  TnpB Polypeptide
MLRAYKYRIYPIDEPKALFAKTFGCCRFVYNWALNLKITAYKERKETLGNVYLTNLMKSELKAEHEWLSEVNSQSLQSALRNLDTAYNNFFRNIKAVGFPRFKSRKNRQSFQCPQHCSVDFKKGTLSIPKAKGIPAVLHRKFKGMVKTVTISMTPSGRYFASVLVDTAIQELSASTIQGNTALGIDLGIKSLAVCSDGRTFDNPKNLQRSLDRLKLLQKRLSRKQKGSANRNKTRILVARLQERIANCRKDSLHKITHALTHDSQVHTICMENLNVKGMQRNHHLAQAVGDASFGMFLTLLEYKCSWYGVNLIKIDRFAPSSKTCGKCGYIYKGLKLSERSWTCPECGTHHDRDFNAACNIKEFGLKALPTERGKVKPVDCPLVDDRPRVLKSNDRKKQEKRGGIGISEAHAFRRE

SEQ ID NO: 50636 - protein, 245 aa, Escherichia sp.
VKRLQAFKFQLRPGGQQEREMRRFAGACRFVFNRALALQNENHEAGNKYIPYGKMASWLVEWKNATETQWLKDAPSQPLQQSLKDLERAYKNFFRKRAAFPRFKKRGQNDAFRYPQGVKLDQENSRIFLPKLGWMRYRNSRQVTGVVKNVTASQSCGKWYISIQTENEVSTPVHPSALMVGLDAGVAKLATLSDGTVFGPVNSFQKNQKTLARLQRQLSRKVKFSNNWQKQKRKIQRLHSCIANI

SEQ ID NO: 50637 - protein, 380 aa, Chloracidobacterium sp.
MLRTASIRLNVGPDQAAALAALQAAYADACNRLVPTVVEHRCWNRVALHHLAYARLRKETPLGAQMVCNAIFSVCKAYKAQKELGRIRKDAPVPAVHFNRASVHFDKRTYAIKGECLSLYTLSGRIAVPMVLGEHQRRILASGKAKEAELVCRKGRWYFNLVVESEDSDPIASGRVMGVDVGENHLAATSTGKVWGGGQLRHKRNGYLALRRRLQSNGSQSAKQKLRQVSGKERRRITHINHETSKAIVAEALRFGASKIVMEDLTHIRDRIQAGKRMRARLHGWAFRQLQSFVEYKAKAAGIAVEYVDPAYTSQTCSCCGALGRRIKHRFVCNKCGLRAHADGNASRNLARIGSGAPLPRAAVNTPDVGDVSHNCCVSQ

SEQ ID NO: 50638 - protein, 446 aa, Chloracidobacterium sp.
MQLTHKIALCPTPEQVDYFKRACGTARRVWNWALNEWNRQYAAGGRPNAMALKKQFNAIKYTDPQWLDENGRPWLRDIHRDAHAQPFAHLAKAWERFFTDLKAGKEAHAPRFKKKGRCRDSFYVANDKFRLVGKTIRLPKIGEVAMTEELRFKGKILGATVSRTADRWFVAIQVEVPDAQFYRRRTSHEVNGVDLGIKAAATISSGEVIEAPKPLKAALRRLEIRSRRLSRKLEAAKQTAGFERHARLPKGTRLPVSNNRQKSAAILARLYARVANIRADFTHKLTTRLCRENQALVIEDLNAKGMLQNEKLARAISDVGFGMLRSQLEYKARRYGTRLTIADRWYPGSRLCSICGWKNEALTLRDRTWVCAQCGAHHDRDLNAALNLKRLATETALPVASPSSNGGAAAGTVPAVVGKVTPVRYDGGQQDTSGQEENRAHFCAHS

SEQ ID NO: 50639 - protein, 290 aa, Chloracidobacterium sp.
VKVSGSHIRIPKLGWVRMREPLRFSGKIMSATVSRTADRWFVSITVDTDDPPRRPAENQGVVGVDVGVAALATLSTGETIPGPKPHTALLKRLRRLSRSLSRKQKGSRNRARARRKLARLHARTANIRQDALHKLTSKLTSELTRRFHTIVIEDLNVRGMLANRRLARSIADMGWGEFRRQLEYKAARRGGLVVAADRFFASSRTCSACGHQLEVLPLSVRRWRCRACGILHDRDVNAARNLLAYGLAVLNGSTASSAGCQACGEEGSGGGRKAVVKPASTKQEVSFVPA

SEQ ID NO: 50640 - protein, 513 aa, unknown
  TnpB Polypeptide
MKTVRTMVLVNLSKEFEEELSELMRRFCSCKRYAFNRLLEGKSANDLNKILPTIFDLNKRYAEDAVLLASGIIASQKELLPTRLEDVQAKIAKTERKIVLYQTGKRKPKKTDIETCLKGLNARLEKLRKKELKLVRCVEENTIPPVIFGGKKNFFKRMSGDISNTEWKELRSNELYSRGDKSKKGNLNLRVVYDENVNKFFLEIANPVNTEERISPRIRCEVSIPDKFFNEILDIIFPDKDGFQQPYTIQILRKSGSLYINLIYEEVVYGNELRSKDQLVVGDKLAGIDVNIDRIAVTILTKQGNFLKSKVFYYHEMEYVSSHRRSNIAGVVAKEVIDYLLAENIGAIALEDITLRQQHDTNKKFNRLTHSFAKKKLMEALNRRGLRNGFQIKKVNPAYTSVIGRFKYSQKLGISVHEAASYVIGRRGLGFEERLSKEVIRLLKEQVKPHLIKLLASMEESEKKSVWGKKQRKYFGMLLNNIDHFKELHRWKVWNVVHKTLRLINGEPLIITL

SEQ ID NO: 50641 - protein, 387 aa, unknown
  TnpB Polypeptide
VTELTETLELKLVEPNAHKHRKLCETKQTYQDALEAAFNANCTSQSAANDVVVNYDLSGYAKNALKKYVPQLCGGSYDAKELHDDHPVRFTNEGPKLDHKPQNGIEWYVKIPHHHDYNLWLPAQPNPEQRDWLEALHAGDAKMGECRLFDRNGEWYFHIVTTRDVEERPSSASETPIGVDIGEASLVTVCHRNERGSPAAPTLWNDEGKRVRQLRETYFTATRRLQKRGSERIAESYGDSLWRQIDDILHTVTSEVVAYADQFENPVLVLEDLTHIRENMDYGTFMNRRLHGWGFAKMHAQLRYKAAEKGFVWRRWIPRTPRRRHCCAEQGYRPDQATFKCSNSECWVSEYHADINAALNIADRYLSGESQSREHTDGDDSAEDGAV

SEQ ID NO: 50642 - protein, 316 aa, unknown
  TnpB Polypeptide
MGGDQVVIKDEKYLKVPNLGLVKLKEKLRFKGKINGLVISQNANKFYASFNMQIDKSEYEATHKTKQSESLSVGIDLGISSFATLSNGLSIKAPKPLDKLTRLLAKRQRQLSKKQHAKTKQEVVQGIKKSNNFIKASKKLSKLHSKISNIRQDFTHKLTTHLVTHYDEIGLETLKAKNMMKNHKLAKSLSDVSLSKFNEILEYKANYYYGIKIKRADSFYPSSKTCSKCGNVKEKLSLSQRVYICDECGYKADRDLNASINLHKLVGQVLPELTPADLTALLDDLAINQIITSKVVSFSSRSNSELETGIQQKSNL

SEQ ID NO: 50643 - protein, 396 aa, unknown
  TnpB Polypeptide
MKLVEIHLIKRGEQHFDEIDDLCFKSKNLFNSALYAVRQHFFETGKYLNYYSVDKLFKETNQPDYRELPIKVSQQILKGLDIAFHSFFALNKKFKEGKYPNKPNIPHYKDKVKGRFEVTYTNQCFSKPLLRKGIVKPSGTNLQIVTKCIPETINQVKLVKVNRDVAKIVVIYTIPDPTSKEDNKRYASIDLGVNNLATVSSNVIKPYIINGRPIKSINQFFNKTLANLQSKGLVRCQYKKDSLSRWRMNHLNDYLHKASRYIVNQLVSNNINTFIIGYNKSWKQDTNIGKVNNQKFVQIPHLKFVEMLEYKCKLVGITVIRQQEAYTSKCSFMDNEQIKKHKEYVGKRVKRGLFKTRNGKLINADVNGSLNILKKAVGEFQYPIEVCSTPCVITLR

SEQ ID NO: 50644 - protein, 338 aa, Blautia sp.
  misc_feature (284)..(302): Xaa can be any naturally occurring amino acid
MKIISSYGVELRKQNIPIRQTLEIYRSTVRYLVKVYESVWEELAQIENSKKRFNAAEHLVHTTKRNPARFDFDFCFPKIPSYFRRAAVQHALGSVSSYQTRLEQWKAEGQKTGKPYLKSEQYAMPVFYHNVMYRENTEEKDAAFLKLYDGHDWKWFAVRLKHTDMEYLRKHWSGKKASAPTLEKKHDKYFLRFTYAEEVSLNRTPVKEQTICSVDLGINTDAVCTIMRPDGTILGRKFINFPSDKDRMYRVLGRIRRFQREHGSRQAQGRWAYAKRLNTELGRXXXXXXXXXXXXXXXXXXXDTRQRTNDLQCGSRHQYGCSLYHHASRRNYPGEKVY

SEQ ID NO: 50645 - protein, 416 aa, unknown
  TnpB Polypeptide
VRKCIVLNSLDLTIKKSDLLNSFVNEYLRVSDMTCLQLLLSDTPNELHQLTYSNIRKTSFLPSDIIQEARKDVWKSRKDILNNGHKFTKYSIRLNKRWFRYIKTKRGNPCFKITYSPRKTFTIPIRTDRQFQRFNDFLRNDWTFDNISLLKDGRIFVILEKEFTEPELSNQYVLGIDIGSSTLASATLFDIKTSKIVKQLYFGRDVAIRQRRYSKRRDKLKSLADKGSHRAGQSLKRLGHKQSDFVKTRSGQIAKEIVNLAKRYDAYVAIEKLKSLTGRKGQFNKKANRKINRIPYGKFKEFLKSNCEMFQVPLYEIDAYHTSKWCPKCGALNKGHQSRNYSLYKCKCGLIVNSDRKASLAVAIKSVLERNKTHSLTNLSSIQISKTRVPVNGLLRPDDVGIKVAVQHDYQPMECL

SEQ ID NO: 50646 - protein, 225 aa, unknown
  TnpB Polypeptide
LQRQHWAIAIGRKAFRGEMDPIAGRLERLWRSLGRGEKKRDYRMKTANMIVRDAMRTRGVIVVERISGDDIRVMIARYRDKQLRHRIYQSALKGELNAIIDKAREYGEPVLMVDPRNTSKICPIHNAPIEYGEDRIGICSKGGERWHREVAALTNIYLKALEALYEGPAQKSFGVLGIDGSPMPLGSTATSEPIEISRSLWRRWKSLDAAGLKTLWIKNTATQTN

SEQ ID NO: 50647 - protein, 387 aa, unknown
  TnpB Polypeptide
MTTAYKFRLYPKKEQQDKLDLSLEVCRQTYNHLLSGLDERFTKSELQNYLLDLKVVFPEMNNIHSKVLQMENQRLFGNLSSLSQLKKKGKKVGRLRFKGKNWFKTFTYNQSGFKLTHIKNKKGILFLSKIGDIPIKLHRKVEGKIKSITIKKSLGKWYASIVTDGIIKRECGTGEIGIDMGIMNYIYDSNGKSYENPKHFDNYHQDLKIAQQSLSRKVKGSNSRKKARLQVAKIHERIANARNDFIHKFSTKLIKENKFIAIEKLNIKNLIGISYNAKNIADCSWGKLSTYLHYKAENAGCVVIDVDPAYTTRNCSFCGTRNNKLELSQRKFVCKNCNTELPRDYNSALNIFVCGKELATMEKSSNTYHSDKQEVSMKSEASSVRVG

SEQ ID NO: 50648 - protein, 395 aa, Streptomyces sp.
MLRRAFRYRFYPTPQQAELLNRTFGCVRYVYNRALAERTRAWYTEQRRVTYAQTSAMLTEWKRDPELAFLHEVSSVPLQQALRHLQAAFTAFWDKRAGYPRFKAKKHGRQSAEFTRSAFRWREGKLTLAKMSEPLDIRWSRPLPEGAEPTTVTVSRDAAGRWFVSILVETLPASPHEVGVDAGLTALVTLSTGEKVTNPRCERRDRDRLARAHRALARKQKGSKNREKARLKVARIHARIVDRRRDLLHQLTTRLVRENQTVVIEDLSVRSMVKNGRLARAISDAAWRELRAMLEYKCRWYGRHLVVVDRWLPSSKTCSACGHLLDTLPLHVRKWTCPSCGATHDRDVNAARNILAAGRAVTACGDGVRPQRSTPSGQSSVKQETQPARVGLPRL

SEQ ID NO: 50649 - protein, 397 aa, Streptomyces sp.
MLTGRRYLLAFTPEQEEFAEKIGDACRVVWNTALERRRQYRRRGAFTGYVEQARQMAEAKKDFPWLAEAPSHTLQQTLRDLERACTRHGTFKVRCRSKRKSAPTFRFPDPEQITVERVNRRWGRVKLPKLGWVRFRWTRPLGGQLRNATVLKDGGRWYISFCVEDGLVESAPNGKPPVGVDRGVAVAVATSDGWLRDRQFVTAGEEKRLKRLQQQLARQRKGSNRRAATRAKLAKLNARIRARRTDFLAWTANRLTRDHGLVVVEDLNIKNMTASAKGTVEQPGQNVRQKAGLNRAILAKGWGGLLTALEHKARYNGSRILRVPPAFTSQTCHACGHCAPDNRESQAVFRCRACGHLDHADVNAAKNILAAGLAVTGRGDLAVRRSAKRQPPVTEVA

SEQ ID NO: 50650 - protein, 356 aa, Streptomyces sp.
MCGCRGGRSYRFHPTPQQADLLHRTFGCVRYVYNWALALRTEAYVQRGERLCYAATDRALTALKADPEHAWLREVSSVPLQQALRHLQDAFAAFWDKRAGYPRFKSKKRGKASATFTRSAFRWRDGQLWLAKCSEPLAIVWSRPLLAGAEPSTVTVTRDRAGRWFVSILVGDPTIRPLPEVAGEVGVDAGLTSLVTLSTGEKITNPRHERRDRARLARKEKGSKNREKARLKVARIADRRRDLLHQLSTRLVRENQTVVLEDLSVRNMVKNRRLARAISDAAWAELRAMLEYKCRWYGRRLVVVDRWLPSSKMCSACGHVLDSLPLHVRAWACPACRATHDRDVNAARNSWPPDGR

SEQ ID NO: 50651 - protein, 383 aa, Lactobacillus sp.
MYQGLKLRIYPNLEQQKQIVENFGATRFVWNQMLDMQSKRYKNNKDSKFLNGFAMNFLLRQLKTEYPWLKQAESTSLQDTCETLAVAFQRFFKKLGGYPKFKSRKFPKQSFKSKCINNNVRLIDNHYLKLPKLGIMKYRGKFTDDKIKSTTIQLSPTGKFYCVLLIECENQTQFSKTNKTVGLDMGIADLIITSDAVKYPTIRFDQILAKKKHYWEKRLARRRLLAQKEIAWDKHNKVVEPRELANFKNYTKAKQMVAKYSEKIANQRKDYLHKITIGLVKDYDKIVIEDLKTNNMIKNHKLARAIANQSWRMLRLMLEYKCKWYGKVLSVVNPYKTSQLCFNCGYDDGKHELDIRAWTCPQCHTQLDRDVNASKNILKLGLG

SEQ ID NO: 50652 - protein, 545 aa, Streptomyces sp.
VGDLRVVGASFVVPGPSGVAVRDRLKGLTVEDERVLWLVGDHLGSLASRDLKARCAAGLEHDGDSWAARKRVLTGLSSSRWAGSLTKATHDVWALARRGQQAHIRQLEAGVDTIRHRLSLPLGERGSKRAAGGYRSRREWHAKTRRLRVLEDRLERARADWAAGRVRVVRGGKRLLNTRHHLEEAQLTEEVWRARWEAARRFLQADGESGKRYGNETIRVSPDGQVSIRLPAPLTHLANAPHGRYVLMARVSFAHRGEMWRDRIGANRAVAYRIHEDTGRRRWYLTASWTIPPIPVVPLITVRAGGLIGVDTNADLPHARLRSRGGTPTAAWRLDAHGNPVGAPRRFDYTLTGTTQHRDAQVRHALTRLLRWAAGHRLAIAVEDLDFTAETSRERHGRRKKFRRLISGMPVARLRARLVSMAAELGIPVVAVDPAYTSRWGAQHWQKPLTTSRRATTRHDAAAVAIGRRALGHPIRRRTAPPPTHQRDGYGHRTVQARPETPGREALFISGLRLRAAPASPDHGHDPCRPDAERTRATWGYLPRP

SEQ ID NO: 50653 - protein, 384 aa, Streptomyces sp.
VTVVKLRYQFRVYPSAPQKNELAKAFGCARVVWNDALRIRQDAYEQGKPVPSIVELAKLVITEAKKTPERTWLGEVSAVVLQSSLRDLGTAYANFFASRKGTRKGPKTGPPRFKKKTSRQAVRFTRAARFSVTEDGRLRLPKIGDVSVRWSRRLPSEPSSVTIIKDAAGRYFASFVVETEDKPLPELDREETDTGIDLGLGSYAVLRGRKIKTPKFFRRQEKKLRRAQRKLSRAQKGSSNRRKAGLAVAKVHARVADQRRDFIEQETTRVVRESQAAYLEDLNVKGMAKSFGKSVHDQSLGMFARTLEAKCRRYGRTFVKVDRFFPSTQLCSHCGALTGPKGKEGLRIRTWTCDCGARHDRDQNAEHNLRLQGRNIVAAGRADT

SEQ ID NO: 50654 - protein, 404 aa, unknown
  TnpB Polypeptide
VRKGRYKLSIQYYSNCWKLLKIAELQRAAKKRSDYIVEKAFKFRIYPNKTQQVLLQKSFGCARFVYNYFLAKRIEKYKQDKSNMSYNQCSKELTALKQEFEWLQEPDKYALQKVLKDLDVAYKNFFSRPEVGFPKFKSKRDNHKSYHTSCTNGNIKFLGNKIQLPKFGKVRIRDKRIQIEGKILNATISQNPDGRYYVSICCADVPNVVLEPVNHNVGIDLGIKEFAITSDGIKYANPKYLTKSLKRLKFLQKSLSRKTKNSSNRNKTRIKVARMHQKIANQRMDFLQKLSTEIVRNNDIMCLEDLQVKNMVRNHKLAQAISDVSWSEFIRMLNYKANWYGRRIIKVDKFFPSSQTCHSCGNINPKIKDLSMREWTCPQCGVVHDRDVNAAKNILNEGLRITEA

SEQ ID NO: 50655 - protein, 185 aa, unknown
  TnpB Polypeptide
MVRKPITRTITGNRKRNLVSFRHVWQKSKRAAVITKKLQAKIQKLHAKIKNQRNDFLQQESTKLVRKYDVIVVEDIDLRAIGGALKLGKNLHDNGFGMFRTMLAYKLEQKGSCLVKVDRWFASTKTCSHCGHVQKINLDERTYVCEECGFTINRDWNAAINIREEGKRIFLNYFKILIEEKQAAA

SEQ ID NO: 50656 - protein, 425 aa, Streptomyces sp.
LKRQRGHKALLDLTPAQLWKIEDQGHAARAMWNLLHDLWTMTPKCQRSLSRMDAEIRRARKDIDWLAALPAQAAQQVLKTYMRAWVNCWEGRAQAPTFKIRSRTRAAIDIPQGRDLRITRLTRRWGQCWVPMVGWVRFRWTKDLPVGKRADKNNRVTGARLIKEANGWHIVFRLQREVEDPKPHPGPGVGIDVGVTRPLALSDGSFRDHTPWLTLKEQERLRRLERTRERQKSHRRPGEKTSNRLHRTNQLIAGYRARAKRRTLDWQHKTTTDIAETFGIVGVEQLNIPNMIKSARGTTEEPGTNVRQKAGLNRAISGEAWGRTVNLLAYKLPDRGGHLIKVPAPNTSKRCHACGSLIEGNRASQAVFVCKNEACGWSGNADTNGSYNIETATRKQTPQDIAGVRTWSLSQWAGPEASTTPPVTL

SEQ ID NO: 50657 - protein, 423 aa, Actinomadura sp.
MQADATAHYFLRMPRYRLAPTVEQETVLVGHCAHARFVWNLAVEQQACWRLGRRTAPGYVEQARQLTEARREFAWLAAGSVTVQQQALRDFAQAMAGFFAGTHWRPTWRKAGRHEGFRQVGLKPGHVRKVSRRWAQVWVPKAGWVRFRLTRPVPDGVRSYRVTRDASGRWHIAFAHIPGPVPAPGNGRAAGVDRGVVVSAALSTGELLHIPGLTAAEARRFRLLERKLARARKGSRRRAAVKRALNRLRARLTDRRKDWIEKTTTALAAGFDVIGLEDLKIKSMTASARGTRAEPGRGVAAKAGLNRAILASGWGQLATRLEHKAPGRVVKVDPAYTSQRCSACGIRDARARESQAVFACRSCSHTGHADVNAARNIQQMARACAAGHAVPAREGPRTSRPTHREPHPGRLPSGAGQSGIPVR

SEQ ID NO: 50658 - protein, 265 aa, Mycobacterium sp.
MARLKVPEGWCVQAFRFTLNPTQTQAASLARHFGARRKAFNWTVTALKADIKAWRADGTESAKPSLRVLRKRWNTVKDQVCVNAQTGQVWWPECSKEAYADGIAGAVDAYWNWQSCRAGKRAGKTVGVPRFKKKGRDADRVCFTTGAMRVEPDRRHLTLPVIGTIRTYENTRRVERLIAKGRARVLAITVRRNGTRLDASVRVLVQRPQQRRVALPDSRVGVDVGVRRLATVADAEGTVLEQVPNPRPLDAALRGLRRVSRARSR

SEQ ID NO: 50659 - protein, 395 aa, unknown
  TnpB Polypeptide
MRFRLYPSAAQRVLLLEQCGHARYVWNLGLEQRLMWRRWKGPTPGFNAQAAQLTAARAAQPWLACGSQIVQQQALRDLDRAWRNFFAGTHRRPKWRRAGQDEGLRIVGPQALRVRQDNRARSSVLVPKIGWVSFKVGRVLVDWKSYRITRDRAGHWHIAFAVIPDPIPAPCNGEVVGVDRGVTVAVALSTGQMSSPAGLRLKESERLLRLQRRLARARRGSNRRKKVKTLVGQMKARDGDRRKDWVEKTTTDLARRFDVIRVENLNVKAMTRSARGTVENPGRHVAQKAGLNRGILKSGWGQLVTRLEQKALGRVEKVTAAYTSQTCNACKHIASESRKSQAAFVCVACGHRANADVNAARNIAAGQAVTARGDPRVLARSVKREPQHARPPKVA

SEQ ID NO: 50660 - protein, 162 aa, Geobacillus sp.
MNRNNKVNDYINKTCRYIINYCIENQIGKLVIGYAETWQRNINLGKKTNQNFVNIPLGNIKEKLEYLCKFYGIEFLKQEESYTSQASFFDGDEIPEYNADNPKEYKFSGKRIKRGLYRTKSGKLINADVNGAVNILKKSKAVDLSVLCSSGEVDTPQRIRIA

SEQ ID NO: 50661 - protein, 286 aa, Geobacillus sp.
  misc_feature (38)..(41): Xaa can be any naturally occurring amino acid
LKQEESYTSQASFFDGDEIPEYNADNPKEYKFSGKRIXXXXFEIQYKYEMPEDQRELNDQKALAIDLGLNNLATCVTSDGRSFIIDGRRLKSINQWFNKENARLQSIKDKQKIKGTTRKQALLAMNRNNKVNDYINKTCRYIINYCIENQIGKLVIGYAETLQRNMNLGKKTNQNFVNIPLGNIKEKLEYLCEFYGIEFLKQEESYTSQASFFDGDEIPEYNADNPKEYKFSGKRIKRGLYRTKSGKLINADVNGALNILKKSKAVDLSVLCSSGEVDTPQRIRIA

SEQ ID NO: 50662 - protein, 388 aa, unknown
  TnpB Polypeptide
MKRLLKSFKTEINPTEEQKARIRRTIGTCRYVYNFYLGHNKALHDNGEKFMTGKDFSLWLNNEYIPDNPDKTWIREVYSKAVKKSIEDGCTAFTRFFKHQSDFPKFKKKGKSDVKMYFVRNNPKDCQCERHRLKIPTLGWVRIKEKGYIPTTKDGYMIRSGTVSVKAGRFYVSVLVEIPDINIDNNSNEGIGIDLGLKDFAIVSNGKTYRNINKSAGLKKLEKQLIREQRSLSRKYENLKKGESTQRANIQKQKRKVQKLHHRINEIREDYENKVIHEIVKQKPSFITVENLNLKGMMKNRHLAKAVGAQRFNYLLTKLKRKAEIIGIEMRVVDRFYPSSKTCHFCGHIHKGLKLKDRVYICPECGYTQDRDFNASLNLRDAKKYRIA

SEQ ID NO: 50663 - protein, 402 aa, Streptomyces sp.
  misc_feature (262)..(295): Xaa can be any naturally occurring amino acid
VKRAFKYRFYPTDAQAAELSRTFGCVRKVYNLALAARTEAWTRQERVNYNQTSAMLTAWKKTEELAYLNEVSSVPLQQALRHLQTAFTNFFGKRAKYPRFKSRKKSRKSAEYTTSAFRFRDGSLTLAKMAEPLDIVWSRPLPEGASPSTVTVSQDAAGRWFVSLLCEDPSVKPLPATSAAVGIDVGLDHLLTLSTGEKIANPRHERRDRTRLAKAQRQLARKARGDGANRAKARRKTAEVYARITDRRRDHLHKLTTRLVRXXXXXXXXXXXXXXXXXXXXXXXXXXXXXXXXXXGRRRAAPRRRHPRRPHPARLAAHGEVRSAHQRHPAGQEDLSERSRRRGHRRDDPGPDRPGAAGRPAAGAAPHPSVELPVGPVVRPLLGLHAGRAAARRRRRHGGVGA

SEQ ID NO: 50664 - protein, 445 aa, Natrialba sp.
VQSSKLTQTLSFGLDIHTGSGDDLQTGCIEARRIRNEANRLDRAGWDWDEIKSTVVANADHVNNTTQLIVDKALGEIKTYHDNKDDGWGRPYPYIDESYPMVMNHSEGYRLFPEDDGTVRFRITATRGTHVKGELRGNPDHFDRLQIAFNDEEWRVGTAEVVHKHGEWRLHVTVTHETHRVASKNDADTIVGVDVNEDCIALAAMSRNGGVKQSVVFEYPSVKEQRHEFFTKRKRMQKANQTAFASSVQTEERDYVHDCLHKVSRQVVDWVSQFEDPVIVFEDLKDMRDSIDYGTRMNRRLHSLPFAALQNMVSYKAAWEGIPSDVVDPEYTSQRCPRTECQHTERANRHKKRFKCKRCEFQDHADRKAAVCVVQEWFDEQSGNVPSLETLPRVWTVRRAASGAGGGPGSHGAIFASGVHQHGTSAQPEMEAREELKTVASAVQD

SEQ ID NO: 50665 - protein, 360 aa, Microcoleaceae sp.
  misc_feature (295)..(331): Xaa can be any naturally occurring amino acid
MYAVQKDVWHLTGLDKTIVEQLLRWSNNLFNVGTYESRQRYFKDRSAVKYQDLYKIAKPNENYGLLYSQVGQQSLKSVAESFSSFRALERLAKKGELNQKPRLPKYRTKGAMYQVTYPGQALKIVGNRVRLPLGTKGKEHFGTDALWVTLPERLKNCQIKELRLIPRNGKVWVEFVHESLTKQAPSCSWEVTGILGIDHGINNWLTCVSSKGKPFIIDGHKLKSWNQWFNKEKARVQSVHDQCKLPKGFSSHRLQQLSETRTRRMRDAVNKAVRTIIDYCEDRQINVLVFGWNKXXXXXXXXXXXXXXXXXXXXXXXXXXXXXXXXXXXXXKSIWEVRLTKALSKYPQLKSKIGSCKSVT

SEQ ID NO: 50666 - protein, 399 aa, Clostridium sp.
LLRTYKTEINPTGEQRRQTRQSIGVCRYLYNFYLAENKELYNQFKNGLIDKKQAFMSANNFDIFINHAIKTQEEFAWINECGSKARKKAICNAETAFKRFFKGQSKFPNFKKKKNQDVKMYFPKNNKGDWTVERHRIKVPSLGWVQLKEKGYIPINLKVTSGTVSFKASRYYVSVLIDVQDTNDYSTSENQGIGIDLGIKDLAIVNTIEKPFKNINKTKEVKKLEKKLKREQRKLSRKYESLKARNKKIKKEGGNATRHNISKKIAIVQKLHQKLSNIRTNYVNQVINEIVKTKPSYITIEDLNVRGMMKNKHLAKAVAQQNFYDFRVKLAFKCKLNNIELRIVDRWYPSSKTCSNCESINKDLKLSDRMYVCPVCGLIIDRDKNASVNLANAKIYKVA

SEQ ID NO: 50667 - protein, 330 aa, Clostridium sp.
MVKGFKYRIYPTVEQETQLAKTFGCVRFIYNKMLAKKIKLYETVKKSLSKTDCNNYCNRELKKEYLWLKDVDKFALTNSIYNLDNAYQKFFIEHSGFPKLKSKHDHNYSYTTNFTNNNIKVLFHNNLVQLPKLGKVKAKLHREFKGKILFATVSKVPSGKYFVSFNVETENFKLSINNNMIGFDLGLKEFLIDTNNNHIERPNIRNDFSNKLSSQIINDNQVIISEDLQVSNMIKNHNLAKSIQDVSWSEFTRQLEYKVNWYGRTYHKISPWFASSQICSDCGAVNKKVKLLSIREWTCEECKNINDRDENTSKNILKQGIKELGFEVAI

SEQ ID NO: 50668 - protein, 354 aa, unknown
  TnpB Polypeptide
MKINRVEQTQINKNHPIWSVIDQYSYYSKNLYNYANYIIRQEFIKTGNYIKYHDIDKLLHHEQPYKQLMSQASQCTLQMLDRCWKSFFVTNEEYKKNPDKFLGKPSLPKYKKRDGRYPWILKNNQIYFENGYLWFKLRVFNGYRFKTHLTNNDRIISIRFIPKGCIYVLEVVYEKEIPAITEQESKRIISIDLGVNNFATITNNIEQQPIIINGKGIKSINQFYNKRRSKIQSQLKILNKKDWSNKLSRITLKRNNRVKNFMNNASKRIIQYCIKNQIDTIVIGKNDGWKQNSKLRDKTNQHFIGIPYESFIQMLEYKGQDVGINKENILQDGYITYLLCKLLNIKTIKTIVEN

SEQ ID NO: 50669 - protein, 414 aa, unknown
  TnpB Polypeptide
VILRGFRYKLAPTAEQAGLFRQFAGVCRLVYNLALEQRRDWWRHYERETGSRLNYVAQARELTALRAEYDWIATVSQTCQQQALRDLDKAFVNFFAGRASYPSSRKKGINDSFRFQGREVETKRFNGKWSAVRLPKIGWVKFRDTRPMRGTVKNVTVSLDPLGWHVSFACEIEHEAPVNICPSVGIDRGVANTLTLSTGERLCVPTSLESIERRHRAAQRVLARRKRSSNRRHKQLQRCARLAATRARIRRDWHHEAALNIARCFGKVVLEDLKIRNMTASARGTVDEPGRNVRQKSGLNRSILNQGWHGFETLLAYKLEERGGTLVTVDPAYTSQTCSECAAVDRESRESQAVFLCRHCGFSAHADHNAAINILRRNTASMRVEESISSPMKRELDGGSRLPKIPSVPRRGRC

SEQ ID NO: 50670 - protein, 374 aa, unknown
  TnpB Polypeptide
MKLTIKAKLLTIPGHHLSLKKTMEVFNNACNYISQKAFQSKTFNQVKLHHLIYKEARKQFPELSSQFIVRAIAKVSDSYVVEKKRLHKFKKYSAVVYDQRLLSFKRLSIASINSVSGRLKIPFIIGRYKSLEGKSIKGQADLTFENNKFFLNIVIEFPDGTPFDPKEFLGIDKGIVNIVVTSDGDTFSGKQIDIVRKKTAEIKSALQKRGSKSAKRHLKKIAKKQSRFQKDTNHCISKQIVSIAKGTERAIVLEDLSGIRSRQKVRRADKQRFGNWAFYQLDNFIDYKAKIAGVPVIHIDPRNTSRTCSVCGFVSKSNRKSQSVFSCKSCGITLNADFNGAINIASKGNPINLPIAVHAPIAIPHALGTASPRL

SEQ ID NO: 50671 - protein, 464 aa, unknown
  TnpB Polypeptide
MKIVSSYAIRIKNADKIFSQTIRIYRSAVKFCINVFELEWDFLKDIDNSKYQAAAARSLIHSTKSNQAKYPEFDILFYKYPCYLLTATINEAIGILNSYHSNLENYENSDKEGNPPRLQANHLIFPVFYRNNMSLYSDGSDTIQLKLFIDNDWKYMTFHLNCNDAVNIVKRAGEHRLSAPALEKKHKTWRLRFSFEDNQKLNNTPLKNRTILAVDLGINTCATCSVMKYDGTITARKFIDFPVEKDQLNHALNKIKKLQRRFGSHNVKKLWRIAKDKNDEIARKTVGELIRLAADMGADVIVFEHLDTKHKKSGTRKQRLQMWNHQYVQNLVTHKAHLLGIRISRICAKNTSRLAFDGSGLVLRGKNAGFNTYELCKFQSGKIYNCDLSASYNIGARYFIREIEKLYINESKLNSEIVKNNSKPADEKISLLSEMRAEVPGFQKRTQNTLKTLTAIHEYLAACA

SEQ ID NO: 50672 - protein, 374 aa, Streptococcus sp.
MKLENLSKTVDHIYVRRYRVVVTPELIEHHARNMQTQNQLWNFANKYLERTYGRKHLNRPYPNNKKQKSVVIDDIRAKFIKENYSLDRWNAKVVGLHSQGANEFLTTLLTNFGEYRKVLYRASKMTTQEKTDCVNNVHGNNSQHRSWYRKGSLNYLHGNNSFKTVSLPNNNQVEIVSAHHIKIQDYGELQVVENISNLRNVTIAITKLKRKSNGQFELQLVLKRQVARVEPTAKVAGDWNMTNNKVFHTSNDEEIYISNDIVTKADALERQINGLKSKRDKSVWLGRSSRRFARMNDEIRHLNIKRENVLDEQYRQLAHALMDDYDVVVIEDLDAKDMRAKKRQARSANRKLAMIKPYRMAQLIEMLQTALVRR

SEQ ID NO: 50673 - protein, 389 aa, Chlamydiae sp.
MKKHCGKAYWWQKMMRTIPLKLILVPDQMTQALSLQNAFSEACNEMVPYVIENRCWNRVDLHHLVYKETRNKSSLGSQMVCNAIYSVCKAYKSQALLGRINKDKPVQELSFRKGSVHFDKRTYSFTKTGQLSLYTLSGRMKVDFVMGERQKELFLNGKPKEGELVCRKGEWYFNLVLELPDVPKVERKIVMGVDVGENNLAATSTGKIFGGEALRDRRDRFLARRKRLQSNGSQSARKALCKASGKESRYVKHVNHEVSKAIITEASRAGASCIVLEDLTDIRDSIRGSKRIRSRLHRWPFRQLQEMIFYKAENVGMEVVRVNPAYTSCTCADCLSLGQREKHQFRCFSCGLRAHADCNASRNLARIITSADVIRAEVSRPNVGTTCVP

SEQ ID NO: 50674 - protein, 411 aa, Streptomyces sp.
MNLVVKVKLLPTPEQAAALEATLRACNRAATHVASVAFDTGVKDRNGLQKLLYADIKATFGLSAQPAVRVVKKVVDAYATLAAQARAGLLGKATSKRYRSAMSSPVGFRPEAAQPFDDRCLSWQQDARTVSIWTVDGRMKALRYTGSADQLKILHEHRKGESDLVQRGGKWLLIATCDLPEPGVSEPADWIGVDRGIVNLATTADGVNYQGRGLRRYRNWCARKRAEQQKKQTRSATRRLARRSTREQRHATHMNHRISKEIVSVAQRTGRGIAVEELDGDTATGYGFDATSATRSPPGPSTSSAGTSPTKPNRPGWLSSRWIRPTPRSAARAAAIPRSPTGPLGTTSVVVGAVSLDPPMSSPGSTCVIAHARRGRSSPCPSPPPRHSRNQRGDATRDRPVVGDSRERDNA

SEQ ID NO: 50675 - protein, 397 aa, Streptomyces sp.
VTTSHVKRAFKYRFYPTDAQAGELSRTFGCVRKVYNMALAARTEAWARQERINYNQSSAMLTAWKKTEELAYLNEVSSVPLQQALRHLQVAFTNFFGKRAKYPRFKSRKKSRKSAEYTTSAFRFGDGELRLAKMSESLRIAWSRPLPDGVSPSTVTVSQDAAGRWFVSLLCDDPGIKHLPATDDAIGIDAGLDHLLTFSTGEKIANPRHERRDRVALAKAQRRLAKKTDGSANRAKARRKVAKIHARVADRRRDALHKITTRLVRENQTLVIEDLAVRNMVKNRKLARVISDAAWSQFRSMLEYKAAWYGREVIAVDRFFPSSKLCSTCGALRDKMPLSVRTWTCDCGAAHDRDVNAAKNLLAAGRAVAACGAGVRPQRSSPGGQSATKQETSRREP

SEQ ID NO: 50676 - protein, 390 aa, Streptomyces sp.
VKLVVRVKLLPTPVQAAVLEATLHACNEAATWAADVAFTTKAMKPLALRKHTYQQIRARWRLGAQAAQHVIKKSCDAYTALRANLRNGNYGKPGSKRYAKATGKPVAFRQDAAQPYDDRMLSWQHHARTVSIWTTSGRMKNVAFTGEAGQLAVVAARRQGESDLICQGGQWFLLATCEITEAEPNTHLVGFVGVDLGIVNIATTSTGKRHSGRRLNRRREADRSLRSKLQKRGTKSAKRRAKKHAGKEARRARDINHKISKRIVAEAQRTGRGIALEDLTGIRERARLKKPQRVTLHSWSFHQLGAFIAYKAKRAGVPVVHIDPAYTSRECSHCHHVEKANRSTQAVFTCRSCGFAEHADRNASHNISHRGWYQWVRGAESHAPALTLIA

SEQ ID NO: 50677 - protein, 390 aa, Streptomyces sp.
VKLVVRVKLLPTPVQAAALEATLHACNQAATWAAGVAFEENARRPLELRKHTYAEIRARWGLGAQAAQHAIKKSCDAYTTLKANLRSGRYGRPGSRRHTRASGKPVVFRPEAAQPYDDRMLSWQHQARTVSIWTTAGRLKGVRFTGQAEQVEVLAAHRQGESDLVCQSGKWFLIATCEIPEGDLNTHPAGFLGVDLGIVNIAVTSDGERHCGRRINRKREQDRKLRSKLQKKNTKSARRRAKKHAGKEARRNKDINHKISKRIMAEAERTGRGIALETLTGIRERARLRKPQRTTLHSWPFAQLGSFIVYKAKRAGVPVVSVDPAYTSQECSKCHHTERGNRPAQAVFSCRVCGFVEHADHNASHNIRQRGWMVWVCGAQSTAPELTLIA

SEQ ID NO: 50678 - protein, 447 aa, unknown
  TnpB Polypeptide
MDLNGILLGIEVQIFIERRITRMKRTIKQRLKHLTKDEYLILKELTHEAKNIVNEAIYLKRQHFFNTGLYLDDKMTRKQMEDNPSYRILNSNMSQQIIKKVDLMFKSFFGLLKAKKSGKVSSDRKIHMPRYLDKNGYYTLIIQEVPKFENNKYYVPYTWKFSKTHKRIAIKLPLTLVNKKDMIKEIRIVPRYNAKFFEVHYVYNIEETQPQINFDLSKVLAIDLGINNFATCVTTEGKSFIIDGKKMKSYNQWYNKRNAILSGIKDKQKFGNDLTKQQICLTLKRNNRILDYISKASKYIINYCISNKIGTIILGYREDFQDKFNIGVKNNQIFGYTPFGQFKFKLEYLCDEVGISLIIQEESYTSKASFLDNDDIPIYDKNNLLEYSFSGRRIKRGLYKSAKGILINADVNAAFNILRKSKIVPNEIVRLYSSGALSTPVRIRLHQ

SEQ ID NO: 50679 - protein, 419 aa, unknown
  TnpB Polypeptide
MSQNSKNSAKYGYHATKTKIKPNRTMKRYLDKCFGYRRRCWNRLLACYLREKETNPKVKIDKELLKKVRQDGLQADWEKEMPAFIWSEVQMTLAETIYRHGKANFKTKKKTKDSFIMDYSRIRDKKLGYFVKRGTHQYFRFTTGRYSGIDDDLKWIKIMEDIEYYPDDGDTLSEVSISKEAGIYMASFDIKLGTPLKETEGSGKVGIDPGVHNLMTLSDGTVMNFDIKTKKKLAKLDKRARYYDKVMGRKRNKNKDWKTSKHYAKAKTKHQRVCLKIKDIRKDNLHKMTTQIVKTYKWVYWENVKSKNMVKNSKLAKAIYGASWGIIRIMLANKCKMHYANFITVPVTFAATQTCSSCGYRRPKEQKLTLKDRVFVCPICGHIEDRDINAAKRIAQYVPSKKKDATCNAAMLAGAQPSE

SEQ ID NO: 50680 - protein, 370 aa, unknown
  TnpB Polypeptide
MKLIAQLQLKPTPAQEAALLATLERANLACDTISQIAWEAQTFGQFALHKISYEATRTRFNLSAQVVVRCIKKVCDAYALDKKVQRTFKPHGAISYDERILTYKIEAQAVSIWTVEGREKMPFACGERQKALLQTRQGESDLALVKGKWFLLATCNVEEPEVDNSGGVIGVDFGIVEIATTSEGQSYSGEKVKALRRKTREHRRRLQKRGTRSAKRRLKKAAKKQERFVRDTNHCISKELVKDARASKKALGLEDLTWIRARAHGLNKEMRWQMGNWAFAQLRQFCEYKARLAGVAVVVVDPRLTSRTCAECGCCEKGNRKSQKHFQCLACGHTANADANASQNIARRAAVNRPIVAGLPSPVTSLTACR

SEQ ID NO: 50681 - protein, 391 aa, unknown
  TnpB Polypeptide
MLKAFKYKINPTKEQSILLNKHIGASRFVFNLALECKQMAWAGNKVNLSCFALHSQLKNLKTECEWLKEINSQSLQQSITNLDKAYTAFFKGQNSFPNFKKKSNGGSFNIPQNVSLEDGKLVIPKFKKGIDIVLHRPIKGEIRQATIRRTSTGKYFVSILCETGEPIKPKATIKENTTVGIDLGIKTYLVSSDGKEFDNPKFLRKAQSKLKYVQRKYSKHKGKRTKHKLAILHEKVANQRKDFLHKTSSELINNHDSLAIEDLAVSNMVKNHKLAKSINDVSWSTFVTMLEYKAEWYGKNILKIGRFEPSSKLHANCGHINKDLTLKDREWTCPKCGEVVSRDLNAAINIKSFALKNNLSVERRLKNRGELPTLVGVLIHEAQPIASGVGG

SEQ ID NO: 50682 - protein, 397 aa, unknown
  TnpB Polypeptide
MKNIHKSYKYRIYPTKEQESLLSKHFGCVRYIYNHFLNERKEKYQEHKKSPNYYAQAKTLTGLKKKKETDWLKEVNSQTLQHALRHLDTAYLNFFRGKAKFPRFKSKKNKNSFTIPQFVTVENDRLNIPKFKEGIKINLHRKLEGEIKHCTISKTPTGKYFVSILCEVKYQPKEKTGKSVGIDLGLKDFVITSDGIKYENHKHLKQYEKQLAKAQKHLSRKVKGSNRRNKQRMKVAVLHERTVNARLDLLHKISTQITNEYDTICVEDLNVKGMMANHKLAKHIADASWGTFVRLLEYKADWNNKQVVKINRWYPSSKTCSECGWIHQDLNLSEREWTCANGHKLDRDINASKNILLEGLKIISSGTGDYTRRAKIRPQLVGAQALKREAHLSLVNG

SEQ ID NO: 50683 - protein, 426 aa, unknown
  TnpB Polypeptide
MRKSFKYRLYPNKVQIQKLELQLNATRSLYNAALEQRIHQYKSTPKFWNENKKKYTSSVSSLTAYDQMRFYPEARISDPAGLGQVPAQTCNAVLDRLHKAYKAFEKRVQVGAGKAAGFPRFKGRDRWDSLVYPTYGSGCKLVKLPSGRFVVRFLNIGLVRVKIDRSILGTIKTTIIKREANEWYVVFSCNNVPCQRLPNTDKQVGIDVGLNTFAMLSTGQAIENPRWYRKAAVALTEAQQSLSRKAKGSNRRQNAKKRVVALHTKIRRQRADFHHKLSRTLVNQYGLIAVEDLNVKTMSKRCKPKSSLPNGLNKSIADAGWSQFLNQIAYKAEEAGRVFVKVKAAGTTSTCSQCGRVQKKTLAERIYTCECGLEINRDLNAAINILRLGQSQQAQACKETFVSPTDGCIESEGSQKFGLAEAIQIV

SEQ ID NO: 50684 - protein, 197 aa, unknown
  TnpB Polypeptide
MGIDLGVKELAAVSYGDDSLIFHNINKSSKMRKLNRELKHLQRSVSRKYEENRQGNKYIKTNNIVKLEKKIYKINRKISNIRTNYIHQITHKLVELLPKRVVMENLNVSGMMKNKHLSEAIAGQGFYRFISYMKYKCEWNGIEFIQADKFYPSSKTCSCCGKIRKDLKLSDRVFRCECGAEIDRDINAAINLKNYVA

SEQ ID NO: 50685 - protein, 493 aa, Moorea sp.
MPKKIGATRKISTQIVPVVGMTESVKTELLFTMKKLGIVRSESYNKLGSINHWGLDWKKAIPEVKSFRNPDSLGLPAKLMDWAINDVAKAITAQQAACIDAVAKRIYRRFPGKENQNKRKELCKQLKTVAFLDNPLLHRLVRRFFQRGHSWIKNQIVYQQVGYKCKRLYRNTYQLELAGLRRGKRNRIVVRSNRKIKGQIRLIHNQLLQKFEIHFLVDHGTVEIPSERRSLGVDKGYTEAFYDSDGQAHGKDLGKVSTKKSDRICAKNRNRGKLWALHRKLEKIDSVKSARILENNLTRKTENRRYRKNQAELTAIIGAASKSLFNGESLKVFAVRVAWPTASDLTQPIRNKRQSKAVSRKLNSWMKGVMRDSLQKWADWTGSVVTEVQPSYTSPIDSRNGTLLGKRTGDNFTGFDGVVLQADHNAAKNILARGTDFEITRYMSKTEVQAVLLRRTARWLKGMGLSLVDAVELGWLDCKHTKTQAFNQLLIEM

SEQ ID NO: 50686 - protein, 415 aa, Moorea sp.
MRIAYQYRLKPTKQQKAKIDHWLSMLCAQYNYLLADRFRWYEENRCSINACPLVCHLSELRDNPDYYSQKKTLPNLKNTHPWYRDIHSQVLQDVVKRVKHAFDRFVKGDCNGKRSGKPRFKKQHRYRTFTYPQMKEGCLDGNLINLPKIGKIKVLLHRPIPDGFKIKTASITKKCDRYYLVLSLEDKTVPEVKPDINPDSIVGIDVGLKEFLTTSEGETIEIPQYYRKSQKRLKVIQKRVSRRKKGGSNRLKAIKQLGRQHKKVADKRKDFHFKTANYLLSKYDVVAHEKLNVKGLAKSRLAKSVLDAGWSSFLTILASKAENAGLLAVPVSAQNTSQNCSNCGKKVTKKLHTRWHDCPHCGCSLDRDHNAAINIRNRAAGQSVLKAQRLLSDGRIGWEAYTLTQRVSVGAVTND

SEQ ID NO: 50687 - protein, 122 aa, unknown
  TnpB Polypeptide
MQKLVREQRRLSRKQKGSHNRNRQRIRVARVHEKVTNQRNDFLQKQSTMLVRENQTICIEDLHVKGMIRNHKLAKSIASVSWAKFFEMLEYKAVWYGNELRRVPTMYPSSQTCSACGYRIRW

SEQ ID NO: 50688 - protein, 432 aa, unknown
  TnpB Polypeptide
MMSIKAYKYRIYGNKATTDKLYRVLTLCRELYNAGLQERRDAYEICVKRHPNYYDEASRKQLTKEHGISVYAQKRDLVEIKEVIRPEYQDIASHVLQDVLFRLDKAFKRFFQRVAEGKPPGYPRFQGRNRYTSFTYPDGAGWKLDERTRPPEKKRMVRVNLKLSKIGTVKLHLHRDLVGTIKTLTIKREGEHFYAVFTCEIGKPEALEVASEDVGIDLGVTHFAALSTGEFIEHPRHYRRAEKRLKKLQTALSRKKRGSHRRARAVSRVACAHRKIRNQRRDFAHKASRQIVNRFQIIAMEDLKTANLVKRPKPKQDEETGQYWPNGAAAKAGLNKSIQDAGWGLVTELLSAKAAWAGRTVVFVNPKYTSQICSGCGAIVTKTLEERWHSCACGTELDRDTNSGKVILDLGHQQLLGRDASHAGNCVEAPGL

SEQ ID NO: 50689 - protein, 368 aa, Paenibacillus sp.
MLMKRAYKYRIYPTPEQATLINKTIGCSRFVFNHFLAQWNDAFKETGKGLTYSACSAELTKLKQEIDWLKEPDKFSLQNALRNLSDAYNRFFKKQNDTPKFKSKKNPVQSYKTNYTNGNIEIVDNLIKLPKIGLVKFSKSREIEGRILNATVRRNPSGKYFVSVLAEVEIHELPKTGNEVGIDVGLKDFAILSSGEVFGNPKFFRTLEEKLARAQRKLSRRIKGSYNWYKQCIKVAQIHEHIANTRKDYLDKISTHIVKNHDIIAVEDLQVTNMLGNGKLLSKAISEVSWSMFRSMLEYKAKWYGRIVVRVGKTFASSQLCSCCGYQNKDVKDLNLREWNCPVCGTHHDRDFNASLNILAEGKRLLTV

SEQ ID NO: 50690 - protein, 179 aa, unknown
  TnpB Polypeptide
MRLLATLGVEVDREPPEPTENPERCVGIDVGILKYAHDTDGTAVRSLDLSNERERLEREQRKLSRKQHGSNNYEKQRRRVAERHADLRRKRRDFLHKLSNYYAREYDLVAVEDLNVKGMMESPSNSRNTASAAWRTFRSLFEYKCEREGAHFVAVNPKGTTKECASCGVSTEKPLWVRQ

SEQ ID NO: 50691 - protein, 423 aa, unknown
  TnpB Polypeptide
MEGDAPRRTVPIKIDVPSDREADLHHTKDQFLDCANQTSDWAWRYDDYCITSKAKAEKALYADLKTEHDLTANLVQKAIRRAIEAVDAGVDKLKKGKKTSQPVFDSWSVVYDKRSATFNADHATLSTVNGRVKADYVLPPKDERDDTPFGRYYESDDWDASHATLQYDEHSEEFYLHVTVKQPDGDETEDNGRQAASHSDDDPENGVVLGVDLNVDGAFAVTSAGKFIGSADYLTHKRDEFEKRRGSLQQTGTRSAHLTIKSIGSKFSDWSLDWLHNRVNELISEAERINADGIIFENLKHIRENIANGSKFQQWAYSKFVKITEYKVESRELFVDFVSPAYTSQRCSCCGFTHEDNRDGKAFACQQCGYEVNADYNAAKNVSVRYCGYIHRGQKSRGGWAGCQSALKSGTLNVNGDFNVSTV

SEQ ID NO: 50692 - protein, 204 aa, unknown
  TnpB Polypeptide
LCCTDVEVPQFTKTNKNIGIDLGICDFAIFSDGTKIENPRFYEKSEKKLVMLQRRLSRKTKGGSNWNKARIKVANLHKHITNQRKDFLQKLTTDIVKNYDVICIENLDVKSLKESDNTQTNKHVSDVSWFEFRRMLAYKTQWYGKKLSVIDRFYPSSQTCHICGHVSGKKSTDIRAWTCPNCQSELDRDINAAINILNEGLNSK

SEQ ID NO: 50693 - protein, 151 aa, unknown
  TnpB Polypeptide
VEKAFKYRIYPTKKQQQLIQKTFGCCRFAYNYYLNIRKESYEKDKTSITYNMCSKDLTLLKKQLEWLREPDKDALQKSLKDLDMAYQKFFKEHSGYPKFKSKKNRYKSYRTSCTNNNIRYDNRRIKLPKIGWIKTKDKQLPQGRILNATIS

SEQ ID NO: 50694 - protein, 505 aa, unknown
  TnpB Polypeptide
MECVRRAVAVEVENPPPELYAVEEPYRRIVEEVAAYVAEREMLEKEKYEELYRRFRELYPLPAQLIQQAINQGVEIGKSFLQRKRDSRVHKPRPEMRRVSIRFAKDSWSYKKAISSVAPVRLGLSLPSGRREVWIKPHRRFWLYWWKVLRKEAELASTLVLKRRRGRWYAVFVFDVMPKREPPAEAVAFDVNENSVAVARVSLLSTVDAVAQWNRQYLNSAVYSIKTDFGRLAKRYEAVRNAKLEELKQRYPYAGGDDEEKVQNVTDTREYKKFVRRLRERRRKEGRVRQIAREVTKSPAVIITEELGKNPQEEMIGLEKKAKKGVKKKVGKRELRHRIKQTPFKRLVRAVEDKAAEGGSVVVYVSSYRNSKVCPIHFSLLKNGSGWHTLHCPHGHDVDRDHAAVLNMLWKITPEGAAKGVWWDLRDVKRRLEKGRGLVPKEAVRRRNPLVTWPVVYAIWTSLAQLKASSQWPAVLARAAPMTPAQGADEGGTRAPPRGAGTPSL

SEQ ID NO: 50695 - protein, 132 aa, unknown
  TnpB Polypeptide
MLRNPSLSKAIADASWSEFVRQLRYKGEWAGRSVVAIDPYFPSSKRCSCCGFTMQKMPLDVRKWHCPECGADHDRDINAARNIKAAGLAVLACGESVNPKTLSAAQVRLRETRIPFLQGGECQNRVLPVAGR

SEQ ID NO: 50696 - protein, 380 aa, Vibrio sp.
MLRATKVRIYPTSEQAEFLIAQFGAVRFAYNKALHLKSHMYRKHGVTLNPKKDIKPLLAVAKKSRKYHWLKQYDSIALQQSVINLHQAFDNFFNPKLKAKYPQFKRRHGRQSSYHCVGVKVLDGAIKLPKMKPIEANVHRDIAGVVKSITISQSKTGKFYASILADDEVEAPTPPHTVRKVTGIDLGLSHFSIESNGRKTANPRFVKRAEKNLRRKQRQLSRKAKGSANRAKARILVAKCHEKVANARADFQHKLSRTLVDENQAVIVETLKSANMMKNRKLAKHIADASWHSFVTKLEYKLKEQGKHLVKLEQWYASSKTCHCCGHRMEEMPLSIRKWDCPSCGTTDIDRDLNAALNIRDKGILELKAAGRSFLLMEAA

SEQ ID NO: 50697 - protein, 404 aa, Methanotorris sp.
MSNKTKSKNNQELTYQVVLSYKVSHNYPLKTFLTECKDKLNISIDIIWNNIEWSKKGYPKLPKSNEFKRNLRNKLLENWEYASHYIDGIIKTAYSILQSWASNYKRDYRTKTKPIVERLFVRVKTTLIKYDKEKGEIRITIKPRKDYLTLNIKDEWFFDKVRGLSIGEIILKENEAFLTFKDNLNHSDKEIIVGVDSNLKSLDLFHPIEGWIRVDLTELHRIKEVYDKKIDFLKKLLKKCPLRALRKMKRLFERRKNRVNDFLHKLTTQLFRLFPNAIFVFEDLNKRKMYKNKYHNRRIDRANWKGLIEKISYKTIVILVNPAYTSTTCPVCGSKMESQEGQVVYCSECLNSFNRQLAGSFNIFKRGLGRIKKLMGGLGVISERSDENLKTVRFLCPRQGQRFL

SEQ ID NO: 50698 - protein, 532 aa, unknown
  TnpB Polypeptide
  misc_feature (48)..(51): Xaa can be any naturally occurring amino acid
VKPKVQGFKVTAMDISDYAVQYLTSMCVILPSSIGGRWIALADRQQKXXXXLVLVIKYRSKVVDDKVSDRLKEIFELICPKYSIISREWNYNKDHVHLLFRGSPNTDISKFLNAYKSASSSLIKKEFPSIRNQLWKGCFWSRSYCFITTGGAPIDIVRKYIENQGMKWGDVVLKAYKYRMYPNEEQKKYLSKTFGCTRFVYNQMLAERIKSYEENKHLDIKNIKYPTPAQYKIEYPWLTEVDSLALANAQLNLNKAYKNFFRDKSVGFPKYKKKNNTNSYTTNNQNGTVYIKNGYIKLPKLKSMIKIKQHRELNGIIKSCTVSQVPSGKYYISVLVETENIKLPKVDKKIGVDVGIKEFAICSDGYKESNPKHLRKSEKRLAKLQKDLSRKQKGSNNRRKSRLKVAKIHERIANQRRDFLNKLSIKLIRENQSIVIEDLKVKNMLQNHKLAKAISEVSWAEFRRMLEYKASWCGRKIIIAPSNYASSQLCSECGYKNAEVKNLALREWVCPQCGTHHDRDINASKNLLKLAI

SEQ ID NO: 50699 - protein, 403 aa, unknown
  TnpB Polypeptide
VKHLYSYKFRLQPTAQQKVLLNKHFGCVRWIYNHFLNERIEEYKTNKRSLRRSDNEKQLPILKTEYTWLKEVGSQSLQYSVECLQNAYNNFFRKCKQKVKGKKGFPQFKKRHGKQSFKIKQNIHLVEGKLVFPKFLDGIKFVQHREIEGEIKFTTISKNKAGQYHVSITVSREIEILPTTDKMIGIDLNVKANVDSDGNAESNPRPAKQYQARLKLLHQRVSRKAKGGKNRSKAKKQLAKLYLKVTNKREDHLHKLSKRMIDENQVIVCEDLSVESMLAKVSPDERNEPRYKEKKRHRDIQDCGWSSFLNKLKYKAEWYGREFIQVSRWFPSSQLCNYCGWRYHDLPKDCKEWNCWNCWEHNDRDHNSAKNILEEGLRIRTSGTEGIAYCPDVRPVMSGLLVG

SEQ ID NO: 50700 - protein, 370 aa, unknown
  TnpB Polypeptide
VQRKCLKYRLYPTKAQERRLETTLETCRQVYNSLLNWHKHDYEVCGKTVTRYQMNSAFPKWRKEFPEIAEVHSQVLQNISLRVELSFAAFFRRAKAGETPGFPRVKGDGYDSFCYPGSSVGYSFVNGGLRLSKITDKSSTIKMRLHRPLVGKVKTCCIHRVGSKWFVCFAVEQDDDFLPKSDEAIGLDAGLNSFLALSNGEFVDNPRFFRRDEKALAKVGRKQAKTKKRSRERKKANKVLSRIHERIRNRRHNFVHQTARRIVNRYGVIAVEKLNVKGMVRNHCLAKSISDASWSMFQTVLTSKAESADREIIAVNPAYTSQDCHQCGYRAKKKLSERWHLCPMCGASLDRDTNAAINILQTAMGQHSVG

SEQ ID NO: 50701 - protein, 387 aa, unknown
  TnpB Polypeptide
MSVRTIALTLAPTDTEKAAFNRLRTAFNDACAFVSDVAWREQEFNSVRLHRLVYRDLRARYGLLAQHAVRAIGVVADSYKAEKATCHTFKSTAAVVLDMPRLYRLSGNKVGIATLDGRLKVTLNIGGIQRAQLASATKLGEADLVCDHKHRWRLLVSAHYVDPPMIEPGGVVGVDLGRKDIAVTSDGASFSGAQITAIRDRYTRNRQSRQERASKGTRSTRRRTRQALQRLSGREHRFQTQVNHTISRRIVDGAAKSRKAIACEDLTGIRQRTNTQPRSKTERRRSNNWAFYQLQAFLCYKCRAEGVAFVLVNPAYTSQMCHRCLHLGERFGKRFRCVNTVCCWSGDADYNGALNIALLGAAVTSPGGPPLYCLYQPGGRATESRAL

SEQ ID NO: 50702 - protein, 454 aa, Caldivirga sp.
MRTVRLRLLPSGSQERKLWRIADAAAKLWNELNYARLMQFRMMGKIDFKDTGREHYHKYKSVLGVNAGQVINLNNGAWMSYFKLKEMYEQGKLPRFMRKPSPPGFWKDRLLGKRELRILVRNDRYYLEPINGGEGYIVLKDWNLRIKYAGRIKWAGKQGTLVIKHEDNRWFAYVPITVGEKPARSNPRGYVKGIHEKVQIENPKGSNKAFIDVGLNNLFAVVFNHTDTAILIKGSTIKAEYYYWKREIKTYQSVRDWLKNHGFESWKKYHTYYLHAVFKRKERLRHYYRTAIRFLAKTLWQMGVDEVFVGYPYLVSQGNGNEYNTNIWWYTKIINWLKDALEEYGIRLHVVNEYGTSKQCSICNMRHENGRVKRGLYVCETTGIKINADLNAARNIAKRVGYEVSIPKKILSYIVTTNGVKPLTPKEGVTIETPKINLAQKGEEGVTCCLMVNQ

SEQ ID NO: 50703 - protein, 407 aa, Gallionellaceae sp.
MKRQQAYKFELRPDGQQQRDMRRFAGSCRFVYNKALALQKDNHEAGNKFIGYVAMAKHLTAWRNGSETPWLKDAPCHPLQHALKDLEKAYKNFFAKRADFPRFKKKGSGDSFRYPDPKQIKLDQANNRIFLPKLGWMRMRLSRDVLGELRNATVSQSGGKWFVAIQTEREIAEPAHPSTSIIGIDVGITRFATLSDGSYIVPLNTFRKHQQRLARYQRAMSRKTKFSSNWKKAKARVQKIHTRIANVRRDFLHKTSTTISQNHAIVCIEDLQVRNMSKSSAGSSDSPGRNVKAKSGLNKSILDQGWFEFRRQLEYKQVWLGGDVLVVPARNTSRTCPACDHVSVENRQTQARFACVDCGYENNADLVGAINVLERGYRLLACGELAQSGRSVKQEPAEATMREVTCA

SEQ ID NO: 50704 - protein, 434 aa, unknown
  TnpB Polypeptide
MSTIERRVHSVLIDKNHPVYKTIDDMCWHSRALYNSMNYDLRQSFFDPKQKMPTIGSLRKQYRFDENEHWMSLPAKVAREVALQLERDWKSYWKKRKNGDVLARPPKYHLHNSRRFIEFSVDAITKAGKKSYMLTLSTIKDFIVPLPCKLEDVCSVRILPVRKKFKVEIVHKVKVPMIESVSHEDEVWSGGDLGVDNFLTVTIDNAGIRPLIISGKDIKSRNQFANKHSSNVKRNKSYRKGNDTRSVDDYIRNIWGSRNRYIDGFIHNATSYIVSYLKEFNVTHFVVGWNKGWKSNSVRGKNKGMGRKNNQKFRSLPYRKFLTVLEYKLRDAGIVYLETEESYTSKTSVLAGEYPVEHEDYASVRIHRGLLKNKITGVVINADVNGACQIVRKCKPEAFSWADGVEGKAGLFSPVKVSVGGGCPKLHTESFLCV

SEQ ID NO: 50705 - protein, 407 aa, unknown
  TnpB Polypeptide
MQEENFVILPTIESIKGIKFQFSAEGNIELLLKRNSKTVNLFIEKIFLERATSLSKLNKSRKEIYTKTNLTGYASVIAMRSALTIYRSWKKNRRKEIQKVKSKFIQLQPGYNCKLIKSKIRITFEKRKYIWLELKVAKYQKMFLNLIEKKKLKLGQIMVGEDFVVLTVKKEYVPYRYQGILALDINEKSISGMIFKKGKLNPVEWDLSKTYELNQRHFGYRRRLQMKYPNRFMLWKKLSNNKNYRNRIRWCLDNVSKQIVDFAEKERLTIVMEDLKNIKKGINKRKLKKNKYSNKKQMMRTNSLSLLGRLNRANFRRVQFMIDYKSKWNNVPVVYVNPKNTSRACSRCGYVNGSLKGKRVLECENCGLKIDRDLNAAINIGMALCGSGSGLPKVEDIRNQISEVSLA

SEQ ID NO: 50706 - protein, 206 aa, unknown
  TnpB Polypeptide
LPKGNKVASINLGINNLASIVLNDGTWFLYKGIKTKEDYFYLEKKISQVQSLADNTKNIGEYEAYDELLKEKKRLFKKLMRRLLHLYRNFAFHLMKKLQEKGNKFTVNMWSYRKLIDAIELKAQEYSIKVYEVIEYNTSRYCAYHNIEVKRNPRGVVSCPLKHKLHSDLNGALNILKKATGKVLSSIKKPLSFIVEHNRVAPIKGV

SEQ ID NO: 50707 - protein, 467 aa, Microcoleus sp.
MKITYQYRFYPDSTQKIELNEWLRISRYWYNRQLGERFDWWQNNQLQLQAFPHWKEIFPTLFAQRPNYYSQKLQLPAIKQDLVRVMHSGELLDFSRVDSTILQEICKRVDQAFKRFIIGDFNGKRSGKPRLKTAASFRTMTWAAAKDDWIKLVRKNWLYLRLPKIGVVKVRMHRPLPNGFTLKQVSVTKKLDGWFMQICLEDTAVPEFNPDRVIPTWENSMGLDAVLHGDDYLATSEGDKLPSHKALRRNQQKLSKISRKKHQKKRSSRARRKLAKQEGKQHQKIARSRKDFQYKTAHKLVRTGKKVFLIEQLNLPGLSRRNAPKHDESGKFLPNGQSAKSGLNKSWMDAAFGQFFEILGYIASKAGATVIPQNPAYTSQLLCYRNEIVFTNLEVRDYWDEIESLMVDRDVNAAINLKRLGLGIMPSIKRRGGKIVVVGTMAESTAKEILNILNRTSEAYTIPLGLV

SEQ ID NO: 50708 - protein, 402 aa, Amycolatopsis sp.
MSRFRLTPTAEQEARLLVHCAHARFVWNLAVEQHSHWRPGRPLPPGYVDQARQLTEIRAEHPWLREGSVTVQQQALRDFAQAVRNFFGGTHGKPTWRRAAVHQGFRQVAVRPEHVRKLNRRRGAAWIPKVGWVRFHWSRRPPAAAKSYRVTRDGTGRWHIAFAAVPAAIPAPGDGGVIGIDRGVAVSAALSTGELLRCPGLSRVERARARRLRRRLARAARGSHRRARLVRAVARLTARESARRKDWVEKVTTRLAREFDLIRVEDLRITDMTRSARGNVGSPGRRVRQKSGLNRAILAQGWGLLVSRLADKAPGRVEKVPAAFTSQRCSACGHVAPESRESQAVFRCVACGHHDNADVNAARNIAAGRAVAARGGGTAVRPVNREPRRPVPAAGSRNPPVG

SEQ ID NO: 50709 - protein, 384 aa, unknown
  TnpB Polypeptide
MKITRTAKIKLNIKEESIIPTISAYTKSYNYVCQVGYDKKNFNGVTLHKLTYPTVRDYLPSQLAISSRMKATENLSSVLKKKQKKTPKCPHSNFCSIRYDKNSYTLNLDKSEVSLLTVNGRLKTNIVISDYHRKYISGWKHTSADLCIKNHKVYLHIVFEQNVADCLQSGKILGIDRGINNLAVTSDNKFYSGKQVKKICGKYKKLRSRLQKKNTKSAKRHLKKLSGQERRFKADINNQVSKKIVNSLNSGSTIVLENLSGIRNKRLGKRARTLINSWNFYQLEQFIIYKAIAKGISIQYIDPRYTSQHCIRCGNIKRNNRVSTYFECKLCHFKMNADLIASKNIVLKYLGALRKKGSLALQATTICRPGRAVVNQPIAAIASQ

SEQ ID NO: 50710 - protein, 343 aa, Streptomyces sp.
MRDGAVGPAGELLPYPAGGDALEAVDQLGDGDLGRVVHQQVDVIAFAVELLQLRLEVLADLARDLFAACQHLVVEHPAPVLRHEDQVHMHRRNNVSASPVVVLSVHETNRIRILVVQLRYNYRAYPDAAQRRALASAFGCARVVWNDCLRDRKQAHAARLPYVKSAELSRLRITQAKRTEERAWLADVSAVVLQQSLRDLDTAYKNFFDSLKGKRQGRKAGPPRYKSKKDTRQSIRLNTNAFCLKGDGHGVRGQGRQPQGQVVSQASGRTHVPDRHQGQLWPVLPQLRRGHRAGQPARAGDRRRYRPRTVRLRRPVRRQEDRQPALPAPGGEETQASSAGAVP

SEQ ID NO: 50711 - protein, 382 aa, unknown
  TnpB Polypeptide
MYKAYKFRLYPNKEQTELINKTFGCGRFVYNHYLDKIKNNGYTNTYSNIKDYTSTLKYEAVFLREIDSIVIRQSLFNLDNAYKKLFNKQGGYPKFKSKYNRNSYNTTAVYKSYKDKEYCNIELDLINKKIKLPKLKRVNIRGYRNINSINGKIKNATISKEANGKYYVSILYEMYDEAPKINHRTIVGIDLGIKKLLTLSDGITYDNNKYIDKYEKRIKRKQRELSRKQKRSKNYYKCKKELAVLYSKLVNARKYYIHKITKDITNEYDIITCEKLSTKEMITKGTKVKLSKKISDATFSEVLRQLEYKTRFKGKEFYQVNTYYPSSQLCSRCDNQDHKYKDLKERTYKCSKCNQEIDRDFNASINIMFEGLKLYIKNYVRI

SEQ ID NO: 50712 - protein, 364 aa, Thermococcus sp.
LARKNAESWRSFFQLNKKKKNGELPEWFRPKPPGFVRKENGKKLFIIPLRNDQYRIDGNGIELRRLGKFGRLRIQFKGKIYLRGKQGRLEITYDEVKRKWYAHISITVKEKLINEEWVEVPRQSLGSLSAGIDLGVNNLMAVYVENGESFLVNGRPLKSIAFYWRRRIADYQSKLNKSGAKKSKKLKRMHEKAKLQAKHYIDTVVRQTVERLYQLGVSRIVVGYPKGISRNPDKGRRQNFLLSHVWRFNTVIKRLKEVAEEYGIQVLVVDEAFTSQLCPLCGQRHTNGRIFRGLFKCRREGVVMNADLVGAFNILKKVVETITPSLSALAGGRGNWGETIPEGFSEPSSKRVVRITPQTSPSLS

SEQ ID NO: 50713 - protein, 569 aa, Actinopolyspora sp.
MLRPWNRPGCHGHRDRLGSEREPEQAGEAAGRSNRVHDRGGTPRSVGPIRGRTPGSRAVCPVPPGCRAQQRLGGGRPGARRDRGIDLDVRPVVRAPVGGQAGESRHESGGSAAAMSTVLQAYQFALDPTPEQQTALSSHCGAARFAYNWGLARVKAVMDQRKAEASCGIPAEELTPSLSWSAYSLRKAWNQAKDDLAPWWGENSKEAYASGLANLATALKNWNDSTKGKRTGPKVEFPRFKGKRHTWSCRFTTGSFGLTDSDRRHVKLPRIGTVRTHESTRKLARHVERGSATIRSATVSFRGGRWFVSLSVKIDRDDPPPADPDSAVGVDLGIKSLAVLSTGEVVPNPRHLEAAQKELRRLQRQASRRTGPDRRTRQKPSNRWRATQARITKLHAFIANARRDGLHKLSSRLVREHGAIVLEDLNVTGMMSNRRLARHVAGVGMGEFRRQIEYKAAWSGVHTHVASRWHPSSKTCHDCGAVKTKLRLSERTYTCDHCGYHADRDLNAARNLAGLTSSPSRGATKNEPAGNPPKTSPAGNGYRHGKTPAEAGVNAAPRGDSSGTLLHVS

SEQ ID NO: 50714 - protein, 557 aa, Actinopolyspora sp.
VRSPWSRTRFHGHRDRVRVERQPAETAEAARYPRGNYHRGGTPRPAGPIRCRTPRSRPVRPVPPNRRTQRRRSGRRPGARHDRSAHVDVRPLVRAPVGGQAGESSTEGGGGAAAMTTVLQAYQFALDPTGQQQAMLSSHCGAARFAHNWGLAQVRAVLNQREAERSYGVPESELTPSLNWSAYSLRKAWNAAKDEVAPWWGENSKEAYASGLANLADALGNWHKSRTGKRAGKRIGFPRFKSKRHRLSCRFSTGSFGLSESDRRHVQLPRIGLVRTHESTRKLARHVERGTARIRSATVSFQRGRWHVSFSVEITKTEPEPAVKGGTVGVDLGVKHLAVLSTGEIIANPKHLDAAQRELRRLQRRAARQQGPDKRTKRTPSNRWRTTQARIAKLHTAVANARRDGLHKLSTRLVAEFDTVVVEDLHVAGMVRNRRLARAISGVGMGELRRQLDYKTTWSGRDLVAADRFYPSSKTCNDCGAVKAKLRLSERTFTCDHCGYRTDRDLNAARNLAGLASSPSCGATKNEPAGNPRKTSHAGSGYRHGKTPTQRAGANAA

SEQ ID NO: 50715 - protein, 398 aa, Actinopolyspora sp.
LSSHCGAARFVYNWGLAQVKAVLDQRAAEASYGCAEDQLTPAMSWSAYSLRKAWNAAKDEVAPWWGENSKEAYASGLANLADVLGNWHQSRTGKRAGKTVGFPRFKSKRHRFSCRFSTGSFGLSDSDRRHVKLPRIGLVRTHESTRTLARHVERGTARIRSATVSYRRGRWHVSFSVEITKTDPQPATQGGTVGVDLGVKHLAVLSTGETVANPKHLDRAQRQLRRLQRQTSRRCGPDRRTRQKPSQRWHKSQQHISKLHTRVANARRDGLHQLSTRLVAEFDTVVVEDLHVSGMVRNRRLARALSDVGMSELRRQLDYKTTWSGRHLVVADRWYPKLQNLLRLWRGESQTAPVRADLHLRPLRPHRRSRPQRGPQPRGPDVLPELRGDEKRARRKPT

SEQ ID NO: 50716 - protein, 445 aa, Shinella sp.
MRISRGHKFKLDPTDAQAEAFARNVGVCRVVYNLALEQRRDHYRQFRRATGYGISFASQCRELTELRADVEWIADGSLTAQQQALRDLAAAYSNFFSGRAEYPTFRRKGVNESFRFQGREVTFRRLNKSWGLVKLPKIGEVRFRWTRDIPSKLKNATISLNPLGWHISFSTEVEVEIGRNFGPAVGVDRGIVEAVAYSDGTFADFPKARIKGLDKKARRAARALSRCRKGSNRRKVAKARVAALRAKAARVRKHFHHVETARLARKFGVVCIEALKTRDMTASAKGTVAEPGRNVRQKAGLNRAILERGWHQFETFLSYKIAANGGTLIKVPAAYTSQTCSGCGSISKHHRKSQAVFECSDCGHSANADTNAAINILRAGTRPSGREPVTAPMNRKSPLEAPASWPDARQEITVLQVGEDVNRKGSSEGDGSATITSDNSKGRVE

SEQ ID NO: 50717 - protein, 384 aa, Lachnospiraceae sp.
MNKAYKYLIYPTKEQQTLLARTFGCCRYVYNQALNWRVAAYRADGTSISYVDTAKAVTQMKNNPDTAWLKEVDSVALQQALRSLDAAFKNFWNNKNTGFPKYKSKHRSRRSYTVPVTNNNVMVFDRAVKLPKLGYVKAKIHRVAPSDWKLKSATVSQDSDERYYVSILYEYEKAVRTIEADPDKTLGLDYKSDGLYVDSNGDCADMPHYYRKAQKQLARAQRILSRRKGSKKGEPKSRNWEKQRLRVNRIYAHVKNQRNDFLQKRSTGIANQYDLVAVEDLSLKGMSHRGKKRGFRLGKAINDNGYGMFVNMLAYKLCNRGKRLVKVDRFYPSSQLCQCGYKNPVTRNLSVRTITCPICGRTYDRDINAAINLKKEGYRLYKSA

SEQ ID NO: 50718 - protein, 354 aa, Hydrogenophaga sp.
MLLVYRYRVKSLNGLLNRQAKAVNFVWNYCNDRQKDALRFGRRWHSGFDLNKLTTGSSKELGLHAGTINAVCEQYAKSRSAKKRPFLRYRGKKSLGWVPLKGRDLKREGDAFRFASNTFRVFNSRALPEGKIKDGTNFSRDSRGNWFLNVVIDVAVDAQSVPAARAPVKGVGIDLGLKSFAALSTGEVIDNPRHFRQLEDQLGRAQRARKKRQATKIHARVVSARRDFLHKLSNRLVREFDYIAVGNVSAAKLARTSMAKSVLDASWSSFRSMLAYKALRHGAWFEEVNESFSSQVCSSCGALPDSRPRGIADLGIRQWVCSGCGVSHDRDTNAALNILARHGHVSPGEGIPVL

SEQ ID NO: 50719 - protein, 330 aa, Bifidobacterium sp.
LSDDAKHELYGINLRYAWHERVDDEAHHMARRLMKHLRKRHRMPDLSKCRVMDIDGKIAQIEDARNTKCERWAVVSTLESGKPIRVPIVADRRLDENLFLNDETLSNHLTIRFDLEGNPGGRLITTLPKAETRTQGETLGLDWGMDCMLALSDGRLLGVRMFEWLKQRDVELTEPTRALQRNGVKPSESRRYRNLQRRIRACYRNEIGRLFNRLGREQVKEIVVEKLDFRNPNLSRRTNRLLTRTGRAAIAAKLKRIQELDGIAVTEINPAYTSQQCSRCGYATRGNRPTRDLFRRKCCGTTLHADINASRNILQGWLAFHPQAGNRSYA

SEQ ID NO: 50720 - protein, 375 aa, unknown
  TnpB Polypeptide
MLKTYRYRIYPNNRQKQIIDQTIELCRYLYNCGLEHRILAYRQRRASVYAYQQINELPGIKEVFPDYKNIYSQVLQDVLRRLDKTFSSFFRRVKTGEKPGFPRYKGENRYHSFTYPQPQENMIPANGKVYLPKIGKVKIKLHREIPGNIKTVTVTRRNGKYYACFTVEVESVLLPKTGRTVGIDVGVSAFVATSDGLLVQSPQTYRKAEKSLKTLQREVSRRKKGSNRRRKSVQKLASVHEKIANQRKDIVHKTARYLVNNYDLIAHEDLQIKNMVKNHHLAKSIQDSGWGMFFDILAYKAEEAGKQVVKVNPHNTSQICSGCGHIVKKTLAVRIHKCPHCGLELDRDINAARNILAAALSITGLDGAFGDSLAG

SEQ ID NO: 50721 - protein, 368 aa, unknown
  TnpB Polypeptide
MLKSIKYELNPTNGQKRMLNQAFGNCRFVYNWALDKKIKAYQEDKKTLSCFDLMKELTSLKKREGFEWLNLYGAKQLQQSILNLDRAFSNFFKAKKGFPKFKSKHNKQSFRIPQSVKINFDEYKFFVPKVGWVKFFKDKHIEGEIKFATVSKSTTGRHYVSITFESTQPRKTGSGVVGVDLGIKHLAITSDGEFFENQKYLRQNLKKLKKEQRSLSRKFQKGKEQSNNYRKQRLKVAKIHEKISNQRRDYLHKLTTHLATTYETVCIEDLAVKNMAKNHRLALAIHDCGWGMFRQMLEYKVKDLRVIGRFSPSSQICNICGDRNKDLKLSDRNWTCSNGHSLNRDWNAAVNIKNFGLRASTLNAKTDH

SEQ ID NO: 50722 - protein, 494 aa, Bacillus sp.
MARKNTPTYTIELPLHIPIWQQHRLEKKFKIARNVYNSCLGEALKRHKRVKADQTYRDLLREPESKERNKQLSDVRKAYGFTEYGLHDFVKPVQAKFKENIGSLEAQKLATRAFQAVEKLHFGKAKKVHFKTFNDDISVENKLNTRGLRYANGHILWGDKPTKKRPKPKNWLCMPVSPKASDEYAQRALMDKTKYVRILKREVRGKVRYFVQLIQEGYPPIKRNQKVVDDKTKRVGLDIGTSTIAISSKETVQLRELAPECDPDEKKLRRIQRAMDRSKRATNPHNYHDNGVTKKGKMTWVFSNRYLQLRRERKELYRKIAVARKMSHEKLANEILELGLDVRVETMRFQSLQKRSKKTTRHNKNGKMNSKKRFGKSIARRAPAMLLSIMDRKLKYHGHSIKKIDTYAVKASQFNHLSGKNMKKQLSDRWNDVGECRIQRDLYSAFLIGHTDEKLESIDVDLCKDEWDNFVQLHQQEIARLKQSSSQTLRWFVT

SEQ ID NO: 50723 - protein, 369 aa, Deinococcus sp.
MPIIHAILPIDQLSYPTIDRLFQDEQLTRRPSQFLQHNRARGILYHTPPCSVTARNDTTLQVGEVTLQVALYRLPTAEQQALIAASPAYHQYVGLHDLSVHLRSPATSQGRAISAIEAVVERGRHPARHASLTLPDALFQARWQTDRLILQQLAGQWFVVLHFDFRCTRLDLITRRTEVGLDLGARPLIYACTADDDQFTTESCHVPIRGLRGTLLEQVQESPDLLTMLDRITTAWHRRELQRILDRLCREAAVVYAEDLSYDDMFGPYVNGARRNGVLDFHEAWLHNRLQTVGIPMEKIDPRGTSRRCSFCKGHPYGQRHGSTFTCRHCKCTVNAHWNAARNVLREGREKSVIWHSKPGTVLPTMLPA

SEQ ID NO: 50724 - protein, 411 aa, Rhodothermaceae sp.
MPDADKDTKTHRGVTYRLLPGSKANGYKLSGLAGACRFVWNAILAQINEEYDAVKDTDEKNPSVSFFSLGQRFTALRQETPWLPDYSFAIVRYGLKYQADAWSGFFKGQRSHPQFHSKYGSTPSFTIPDNVKIKDGTLYVPKVGWMRLRRKGGNPYPDGTPKQATVKKEGRYWNVSVNYEIDAPGYTDNGVAVGVDLNTYNVAWTDTEGECGMLAIPKLTKSEIRIRRYQRKLARQQKGSNRRRGTKRKIAKWKRTQKNQRKNRDHHNSRILANQAEVLVREDLKLKNMTKSAKGSVENPGTNVNAKAGLNRVMLNASHGRFTTYCDYKFKTVITVDPKYTSQACNACGCIDKTNRPSQSRFKCVSCGHADHADLNASANILASGIGASGRGEAFPLGTSMIRQMDTRVAA

SEQ ID NO: 50725 - protein, 393 aa, unknown
  TnpB Polypeptide
VRAYKTEIHPTKAQIELIHKTFGCTRYIYNQYVYENLENLASGKDFISAFSYSKRVNNDPDTPSWLKEVPSKAVKQALIYADRAFKDYFSKRRGKPTFKKKGTNDSFYLIGTLKVERHRIFVPKLKWIRLKEFGYIPENISSVTISMKNGRYYISCLCKDEKDERIPLSDYAMGIDFGLKDQFITEEQTIPSINRSLRIKKLEKRLRREQRKLSRKVEANMVEKVYYQTGSKKGQLKSYKWVKPLSECRNIQKQKLKVARLHERLTRIRTDYNRKALLSLVLERKPSSITIENLSVRNLMKNRHLSKAIMKAQWYQSRLYLESLCKKLGIELRLANKFYPSSKLCSACGFKYQDLNLNERFWTCSNCGSEHDRDKNAAINLGQCKQYTVLTAV

SEQ ID NO: 50726 - protein, 412 aa, unknown
  TnpB Polypeptide
MRSQKIRLKLTKEQEHLAWWYSKVARNFWNLLVDIDKRNNKGEFDEILSKQGNKTYHSNFYNREICHLNQSDYLKLSKLVVAKGYEKDKELWSWYYQPNQFFIYNFLSKELVRIRKQNKGRLNFRNVNKIQPNFNVRCDISSDKKRPSRIYLKDSGKLQIPTIGDVRYGSVREGFDLSCKKQVANVSFDGKYWYLSYTEDVETQVEDLPEFTDGLGIDLGIKTLATVSDGTTVPNIKTFRRVRILNKRLKRLQRKVSRKYHINKCDKHNKTKNIIKLERQIKLIHRSLRNIRINHIRKFVSDLVKKQPQYIAIEDLNVKGMMKNKHLAKDVANCSFYTIRRHLIRKAKERHIAIRLVERFYPSSKTCSFCGHYNKDLKLSQRVYHCSHCQEKIDRDFNASLNIAKTERYVLA

SEQ ID NO: 50727 - protein, 281 aa, Planktothrix sp.
LCFDTLRSEDTEKEIGLDVGIESFYTDSNGYQEVNPKFLRKAEQSIKQSQKQIYKKVKGSSGRRKARKVYAKKHLKVSRQRIEHAKRIARNVCKSNDLVVYEDLIVKNLVKNHCLAKSISDVSWYLLRKWIEYFAAKFDKSAIPVAPHYTSQKCSNCGVIVKKSLSTRTHVCNCGCELHRDTNAAINILNLGKQARGGHPQSNANGLETSTPLDESLVEQVSRLKLESPPSEDGLPLVVFTTIVRKTFPAKKDIPNSKKIAVPLNIKHRDGNYTQPKDKLP

SEQ ID NO: 50728 - protein, 391 aa, unknown
  TnpB Polypeptide
MNIEQMFDTDRRRRLMNRCYKYRMYPTSEQAEYFQKCFSCSRFVYNALLEKQNEVYKNGGHFLSKYDANNYCNRVLKEEYPFLKEVDKFALTNSIWDLDFAFKSFFKYKTNYPKFKSRDRCRKAYTTNYCNNNIEISDHAIKLPKIKWVKAKIHRVAPQQWIIKQATISQDAAGDYFCSILYDCGDNDLAPVLSRELALGLDYKADGLYVSSEGEVCGSPHYFKQSEQTLAKEQKKLARMKRGSRNYEKQKQRVAKQMRHIANQRKDYSHKKANDLAESWDYIFAEDLDLKEMASRSGKKTMDNGYREFLNILQYKMEEKGKVFAKVDMYYPSSQLCSSCGYKNPQVRNLTVRSWKCPSCGRTHDRDINAAINIRNEGLRFVEEQQIQSAI

SEQ ID NO: 50729 - protein, 306 aa, unknown
  TnpB Polypeptide
MDIKKDMGYFLPAWCADIPFQIKGTAIKEACNAFWAAKGKPAYRTRKSPEQSCFIPSTAVSRIGIYPRISGKGLFYHESLPDNIRDSRLIWRFEKWWLAVPHKVQQQRADNQRRVVALDPGIRTFISFFSTECAGKLGEGDFSQIIRLCQHLDNLNSRRTKTKKKSLTKAYRRAVGRIRNKIDELHHKIAKFLVDNFDVILLPSFETKQMTKKISRKIGSKSVRAMLGFAHFRFKQFLKFKAENAGKMVVDCSEAYTSKTHPQTGKIRNIRSAKTIRLTDGSLADRDLIGARNILFRALVDSPVIC

SEQ ID NO: 50730 - protein, 402 aa, Trichormus sp.
MRITYQYRLRLTKKQIATFEHWIELCRRQYNYRLAERFNWWEQNRCDIDRCSIVCCSIAPLKDKPNRWSQQKDLVNSKGLFPEYKELVSHTLQDVIARVDKTFERWLKGDCNGKKSGRPRFKPQGRYRSLTFPDPIKPEHIQGKFIQLPKIGKVKMILHRPIPDGFKIKTAIITRKADGWYISLSLEYVTVPNMKTDVTLTLNNTLGVDMGLKSFLVTSDNQTVKIPQYYRKAEKRLKRLQRRLSRKKKGSNRCKKAVKRVAKAHLKVANQRKDFHYKTAIWLLHQSQVIAHENLNIKGLAKSMLAKSIADAGWGQFLQILNAKAASAGCLVVAVNPNGTSQECSDCGATVPKALSDRWHSCQCGASYDRDHNAARNIKYRAAGHPVLLQSSVNVRGVARSR

SEQ ID NO: 50731 - protein, 260 aa, unknown
  TnpB Polypeptide
MDQIKQMRIYPPEKGSCKIIVVYEVPDQEELPQNGHELSIDLGLHNLMTCYDSGNGKTFILGRKHLALERYFHKEIARVQAQWYGQQSGKGVKYLATSKHIRKLYKRKHDSVTDYLHKVTRYLAEYCREQGITCVVAGDIRNIRREKDLGHRTNQKFHSLPYNRICIMLEYKLKRYGIRFIKQEESYTSQCSPLSSKVEKRYAEPSKRKERGLYRDGNRTYNADAVGAYNILRKYHSVSGVKKELSVTGLKTPEIIKVAV

SEQ ID NO: 50732 - protein, 368 aa, unknown
  TnpB Polypeptide
MKLTAKVKLKPTKAQAELLKRTLETANAACNRMSALAWDAQQFGQFQIHKLSYHCVKAEFDLTAQLLIRCIAKVCDAYKLDKETKRTFKPLGAIPYDSRILSWKMDKDEVSIWVLGGRQKIKFVAGDYHKSRLVHQRGESDLCLIDGNFYLFTTCDIDEPTPKDVEDVLGVDLGVKNIAVDSDGQVHSAKAVNNVRYRHRKLRTKLQKKQTHAARRKLKRLSGKEHRFATWVNHNVSKEIVDKAKGTNRGVALEELGGIGDRVTVRKAQRATLSSWSFNQLRLFIEYKAQRQGVKVFPVDPRNTSRTCPGCGCIDKANRPTQSKFSCVHCGFSGLADHIAATNIRSRALVNVPYIPTAPQCRDKANVL

SEQ ID NO: 50733 - protein, 399 aa, Moorea sp.
MNRDQQKNLTVGSLQNLTSQVNIGKFQEREVKMLTLTYEYKLIPTIFQIEIIEHTLTVCRSVWNYALRERKDWLNSRKSLLNTCSLEKEYIIPADAPFPNYHYQAKQLTEAKKIHPVLKSVNAQVLQQVLRRLERAFEDMKRKGMGCPRFKNHYRMRSFVYPQMLKNCLEEERIKLPQLGWVGFRKSREIPNNFKIKQARIIRKASGYFIALSLQLDVNIPQPFPHGHPRGLDLGFDKFVATSDGEEVKRPRFFKTLQSKLKLLQRRLKKKRKGSKNRQKLNQKIARLHQRISDTRKDWHFKLAHHLCDGVGMIFVEDINLISWQRGMLSKHSADSGFGQFVTILQWVCWKRDVYFAKVNKGGTSQECPQCGTDTGKKTLEVRVHSCPECGYVMLRPET

SEQ ID NO: 50734 - protein, 397 aa, Kribbella sp.
MSRYRLYPTPAQEIGLLGQCGHARYVWNLAVEQWSMWTRDKGPTPGFVKQARQLTEARAEFGWLRGGSQTVQQQALRDFDQARRNYFAGSHGRPTWRKAGQHEGFRIVGPQAGRVEQVSRKWARVLVPKVGWVRFRVSRALPDARSYRVTRDSLDRWHVAFAAVPDPIPAPGSGEVVGIDRGVAVSAALSTGELLKCPGLSESEQRRLGHLQRRLARAQSGSNRRKRVKAAVAKLHARATARRKDWVEKTSTDIARRFDVIRVEDLRVGQMTRRPKPRPDPAQQGSYLPNRRRAKAGLNRGILAAGWGLLVQRLEQKATGRVERVNPAYTSQTCSRCGHCAPGNRDSQAFRCQSCGHTDHADLNAAINIAAGRAVSARGDRPGRLSVKREPQFTTSA

SEQ ID NO: 50735 - protein, 353 aa, unknown
  TnpB Polypeptide
MISQKYKLYRTDKTKHLDKMLREGAFVWNHTLALQKRYYKLYHKYASVVDMQKHLAKRFKFARLHSQTVQEIIQRLDVAYKRFFNHISKRPPKFKRASDFCSIVFKQGGYSLNGNVLTVNKIKKRYKFSLSRIYEGKIKRLTIKRNHLGEYFIVMCIDREVEKYGKTHDGASVGIDFGLKKYMTLSNGVEIDNPQFLKSDLGELRRKSRNLSKCVKGSNNSKRKRFELDRLYNDVSNKRCDFQWKLAHQLCRQYDNIFIEDLNLTGMSRCWGRKMSDLAHGEFVLKLEYVASKYGCTVHKIDRFHPSSRLSNWGVVVSRPSISEDAATLVTQESHPFRGESMSKQSAFLLWRS

SEQ ID NO: 50736 - protein, 377 aa, unknown
  TnpB Polypeptide
MRNYKFRLYPTALQERQFVETLDGCRWVYNYLLDRQPLSREDMQFMLTELKITEPFLRNYHSKVLQMVCHQIDTANKALRALKKNGHKIGKLRYARSEDYNSFTYNQSGFDITIDNKLWLSKIGKIAIRLHRKVSNIKQVKVKREGKKWYAIICCQITMPITKFVDSKKSVGIDVGITKFAHDSDGHEIGNPQFLKKMLNPLKRASRRLSRRQKGSCNYEKAKTRLQILHEKIRNKRNDFLHKVSRYYSKHYDLIFLEKLRVLNMTKNHSLARAILDSGWITFGSMLRYKATQVIEILATNTSIDCSKCGNKVPKSLAVRIHRCNKCQLVLDRDYNAALNILQRGLKSLLLMEREEVTPVETERSLKQESEATGIVR

SEQ ID NO: 50737 - protein, 395 aa, unknown
  TnpB Polypeptide
MDTPEENGKKKKRKPWKQAPDKTSTAYKFRIYPTEAQKHQMARTFGCKRYVYNHLLDIRQNEWKANHHGITYKESSRILTDMKHRKETDWLNRVDSMALQESLRDLDRAFKNFFKKLAKYPRKKSKKSFAQSYRTRNQTGNIRIVGKEIWLPKLGAVKTKQHRTFSGRILHATVVRTADDKYFVSLCVEVDKSAYFQDMKNTKKIGIDVGLKSFYADSEGNVIENPKIFDKLHKRLKKEQQKLARTNKKSANHRKQRVKVARAYAKISNKRSDFLHKKTHFLATHYGIVAVEHLRIKGMLKNSKLSKAISTVAWGEFFRQLEYKMPKYGGRLLRVETTYPSSQTCHVCGYKNPLVKNLDVREWDCPKCHAHHDRDFNAAKNILSHALDIDARASS

SEQ ID NO: 50738 - protein, 394 aa, unknown
  TnpB Polypeptide
MKRAILLQTIATNSKNNCLKEFMNKAIIEYNRLLSERWDCDSFIEFHHKTFLKSKKNTFFNVQVICSLIRNSWKCKVNKVSGLTVKFNIPRNCKTFSTKTNFFIDVGIYPGNRVAIPIKQNRNYQRFQSLIQNGWNCKTFGLIKDLQIVAFLSKEKEIQQRKNIIGIDINAKHFAISIISPEGKVLYQTYIGKQIWIKRKQIMERRALLQSLNAKKSLKKIRKYESNFVKTNIGQVVRDIINLAIKHDADISIENLRKVKPKSRRFNRIVMRIPFYKFKQNLEQRCFDNNICLNIVDSWHTSKWCSHCGALAIGHSSNYSLFKCKKCGQIVNSDRKASLAIAVKSLLERNSHILEPDISIQISNRRVDVTQLLRSDEVDSLRPVDNNYQLMESS

SEQ ID NO: 50739 - protein, 399 aa, Synergistaceae sp.
MILAHRIQFEPNKKQRTYFAKACGVARFAYNWALSEWKKLYENGEKVTEGLLRKQLNATKRESYPWMFEVTKCAPQLAIKGLGKAFDNFFAHRAEFPKFKKKGHHDSFGLSNDQFSIKDKMIRIPNLGYVRMSERLRFDGKIMGAAISRTADKWYISIQVEMEPPAPVHNSESQAVGVDLGVKDLATLDDGTKITGAKPHKQLLTRIRMLNKSLSRKQGAKEGEKKSKNYKKTQRKLSRTYARVGNIRNDETHKLTTMLTREYGIIGIEDLNVSGMVKNHRLARAVLDMSFFEFRRQLEYKARMTGSIVVIADRFYPSSKMCSKCGEKNEGLDLSMREWECPTCNYQHDRDINAAINLKKNAESYAVSACGELVEKVTSVKQELNIKADHVCTSMVSYE

SEQ ID NO: 50740 - protein, 474 aa, unknown
  TnpB Polypeptide
MPKANKTFTLETRLDRYSSNELMEYFSALVPFYAKIYRSVWQEVMHADEKIHLISGKNKSSYNTYLQRKFYISKRMANSIIADVVGTYNAMLELKKYELSQLNSKIDGSHKKLEKYNLRLGRFKNADINKLSKQDRRTYKWLRFAVWQRLRRINRLKQKRDVLERNIQSGKVSVCFGTKKLFKAQWFLEENGFTSHKEWLKTFRQNRDKNILFLGSKDETACNLMFQLEEMNGLYQIKVRKVENRRINPSGEKYVYGMCKFRRKDFESYLSANLENRKSKDACMPLTYRIVFRGKRIYLQVLFEYKREDFSHTTNVFGTIGIDYNDGFMQVTETNETGNLVRLERIPLDYHGTGNRAKSEIEEKIAKIVHRAIVVGKTIVIEDLDFRKTKSKTQTGKTERGKQYNRMLHKFDYSRYKETLENCCYRNNVELIKVNPAYTSRIAKAKYCESRKLNVHAGAAFVIARRGMGLRDVV

SEQ ID NO: 50741 - protein, 383 aa, Nonomuraea sp.
VQLRYNFRLYPTAGQRQALARAFGCARTVFNDGLRARQDAHEQGLPYISDGDLSKLVITRAKATPERSWLGEVSAVVLQQALGDLNSAYRNFFASLAGKRKGRKAAPPRFRSRKDNRQAIRFTKNARFAITAGGRLRLPKIGEVPVRWSRSLPSDPSSVTVVKDAAGRYFASFVVETGEEPLPETAVEVGIDLGLTHFAVLSDGRKVANPRLLRRAERRLRKAHKALSRKEKGSANRAKAARKVAKAHAGVADTRRDWAHKLSTRIIRDNQAVYVENLAVSGLGRTRLAKSVHDAGWSRFVGMLEYKARRYGRVFARIDRFFPSSKLCSACGALRDKVPLNTRSWTCSCGTSHDRDINAAINILAAGRADKSNACGGTVRPAA

SEQ ID NO: 50742 - protein, 406 aa, Ignisphaera sp.
MRVVVTAKVKAVTPNSQPLVSFLRGFRDWTQYVVDEIWKLEHIPSIKELHQRFYRVLRIQGFRAHHCHKIERRAREIVKATKKNKGSKPVLKKLTARLDYQDYKLDLNSKILKIAVLNEEWVELKLQWYSYLDKYLDGSWRLREIQVSYRDGRIYVYLTFSRDVQLRESKTLMGVDINFNNITYTVVDLNGNLVSMGVIPFNGLKRALAHRIIAEKMQRRYSREWRYVRGIRESVRKHGRRARSILTDSCHYVSRRLVEVAKEYSALIVLEDLNKLRTRVNGSRKFNKKLSLWAYRRIQFYIHYKALIEGLSVAYVDPRNTSKTSPIGGKLEFINYKWVKLPTGHVVTRDLVASWNLALRGLNSLTRDVGARGHVEPLNAPDQMQSQEGMREKPVQVSKVTLVTKK

SEQ ID NO: 50743 - protein, 402 aa, Escherichia sp.
VKRLQAFKFQLRPGDQQECEMRRFAGACRFVFNRALALQNENHEAGNKYIPYGKMASWLVEWKNATETQWLKDSPSQPLQQSLKDLERAYKNFFRKRAAFPRFKKRGQNDAFRYPQGVKLDQENSRIFLPKLGWMRYRNSRQVTGVVKNVTVSQSCGKWYISIQTESEVSTPVHPSASMVGLDAGVAKLATLSDGTVFEPVNSFQKNQKTLARLQRQLSRKVKFSNNWQKQKRKIQRLHSCIANIRRDYLHKVTTAVSKNHAMIVIEDLKVSNMSKSAAGTVSQPGRNVRAKSGLNRSILDQGWYEMHRQLEYKQLWRGGQVLAVPPAYTSQRCAYCGHTAKENRLSQSKFRCQVCGYTANADVNGARNILAAGHAVLACGEMVQSGRPLKQEPTEMIQATA

SEQ ID NO: 50744 - protein, 552 aa, unknown
  TnpB Polypeptide
VSRALRAIAGPFVAAGPTGVRVRTRLRLSPGDAAVLQAAGTHLGSLAGRDLAARCREGRLDAKGRAVSRAARKRALTSLSSSRWAGAITRTSEDAWQLADRNLRAERAALRAQVSKIGSRLAIPVGRKAGRMRGYATVAERYSKQVRLQALKARLARVEQRIDTGAVSIVRGGRVLLRNRANLATAGLTEAGWRERWEAGRLFLTADGEAGKTLGNETIRWSPDEQWLELKLPAPLAHLANRPHGRYRLSCPVEFPYRGDEVAAQATSGAVRYDISHDPRSGRWYLDASWRASPGPVPSLDALRQHPVVAVDVNAGHLAVAVITPDGNPAGVPFTIPLDLAGLPATARDGWLRAAISTLIATAKARGARAVVIEDLDFAAARAEGRERTGNRPSRGRCGKAFRRAAYGIPTGKFRDRLTQMTANAGLAVVAVDPAYTSRWGAEHWLAPLQQDHPEISGHHAAAVVIGRRALGHRAQRREGVTRPRPEDRGVRTAPRAPGGQAAKRNGGPRTAQRQPPRWRNTATAGRGTQPDQVAQDRSGPPDSRNYLLQSH

SEQ ID NO: 50745 - protein, 358 aa, unknown
  TnpB Polypeptide
MKLTLQIKLLPTNEQAKSLGKTLKACNATCNDISETAWQTKTFNQFKLHNLVYHQQKEFSHLTAQAIVRCISKVSDSYKLDKNVKRIFRLEGGITYDSRILSYKENVVSIWSVDGRLKISFVCHNQKYLPHIKGEADLITKKGKWFLFQTVEIPEEIIHDVEEFIGVDFGIVNIATLSSGEIMSGKELETYREKRQKIRSSLQSKGTKGCKKVLKRLSGKEKRTTSIVNHTIAKKIVANAVQENKGIALEKLKGIRKSANNKGKKFCSRVGKWNFADLRTKIEYKAKLNGVPVIVVNPAYTSQTCSHCHNLGSRNGESFKCPHCGFETHADVNAAKNIGADVNLPEKSVKEHKVPNQV

SEQ ID NO: 50746 - protein, 373 aa, Chloroflexi sp.
MLKMFQYRIFPTKKQVVRLNETLEECRWLYNHLLASRKHAYEQEGKSLTLYEQQATFSILKAAHPALKDVHSQVLQNVAVRVDLAFKAFFRRVREQAKEPGFPRFKGSGRYDSFTFPQSGFSITHDERVCLSKIGSLHMVYHRPIRGKVKTCTVQRSSTGKWYVSFSVECEPERLPETSTPVGIDVGLKTFATLSNAEAIENPRFFRKEQKALAKGQRKLAKLAQGTAERRKHRKVIARVHERIAFKRDNFTHQESRQIVDRFGVICVEDLQVKRMLHNHCLAKSIADASWAAFFAQLSCKAEEAGRQFIKVNPAYTSQDCSRCHHRQFMPLSERTYHCPCCLLELDRDLNAARNICAVGLHSLGLALEAPVL

SEQ ID NO: 50747 - protein, 305 aa, unknown
  TnpB Polypeptide
VKITSSYGVELRKQNIPIRQTLDVYRSAVSYLTEIYAQVWEELERIPETKKRFNEAEHLIHTTKKNQARFSFDLHFPKMPSYLRRAAIQHALGSVSSYKTRLGLWKKTSQIEGKPRLVYESHAMPVFYRDVMYREDEAGKDAAYLKLYDGHDWKWFRVWLSHTDMEYLRKNWAGKKASAPTLEKRRRKYFLRFSYTEDVILTKTPIKEQIICSVDLGINTDAVCTIMRSDGTVLGRKFINFPSEKDRMYRVLGRIKRFQREHGSAQVKSRCLCKTPEYRTGQKNCRSSHKICKREPCRYNCFRIS

SEQ ID NO: 50748 - protein, 382 aa, Escherichia sp.
MRRFAGACRFVFNRALALQNENHEAGNKYIPYGKMASWLVEWKNATETQWLKDSPSQPLQQSLKDLERAYKNFFQKRAAFPRFKKRGQNDAFRYPQGVKLDQENSRIFLPKLGWMRYRNSRQVTGVVKNVTVSQSCGKWYISIQTESEVSTPVHPSASMVGLDAGVAKLATLSDGTVFEPVNSFQKNQKTLARLQRQLSRKVKFSNNWQKQKRKIQRLHSCIANIRRDYLHKVTTTVSKNHAMIVIEDLKVSNMSKSAAGTVSQPGRNVRAKSGLNRSILDQGWYEMRRQLEHKQLWSGGQVLAVPPAYTSQRCACCGHTAKENRLSQSKFRCQVCGYTANADVNGARNILAAGHAVLACGEMVQSGRPLKQEPTEMIQATA

SEQ ID NO: 50749 - protein, 394 aa, Mycobacterium sp.
MSRFRLLPTPAQQVVLVEHCRHARFVWNLAVEQHQLWQPGRRAPGYNTQCAQLTEIRAEYDWLAAGSQTVQQQALRDFTHAMRNFFAGTHRRPSWRKAGVHEGFRQVGVKPRHIEKVNRRYGRVWVPKVGWVRFRSTRAIPAGVKSYRITCDRAGRWHVAFAHIPDPIPGPADGSVVGIDRGVAISAALSTGELLHAPGLTPGERTRLRRLQQRLARAQRGSNRRQRTKLAIARLKAREADRRRDWVEKTTTDLARRFDTIRVEDLDVKAMTRSARGTVEQPGVGVAQKRGLNRAISLQGWGGLVARLDHKAAGRIQRVPAAYTSQRCSACGHIAPENRKSQAVFACVACRAGPCHADVNAARNIAAGRAVPAQGDLAAGRSMNCEPHPCSPAA

SEQ ID NO: 50750 - protein, 405 aa, unknown
  TnpB Polypeptide
MLIATKIRIYPTVAQAEKLAKAFGCARWYWNNSLAETQKVYQETGKGLGQFQLNARLPQLKSEIAWLVETHSQVLQSVSLHLSRAFVNFFERRASYPRFKHKHHQQSIQYPQGVKVVDGCKVFLPKIGHVKAVLHRELQGKIKTVTVSKTPSGKYFASLLCESDAVAPSVSLNGKILGVDVGLTDLAVTSDGSKFANQKHIIKAQRNLARKQRKLSRKVKGSNSRNKARMLVAKAHERVANARKDYLHKLSTRMVNENQVIAVEDLHVKGMMKNHNLSKAIGDASWGIFTSMLKYKTAKSGKGYIEVNRFFASSKTCSCCLHQQASMPLNIRSWICDQCGTSHDRDVNAAINIPNEAQRMIAAGIVATANGGAVSQAKGRKFSVLLAPLKLEAPSFRAGWFTNTY

SEQ ID NO: 50751 - protein, 456 aa, Proteobacteria sp.
MNRNRTTGIRITLEPQNCTKEDIKNWMVAQRKLTNYASKNLLKLMRKDASIAEVVFKNNSHYLAYEVHHHILLPFTKFREERIKLGLRTSTNERLAAAIAGRFYHGYGQRNGSKKDVWAYALPKLPAITRQNKAVHVKDSVLRKFVDGNTITVNPEVINGQQYLSNVRFELQGLFGKIYKLKGKILSKHIHLLEFLDLKENVDCNIFLTKHGNITIMIRIDEEYELMYQPIQTLGVDFNKRKNVFVTMNDGTFIPLTSEIAEKIQCVKESDESIHEVKSSKLRQAFRMRWKQCRKELRHSLRNIADEIVAKAISKESLLAIDGVTQSQGSFGHAELKEMLVKLCKQKKVPFVIVPSAHTSSDCSYCFERSGKYNQVARSKDFEKVSCEVCGQNYNADVNAARNIAQDGWFIFTNTNEDFPKDKFGRAVRSNRPSTSVANRKKKMKFIDFSDEDITF

SEQ ID NO: 50752 - protein, 228 aa, Euryarchaeota sp.
LDGVEADGETSRLLSVPFGGVRQVQATHFRRRQLLAKKKARDRRVLRRLLAREGRREKDRVLQRLHRVSKALVTVGNRKRAAIILEDLTLRGAGGRSRRMNRRLSSWPRSEIHRQIEYKAALAGVPVIKVNPQWTSKTCPVCGARRRDRVGQDFVCLHCDWEMDRQINAGMNILKTALASNEALARAVRFQPGALRHDVVSPLYDLVRGGPSARDEPSGVECGADVVR

SEQ ID NO: 50753 - protein, 491 aa, Coleofasciculus sp.
MYNACLGEAMSRVRLIRQSKDFNKARSLKSSNPERKVLFKRARERYEFSEYALHSYSTFIRQSWIGEHIDSNTAQKLATRAYKAVEKVLFGQSKKVRFKGKNQMDSVEGKSNKSGIKWKGEAVEWGGIELKALITCNDPVILHGLNSKVKYVRLVRRKVSGKNRFYAQLVCEGRPFVKPKNKTGKGTVGLDIGLSTIAIVGDSTASLQEFASGLEFQDKQIRRLQRKMDRSRRATNPDSYNPNGTVKKGKKRWNSSSSYIKTRTSKANLERKLAAHRKSLHGELVNDILRSGDVIKLEKLSYKAFQKLFGKSVGKRAPGMFVSHLKNKAERAGLKVVEIPTYSTKLSQTCQCGRVEKKKLSERIHQCECGVVAQRDLYSAFLAKYIEPDTFVLQVSQLLDDWQSAELCLQAAWRAATENKPATGRVIPSSFGRCPEVEQVAAKVLTKVSKSQDVVSASREPGRGYARPPVGEVGGAGIHSSTQAYRSERGS

SEQ ID NO: 50754 - protein, 401 aa, unknown
  TnpB Polypeptide
LILAHRIRLDPNNVQASWLERCAGTARFTFNWGLARWQEQHAAGEKPSWQKINGELNSVKSVEFPWMTELPWAITNKALSDLGAAFTNFFHRVKFGQKPGYPRFKSRKRSTPSFAIEGRALHFDGKKIKIPKLGWVRTREALRFPGKVLSARFTKRAGYWYVSLQVEVDESRWSYPHRCETQAVVGVDLGIVDLAVLSTGERIEAPRALRAHETKLRRLNKELSRRTRGGKNWHKTKAQIQRLHERIANIRRDVTHKLTTSLVKRFRWIGIEDLNVVGMTKNRRLAKSVMDAAMSEVSRQLAYKAPLVGSAVVVADRWYPSSKTCSGCGVVYADLSLGERRWTCDACGAEHDRDKNAAENLRAMAAAQAVTACCHGSAGADLRIDVKPPLGQESSNVVSFG

SEQ ID NO: 50755 - protein, 538 aa, Micromonosporaceae sp.
VTVSPASESSNSKLRCQGSGRRLWSSIPRRPQATWCGISRGVDVEVRPPVWAAGREEPGGPHHRRCHWGKRPMTSTVMRAYRFALDPTPRQAGNLLRHAGAARVAFNWGLAQVKANLGQRDAERSYGVAEDELTPSLGWSMYSMRKAWNQAKASVAPWWATCSKEAYATGLDSLARALSNWSDSKQGKRKGPRMGFPRFKSKRRAVPSVRFTTGPIRLDDDRRHVTLPVLGTIKTHESTRKLHRRITNGTAKVKSATVRREAGRWFVAFTVEVQRTEQTPARPDAVIGVDLGVKTLAVFSDGRPAVPNPKHYDTARSKLARLSRAVSRKQGPDRRTGQRPSNRWQRANSRRNRVHYRTASLRRDALHKLTTSLAMQYGTVVVEDLNVSGMLRNRKLARAIADTGFAEIRRQLAYKTQWNGGELAVADRWFPSSKTCSGCQAVKSKLPLLMRTFICAACGLVIDRDENAALNLAALVQRHVAGSGPETQNGRGADQKARPRLAGGATPRQRTETSTPHRMQVRIGRGLSLGNRRITETR

SEQ ID NO: 50756 - protein, 241 aa, Okeania sp.
LLVKAIEAEQLPVHPLLEERQYETFGIDVGVKKFASIANQEKGDSEVVSLPDSIKLEQLKIAKFQWRNRNKQLGGKGKPPSKNAIKYYKKLAKYHGRVTNMRRDFIEKTTTKLVTQIKHVCLESLNVKGMMQNTKLAASVARLGLYEFRQRLTTKIVSSGGTVVLADQWFPSSKTCHSCGRINQELKLKDRTFNCPHCGMRIDRDLNAAMVLSQYGEINQKNREGCARIYACELEEGYLLG

SEQ ID NO: 50757 - protein, 416 aa, Moorea sp.
MIAAYQYRLRLTKSQEVEIEKWLDMLRHQYNYLLADRFNWYEQNRCSINSCPLVCYLPDLRNNPDYFYQKKTLPQLKKDRPWYKVVQSQVLQDCVKRVDLAFKRFLKGDSNGKKSGRPRFKGKNRYKSFTFPSLYKNPINGNIMTLPKFGKVKMIYHRPIPEGFKVKTATITRKADGYYVTLSIQDDSVPDIIPVDSASNPVGIDMGLKSFLVKSDGSEVPIPQYYRKAQKRLNKIQKAVSRSKKGSNNRKKVVTKLGKAHKKVADTRKDFHFKTAKELLDNHDLVAHEKLNIKGLAKTKMAKSVLDAGWGQFLSILSTKAVRVAWPTAINAGLLTVAVNPRNTSQNCSNCGTKVPKKLKDRIHSCPHCGYTADRDVNAAINILKLAVGHSVGSKAFRVSEALAGVGKKPTLNLKR

SEQ ID NO: 50758 - protein, 404 aa, Streptomyces sp.
VGVVRAYKFLLRPTVRQEQALAGMLADHCSLYNGALQERRDAYRHASKTTVRYGGQSAQLKEIRAFDPGRQGRWSFSSQQATLRRLDRAFAAFFRRVKAGLTPGYPRFKGVGHFDTVVFPKDGDGCRWDSTPHDGQTRVRLQGVGHVRVHRHRPVRGRVKTIGVKREGRRWYVVLACDEVPAEPLPATGSTVGIDMGVTHFFTTSDGEHVANPRFVETMAKELAAAQQHLATFPRRTRRRTKKHRAAARKVAKLHAKIRRQRLDHHHKAANTLVTGHDVIAHEKLNTAGMTKSPAARPDPETPGGFLPNGAAAKAGLNRSILDAGWGLFLSILAQKAESAARRVIPVDARNTSRICPDCGHVAKENRLTQADFECTACGFTANADHVGALNVLSRAGLVLCDVA

SEQ ID NO: 50759 - protein, 406 aa, unknown
  TnpB Polypeptide
LQLRAYKYRIYPTFDQKQTLDQNFGAVRFIWNQLVANFNNYGTDSHIKNMNEAQVKLEHNWLKDCISYGIQQKRMDFYETVKQYFNKKRKSKSGRPKFKKRGLARDSIRIPSQALGYNKACNFEAGTIKIPKMKPIKVVYDREFNGELRSVTVSKSKTNDYYVSVLVKEEIQEKIKTGKDVGIDLGLNHVMILSDGTKFQNPKYFCKTQAKLKKMQQHLARKTKGSKRRELGRLKVARLHEKITRQRNWYYHRISNFLVTNYDSIFVEDLAVKNMIKNRCLSKSIADVAWSTLVGMISYKANWYGKEMCKVNRFFASSKTCSSCDHKLEKLDLSIREWTCPSCHVQHDRDINAAKNIYKEGMFKQHGLLSEELPDYNRGEDVRPEWFLQRKFTADLVEATRQTVSL

SEQ ID NO: 50760 - protein, 382 aa, unknown
  TnpB Polypeptide
MRRTFKYRLYPNREQAEALEYQLSEARSLYNAALQERRDAWRGHGVSRNYYDQANQLKEIRDTGHLDLANYSACQDVLRRVDKTFRAFFRRVKAGEKAGYPRFKGRDRFNSYSFPAWGDGCHITDNDRLRLQGVGIIKLKMHRPITGDIKTLTLKCEAGKWYACFSVVISMDPPAPLPDAIGIDVGLSSFAALSDGELIENPRHYRHGQAALRIAQRRVARRKKGSGGRRKAVRLLQKAHAHIRNQRSDFHHKVSRQIANNYGLVAVEDLNVRGLARGMLAKPVNDAGWGMFLAKLAYKVEETGGQFVQVNPCNTSQVCSGCGCLPDVPKTLADRVHSCPHCGLVVDRDVNAARNILTLGLSVAGPTWHNGACVPAEAVCFS

SEQ ID NO: 50761 - protein, 536 aa, unknown
  TnpB Polypeptide
MSDEEYKKLLKQYHKLSDRHILVVETDMPYPDVLKVVALSDKIRKAGNELVSLMRKNYDQLMRTKKYRKLLKLYGNTEDKDKRKALADQLNDMQKSYNVTWDLCRTSMIPIGKKYSIDAVFALTKAEDIWRGMEKCLYDNGKTTHFSKYGELPCIRAKQINRGIPMFVEDGKLRFKLRKMQFGIQVNDRFQSDEVNAVLSYLENPDKMDADAVNTLIEEACCIDTYRPCYATLVPRLIRGKYRVYLHLTIEGKAKSKYDRFGNPRHKYGKGMIGADIGTQTVAYTSDTEVGLKNLSERGNSIQTAERKERLYYRAMDRSRRATNPQNYNPDGTIKKGKKTWKYSDRYKKLKAKHTELCRINAVNRQLAINEDANYLRSLGDTFVTEPKNASKLMKRAKKTTVNSKGKFNKKKRFGKSIKNRCPSGFQTTIEKKFKVTGGAYIEVPNNYRASQYDHTADDYIKKKLSDRLYRLRDGTLVQRDWYSSFLFYCYDYRTQDIDKDKCITDFGRCYDKEKALIAWIKANHIKILNSGIKVA

SEQ ID NO: 50762 - protein, 402 aa, Oscillatoriales sp.
MLKAIKVRIYPTGEQQAHLAQAFGCVRWVWNQALSVMSLTYKETGKGLSAYNMKKQIPVWKTEFEWLKKCYSQCLQQSVLNLSQAFINFFDGRAGYPTFKNRHGRQSIQYPQNVKVLNDTEIKFPGNLGTVKAKVHREILGTLKTVTLSGMTDGRYYASLLIDDGMEKPESSDGGKAIGIDLGLTNFAVTSDGSKFQNPRHLKKHERNLKRKQRKLSRKKDKTTNKRRKAKKALARVHSKISRVREDYLHKLSRKIVNENQVIVVEDLAVKNMVKNHSLSKAISDVGWGTFCTMLKYKAEQEGKIYLEVDRFFPSSHLCSNTLLRVPHMDLSVRMFACPHCGQRHDRDINAAVNIRNEGLRILALGTSATALGGSVRPKRYGRKSTTVAATPDELGSLLHTA

SEQ ID NO: 50763 - protein, 433 aa, unknown
  TnpB Polypeptide
LEQILAERRKRDMTNKIKNDCFHWNVRLYPNAQMKKELDRLIAYDRFCWNEFVSRKLEYNKNKDYTHNLLEEYRPIRNASEWQLKLPQYVMNQVHRRFVGTCIQLSKYNKKVAAYNKTHKHKKKYKFLKLRSKKHHKKSFTIDAATISETSFQPKGKNFTFKIDLSKYSRVHRKYRTMEISELPPGLIPNFRYVSENASIRNQYPDKPYSRIVNAVILKEYDEYYVSFCLERLNLQKKSLGKGIVGIDPGLSPVMTLSSGRKYHLPKKIKELRKKARYYQSRMGKRRKKGILKQSNRYYRARTKYHNTLKRLAHIKDDWIHKITTQITKKYNEIHWEKCDSNRLSKNKRLSIHFREVDWYKISKTLDYKSKSRKGRLIYISPNKAATQTCSKCGFVRTGSLKLNLSDRYYDCPECGHHEDRDINAAKNIAKFT

SEQ ID NO: 50764 - protein, 349 aa, unknown
  TnpB Polypeptide
MRKAYKFRLYPSRKQAEFLDHELTAARRLYNAALEQRRIAWKRRGLSLGYLDQAGDLKGLGASGACTPVNYSACQDVLRRLDKAFRAFFRRLKAGGKPGFPRFKSKDRYDSLTFPSYGDGCRIRVNGKLYLQGIGEIRVKWHRQVAGKIKTVTVRRRGGRWHVCFSVEYEPRSLPQVDADVGIDVGLDHFAALSTGELIANPRWYASAQKRLRRAQRKVSRCVKGSNGRRNAVRELQRIHEHVANQRHVQRHVCQAGPRCGLAFLPAGTHRQSGRSWAAGGGSEPGRNEPALHHRVRQAGPVMDCAIPDPTATSPWRQLRAARVVKTSTPPPCLAACQSGNRLMRPGLR

SEQ ID NO: 50765 - protein, 387 aa, unknown
  TnpB Polypeptide
MKVRRAHRIALDPTDEQREQFKRAAGTARFVWNWALAEWNRLFKSSEKPNAMDLKKRFNAVKGDEFPWVYESPRDANARPFADLQAAFRNFFDKRAERPKFKKKGKCRDSFYVANDKFSLDGRSVRLPKIGYVKMREALRFHGKILGARVSRTADRWFLSVQVETEPTPFDAGESQAGVIGVDLGLHKLAVLSDGTTFDNPKPLRKMLRKLRRLSWRLSRKVKGSANHAKAARKLARLHARIADIRADALHKLTTWLVAHYRHVVIEDMHIKGMLRNGRLARAIADVGWGEFRRQLAYKGEAAGVPVTVVSRWYPSSKTCSGCGAVKSDLTLKDRVYECASCRLIVDRDFNAAVNLERYPGLSGESDACGHLSAGLVVVAARCNSSG

SEQ ID NO: 50766 - protein, 638 aa, unknown
  TnpB Polypeptide
  misc_feature (470)..(487): Xaa can be any naturally occurring amino acid
VTSVPTAVGTEEQTGGVEWTAECNKPLFYCPLLDFPPFHFHFGWLRYLPNIVIQWSTPPMAELTKTLELKLVDPNVHKRQKLRETRDAYQQALQAAFAAGCDTQAAANDVVVEYDLSGYAKNALKKYVPQLCGNSYDADELHDDHPVRFTNEGVRLDHQPQNTIEWYVKVPHHEDYHLWIPARANPDQWEWLEAVYADDAEMGESRLFEREGTWYLHVTATRDVEDESDASADERTPPDESGEPCLAGLDRTPIGVDIGEASLVTVCHRDNSGSPVRPRLWADDGKAVRRLRKTYFTATRRLQQRGSERIVESYGESLWDQIDDVFRRVTSDVVEYAESVENPVLVLEDLTYIRENMDYSEYMNRRLHGWGFAKLHAQIRYKPAEQGIPVETVNPRNTSKACHACGEHGYRPRQATFSCLNGACWVGEYQADVNGAINIADRYRSGESHRRSDRSSGQRAGADDSATDGXXXXXXXXXXXXXXXXXXDGFRHVVFTRRTGGQLPERVCGVDLPGTGRRRDAPVDDPAGGLSAGDPPLLFESRQLSPPGLTRAVQRVGDIARRDDRPLYGLEDAQHVVEADGLRVSPAVAAFSGHTCYFSLRTNVCCGVPNMGSAQDFGCILLVEDRPRDSLSRRPGPC

SEQ ID NO: 50767 - protein, 368 aa, Herbidospora sp.
MAQVVKRAYKYRFYPTPGQAAELARTFGCARMVYNKALEERTRAYTLEGRKVSYVESSAALTEWKRTDDLAFLNEVSSVPLQQALRHLQAAFANFFARRAGYPTFKSRKKSRASAEYTRSAFKYRDGALRLAKMDGPLNIVWSRPLPEGAEPSTVTVSRDAAGRWFVSLLCQDAIRPLDPTLNTVGVDAGITALATLSTGEKIVNPRHERADRRELAKAQRALARKEKGSANRQKAKLKVARVYARICDRRRDFLNKITTRLVRENQTVVIEDLTVRNMVKNHKLARAISDASWREMRFMLEYKTAWYGRELVVVDRWFPSSKLCSACGTVRDRMPLNVRTWECACGAAHDRDVNAAKNILAAGLAER

SEQ ID NO: 50768 - protein, 393 aa, unknown
  TnpB Polypeptide
  misc_feature (145)..(145): Xaa can be any naturally occurring amino acid
  misc_feature (161)..(161): Xaa can be any naturally occurring amino acid
  misc_feature (182)..(182): Xaa can be any naturally occurring amino acid
  misc_feature (187)..(187): Xaa can be any naturally occurring amino acid
  misc_feature (200)..(200): Xaa can be any naturally occurring amino acid
  misc_feature (223)..(223): Xaa can be any naturally occurring amino acid
  misc_feature (243)..(243): Xaa can be any naturally occurring amino acid
  misc_feature (248)..(248): Xaa can be any naturally occurring amino acid
  misc_feature (260)..(260): Xaa can be any naturally occurring amino acid
  misc_feature (275)..(275): Xaa can be any naturally occurring amino acid
  misc_feature (320)..(320): Xaa can be any naturally occurring amino acid
  misc_feature (346)..(346): Xaa can be any naturally occurring amino acid
  misc_feature (348)..(349): Xaa can be any naturally occurring amino acid
  misc_feature (393)..(393): Xaa can be any naturally occurring amino acid
MEVWKLVEVIALLKHKAYEYRIYPNKEQEILIARTIGCSRFVYNHFLEMWDKEYAETGKGLTYVACSKLLTELKRDPETKWLSEVDKFSLQNSLRNLSDAFSRFFKGQNEHPRFKSKKSSRQSYTTQFTNNNIAVSGNFLKLPKXGLVKFIKSQELKGRIXNATVRRNPSGKYFVSILCEEXISELXKTDSAIGIDLGIXDFAVLSDGEKKDNNHFTLQMEKXLKREQRKLSRMLLAAKKKGXSLSDXKNYQKQKRKVAXLHEKVANQRNEFLNXLSTEIIKNHDIICIEDLNTKGMMRNHKLAKSISDVSWSGFVSKLXYKAAWYGREVIKVGRWFPSSQICSEXGXXDGKKPLNIREWTCPVCHAHHDRDVNAARNILAEGLRLRALKLEX

SEQ ID NO: 50769 - protein, 456 aa, unknown
  TnpB Polypeptide
MAETTTTRAGALRVRLDVPDVRAQQLLSAAGARRYAYNWALARIVANHAQWKAEESYGIAKADRTRPFSFFDLIKAWDGAKRECAPWFGEHSTWTFRYAIRAAARAHADFLSGKTKFPRFKSRNRDRRRFTVTDGLHLAAGRIRVAKYGWFRIAAPCPAQAKLRRLVTRGRARLMNVTVSQHSDGHWYATLCFEQQVRSRPEERTAPAGPAVGVDVGLKTAAVVATSAGTVTAQLEASRALRDSLGKVRHLQRDLSRTAKGSANRRKAAVRLARAHAKVGSRRAAALGTFTAALARAHAVVVVEDLAVANMLRNHHLAAAISDQGWAELRRQLEYKTVRHGGQVVVAGRFYPSTKTCSGCGAVKAKLSLSVRTYHCELCDLVIDRDVNAAVNLAAWGERHLANPVSANQVGDRHPGGPSAGELRHACGGDNEPAHRVLAGVPDETGTSLLAHTSAA

SEQ ID NO: 50770 - protein, 384 aa, unknown
  TnpB Polypeptide
MIIRKGYRFVLQPTAEQAALICRSAGSSRFVWNKGLELQKNRLENGKRVLSYSEICSRLVEWKSEWDFLKEVHSQPLQQSLKDLSAALKNSFGGSKGFPKFKKKGECDAFRFPQGTKLDNKKVYLPKLGWVKFRKSQEIDGTIKNVTVSRSMGKWFVSIQVEMEVPEPVHPSKSEIGIDMGVIRFATLSDGTFAAPINSLGKVRTKLASAQRKLSRKQKHSSNWRKQKGKIHRIHAKVARVRKDFLHKLTSSISKNQAVIVLEDLRVKNMSASGKGTIEDPGKNVKAKSGLNRAILDQGWWEFRRQLEYKQQWSGGKVIAVNAANTSLECSECHYRAKENRVSQADFRCVKCLHQEHADLNAAKNILAAGRAVQACGVIKQTAA

SEQ ID NO: 50771 - protein, 487 aa, Micromonospora sp.
VARFATFRFCLDPTGEQEIMLRRHAGAARFGFNQCLRLVKDAVDGMRRGETVGKVPWSGFDLINAFNRWKRSGEAGRVMVAAGDGTVTVQVTGLSWRGEVCQQVFEEAVVDLGRGLSAYTASRTGGRRGRRVGFPRFKSKRHAPLSFRIRNRTSATGRASIRVGEQAPRTVTLPGIGVLKVRQDTRRLRRMLAKGRAKVVSATVSHRAGRWSVSLTCEAADLHDARRHQPMTSAGWVGVDRGLSTFVAAARADGTPVLRVDGWPRPARTEMARQRRLARDVTRKQRGSRNRAKAAARLGRHHAHTAAVRHRFLHQVCNRLVNTHDRLAIETLTISGMLANRRLAAAVADAAWGELARLLTYKQQWRGGQLALVDRWYPSTKTCSACRTVGPAMPLHQRMFTCQTCGYQADRDHNAAVNLAIWAEQHHAQVRDLPAGGPVTNTRRGEGTGPRTRAGETSPDDAGTAPTPPGVRRGRPRRALSHHSTKW

SEQ ID NO: 50772 - protein, 227 aa, Micromonospora sp.
LRAGVKARAGRAVKARVLSDGTKVTAPKFLRRAARKLKRLQQALSRKQKGSANRKKAVVKVARAHARVADTRRDWQHKLSTTIIRENQAVSVEDLCVAGLGRTRLAKSVHDAGWASFTAMLQYKAARHGRAFARVDRFFPSTRMCSACGCINAKMALNVRSWDCPCGAAHDRDVNAAINVLAAGQADNSNDRGAHRRPAPVPAARREAVTHPDLACSTRSVEGISAL

SEQ ID NO: 50773 - protein, 459 aa, Micromonospora sp.
VKTIQAYRFALDLNRRQERVILTHTGAARVAHNWALAKVKAVMDQRCAERSYGVPDELLTPPQSWSLAGLRKAWNQAKPEAAPWWTEVSKEAFNTGLDALARGLKNWADFRKGTRAGRPVGFPRFKSRRRSTPSVRFTTGAIRVEPDRKHVVLPRLGRLKPHESARKLARRVDNGTARIMSATVRCDGGRWHVSFTVEVERADRTPARPQLMVGVDVGIKYLAVLSTGEMVDNPRHLVAAQQRMRSLGRALSRKTGPDRRTGRRASKRWERAATRLGRAHARVANLRRDGLHKLTSRLAAEYGSVVAENLNVTGMLANRKLARHIADAGFAEIRRQLAYKTNWNGGRLLLADRWYPSSKTCSGCGAAKTKLPLSERTYHCQTCGLILDRDANAARNLAALAAEFDTAGSGPVAGRGADRKTPPAGLVAAKRQPGTTLVGQTGTVPPQGRTTKRVLTKAR

SEQ ID NO: 50774 - protein, 458 aa, Micromonospora sp.
VGVRVVQAYRFALDLTPRQERSVLAHAGAARVAHNWALARVKAVLDQRAAERSYGLAEEALTPVVGWSLPALRKAWNAVKGEVAPWWRECSKEAFNTGLDALARGLKNWADSRNGRRAGRRVGFPRFKSKHRCAPSVRFTTGAIRIEADRKHVVLPRLGRLKLHESARKLARRVEAGTARIMSATVRRDGGRWFVAFTVDIDLGVRCPARTDTIVGVDVGIRHLAVLSTGEPVPNPRHLDTAEVRLRALSRAMSRKEGPDRKAGEAASKRWRRAAGRLRRAHARVANLRRDGLHKLTTRLAREHATIVVEDLHVAGMLKNRRLARHIADAGFGELRRQLTYKTVWNGGLLVVADRWYPSSKTCSGCGAVKTKLTLRERTYHCTTCGLTLDRDVNAARNLAALATCVTGQQTAGSGSVAGRGAIPKTHPRGQEAVKRQPGPARLAGKTGTVLPQGRTAT

SEQ ID NO: 50775 - protein, 416 aa, unknown
  TnpB Polypeptide
MKTWKQNLKHLTAGQYHTLRTMCRLSKNIYNQSIYNIRQHYFAEGTYLRYEANYPFMKNEENYKVLGAAVAQQTMKCADNAFKSFFGLLKLAKSGKYASWQIKMPKYLKKDSMYKICLVQAQTSDGMLLVPMSYQTKKKNYDSIRIKIPPYLHDKKIRQIHIIPKHNGKYFEAVYMFDDAEQETPILDSEKALSIDFGVNNLATCVTNTGESFIVDGKKLKSINQWYNKELSRLSSIKDKQKIKSYTNRQYAITNKRNNRVSNYMYNAAKLIIDYCIKHKIGNIVVGYNDGFQDRSNLGRVNNQNFVQIPLGKLKSRLEYLSKLNGINFVLQEESYTSRASFFDNDDIPVWNPQNPVEAEFSGTRIRRGLYKTKSGTLVNADINGALNILRKSNVVSLTALYTRGEVNTPLRIRVL

SEQ ID NO: 50776 - protein, 461 aa, unknown
  TnpB Polypeptide
MRYEVQRLTSAERRCPMRQAYRYEMDPNRAQAHLLRCHCGWARFAYNWALDKNNKLWDEKKPLLRSMALMKLWTQERPEWARNGECSRQVVEGAMRNLDAAFANFRRNSKNPAWVNRLKTIRRRRKLRTNKPPGYPEFKVRGKKESATFFNPGSNSKKDYGALRIRIEGDRAVLPTLGSIKLKEQPRVKGLITQATVRLEVDRWYVALMVERNRKSPGPRPGPVIAAALGIEPFATFDTGEEIQAPRPLFHRLDRIRRLTRIVTRRSVDYKGRRQRGGPKIEPPADQPREEREKKVQSKNWAKAVLRLGKANRKIRHIRLDFIHKLTERLTKNYSRLVIQDFKVTEMQKPDKADLRNDPDWVTSRSLRRSISDMGWYTFKELCRRKAEFYGCDLVVADPDYPSAKRCSGCGNVKESFPLSERIYVCEKCGMTLKRGLNAAYNLAAYGRGQTTNGTANQAGT

SEQ ID NO: 50777 - protein, 317 aa, Okeania sp.
MQSIKTKLKVNNQQKTILAKHAGVARHAYNWGLATCISEYEQTKKRPSAITLHKRLVAEVKSINPWYYQVSKCAPQQALRDLERAFKNFLTIPQRGFPQFKKKGKKDSFYLEGSIKICQGNKIKLPRIGIVKTYEILPSVPVKNVRISKRANNWYISFKYDNEPTHTAKKRDVIGVDVGINTLATCSDGTPNAHPKAYQQAKKRLTRYQRRVNKKKFGSFNRAKAVKRLAILHMDRPGSTASTGSTTAKASCPTKRCTRRNSGRATGPTPTGAAPTPTTSTWPSQRRGPRTRWPGIAPPTPASATSTSPPTGLGCWS

SEQ ID NO: 50778 - protein, 402 aa, Escherichia sp.
VKRLQAFKFQLRPGGQQEREMRRFAGACRFVFNRALARQNENHEVGNKYIPYGKMASWLVEWKNATETQWLKDAPSQPLQQSLKDLERAYKNFFRKRAAFPRFKKRGQNDVFRYPQGVKLDQENSRIFLPKLGWMRYRNSRQVTGVVKNVTVSQSCGKWYISIQTESEVSTPAHPSASMIGLDAGVAKLATLSDGTVFGPVNSFQKNQKTLARLQRQLSRKVKFSNNWQKQKRKIQRLHSRIANIRRDYLHKVTTTVSKNHAMIVIEDLKVSNMSKSAAGTVSQPGRNVRAKSGLNRSILDQGWYEMRRQLEYKQLWSGGQVLAVPPAYTSQRCACCGHTAKENRLSQSQFRCQVCGYTANADVNGARNILAAGHAVLACGEMVQSGRPLKQEPTEMIQATA

SEQ ID NO: 50779 - protein, 460 aa, unknown
  TnpB Polypeptide
VDYVTVPIRADRGVTQVVKLRLNPSRAQVELLRGYCGTARAAYNTLLFQVKANLGQRAAEKTYDIADADLTPSLSWHKFGLEQLLRTNRDVWLPWYAQVPGLVLDRQAHQLAAGLAKWKTGTGKFPRYRKKHGPGAGLVPVTFKETGASWLTGGGRALALSLSNATRRELGAAQVRKLASVKVVKDPRGRRAAKLIRDGRGQVQEVTFSFSGGYWWASLRLRVMPAAATQPTRGPARPRAAAVGVDAGMGRHFATLDKPLPGVTDDAGHIDAPLFLRRALSDLAVAQRALTRTLPGSKRHAKALARVQKLHGRVASRRETWQQHLAIALAEHAHVVGVETLNLRGMARKTKGFRFSRSVADNGYGLFVEILTRQADKRGSAVVKAGRFYPSSKTCSDCGAVKTKLPLSEREYACATCGLRLDRDVNAARNLAALARTGLTRPEGSGIPPGPVGADLVLAA

SEQ ID NO: 50780 - protein, 337 aa, unknown
  TnpB Polypeptide
MSSNKFRVWLNNEYLPQHPEYSWIKEAYSKAVTQSVNNAQTAFVKFFNHKSAFPDFKKKGISDVKMYFVRNNPKDCRCERHRISIPSLGWVRIKEKGYIPAAKDGYVIKSGSVSTRAGRYYVSVLMEIPDTGIAGNFNEGIGIDLGLKDFAVCSNGKTCKNINKSAGLKKLEKQLIREQRSLSRKYENLKKGEVTQRANIQKQKLKVQKLHHRIDNIRTDYINKTIAGIVKTKPSYITIEDLNVKGMMKNRHLSKAVASQKFYEFRVKLHAKCNENGIELRIADRWYPSSKTCHCCGAVRKDLRLSDRVFKCSCGYTEDRDFNAALNLRDTKTYRIA

SEQ ID NO: 50781 - protein, 386 aa, unknown
  TnpB Polypeptide
VKLVAQIKLQTTLEQLAALKQTMQEANRACDYISSVAWEQKTFNQYALHKLVYQDVRKQFDLSAQVTVRCIAKVADAYKLDKRRKRKFKSQGAITYDDRILSWQLAQSQVSIWTTNGRIKIPFVCGDKQSELLKTRQGETDLILFRDQCYLSATCDVAEPEPIQSEGALGIDLGVVNIAVDSDGTVYSGKTINNVRFRHRRLRTKLQKKGTRSAKRLLKKLAGKEARFAKNVNHTISKQVVKLAQGTRRAIALEDLSGIRKRVTVRRDQRATLHSWSFFQLRMFLAYKAQLAGVAVIPVDPRNTSRTCPHCGCVDKRNRPSQSKFACVSCGFSGFADHIAARNISSRAVVNPPNVAHDEAKAVEVFVAPTELRSSAVTSHPVLLGV

SEQ ID NO: 50782 - protein, 420 aa, unknown
  TnpB Polypeptide
MLKTYKYRLYPNKETTSRLYWTLTRCRELYNAALSEYKDAYQKHIRTRMHQNEQGQWIIAEMQANVRVKSVSCFEQMRDVTEIKSEIREEYQEIAAHVLQDVLKRLDKGMKAFYRRIGEGQTPGFPRFQGRNRYNSFTYPDGAGWKLEGNILHLSKIGDIKVKLHRPIEGKMKTCTIKKEVDQWYVTFSCDIPDEQVGTHAPYTDDAIGIDVGLLHFATLSTGDTIENPRFFRKAQSDLKRKQQHKDRCKRGSHRKEKAKKQVAKAHHKIKNQRQDFLHKQSRQLVNTYETIVFEELQIANISKAPKPKQDEQGKYLPNGAAAKGGLNKSILDAGWGQFVSLCKSKAAYAGLVTVLTVDPKYTSQVCSGCGQVRKKTLDERWHSCECGCELDRDHNAALNILTKGLQTLSGGTHPTLATA

SEQ ID NO: 50783 - protein, 375 aa, unknown
  TnpB Polypeptide
MRLAYKHRLYPNRAQALAFAAMLDAFRDLYNAALQQRIEAYRRRNISLRYTDQANELKAVRAADERLAGYSYSAEQQVLRRLDKAFKAFFRRIKAGDKPGFPRFRAAARYHAAEFRVGDGLTLRKSKCIGIVGIPGEIKCKWHRALPSDPTSAILTRQSGKWFVVFHVEIKEAERRGGETIGIDCGLSAIVALSNGELVERPKWTKQAARGLRRRQRLLARGKRGSKRRGKTRARLAAYSARIARRRADFLHKLSADLVSRFSGIGIEELNIRGLARGMLAKDVLDAAWAQLIAMLRYKAARAGSAIIAVDPRGTSQTCPACGTIKPKTLAERTHRCDCGCVLPRDVAAAQIVHRRAFGIGSGHDLRERSEPVAA

SEQ ID NO: 50784 - protein, 245 aa, Cupriavidus sp.
  misc_feature (245)..(245): Xaa can be any naturally occurring amino acid
MTGMLLVYRYRVKSLNGLLNQQSRAVNYVWNFCNDTQKHALKWGKRWPTGFDLNVLTTGSSKELGIHSGIINAVCLQYAKSRSQHHRPYLRYRGRKSLGWVPLKGRDLKRSGDAFRFAGNTFRVFNSRPLPEGKIKDGTNFSRDARGNWFLNIVIEVADTQARSPARGVGIDLGLKDIATLSTGEKIGNPRHLGRLEQALAKAQRARKRRQATNLHARITNARRDFLHKLSRRIVRDFDYIAVGX

SEQ ID NO: 50785 - protein, 379 aa, unknown
  TnpB Polypeptide
MEQITVTAKIQILATSENKELLNRTMSVYADACNYVSDYVFRTHDLKQFSLNKTLYSILRERFGLKSQMAQSVFKTVIARYKTILENQKKWIKPSFKKPQYDLVWNRDYSLVRNYFSVNTLMGRVKLPYFTKGMSKYFNHDIYKFGTAKLVNKHGKYFLHIPVTYEVEESNISDICNVVGIDRGINFVVATYNSKHKSEFVSGKSIKQKRASYAKLRKELQMRKTPSARRRIKAIGSRENRWMQDVNHCVSKALVEKNPKHTLFVLEDLSSIRNATERVKTKERYVSVSWSFYDLEQKLIYKAKQKQSTVIKVNPAYTSQCCPICGHIEKSNRNKKIHLFTCKNCGYKSNDDRIGAMNLYRMGINFLEESQVPSTVTAE

SEQ ID NO: 50786 - protein, 351 aa, unknown
  TnpB Polypeptide
MLNSNMAQQILKEVDGSFKSFFGLLKLAEKGRYAKKDCKLPGYLPKEGYTTLVIGFVRLNGNQLVIPYSNSFRKEHAPVSIAIPPKLVGEKIKEIRIIPRSHARFFEIQYTYEAKAIQREVDINKALALDPGVDNLVTAVTSEGQSFIIDGRRLKSINQWYNKKNARLQSIKDKQGYGKGRTCRQEVLLRKRNNKVNDYMSKAARIIIGYCIDNKIGTLVAGYSETFQRGSNLGKRNNQTFANIPFGRLLDKLRYLCELNGIRMILQEESYTSKASFWDRDELPVSKDDINQEHKFSGQRIHRGQYRTADGRLLNADVNGALNILRKSNVVDLTVLYSRGDVDTPIRIRVA

SEQ ID NO: 50787 - protein, 385 aa, Sulfurovum sp.
MLKAQKVRLYPNTEQKQLISSQIGGARYVYNRALALRKYAYSKFGIKIGKFALINHITKLKKRERTSWLKEIDSQAIQQSIANMDKAYQHFFKGGGYPKFKSRHHSRQSYQYPQRVKIDGDGNRIFLPKIGWLKCKGLRKEFVGKIKTVTVSYEAYQYHASILIDIEEKKTVISHNSKAVGIDVGVSLVVADSNGTKVKPLDLVKELSKLRTKAQQLSRKKKGSNNRVKAKAKLAKQNLHIANMRKDFLHKLSFQYSENQTVVVEDLKIKNMTKATKGTVEKPSKNASAKRGLNRAITQQSWGLFFEFLEYKLKENGGQLIKVDPKFTSQTCNKCGHISKENRQSQSKFVCTACGHSANADTNASKNILARGIHGNNASPQIKVA

SEQ ID NO: 50788 - protein, 398 aa, Sphaerisporangium sp.
VQLRYNFRLYPTPDQRESPARAFGCARVVFNDGLRARQDARERGLPYISDGDLSKRVITQAKKTSERSWLSEVSAVVLQQALADLNTACRNFFASLTGKRKGLKVAPPRFRSRKDNRQAIRFTRNARFSITAGGKLRLPKIGDIPVRWSRELPAGPSSVTVVKDATGRCFASFVVETAAEPLPEVMPEIGIDLGLTHFAVTSDGRKVDNPRFLRRAERRLRKAQRDLSRKARGSNNRKKAVVKVAKAHARVADARRDRAHKLSTMLIRDNQAVYVENLAVSGLGRTRLARSVHDAGWSSFVGMLEYKAARYGRAFHRIDRWFPSSKLCFDCGTVAESMPLAVRSWECSCGAVHDRDVNAAKNILAAGRADRLNACGVQVRPGPAPAQREEAGSLRGAA

SEQ ID NO: 50789 - protein, 307 aa, Bacillus sp.
MAKQNKAYKFRIYPTEEQALLIRKTSGCVRFVYNKMLAERKETYETFKEDKEALKKVKHPTPAKYKKEFEWLKEVDSLALANAQLNLDKAYKAFFKGNAKFPKFKSKRHKQSYTTNVVNSNIELLEGHIKLPKLKTVKIKQHRHIPSGYMIKSCTISMTSSGKYYISILTEYEKEITPIEIQHVVGLDFAMNGLFVDSETGKKANYPRFYRQMLEKLAQAQRKLSRKKKGSSNWNKQRIQVAKIQEKVANQRKNFLHHKSKEFVTHYDAVIIEDLDMKEMSRALKFGKSVADNGWGMFPSFLEYKLK

SEQ ID NO: 50790 - protein, 410 aa, Streptomyces sp.
VRRRSADAADTGRRYRLYPTPAQAERLKVWGHTCRAVWNLALEQRIYVYSQRRKSLRADEQCRYLTRARHDIDWIADLPSQTPQQILRRLDQAYDNFRNAGHPAGFPRFKKRGARLSIPFPAQAVRVTEISRKWATLRIPKLGEVRLRIFRPLGGSIKHATIRTDGTGRWYISFGVHTGQSAAPPNGLPPVGVDFGVKQSAFLSGEVKPRMMPPSLTVGERRRLRGLERRKARQMRRAGKETGNGRSARLRRTVREIARLKARQARRRLDFTHKLTTDLAKNHGLVVIEDLRVKDMTRSARGTAGAPRRGVARKAGLNRAILDNLPGERRRQLAYKCPRHGSVLVAVEAAGTSQTCGVCHHRDPASRTDRDTFVCTACGHFDDADHNASVVVLTRALRRGRARTLPQGMR

SEQ ID NO: 50791 - protein, 366 aa, unknown
  TnpB Polypeptide
MTFQKGVKFRIYPNREQRNLIDRTLGCSRLIYNKGLAMREDAFKSGEKCGYKQTSAMLTALKQDVNYAFLKEVDSIALQQALRNLDTGYTNFFEHRAAHPKFKNKKSSKQSYHTLNIGNGIRISNKRIRLPKIGWVKVHQSMEIGAIHNATVVRTTTGKYFVVLNVEYDPQPMPNNGCVVGIDVGLKEFYSDSNGTVVNNPKYLEKKAKKLAREQRRLARKQKGSHNREKQRIRVAATHEKIANQRNDFLQKQSTMLVRENQTICIEDLNVKGMLRNHKLARAISSVSWSSFFNMLEYKAYWFGCTVIRVPTFYPSSQTCSCCGHKNVAVKNLSIRKWECPSCHTVHDRDKNAAINILRKGLEKSA

SEQ ID NO: 50792 - protein, 478 aa, Bacillus sp.
  misc_feature (2)..(2): Xaa can be any naturally occurring amino acid
  misc_feature (34)..(34): Xaa can be any naturally occurring amino acid
LXGENEKELIKKLQLKYLLNKRFCEDAVLQAQTXPFPPKKNFFPVYLENNQKKLEKTLQKKDDYESGRKNPKKVSLEICLIGLRKRQQKLEQKIEMYETHIKNGTLPPIIFGGRKNFYERMKDKISNQEWKDLRTRQLYSRGDKSKKGNLNMRITVDDCGQGWLEIANPLGRTNGKTKSPRIKVPIMIPYRFYHQITNVVMGKQIGVNPKGKPIIEHQKYSVEIIRKQNEFYVNITFDETEIGRVLDFKETPQSDVIAGIDVNPDRIAVSLCTKQGNFKGSKIFYLHNLNAFLTNKRATIIGQIVQQIKTWLLENNVGGIVLEDLKFQQSHDTDKYSNRNFHQFTYKKMLNSLIRMSLRNGFSVKTVNPAYTSVIGKLKYSQNFGISVHEAAAFTIARRGLELQEQLPKEIILLLKKQITTKLRILVASMEESKKNTKKVYKKWLQTIQTWKEYHNWKLWSILHKTVYMNNQQFVFKI

SEQ ID NO: 50793 - protein, 236 aa, Rhodococcus sp.
VVAGSAVGAVECDDHQGCRGPVFRVVRRGDVRRSAAGVRCGGGYRSGARHVRGALGREGDRVPEVLPPRRTEVEEGAAEPVPQGEGIEESDQGTCPCRKAHARVADARKDWAHQRSTVIIRENQAVFVEDLCVTGLARTRLAKSVHDAGWGMFTRLLEEKAARYGRTFVKVNRFFPSSQLCSVCGRVDGPKPLSVRTWSCPCGAVHDRDLNAAINIHAAGRAEWLNACGETVSLLA

SEQ ID NO: 50794 - protein, 262 aa, Rhodococcus sp.
VQLRYQYRVYPTPGQQDTLARSFGCARVVFNDALRVRQDAYAAGVKLSDTDVQKQVVTEAKKTPARVWLSEVASVVLVQACQDARRAYRNWFDSMSGKRKGRRVGAPRFRSRKDNRQAIRLTRHGFSIRANRKLYVAKVGDVKVAWSRDLPSEPSSVTIIKDAAGRYFASFVVETSDDPLPECDAEVGIDLGLATFAVLSDGKVIESPKFFRRAERRLKKAQQSLSRKEKGSKNRTKARVRVGRPTPGWPMPARIGRINAPR

SEQ ID NO: 50795 - protein, 415 aa, unknown
  TnpB Polypeptide
MLVHQAFRFELAPTAAQRAALINHAGAARWAWNWGLAVRRKTWQRRRQTLNAMDLHRLLNRLKRTTRYGWLYEVSKCAPQEALRDLDRAYANWWRSRKQGRRGGRPRFKKKGRCPERFRLTGAIHVERDAVVLPRIGRVRTKEATGKFRGGQILSATCRREADRWYVALTVNVVRLDPAAVTGPVVGVDRGIRTFAVCSDGTTIDSPRALARGQRRLRRRGRAVTRKQPGSANRRRAVLALARYHRRIRNQRVDALHKATTALAKAKSVIVVEDLYVAGMVRNRRLARAIADQGWGEFHRQLTYKTAWYGSRLLVAPRFYPSSKTCSSCGLLKTTLPQDIRMFSCEGCGQMIDRDLNAARNLARLAEAQARLVAASSAETRNACGEGSAGWAATGPVELTSVKQERTRVHTITGA

SEQ ID NO: 50796 - protein, 390 aa, Deinococcus sp.
MENNTTIKTHKYRLYPTKPQEAAMFETLRLTRQLYNAALEQRISAYKKQGKTVTGYDQQKELTALKEACPEFEAVYSHVLQEPFERLDKTYRSFFARVKRGEKAGFPRFKPAQRWNSFKFKEVWDKKKGRWLTPGRPTDDGKRINIPKIGSVKCKFHRPLEGTPKTLQILHECGEWYAVYTCEVPKNPLTPTGSSVGVDVGTTWFAITSDGEFVENPRHLKTGLRKLRVQQRTVARRKKGSNRRKKAVKLVAKNHQKIRRQRLDFHHKTARRLVNEHDVIAHEDLKVSNMVKSNLARSISDVGWSQFFDILSLKAESAARKVIRVNPMYTSQTCHQCGHRSKESRLSQSRFKCVNCGHEDNADLNAARNILQAGARPSGVNDSEVMHVVA

SEQ ID NO: 50797 - protein, 445 aa, unknown
  TnpB Polypeptide
LKLELNSEEESILRAEMVKYIACVNFLVAQDLSGESIRKFTTKDVDAPLASAVRNQAILDAKSVLRRYAKNQRKVDRKRAWFTAQGKTPKHLIRDAKVPILRKPVLFVNNQNFKIELDAKTVSVPLFLDGKMTRKNYRITLTPRQREILTTTSHLATLRIVRRGDKLFAQVGYKVEEPDKASLDALLADTNTLVMGVDLGIKCPAVSYSTNGTVRFYGNGRENRYKRRKFYARRKKLQKAKKLRAIKRVSDKEARFMKERDHQVSRAIVNEAIRQGAKVIALEELDGIRESCTQSTKSTSTRKSRKNVDKPKVDAVSESVKNVTDAGANARVHVQLDLFSEPETLTKKERRKKRKLSKKQIAARKKNNRSLNSWSFYRLTKFIKYKASLAGIRLVHVDPYKTSQRCPTCGREHKAKDRKYVCECGFHAHRDVVGAINIAKNALKR

SEQ ID NO: 50798 - protein, 369 aa, Deferribacterales sp.
MITREVKLKLTKKQENQLIKWIPILTSIYNWGIRKIELNAKNGIYFSRFDFTNLLAYHGKKLDIPSHTIEGILNQAYTSWKRCFKKISKQPRLKSIRNKLNSIPFPDSIPYSRITDKTIRIPGIGKIRYHKQEIPQGEVKCGRILKKASGWYLQLTLDIINKFPVNSTTEKVGIDTGFKYLAVLSNGIKIENERNYIKGQKRLAQAQRGKRKKLVARLNERIKNRRKDYNHKVSRKIVEDYSEIYITNDNLRNQTSIFGKSIQDAGISQLRSFIIYKGDNHNRIVKLVDSKNTTMTCSNCGSLTGPKGLSGLAVRDWECDACGAVHDRDINSAMNILNLGLGYSLNNPKTHALEIRPEKFGQESLGDTL

SEQ ID NO: 50799 - protein, 409 aa, unknown
  TnpB Polypeptide
MSLITRSYRLRAYPNGAQRRLLDRWFGAVRWLWNTALEIRSEAYRTCGLSLTGNDLSRWLTQWKHTAGHEWLAEVPSTALTQCLRDQDRAFSGFFAKRARYPRFKTKGGRQSLRFQGVGRPWRSGTLSLPKLGALKLAEELPKTERPGMVTLSRDARGAYYVSFCAEVPCPSLSGTGELVGVDLGLTHLATLSTGEKIPNPRHYQRRLRYLRQQQRCLARRQKGSKRRVKQRVRVARAHARVREARQYALHALTTRLVREFSVIAIEDLNVRGLARGRCARAIHDAAFGELRRQLRYKSEWYDRLLLEVDRWYASSRHCSVCRFRLDELRLDQRQWTCPKCRTCHDRDINAAQNLLTQGMRQLAGRDDRDLCVDARDSCPEEHILVQVLAEEARSGHRNPAGLEPAGLG

SEQ ID NO: 50800 - protein, 356 aa, unknown
  TnpB Polypeptide
MSCHCLTHCPLGGVHSNAFSISAKWGYENQSWNRVDNHNATYKLARQSVPNLPSSLVQGARDCACEALKAVKCKTLPQRKSFSAMRYNQRVITVNIVHGVATIASTNGRIKATFYIPSHYREYLSWIIKSSTISYDRRRKVFYLHISMEHSDPAKVANLEVLGIDRGIVNIAVCSDNRFFNSKKIKNRRARYAYLRKELQSKGTQSARQKLKRLSGRERRFVTDVNHCISKQIVNSEYTVFAFEDLSKIRVQKRRGKEFDRKLNNWSFYQLEQFVGYKAEALGKHVLLVDARYTSQKCSNCGHTYKGNREGSAFRCRSCGFELHADLNASRNIAQAGISCLSRLHSQPAKCDTTLS

SEQ ID NO: 50801 - protein, 444 aa, Escherichia sp.
  misc_feature (236)..(283): Xaa can be any naturally occurring amino acid
MHQENTMLPRRISVSLFIDQSIIWPVKRLQAFKFQLRPGGQQEREMRRFAGACRFVFNRALALQNENHEAGNKYIPYGKMASWLVEWKNATETQWLKDSPSQPLQQSLKDLERAYKNFFQKRAAFPRFKKRGQNDAFRYPQGVKLDQENSRIFLPKLGWMRYRNSRQVTGVVKNVTVSQSCGKWYISIQTESEVSTPVHPSASMVGLDAGVAKLATLSDGTVFEPVNSFQKNQKTXXXXXXXXXXXXXXXXXXXXXXXXXXXXXXXXXXXXXXXXXXXXXXXXIANIRRDYLHKVTTTVSKNHAMIVIEDLKVSNMSKSAAGTVSQPGRNVRAKSGLNRSILDQGWYEMRRQLEYKQLWRGGQVLAVPPAYTSQRCACCGHTAKENRLSQSQFRCQVCGYTANADVNGARNILAAGHAVLACGEMVQSGRSLKQEPTEMIQATA

SEQ ID NO: 50802 - protein, 405 aa, unknown
  TnpB Polypeptide
VIKINRVEKHIIKQNNKYYSLLDEFCYKSKNLYNYANYIIRQEFINNNKWLRYNELDKILKQEGKDFDYRNMPSSATSQQCLRLLDKNWKSFFASIKDYNKNPNKYLGRPKLPKYKSKNDRNILILTYVNCKINKGIIKFPKSFKGFYLKSKVNNLQQVRFIPKDKYIVAEVVYKIDDVKELIDNDRYIGIDLGLDNFVTITNNCELIPLVINGKGLKSINQYYNKQIAYYKSIAKKMNKLDYTNRMRELTFKRNNKVEDYIHKASRFVVDYCRNNEINTIIIGNNKNWKQNSKMSKKVNQNFISIPYYSFIQKVQYKAEEFGIQVIITEESYTSGTSFLDNELPIKENYNKNRRRHRGLFVSNKGIKINADVNGSYQIIKKVFPKAFADGIEGVGLHPFKVDLL

SEQ ID NO: 50803 - protein, 488 aa, unknown
  TnpB Polypeptide
LLLVIQELTKFLEMKQKRSSTVALEMFYSLEKRHESALLITTKILICKQLLYNIQRKEVVTLNRAIKYKLKPTKEQIIFFEKNFGCSRFVWNQMLGVFKENFDNRKNANIPTPASLKKDYPFLKEVDSLALSNVQQQFNQTRNQFFRSLKSERKGEKLCFPKFKSKRQPKKSYTTNNQNGTITIQGNKIKLPKVGQVRATVHRLPKEDWKLKSATISCDSDGRYYISILFEFEQKIKLKNEVNLAIGIDYASNGFGITNFGDQLKYSKHFYENQEKLALEQQKLSCKSLHSKSWYRQLKRVNKIHKKISNQRKDFAHKLSYLLAEEFDLVAVEGMNLKNIAQTLNLGKSTNDNGFGMFRCFLKYKLAERGKYYYEVDQFTPTSTVCSCCGTYHKDIVNSLAVREWTCPDCGTRHDRDINAAKNILQHGLNALNELEIKIELGQERPEGYADFVREVREHLQTTDSLRAVEQTPLNKEKSSVRRSYSLE

SEQ ID NO: 50804 - protein, 355 aa, unknown
  TnpB Polypeptide
VKQIKTLKVRVKDKHVDQLNRMARSVNFVWNYINELSSRAIREKGLFMSAYDINPYTKGSSKDLGLHSQTLQCISAEYVTRRRQFKKAHLKWRKTGGVRRSLGWIPLGGQTVKWKNGQIYHNGSYFKVWDSYGLSNYKFRAGSFNEDARGRWYFNVAVEVDVQPTLGQGAIGIGIDLGLKDVATCSDGVKLENGRFYRQMEDKLATAQRARNKRRVKAIHAKIKNRRKDAHHKFSRKLVNKYGEIVIGDVSSTKLAKTKMAKSVYDAGWFQLKTMLEYKCAHAGIAFKVVNEAYTTQTCSNCGSLPDSRPKGIAGLGIREWECVECGVLHDRDVNAAMNILAAGHRRLAVGIPRL

SEQ ID NO: 50805 - protein, 301 aa, unknown
  TnpB Polypeptide
MLPIDWIRHLPTFSAGSRREKNRAIPDLKDLIDMIASPTSKQVLAGKFTATVLSFLKQEILRLSFTALLWANLKPALSEDNLANGMRAFVLSMHLNLGQKMRKLLVLMLGWKALLPFLLIKGLLTPDFLKPMKRLLLRLKEACLNKSKELLKDAKPKKIVSRVHERIANRRHNFIHQEARKIVNTFGIICIEKLNIKSMLKNHFLAKSIADVAWNQFAQALARKAEEAGRKFVAIDPRNTSQICSRCGATVEKTLSTRWHDCPICDAHLHRDFNASLNILRLGLQSLGIQPVEAPDFSRVE

SEQ ID NO: 50806 - protein, 435 aa, Psychrobacter sp.
MKINKAYKFRLEPNAEQEIILNNLVGSARFVWNQMLVISFEMFAKDEFINATNLVNKIMDLKSNPDFEFLKSSSNAVSLQQKVRDLASAWSRFFNPKVHARLKENKKKPRKPKFFKLADGTEIQRRPLMPQFKRKSDGRDSIRLVQFDKYCRVKGNRVKLPNGVGLVKFRKSQDIIGTIKNVTISKKSGRWYVSFGTERELTENPRHPSKSAIGLDVGISKLLTTSNGEYIKPKNSFKANQLKLAKLQRGLAKKVKFSENWKKQNRKIQKLHSHIANIRHDYLHKITTSISKSHAMIACEDLKVANMSKSAIGTVKNKGRHVKAKSGLNKSILDQGWGMMVNMLEYKQQWRGGLLVKVNPRYTSQTCSECQHIAVDNRQTQAKFECVKCMYVANADFNAARNILAAGHAVLSAEGGCSKGRPLKQKTSDLREKVA

SEQ ID NO: 50807 - protein, 438 aa, unknown
  TnpB Polypeptide
VNITSSYSVEIKRCPCGLKETQRVFRQAVSYLIAVVDHEWSAIESERSANRRMMVIEHLVHTTKANVARYDFDDRFYKFPSYLRRSAIHMAVGAVSSHKSNLHNWENNGKQGKVPKLQADRFAAPTFYKIDMYKPGEEPDSVYLKLFVRNDWVWVKVRLLKTDVQYLQKYWSHCAPSAPTLEKRYEKYYLRFAFTENIKLTDAPVSEQRICAVDLGLNSDAVCSIMASNGTVLARRFIDFPSEKDHLGHVLNRIKRFQREHGSQNAHSFWAYAKQLNDELAKKVSSAIVEFAAQHNADCIVFEYLDFRRKKVSGSKAQKLRMWRKNGIQDYAEHKAHRCGIRVSRVCAWGTSRLAFDGSGELVRDAKNRALAVFRSGKQYNADLNASYNIGARYFIREIIKPLSVKAGSALSAKVPEVRRRTSCTLDTLLRVNAALAA

SEQ ID NO: 50808 - protein, 356 aa, unknown
  TnpB Polypeptide
VIKAYKYRVKDRRVAKRLTAHAYACNQVWNWCVAQHEDTLARHRAGGPKRKWLSAFDLAKQCAGVGKDLGIHQQTVQSVCDQFATSRAHRPHLRFRSSFGKKRARGWVPFQRQSRRITDDAVTYLGQTYRVFGAKRRQIPEAAGGGSFVEDGRGRWWLVLRVEAPDPIAANDGAVGIDLGLKDFAALSTGEKIAAPRYFRQLEVKLAAAQRARNRRRAAAISAKIANTRRDFHHKLSTRLSRDYAFIAVGGVSAKALARTRMAKSVHDAGWSTFRQMLRYKSPGYREVDEAFTTQTCSSCGSLPPERPRGIAGLGIREWSCSACGETHDRDVNAALNILALGRSAAPRADESRRVA

SEQ ID NO: 50809 - protein, 426 aa, unknown
  TnpB Polypeptide
MSLSEENAASVMRSQTVRLYPTAAQAERLSQWAGTVRFVYNLALEQRKTFWRPGRHFNYATQSREITELRATVEWIADVPRSPLSYALSDLDQAYANWWAGRAGAPSYRTRRENDSFRLQGRDCSLRRTSRRSGQLRIPKLGDIRFRWTGATPATWVNCTIYRRGGAWFAAGPRTVEARAPACSPQMVGVDRGIRAFAALSSGELVVGPNPGRRAAKTLARAQRNLSRKQKGSRNRDKQRRRVAKLHMRLADARKDFLHRISTAIAQNHGTVVLEDLKVKNMTRRAVGKGRAAKSGLNRSILDQGWGTFRQMLAYKLAERGARLILVAANDTSRTCAACGVVDGDSRKAERFKCTVCGHEADADTNAAINILRRGRASVLPVEASACEPAHEAGTSRTASRLFVSSETSGCGASIGKVAFPGGVSR

SEQ ID NO: 50810 - protein, 440 aa, unknown
  TnpB Polypeptide
VVEGTFKYAATPEDAETATAAWEDIQTCREVYNHALTQEYRPRPDYDKPSYTAMQNKLTGPNGWKEQWPAWKDVYSKCLQMAIRRIKQSESVLESLQDRGYDVGRLKWKAPREFRSIVYNQSGFDVDHNTDRTDHAIVNFSKIGDFHLNYHRPLPEDGDIIQVILKKEKTGNWFVSIVVEYDPEYPEKPCVEYIEPKETVGIDLGIINFIHDSDGRAFASLDEQRDRDRIERRHQDISRKTYGSNNWEKARQKLAQAYNRLQNRREDYREKLTHEYTTQYDAVFLENLDVKAMTEDDGNSRNIAAMSWRETIQAFKRHGEKNGCHVIEVPPEGTTKRCSQCGCETDKPLWVREHSCPSCGFEAERDYNSALEIKRLGLEKLGVEAQTKTVGQGMAESTPAETALPADTDDFREVSPKRVVETGSPCLKERAATPQVSRQG

SEQ ID NO: 50811 - protein, 408 aa, Streptomyces sp.
VIVMQLRYSFPAYPNVGQRKRAARVFGCVRWVWNAGLAEQLPVKASNKVLGSPRKRIAEGPYARTPKNPDLSKILITEAKKTLERAWLVQAPAGVLQQSLRDLDKAWTAHEDSKSGRRPGPKVEEPRFKSKHDRRQSARFTKATRFKVLDSGRLRLPNIGELKVKWTRELPSDPSSVTLIRDESGRYWVSFVVETDPTTDLLPQIDADCGIDLGLKHFAVLDGGRKIDHPKWLKKAGKKLAKAQRALSRKKKGSNNRNKVARQHTHVANARRDWQHKLSTRTIGENQAVYVETLGLRSLARTRMAKSVHDCAFAQFVSMLEYKAAKTGRLLIKVDRDFPSTQRCSACRHRTGPKGLAGLKIREWTCSTCGTLHDRDLNSGINIKTEGRRIRAAMTQHHIPGDVPALTG

SEQ ID NO: 50812 - protein, 423 aa, Alkalinema sp.
MLLNYQYKLLPTTQQKAELTRWLDMLRCQYNYLLADRFDWWESNRCPINACSLVQRPHRLRDKPEYYGQKRSLVGLKAGRPWYKDIHAHVLQDMVKRVDLAFQRFIKGDGSGKRSGKPRFKGKRRYRTMRFPSLKPDCIHGNRVTLPKFGAVKFIQHRPIPDGGTVKNAMVTLKADGWYVTFCIEDKSVPTSTPDVQPTWENSTGVDVGLEKFLADSDGNFEAILQHFRQSEKQLAKLQQKASARKKGSRARKLLYRKVARLHQKVARKRQQFHAETAGKLLSQADVVFVEGLNVRNMNRRCQPKMDAAGKYLPNGQAAKSGLNKSIADAGWSQFIDILTFKAEKAGALVVKVDPKGTSQHCAICLNKVPKTLADRWHDCPHCGNEMDRDTNAALLIKKVGLGIASLKNAQPRKGKRSQRCTA

SEQ ID NO: 50813 - protein, 386 aa, Ruminococcus sp.
MRKLLKSFKTEISPTLEQKAKINKTIGTCRYVYNFYLTHNKELYDKGEKFMSGKSFSVWLNNEYLPNNPDKLWIKEVSSKSVKKSIEDGCAAFTKFFKHQSGYPNYKKKDKSDVKMYFVKNNPKDCACERHRINIPTLGWVKLKEKGYIPTTKDGWKIKSGTVSKKAGRYYVSALVEIPDNKITKNSSEGIGIDLGLKDLAIISNGKTFKNINKSGKVKKLEKQLRREQRCLSRKYENLKKGESTQKNIQKQKLKVQKLYHRIDNIRTDYINKTIAEIVKTKPSYITIEDLNVKGMMKNRHLSKTVAAQKFYEFRAKLQVKCNENGIELRVVDRWYPSSKICHCCGCIKKDLRLSDRIYRCSCGYVEDRDLNAALNLKDAMTYEVA

SEQ ID NO: 50814 - protein, 408 aa, Archaeoglobales sp.
MMRETLEIVVNNDVRSRKKAHELCYRVLREKYPHLHNKFVQEAYKRALAMYRSYRKLLNKWKKLSERKRKKISPPSPPSLEKNRVIELHIDTYRLKRRHGFLVLTISKGNGTYLRFLVMEYVYARRELNNAKLGNSKILVDGDNIFLLLTIRKNVEVNEHRNKLFIDINEDSIDCLLINYNEGRAQLFSIRHDIKRIRTNYRRIRKSIQKKVKKERLRDKLLAKYGSHERKRVEDRLKKITTLLAEIARKHNTDLVRENLKDLKLNGKRRSKQLNYRLSTFPYRKFISYIDQKFYERRLIVIKVDAKKTSVTCPLCDHVNKRNRVNKETFKCRKCGFTFNAQYVACLNLFSRFNDGKVAIRSGKLVLTTRKAGSVVPVNVAPNEAPSIHEVLREKPVQVSQIPIIPKR

SEQ ID NO: 50815 - protein, 285 aa, unknown
  TnpB Polypeptide
VRIAYQYRLRPTASQVALMEHWLELLRKQYNYRLAERFNWWQQNRCDINACPLICHLPELKDQPDFYTQKRDLVHTKARFPEYKAIHSQVLQNCIERVQKAFDRWLSKKSGRPRFKGVCRYRSFTFPQMKQDCIRGKFIHLPKIGAVKLIQHRPLPDGFGIKTATITRKADGWYVSLSLQSASVPKFTPDLPTLENTIGIDMGLDSFLVTSTGESVPVPQYYRKAQKRLRRLQRWHSCPHCGLELPRDWNSAILVKYRAVGHPVLKAQAMSFTGVTEKPALYASA

SEQ ID NO: 50816 - protein, 442 aa, Lachnospiraceae sp.
MQTVSSYGVELRKQNIPLRQTLGIYRSAVCYLTEVYGKVWEELSVIPDAKRRFNAAEHLVHTTKKNIARFGFDLRFPKMPSYLRRSAIQHALGTVSSYETRMELWEKEGKRAGKPRLVYENHAMPVFYRDVMYREGTEGKDEAYLKLYDGHDWKWFCVRLLHTDMEYLRKHWHGRTASAPTLERRHHKYFLRFSYTEEVTLTKTPVKNQVVCSVDLGINTDAVCTIMRPDGTVLGRKFIDFPSEKDRMYRTLGRIRKFQREHGPAQAGGRWAYTKRLNTELGRKIAGAVAAYAEENHADVIVFEYLEMQGKISGKKKQKLHLWRKRDIQKCCGYQAHRKGIRVSRICAWNTSRLAYDGSGLVLRDPKNHSLCTFQTGKRYNCDLSASYNIGARYFIRELLKPLPATERSLLEAKVPSVKRRTSCTYADLRELHLQMGVLKAA

SEQ ID NO: 50817 - protein, 245 aa, Streptomyces sp.
VTVSQDPAGRWFVSLLCEDPAIKPLAATDTAVGIDVGLDHLLTLSTGEKIANPRHERRDRERLAKAQRELSRKARGEGANRRKARQKVAKIHARIADRRRDVLHKLTTRLVRENQTLVIEDLTVRTMVKNRSLARAISDAAWAQFRSMLEYKAGWYGREVIAVDRFFPSSKLCSACGSLAEAMPLGVRTWTCGSCGTAHDRDVNAAENLLAAGLAVSVCGAGVRPQRRTPGGRSAVKQKTPRREP

SEQ ID NO: 50818 - protein, 1058 aa, unknown
  TnpB Polypeptide
VRYAASRSARSSARSTKGSQGDRGHAQTGRDQDAQGHRRGQGGVRRDPHRTRQPGAGQPPPGRLLRHPDPAAAARRRLGTRGPHAGRVALRPQRRRRHREGHPQLRPRHQPGQRRPGDPARLPAAHRGAPQGVRAARQATGRGCQDQHPQRPPPREGRTRAHGAGRRDLPGRAAPGRAAPAGHHRQVRGRGGHPAPAQGAGAARGLSPRGRAGPARSRRRRTSGGQARASDRPRPPHGHRQRAAAGRPAARRPDPVAAGVRRLRARGRRARPARARHRAPGQGHAPGQAGGARHGRGAAGRRLPEGTGRPLVRPARHDPGRVRVVPGRPGPHRGHPQRGGHRLRRGLRPVHGRPPRAGGRPGRALRGRHHRLRRAGGGLRHRRLRHRGHPRPPPARPARLPQQIVGGRGRGDRGVPARRRPTAAVVGAVDARLRAGPGGGHLRGRAGRRPGGVDAQARPGRQGHGLDPARPRRHARPDRRPAVRGPRPLLRPGGLRPDQDAVTRFLRAQASPFRRGWPGGALLADVRPECLQRGVTSRRGEVRRRPQVLPLGAHPVALAQPASGDALERVHQPGDRDRGWVGDQEVHVIVLALHLDQLSTEVAAHAGEHLTERLQVLAGQHSTPVLCHEDQMHTKRRHDVSSSAVVAGLSHRPSIFGRMLVRYRYRIDPTPRQRQALARAFGCARVVYNDALAERKRAYQAGEKLSDTEIQRRVVTLAKSTPERAWLAEVASVVLVQACQDARRAHHNWLDSLSGKLKGRRVGHPRFRIKHGRQSIRLTRNGFALHRRRLYLAKVGEVLVRWSRELPSVPSSATVIREPDGRYYASFVVDRDPTPLPPVARTAGIDLGLISFATIAASDGTIETVANRRHLRAAERRLGRAQRALSRKQKGSANRAMARHRVAVAHRKVRDQRADHHHKLALRLIRENQAVAVEDLAVVGLARTRLAKSIHDAGWARFVCLLEEKAAQHGRRVVKTGRWEPTSQTCSGCGHRDGPKPLSVRAWSCAVCGTVHDRDVNAARNILVAAGLAETQNACGGSVSPGATLAATGEAGTHRGAA

SEQ ID NO: 50819 - protein, 216 aa, Oscillatoriales sp.
SIGIYLGIKTFAVMSNGDQAESPSYKKLDRKVRKLQRKLARQPRDSKRRNITRIRIAKLHNLIADTRKDFLHKLSTKIVNENQVIILEDLNVSGMVKNRKLSRAISQQGWYEFRTLCEAKSEKFGREFKVISRWEVGASQVCSGCGFKWGKIDLSIRSVLCLNCGTEQDRDENAAKNIAQVGMGNRHDSKRALRDCKTTSVARPDEASRITAPDRR

SEQ ID NO: 50820 - protein, 461 aa, Halochromatium sp.
MKVTRILHAKRPNQGKLAALCEQAKRLGQVRSEVWQRFGSLQGVGLSDRQIRDRWLEQQRAFPVSANAWKETLRDAKGDITANMEAAKVKARRCIWRHTQDQAEQKRLFTALKINDWTSDPYLRRVMRRYWMRGHNHTHNQIIVRSDNYTSFQLGGRAWIKIPGLTKGQRIAIPLNSTVAPTGTLRLILKDDDRLEVHYTIDAEVTQDCGERTIGVDKGYSEVLVDSDGEHHGPELGALLTDTSDKLKAKYQRRSKLRALANKTRNLRKREHIRRFNLGRKKLDRQMDNAHARIRDTVFQAVHDVVDKAAVIATEDLTAPMAGKSFGKNVTRRLAAWTKGVIAEALDSVSSRRGSAVVLVNPAYTSQIDSRNGCLLGKRQGDRFHCVDGEVLQADQNAARNVLARLTDPDIERFTPYRQVKAILQARTERLRLRLPNQDSSCSPARALSTESESPNEHLCV

SEQ ID NO: 50821 - protein, 349 aa, unknown
  TnpB Polypeptide
MKLVVQLKLLPTETEAKLLDATAKQYITLINEILDCAIACDEMPKLSSSKLKAPLPSALKDQCRLDAKSIYDKVTKTGSKHNGKFPLLKKPVIVWNNQNYTVGKDYIAMPFFVDGKSRKMKIAAIVPDEVFEILSTSKRGTLRITKKGNKYIAQIAYEKAEAPLMDGQAIMGVDLGIKCPAVSVTSNSKTKFYGNGRQNKFVRRRYAKRRKKLGKAKKQKAICKSRNKEQRWMTDQDHKISRSIVNEAIKQNVSTIKLESLSGIRQTTRTSRKNNHSFHNWSFYRMAMFIEYKARLAGINVVYVNPAYTSQTCPQCGEKHHAKDRLYVCPKCGFHGHRDRIGALNILNA

SEQ ID NO: 50822 - protein, 393 aa, unknown
  TnpB Polypeptide
MNTMKLTRTIKLRLDIPLEIIQPTVDVYTKAFNFVCQTGWNDSDSNGVSLHNKTYLKTREYLPSQLAVSARMKATEAIKAVKARLKKKQKATCPQSKQCSVRYDARSFNVWFERNELSLLTIEGRIKIPVSVPECFRQYLTWKRCSADLLIRKNKVFLNIVFSKDVADPEVTGKVVGIDRGIKKIAVTSENQFFGGGKIKKVAKRYEKLRSALQSCGSKSAKRHLRKISKKENRFRANTNHIITKQIVNFFDKGTVIALEKLSGIRQTTRQRKKQRREFHKWNFFQFEQFLTYKAEARGMIVEHVDARYTSQKCSACGYISRSNRQSQSVFKCKHCGFSLNADLNAGRNIRQNYLDATCYPGSGSVNSRIVAHDDAKAPYGELRRSAVTSRLL

SEQ ID NO: 50823 - protein, 393 aa, unknown
  TnpB Polypeptide
MTQRAYQFRFYPTDKQQQQLAQTFGCCRKVYNHFLAYRSDAWYERQERVSEVDTINMLPGLKKGEFPYLKEVSSVPLQQALRHLQRGFVNFWEGRAKYPTFKSKHHKQSATYARTGFSFDRAQHGLRIAKLGIVNLKWSQDVSMDPSTIILSQTPSGRYYVSLRCEVDVQPLPPVTKEIGIDVGLTHTATLSNGEKIGNPRHTRKYEKKLARAQREMARKQKDSQNRHKARVKVAQIHQKISDCRMDFVHQMTTRLIRENQVIVVEDLNVTGMIRNHSLAKHIADVSWGEIFRQLEYKAEWYGRTFVKIDRFYPSSKRCSGCGYIVAKLPLSVRAWTCPKCEVVHDRDHNAAKNIVAAGQAVLACGSGVRPKRSAERQGNQRRSRNRLKMRHV

SEQ ID NO: 50824 - protein, 504 aa, unknown
  TnpB Polypeptide
MPKVKNPNFIVELKLVTHEHELALLDKRFNIANGIYNRLVKFANKQLKRMRENKSYQTTLHNFFYYKALNDTKMVKLHSELLKNIRLSYSLSEYQFHSFVKVQQQKYKKHIDSFTAQKIASTVWKAVETVLFKKGKKVHFKKFGQLTSLEGKSNKAGIRFIKEKELLSWNKLNLKVKIRKNDLFIQEALTNDIKYCRIVRKPFKTGHKYFVQLIIGGFPPAKRINQTGAFRHSASPNEKVGLDIGTSSLAVCSKNELILTELAKKSSNYDKEINRLYRKLDRSKRAMNPHNFNPDSTIKRGIKLTWVRSNNYVKTLFKLKNLYRLKANYIKLEHNKLANKVLSLGNEIYVESMNFSALQKRSKETTINKKGKFNRKGRFGKSLGNKAPSMLLTIIDRKLGYIDKSLNKINTTTFKASQYNHIEDTYIKKKLNERWNKIEGELIQRDLYSAFLIMNSKPNLKETDRDLCLKTYENFKDKHDKLIEELKTKQEEKYLSSFGIKKIA

SEQ ID NO: 50825 - protein, 406 aa, unknown
  TnpB Polypeptide
MKMLSEVLTGVNRTEQIWLNANKELSKLCHIAKNLYNEAIYIIRQEFIKTGKWITYSQLYYLLKNSQNFKQLPAATAQQILILVEKNWKAFFKAMKEYKKHPEKFKNKPALPGYKPKDGEFMLLFTNQQIKVASNKVEFPKKIVLEVKTRLPDETVLGTSSIVPKGVGFILNIVYKKTIKPVIETTKNIMGIDIGLNNLVTTADNIGKMPIIIKGGIVKSINHFYNKRKAEIQSDYDLSGIKKQTKQLSRLLVKRDFKIKDFFHKTSRKIIAVCKMNSIDTIVIGHNNDWKQKIDIGKKNNQNFVSVPFNKLLEMLKYKAEEEGIKTIIVNEAHTSKCSFLDDETIKHHARYLGKRICRGLFKTLSGKIINADVNGAYNIIKKAIPNAFANGIQGAGCHPVRLEVY

SEQ ID NO: 50826 - protein, 372 aa, Anaerolineales sp.
MKLTAKVKLQTTPEQHQSLLETLERANAACDQISQVAWETRTFNQFKLHGLTYYTIRSTSGLSAQMVVRCISKVTDSYKLDRETKRTFNPHGSIAYDDRILKWYVGRQTVSIWTTQGRLIIPFLAGQHQLDLLQHQHGESDLGLVDGVFYLFATCEKETPETVDVEGVLGVDLGIVTIAATSDGETYAGNQINNVRFRHRRLRKKLQKKQTKSAKRRLKKLSGKEARFARHTNHVISKQIVKTAKDTNRAIAVEKLTGIRDRVSVRRGQRDNLHSWAFTDLKAKISYKAQMAGVHLIEVDPRNTSRTCPVCGCVDKANRKSQSSFLCVSCGYAANADTNAAVIISRRGIVNYPNISTIVATDSPTWGMAPAG

SEQ ID NO: 50827 - protein, 413 aa, unknown
  TnpB Polypeptide
METIEISRTIKSRIIFKDDKDILKMLESQEAFRQGCNFVSEYMFNNDFPMNTTGLIKILYNDLREQFGLKSQMAQSCVRTVIARYRSVQTQLRKQLVWDGYKKDNHGKQVKNYVPKTLEYLWYPIEFKRPQLDLVRNRDYSHKEDGTMTLNTIHGRVIVTPTFKGFEQYFDGSWKLGTAKVLKSGKHWYLHIAVTKQVEQSEFKSSHVVGIDRGLRQLLTIYDEKGRTTFVNGKAILQKRKYYKNLRKELQSKNTKSAKRRLKAIGERESRWMSDVNHCLAKTLVNRYGSGTIFVLEDLTGVTFNTVSKRAKKNRYEHHSWAFYDFEQKLIYKAFDKGSQVVSCDAHYTSQRCPKCGYIDAKNRNKDKHEFCCKACSYRTNDDRAAAMNIQFLGTLYNSGNPKPVFEKLELMN

SEQ ID NO: 50828 - protein, 414 aa, unknown
  TnpB Polypeptide
MKEITLVTNCLFYKNKNEQLYNYFNDITPLFSFLVRRTIHHLTHDLNGENITKYRTRLKQEYGLTNRFAKAVVTTANNTLKLAITSGDYLHSTYATKIKKINTKIIKTKAILNNPKTKKHRIKILKTKLFWLQMKKNKLIQLQKNGPKPMLTFGRKKLLNNNKDLFLKKRDNQIVYIGDKNEHLGNQQFKLFYNKSHNKFTYKIRLEDKYIKDSKYIYGEFIIKDNKAKREIIKTLESPKSNPLSFRIIKRNEVLYLQIMYRIKSELKTRHSNGVIGVDFNKGFVTISEIDQNGKLLNLDRIDYIHKGKAGVTKNSMSYLVKNLVDIAIKSGKDIVIEDLKSLNKNKKEKSERKHYNRMINTLKFSKFRKFLETRCDKLGVGLSLVTPYNTSKIALNKYCYNMKLNIIVEQVML

SEQ ID NO: 50829 - protein, 258 aa, Micromonospora sp.
VKTIQAYRFALDLNPAQERAVYAHAGAARVAHPRHLTDAQRRLRTLARAVSRKTGPDRRTGQRPSRRWRRACTRLSRAHARVANLRRDGLHKLTTRLATTHGTVVVEDLNVAGMLTNRRLARHIADAGFAEIRRQLAYKTTPNGGKLITADRWYPSSKTCSGCGTVKTKLALSEREYECGTCGLTLNRDLNAARNLAALAAQTTTAGSGPVAARGADRKTRARGQVAEKREPGTAPAGKTGTVPSQGGTTDRALTKAH

SEQ ID NO: 50830 - protein, 229 aa, Lachnospiraceae sp.
VDLGINTDAVCTIMRSDGTVLGRKFIRFPSEKDRLHHVLGRIRRFQKEHGSGQTGSRWSYAKRLNTELARKTAGAITEYANENHADVIVFEYLEMKGKISGKQRQKLHLWKKRDIQNMCEHKAHRHGMRIARVCAWNTSRLAYDGSGPVSRDPKNHSLCVFQTGKQYNCDLSAAYNIGSRYLMREIIKTLPETERSFLEAKVPSVKRRTSCVYADLLLFQKEYGQIRSA

SEQ ID NO: 50831 - protein, 408 aa, unknown
  TnpB Polypeptide
MKTIFRSYKFRIYPTKDQRELLCNHFGCVRFVYNYFLDLRNKSYKELGQNISYFDCAAKLTKMKKEEKFSWLKDVNSQSLQHSIRHLDAAFVSFFQKRTRSPRFKKKMGPRSFVVPQRFTLDEETSMLFLPKFKHGIKIKIHKKPKGTIGHITVSMTPTGKYFASFSCEQEYQQYAPTGSKIGIDVGIKDLAVLSDGTKYRNPRTFKSFFRELKFEQRQLSKKVKGSKSRERQRVKVARVHEKITNVRHDILHKVTTNIVKNHDVICIEDLAVINMIKNHKLVQALSDASIGTFFRMLNYKAEWSDKTVVKINRFYPSSKNCHVCNTLKQDLTLKDRSWTCLSCGTEHDRDINAALNILDQGLKILSGFGTNPDVKQKQVEPPKKYSLRKPKDFCKETGAMKPEITSL

SEQ ID NO: 50832 - protein, 384 aa, Lactobacillus sp.
VAVLFLKGIKLRVYPNREQRAQIQASFGCNRFVWNQMLNMLITRYENNPELSLPSSYTLDYLLPQLKREYPFLKSVESTSLQVTNHDLIEAYRCFFKQHRGFPKFKSRKYPKKSYQVKMVNHNIEVVDTHQIILPKLGSMSFKTGALIKGTIKRVTIRRSVTNKYYAILLVDTSIEPLEKTKHIVGLDLGVSDLVITSTGVKYPTKRFDKQLADKKHYWEKRLARRRLQAQTQIARDHHNHVLEPRELTDFKNYQKAKLMVAKYNEKIANQRNNYLHQISKQLVEQYDVIKMEDLKTKNLLRNHHLARAIANQGWRLLRTMLAYKASWYGKQLVIVNPYKTSQVCANCGYDDGKHALNIRRWTCPNCDVEHDRDVNAALNICRA

SEQ ID NO: 50833 - protein, 362 aa, Massilia sp.
MKLVYRYRVKSLAGLLNQQARAVNFVWNYCNERQKDALRFNRRWHSGFDLIKLTTGCSKELGLHSGTVNDVCQQYAKSRSQSRRPYLRFRGRKTLGWVPLKGRELKREGNAFRFAGNTFRVFYSRPLPEWKILDGTNFSRDRRGNWFLNIVLEVLEAPARMPERGVGIDLGLKDLATLSNGEKIEAPRIYRDAEAALAVAQRARKRRRVTAIHTKIANRRRDFLHKCSTRMVRDFDYIVVGNVQAATLAKTRMAKSVLDAGWSCFRNQLAYKAVKHGVWFEEVDERFTTQVCSNCGTLPESRPKGIADLGVREWRCGDCGAEHDRDLNAALNILRRGRATLAAGIPVLSDGEDVKAPAQPSR

SEQ ID NO: 50834 - protein, 422 aa, unknown
  TnpB Polypeptide
MEYSPKYRLFPTSEQRERLDWTRNTVRQLYNHALHEFNKIPEDDGTLRQRVWQVRDDLPRLKQQWSDLKQVYSTVLQKAVERIRTNSNNLGKLKAKGHSVGSLNWKKPREYRSFTYRQSGFELDTKSGPRDRAILRLKKVRGDTLEIPIRLHRNLPEHDAIKEVTVKKEPTGAWYASFCISTDEPEKLSPEDIDAEDTVGLDLGVCNFIHDSDGRSIGRLDLTEERVRLEREQRSLSRKQYKSNNWEKQRRRVAAVHARMSNKKRDYKHKLAHFYATTYDAVFVEDLDVKPMLESDGNTRNKAEVGWSDFKAILEHHCNKHGTHYVEVNPRGTTKECASCGVETEKPLWVREHSCPSCGFEVDRDWNAALNVKWRGLSKLGVVHSKSTPVETATAVGARSVSASRVVETGSSCLKEAVKAAE

SEQ ID NO: 50835 - protein, 412 aa, Lechevalieria sp.
MLWVVRTAYKCRAYPTSDQVALLSRTFGCVRLVWNKTLSERNHRYREAGARTSYRETDAALTEWKRTKELAFLSEVSCVPLQQTLRHQHTAFQNFFAGRARFPRFKSRSGRQSAHFTRSAFRMREGVLVLAKSSEPLHFVWSFADKAVRGLEPTMVVVSRDPDGRWYVTFAVDTDTPAPNEPTGRAIGIDLGLKDYLVTSDGERVQNPRHLVRKARNLARYQRRMSRCQRGGLNRRKAKVKVARAQRKICNARQDFLHRTTARLVRSADVIVIEDLNVAAMVRNRRLARAIHDSGWGEFRRQLEYKCARAGRALVVIDRWYPSSKTCSSCGHRLTELPLAVRCWTCPGCRTRHDRDLNAAKNILAVGRAAVRDNSGDACGADVRRQGVSLPQSAVKQEPLCSSAGDSQLISS

SEQ ID NO: 50836 - protein, 358 aa, unknown
  TnpB Polypeptide
  misc_feature (318)..(353): Xaa can be any naturally occurring amino acid
VIRCLKTAFKTSKANLNRLYECNRISAQIWNDCLDIAKQYSLANDGKWINKTELQKALKNKYPLHSQSIQAVCHKYLFARDAVHKAKQQGLDNKYPYKKKKYYNTKWAKDGFKIYDNGRIELSMGIWNGKRQQHIVVYVKELPIGKIKEIELIYDRGLKLSLAYEDGLIESINNNKNIAGISINNNKNIAGIDVGEIHTISSYCENGNAIIVTGRKARSVKRLRNKKIAELQRKMSKCKKGSRKWKKYNKAKQYILSKSDKQLTDILHKTTKQYVDWCLENKVKEVVIGDIEGVQRNTKKKRNKNTNQKLSQWQFGKXXXXXXXXXXXXXXXXXXXXXXXXXXXXXXXXXXXXMSCLW

SEQ ID NO: 50837 - protein, 114 aa, Alkalispirillum sp.
VKNMLRNHSLAQAISNVGWHQITSMLAYKAEWYGRDFVQIDKWYPSSKRCHACGHLCDAMPLSVRHWDCPACGASHYRDINAAKNILKAGKAILAGADKLREHEQKTTVGRTGG

SEQ ID NO: 50838 - protein, 399 aa, unknown
  TnpB Polypeptide
MYLVERHIIKFNNPLRKELDNVCFLSKNLYNKALYLVRQHFFSTKGYLDYYKLNRLLIDTKDVDYYAVGNTKVANQTLMLLDRNFKSFFSLVKKKKSKDYEKPISIPKYLDKEGRYITVFEKHAVSKRFLKKGVIKLANVSNTFVTKVTTDNIVEVRVLPRNNHHIVEVVYKKEEKPLLVNNDRYATIDLGLNNLATVSSNVEKPFIVNGRPLKSINQRWNKHKANLQSRLTSNRRSSKQIILITNKRNNRVKDYLHKSSRKVVNFLVSKNISTLVLGYNEEWKQNISIGKINNQSFVSIPFYTFIQQLQYKCKLEGINVVLTEESYTSKCSFLDNESIEKYDSYLGKRVKRGLYKTAKGKLINADLNGSLNILKKVIGEFQYPIEACCTPVRITPSRY

SEQ ID NO: 50839 - protein, 415 aa, unknown
  TnpB Polypeptide
MIKSIKLRIYPNRTQLKIINNTLSACNSVKNKYLEYNINEYKNNKGFITGFDFINYVTKLKKENSKYSWLKGISSKAIKEAILSKEKAFKSFFKNNKGFPKFKSRKRMNKESYYFIRNNIHYINKNIVKLPILKRIRITSGNLLPDEDSIISGRIIRHYNKYYVMFIYDEDNDNKDIIKNDIKLGIDLGIKDYAIIYDGYECHHYKHFKDLDTYKKYYDRIKELQKVISKKADYNYGKLLNKYLNEYHKEPSEIKKNEMKGKAYNSSNIRRIFIKINKIKVKLTNIRDNFIKQLVNILTARIKPSKINIEDLDISNMIEDNGTSHKLHRLISESNFYKFKAHLINKCLEYGIKLRLVDTYYPSTKLCSNCGHKNNHIRLVDRTYVCDECRMVMDRDDNSAINIYNCKSKYYEEIA

SEQ ID NO: 50840 - protein, 413 aa, unknown
  TnpB Polypeptide
VIKSIKLRIYPNKTQLKIINDTLGACNFVKNKFLAYNLKNRDEGRKFTDGYKFSKIINKLKKEDDKYSWLDDISSKSIKDAIMSKEKAYKAFFKNNKGFPRFKSRKRINKESYFFIKDNIHYIGKNIIKLPILKKVRITNSKDLPDKGSITSGRIIRHYDKYYVMFIYNDEYNDNKDIIKNNIKLGIDLGIKEYAILYDGYNYFHFKHFKELISYNKLNGRLDKLQKVVSKKAEYNYGKLLNLYLDKYHKEPSEIEKNKMKGKSYNSSKIRKVFNKINKIRVKLTNIKDNFIKQLVNYLTAIVKPKKINIEDLDISRMIRDKDTSHSLHRYTAESCFYKFRIHLINKCKEYDIKIRLVNTYYPSTQICSKCGKKNKLKLEDRTFVCKKCGMTMDRDENAAINIYNCKYYEEIA

SEQ ID NO: 50841 - protein, 468 aa, Streptomyces sp.
VAEAAGGNKLIRVTGAEAKRIKREALGVPDPAKHRQRVAVPMQRRAPEADTRQRVYRYRCYPTPTQAEQLIKTFGACRWTYNEGLALRDKAWREHRVSFGYAESCRALTGWRHAEGAQWLQEVSSTVLQQALRHLDAAFGRFFSGSKEYPKRKKKGRSRDSATYVRTGFRWVEDPDQPGTGLISLAKQYGPLRIRWSRPLPAGVRPVKLTVTRDRAGRFFVSVLVEERIEPLPHLFLRDGGAPKAVGLDLGLAALVTLDDGEKVDHPRLLKKYGAKLADLQRSLHRKKRGSRNREKARQEIARLYALISDVRRDALDQLSTRLVRENQVLVVEDLSIASLVRSPKGKGRRRKAGLNRAILDASWGELFRQLQYKCAWYGRTLVVVDRFFPSTRRCSGCGVIGPKLDLAVRGWSCGGCGAEHDRDVNAARNLRDEGMRLYQLVASALPPGRAMPSMIRASEMPDVVLTA

SEQ ID NO: 50842 - protein, 394 aa, unknown
  TnpB Polypeptide
MYIKDLFSIIIMKAIRAWKFRLYPTKAQTKEMQTHLWFSKNLWNDGLELAKQLYADHQRFPTRSTYQEISKNSGLYSQVAQDVFIRLDLAIKAKIRRKKAGLKGGFPRFKSIDRAKSLHYPQSGFSLNGKKLKVTPFGEINIKLHRPVEGAIKTLTLKKEATGKWYAVLTAEAEPVPKNNGSQVGIDLGLINFAVLSDGTTIKNPRHFKKHQDDLRAKQKPVSRAKRGSNNRKKAKKRLAIVHEKVRNTRRDFLHKLSRKLIHSHSLIALEDLASQEMAENAYGKAIKDAGWSEFISMLFYKAEGAGSRVVLVNPKNTTKECSRCGILTDKELSERQHNCPSCGLGMDRDLNAAINILNRATAGIAGSNACEDETSTSRQVSSMKQEAQGFSPG

SEQ ID NO: 50843 - protein, 404 aa, unknown
  TnpB Polypeptide
MLVKGIVFSLDSDLPSEARFLLEDFRLAVNSAIRTGLGSRVTSRNALCRLAYKDFRQDHPNMYSQHLVSAFAVAASALKNHRRRVMKGTACMIPYVKRLMMKAENQAYKLDRDAGVIDLPVRAGCHVKLKLVVSQYHRRYLDDSTLSLGSLTVLPDRVIVAFRKEVPKPYFPGSALSFDTNERSLDGVFVDRGRTNAVKADFDDVAVIQQRHHDRRRRLQKKKAHDRRTGRFLCRREGAREHRRIEYRLHQVANAVVSFAEKRHSAVVLEDLTGLRFKRNKDLNRRLSMWPRRKLHAIIEYKAQWRGIPIFKIDPRYSSRKCPICGRIQDSRMGTEFECECGWHLDRHINASINLLQTAISKGMAGGLRFDPGAFQHDVMMILYEPAMAARSEPNGTSCVSGVT

SEQ ID NO: 50844 - protein, 358 aa, Pseudomonas sp.
MMKHTKTLKVRIRDKHAPLLNSMARSVNFVWNFVNELSQRSIKERGVFLSAYDVQKYTNGAGKDLGLHSQTVQRIAVEYTTRRKQFKKARLNWRKSGGVRRSLGWIPVNTAAAQWTNGQVYHNGHYFKVWDSFGLSQYTFRSASFNEDARGRWYFNVVVDVQAQIPQGQDRIGIDLGLTDTATCSDGTKLEAGRFYRGLEEKLAIAQRARNKTQVKTIYAKIANRRKDALHKFSRKLVNRCGEIYVGNVSSLKLVKTTMAKSVLDAGWGQLKTMLDYKCAHAGIVFKEVNEAYTTQTCSCCGALPDSRPRGIAGLGIRKWTCSACGVRHSDRDINAARNILAVGHGRLAVGITASLGR

SEQ ID NO: 50845 - protein, 401 aa, unknown
  TnpB Polypeptide
MYITKKVRLFPTQEQEILMRKTAGCCRFLYNWYIDEFKLGNISNYTQASKKFTQLKKQEEYIWLNEPSRTSIVHEFQNAEKAYQDFFNHKSGYPKYKSKNNDEISFYVRCDSYIDKKSGKLINKLTRTSNGVKIEKLGIVKTNQPLPKIPKNQHYCNVTISYDNKYWYLSVSYEIPEEQLMLTGKSIGIDLGIKDLAITSYHKKYKNINKHPKMKRIEKKIKRKQRKLQRQRDANKNVYIKEVSIDKNGNEIISKRKKKLSECKNYQKTRKEIQLLYRKQRNIRENHIYLIINEIVRTKPSRIVMETLYPHRLMKNRHLAKAIQEAKWRFFINHIKNKCKRYGIEFIQAEQFFPSTQKCNKCGNVKKGKEKMKLNHRIYRCSECGNVIDRDINASINLAKY

SEQ ID NO: 50846 - protein, 641 aa, unknown
  TnpB Polypeptide
MPALCHVHVASVRNIMGKCRTPTFIAEFQLRTTPADERALRIRLDAGRNIYNAALGEALRRLDLMRESRAYQAASKLPRGNKTTPEGKALKRARDDAFNAIRAHHQFDKASIVKFTTACRNNCWIKDHLGSQEAQATARRAFDVVNRHAFSGRNPDTKGNAKTGKKARKGKLKFGRPRFRGKRFFHSVENQSIKQGLRFKDGILQWGELRLPIRRDPHDKDGWQAEALARRVKYARVIRRELRGLWRWYLQLSLEGVAPQRRLTGEGAVGLDIGPSTIGMYSDTGAAFDRFCPTVTQPWKKMRRLQRAMDRSRRATNPECFNPNRTWKKGAKATVRSRRYQALALKRRERDRRLASERKRSHGQLANAVLGRGSEVRLEKLSYKAWQKTFGRSVTVRGAGGFVAILKRKLQALDGNLVEINPYETALSQFDHTTGEYVKKPLKRRVHYFGDGTTAPVHRDLYSAFLARHCGCENLDVPGVIDTWPRAEQLVRRAMLLLDAKGRPIRQTASDKTGNAGASSRAKPESQVGFILPQAFRRLRAGRLSKVDGQSDENVDVVACGKLHAGAAGSLTKGTRKRPQAPPEPRIFGNTLGSRLGSMELAGSRKSVSRRRMFRKLPMSTQPSCFPQAAGAGMFRFLFWG

SEQ ID NO: 50847 - protein, 404 aa, unknown
  TnpB Polypeptide
MQRTNIIELKPNKAQKKILKELMLLSSCVYNSTNYLIRQQFFNKEKISSFFDLQQKLQTTEDYQLIGRSYALPRIQIYAETNSARFKLVKSKSQKKVGLPKYLKNRKTNTTIPSYLVIDGCQYNIKKNKITIPLSRQMRKKYEIKHFKLNYNGVLKWKGKQQRGQIHFKDGKFYFNQSVELKEPKKANSKIYAGIDLGIKKLFAIKISNGEEKLIGSKRHFKQWSYYTQLIAEEQSELAKINKKYSKRLSNLFRIRAKWQNNLYNNLVSKAFKVLKRNNVSKIFIGDVKNIRDNANWGKKGNKMLHNYWAYDTLYHKINNKSEEYGMEYSRDTEEYSSQTCPICSDIDSRNKKDRIFICHFCGYIDHRDIVGADNILNNGMRSLSESTHQGETALSRGCSNATA

SEQ ID NO: 50848 - protein, 402 aa, Streptomyces sp.
VRRSYRFLMRPTARQEQTLRSMLKDHCSLYNAALQERRDAWRHGSKTSIQYGQQSAQLKEIRAFDPEHQGRWSFSSQQATLRRLNTAFAAFFRRIKSGDNPGYPRFKGAGHFDTVEFPKNGDGCRWDSTPHDRLTRVRLQGVGHVRVLQHRPVRGRVKTISIKREGRRWFVVLACDDVPAEPLPATNSMVGVDLGTTRFFTDSNGNYEENPRFLQSTMDQLAEAQRHLSTFPQRTRRRTKKRRAAARKVAQLHAKIRRQRLDHHHKTANTLIISHDVIGHEQLNTAGMTKRPSPRPDPDREGSFLPNGAAAKAGLNRSILDVGWGQFLRIPASKAESAGRRLIPVDARDTSRTCPVCGHVAKENRTTQAKFACVSCGFVANADHAGALNVLHRAGLALCAET

SEQ ID NO: 50849 - protein, 398 aa, Microbispora sp.
VQLRYNFRLYPTPGQRHALARAFGCARVVFNDGLRARQDAREQGMPYISDGELSKRVITQAKKTPDRAWLGEVSAVVLQQALADLNKAYWNFFDSVTGKRKGPKIAPPRFRSRKDNRQAIRFTKNARFSLAPGGKLRLPKIGDIPVRWSRDLPTEPSSVTVVKDAADRYFASFVIETGKAPLPETAAEVGIDLGLSHFAVTSDGRKVDNPRFLRRAERRLRKAQQELSRKEKSSANRQKARAKAATAHARVADARRDWAHKLSTQIIRDNQAVYVENLAVSGLGRTRLAKSVHDAGWSQFVAMLEYKAARYCRHFAKIDRWFPSSKLCSGCGTVAESMPLAIRSWTCPCGAVHDRDINAAINIVAAGRADRLNACGARVRPGPAPAQREEAGSFRGAA

SEQ ID NO: 50850 - protein, 627 aa, Streptomyces sp.
VDEKTGEVLTTAALAERVGWCAGLVEGMAGPLLSEHWNAADIDALASGVDAGGTNLPSQAWMALRRLGWGVAPPAGVRVNDRIVRMAQEQAGRMLRSVKWRADLVAGVLATWPADPDRRTPAEWDAVRAAIPGGEHLPSGVIRSRTRQITAYARRHGRLPVDVFELEPSPGTARMLLLAACDGQQATLERADDGHRALLRLQLPTRPDPASYADWTWVACPITLPPTVPANAVLHLPTLRPTGGRVRADLAFTHAVPRLRRTGHTVALGVDWGLNTLLSAGTVRLHADGRITALGTGAQFRAAGVLAKQHRLRRVSEHLHARTDHYTRLADPTLDGKHAVLTEEIRRVAARRSHLNDALARAAARWAVDQAVAAGATVIYLEDLRSLEARGMGRTTNTRLAQTVRGQIAEWMRHLAAETGIAVVTVPARNTSRHCPHCLTPLRHRKAPDRPTTRGWKWALCPGCGWQGDRDQGAWRRIAARGLAHQTKTTTDRTSGQVVIRTVVDRLEATAVITAAPKTSRADRSKTGPTRPRTHRPAPRRRGVPSPARPPGRAGKRPEGHAPTDRPRLPRAAHRHQSVTTISAPTNRRHRPRGAALGAGFHLHAHASPARWTVPIPDPTVRMGSLG

SEQ ID NO: 50851 - protein, 484 aa, unknown
  TnpB Polypeptide
MGFYGAPDKKRHLTMARLELLFVNVKHGGIGRHVINNLFNIFESHWRTFVIQVFTFALTNDFDNRFISRCINQLTFKEGELRRYYEGWERVKYNEDVGELHRTDANGNRIKLRFATMLARQNENHEAGNKYIPYGKMASWLVEWKNATETQWLKDSPSQPLQQSLKDLERAYKNFFRKRAAFPRFKKRGQNDAFRYPQGVKLDQENSRIFLPKLGWMRYRNSRQVTGVVKNVTVSQSCGKWYISIQTESEVSTPVHPSASMVGLDAGVAKLATLSDGTVFEPVNSFQKNQKKLARLQRQLSRKVKFSNNWQKQKRKIQRLHSCIANIRRDYLHKVTTAVSKNHAMIVIEDLKVSNMSKSAAGTVSQPGRNVRAKSGLNRSILDQGWYEMRRQLAYKQLWRGGQVLAVPPAYTSQRCAYCGHTAKENRLSQSKFRCQVCGYTANADVNGARNILAAGHAVLACGEMVQSGRPLKQEPTEMIQATA

SEQ ID NO: 50852 - protein, 379 aa, Clostridium sp.
VKYLKTILRAYKYRLYPNKKQQELINKTIGCCRFVYNYYLNKKIELYKTEQKSINYNACANDLKNLKNQYEWLKEVDSISLQQTLKDLDAAYQNFFRRIKNGEKQVGFPKFKTKKNPKQSYRTQNVNNNIEIKGNKIKLPKLGLVKFANSRSFNGKITSCTVSKTNTDKYFVSVLVEEEIQKLPKKNNAIGFDLGVKDYLITSDGEVVNNPKILKQYERKLIKLQRQLSRKKIGSNRYKKHSKKIAKLHEKIRNIRTDFLQKLSTRIIQENQLIISEDLNVKGMVQNHRLAKAINDVSWSEFCRMIEYKANWYGRTYHKINRFYASSQTCNVCGYKNVDIKDLNVRKWVCPECGTKHDRDNNAAINILNQGLKELGLTA

SEQ ID NO: 50853 - protein, 390 aa, Halomonas sp.
MLKATKVRLYPTPEQAAFLNAQFGAVRFAYNKALHIISTQYKRHGTKLRAKKDLKPLLAVAKKSRKYHWLKDFDSMALQQACINLDRAFQNFFNPQLKARYPKFKRKHGKQSSYHCTGIKVGENWIKVPKLTPMKARTHREITGTLKSITLTRTTTGKYYASVLVEDGVEAPAPLQTVDTVLGVDMGLTHLAIDSTGRKVANPRFLKRARTNLRRKQKALSRCQKGSKRRAKARIKLAKAHERLANARADFQHKLSRQFIDDNQAVVVETLNVKNLLKNRKLAKHIADASWYSLIQKLAYKAEAQGKHLVKIDQWFASTKTCAGCGHKVEQMPLTVRTWDCPGCATQGIDRDINAALNIKHQGIIQLKAEGLSVSAHGGLRKTGTSSAAA

SEQ ID NO: 50854 - protein, 408 aa, unknown
  TnpB Polypeptide
MSDVMILCERHIIKKSHPFYDECDNLTFLAKNLYNATLYYQRDSFFNKDFKNYYDVNRVFTHGNQKDYRALPSKVSKQVQMLVDKSFKSYFALVKKKQSNDYSCSVQIPKYLGKTSGRCVVPYPKDALSLKNEGFVKFSKTNIVVETKLSRKDIKAARIVPKGNHFVIEILYKATAIQLKSETPKRVAFVDPGLNNLMTVTSNCFNPMIVNGKPLKSINQLSNKTIAELKSKLSKQGLKTSSLLKSIYSKRSRRLTDLLHKITTQLVNHLDSHNIDTVIFGHNIGQKQDINLGKVTNQNFVQIPFTQLMQLLKYKCELRGIRFIETEESYTSKCSFLDEESICKHSSYQGKRVKRGLFETSNGKLINADVNGSLNIGRKYLTKVSMYAKQLHDDLVRFMVNPKVVTIR

SEQ ID NO: 50855 - protein, 481 aa, Haloferax sp.
MEDVIRTVKVKLDVPTERCDDLHQTKDQFLHCAVIRTVKVKLDVPTERCDDLHQTKDQFLHCANTTAEWAWRHPNDYCVTSKQKAEKALYGRLRNETELTANLVQKGIRRAIEATKSGVARLKKGDNTSQPHFDAWSVVYDKRSATFHRNHVSLSTLNGRVECDYVLPDDPEGTPIGEYLLNDDYEFRMATLQYDRSTESFYLHARMRRTTDEQEQSTTDSPDVHQTESDAAHQNAPRSEDAKHRTVLGVDLNVDGSLAVTSTGAFIGNADEMNHRRREFEKTRRSMQQTGTRSAHLSIQSMKDREHRWMQDELHRASNQILEEARDHDCTHIAFENLTDIRKRMAGAKRFHAWAFRRLYQYTEYKAEMFGISVEQVSPAYTSQRCSSCGFTHENNRRSKHQFVCQKCEYELNADYNASKNIARKLLKRLHSGQKSSSGGAPRQCALTSGTLNLNGDYNASDPASAEGESTDKPTTSVVGY

SEQ ID NO: 50856 - protein, 274 aa, unknown
  TnpB Polypeptide
VYLTAAWAAKPESRVPGTPDEDARADGPVMAVDLNDGHLAVRRLDPYGNPVGRPERIDFALTGRSSRRIAQVRHAITRLVRHTQRHGIGTIAVEDLNFADARQAGRETMGRGQRGRRFRKTVAGIPTAAFRDRLAAQTHRHGIRLYAVNPAYTSAWGTQHWRKPYNNVTRHEAAATVIGRRAQGHKARRREGVTCTRPEDRAVRATDQAGPSESWVTADSRHRPGTRGTESRPPRRTRTRLAARATVTPAPTDIQRPTQEVTVSMPRTRPGMRD

SEQ ID NO: 50857 - protein, 331 aa, Chloroflexi sp.
MQVVEQHVLRKRDPRYEVIDQAAFASKNLYNAALYEMRQAFIFQQVRFTYPEMHARMKSHDAYKALPAKVAQQVLRLLDKNWQAWEEAMEAWDADPSQFLGRPGLPKYKEKQQGRNILVYTMQALSKRALQRGMIAPSGLPITVQTRQTNVKQVRIVPRSGYYVVEVVYERQEQPQPVNPTWIASIDIGVNNLAAITANKEGFIPRLVNGRPLKSVNQYYNKRKAELQKWSKHDHFTQRMHRMMTKRTRRIDHYLHTSSKKQLRCARRRSNTLCSCRMPGSSTCSATKPNSSGYRSCCKKRATPARPASWMGMRSPRTAKSRKSESLVADG

SEQ ID NO: 50858 - protein, 323 aa, Aphanizomenon sp.
MYGCQQILISPNQELGAIFEFLCGESNKLANCGTYYARQLFFRTGKIPSKFDLHRKLASNSHFGAMHSQAAQQCLTTVAESFKSYIGLLKGIKRGTVIQKPKLPGYRKGGLNLITFPGQAIKLKDGKLRFPMGSKVKVWFGLDAFYVPMPSNLEHKDIKEYRILPRNNEFYLELIYKISSLKPDVNTENVLSIDHGLNNWLTCVSNVGTSFLIDGRKLKSVNQWYNKRVSVLKENQPQGFWSKQLASITEKRNRQMRDAVNKAARIAINHCINHKIGTVVFGWNVGQKDSINLGSKTEMLNVVTKLYIFKYTSIIKGKNVNIS

SEQ ID NO: 50859 - protein, 563 aa, unknown
  TnpB Polypeptide
MVIKMKKSIFYKKIICIFSITVAFLFLLFTAAVVLHPTRYIKCSANTLTVYKTYLEDGEAVVDKVQIPKGTKVKVYEKKDKTSIIVYNKNKFTVNNKNLTKHFEDAIQTNYVYCRRLVNLRESKGGKLSKAIVKKGEKIKVLSIDQNDWDEKTGKIRWYKISKNNKSYYVSGEYVETSKKLALKNYANNISYSTYWDDYYKDGYAKDAYISQVDYKPQKKQSYKGNVMPDTVKADLPDGSNYVLESLKHEIKYCELERLWFKSGWRYYANVYFDGDAPKKLQPGRGTMGIDEGPSTAAAVSEDLAILEELAPKCKDYNKQIARLQRQIDASTRKTNPEKFNEDGTVKKKSEYKGKRWTFSKTCLRKKAIVRELYRRKSEYSTHMHGNIVNRMVKNASMFITEPMDFKALAKRAKETRRQNKATIIKKADGTEQAVYKYKRKKRFGKSVTDRSPAELMIILQRKCNQYELFYYEVDKWESRASQYDHTTNTYIKTQLSQRFKTVGGNNVQRDLYSAFLLACRWHSKKPSRKKCRELFPHFVKMQNLLIKQMKENGISRPACFGF

SEQ ID NO: 50860 - protein, 327 aa, unknown
  TnpB Polypeptide
VSLTTVEGRERFELAIGRYQREQLAGSNPKSATLVKRKDGSYSIQIGVETEPSPPQRTDRVLGVDLGRTDIAHTMALRAAARTEGDNWHGQQLSKVRDHYSRLRAVLQRKASKGTRSSRRRCRELLQRLSGKERRFQSRQRCVATTWVHHRISKAIVSRAKATNSALALEDLTGIRERVNRQPRSKTERRRVNSWAFYQLRQFLEYKALRAGVALILVPPAYTSQTCHRCLHIHPDPAQSYRSGKQFKCGHCGWEGDADLNGANVIALWCSAPLTRVGAAVNQPGGPGLFCSAERNQLRATVRAAARSAISPHSFALAARSALHQHE

SEQ ID NO: 50861 - protein, 391 aa, unknown
  TnpB Polypeptide
MEHECAYRYRCYPNATQRTLLARTFGAARYVYNWALRLRTDAFYERGERIGYGESSARLTALKKREGHEWMHAVSSVPMQQALRHLDTAYRNFFAGRTAYPSFRRKDGSQSAEYTTSAFKWRDGRITLAKMDAPLHLHWSRPLPVGSRPSTVTVTRDTAGRYFVSIRIKRDVMPLPATDTAVGVDLGITSLVTLSTGEKVANPRFGARDATRLAKAQRALSRKTKGSRRREKAKRRVSRIHARIADRRQDTLHKLTTRLMRENQTVAVESLAVKHMVGNRRLARAIGDAGWGELVRQLRYKAAWYGRTLVEIDRWYPSSKRCACCGHVVDTLPLDVRRWSCAMCGVAHDRDVNAARNIVAVGQTVIARGEAVRPKRETVAAGLVEPRIPRR

SEQ ID NO: 50862 - protein, 378 aa, Spirosoma sp.
VIQTKTYRYKLNPSPSQQRSLVQWLGACRYVYNLSLSYKKTLWEQNKISIGKYEIQKELSAIAKQTPWLGCVNSQTLQEVTDRVFNAYEGFFKQGKGFPKFARKGQYQSFSFKQGVKLSATHVQLPKLGKVKYRNSQACTGTIKRATVRECADGWYVCLCVETDIEPLPTVQNSIGIDVGIKSLLVTSAGETIENPKHLYKAEKKLKRLQRLVSRKKKGSTNRKKAVKKLARQHQKVANTRFDFHHKLTTRLIRENQAIAVESLQIKNILANHHLAKSISDAGWYGLTQMLEYKAKWYGRKFEKVSARHTSQDCSACGYRNTELTLAVREWVCPGCGTTHDRDVNAARNIKLRAVGHTVTQLVELDSSSTLKQESPAL

SEQ ID NO: 50863 - protein, 653 aa, Nocardia sp.
MSWNLPLTCGQTARTASTRASIRTGVDERTGELLTAATVIDRVRWCAGLVAEMSNRLLREHWNQTGVDTLARGRDANGRKLPSNAWMALRRLAWTVTCEAKTNDRIVRMAQEQTGRTLRSVRWRAELIAGILATWPGDPTHRTAQEWEQVRAAIPAGEFLPSSVIRSRTRQVVAFERRHGHLPSDLFELEPIPHTAQMLLLSACDSQQATIQRSATDPAKVVLRLRLPIRPDPRAYKDWSWVACPLVLPTTVPPTAVIYLPTVRVTEGKIRTDLAYTHAVPMSRHHGHTVALGVDWGLNTLLSAGAAQLHNDGRITALGTGAQFRAAGVVAKQDRLRRLSERLHVKVDHYARLDDPALEGKADALAQEILRVCGKRSRLNDALAWAGARWIVDQAVAIGATVIYLEDLRSLEAKGMGRTHNTRLSQMVRGRIADHTRHLAAAAGISVVTVPAHNTSKHCPRCLTDLRHRKAPDKPVTPGWKWATCPNLGCGWQGDRDQGAWQRIAARGLTHQSMTVTDRSSAHMVIRTVTDSMEARAFITAIPPTRQADRTEAGPPRTKSTHLTPRRREVPSPARLSRRAGQRPEGHVSTDRAGLPRAANRNQSVTTISTPIAGRHRPRGAELGAGFHLHAHACPPRWAQPMPDEMSSMGSLS

SEQ ID NO: 50864 - protein, 385 aa, unknown
  TnpB Polypeptide
MRRTSVVELVVDKSSEERLKLLCSLSSKLWNEVNYARRRAFFEKRGVDLKATYKEYYEKYKALIGSATTQQVLNKNDEAWKSFFKLLKLKKEGKLPPFITKINPPGYRKKNNKRTLWTVLRKDQYRIEGDKIVLKGLRAVGWVELRCRGLIHLKGRQGRMEIHYDQDRRKWYAHISFEVSEKAVRGVWTNVPRKPKEDLVAGIDVGINNLMAVYVENGLAKLVNGRPLKAVSHYWRMRIAEYQSTLNRYGLKTSRRLRSMYSKWRRQVKAYIDSRVRQAIEWLYSIGVSVIKVGYPKYIVQENGNFNNVHIWTYGHLLRRIYEIAEEYGITVVYVDEAYTSSKCPIHGEECGKRIKRGLFKCTKLNKAFNADLVGAYNILITPSP

SEQ ID NO: 50865 - protein, 891 aa, unknown
  TnpB Polypeptide
MAPKKHDKDETTHRAVNVSLAQLKPSKEVTEMIERWCCCMQDLSVKATMLANQCIVDEKLTPEEASMYFQNISWWEHHMKIWTTLSRCEYAELLTRGRDALMARKPFELLHAKNMTQVINFAATQMKTMASNMMNSRYMPSVKASFRRYVILLMREGSLQMTSIERHAFEKYCMDRFKEIAFPGMASGKSSPSSKKTDAKKTAAVAKASTMGPLYDQIIAKWEAAVPQYFKWCRQRSSVQGEVNIFKDDLLMMGKYEKLKELNIINSKNLTKDQKREKGDFSKELNKEVSAHRRSLSEKIDKDEYYCRLLFMKHLHANKQEDGHRMRALDDAPSSSLHKISKDTKKAFWNSCKAGLLLPLCGYDVKSIRLDARGLQCLLSEVKAEEKARNPLTTEKKRVSSSANTRVPKKRKCRDTKALDEDIVVVVSDEEDLDEAIDAEEDGEEDGEVKPDGGASSSRSAPKAKPARRVPSAEESAEAASKQRALFVKTFPGLKTLLSRAGSGKGDNLLDKLGKSLCTNGICASVFLQIPKPDVVKSDSADADDFFKRRKDYDLASRCPPQKLLPGQRMVSIDPGRRDMIVAYEEGSKKHLVVSTAHHIRKSWRSATTACTLKEQRKVLLTEADFQRYIGRLDDEKKARALIRRERGNPLDLAEYLSKSPTKACDATSWSTYLDYVWPVIPERLEAFRNKSIRRAKFKSYSRIDKSLDEICKKICQLGAPESELTRQIKHRDHRNQRTFRGENVLVAFGNGSGSSTGFGYAPAPQARLRHRLETVHKCRVTLIHEFCTSKLCSSCGNEMVYVGEKTMAEHHAALAKKGMNVDVGVTKRPIHGVLKCLECNISGARSDFGPRKHWHRDVNAAINIGKIYTCLAKNGNRPDYLKLPGDDGED

SEQ ID NO: 50866 - protein, 402 aa, Chloroflexi sp.
VGLKTFKYRLYPTPAQEKCMLNTLAVCRHFYNMCLEERMLTYKFEGRSVKKSDQEKMAIRYRATFPQAKAVFSQTLQTVANTVDKAFQAFFRRIKTGEKSGYPRFKSRNRFHSFAFKQFGAGAKRDGRRLKLFGIGRVVVCWHRPIEGVIKTVHIIYKAARWYACFACEVPDKPPLPETGKQIGIDVGISALLTTSEGEKVTQPKFYREGQAKLRVLQRSLSRKQKGSKNRRKALLKVQRQHEHVKNQRTDFAHKLSYALIQDYDRIACEDLKIRNMVRNHYLSKSILDAGWGIFKQLLVNKAVDAGRQVVFVDPSYTSKCCSNCDTEFQNFDLSTRWVECVCGLSLDRDHNAAINILNRAGWDTSVQPNVAPLPKPKGNGKRKRAVALAVVECHNAEVPIR

SEQ ID NO: 50867 - protein, 382 aa, unknown
  TnpB Polypeptide
MKIYRAYKFRLYPNEEQRILIHKTFGCSRFVYNYYLNYQKEQGIKKAFDLCKDLKELEKGHEYLKEVDSCALRCSIFDLEDGFNNFFAKRSGYPIFKSKFARQSYRTNCIRSTYKGKEYSNIEVDLLTRFIKLPKLGKVKIRGYRNRERIEGKIVNATISKETTNKYYVSVLVEEDLLVEKVTPTTIVGIDLGLKDLVVTSDGVKYGNEKVLTKYEKRLKRLQRKLSRQEKASKNYLKTKMKIARIYAKIKNYRKHYLNDIANEIVDEHDIIVTESLLVKDMFKEKVKAFNKSLSDASLSKLCSLIEWKSKLKGKFYYKINAYYPSSQICSHCGYKNENIKDLSIREYDCKECGTHNDRDINASLNILLEGLKLHYKLESVV

SEQ ID NO: 50868 - protein, 302 aa, unknown
  TnpB Polypeptide
LRAAATGVETLADGVLQLLQADRRLSEIQGQIPRRKRRIHSKCVQMGRQTQRTHARQDARTIADTMVQNTAPQDGAEHRDRKLGRSRTMARQHPRGGDHPPSPHPKERRWNRLGSGRYAVTSDGETIANPRHYKKLAERLEREQRTLSRKTKGSNNRRKAALKVARTYARITDMRRDFLHKLSTRIIRENQTVVLEDLNVKNMVKRCAPKPDPDNPNHWLPNGQSAKNGLNGSIMDAGWSEFRRMLEYKAEWYGRQLITIDKYYPSTQICSHCGAKTGPKACPASKSGHGRARTAVQATTVT

SEQ ID NO: 50869 - protein, 404 aa, Cyanobacteria sp.
MIVYEFKVKGEEAQYRTIDEAIRTSQFIQNKCLRYWMENKGLRQYDLNKYCAVLAAEFPFAEELNSMARQSAAERTWSAIARFYDNCKKKVKGKKGFPKFKKHCRSVEYKTSGWKLSPNRKAITFRDGKNIGTLKLKGTYDLNFYDIKQIKRVRLVRRADGYYAQFAIDVKVRIETEPTGQAVGLDVGLKYFVADSKGNTEPCPQFYRSWERQLNRANRKKSKKFVKGAKPQSKNYHKARNRYARKHLRVSRQRKEYVKRVAYSVIQSNDLVAYEDLNVKGLVKNRHLAKSISDAGWSIFRQWLEYFGFKYGKQTIAVAPHNTSQNCSNCGQKVKKSLSTRTHVCNHCGFVEDRDVNAAINILKLALSTVGHTGTYAWGDLPSWADGAILLSNGESLNQESPHL

SEQ ID NO: 50870 - protein, 99 aa, Okeania sp.
ARGVGSDANWGELVRELEYKAEWYGRQLIKIDRYFPSSKCCSNCGHVVEKLPLNIREWDCPECAAHHDRDINASINILAAGQAVSVCGATVRLEGSKSR

SEQ ID NO: 50871 - protein, 355 aa, Leptotrichia sp.
MLIGKKIRIKTTPELEILFRKCAGVARFSYNLMISLNNSSQKFIKESDVRKYVTGLKKQENYSWLKEVSANIPKQAIKNCGKAYSDYFKKLRGKPKFKKKFKNDRFYVNYESLKKTNLGFKAEKLGEIRTSEPLPEAKQYYNPYIVYDNKYWYLTFSIETECIKEQLNDFTLGIDLGIKHFAVTSQNEIIPNINKTLTMKKLYKKIKRYQRKLTKCLKNSFNRIKVLKQLHRLFRRQKNIRNNHIHQATSHLVKTKPSKIVVEYLRVSNILKNKRLSKAISESGFYEFRRQLEYKCKLRNIKFMLADTFFPSSKKCSNCGNIKKDLTLKDRIYKCDCCGLEIDRDYNASLNLSKL

SEQ ID NO: 50872 - protein, 416 aa, Salinibacter sp.
MELTDTVHVAVSDMARKKAFKYRFYPTDQQEAVLAKVFGHTRYVWNWALELRTNAYYEEGKSLSYTDTAKRLTDLKKEKTWLREVSSVALQQKLRDLDQAFQNFFDGQCGYPNFKSKHDKQAARFASNAFALHGKKLSVAKVPGSLNVRWSRELPDEAKPTSVTLTKDPAGRYFVSITCTMPDPEPEPTVTDEDGNRKSIGVDLGVADIVVTSDGWKSGNPKYLEDDLYRLRKAQRRLSRKEEGSKNWKKQKRRVAKIHAEIRDKREDFLHKLSRRIVDENQVIALESLSVKGMQQNRSLARSISDTGWSTLVRMIEYKTEEAGRTVIKIDRWFPSTKRCSECGYITESKSLSVRSWDCPRCDTSHDRDINAAKNIRTAGLAGAFDKANDSGGHSKTRDAFRIERSGPNAHGPVNE

SEQ ID NO: 50873 - protein, 414 aa, unknown
  TnpB Polypeptide
MKEFRLIVNKSIRIAEEQGIRSRFRLSDAAYADLSRDHDILKLYILSAFGVALSALNSQRRHAKCKSTCGRPYLKRLMARVARRGYHFDRATGHLRIPVRAHEYLEFDLPVSRWHRQFLDDSAWDLGSLTMVPGRVVLTLRRERRPAYAPTSAIALDTNEDSLDGVAVNRRRAHLVTASLNGVPQIRATYFRRRQRLAAKKAHDRRLARRLLNREGRRERHRVAQRLHRVSKKLVEVASQERSAIVLEDLRGMNPGRRSKRTNRRLSSWPRGELHRQIEYKAALAGVPVIKVNPAWTSKTCPVCGARRRERVGQDFVCEMCDWEMDRQHNAALNILQSALASHEALARAVRFRPGALRDDVVSPLYDLSALRTGAREEPSGVESKRVRRHRLLVPQSTRSDGTSPTFRPAARAT

SEQ ID NO: 50874 - protein, 365 aa, unknown
  TnpB Polypeptide
MNKAYKFRVYPNAEQTVMFAKTFGCVRFIYNKMLGDKIAYYNENQKDLSCYPSQYKPEFPFLKEVDSLALVGAQNNLKVAYKNFFRDKSIGFPKFKSKRNSRKSYTTNCINENIKINDGHITLPKVGAVKMKQHRTIPENYVLKSVTVSKTPSGKYYASILFEYEQIIEPVEIKETIGLDFSMAELYVDSNGEEPKYNRYYRRSLDKLRRMSRALSKMKKFSNNWRRQKHKIAILHEKTANQRKDFLHKESRKIANSCDLVGVEDLNMRAMGQALNFGKSVADNSWGMFRTILKYKLDDMGKYFLVIDKWFPSSKLCSTPNCGYKNDALDLSVRSWVCPNCGVVHNRDVNAAINIRNEAVRMVTA

SEQ ID NO: 50875 - protein, 369 aa, Bacillus sp.
MLNNKKQGGEIMSQTITVKIKLLPTKEQDLTLTEMSKTYISTINDLVSEMVKEKKSTKKTSKNIGASLPSAVKNQAIKDAKSVFKKAKKTKFETIPVLKKPTCIWNNQNYSLDFTHISLPIMIDGKAKKTPIRALLIDKENRNFNLLKHKLGTLRITKKSNKWIAQISVTTPTPQKTGFKVMGVDLGLKVPAVAVTDDGKVRFFGNGRQNKYKKRKFRSVRKALGKKKKLNAIRSSKNKEQRWMKDQDHKVSRAIVNFAKENEISVIRLEQLANIRQTTRTSRKNEKNLHTWSFYRLSQFIEYKAKLEGIKVEYVSPVYTSQTCPNCSEKNKAQDRKYKCKCGFEKHRDLVGAMNIRCAPVIDGNSQSA

SEQ ID NO: 50876 - protein, 388 aa, unknown
  TnpB Polypeptide
MQRTIKLKLNTTQAQEEVLKHTLSEFTQAFNFVCEYGWLNSEKNGVKLHHATYYTVKEHCKGLVSDLIVQARLKATEALKSAFARNKAGRKATRPRSNLCPARYNLHTYKLNWQTTSVNLATSPGNRLVIGFTTPKYATKYVGLPFDTADLIYRKGSFWLHVVVSVPEFDFLNSGETIGIDLGLTHPAVTSKRKFLGSRHWKEVDRRYFRSQRVLQSKGTKSAKRHLRKLAGKRMRFRRDCDHVLSKRIVQSAASGATIVIENLTEIRSRARLRKGEGQRRLHSWSFAQLRSFLTYKAEEAGMKVVAIDPRHSSQTCSRCGYQSRSNRTKQSRFLCKECFYQLNADLNASYNIRDKHLASLGISLAGGPQSMGLSHPPSGEVQAVCFS

SEQ ID NO: 50877 - protein, 437 aa, Streptomyces sp.
VSPSKRPEWGYASQSERFEKQRRLAVLKARLARVEARIEGGRPGVVVGGRRLATVRHHLADAGLTQARWRQRWVAARLFLTADGESGAPYGNYTITVTPETGDVTLVLPEPLRHLANAPRGRYRLTCPVAFSHRREEWLDRVTANRAVRYDIVHDPIRDRWYLDASWSAETAALPTPQELRASGQKLLGVDLNADHLAAYVLDPHGNPIGEPVTVPIAVEGPTSRRDGHLRAAISELLRIARAHRCAGIAIENLGFDDARAPGRETMGRGGRGKRFRRTVAGIPTARFRERLRSMAFHAGLVVIAVDPAYTSVWGARYWKAPLQQRNQQTTVTRHHGASVAIGRRALGHRARRRPGVTAHDQRIVTRRATGQAALIPRARGTASPPRTASTPNGGGKTRPHQGDQLALLPDLEDRSRGHQAITGPVCDSSANTGRQR

SEQ ID NO: 50878 - protein, 405 aa, Planktothrix sp.
MKLRYQYRIYPTDQQKRLMSQLFGCCRVVFNDALAYCQEQYHAGNKKPSSGELSKRLTELKKTEEKQWLTEVSSVPLQQSLRDLEQAYSNFFKSCKGQRKGRKIKPPKFKKRKSKQSAKFTDNGFKLYPNSSYIHLAKIGDIKVIWSRELPATPSSATLIKDSADRYFASFVVEFNPQQLAKNGRSVGIDLGITDFATLSNGEKIKSPKPLKKQLKRLRRLQKNLSRKQKGSKRREVARKKLAKLHAKISDTRSDFLHKLSTRIIRENQTIVLEDLNVSGMVKNRKLARAISDLGWQYFRTMLEAKSVMYGRDFRVIDRWTPTSQSCSCCGFRGGKKELNVREWICLNCGTFHDRDVNAAINILVAGGLSETLNGRGEKVRLSAKKAHLGEASTRPGFQQLSPEP

SEQ ID NO: 50879 - protein, 405 aa, Aliterella sp.
MSITVNYEYKLKPSQQQMQTFEAWLLTCKKVYNYALGERKDWVNSRRCAVNACSLTSEYILPPDLARPTYYSQCKSLTSAKKNFVELTEPHIHVLQQTLRQLEAAFVSMWERGHGFPRFKKKMRSFVYPDVKQNAVEVGRVKLPKIGWVRMRMSRPLPEGFILKQMRVARRVTGYFVMLTYQLGVQVPDVPAHGHFLGVDIGLDKYLATSDGELVSRPRFFNALQGKLKLLQRRLKHKKKGSSNWLKLTGKIARIHQKINDTRKDWHFKLAHQLCDSVGAIFVEDINFIAWAKGLFGKHTLDAAYGQFFNILSYVCWKRDVFFLKVDKNYTSQICPNCQTHTGKKDLRQRTHYCSNCGYTTNRDVAAAQVILQRGILAVGQPVSQIASGDVLLGVSSNTNLGKCP

SEQ ID NO: 50880 - protein, 280 aa, Oscillatoriales sp.
LAIRGVAIGKLNQYAAIDEAIRTAQFVRNKCVRFWIDNRGVGQKDLYRHSTALREEFAFVKDLNSSACQASVERAYSAIARFYDNCKKAVPGKKGYPTFKKNRRSVEYKVSGWKLSETRKQITFTDKKGIGKLKLKGTWDLNFYQIDQIKRVPLIHRADGYYVQFAISADNKVDAAPAGKTVGLDVGLKEFYTDSDRRTEPNPKFYRTSEKQLKFRQRRVSRKKKGSANRKKAINRLGRVHLKISRQREEHAKKLARCVIQSKCDSFWRNLIGRFQASVE

SEQ ID NO: 50881 - protein, 567 aa, unknown
  TnpB Polypeptide
MARRKKHQITEYEKCLREYHKTSPRHVIVLEADLPEDEKRHLFHQADLLRQCGNELLGIMKRHLDQLLRTKKYRGLRKSYGKISKSIKNLQQIKKLSNVQKQHLKDLQKDLRTISNLMNEMQKSYHVTWEYCRNTMKTLRLKYQQPSIFALSRAEDIWTAVSKVLYSDGDRLHFKKRGDLPELRAKQIHRGIVGSMKNGSLGFHYGKLTFPVKRKEKDFWLMDELEAVEAYLKNPGFHDAYAIDRMQHGEIVSTYRPCYASIVCKTIRGKLRVYLHLTVEGFPFPKRTKDGVIKRLCGDGIVGCDIGTQTIAYTSDHVVGLENLAERGNSIRCVERQQRLVQRAMDRSRRAMNPDNYNADGTIRKGKKAWTKSKRYQKLQLRYRELCRVSAENRKLAIHEQVHKMRSLGDVFVTEAKNAKKLQKRANPEDPMDKNGKPKRKKRFGRSIKNRCPGYFQAKVQQLFESTGGTYIEVPPDYRASQYDHTADDYIKKKLSQRMYNLKDGTKVQRDWYSSFLLYCIDLITKTIDRQKCLAIFEIQLNKEHELIEEIIRLKKRIMNSGIRVAA

SEQ ID NO: 50882 - protein, 342 aa, unknown
  TnpB Polypeptide
MEHKLKRLEIRQQRLKDHPLKVRFGGKKLTKNRMIPERHRALEKRRNKRMMISGRKDCQYGNFVFHYDIETKTLEYRSMTDWDGARICFPNVTFPYGQEWIETWLQERKGAIAWEIVDCGNAWQIRCILTKEAEDMNGYYGDGAIGIDINYDHIAMTETDQSGNLLYHKVFHYDMKGKTSGQIKHQISEVIEKVFQYADQQHKPITAENIKSIQRKKFYDKHRKKHRHISMFASACILELLISKAVKHHIGVKFVHPAYTSKAGKMRYLRRYGLTVHEAAALCIARRGQGYKESIPSYLKPYLTNKKVRALIPQKWGSLTKLINKVTTQDLLTYQDPVLHRN

SEQ ID NO: 50883 - protein, 399 aa, unknown
  TnpB Polypeptide
MNRSFEIRLYPTKLQEQKLNQTFGACRFMYNCTLFQKQKAYSEQIKITTDEIVKHIKSENPWLKEIGSQAICQTLNDLNSAYKNWFNSLSHKTKQKSNAPKFKKKHDKQSYRDCMMKDKIELLCNQDTRKISIPKIGKITYRAGYDFSKYNITKVCNITIKKSKTNKYYCSICCECQEPKKLKQNDYSIGFDLGLKDFLIDSDGIVIDNPKYFRKSQDKLAKEQRKLSNCTKGSNNYIKQKLKVALVHEKIKNQRKDFQHKVSSQIINENQVIVSEDLKPSNMIKNHKLAKSIQDASFSSFCNMIDYKAKWYGRTYIKIGSFYPSSKLCNCCGYKNTTLTLADREWECPNCHTLLDRDKNAALNILDEGLKIFKSGQELPVEPVDTENISSLEQKDSGF

SEQ ID NO: 50884 - protein, 399 aa, unknown
  TnpB Polypeptide
MDFLMNRAFEIRLYPTKEQQKLLDMTFGACRFVYNNVLGLRQSYFNDYGFKDKDLDIMDMLKAFNPWLNEIGSQAICQSLNDLNKAYKNWFNSLSKKTKQNSKAPKFKKKSDKQSYRDGMMKKNIFELLDIQNRKITVPKIGKITYRCGYDFSKYGITKVCNITIKKSNTNKYFCSICCECEEPEKLPTNNFKIGFDLGLKDFLIDSDGIVIDNPRYFRKSQEKLAKEQRKLSHCIKGSNNYKKQKLKVALVHEKIRNQRKDFQHKISRQLINENQVIVSEDLKPSNMVKNRKLAKSIADASFSSFCNMIDYKAKWYGRTYIKVGSFYPSSKMCHCCGYKNTTLTLADREWECLNCHTLLDRDKNAALNILDEGLKILNKSAQGLSVEPIDTVHNNALE

SEQ ID NO: 50885 - protein, 326 aa, Anoxybacter sp.
LKIIKHWGFTSYTKSHKHTYRVLRNNYSLPSQIAVECNRKAIEIFKVNQISRFKSNVPVRLVNGKSFAIIVKNGRYFAKILTPNGKIFCPLAFGKYQLNYLADERYIIKTADLYFSKGEWYLNLVLEYQQKQIEPKTVMGIDLGIVNLASVAVIDQDKNILHTEMFSGRELRFKRLRYRQKRKLKSKKAGSQKISTIKENRICREVNFHIANRIIELAAKNNSLIVFENLKNIRSNITKEKDRLSNYEKNSWAYYQLKEFVKHKACLHGIPVIEISPFKTSQICSTCQAEGQRITQSLFLCPNGHRHNADKNASINIAVRGLQHVG

SEQ ID NO: 50886 - protein, 406 aa, Actinobacteria sp.
MLDKRFCINYNGNMQSYKFRLQPNKEQREKLDNMFGCSRFTWNYFLDLNNKIYLEAKEKDLKKKHLNYYDCANKLTELKTKNKWLKEANSQSLQQTLKDLDTDYNKFFQKKGGFPNFKSKKNKQSFRIPQSFKLKDDQSVFPKFKEGIKTVVHRKVEGNIRYATIIKTKTNKYFVLVTTDFEVKKKRIADNKIGIDLGIKDFAVLSNGEKYNPKVKEGNIRFLHKQVSKKKKDSNNRNKARLKLAKKYEKTNNQNQDFQHKLSDKICKENKLIAIEDLNIKGMVKNHCLARALSNQSWYSFIIKLGYKARRYGGKVVKTKRFYPSSKACYCCGFVNQDLTLADRDWQCPQCKTKLDRDLNASQNILAQVLRELNIKGGRDYRLKPVELSSLDEAVKQEALGYLAQR

SEQ ID NO: 50887 - protein, 353 aa, Bacterium sp.
MYRIVNEKEVYLKLYTGQAWIWVKYRMSGRSFPQSWEQASPKLVVKGKKLFLHICFEKKIKVAPIKQQVSKDTSNELVICSVDLNINNNLAVCRILKADGTVLASRFIGGGKASSGRRKRALGRVAKKRRKTGNLRKDEQDNKKLWEYINNLDKYEAHRVSRRIVEFAFQYRARIIVFEHLGNFKPQKGKYSRRGNEKRSFWLRGKIYHFTQYKAYELGILTSRVSPKNTSRLCAYCQKVVARHNRNQKPKEYRPGAPMFTCPNGHRGNADLNASNNIGLRLFARFNKQVSLKKPILKKIGVSLLYNAEGQDKRDGQVAPPELAVVHYENNVVALMGQGLPFSSTPAHLKNFS

SEQ ID NO: 50888 - protein, 469 aa, unknown
  TnpB Polypeptide
MVVDSKQERELSARFQAGRQLYNACLNEAMARMELVRNSDAYKTAKKIPRDQKKKRTFAFAEARIAYRYSDYDLQAYATRVSNSSKWLAEKLDANTQQKLATRAIHASEKVLFGRAKKVRYKVPNRFHSMEGKTNKQGIRWSQEQLVWGKLRLNAIIDPENVVIQHGLNSKIKFVRILWRELNGVRRWYAQLICEGKPYQKPENYVADGDIGLDLNISNLAFVGETHAGLLPFAEGVPTFERKIKALQRQMSRSSRVNNPNNFHPDLFGKKGRKTVIKKGKAKKGKRNWNNSKRYQKAAAIRCKLERRKVAYAKSQNRKLVNVVLRHGKQIKTENVSVKGWQKRYGKAIAAKSPGFVQSELKRKAERAGGSFIKFSTQKTALSQTHLDGERFKKSLSQRVHYDRTGIVMHRDLFSAYLARYVNQDELALQDAATQYLGSEPILLEAWKRFIQSARLVNARLKPRGLIPR

SEQ ID NO: 50889 - protein, 486 aa, unknown
  TnpB Polypeptide
MLSGVKFRAYPGALKPLLRRWIGHQRFIVNAKVGEERYFLTFARFALSLTGQRPPADQAYSHFIGPDTEFLREVPSQVLRNGAYRFAQARLRHQRGLGGAAQIRNKSGRQSVLLTAELFEFSGEYCNVHTRKIERDLWLGTKKFPAGRLKFKAHLPYQVPQSVCISVEPSGEWYVSFCYERVALEGEAIVLRTQEELAYEFARRADLETLTEGFDRGSVSPLVTSEGTVFAVPAVNAKRIAQRERRIGAYQRRMARQQRGSKRRRKTASRLARLKAYGREVRRDFAHKTSATLVGSMQEILVFEDLKLKNLSAAPHPKKDAAGRWARNGSAAKAALTRGLISASLGQVLQFTRYKAAARNKLVLTVLPAYSSQECSACGSIDAANRRTQSEFRCLKCGFAANADHNAASVIKKRGIALLRSGQFRPKDKKTARVRGRNKVGQVLPKPEAIPTPEESTQVGVRGRAPARNALGSGKPPLQPVAASGR

SEQ ID NO: 50890 - protein, 486 aa, unknown; identical to SEQ ID NO: 50889
  TnpB Polypeptide

SEQ ID NO: 50891 - protein, 346 aa, Lactobacillus sp.
MSNHFQFLEDKRIDSLAKANAIQNYHKAWNAFRKVHEAGVPKFHRKSYAWRYQTNCQYPKQKTARLDNGTVCFEDRKHIVVPKLGRLRIKGAQQRLLDRQDETRIGTVTISKDAADRFFLSLQLGSDTPFVSKLSRTNRQIGIDLNTENFLTASDGRTIANPRYYRTIKGKLAKAQRTLSRRQRRAKKEQRSLRESKNYQKQRLLVAKIHARVFDRRRDFLQRTSTALIKNQDLVVAEELRSKNLLKNHALAMSISDVGWRSFLGMLSYKADLYDRQFITVSPKNTTQTCHDCGFVMGSNGTEKLTLADREWICPQCHVHHIRDYNAALNILEKGLQKQQKAQSKS

SEQ ID NO: 50892 - protein, 277 aa, Bacteroidetes sp.
LKGQKPKSAVVFKKRINGDWTYYAGIHIDVEEPPPDLDDDHGWIGVDLGIVQLATLDDGTSFSGEEVDRVRDRYNSTRSSLQSKGTHGAKRVLRRLRGRERRFQQSVHHCISKRIVEKAKAEGKAEGKAEGKGVRVEDLSGIRERMRVRRSGRYRHHSWAFYQLRQFLEYKCALAGVPFETVDAAYTSRTCPECGHEEKANRKGQSPFVCQACGHEENADIVGARNIKRGGVCQPSQDESQDVASKVGGKSPPEVWQRQAPYFKCGVADGTIALMIE

SEQ ID NO: 50893 - protein, 329 aa, Caldanaerobacter sp.
VGERKYVYAKIEAGWKKNKDREELLQKIAESNIPYSVELKLKNGNIYAYFAIEEEYPKIKITTDKGVIGIDVNAYPDNISWAEVDEKGNLISYGNIPMPELSSGSKDKREYFRWQYAHEIVKIAKEKRKAIVIEELDIKEKGKRGDFSGRKSRRIRHSFSYKSLLSKIKTLAKREGIEVIEVDPSYTSIIGMLKYAPQYMVTKDISAAYVIARRGLGKEEKIPNNYINFLNTLTVEELEELKKHVKNTVKNKYLKKRHLKEINRAIKFLQSLESESGKVLRPLYGTSFSANDFWQVLKVAVVTPLSPEKVKRDFSTLKGLIIQGKWRDP

SEQ ID NO: 50894 - protein, 345 aa, Betaproteobacteria sp.
MNCSAQQITLRRLDKAFSAFFRRVRAGQTPGFPRFKSLTRMPGFGYKKHGDGWRFTPGANWRHGTLRLQGVGLIKARGEARQGGTIKSCELQHSHGDWRLSLTIECAPVRVGGPAAVAADWGTEHLLTIVDGHCGTETVVNPRWWQQRKATEVALAQAVAAKRRGSRRWRKAAARLAAHRGQSGRKRLDHHHQLAARIASEVAVFATEALDIKTLTASAAGTMEAPGVDVRRQRNLNREMLDTAPALLMQLITYKVQETGGWFLTAPTKRLKPSQTCPACGAQRKKQLSERTHTCPCGCVLPRDVASAQVVLDWALREIAGKSHAQNFGREPTAAASPLRNRLQA

SEQ ID NO: 50895 - protein, 405 aa, Betaproteobacteria sp.
MLRRQAYCFRLRPAGADERALRRFAGACRFVWNRALALQQARHARGEKKLGYAGLTKLLTGWRADPATAWLADIHSQVLQQSLKDMERAYSNFFAKRADLPRFKKKGQHDAFRFPQGIKLDQRNSRIYLPKIGWVRYRNSRVMEGTIKNVTVTAANGHWMISVQTERAGAVPVHPATSSIGIDVGITRFATLSDGTVFAPLDALRRQARHLMHLQRALARKTKFSNNWKKAKARVGRLHTRIADSRRDFLHKTTTTISQNHALVIVEDLQVRNMSRSARGTTARPGRKVRQKAGLNRAILDQGWGEFRRQLTYKTAWLGGELLAVPPAYTSQTCLACGHVHADNRQTQAQFLCVACGYTEHADLVGALNILRAGHARCACGEAAPSGPSLKQEPTEATVRELAHG

SEQ ID NO: 50896 - protein, 258 aa, Oligella sp.
LDQGNSRIFLPKLGWVRYRNSREVLGVVKNVTVSSKQGKWYVSIQTEREVETPIHPSTAIVGIDMGITRFATLSDGSYLVPLNGFKRQEKALAKAQRAMSRKQKFSNNWKKAKATVQKIHARIAHSRRDYLHKATTAISQNHAMVCIEDLQVRNMSKSASGTSALPGKNVKAKSGLNKAILDQSWFEFRRQLEYKLTWLGGELLAVNPRNTSRTCPCCGYVAKENRRSQACFKCMDCDFEENADVVGAINVLRAGHAR

SEQ ID NO: 50897 - protein, 477 aa, unknown
  TnpB Polypeptide
MATYWTSVQVAAQNAVSDFIYRLKKEYKGVKPIDEKYHHQGKNYTKHWSYNRSLKKSFKRVPYTEEQKHYANWLVCGCYPQFFRLLDGMAPDPTCEGQLAMGIDSKIAKKSSFKTRPQDMGRVANDVRRLIHETRSTTVRLPRCGGKGNYFGCDSSSWTQKDGRDSVNLMNYAGTPKKVRKAQAEENASKSKKKPSDRHPRLHIPLKGKPKLEGTLRVYLHEDIGYLSIHYHRSIPCQDKKLRKDGITLGFDAGLSEGGYDSKGRCIAKNLGKMSAAISDRRMLKDQRRQPLIAKVKLLKASNDAEDRAKARRIEHNNLRNKKETKKRAAEREQLVNYVRRELKKKVFVKPKQPAKTLVIENLGPMGGQKFGKRMNRHVSAWNRGDIITAFEELCPLYGVELVKVNPAYTSRKCSRCGHIEKANRQGDKFKCRKCGLEEHADVNAAKNILASYLSSTSIPLSASPEDVLKTEKANQI

SEQ ID NO: 50898 - protein, 339 aa, unknown
  TnpB Polypeptide
MKRTILLQALATKSKTNRLENFMNKAIDEYNRLLSEREGCKTFMQFHHKTLVTSKTNTSFNVQVRCSLIRDSWKRKTNKVNGLTVKFNIPRNCKIFNTKANFFVDLGIYPWNRIAVPIKQNRNYQRFQNLIKNRWTCKTFGLTKNLQIVAYLSKEKEIPERRNIMGIDVNAKHFAISIISPKGKILYQTYLGKHIWVKRKKIMERRASLQSLNAKKKLKRIRNYEKNFVKTNIGQTIREIIKLAIKYDADISIEKLRKFKPKFRRFNKIVMRIPFYKFKQILEQRCFDYNIKLNIVDSWHTSKWCSHCGALASGHSSNYSLFKCKAVKSSIATEKLAWL

SEQ ID NO: 50899 - protein, 180 aa, unknown
  TnpB Polypeptide
LSYRRKNQVNDYLNKAARYIVEFCISRKIGTIVVGYNPTLKQAINLGKRNNQSFVQMPIFTLRAKLESLCSRMGLNYVSQEESYTSIASSLDRDVLPVYNADNPFQPKFSGRRIKRGLYKTKSGHLINADANGSLNIGLKSNYKEVFLRVSRVCLTQPARVNILQESPITALLLMVGVRQ

SEQ ID NO: 50900 - protein, 637 aa, Micromonospora sp.
VLRAGVDEETGEVLSRALLAQRVGWCADLVAGMVAALVGEHWNRVDVGLLTGGVDAGGRRLPSHAWMALRRLGWAATPPGGVRVNDRVVRMTQEQAGRALRSVKWRADVTAGVLSTWPADPRKRTPAEWDQIRQAIPGGQHLPSSIINARTRQAATFLNTNGRLPVDVFELEGTPRIPRMLLLAACDRQQATIERSDTGPGRALLRLQLPSRTDPQTYRDWTWVACPIELPPTVPASAVLHLPTLRLTDGTVRADMAYTHVVPKAQAAGHLVALGVDWGLNTLLSAGALRLHDTGRITALGAGGQFRAAGILAKQHRLRRQSERLHAKADHYQRLIGVDERHQLVGKHAVIRDEIRHVSARRANLNDALAWAAARWTVDQAIAARATAIYLEDLRSMKAKGMGHSLNTRLSQQVRGKITDRIRHLAAEHGIAVVTVPARNTSKHCPQCLTPLRHRKAPDQPTVAGWKWATCPDRSCRWQGDRDHGAWRRIAARGLTHQAKSVTDKTTGAMVIRTVVDELEAAAVVTPTMSKTSRRDRSKTGPTRHKPPRPAPRRRRAPSPARPHGQAGKRPEGHAPTDRKLPRAAHRHQSVNAISTPTAGHRPRGAALGAGFHLHAHATPPRWETIPETPSDSRSLS

SEQ ID NO: 50901 - protein, 372 aa, unknown
  TnpB Polypeptide
MKQTIAVKLEPNEQQSQALRLTMEAFNLGCDYVAEVAFKKRLANKIAIQPFVYGTLRSEYGLSSQMAIRAIAKAIEAYKRDKNIQPAFDPHGAMVYDHHIMSFRDLSHVSLLTLSGRELLPLRYGAYQQARMDRVKGQADLILRDGTFYLYLTVDLPSAPPIEPVDVLGLDLGIVQLAVDSDGEAHTGAGVKKCRRRFQGLRKGLQSCGSKSAKRHLKRNRRREARYQKHVNHCISKHLVSKALVGQRAIAIEELSFINQRVAVKKNQRYERLSWAFAQLRAFLAYKCEAAGIPLIVINPRDTSRTCPACGHCAKENRRTQSEFLCKECGLQDNADWVGAVNIRRKGLEARATLSTPTDGTRQGCSQRHCLS

SEQ ID NO: 50902 - protein, 393 aa, Thermococcus sp.
MSLEIIKLTAKFNIKTVPEELNDLFTTYREIVNYLITYAYENNITSFYRLKKETYKSLRREYPELPSHYLYTACQMATAIFKSYRKRKRKGTAKSKPVFKKETIMLDGHLFKIGLETGVLKLSTPKGRLTLEIHPAKYHEKFKGWKIGQAWLIRTPKGVFINVVFSKEVEIKAPLTFVGVDLNENNVTLSLPSGEFVQIITHEREVRTSYFLKRNRIKKKLKTGKRRRELLKKYGERERNRLNDLYHRLANRIVEIAEKYGGIALEDLTEIRDSIRFTAEINGRLHRWSFRKLQSIIEYKAKLKGLTVVFVNPAFTSSLCPICGGKLSPNGHRVLKCEKCGFEADRDVVGSWNISLRALKMWGVSVPPESSTMKMGGGKVIRYEWFKSPTNSG

SEQ ID NO: 50903 - protein, 201 aa, Thermococcus sp.
VKVPRKPLGNISAGIDLGVNNLMAVYVENGQSFLVNGRPLKSIAFYWQRKIANYQSKLNRSGAKTSRKLKRMHEKAKLQARHYINTAVRQTVEKLYHLGVSRIVVGYPKDISRNSKRGKRQNFILSHVWRFNYVIQRLKEVAEEYGITVEVVDEAFTSKLCPVCGKPHEGARFVRGLYACPATGFTFNADLVGAFNILKKW

SEQ ID NO: 50904 - protein, 436 aa, Thermococcus sp.
MKRTLTLKLQPSKEQEKALFQLADLSSRAWNRVNYLRRQEYFQGKPIDFLKTQKIVYEEFKKEIGSATVQTIARKNAEAWRGFFSLLRKKRNGELPTWLKPKPPNYLKENGKRKLFIVLRNTQYRIEGNKLILMGLGKFKRLEIQFKGRIHLRGKQGRLEIIYDNAKQKWYAHVSFTVEKKLIKNEWISVPRTPKGRLTAGIDLGVNNLMAVYVENGESFLVNGKPLKSIAFYWQRRIADYQSKLSKSGAKKSRKLKRMHEKAKLQAKHYINTVVRQTVRRLYDLGVSKIVVGYPKGIARNSEKRRKQNFLLSHVWRFNYVIKRLKEVAEEYGILVEVVDEAFTSKTCPVCGKPHKGARFVRGLYSCPTTGLVFNADLVGAFNILKKVKTITPSLEGLRAFRVRGNGGKALPEGLKTHFLVGLNEAPQTSLSLARG

SEQ ID NO: 50905 - protein, 459 aa, Thermococcus sp.
MKRTVTVKLQPSKAQEKLLFELADIGAKVWNRVNYLRRKEYFQGKPIDFLKTQKIVYEEYKKEIGSATVQTIARKNAEAWRSFLVLAKKKKNKELPKWFKPKPPNYLKENGKRKPFIILRNTQYKIGGNKLILMGLGKFKRLEIQFKGRIHLKGKIGRLEITYNEVKGKWYAHISFTIKEKLEGEKWIEVPGKPKGDLTAGIDLGINNLMAVYVENGESFLVNGRPLKSIAFYWQGRIADYQSKLNKNSQKTSRNLKRMHEKAKLQARHYINTAVRQTVKRLYDLGASRIIVGYPKGISRNSDKGSKQNFILSHVWRFNYVIKRLKGVAEDYGISVLVVDEAFTSQSCPVCGKPHNGARFVRGLFKCPVTGLVFNSDLVGAFNILKKVVKTITPNLSGLYAQRRGNGGKALPEGLYDPNPVTVVGETPRTSLALVHEFSHKNPSLLEQGGGRRGLCSTT

SEQ ID NO: 50906 - protein, 368 aa, Streptomyces sp.
MTQQVKRAFKYRFHPADEQAAELSRTLGCVRYLYNWALHMRTEAYTLHSKKVGYAESDRALTVLKKQPATAFLAEVSSVPLQQAVRHLQTAFAAFFDRRAKHPRFKSKKKSRASATYTRSAFRWRGGQLFLAKMSQPLDIRWSRPLPAGAQPPTVSVSRDAAGRWFVSILCDDVVSPAVAAKNAVGVDAGVTSLVTLSIGEKVTDPRHERRDRRRLAKAQRALSRKTKGSANREKARRKVARIHARVADRRRDFMHKLTSRIIHENQVVVSEDVTVRTMLKNHSPARAVSDASWAQLRLMLEYKCRWYGRDPVLVDRWSPSSKLCGTCGTVRERLPLSVRTWTCDCGTTHDRDVNAARNVLAAGPAES

SEQ ID NO: 50907 - protein, 386 aa, unknown
  TnpB Polypeptide
VNVVALKYRLFPSKAQETALNETLAVCRLVYNSLLHERTALHEQGLKSPAYYTQAPAITQWKKDHAELKTVHSQVLQNVAVRVDLAFQAFFRRVKAGETPGYPRLKGEGQYDSITYPGSGFKIGESSVWLSLFGRQVQVQAKLHRPIVGKVKTCTVRRYGSKWFVCFSVEQPDNLLPKSEEAVGLDAGLNSFLALSNGEFVDNPRFFRRDEKALAKAGRKQAKTVKRSKERRKANRVLSRIHERIRNRRHDFVHQTARRLVNRFGVIAVEKLNVKGMVKNHNLAKSISDASWSMFRSVLAHKAESAGREICAVNPAYTSQDCHACGYRAKKKLSERWHNCPMCTASLDRDTNAAINILNLATGTSLNGITLSQGTPVEAPAFRHGE

SEQ ID NO: 50908 - protein, 415 aa, unknown
  TnpB Polypeptide
MASKDLWNHANNIVLSVFTASTESKKNGDAEHATYLNYNAINRMMIDRCDPTYTALPRKVSNQTLMLLDKAWRGFFASMRSWKRDPSKFLGMPRMPGFRSHKRGGQTVTYEFGAISKKRLKKGFVSPSGTSIEVPFVHGAEEGVRLLGCRIVPLGDGEYKLDILYERTWEDKVEGRSVHAAIDLGVDNLATVVFDDGSRPAIVSGRTIKSENRFWNKQRAALLAALQASDARRRSSKRMRLIDAKHGRRMESMLHEASRCLVDELVFRGASDLIIGYNKNWKQDADMGSKNNQKFVGIPHERFVSMVEYKCELSGIRTRRQEESYTSKASFLDLDPMPTFADDCAAPKFSGYRSERAWYKRKGHEQKVHADVNGAYNILRKVIPAAFVKGISGFAVSPARLRSCERHGNGFPLVC

SEQ ID NO: 50909 - protein, 383 aa, unknown
  TnpB Polypeptide
VTNATLALKNFSESKSGVRRGRSVGFPKFKNRHSKLSLTFTATDKQAGWFTEDSRHVRLILPHFATDPRIARRRDQLQWLYTTESLRRLRKKVASGEWRVQSVTISFTGGRWQASFSVRQFIAPALVARKSLGTLVGVDLGVKHLATLSVTVSGVNDEDGHVANPRHLEAELERLAKINRQLARCVKGSKNRGKILKRRQVLLGRITRTRDLHLHRLTTTLAGSFETVVLEDVNVVGMVTKSKHTATHGRSRSILDAGFYELRRQLTYKATDRGHRVVVVGQFYPSSKRCSHCGETKAKFALSDRVFECSTCGTRLDRDVNAARNIHREGLRLNGDESTVAGHQPETLNADSRNQKTTTPRRDGGDRYQSRTTQPFREPSVSA

SEQ ID NO: 50910 - protein, 383 aa, unknown; identical to SEQ ID NO: 50909
  TnpB Polypeptide

SEQ ID NO: 50911 - protein, 491 aa, unknown
  TnpB Polypeptide
LTSSLKELEKEETKNPHAQIYQRLRQLFPDLPTKYIDSAIYKAKQYPTDKPVVFGGKSLFEKLCKNHLSGKTREKLKKQWRELRQGTLISIGSKAEKGNRLMRFEDINGQLCLRITTGNREFIYAKVLREASNSKDKWITFMIMLLESWQTKNYFAYTVELKLREGEVYGSVSFELPMPKVRYTKEKGVIAIDTNASPIHLAIAEVSKTGELVSYQTISLHNLLGLSQNSKDHQEWILAHQLLDLAIEKGKAIAVENLKKLKRGMRGDGKAKLRKRLHQWNAKKFLQKLKRVAMLKGVEVIEVNPAYTSVIGMLKYAPQLNIDKDIAGAYVIGRRALGFKEDVPENYERLLKDKAYLEFALKRYEEREKELRELIEKESNEYKRNALESELKNVQNARKLLANLIQSLQSEPNSCEGANGRNPEQGRGNLASFVAWQVLKVALLFPILGKVLPRDLSPLKPVLVEGVWDRVRCSNGLVPFEAGGTVQMRDF

SEQ ID NO: 50912 - protein, 482 aa, unknown
  TnpB Polypeptide
MNPSIAKVVNSVRLILDSMESSNSRIVSLERMIVYHRIGRELRLQSNDCLWGDKMMDEVSRQIRLIYPEYHYINRGNLYLFRTFYDCFPDESFVSNYVVSIPWTTVKEILFARKEYDPQAMVMGTIKSGWSTSEFKKALSIGSFPRVQLNEGCFTNQELGYVLRTAKVHIRPTHSQKNLFERYIGASMKLYNEMMDWALRYYLEHGLVLFREELVPIMRVKKRDNTDYQDVPEVLLQNVCSRVYSAIKNFDNDIENGGAHYPKLRNRQNYRSVTYDQYGTVRLQGEKLWLGSVPRLVKMSKHQIIGDIRNCTITCESSGKWYAYIVYRRNKDLAGLTCKPSEVGIDLGLNNRAILSDGTVYEMPQFNELEGKCDKIRSKRDRSDDPKYRAKCNKILSKMQARLNNKRSYILHSQTRDIVDSHTLIAVEKLDVPDIISVQEYSSKRRKIQAASWARFITTLKYKSEETNYCRVVEVDSRYSSQ

SEQ ID NO: 50913 - protein, 471 aa, Moorea sp.
MYKTISVKATFSDEETAFWLFQCQQSNSLTNCAVYYSKHKHYSWLEQQSKAFTTYWQGDELRYGWKTYKCAVKYPQLCRELKSNPHYKAMAAQSAQQTLKTVAESITSYNQLVGLYYKGQVDRPKLLRYRKKGGLAAVTFPRQPLKYKNGLFYPPISKESKSELLCEIALEPPEFIDPDWVKEVTVRPYLGQLWIDWVIDDGKQPVEHNPNLDYSQAWSFDHGGDNWLTGVSTQGKSLIVDGRKLKSLNQAYCRLVAKYKTGKSDFYWDAKLDRVQRRRNNQIRDAINKAARFIINRCLNDRIGNLIVGWNERQKDASNMGRRGNQNFVTIPTKRLIERLKQLCSEYGIKLTITEESYTSKASFLDDDPLPKHGEKPSGWKPSGKRVKRGLYKTSKGHLINADCNGAANIARKVARQLGLDLVKLGRESLTVPHRYDIFKSLKKLYRTRSVREASPSAIAARENRCCVTTS

SEQ ID NO: 50914 - protein, 432 aa, Aquificae sp.
MTTTLDKKQKIKESLKKTKEKRKNQIAKVYQLKTSYTNLNKEQKQWFERIFLEAKWLYNYVVADIQNRLNPQIEKTKQVEIKTPNGTETREIKCLSSQMRQGILDRIKKNLSDLSKAKQKGIKVGKLKFKTDYRNIPLKQNNITFKVLKEKNRIKLQGLKKPIRILGLHQLPENCDIAKAELIKKPDGYYIYLTCYIDKNQIKQEKINKPIGIDFGIKHQLTLSNGIKINYSVEETKRIKKLQKKLSRQQKGSRNYQKTKQKFQKEHQKIYNRRKDIKNKILALLKRYEYVLIQDEQIKQWHSGLFGKQIQNTGIGGIISRLKQNLETLIPVDRYEATTKLCSQCENKKEDIKLSERTYKCNICGLVIDRDINSAINILKIGLQKEERTTIKNLPTDCGEVTPVERTATARILGSNPYIRISYASLKQEATY

SEQ ID NO: 50915 - protein, 388 aa, unknown
  TnpB Polypeptide
MIRSAPTSLKFANAGKRQQIERFLGEYRRVLKLFVEKFWSEEKLQKFGDSKCESWLSARAKQCAAKQAVGIVRAVRKKHDSRAFVIKRLKNEGDHAGAERLQKIQDSSVLTLPEIENANAELDSRFCKIEASDKSFDLWVSLSSLGEKIKLCVPVRKTKTFNKWLAAGKLRPSVRLNEGEIAFFFECEPPTSNGSTLGVDIGLKKAFSTSAGAQTQADNHGYTLQSVCEKLKRRKKGSKGFWRAQEHRKNFIRWSVNQLNLSGVKEVRLENIKNLRKGRATSALLSRWNYADIFEALTLKCEELGVQVTRVQNAYTSRRCYACGWTQKRNRKGETFKCRECGHSANADLNAAQNIALNLSIERRPNLDQFYWSTQEPIVPAAKKAGVE

SEQ ID NO: 50916 - protein, 270 aa, Limnoraphis sp.
LAKCSEFLQVRWSRTLPENCEPSTVTVRLDASGRWFVSLLVEDHTVKVLPQVEKTVGIDAGITSLIATSDGEKIVNPKHFKCLRYKLRQAQKALSRKVKGSNNREKARLQVARIHAAIADTRKDFLHKLTTRLVRENQTIAVENLAVKNMMKNHKLAQAIADASWSELVRQLEYKCQWYGRTLVKIDRWFPSSKRCGHCGHVVDKLPLDIREWDCPECGMHHDRDINAAKNILAAGLAVIVCGASVRPDGHKSKGQLRKTSNGKKQKPKS

SEQ ID NO: 50917 - protein, 373 aa, Domibacillus sp.
VITAKKVRLKPTPEQEVLLWKSAGTARFIYNWTLNRQEEQFKSGGKFISDNDLRKEVTVMKKTEDLKWIGDVSNNVAKQAVKDAYDAYKKFFKGLAEKPRFKSRRKSKASFYNDSIKLKIKDHSALIEKVGWIKTAEQLPIGVNYSNPRISHDGKYWYLSVGIEQEFKEESLSGEVIGIDLGIKDLAICSDGQVFKNINKTKEVRKIDKRLRRLQRSVSRKYEMNKEGSRFVKTSNTIKVEKQIRHLHRRLANIRNNHLHQSTHSIVKTKPCKVVMEDLNVTGMMKNRHLAKAIQKQKLYEFTRQMKYKCEKYGIEFMQVDRFFPSSKTCSSCGTIKKDLKLSDRTFTCTCGLKIDRDRNASLNLAKAGQLTV

SEQ ID NO: 50918 - protein, 391 aa, unknown
  TnpB Polypeptide
MSKRSYKYRFYPTPEQAHNLACTFGCCRFVYNWALRLRTTAYLEQRHRLYYNDLSAALTVLKKEEGTAWLKDVSSVPLQQSLRHLDTALENFFEKRTKYPTYKKKHNKQSAEYTVSAFTWNGACLKLAKQDEPLAIVWSRPLPKDTKPSSVTVSKDSTGRYFISILIEKAITPHPPLDDNKSIDLGLKSFVITSDGETIANPKYYVRDEKKLAKAQRRHAKKQKGSKNREKARRQVARVYARIADQRCDFQHKLSTRLIRENQVICLETLAVKNMLHNHKLAKAIQDVGWSEFTRQLEYKAEWYGRTVIKIERFYPSSKLCHVCGYVMQDMPLEVRVWTCPQCHAVHDRDINAAKNVLAAGLVASACGDHVRPAVAKAVVGGGRRSRKPSS

SEQ ID NO: 50919 - protein, 405 aa, unknown
  TnpB Polypeptide
MQLVEQHCIGRNDVRFDVIDGVAFTSKNLYNAANYELRQSYIHHGVYLSYETLYHFMKSQEAYKALPAKVAQQVLKLLDKNWKSYFAACLAWNQDKSKFLGHPKLPQYKDKQKGRNVLVFTIQAVSRKGLKKGLIQPSGVPIEIQTAHTNVNQVRIVPRGSYYVVEVVYEQEKQQADVDATLVASLDLGINNLVALTSNKVGFVPRLVNGRPIKSVNQFYNKRKAELQAIIKHDIHFTHRMKRMTNKRTRRIDHYLHTASRRIIGLLISEGIGTLVIGKNPLWKQETNMGKRNNQTFVQIPHTRFISMLTYKAELVGIQVIVGEESYTSKASFLDNDPIPMWGKTTQELVFSGKRVKRGLYKSKSGKKLNADVNGSYNILRKVAPDAMSGKGVEDCVVNPVRLHA

SEQ ID NO: 50920 - protein, 375 aa, unknown
  TnpB Polypeptide
MLSRDLLCDNKMISAYKFRLYPNKIQETMMYRHLWLSKNLWNELLAFSKIHYQNYGLFPTKRTLQLMSKNYGIYSQTQRSISHRVSDSIMRVFKLRKKGIECGFPRFKSIERMKSLYYPQATQGFNLETKLKVTPFGEISIKQHRNIKGDIKTLSLKREPTGKWYAIFTAERDAKVKKNRGKAVGIDLGLKTFAILSNGKIVDNPHHLREQEDKLAFLQRNLSMCKKGSENRKKARYKVALLYEKIANTRKDFLHKLSHSLVSRYSKIAMEQLASQKMSEGVLGKHINDAGWSMFANMIRYKAEEAGSEAVFVDPKYTTQECSKCGTRSKKELCDRRHECSSCGLSMDRDLNAARVILNRATVGHIGCNVCGVGI

SEQ ID NO: 50921 - protein, 476 aa, Escherichia sp.
MVKNLALVFGDKDQVNMHQENTVPSASDISFFHRPKYNLPCETTTAFTFRLRPGGQQEREMRRFAGACRFVFNRALALQNENHEAGNKYIPEREMRRFAGACRFVFNRALALQNENHEAGNKYIPYGKMASWLVEWKNATETQWLKDSPSQPLQQSLKDLERAYKNFFQKRAAFPRFKKRGQNDAFRYPQGVKLDQENSRIFLPKLGWMRYRNSRQVTGVVKNVTVSQSCGKWYISIQTESEVSTPVHPSASMVGLDAGVAKLATLSDGTVFEPVNSFQKNQKTLARLQRQLSRKVKFSNNWQKQKRKIQRLHSCIANIRRDYLHKVTTTVSKNHAMIVIEDLKVSNMSKSAAGTVSQPGRNVRAKSGLNRTILDQGWYEMRRQLEYKQLWRGGQVLAVPPAYTSQRCACCGHTAKENRLSQSQFRCQVCGYTANADVNGARNILAAGHAVLACGEMVQSGRPLKQEPTEMIQATA

SEQ ID NO: 50922 - protein, 377 aa, Bacillus sp.
MTMLLSRKCEISPTEEQKEMLERWLQYCRQTYNSSLLDKQRKYKENKQLYTRSDMQKQQVIDKKRYPFLKEVPSQPLQEVFLRLKKAYDGFLSGDTNYPKLKKYKNYNSLTSPQFGFKSNGKHRFAMSFADNGNLYNKQLGEIEIHLHRLIEGTIKQLILKRQSKRWYAIFSVERQDVPPSIDIENAIGIDVGLNQYAVLSNRTVFENPRFLLQKEKQLRKTQRNLSKKKKDSANYKKQVERIQILHEKVANQRKDFLHKLSYHLTQMYSVICIENLDIRKMVRNRKVSKSISDAGWGAFRKMLLYKCEKFGGLLVRVDPAYTSQDCSSCGNRVEKSLSIRTHICTKCGTVLDRDYNASLNILRKGLERLLMRTTEE

SEQ ID NO: 50923 - protein, 458 aa, Caldalkalibacillus sp.
VFWQVFIVKVVKTLRHKITSHSNIFDDTLQVYRQALTFVVEVMDREFPNLDGWNIKAMTQAMEKLIHATQKNPHPKYMDFDHLFYKFPSYFRRSAIAEAFGILKSHRSRYDKWLKEKEQAERAGRRFKKKPPKLQFCHRAFPVFYKGVMFQRTGDTTAKIKVFHQKDWVWITIRFKGQDLQKRGVVNWKENNPSLVKVGKKYFLHISYQKSVDLNNTPLSQQKICAVDLGLNQSAVCSIMDANGTVFARKFINQAKEKDRLYRMTNKLKKAQRQSGYIKAPRYWRRINGLQKQIVNHTAHEIVRFAQDHGADVIVFEYLDHMKMPKGFYGAKRLRFRLHYWRKQGIQQKVTEMAHCQGIRVARVNARNTSQLAFDGTGVVKRKGKKDVCQFSSGKIYHADLNATYNIGARYFLRELRKSTSEREWLSVEAKVPSLARRTQQTLASLISFHQAMCQIGA

SEQ ID NO: 50924 - protein, 307 aa, unknown
  TnpB Polypeptide
MQLVEQTIISKSDPRYRAIDEAAFKSKNLYNAANYVVRQAFIQSRVYLDNVKVYHLIKSHEAYKALPAKVSNQVLIQLHKAWVAFFEAMEAWRVCPEKFTGRPQLPTYKHKTDGRNLLVYEQGAISKRALKRGMIAPSGLGVEIPTKQTAVKQVRIVPRKGFYVFEVVYEQAVKQAEVNPAYYAGIDMGMNNLVALTSNKPKFPSVSINGRPVKSINQYYNKRKAELQKQLGHTGTTKRMERMTTKRNRRIDHYMHTASKRIVDLLVKEGIGTLVIGKNDLWSGKPAWARGPTSSLCKSRTLILSPC

SEQ ID NO: 50925 - protein, 464 aa, Halobacteriales sp.
MKRTNTFAVRPLSAKDGQLLRDLLDASAALWNETNYERLIRYDDEDGLENEDVWDAPTGRLEGQYKGVLGASTAQQMIRKNSEAWRAFFRLKDQYYDESNSSVTEHPEPPGFRGNKDDGRELKTVIRNTPYSVEWGDRSCLEILVGSELQDRYNHTGRLPLEIAGEPNWPDYDKQGRLDLWYDDIDGTFRASQPVTVADARATPLASEEAALDIGANNLVACTTSTGNQYLYEGRELFERFRETTAEIARLQSKLREGRYSSQRIRRLYRKRTRRRDHAREALCRDLIEHLYDEGVATVYIGGLTDVLETHWSVETNAKTHNFWAFKQFTERLTCTAEEYGISVEIRSEAWTSQECPQCGSTDRTTRYRDTLTCPCGFEGHADLVAFARRVRLARPREPSVLGTSKTFLERHIEQAVRPMARPVQLKWDDHTWSETPSSRESPNEQCTDPSTAANGGNVASGES

SEQ ID NO: 50926 - protein, 370 aa, Allobacillus sp.
MTKLNKAYKFRIYPTDEQSLMIRKTFGCVRFVYNKMLAERIKTYENLKDDKGAMKNVKHPTPAKYKKEYEWLKEVDSLALANAQLNLDKAYKAFFKGNAKFPRFKNKRHKQSYTTNVVNGNIQLLDGHIKLPKLKKVKMKQHREIPSEYKIKSCTLSMTASGKYYVSILTEYETEVKAKKIKNVVGLDFAMNGLFVDSEGEKANYPKFYRQMLDKLAKEQRKLSRKKKGSSNWNKQRIRVAKIQEKVANQRKNFLHHKSKELVTNFDAIVIEDLDMKGMSQTLKFGKSVTDNGWGMFASFLQYKLKEQGKQLIKIDKWFPSTKTCSNCGNAQPMPMNIRTYTCSCGLNLDRDYNSAINIKNEGLRLLAST

SEQ ID NO: 50927 - protein, 507 aa, Aphanothece sp.
MKLKVKNQLTVTRIAILGTQKLNKWKSDELDLIALRLGQLRSDLWNEFGSLKAWGVSKFEIDKQLRTRRVDGQKLLSARTAASKDKYQLPAKLWEATLYDVIDDIHLVQAACVEKVMKYLGQSFQPFQAKKGVLQLTLESREWLEHPKLCTLVRKFWYRGHTKVCNQIIIKAFDTKIDDKGVVWLRFGGLTKGKTLKLPTTLPTEVKCQLRLIKRNGRWEIHYTTNIQKASKKTEGKIIGCDRGYTEVYATSSNDGARFLGNNFGKIQTEETDYRTAKQVKRNKIRSVFNKAISQGNGAKADRIKRNNLGFSKWNNRETSFKGKIQTIVFTATHDLMTNAIKVAFEDLTEQIKSKKPMRKRMKRNVSSWCKGIVTNALKQVSTRTGCTVVSVNCAYTSQLDSRFATLTGSRNGDKFTGHDGVVMHSDTNAADNVLARMSDVEITRYMKHSDVKVILLKRTQKFQDSLLKTEAPSGKDKPQTLEPTRKLTSKVNQRANYKQLTLFDLG

SEQ ID NO: 50928 - protein, 397 aa, unknown
  TnpB Polypeptide
VQLRYNYRLYPTPGQQHALARAFGCARVVFNDALAARREARAVGLPYLTDAELSARLTAAKKTPERAWLGEVSAVVLQQALTDLNAAYRNFLASLAGKRKGPRMGPPRFRSRKDRRQAIRFTANARFAVTPGGKLRLPRIGDVSVRWSRPLPSEPSSVTVVRDAAGRYFASFAIQAGPDALPETDQVMGIDLGLAHFAVLSDGRKIASPQFLRRAEKKLMQAQRALSRKQTGSQNREKARIKVARAHARVTDARRDFHHQLSTTLIRDNQAVAVEDLAVKGLARTRMAKSVHDAGWSAFVRMLEYKARLYGRAFHRIGRFEPTSQTCSACGARDGPKPLHVRAWQCRKCGTWLDRDINAAVNVARAAGLAVSACGAQVRPGPVPAQRGEAGTLPGAA

SEQ ID NO: 50929 - protein, 363 aa, Methylobacterium sp.
MAFAAGYRYRFYPTPEQADLLRRTFGCVRTVYNRALHEREAAWRERRERISVKVMSRWLPVWKVEWPWLAEVSSVPIQQALRHLEAGYARFFQRLGRKPGFNSRRDPQSATFMKTAFCWRDGQLTLAFMREPLAIRWSRDLPSAPSSVTISLDAAGRWHVAFRVEVEPQPAPDPLRSALGIDLGLMTLAVSSDGALVANPRWLRKRQHRLRRAQRALARKKKGSNNREKGRRAVARLHARVADARRDHHHKLSTRWIRENQAIVVETLSVRGLARTRLACSLYDAAWGSLLAMLRYKAAWYGRGLVAIDRFYPSTRACSACGVVGPKRALHVRTWTCDACGVTHDRDANAAQNILAAGHAVRA

SEQ ID NO: 50930 - protein, 422 aa, Methylobacterium sp.
VLIRRAYKFRAYPDVATADALVRGIGCTRLVYNLALAQRQMFGRRGRRLDPSAELVALKRDFPFVKEDAFSQCLQQALRDLDAAFQAFFDGRARYPTPRRKFVDDAMRFPQPYTKAGVAIVLGRDSIRLPKFGWLSIHRHRKIKGRMRNVTVTREGERWHVVIQTEIEVRDPQLRVDLPAIGLDIGINRPIATSQGETIALPQMSRQENTKRANLARALSRRKKGSAGRQEAHQKLQRFDRHIADRRDDARHKATTRLTQSHGLLGIEDLDVRAMTASARGTAEAPGRNVAQKAGLNRRMLDVAPGEIRRQLTYKAGWTGRIVLAVRPAYTSQDCSACGVRGHVARGERQFACDACGARIDRDTNAGRNILVRAILEHGRRTGGDSPWIEPHQRPETGMPKAAMIAHIAMQAGRSPRVQAGE

SEQ ID NO: 50931 - protein, 491 aa, unknown
  TnpB Polypeptide
MSQRARIRGVKVAGNVYLGRRAHGTAENEHDEWATQPDRVMNWLCDGYRFRFNQHRSKRMKTVIDEAGERALVPLGRTATDISDKDARLAHPHLSALPMHVLQAPERLESKEWWAAVERRATNAGRSRKSGGMPGFQKRLRSDQAFTIWHNGGKNANLVRTGRKSGILTITGRNPSGKYGRASNLGWSVRIRVTLTQEILEYTSVRVNWTRGEVVFVSPPAGPENVVGGAGTIGVDVGIARAATDSTGAFWRPPDVKPLIAKRKTLERKMARQQRQAKTDGRDFRSSDRYQATRTKKSAIDTKMARIRDDFAHKTATEIIRTADAIRVEDLNLAGMSRKARGKGAAAKRGLNRGLANAALGNLLSKIEYKAKAAGVEHRLVNPRFTSQRCHECGHTARDNRKTQAAFVCVKCGHTANADHNAALNIRDATPLPEKPRKEHNPNKPVGSPPDGERQEGRPSDRAAARQRARSSHVSCDGSTRRTVNRSLVSR

SEQ ID NO: 50932 - protein, 619 aa, unknown
  TnpB Polypeptide
MASKTGQIVSTATCRVFFGIDESTGETLNARRVAERVGFMSDLLREASQRIVDEHWTEGDLVVLAGGVGPDGRKLPSHGEAAFRRLAWKAVLPEGVYAPERARRVAAENAARVLRSAAAFSTPLVAAICATWPAEGKRTSDEWDALWAAAPAGADKASVRGRTRQIAARLADGGAMPESIAEIEAAPRVHGQLLLAVADHQLVAFRPAEPDDEDQRRVLRVKLPMVPAPASKADWVWHELRATIPAYVPESAALSTPTLRLVGGVVAADVPFTVVAKPAAAKGHTVALGIDWGLNTLLTASVARLGEDGVVTAEPAPMFFDATGISVKVAALRRQREFLLGKVDRWEVLQAGRATRDAHLDALIARTQAESANVSRRQSNLNADLARKAARWAVDQAVAAGATAIYIEDLATLETRGLSRNLHRRLGGHVRGKVFDAMRHAAAKEGIAVVSVPARGTSAMCPGCLEPLKHVKASNNRTAGHKWSVCDKCGLSLDRDHSASRRIVSRGLAAQDSTRKARSGELTIKTPVDRPVAVSRDKHVVTPRRVNRRPQRLTHQAPPRRLAPVPASAGYRRTGRRSQGGNTQTSTQYTKSIRFMRGAGLAPHVRATPVLSRPSPLAA

SEQ ID NO: 50933 - protein, 384 aa, Deinococcus sp.
MGFQAMKYRLFPNATQVKALDTTLYLCRQLYNGALEERRGAYKKAGVSVSYYEQKRVLTEIKADLPEYKAVHSQVLQNVIERLDKSFKGFFRRIKSGAKAGYPRFKGRAHYDSFTYPQAGKTGAMPMEDTGKVYLSKIGNVRCKYHRPLEGQVKTATIKREGDKWYVVFACEVEVVALPATGDDIGIDLGTNPNFLITSDGEFVPAPRHFKKSERKIGLLQRAATKKQRGSRRHKALKRQVAAEHRRVVNRRRDFHHKAARTLVNRYDAVYHEDLNIIGLARSRTAKGVLDAGWASFINILSLKAVNAGRKVLGVDPTYTSQDCSQCGHRQKVKIGHAYLCVNCGIDMHRDVNAAMNILHRGRDAAFSESVPVTALVDLRSLAL

SEQ ID NO: 50934 - protein, 315 aa, unknown
  TnpB Polypeptide
LTRCIPIKHPRSSRIAGGILEIPLPSDLRGPQWTRLRLRIRGVRRWQGKEGRLELVWDPARRTWYAGQSVEVERRVPQRRPREFAAIDRGARAPVALAVEGSEEAWVFPKQGAVEGLPEPVQAHPQAPGPARHEGAALLQKSPEAVRQKTGRLLAVYRALARTVVRILRMAGVTDLLVGDITGIHEDMDFGRLNEVVHNFRSFRELLGTIPDACERARIRVRPKPEHGTSSHCALCGNPVARPTRSRVRCPAGHEFHADVSGALNLPYREPEVRARAGGRPRWRTCRWTGHRWVPTESARGSSNPPGTPHAAVAA

SEQ ID NO: 50935 - protein, 460 aa, Cyanobacteria sp.
MANWVNRLRSHYNWCLNDRIAQYNQQFIQGDYCDIRTEGEACPLTCFVSKNGASGEPWKDDKTKNPRRSAGEIQITALPQLKLARPWYAEIDSTVLQQNVRRLDIAYKNFFEGRGFPKFKNRSNFTSFTYSTGVKIKGSKIYLPKLGWMRLFNSRPIPDGFRINSVTVRQKQDGWYVSVRIEDKTVPDYAARHLTEVRTVIGCDLGIAKLVHLSDGYQFDNPKFGINKRTKRLLSVRQRRVNRKVKGSKNRKKASQKVGRLHKKIADKRQAYQWWVANTIVSRRVDAIALEDLNVSGMLRRCRVKKDEESGRFLANGQSRKRGLNRAISDAAWNELILKIEYLAAKRGKVAIKVNPKHSSTECRNCGHIDRTNRDGEKFICQNCGFFAHADISAAKNIRDRASEMVRADCAFPVDNATKRPKYRKEKSQCGLGETPSGASGVSPRPCGSLGRAWEPFWGY

SEQ ID NO: 50936 - protein, 394 aa, Chroococcidiopsis sp.
MTGQVLTVSCKLGVEEVLAQEIDATLQGFADCCNWINSIVDPKVTGRLAIHKETYHFCKQTFELPANLVCQAISRVSSNRKTAKLKNARLKKFKPTSAGYDARIFSFNEHGWTVKLTLKNGRYSFPLLIGNYQKHLLSGETPTSATLIKRQSGEYYIQIQVKPKPLEVTESEECLGVDLGRKSIAYTSEGENWDADAINKLRDHYANLRKTLQQKASKGTRSSRRRCRELLKRLSGKERRFQTWLNHTISYRIVKSAANNKKIVAIEDLTGIRDDLNQQPRNAYERRRTNSWAFYQLRVFLTYKCLKFGIKLITVPPAYTSVSCASCLRIGNRNGKSFSCKCGWKCDADHNASIVISRLGGVVNRPEGSGLFCLLDRDDSGLLKASSMPQAWAG

SEQ ID NO: 50937 - protein, 271 aa, unknown
  TnpB Polypeptide
VHYGDGNQGGKPGVAWDFNLLSLDGYSPETGWIRIDTSKLASIHIASFEKRRSVQRRASHSKKARRVLSKYSNRERNRAGKHQLEIARVIQSLCGSVGLEELKKQGMFTRSRIWNRRISRSDWRGIAKILEGRLWEVKVVELDPYGSSSYCSRCGWENRDLNGADVFVCGGCGLRLDRQLNAAINLYMRLTFGYTTNWEDGKKRVELRMEGASQKEWWDAVVLPSLVGGCVLTGAERSDPDELVRGLHDAVKPKLCYAYDRYANAYLRIPT

SEQ ID NO: 50938 - protein, 389 aa, unknown
  TnpB Polypeptide
VETIKFCVKAVISPKDKALQILQKELKNYKKMLIPKVQKAVRKVAKDRSINVYAQQKWMLDKKLTEYLKNLPFHPMTFHNQSVWLERTEKGYFLIHFKTKQEEKEAVCHLQVPSKYHSQIEKACGKDNPILGQVELIEDNKYGWINVHITLRLPKPEPYTPKGWVGVDVGWNKLAASILVTANPHLHFSNPTVHGKDFKTRIIQLKYLLKQYARKGRSWKKWDFRLKQTVKYAVGTVAKEITVKAEKHKAGVALENLTFQSQTKRWLIPRYKLMVAVKTLCERKGIPFKLVPPRNTSITCPKCGYIDAKNRNGERFNCKKCGYQADADITAAENIAAIAIGFMPVVKEVRLHAEASGDVATPLNTDETDDLIKGRCKPSKIENEVTVKG

SEQ ID NO: 50939 - protein, 404 aa, Escherichia sp.
VKRLQAFKFQLRPGGQQECEMRRFAGACRFVFNRALARQNENHEAGNKYIPYGKMASWLVEWKNATETQWLKDSPSQPLQQSLKDLERAYKNFFQNRAAFPRFKKRGQNDAFRYPQGVKLDQENSRIFLPKLGWMRYRNSRQVTGVVKNVTVSQSSGKWYISIQTESEVSTPVHPSASMVGLDAGVAKLATLSDGTVFEPVNSLQKNQKKLARLQRQLSRKVKFSNNWQKQKCKIQRLHSRIANIRRDYLHKVTTTVSKNHAMIVIEDLKVSNMSKSAAGTVSQPGRNVREKSGLNRSILGQGWYEMRRQLEYKQLWRGGQVLAVPPAYTSQRCACCGHTAKENRLSQSKFRCQVCGYTANADVNVNGARNILAAGHAVLACGEMVQSGRPLKQEPTEMIQATA

SEQ ID NO: 50940 - protein, 644 aa, unknown
  TnpB Polypeptide
MSKKLDEKYILNPDTNRCVLKTGTIGKRILNNKTLKTIVPRFPKPVVSKNCILILDRFGFWKVFHFSYLSSSLYRIKSELINAQPDKELLVQRIYITLLVGTLLLIKKNKPIILTYTSVHWRNLIDHLASSDAISASIKWYPMIIQLLTGTGKESKPYWNQSYVDLSQKLWLPTLIGESNYIDCHSSYDKSNAWFTIKKTEPNVRDSLLLTSIECKSMIESTSIKKEIPGSIQCTRKVRIYPNKSIIKQFKIWIAGTICIYNKIVYFQEHCSEEDKNMSKKDLKRKFVYESIMTREDMTELNQERKGCHKLKGIMIDKQPNPYVNEWTKKLPKVVREGVVEDYSDAKNAAFTNLNLGNIAKFRMKYRKYTNQPAFHISNQVQSISNGKYIKLFPRILKKANISNPHVLVNKGDRSFVEQYIGEKPKQICKIKYEYGQWFLIVPYNTEVKPIVKERGVCAIDPGVRTPLTLYDAERFVSFQYEKEIYTKLITKLHLLQSLRDKKQITSHSYKKARIRIRRRWTNLVKDMHYKCATYLVSNYSIIGIPPFETSKMVTGSLHKKTKLEMLDWCHFKFKTRLISKARQLSHILHPDESYTTQSCTKCGTLNDVGGAKIYECKKCQHKIGRDDGSSRSIKMCLILGRVV

SEQ ID NO: 50941 - protein, 428 aa, unknown
  TnpB Polypeptide
MARERRKKAAWGPGQILGFRVFKVHVDAANREKLKTLYNDVVNYILLGVVHELKGSKYLAYYADEWIKEWQNVLRMREEAGKRTLPKMPPLFLPVRFIMPDGEVRGNKSAPVIIDLRKNELRIPSYGVAISLRKSIVKALVEENKLEPRPDFVMQITRKGFLRIIAHRLQREDFREPPLRLICIDENSIHGFVVAIFDYDGKWRLTHFRIYHPPNHGYHEGVISLFQSFADKPAEETRNALAQRLDLAMTPERARELARKTKNKERKKNDEFIRQLIGKIRKAVRDARRQNIHVAVLVDPINPESLKGTPLQRTLLRTRRYIRNLCLYEGAEFRLLRSTGKQCPICGSWGVKITPRTYQCPRCGVTWDRDRNAVARLPILYFKLLYESYREKCDDYSALPLLLLHKYIGFLKRRVKFLSPFPSGAGEP

SEQ ID NO: 50942 - protein, 372 aa, unknown
  TnpB Polypeptide
MILTYKIRHEQDFSRELSLARKVAEYGLQHKTISSKDVRHIGLKSAISNQILKKYSKSKTVKNVNSVKLTIPNQSIKIQDDKIYIPCLKLNLDIYFPRGFQKINQIEIGKEFAYISVSYSEPPKINTIHTIGIDRNTTHHTIVASCLETGKILKLGKSCNHIHQKYKHMRKSLQKQGKLKKVKAIKNRESRIVRDINHKTSRALIEFARDNNACIVMEELKHIRQTAKTRRKQRYSLHSWSFYQQKSMIEYKAKKLGVSVHYVAPQYTSQRCSRCGHIEQANRNGNLFSCKKCGTVEDSGVNAGFNIAYLHKQGIPQFVIDSDMAKVALILPERQRYETSDLRTQRTSVVGVCQRERGMMKNEKETANQKKK

SEQ ID NO: 50943 - protein, 400 aa, unknown
  TnpB Polypeptide
MRDLHCAHARYVWNLAVEQQSWWRPGRGPVPGAAERQRQLAEARRAEPWLREGSSSVQQQALRDYDRALAAFFDQANPARKPGFRSKRRAQGFVIRDVRARRVSRHWGEVFVPKCGWVRFRWSRPLPANPGMARVTLDRAGRWHVSFPAAQPAVGRAPGPRPAVGIDRGVRTALVTSGGQHYRAPRISGRDAGRYLALQRKLARQEPGSKRRDKTRRKMAAVTARVSDRRRDWAEKISTRLVAEHGLIVLEKLAIPAMTRKPRPKPDPENDGAWLPNRARAKAGLNRGILASAWGTLGTRTKQKAESANVTVVLVEPRFTSQQCHACGHIAPENRKSQAVFACVACGHGDHADANAARNILARGLALIDNEAVPARNPGHGNKRPRKTARAGADTTRSAA

SEQ ID NO: 50944 - protein, 386 aa, Streptomyces sp.
VKVVTQVKLLPEADQAAALRSTLRTVNEAACWVSGVAFERGVPREYELRKHTYDELKARGLGAQAAQHVIKKTRDAYTTLKANIRAGNLGKPGSRRRVKAESKPLAFRSEAAQPYDDRCLSWQMDQQTVSIWTVAGRIKGVRFACSPDALKMLREHRKGESDLIERDGAFYLIATCDVPEKPLNDDPVGFVGVDLGIVNIATTSTGYRAAGRGLNRHRKRQINLRRKLQAKGTKAAKRLLKKRSRKEARHVKNVNHIVAKTIVTTAERTDAGIALEDLTGIRHRVRLRKDQRTSLHSWSFHQLAAFVEYKAKRAGVPLVYVDPAYTSRQCSQCGHIDRKNRVDQATFACRSCGTLMHADDNASHNLARKGETVWTAGRESRVPATP

SEQ ID NO: 50945 - protein, 328 aa, unknown
  TnpB Polypeptide
MYKKNKNSLRGQPRFPRFKKENVVQEIIFTKYAIRIEGNKIKLSLSKRMQEKYEVKSLNFLIPRKLRKLVDFSRVKMIKIKQEVKNIEINVIYEREEKKAIEGNTNIMSIDLGLNNIVGCTNKDNSNSILISGKEAKSKNKYINEKIRKLQQIEMKMRKTSKKYKNTKQIKKLYEYRKNYMNTYMHKVSKIVIEYAKVNKCGVIVIGDLKDIKQRMNYNKNFVQIPLYKLVQKIEYKAKLEGIKVEKISEKYTSGVSALDREDIIKENYNKRRRISRGIFVTNRGIKINADINGSLNILRKYIKKSSPNQEIAMDNGREQRPLKKRVA

SEQ ID NO: 50946 - protein, 368 aa, Psychrobacter sp.
MKTLKLRIKDKHIKQLNQLSGSVNLVWNYVNALSFEHLNRTGKFFSAYDLSEYTKGSGEYLGLHSQTLQAINEIHAKSRKQFKKAKLNWRTNRPDAKRKSLGWIPFKKSAIKYLHTRQTGKKALRSTIQLSLSKGQKLIIDVFDSYNLSLYQINTLEVVQDSRNRWYACITVKNHPKKTSGTDSVGIDLGLKEAATTSNGDKLTIKQTQKWAKKLAIAQRAKNKKRVRAIHAKIKNSRLDAIHKFTTQLVKDNALIVVGDVKSRSFTNKKTNLAKSTYDAGWFELKRQLEYKCKHAGCHFEIVNESYTTQTCSHCRKVSDSSPRGRAGLGIRGWICAECGTWHDRDINAAKNILAVGLDRLVVGIPSV

SEQ ID NO: 50947 - protein, 246 aa, unknown
  TnpB Polypeptide
MASCEWCASGVRVVCETPDEARRQEAVVGVDLGVNTLIAATDGATVILISGRAAKATVQYRNKQLARFQQALARKEQGSRRHKRLQRRTHQMLEKRKRRIRDLCHKATRQVAKAFPNATCYVGEPFTEAAQRIQAHPGAICQPGLYAQAHHSTRRQDGWRDCHQRSLFLADMSCMRGRSKQRRIYRCPSCGASGPRDAVGAVNILSLGVHGAMLPGRTLPQQVKYLRPWPRQPRSSSGGHPARRSA

SEQ ID NO: 50948 - protein, 280 aa, Okibacterium sp.
VPHLLVFVLEVPAGHLERSPTRRQREAGGIGIDQGVTQRLALSDGSFVANPRLAAAQAQRIRRMQRSMDRKRAAGAPGAEPSARYKRVRDRYAAAQRSLATARAGFLHRETARIATRYVFVAVEDLHVRNMTRTAKGTLVEPGARVRQKAGLNRAILDAGFGAAIRMLEYKTRRSGAGFVKVDAAYTSQTCHQCGYTSKESRESQARFRCVQCGHTANADTNAASNVLALARSQLASDAGRVETRAEGHLSGTASVSDESRRPAWPHRTGTTTRRRSSTH

SEQ ID NO: 50949 - protein, 505 aa, Oscillatoriales sp.
MFLLISNIGFMGYTNYTVGRLKKRKFPMQLTYKYRLKPTKAQLVTIATHLDLCRRQYNYRLSERFRWWESTRTPINACPLTASIVPVEEIYQNIPLTRVQTRDGRKKDESGNPVTRKGDVFSNIEGGYVQWQTIQLADLKNTKKLFPDYKALNSQVLQDVVNRVETSFSNFTTPDKNGNRRGKPKFKGFHYYKSLTYPQLDNLDIIKDEQNRICIDLAKIGQVPMVFHRPIPAGFKVKTGTVIREADGWYITLTLEDKTVPVTVAEIQPTDKNTLGIDLGITNYIYLSNGERVENPRFLRRSAEKLARLQAKLANRIKGSKPWQIIKSKIARVHQLVTRARLDFQFKTAHELFGKCDILVLEDLSIKNLTKRAKVKTDIDSDGNLVYLPNSQSAKSGLNKSMLDAAHGQFANVLKYVAWKLGKNVLFVDPKGTSQHCWNCLNKVPKELSERWHSCRCGESLDRDENSAKLIKKIGLIHESGGGTPSLKKAFVKKEKEACGLTVPS

SEQ ID NO: 50950 - protein, 378 aa, Fischerella sp.
MANLSLTLKLPFYRLNQVKALEFEKLTAVNTQVANKLLRVGIKERKKLTSAAFRHIEIGSMWINQTIRNTNAKIKVKHFKQMWLEVNNQGFEIAKSGDLYTVSFSLYRGRKGRIPLSVHQASHADVLEKLISGEAKLGSLKLCKSKKGIWYALIAVSMDVPDAGEIKGWIGVDRGQNNIAVAALPNSFGKFWKGGRVKSLRRQFQRTRKKLQQAKQIKEVKRLEQRERRIMTHINHVISKQLVQFASYFGMGLRFEDLSSCRQTMKQKKKTKSDAAKNLDTWAFYQLEFFTKYKAVRAGVPVESVSASYTSKSDHRNGVLGVRNGDWFRGYDGYRCNADWNASQNIGQWIGFSCPLDLQKTVSAMGAVDVEGGVNDSP

SEQ ID NO: 50951 - protein, 487 aa, unknown
  TnpB Polypeptide
MGKEEKILRTQSIRIKKSHNLYDYCDNMCFLSKNLYNTTNFYIRQVFSGIKKDYFKREENEKNIIDEINSTIPKINDVKISYTKKRKIKELNKAISKRKEIREANLFDLITTDNPYTSYNLLDGIFKINKQVDYMSLPSHSNQHIMKLAFSDWKSFYASLKEYKKNPSKYKGKPKPPKYAKNNGRKIAFFSNQTCKINDNYIRFPKTKEKLNIGKLCKTDSKLKQVRILPGPNYYTIEIVFELNIKPKAISETPKRIFGIDLGINNFATIVNNVGENPIIINGRAVKSINQYYNKKRAHYYSILRKGKLKNQGLFNSNRLNRIDLKRNDKVKDFLHKASFNIISKAMDLDIDTIIIGKNKDFKENIKLRKDIKLNFKSLPYAKFIEILKYKANEKGINVLETEESYTSKASFLDNDKIPCFDDKNREKEKPIFSGKRIKRGLYKSKEGILINADCNGAANIIRKVVPNAFSRGNRGVVSTPLVLSIA

SEQ ID NO: 50952 - protein, 404 aa, unknown
  TnpB Polypeptide
MKTHIAVRFRAYPTEEQARLIDRTIGCARFVYNLMLETRIAHYQTTWESCRPTPALYKDTYPFLREVDSLALCNAQLALEKAYRRFFDNGCKGFPRYKSKRHGKAAYTTNRIGGNIGLDDKARRLKLPKIGWLAVRQHKHIPNDWKLKSVTVEHRPSGRYTATILFERETQTPEQVKPVRIVGLDYASHGLYVSSDGKQAEYPGYYRKTQDKLAREQHRLSRMVEGSANWYRQKQRVGRLSEKTADQRRDWQHKKANGIAAAYDMVAVETLNLKGITSKSKPKPDPTIPDIICIMVARLRADWRKARWTTPTACSAPCWKSSSPAKANGSVRWTGGSRRANCATTAATGIADQGLGRQGMDVPAVRGHARPDVNADPEHPGRSQKNRRATRLVKQRANHRACRG

SEQ ID NO: 50953 - protein, 454 aa, unknown
  TnpB Polypeptide
VATKRQTFRLYLNKEQEDKLFGARRVHAYVYNACIAHRRYEWRANKKSVSYFEQQNCLPLFKKEWVEFAYIHSQAMQATVKRVDLAYNSFFSGLRGLPKFKSIRNYSGWTYPGLSGWKVESSGKHGRLTLNDLGITLKMRGQAKDWGIPTTLTIVYKPSKNQWFASITVEVPTVESKFGSQSGLQYESIVAFDLGTETALTFYNGKEFEEISNPRFTQKIEQKIKKASKALRRKRAPNRTKKVKASRRWKKARKQVSKLQRKVSNHRKDWQHKVTSEIASRYDIGVTEHLNTKGMTRKAKKGSKRKKQKAGLNKSILSVGFGSLNKMIAYKIEHKGGLVIALPTKQLKPSQRCPNCGTPHKKWAELSNRYHICNNCTFEIPRDRGSVMVMYNVATNKQPGLGTSLLDCGCLSSTDSSRKPKHTGSMKQLGQKKRQKLDSQMDGGLETPSACAVG

SEQ ID NO: 50954 - protein, 362 aa, Dolichospermum sp.
  misc_feature (333)..(356): Xaa can be any naturally occurring amino acid
MIVFEFKAKGTKQQYQKIAQAIRITQFIRNKCLRFWMDNQNVKYYDLNKYTAVLANEFDFADKLNSMARQSAAERTAFAIKRFFDNCKAKVPGKKGYPRFQKNNRSVEYKTSGWKLLNDRKHITFKDKCGIGQLKLIGTWDLHFYQIKQIKRVRIVKRSDGYYIQFCVDAERNIDINATGKTVGLDVGLNSFYTDSQGDKVDNLRYLRKSEKSLKRLHKKVSRKNKGSNNRKKAINRLGRKHLQVSRQRKDFAIKTALCVVKSNDLVAFEKLQVKNMVKNSKLAKSISDAGCSLFTQWLEYFGKVYGRVVVSVAPQYTSQNCSNCGEIVRKSXXXXXXXXXXXXXXXXXXXXXXXXMLQLTF

SEQ ID NO: 50955 - protein, 1264 aa, Streptomyces sp.
VVSAGGPRHRRGGDRHPRRARLRHHPAAVSGALRRAGRRRLARRAGRAAPLLRAAARRVGRGGAAAPGLAPALRRARRRPGVHRRQRRGTAAGAARAAARAGADRRHRQAAPPPPRRGPPGGPGRPARAGGRGTGHRRPRRRPTRRPYGPRVRRRRRRPGRRGPAVLRRPGGRPAGPGPLGQGGLGRPGGAVRRPGARRRAGPRRPRTAAAGVPAAAVGVGDARRGAAAGRPAGHSRGRRAAAAAVGGGGPDPAAHRAAAAARRAVDAEGGERPRRRGRRHRAAGAGVRADRGGGEVHLAGAGVPQADPPRPRRGAVHHVEVPQHGRGRGAAEVRAVRGQRARRQPDLQDPPRPAGHPRRRGAAPQLTGRTAAALQRAARRDVPRGPAPPAAGGGRPLQRHRAAPAGGQARDDGPVAGQRPLGPDLGRDDRAGPALRRELVLRPRHGRDGPHPARGRRRPGGVLSHACRLRRASVQGAQPATRAAASPRPGRPARAASRGGRAARGGAAAEGGEPEGPSPSGPAPALVHRRDALPQGDLRAPAQLRDARDVQELAGRPVRAVGVEGDTAPVADDVPYGLGQFPDRQVLAAADVHGTVRVVAAQQREARRRQVVHVQELPAGRSRAPEHDLLRTRLARLVEAADEGGQDVAGLQVEVVAGAVEVRRHRRDVRRAVLPAVRLHLLDAGDLRQRVRLVRRLQRAGQQRVLADRLLGELGVDARGAEEQQPGDVRRVAAGDDAQLDAQVVLQELHREAAVRHDPADLGRRQHHRVGPHGRQPGRRPLGVAQIQLRAGAGQHLVPVGGQPPGDGGADQPAVPRDEDPRTGRQQLSRSCHRTCGAVAPRREPGTEAPSPFVAGVVVGDGCYVQRMPRYRLRPTGEQERALTSHCAHARFVWNLAVEQHSWWTPRRGSAPGYVAQAKQLTEARAECPWLRAGSQMVQQQALRDFAQAMANFFAGTHGRPTWRKAGRHEGFRIVAVRPGHIRRLSRRTAEVWVPKAAWVRFRLSRPVPAGVKSYRVTQDRAERWHLAFAAVPDPIPAPHNGALVGVDRGVAVSAALSTGELLTAPGLGPFEARRSRKLQRRLARCRPGSQGRRRVKAALGRLRAREVDRRKDWVEKTSTDLARRFDVIGMEALSIRHMTASARGSAARPGRGVKAKAGLNRSILAAGWGALARRLEHKAPGRVVTVDPAYTSQRCSACGTVDRKARESQAAFRCRACGQASNADVNAAKNIRTAAGRAVAAREGPRVAGPVHREPQSDPLSA

SEQ ID NO: 50956 - protein, 452 aa, unknown
  TnpB Polypeptide
MIQKVERHVIRKNNANWQACHRLCSLSRKLGNCAVYLLRHRVFEKAPVLTRKELDTELRHQYGSDYRAMPSAASAQRQGQVIAKQFKGFAKAAVEYSKHPEKFQGKPRLPGYKRNYRTFYVGRNGYQIRDYRLTITGGKDIGFSAIRIVCCKHQEFNAKAEDAVTGDLRIIPMGNTFIVELTYRVDKDECKNSKSVSLNPNEALCCDLGIDNFATFVPTKPGVKPFLVKGKILKSINQLYNKQVAELKSKKNYEHIRIKGVKRYWQIQDLMHKASRLAVNFCLAHDLGRIVIGTNRNWKQRVNLGKRNNQNFVMLPHNKFIEMVRYKAEEFGIQVTVREESYTSKASSMDFDEIPDFDPKERKPAIFFSGKRLKRGLYQSSKRHLINADINGAANIGRKELGDEWLKKLLELDGGVFVDTPAVVRNLHECVGVRQLLKMEARSHETVHVSAW

SEQ ID NO: 50957 - protein, 360 aa, unknown
  TnpB Polypeptide
LQREVQICVVGKVFRPNKSKVLALNKTLGEYFKLVKWYLGCNSKSKKFLHEKCYEDAKRLFNLNTALIQTARDKAVEILKSFEENRKESSILKLKRISIRFDNRCYSFSKTDNALTPYWLTLSLNREERISLPIVFGGKQRQRIEEALKGEWKFAAVEMVKRSGEWYAHFILKKFVEVPDEPETVIAIDRGERNLAVAVAISKKNPNKPMKGNFWKGAEIKRTRGKYAHIRRKMQRRKLMKDVKKLKNKEKRIVEQQLHTIANEIIAYAKQFPKPVIVMENLNGIRDNFKKSKKLNKRFHSLPFRKLQEIVEYKALLEGIEVRHLPKKEVRNTSKTCHRCGHVARMSVGRIYKCPICGME

SEQ ID NO: 50958 - protein, 210 aa, Leptolyngbyaceae sp.
MAPTNFLPLLFKVQRRIQRPKKDSRPTEGFNAHRRIQRPKKDSTPTEGGRSMLLRVHQQISDSCKDFHCKQAHFLCDQGGMVFVEDLDFRIMAKGMLDKHTLDAGFGQFLNQILPWVCWKRSVHFGKVNPNGTSQTCPDCGALVKKDLSVRIHHCLECGSTKPRDIASGEVIRNRGLSAVGHTVDQAVCGGVLAGAAMSSQVPVKQKPKS

SEQ ID NO: 50959 - protein, 414 aa, unknown
  TnpB Polypeptide
MDLTKKVRLYPNKVMSTILDNLCDYRRYCWNQALDVWMSLYQQRQEHLPADLRLRVKQAIKDKSITFTDDESALLMQYPAPTYYTVRKMLTADKQDWQHQLSSRALYLAVDDLAKAWKYFFNNKDNTSSRAGKPTFRQKKNPKQGFKTDRIRIQNGKLVLDKPHQYKGDWYGISFKGYSLPDGHIKYCSITKINNKYYASLVVETPIEPLVKTGQHTAVDANVNHFDYTDGQYSINPKRLNALYEQIAFYQKRLARKRKVNGKKASDSKSYTVMRAKLQALYEKATAIQYDLLHKFTTYLYRTYDIIVIEDLDVKSMQMSKKAKNLHRSLFGKFRLQMEYKAIKFDKQLILADRYYASTQMCSQCGHIKKGDDKITLMGNAKHGTAHNEYICYNCGYKADRDTNAVNNLLALIK

SEQ ID NO: 50960 - protein, 482 aa, unknown
  TnpB Polypeptide
LTLKLNTSPEQDRWLAHAFWCGQQIYNVLVRHCRKQLRKLILDPEHRELLATRRKDNLSKKDKNRINQELAAIRRGYGLSEYQLHAYVSVQQHRYQKYIDSMTAQKIASSVWRSVEKYLFDNGKCIHFRKYDDFDSLEGKSNTSGMRFKDGRLHWRRQVIQPQIRTDYDREALRSRVKYCRIRRKPVGAKYHYYLQLVLEGKSPVKHPAGHGTAGLDIGTSTAAVVTKDSCRLTVLGSDAKDRSAQIRRIQRAMDRSSRATNPDNFLPDGTVCNGARKWIRSKHYKKLQFCKKSLERRYADAVNTCHHRLSNEIASKTDTVYVEKMSFNGLARKSKSATKKADGRFRSRKRFGKSIGNHAPAVFLNILGNRLASGGGQLIKIDTISFRASQYNHVTDDYVRKKLSCRGSFVGGHYVQRDLYSTFLLRNSNDTGTAADRQKCTDSFPMFLITHDACMDALLAENKKYPSSFGLRSYKYHKCNC

SEQ ID NO: 50961 - protein, 484 aa, unknown
  TnpB Polypeptide
MAKSNTSSYVVTYELAFDNDNLSSVLDKLEKIAKAIYNDCLNECLKRYHKLIHDKEYQLLVKELKNANNKKELNKQLNDIAISYGYSEYRMHEYVKKPYEYFNKKLGSQECQKIATRAFKAIEKLRYHQADKVAFKNKYDSFSIEGKSATSKLHYCDDISISYGNYKFKLKIKRNDIYAQTALLDEVKYVRIYPQHIRNKKRWFVQLIFKGTPPSKNRQYGDNFKVQGIDIGTSTIAIVSNEKVYLKELAPNCKENEHKIKVYQRKLNRSRRATNPNNYNEDGTIAKGKHKWYKSKNYLKTQAKLKDEYRKLSVKRKQAHEILANQIIAESLDIRVEEMNFKGLQKRSKKTTVDKNGKINSKKRYGKTIKNRAPSMFLSILDRKLKYYNLELKKINTYKVKASQYNPIDRTYKKKQLKDRLIELNEGIIVQRDLLSAYIIAHTNDDLETIDEVSCYDDFNTFKKLQDNEIQRLKDNKQLSWYIH

SEQ ID NO: 50962 - protein, 225 aa, Nostocaceae sp.
MYGCQQILLNTDKDTKAIIEYLCTESNNLYNCATYYARQIWFKTGSIVSGFDLTAEMKSNRHFNAGYASSMQQTCINVGEAFKSFKKLVVEAKKGKLNQKPKPPNYRKTGGLFTVTYPKRWLKLENSVIRFPLGNQVKAWFGLSEFFLPMPSNLDWASIKEIRILPRNRCFYAEFVYEQSVNTVSLDKNKVLGIDHGINNWLTCVSNVGTSFIIDGLHLKSLNQW

SEQ ID NO: 50963 - protein, 397 aa, unknown
  TnpB Polypeptide
VGKYEMMKSIKVQLSPNNKQLTKLFQYAGCSRFAYNWTIAREKENHAKGNRFLQDGELRKEFTRLKNQENYKWLNNISNNVTKQAIKDACNSYKGFFKGRSKYPKFKSKKHSKPSFYQDNVKIKFTNTHVKVEGFAVSKKRNKQKLNWIKLCEKGRIPTNCKYMNPRFTFDGLHWWLTVSVEVNDDTSIPINEGVGIDLGLKDLAICSDGNTFKNINKTRKVKKIEKQKRRLQRSVSRKYNMNKRGVRYKKTSNIIKREKELLKVIKRLTNIRRNHLHQITSEIVKRKPSFICIEDLNVSGMMKNKHLSKAVQQQGFYEFRRQIEYKSAWNNIPVIIADRFFPSSKLCSCCGTIKKDLKLSDRIYRCDCGNIIDRDYQASLNLKKYGENVLKQKSIE

SEQ ID NO: 50964 - protein, 431 aa, Kamptonema sp.
MYAVQKDVWHLTGFDKTIVEQLLRWSNNLFNVGTYESRQRYFENKSAVKYLDLYRIAKTNENYGLLYSQVAQQSIKSVAESFNSFRALEKLAYKGELNQKPRLPKYRTKGGMYQISYPGQALKVVGNKVRLPLGNKGKEHFGTDALWVPLPERIKDCQIKELRLIPRNGEVWVEYIHKSFTKQAPSCSLEVTGILGIDRGINNWLTCVSSNGKPFIIDGRKLKSWNQWFNKEKARIESEHAKYKMPKGFSSKRLQQLSETRTRRMRDAVNKAVRTIVDYCENHQINVMIFGWNKGQKQEVNMGGKTNQNFVQIPTSKVKERLAQECNLRGWRFVDQDESYTSKASFLDRDFLPVKVGEKPNNWQPSGKRIKRGLYRSSAGWLINADTNGAANIIRKAKVATDSFVERVGSGLLTNPLRIKLWADSSPKVCP

SEQ ID NO: 50965 - protein, 392 aa, unknown
  TnpB Polypeptide
VLKDVRLTVVGKVFKPNRLKVLALNRTLSKYFRLVRWYLRFNSKSKSILHENCYEEAKRLFNLNTALIQTARDKAVEVLKSFEKNKKDNSVLELKRISIRFDKRCYSFSKTTNVLTPYWLTLSLNRGEKVSLPIIFGERQKQRIEEAFRGEWQFSTVEMVKRNGEWYAHFVLTKTVELPDEPETIIAIDRGEHNLAVAVAISKGNPDKPVKGQFWRGEEIKRIRGLYSHIRRKLQKKKLLKKVKELGGREKRKVNQQLHVIANQIIEYAKQFPKPVIVMEDLNGIRSSFKKPKRLNRRFHSLPFRKLQTIIEYKANLEGIKVRYLTKKETKNTSKTCHRCGHVAQVRGRIFKCPKCNMEYDRDLNACVNIARRVMSSAGWGSVSPPNQQMVG

SEQ ID NO: 50966 - protein, 394 aa, unknown
  TnpB Polypeptide
METWSELLRRHWNLALAQRLDWLNRTRCQIDRCSIVSEPIGSVPERVDYYSQQSALKETKKLFPEYASIYSEVQQMNLQRLDKAWKRWLVPDKDGKRGGRPKFKKRGEQPSFSFSRVNHPKAACFLEGNTLRIPKIGAIPVVVHRPIPEGFVLKTATISFKADGFYVSISAEDATVPEPKPLDQVKSVVGIDLGLKVFLATSTGEFVPVPQVYRKALHHLARQQRALSRKKDGSNNRIKAKTRIAKIHQRIARQREMFHYQVAHRLCRNYDLIAIENLNIRGLARTRLAKSIYDVSWGKFITILESVVVKYGVHLVKVNPHNTSQNCSGCGTKVPKTLSVRLHECPKCNLEMDRDENAAINILHKALNAVGLTVSACEALDSSQAMKQELLFWG

SEQ ID NO: 50967 - protein, 430 aa, unknown
  TnpB Polypeptide
MKLTFVYPVYPTKTQEQILLAWFDHLCELQNSARHDRLVAYETEGVFVSLSDQQTLLTAAREKYDDFRAVPQDFQNHTLRRTDKAFTAFRKRCKNGDAKKGYPRHKTRVRSLTWSLRKYTKVVRKKTKDSDKQTIRVRENPIIETHFRHNRLKVPKLGKVKIRMHRPLQGDPKEVTIVKKASGWYAHISCEIPDTPKVEPTHAIAIDVGTTDYLTTSEGEKEDNPRWYRQAEGLLRKHSKDLSRKKKRSHRWQQQKHKLSLHHERTTNKRKDFIGKLVYKLYHHQKNNVLVAEDLGVSNMVKNKHLSKSISDASWGIFFKWCADIAERDGLHFHQVDPKNTSQTCSCCGKKSPKKLSLAIRTFDCSFCGTSLDRDHNAAINILLRAACAHRGERWVTDLYEARNTNKARDAGFEDAEQLLFNDLFTSPSL

SEQ ID NO: 50968 - protein, 364 aa, unknown
  TnpB Polypeptide
MQLKNYQYRLQPSKKQVTLLNRQLALCQSLYNKLLEQRIQVYEDEKKSLTAFDQCKFIAILKRTDRKELRDVHSQVLQNTAMRLDLAFKSFFRRMKSGDKAGFPRFKSKDRYDSITFPQCPTGCFIKDGKTVIGKVGHIKMKLHRPVGGRIKTATIRRTPTGKWFVTFCCEIESKQVTHPSKESVAFDLGLKTFASFSDGSKIENPRFYRREEKDLARAQRKGMKKVVARIHERIQNKRKDFCIKAARSIVKKYSTIYMEDLKVNRMVHNHCLAKSIHDASWGIFTQWLLFKAEEAGTRVVKVNPAYTSQDCSSCGHRERKTLGEREHKCQCCGFTCDRDLNASLNIYRLGIQSDLVRGKSPLL

SEQ ID NO: 50969 - protein, 365 aa, Lyngbya sp.
MQRAFKTKLKLNNKQKTLMAQHAGYSRWIWNWALRMWNSAYKEGLKLSTNKLKKFYTNHIKPDYPWQSTLSSRVYQFAFLHLGEAFKRFFKGTAQHPKFKKKGRNDRFTIDNCGKVMVFEGRRLKLPFIGWVRTYEALPEIQTKRITISRVADSWYLSVAYEFDPEPTVKTRDYLGVDVGVKVLATCSDGTVFPNPRAYKKAQKKIALLQRQLARKEKGSKNRDKARLKLAKTYQRVTNIRKDAIDKLTSWLSKNHAVIGLEDLNVSGMLKNHKLAGAIADSAFYEIRRQLEYKSEWYGCELVFADRFFPSSKTCSSCGNNQEMPLTQRVFSCFACGAVKDRDYNASVNLQHLAEGFLVIACVSE

SEQ ID NO: 50970 - protein, 509 aa, Vulcanisaeta sp.
MLCRAVAVELEVTRELNRLLCSVESAYLSIVREVVEYAVKNNVTSANQLHGLFYHRYRSEYPSLNSSLVQQAIRQASEIAKSFIERRRKGLAYKPYPEVRNVSLRFVETTWSYEEFVKSVAPVRLAISPINTGKRGRGGRRFEAWLRPHKRFWLYWWRVLNGEAELTSTLMIKRKLNKWYAIFVFKLKLREEEPRSIIAFDINENTVAVGRIDIIATINKTADWNRRYLMPELYMIRTDFGRLAKRYERVRSAIIEKLKPRFALPNGKYVNITDTREFRKRVKHLRESGRKVGRVRHVANELTRIPAIIITEELGDNPQESMIDGIKKDELRHRIKQTPFKSIEKTIEDKALERGSKLVRVSSYRNSRVCPIHFTRLEETNDWHILYCSKGHYVDRDYTSVMNMLWKTTPKTWIKAFWWDLSKGMDWREYEGESNPIIPYEIVKYMHAILKEFKASLEQSPAVLARGKPMNPAGGADEGRARTPFHLEGNPRPSRWEGGQEPLRGELKP

SEQ ID NO: 50971 - protein, 475 aa, unknown
  TnpB Polypeptide
MSQQVRILKVMVTGASPYLGEMRLADGSTVSEYSSDPDRVMRWLCDGWRGRFNQYRSRRMKYAKDGETLVPLGDRVDDCTDAQARIEYSWLAAIPQLVLQAPGRIENTEWWGAVKRRKTNLKHHRKAGAMPRFKRKSHGMMFTCWHNGGRNANLTVFNRTHGEVIITGMNPKEHREHGARFQIRIRVKLSEPIREYTSVGVDWAGKTLTFINAPLPVERTVTGAMTGIDRGVTHTLALSDGEFINLPKGRLERIDREIRRRQKAQARRIRESGKSAKEYVMQPSKRYVAERERIHALYDKAHRIIDDWQHKVTTQLVRDYDVIAVEALKVASMTRKAKPKKDPAEHGHYLPNGQSRKRGLNRSMRGMALSSLAEKLAYKTSLAGNLYVEVNPAYTSQQCNRCGHTAAENRESQAVFACTKCGHTDNADTNAARNILAKAFRGGDTADTQAHGIRRLARAYEPAAPVTPASTRHGE

SEQ ID NO: 50972 - protein, 462 aa, unknown
  TnpB Polypeptide
MGQATRTTKLFLDLGKRDQGGANIDKRAALDATALVLNQARAFYIDFFLAHADKLAERVPYYSEKHLEMRERAISANELLTWAEACTVETEAHPHPWEGWNFSARFPEVPFIYRRSVIKDAIGKVRSYLSNRANWEKSGKKKGKPGLPGATDHPTLYQGTCSLQLESAEVKQRFVQLKVYDGKTWRWVNYPVACSRYFEQRHRDESWEQQSPTLVLRAQSAELHFPQSKKIEAKQVKDSKLDPELVTVAIDLNVRNLAVITVRQHGSILQTVFVSDHGLDQHRYRHLRRIAKKQWQSGQPVKGEHSNRQLWRHIDHMNEDAAHQVARSIANVCARYPGCVLLFERLRKIKAKAGSKSRRMNRKRANQLRGKINRYAREKAFAQGTVTVEVNPHGTSQYCSRCGQLGERFSYQHGQRVSVKWGKLFWCPHCRYEVHADWNGSVNVHHSFFREFHWQPRFKRSG

SEQ ID NO: 50973 - protein, 568 aa, Lactobacillus sp.
MTRKKRRTQTKTVRAYTVKLNVDELKELDELFTAYGKCRDFLYSQLCGINHIIDVANWYGPRDKIREHDGEIKKARKAVKDWKKAYKKNKAQGSKSPNARTVRLSKQKLLSEQFGIQGRHVTEAVKDVCMNLNSMWSNLGLKLKRMVQANDALSNAERQYLNYVFTSPYYWQLILQRRENEAQPNEEMSQYPALRAALSEEQLRHCFGYIRRLTRKHKPYPHSTTPRCMLYDEVMWKVVEKGGSSYLEIMTAKCRKKKQFKLTGPYCYASKKKRGDIQLVLDRDKKRLEVHRAIKAVAHEIHKPRKKLGMDKGLATLISCSSGQEYGADFSKLVGAEVERINDRNTNRNEYIQSEKELREEKFALQEKLAKDYSAKTKKRIRHRIGSLERQIARLEKHHLGSQLYHRQHERKQRNMEQVMNTSIRQMLVAEDPDVLVKEDLTFTKEKLPKVSNRYEAKVRRKLSSWTKGRLDKRIEYLCGSLGIQTIDVNPAYTSQFCPRCGAHFSERKGAHHETAVCPNCGEMNANTAAAVNILQRADDKEITKYMPYKNVKLILEDRYVNKQLVMA

SEQ ID NO: 50974 - protein, 647 aa, Micromonospora sp.
MARTACARAVLRVGVDEATGEVLSQAVLVQRVGWCADLVAGMVAALIGEHWNRVDVEVLAAGVDAGGRRLPSNAWMALRRLGWTVTAPQGVRVNDRVVRMAQEQAGRVLRSAAWRAEVTAGVLSTWPADPRKRTPAEWEQVRASIPGGQHLPSNIIKGRTRQVAAFGKANGRLPVDVFELEGVPRIPRMLLLAACDRQQATIERSDTDPARALLRLQLPTRPEPRGYRDWTWVECPTRLPSTVPASAVLHLPTLRVTDGTVRADMAYTHVVPKARAAGHTVAVGVDWGLNTLLSAGALRLQADGRITAFGAGGQFRAAGVLAKQHRLRRLSERLHAKADQYARLLGGRPDEQLKVKHEALTGEIRHVSDRRSNLNDALAWAAARWTVDQAIATRASVIYLEDLRSMEAKGMGHSLNTRLSQQVRGKISDRMRHLAAEHGIAVVAVPARNTSKHCPQCLTPLQHRKAPDRPTTPGWKWASCPNTGCGWQGDRDHGAWRRIAARGLTHQAKTVTDKTNGAMVIRSVVDELEASAVVTPTTTGSRWDRSKTGPTRHKPPRPAPRRRRAPSPTRPKSPAGQRPEGHAPTDRPRLPRAAHRHQGVNTISTPTTTGHRPRGAALGAGFHLHAHASPPRWETIPETHSDSGSLS

SEQ ID NO: 50975 - protein, 447 aa, Helicobacter sp.
MMLVTRILYAKNINKGKLKALNEQAQILGKLRSQIWQEYGALKCLNTSDRKIRDLWVKEKREFKVLANAWKETLRDSFNNIKLYLEAAKTSIKKDIFKHYKTKEEQKEAFIQLKKDEWLKDHFLHRKMRKAFKHGKNSVFNQIIVCSDDYKVFELNNQCWISIPSLIKNKRIKIPLNTTMEYKPSGTLRLIIKNKVVEVHSSYEKTDNRACGNEIIGIDKGYSEVFVTSTNEFLGKDLGKILTQYSDKLKVKYQRRNKLLALMKKAQKNNQLEKANRIFKNNLGKIKQNKEDHKVKQRLKTLIYNACHQVVDKAKVVVCEDLKENFSKNTSYGKNTNRRLNSWVKGLIADSLKNVIACRGSALHLVNPAYTSQCDSFCNNLLLGRRKSNTFYLFNGGTIQADYNAARNILARYFDKEIKRNTPFNAVKEILLKRTDSYRLTTVQARL

SEQ ID NO: 50976 - protein, 482 aa, unknown
  TnpB Polypeptide
LITIKLKYKTDEESSARIQEYRRQYSSVFKVYFNRLSEGMSSKEILHLELNNVELINSGFKGSALQEARGLLITYQAKKGPLKRKNESEKHYQKRLKEFEHSKNHLIFSGRKSFLDRIKGNISREELKERRLQKLCSIGQCASRGNGLFSVQEDFNILFKPTRKEHIILEVLDSQKKRYSRELKAIYIKSFLEKKYPVTYHLDSEFVYLTFDETILKNENKELEFIPNRIMALDLNPNYIGWSIVDWKNSSEFKVVKSGIYNFKSLNDKEKELKNLKLSPEHPKRKYLNNKRRTEVFEVSKNLINKALYYKCQIFSVEDLNIQTKDSGLGKNFNKLVNNQWIRTDLVSNLEKRCNIFGIKFIKSKPEYSSFIGNFLYRSLELPDMILASIEIGRRAFEFYNQYITKKFEIRKNIVRPSLVDFRTLYLKSLEEFELQPVYKDLIELYYFFKKSKLLYRLSLDKFSLEFSRCFSIKSQLSSILI

SEQ ID NO: 50977 - protein, 174 aa, unknown
  TnpB Polypeptide
LSNGEKIENPKYLKKSIEKLKKLQKQQSRKTKGGRNWIKNRIKIARLHEKIANQRMDFINKLSTRIITEYDIICIEDLKVENMLKNHNLAQSISDVSWSKFTTQLEYKAEWYGKVIKKVDTFYASSQICHCCGYKNEGTKDLKVREWTCPKCHSNHDRDVNASINILMQGILAN

SEQ ID NO: 50978 - protein, 475 aa, unknown
  TnpB Polypeptide
METYKAYKFRLYPTYKQREFFNRTIGGGRLVYNWALAMRKEAYEKDGTTLSIRKDIRPLLSSKLKIEKPFLKDVDSTGLNSEFENLDVAYKKFFKEGGGFPKFKHRESIGSYTTRLQKGAIHQDEDYVILPKCGAVKCVFHRKIDGIVKETPYVTISRTTTGEFYISILALCESPDAPTSVATDGNTIGIDMGLKDLAILDDGTKFERIAVDEKIEKRKKRLQRRLAKKVGAKKGQKKSNNFLKLQRKISKLDAKVARRREHYQYNVVAQIAAKDCEYIGIEDLNVKGMSASGRAKKKLTAEEYAKLSKCDKKKYNRKKNKGFNKSILNAGFYSFKTKLEHKASQNGKEVVAIGRFYASSQTCSSCGAKNKRTKNLSVREWTCPECGTHHDRDVNAAKNIRNEAIRIKNEKGETTPKNLPRCNRKVKSAETIRNEKTAKVGVNSTVVEPEIQVIQRSKTIKSEVITESQVVILQE

SEQ ID NO: 50979 - protein, 393 aa, unknown
  TnpB Polypeptide
MIRNSKHTLKFTNKNKLIRLNEFLIEYNLVADQLLDYIWNNKIKHKYGELDIKNNIYDIPKYLDYKELIQLSDIKTELSARSLSSLVTQLVGVIKSQLKNKKKRKFKPSLNNFHPELSSKCIDYQLVNKEFNGFIRIKSIGKKYGHIKIPIKYHKHSNSLYGKLMASFLITNKNVEFRWHADKNKKKTNNIIGSDQGINTLLTLSDGQTTPMVDKQGIHYHDIITKIKRKKQGSENYNKSLIQRNNFIRWSLNQLNFDDIDQINYEDIKGIKFKKKLKYKKHLLFWNQALILTKIDRLCDENEVHLNHIKPYFRSQRCFNCGLVLKSNRNNKNYKCKCGYENDADMNAALNNTLKLKFLNFKTIDSNKGFYWMIEGSIESPLHENDKVMTYLS

SEQ ID NO: 50980 - protein, 405 aa, Prevotellaceae sp.
MLVSQVLKLKVNISCQQAISFRETQRQFVAACNLVSQYIFKHGFILQQRTLQDRLYRKIRADYDMPSFLAQSIIKTVIAKYKTVKTLDIDRLTKKAKKQGWEFDPKTVFEYMQKPIAFHTPFIQYARKFSYSVLPDGSVSMLTLHGREKATAHWQVGYFDKFYNGGWKQCSATLHERRGKWYLHIAMQKDVEKFSKDHVAHVVGIDRGLRQIITTFDEQKHIHFESGKQIARRRRHFYELRRHLQKKNTKSSKRRIRTIENRENRWMADINHQISKALVSHYGPNTLFVVEDLTDVSFDEKNLKRTKKGKRELRSWAFYDFEQKLVYKALANKSLVLEVSAAYTSQRCPRCGRIHKENRNHNRHLYVCDCCGHQMNDDAVGAENIYLLGTQWVSGVEAPHFEKLS

SEQ ID NO: 50981 - protein, 368 aa, Moorea sp.
NKAFYKFPSYYRRAAIAFAAGQVSSYVTRYSEWQSGTRKRRDTKPPRLNADTGCYPALYKGQCYKLHGFNQVEIKAFNGKDWIWTTVQITELRERHACASNKMMSPSLIFNERYCHLSVPFACKPEKRKPEANVTAVYLGINTTATIAVVTHSGTVIHREFIHPGRDIDRRDKRLKSISVRASKTMGKGGRLHKGFCSLTYQKCRRINHQIGHIVSKRIVEIAKEFNSEAIVFENLKGWKPKGGRKRSNLRQRFHGWLKAKIRNFTEMKWTELGGKVIEVVAAYTSKLAYDGSGKVRRDSRNYSLATFPSAKRFNADLNGAYNIGARGVLKLVRRNGNEGRSSKSSGRPPRSWACLCDLWTSGSLRLA

SEQ ID NO: 50982 - protein, 366 aa, Okeania sp.
MKSIKTKLKVNNYQKTLLAKHTGVARHAYNWGLNTCIEEYKLTKKRPSAITLHKRLIAEVKSENPWYYEVSKCAPQQALRDLDRAFKNFLTIPKCRFPKFKKKGQKDSFYLEGNIKILHGNYIQLPRIGRVKTYEILPSVPVKNVTISKKANNWYISFKYDLEPVPNLTPTPKERAVIGVDVGINTLATCSDGTKFANVKPYRQAKKRLTRYQRRLKKKELGFLRNATQTKNRAKAVKKLAKIHKKVADTRADALHKLTTWLAKNHSTIVIEDLNVSGMLKNHKIASAIADCGFYEFKRQLTYKCEWYRSKLVIADRFYPSSQICSQCGHKQKMPLSARRYECGACGCETDRDFNAAVNLENYVNK

SEQ ID NO: 50983 - protein, 438 aa, unknown
  TnpB Polypeptide
MPEEGIYEVKYTNRRTNVVRLLPNGFQERKLRRLADTSARLFNEANYERRQQFFHGGKVDFQGTYQKYYNKYKGVLGVNAQQVINKNNEAWSSFFSLLRLKKQGKLPPRVSHVSPPRYWKDRETKGRKLILVIRQDRYEVDEQSRRLTLRDFGLEVEFAGRLRWHGRQGRLEIYYDDAESAWYASIPVEVGVEVIKTGKKSKYIVRGERRSIQIASPKGDKVASVDLGINVLASVVVDDGTWLLYKGVRAKEDYFYLQRRIAEVQSLADKARNIGEDEAQEELNREKRRLFKKLTRRLLHLYRNLASNLLKRLHDQGVSTIYLGYPYNIAQEKGNKFTANLWSYRKLINAIELKAQEYGMKVYEVVEYNTSRYCAYHDVEVKRYPRGVVSCPKGHKLHSDLNGALNILKRATGTVVSTVRKPLSFLVLHNGVAPVKGV

SEQ ID NO: 50984 - protein, 555 aa, unknown
  TnpB Polypeptide
MDTQLLCQYCWECVHRNDSALCGRAKNSLKKGGSVMARKSPSKNAFVLTLPLQCEAWQRDRLDTIFQVGNDIKNNLIAYEQKQYQNLISRKDWKANQAALSAAYEAEDEELIKVLCERRNELLSNAGFGKYRFEKQINKYRKHYRGKNGKGFLIPVHVAQKISSSVWAAYEKLLYGNGQQVHFSKWSEFTTITAKTNASGIRYADGFVFINGMRLRMVFDRKDPYGYQREAMTRTVRYCGIHRRWYASGWKYFVKLTLDGLPPLKTKPDTGELLHPMGEGRVGHDIGTQTIASVGNGAVLLTELADKVKGIDAELWKLNRAMDRSRKATNPGMFNPDGTIVPKDKLPSNGLNHRGRRKWIKSKRYIVLESRRRELYRRQKEMRIQQHNELANRLLSFGNEHYIEEMRFRALAKRAKETKRNRKGKPSRKKRFGKSISNKAPALFISTIKRKVLHAGGSFQKVDTISVKASQYNHLTEAYTKKNLSKRWNTMPDGTKVQRDLYSAFLIQNVEDSLKQIDTERCNQSYNSFLFLHDKEIQRLTLLVTPSSMGIQHIA

SEQ ID NO: 50985 - protein, 279 aa, unknown
  TnpB Polypeptide
MLIIGAQQCAIKDGMMRFPKKLNLDKIYVGDLNIAHVRIFPGKKKYKVEVVYKVEALPKRKKGNIAGIDLGLDNLATVAINKRSIRPLLINGRPLKSMNLHFNKKRNKIQSKLKKCNDKYMSYKLETLYRKRNNRFNTYMHKASKEIVDYCLEHNVSQIIIGHNKLQKQESKLKNFVAIPTFKLIELIKYKAEYQGIEVIETEESYTSITSYLDKEEPIKDNADRFRRIHRGLFISGKGKRINADVNSAYQIMKKVIGDKVIKPIGKGSVFIPKKVTMV

SEQ ID NO: 50986 - protein, 369 aa, Methanobacteriaceae sp.
MRIHPLAYKCRIYPSKKQEEQLTQTLQICQELYNKLLAKYKEDCQNKKYIPTLKDYFQNLALEYKQDSKSLQKLEESSIKDVINNLSKAIRQKANPQQVQFKDERKRVNSFLLIDKPDIQLNDKDITLEKYGKIKLRYGKSFSDKKILSYRIKKQCHIWFLIVTVKINSIQPFKKTGKKVGIDLGISHLIILSNGKKYDPPNISEIELKIKNLKEKLSTKTYGSRAYNATRDKLDKQKMHRQNIIIDYYHKLSTELVREYDFIAMESLNIQVMARDPRYKNQIYKANWQKFITMIKYKCELYGKTFVQVEAKYPSSKICNSCGYKFNNLTIDVREWKCPNCTQINDRDVNAARNILKHALNTQEKRITI

SEQ ID NO: 50987 - protein, 409 aa, Halorubrum sp.
MYYNYKYRLDPPENLREELSDHVDTCRQLYNHVLYLLNETDEIPTRYDVQGRLPEFKEWWDDLGDVYSKVLQMVVKRVYDNLSTLKAQKETGRAVGMLKWKSPREYRSLTYNQSGFELKNTSGRPVLWLSKIGEIPIHLHRDIPDEAIIKQVTVKREPTGEWYATFGIDVEEATPAKPDTLEKVVGIDVGILTYAHDTDGYAIESPNFSEERERIKRARRDLSRKEHRSSNWEEQRKVVAERYADLKRKRRDFLHKLSNYYATEYDLVAVEDLDAKGLVELPGNSRDRVGAAWGMFRRMLKYKCEREGTQFITVNPDGTTKECASCGVSTEKPLWVREHSCPACGFEADRDANAAWNILFRGLEDVGVGHSESTPVETALPTDTSVSAKRVVEAGSPTLKERTASAVSK

SEQ ID NO: 50988 - protein, 404 aa, Halorubrum sp.
MAEVRRTVVVKLDLDDSDATLLHKTVEEYLWACNYVVRDAWQDDYKLTSKNKLHDRTYSDVREQTRLQANLVQSARNRAAEAIKGVIARWKNGKKASQPNFTTPSVRYDKRSATFHADHVSLSTVNGRIEAEYVLPPEGDNPQTTYLRNDEYEITGATLQYRDATDTFFLHIGTKADVESEIPDAGDAENSTVLGVDLGIEQIAVTSTGMFWSGDYLNHRRREYERVRAGLQRTGTESDHRTIEQIGDRETRWVADYLHRISKAIVQEAVAHGCDWIAFEELTDIRDRMPGAKKFHMWAFRQLYDYVAYKAEAEGIEATQVDPAYTSKRCSKCGTTLDENRQSQAKFCCQKCGYEINADYNAAKNIGFRLLRAGQKSPHGGATRHLALKSGTLNVNGGYSPATQ

SEQ ID NO: 50989 - protein, 538 aa, unknown
  TnpB Polypeptide
MKRAKTPTFLLELPLAVTGGQAKHLPAHFEAARCLYNALLGEALARLHRIWADPAWQAARAIPKAQKQERAAAFSRLRQQYGFSEYALHDFAKKANCTWIADHIDAVMAQTLATRAYQAVNRVCLGKAKKVRFKSKGRGLDSVENKREKSGLRFVLQPAEEGNQGWLVWGKDRLPAIIDWNDPVVKHGLDHRIKYARLIRRKASSPRAKGTDCQGYRYYVHLILEGIPYQKKPKNQPGRDVIGLDLGPSTLAIVPREGEARLVPLCEELRPNARKKRRLERKLDRQRRANNPQNYNEKGRVKKHGKRRLTWKNSKGYLATKRRIAHHERKLAAHRKSLHGRLVHEIVRVGNDIHIEKVSYKGWQKRYGKSVGLRAPGMLIEHLRRTVAKTGGILHEFPTRSTKLSQYCHGCRTYVKKPLAQRFHNCACGIGPIQRDLYSAFLAAYLDPQDYLPSSAQYHVYWEGADLRLRAALERLHERAKEGQTLPRSVGITGARARLPESLVPNRQELVYRHGRLEALEEEREPPALKAGECQLSF

SEQ ID NO: 50990 - protein, 376 aa, Cetobacterium sp.
MEVKTMKTYNLAFKYRIYPNETQANIINQTFGCTRLVYNRFLAQRKELYEAEKKSVTYNTQSKELVPLKNELPFLKEVDSIALQQALKNLEIAYKNFFQKRASFPKFKSKKSSRKSYSTNCVNNSIRIENSFLKLPKIGLVKIKLHRQIPQNYAIKSATISQEPNGTYYVSILTEFEKDIKEVPSDNNIVGLDFAMSELFVSSDNQRAHYPRFFRKLETKLAKAQRDLSRKVKFSQNWNKAKLKVAKIHNLIKNSRKDFLHKLSHELVTKYNAIILEDLNMKGMSQGLNFGKSVADNGWGMFTTMLQYKSIFLGKQVIKIDKWFPSSKTCSFCGSVKTKLALSERVYKCDECGSQIDRDLNASINIREVGRTLLAY

SEQ ID NO: 50991 - protein, 434 aa, unknown
  TnpB Polypeptide
MLEAVKVALDPTPTQERLLLSHAGAARFAYNAGLAHVKDMLEAKEKPEWSLYALRRWWNQAKDALAVDETTGEPWWPENSKEAYNSGLESLSDALKNWSKSRKGERKGRRVGFPRFKAKDRETPRFAYTTGSFGLIKDDPKALRLPRIGRVHCMENVTGRADGAKVLRMTVSCRAGRWYAALTVERADNPTPEPPKGGSVGIDLGVKELATLSDGTVIRNPHALKSNLTRLRKAQRSLSRKRKGSNRRRKARVNVTRLHARVANLRRDLLDKTTTMLAHTYADIGIEDLNVAGMVKNHRLAQSIQDAAFAEFRRQLTYKTARTGTRLHVIDRWHPSSKTCSNCGTVKTKLSLSERVYHCDKCGLSIDRDLNAAINIQVAGSAPETINARGGSRRQTRPKGGTMRHPAKREPSGGESRVRLGAGLGNEAMQMTSL

SEQ ID NO: 50992 - protein, 292 aa, unknown
  TnpB Polypeptide
VNSIPLKQHGVTYTLDRNRNRVRIQRLGQFRVLGLHQIPPEAEIASAVLVQKPSGYYLHVTCYVPKKSFSRQLIGEAVAIDFGVHPKLTLSNGIKIDFELRETERLKTLSRKFERTKKGSKNRKKLRFLLRREYERLARRRRDVHNKVLAFLKGYKEVVFQEDFVKGWTSLFGGQVHASGVGGLKARLRNSLATPIPVERYEPTTKECFACGRLHELSLGDRVLQCECGWVCDRDQNAALVILRKGLGLSPDQAVGLDRPELTPLEREAITRILGSNPYIRVSLPGGGSPPL

SEQ ID NO: 50993 - protein, 497 aa, unknown
  TnpB Polypeptide
MKKKQVNWKSFNINMTDELKPTYDFLQNELNFILSNDETRAILDNIDLSKLRGDVWRDMRDNLKWRIKDWPLHNKTWHSYILFENIRREIKSKQEAIIIWNELVKNNFNIDEALFNSLHKLKLHPTRSRISNIKRSNSIPELARNAVFNLDYTISEKQIFRMKQGHICEIKVGKKDWIEYEIVFPSSIDERFTGRIAKPRFIKRKRDNQYIGVCSYEYEIGDYELEDKILGVDIGKIKLFSSVIVDRKGNFSNEFINTKRSQETEYKINRLYENKQILYDKIKSYEDLRLTNLPKYEIWQNIYSNISNKIINTKDYQAKLLSNEIVQLALEQKCKTIHIENLSWLNSQGGKWNHSQIHSKIIEKAAMYGITVKRVSAFNTSKEHPITKEIGVAKDRIIEFTTGKIDRDLLAALNIAIRSTNIKLKKSLPKKAKTKRVKTKSNKKEIKEKVNRLKGNGQIVSFLTNVLDSTIHVKLGVRPLNEVSPCNSLICYNKLQV

SEQ ID NO: 50994 - protein, 472 aa, unknown
  TnpB Polypeptide
MKRTVKIKANCLNNEDEILLIGTIQRNIKNYVWSRYSGIGSLLKQSGWTIRDELIQKDLLSKKITKTLSRVAIEKSASTIKTNWTTTKKKVKNAIKQNENLTEDDKRYLFLCLKHTPTLYNILNYKKVNYTTDYLKDLKIDVHRLNNLLRRYIRRYKTKSYTNKTNVILTSNLYKFNSNDNTFMFLRKAKNSRIEISLTGNIPKLKGTLELVKNQKSNQYYLHVPLDRVISKKNITNESEILGLDVGITDLITLSNGSVYGANSSELFYTLSDNLVNKNRSRLFSYKQELEQRILNEQNLTTKAILEQKLKNLENNNLGSKKRISKISKYKSRIVSHINCELNKMVKEEDIEEIVREDLNWISKKKKNVSRKQQNRFSTWSKGVLLERLSIKLAEKGIKETIVNPAYTSQVCCKCNHLGNRNGKTFKCSNCNLSIDADFNASINTKKRKFISEINIDTPYKEVKKYYENISV

SEQ ID NO: 50995 - protein, 366 aa, Acholeplasma sp.
MNKAFKFRIYPNESQKTLIHMTLGHNRFLWNKMLEDKQRHYELTKNSLHLTPAQYKNDYPFLKDVDSLSLANTQLNQEKAFKQFFNHKQERPKFRSKKQDYGYTTNLVNHNIVLLKGYIKLPKLGEVKIKQHRTIPSEMILKSVTVSKSSTGKYYVSILYEYQKEIQKQVVKDAIGLDFSMTHFYVDSEGFKMDYPKDIQTDFNKLRVLQRSLSRRVKGASNYDKKALEIALLYERIKHKRDDFLHKLSNAIAKRYELVSVEGLNLIEMSKTNPYYAKQISRFGWTRFVSFLKYKLETQGKSLMMMDQWYPSSKRCSCCGDIKTDLKLSERVYDCPNCELHLDRDHNAAININKEGFRKYKLAFQL

SEQ ID NO: 50996 - protein, 366 aa, Acholeplasma sp.
MNKAFKFRIYPNESQKTLIHMTLGHNRFLWNKMLEDKQRHYELTKGMLYNRPAQYKDTYPFLKDIDSLSLANTQLNQEKAFKQFFNHKQERPKFRSKKQDYGYTTNLVNNNIVLLKGYIKLPKLGEVKIKQHRTIPSDMSIKNVTVSKTRTGKYYVSILYEYQIEIKKQAVNHSIGLDFSMNHFYIDDQGFKMDYPKAIQTDFTTLRILQRSLSRRIKGSSNYQKKVLEIALLHERIRHRRDDFLHKLSNAIAKRYELVSVEGLNLIEMSQTSPYYAKQISRFGWTRFISFLKYKLAKEGKTLMTMDKWYPSSKLCSHCGEIHTELKLSNRVFECPSCRLHLDRDHNAAININREGLRQYKLAFQL

SEQ ID NO: 50997 - protein, 486 aa, Oscillatoriales sp.
MTTLTYCKGLPTPEAELNPAGYTEFECFLTAFSGVFYRATIETVNHLLNREIKFNKSSWNTHLQQTYGINKRHANGVIALSSGKVDSAYKARTRYLSQLASRLKSAASWLKAAERKLKGAQKFYAKRHWQHSSSGCNFPLASDRKTRKTNWYNLKFAIHNKKRYIYKLTQTLAHLKVAPLRVKVNSRELFIVGSKDESYGNQACQWDGKNLKFRVPNCLEAKFGKYVTSAIGNFDRNLNRLPEAGAKTWHFYRQDNRWVVAVQFTPLPVKQVSRSIEYGCIGIDLNPNSIGWAYIDGQGNLSSRGKIAMQMGLPRGKQDAQIVGAILQLAELATAFACPIVCESLDFTGKKSQLREKGRKYARMLSNWAYSRFYQLLESILSNRGISLFTRNPAYTSLIGLVKYARMYGLSSDISAAIAIARRGMNGSERLPRPVSAYLGVNPRKHVWGAWYQFNMFIGRCPVVNRRHDYYRVSNWGPLVKADVEQ

SEQ ID NO: 50998 - protein, 369 aa, Bacterium sp.
MERGYKFRIYPTPAQEILIAKTLGCCRYVWNHYLDLRKEKYAADKKNMGYHACCKDLTSLKKNLPWLNEVDSTALQSSLQDLDEAYKNFFRRVRNHEPKAGYPQFKKKHDHRQSFRSKSGIKIFDDAIQLRKLGRVKCKISQEVKGRATSATITREPSGKYFVSIHCKDVPEELWESTGASIGLDLGIKDFVVTSNGEKYENPKYLAQCEKKLARLQRQLSRKQKGSKNREKARLRVARLQEHIGNMRRDNQQKLSTQIVRENDIICVESLSAKDMMKNHKLAKSIGDAAWGEFLRQLSYKAERHGKVVVTAGKFFPSSQICSCCGEKNPEVKDLSVRSWVCPHCGTAHDRDINAAINILNEGLMLLSA

SEQ ID NO: 50999 - protein, 187 aa, unknown
  TnpB Polypeptide
VLGLDYSQKHLYVDSEGQVCDYPHFYRTSEKRLAREQRKLSKMIKGSNNYKKQRNKVAKLHAHIGQQRKDFLHKESRKIANSWDMVVVEDIDMKAMSQGLQLGKNLMDNGFGTLRNYLKYKLEDVGKRFIKIDKWYASTQICNHCGAKRKIGLNERIYQCPKCGHIEDRDINAAKNIRDEGIRLHRG

SEQ ID NO: 51000 - protein, 430 aa, unknown
  TnpB Polypeptide
MKLTHVYRIKPTAEQVATMDLWLELLRRHHNYSLGQRLDWLRRTRCLLDRCSLVSEPIGKIPGGFPNYNLQAGMLKQTKELFPDYKNIYHDVQQQNLKRLEKAWERWVKPDKSGRRGGIPRFKKVGDLRSFTFPRVNSEKAGANIKDGILTLSKIGSMPIILHRPLPDGFTPKTCTIVKKADGWYACISLEDDTVPQPLPLNEIKSAIGVDVGLKEFLTTSDGDTEPIQQNFRRSQKRLARQQRRLARMQKGLKNAQKQKNRIARIHQRIQRQRKEFHLQVAHKLVKAYDLIGVEDLNIKGLARTNLAKSILDAAWGEFITILEAVAVRRGVRVVKVKPHGTTVDCSTCGWEVPKTLGIRIHDCPKCLTVLDRDENAAINILMRAINDVGLTLSACGGYLSWVTRLAGHLVRADEAGISGCEAGSLRYTA

SEQ ID NO: 51001 - protein, 422 aa, unknown
  TnpB Polypeptide
MVYTKNNTKRIVSVRTAYQYKLRPTKQQAALIDRWLSMLCAQYNYLLADRFNWYEQNRSPINTCPLICHLPELRDNPDYFSQKKTLPQLKKTHPWYSEIYSQVLQDVVKRVKVTFDRFLKGDGNGKRSGRPRFKHRSRYRTFTYPQMKEGCLQGNLINLPMFGKVKVVLHRPIPGGFKVKTASVTKKADGFYLTLSLEDATVPEIKPDFNPDSIAGIDVGLKEFLTTSDGETVAIPQHYRKAQKRLRVIQKRVSRRKKGSNRRHKAVKQLGCQHKKVADKRKDFHFKTANWLLSKYDVIAHEDLNVKGLARTRLAKSVLDAGWSNFLLILTNKAENAGLLVIPVSAHNTSQDCSNCGERRTKKLHIRWHDCPNCWCSLDRDYNAAINIKNRAVGHSVLKAQRLLRDSRIGCEAYTILVPKLV

SEQ ID NO: 51002 - protein, 400 aa, Okeania sp.
MRARYKYRIYPTKYQQTKLAQLFGCVRVVWNDSLACCKEKHAQREKKPTNSELQKQFITQAKKTEHREWLSEVSAIPLQQSLNDLNQAYQNFFQSTQGHRKGKPVKPPKFKKRKSKQTARFTKGGFKVGQDKVYLAKIGKLKIVWSRDLPATPSSATVIKDSAHRYFLSFVVEIQPEELPQIDNSVGIDLGIKTFATLSNGEKVDAPKPLKKRIKKYRKLSKSLSHKTRGSKRHEKARLRVAKFNGKLKDTRTDFLHKLSTKIIRENQTIVLEDLNVSGMLKNRKLSRAISDLGWRTFRTFLEGKAEKYGRDFRIISRWEPTSQKCSCCGFKGGKLDLSVREWECLNCGSKHDRDENAARNILVAGGQSETKNGRGGKHKTTVKVAEVSETSTRRGAMAR

SEQ ID NO: 51003 - protein, 407 aa, Streptomyces sp.
MQLRYAFRLYPDTAQQAALARAFGCARVVFNDAVRAREHARQAGEAFPTAGQLSTCLITQAKRTAERGWLGEVSAVVLQQALRDAEAAYRNFFASLKGSQKGPRLGQPRFKSRKDARQSIRFTANARWSITGAGRLNLPKIGAVRVKWSRTLPATPSSVTVIKDAAGRYFASFVIDTDPAADQARMPETDRTIGIDLGLTHFAVLSDGTKIDSPRFLRRAEKKLKKAQKELTRKQKGSKNRAKARLKVARAHAKVADARREFHHQLSTQLISENQGIAVEDLSVAGLARTKLAKSVHDAGWAQFLSMLEYKAQRYGRTLVKIGRFEPTSQTCSTCGVKDGPKPLNIREWTCTACGTVHDRDHNAALNVKTAAGLAVSACRAPVRPGAIPAQREETGSHGFPTGHRAA

SEQ ID NO: 51004 - protein, 142 aa, unknown
  TnpB Polypeptide
MTRYITNYCVKNDIHTVVIGDIKGIRKERNLGRKTNQKLHSLPYARIYMQLEYKLKMKGICPIRQEESYSSQCPPQSEEVWHIYAEKRNRKKRGIYIVDTVIYNADAVGAYNILRKYHAVSGKEIDMPVIGLSSTKTIKVAV

SEQ ID NO: 51005 - protein, 379 aa, unknown
  TnpB Polypeptide
MKLVKTVSCKLNPTPEQTKALKATMQSFADACNYVLEVARKHKTTNKVKLQHLCYYDLKKKFGLTANLAIRAIARVAEASKRKLGRVKYFKPTSVSYDQRIFRYIAPKEMVSLSTVRGRIKVPLILGNYQRHLLKDQEPTSAVLVYRRSKRQKGFYINIVLSKPVPRPSGTNPVGIDLGINNLATCSNGLRFSGKNAMYIRRRFGALRAALQSKGTRGAKELLRRLSGREGRIIRNINHVISRRIVDSLREGDVIVMEKLTHIRDRTKVRKEQRYIHHSWPFAQLAKFIEYKALERGIPVVYVDPRNSSHTCPRCGELSIRNRHSFYCPSCGYRNHADFAASFELANRGRALLAGPPSAGPEAPAGEARGKPTASAVGG

SEQ ID NO: 51006 - protein, 512 aa, unknown
  TnpB Polypeptide
MASKATTKSFIHEFQLVTTPKENRILEVRLNAGRNLYNACLSETLSRLRAMRGSDAWKTARNMPHGKPRTAAFQAVNDKFEYSEYSLHKYAASVCHACWIGDHLDSLAAQKLATRAFTAVKEYRFGKRGKPRFKRYGWMSSLEGKNNASGIKWRDGRVQWNGLDLRCVLDRKDKHGIQAHALSQTVKYCRLVRKVIRGNTRWFVQIVLSGVPKIKVKNVIGCETVGLDIGPSTIAVVGDTDASLLEFCPEVDVRHKQIRSLQRKMDRSRRATNPDNYYRNGTVRPGKKTWHRSRKYLALRADLANRWRVMTETRKRSHGNLANKVLSLGATISTEDLSYRDLQKQYGKSIGRRAPGTFIEILGRKAANAGGRILEFSTRTTALSQTCHCGHKARKHLRDRWHVCQKCGAVAQRDLYSAFLAKYVHDDVLDIRQAEQAWPGAHLLLERAMSGLQHQAANGLRTPASFGLYQRQSCSLVKDGSMAAEVCDIASIAKEAVKAARAAGVSIAVRTP

SEQ ID NO: 51007 - protein, 519 aa, unknown
  TnpB Polypeptide
MKCTTPSFILELPLKVTSLDESIILTRFDIGRQVYNACVGESLKRLNLIQQSKDYKSAIKIPKGTKGSDNQQTRSKIFSKLNEEFGFREYDISEYALKLRSGWISKHLNSRLTQIISKRAFKAVQKKAFKKAKRVRFKSKNQFDSIEGNDNKTGLIFRNNTLNWNSLSIPCIIDKKNVYQEYGLNHDVKYCRVVRRKINQKNRFYLQLVLKGKPYQNHPIGDEEVGLDIGPSTIAYVGDTTAELKQFCNTLKPEWRKKRILQRKMDRSRRATNPDNYNENGTIKRGRKGRKFWTQSRKYKETQNLHLEHERKLAAHRKSLHGELANEILSVGNKIKTEKILYKAWQKMYGKSVLMRAPSMIVDMIQRKAENAHGGYLHEIPTYSTKLSQTCHICGAQVKKPLNERWHICCDIKMQRDLYSAFLAKCVDKTIDSLDITRANYLWSGLEPILNNAISRVEQDAKQSAISGNLVPASFGLAQRQSRSHFKPEITMTNISDVVIQYADESWKEVTVNAGISRL

SEQ ID NO: 51008 - protein, 344 aa, Moritella sp.
  misc_feature (5)..(62): Xaa can be any naturally occurring amino acid
  misc_feature (221)..(253): Xaa can be any naturally occurring amino acid
  misc_feature (315)..(339): Xaa can be any naturally occurring amino acid
LLRHXXXXXXXXXXXXXXXXXXXXXXXXXXXXXXXXXXXXXXXXXXXXXXXXXXXXXXXXXXLDKGFKSFFKSGFGYPKFKHKHGNQSASYMSNGFKWSADKQSLILAKMKQALKIKWSRPFTGTPSSLTVSKTKSGKYFVSMLVKEDVKQLPVVNKTVGVDVGIKDLAICSDGTKFNNPRLTNKYAKKLAKASRKLAKKKKGSNNFNKQKLALAKIHEKXXXXXXXXXXXXXXXXXXXXXXXXXXXXXXXXXVKNRKLSKHIHDANFGEIVRQLEYKADWYGRKVSAISQWFPSSKMCNECGLLYSGKWSLKIXXXXXXXXXXXXXXXXXXXXXXXXXLRLAA

SEQ ID NO: 51009 - protein, 402 aa, Proteobacteria sp.
MILGHKIRLVPSPEQEAYFQRACGTARFTYNWALAAWKREYEAGNKPSGRSLKKDFNAIRKAQFPWTYEVHRDCTAGAFDHLQSAFQNFFRALKAGGKPGYPAFKKKGRSKDSFSIANDKLQLQEGRVRIPLLGWVKMREALRFEGEVLGAVVSRRAGQWTVAIQVEGGDLKKARVSEGVVGVDLGLRASATLSTGEVITGPKALWRNLKRLRRLSRRHSRKERGSANGRKAALKLSRLHLRIANIRQDHLHKLSTRLVSENQAVGIEDLHVKGMVRNRKLARAISDEGWSEFRRQLEYKAGLYDTQVVVHDRWLPSSKGCSSCGNVKAALSLSERTYSCDVCGLVIDRDHNAALNLKPIELPGGSGDVKPVEMGALVGQTMTDETAVEEAGTGTGELSPCF

SEQ ID NO: 51010 - protein, 405 aa, unknown
  TnpB Polypeptide
MKVNRVERHQISKSNPMWKVIDELCLKSKNVYNYGNYVIRQEFIKTGNWIRYKDLSKQIKHEDCFKKLGSCSAQMTLRRLDKNWKSFFNGTKEYKKNPSKFLGRPKIPKYKKKDGRYILELTNMQTHIINGYLYFAWKPLKQFNNIIKTNIDGRLLQTRFKLMNNCYMMEIVYEKEITIMTDKESKRICSIDLGVNNFVTMVNNVGEIPIVINGRGIKSYNQYWNKKLAYYKSKLKKINNKDWSNRLNRLTLKRYNKINNFFHKASKMIIDYCVSNNIDTIVIGKNDTWKQNCNMQKKVNQIFVQIPYENFIKMIKYKGQDIGITVIENEESYTSGTSFLDNETPIKENYNKNRRKFRGLFISNKGIKINADCNGAYQIMRKVFPKAFTNGIVGVHLHPIILNVA

SEQ ID NO: 51011 - protein, 381 aa, unknown
  TnpB Polypeptide
MHKATFQYRLYPTPAQTTAMQHALDECRWLYNRLLEERQLAWDDAETNVRLYEQVNRIPTLRVERPTLGDVHSQVLQNVAARIDLAFAAFFRRVKAGEKEPGFPRFRGYGRYDSFCYPGSGHKVEARGDGEKKGRVFLSKIGRVKAIIHRPPEGTVKTCCVKRTSTGKWYATFSCEVEDAPLPATDSAIGIDVGLASFATLSDGSDVPNPRFFRRDEKALATVQRRLSKEPRTPKGQRPTPMRRKRRKVVARVHERIANRRKDFAHQHSHRVVNQHDTIAVEDLSVNRMVHNHCLAKSISDAAWSMFSSFLSYKAASAGRQFIAVNPAYTSQDCSRCGHRQKLALADRLYHCPCCGLDIGRDHNAAINIVTLGLQSLGVRP

SEQ ID NO: 51012 - protein, 414 aa, unknown
  TnpB Polypeptide
MIHTHLFRCKLPREQADTLNRESGRIYTETLVEHYRVYRQTGHWLSGGAGEKINDLRSGTFLHAHSRDAAQQGFYKACKAAAESRKAGLEANYPHQHRRYRSSTWKNTGIRKRGEGLLLSLARGHAPIFVKLPSNLKMVAPESFLEMRLVWDRAGQEYMWHLVVEDSIQPASAPGDRVAGVDLGEIHPAVVTDGEEAVVFSARELRSVVQYTHKRLAEIQTKQACKTKGSRDWERLQRRKNRFLARQARRRRDIEHKVSRGVVKWGQERQVGTLAIGDVRDAADRVALGKQSNQKISSWPHGRLRQYITNKAEAAGMKVELVDEAYTTQECPKCHERYKPRGRKYHCPVCGFGSHRDVVGSANILSRYVYKELGHVSPPEVIKYRYPYDITGKRSPVDTGQVAWAFMAQEAARL

SEQ ID NO: 51013 - protein, 384 aa, Ectothiorhodospira sp.
MNTVQRAYKYRFYPTPEQAEQLARTFGCTRYVYNHFLKVRTDAWYEQQERVGYNDTAKQLTVLKKQSETLWLQEVSNVCLQQALRNLDTAFKNFFLGRAKYPTFKKKHACQSARYTSSGFSYRDGQIKLAKHKEPLNIRWSRRFTGTPSSVTVSCDTAGRYHISILVQEYVAPLPFSKQEVGIDLGLTHAVITSSGQKVNNHQYLKQSEKKLARAQRSLSRKEKGSANRAKAKLKVARIHARIADQRRDFAHKLTTQLIHENQVVAAESLQVKNMLKNRSLAKAISNVGWHQMTSMLTYKAQWYGRDFVQIDRWYPSSKRCHACGHLSDTLALSVRHWDCPACGAGHDRDVNAAKNILKAGKAILAGADKLREHEKTTVGRTGG

SEQ ID NO: 51014 - protein, 399 aa, Rhodovibrio sp.
MPTFQLTHKIALDPTNKQHTLLARSAGTARFAYNWVLDEWKRQYRNGEKPTEAALRRQLNAVKGTDYPWMFEVSKSVPQQAVKDLGEAFKRFFQGKNAYPRFKKKFVDDSFRADNGPGTFDVQGKRIRLPRIGWIKTREPLRFSGRLKRVVVSRTADRWYASVLVEMDTETPDRENQAIGGVDLGVKALATLPDGTTFESPKALERNLKKLRRLSKAHSRKKNGSKNKRKSAAKLARLHRRIANIRADALHKLTSELVGRYDVIGIEDLNVSGMSQNKRLARHIADVGLHEFRRQLEYKAELYGTRIVVADRFYASSKTCSACGSKNEMLRLGDRAWTCCSCGTSHERDANAAANLQHIAASSAVTARGEESHGRGARAPVNLASTKREPGGKPAHATA

SEQ ID NO: 51015 - protein, 512 aa, Rhodovibrio sp.
MSIPRTIHRTDRLPVFPNAGKEQAVRELLFAWRDTAETVAADQWRRFFETGRFEKNLSANQEAAVAPIREAKRRIGAARVQMVRYQVVGTLQSFMANRQNDFRRIVEASSLDDTTKHQLHTINKRQAWFRRDAVAMKDGTVVPAETQKLARRIMRHVLSQHRRPLFARCNMVMDQRQAVLGRATQAGAFDYWFRLGTLDRRKIDVPLRSYPYHDARQGDRCKTVQINADRDGALSVGVVTDVTESFRQSRTTYQPLRDAIAVDFGLSTLVATDEGDLMGRNFIDHLAKLDRRIDKIARVRQRAGFRVRSERYDKAVQQLRGYIKTEINRVLKRLARLKRPETLIVERLDFSHPDLSKRMNRIIRRCGRAVFRQKLQDLEERFGVETVEVNAAYSSQQCSSCGFTSRDNRPGRATFRCGRCGHTSHADVDAARSLRVRRSDSGLRDPRRSRRQVLAELQRRGLYAASSGQRRAGQVRRSAQQGWSGKPPTAGFHPPGPAESALRDATATSGRA

SEQ ID NO: 51016 - protein, 289 aa, Uncultured sp.
MSAGDEGELTLTIRMRVSPEPEDEQALLDLMRRYRDALNYSVRVIIANRALSLSRAHRLLYKDLRERYGLPSRIAQDCYREAIAIAKSWLKNSKRGDMPVVKGLSMWLTHELGYRVKGDRVELAGGYGLRIIGWDRRYDDFPSREARLVFRDGEFTLYVTKRVPRPARYAPKGVLAVDVNERQIVVGNSSVEQRIETPVERALHYMRLAEGLKKKYSSPRYNAWLRRRGIKRRVKYFHRKARNIIEDWARKTAHTIISLAKQGQLAVAREDLTGLIEGLRRLPKSIKPP

SEQ ID NO: 51017 - protein, 410 aa, unknown
  TnpB Polypeptide
MAKQMFEFRIYPSIKQTNRLKKQFYLVKTLYNILLLLTKDQYRANGHTMSRNELNNAIKRIKEFDPRYNEVHSQVLQNVSDRISKAYKHFFRRVKERRMGKKVKVGFPRYKKFLKSIAYPQSGFKFVSDKLLYIGKVGNVPIVRHRPVVGTIKTMSVKWTRSNKWFVVFCCDIPEAPKDAGKVETSINEWNFKHEVGIDMGLEKFLATSDNVIVENPRFLKVEGKRLKRLQRQVSRKVKSSKNRKKARVKLARQHERIANQRKDFHWKTANMLVNNYDFIAVEDLNIKKMLRDHRLARQIADVGWGEFLRKLGYLAGSAGVPNPAVNPAGSSQECSGCHGIVPKDLSVRIHSCPHCGLVLDRDINSARIVIYVAKRTAGLAGTHACGDVASTSRPDREACDIVEARTKYG

SEQ ID NO: 51018 - protein, 370 aa, unknown
  TnpB Polypeptide
MLVNKAYKFRIYPTKEQEVLIVKTIGCSRFVFNHFLAKWNETYKETGKGLSYGVCSSELPNLKKELVWLKEVDSIAIQSSVKNLADAYSRFFKKQNDAPRFKSKRNKVQSYTTKHTNGNIAIEGDKIKLPKLGLVRFAKSKEVEGRILNATIRRNPSGKYFVSLLVETDVQPLPKTNKEVGIDVGLKDFAILSNGEVFDNPKFLRNMEQKLIREQRILSRRVKGSSNWNKQRVKVARIHEHIANARTDYLQKISTHIVKNHDIIAIEDLQVSNMMKSHKLAKAISEVSWYQFRTMLEYKAKWHGRTVVVVGKTFASSQLCSCCGYQNKEVKDLNLRQWKCPSCYSEWDRDVNASLNILAEGKRLLSAQSQ

SEQ ID NO: 51019 - protein, 379 aa, Eubacterium sp.
MCINTKILYNEANSVLLEHYKNTGEYIKYKDMNYMFKTYTSYKNCFSQPANCVMRLLDKNWKSYFRSIQDYEKYPYKYRGKPQLPSILDNDARIPWMFPNNQVLYLYDNNTVYIRNRLLNDYEWKSKCLGRLIQVRFVYHKTYYSMEIVYEIGLNDLNQNSSRIISIDLGVDNLATVSNNISISPFIINGKILKSINNQYLKKYHMAMEDLQNRNGKTWSHKIESLNDKRHFRVKDYIHKSTAYIIKWCIENNIDTIIVGRNKYWKQANHMKYFMKIPFNMFREQLKYKSENIGINYIEVNESYTSGTSYLDDEYPIKENYDKSRRITRGLFKSQNMLINADVNGSLQIMRKIFPNAYTGYGVEVNPTPVIINPLNPNG

SEQ ID NO: 51020 - protein, 362 aa, unknown
  TnpB Polypeptide
MYRTYQLKIKNTDKEYFSSLFRESKWYYNTILSSNDVFKFDTKSTTVTPALDFQTETVFLSSQMRQEIKKKIISSIKGLSKRKQKSKVGKLKFKSYVNSVNLKNQTFSFIKNKVRFQGNKKKYKIFGLPQLPEDSKIVSGILHRNSKGLYLLVTVEIQDKETNTPNLELGVDFGIKDSLTFSDGTKLNTNFCTDRLRKLQRDLSRKTKNSKNYRKAQSKYRKEHQLLENKKKDFTNKLKNKLGNYKIYFQDEMITSWKMRFGKQIHNGILGRVKLMLKQNTNNLMIPHSAPSTKLCPKCGVLNTLKLSDRVYNCECGYSKDRDIHAAQNMILIGSGRTYVEKKSDLFEVLKNIDCKHFSLKQ

SEQ ID NO: 51021 - protein, 399 aa, unknown
  TnpB Polypeptide
MVSNLAHSIRLYPNEAQATFFRKACGCARVAYNYGLDEYQRQLKAGSKPKVLEIKKQFNQDKKTLYPWMSETNKDANQQPFANLQNAFNRFFKKQGRFPKFKKKGVKDSFYISNDKFGVENNKFWIPKLGWVKGTEELRFKGKITSATVRRKADYWFVVVSVETENTRTTCENQAVVGVDLGIKTLATLSDGKVIESVSPLRKRLGKLKLLQRWLSRKVKGSSNRRKAIQRAAKVHYEIACLRKDVLDKLTTYLCENYQTICIEDLNVSGMVKNHKLALSISDAGFGEFRRQLEYKSVLHGNSLVFVDRWFPSSKTCSGCGAVKQTLLLSEREYVCEKCGIVIDRDLNAAINLRNYGLNKIGAVSPELTPMEMGALACRAASETAVDEVGISECLVMST

SEQ ID NO: 51022 - protein, 393 aa, unknown
  TnpB Polypeptide
MQLTKTIILKLDSPDNNLEELLSVFSQGMNYASQIVFANGKPMGSGRIQKATYGHLRNELGLKSQMCCNVARQVAGAYKTFQEQITIKQSEWQLLKFGPTSATFSFERDFGFSKDALSITTLAGRKKYKLQIYKYAERYFDGSWKYSASKLCLHRDGSYYFHLACEKDITDKKITDASTFMGVDVGINHLAVASTTDKKCIFFAGGEIKNHRDIRSKERIRLQKAGGRYLGTRSSMRVLRNLAGRETRFMTAVNHRVSRRLIEFALQNDVSVIGMEDLTGIRKEQTAPKEFRYEHSSWAFRQLQNFVEYKAGEAGIAVIYVDPAHTSQTCPRCNHISRNNRNGLAFRCEKCGYETHADRVGAMNIEHRARDWRYILESQGGFVSPPDATRFCT

SEQ ID NO: 51023 - protein, 269 aa, unknown
  TnpB Polypeptide
MYVEYSYKFRLYPNRTQENQILRTLGCCRFVFNHYLAIRKEVYERDGRTFNYYDCAGDVTQLKKTLEWLREVDATALQSSLRDLDAAYQNFFRRVKRGEKPGYPRFKSKHDHRQSYKSKCVGTNIKVLDKAVQLPKLGLVKCRVSKEVKGRILSATVSRNPSGKYFVALCCTDVEIEPLLSTGVAVGLDMGLKSFAVSSDGVEYPNHKFLTKSQEKLARLQRQLSRKTKGASAEKKPGFRWQDSMNAFPTSGRICFTNCPLSLCGTMTS

SEQ ID NO: 51024 - protein, 538 aa, Streptomyces sp.
MAAPFVVPGPSGVAIRARLRVSKTDAAVLAEVGAFLGTLASRNLAVRSRQGSTHDAAMRAARKRELTGCSSARWAGSITKATHDQWAPARRGQVAEMAWLRRQTTLIEARLARPPGAKASKREGLVRGYGSRAEWHAKARRMYGLKDRPAGLEADWAAGRVHVVRGGKQLARLRDHLDVAGLDEQAWRQRWQAARMLLAADGESGKRFGNETIRITAAGQVSIKLPATLAHLANAPHGRYVLDATTDFRHRGEEWLDRITASRAVAYRIHHDVVRGRWYVTACWQRTIAPVLPLEAALAKGVVAVDMNDDHLAAWQLDVHGNPVGEPQRFLYDLSGNTQHSDAQIRHALTQLLHHTRRCGIAAIAIEDLDFSDARTREKHGRKKDFRRPISRFPTAKLRARLVAMAAEQDIAIIAVDPAYTSRWGAQHWQQPLTSDNRKTTRHDAAAVAIGRRALGHPIRRRTAPPRTHQSDGYGHRTVQARLETQRREETRHRVPGPRTRRVPPGRGAKAGDQCAQHRSGHAAEHASWQQDPLPLSL

SEQ ID NO: 51025 - protein, 270 aa, unknown
  TnpB Polypeptide
MKRQGGETNESKMKQPKTSNVVGVDVGISDTLHTSEDKAIGSMKPVIAFYHDTVEKSFASLSDMRNKKRSISHYLRRHKALPEDVRRSLIKKMDRLDQMIQKADAPYRKKRCYYETLDHEIKSSIDRYIESISHDTLTVLEKLDIREFNKSRKSNGMMSTFARGKLQKKLMETLNWYGYDFKEIIPDYTSQTCPVCSHLEKDNRNGKSFKCKCCGYEADADYVGSLNIKARIDDQEIQEICEKYKYKHNELQKNLKMIYKSRNDQYKAAA

SEQ ID NO: 51026 - protein, 228 aa, Fusobacterium sp.
  misc_feature (186)..(219): Xaa can be any naturally occurring amino acid
MIYGEQAFKRFFKGLTAFPVFKKKGRNELGAYFVKNNKKDFEFYRHKIKIPTLKFVRVKEYGYIPKNANIKSGTITKIADRYFLSLIIEVDDIVKTKNKNIKGLGIDLGIKDTAICSDGRVFKNINKTIKIKKLKKKLKREQRKMSRSIEYSKSKKIKLKECKNFNKKKLKVQKIFYRLNCIRDDXXXXXXXXXXXXXXXXXXXXXXXXXXXXXXXXXXLYKSKIFIV

SEQ ID NO: 51027 - protein, 412 aa, Sulfolobus sp.
MWRAKEKNNKIQLSFKYRIYPTREVEEKLIKVMQVEVKVYNTLLDVINKARKEGKKITPKDTQNMLKDLKIEGKELVYSKALQMVNNQLWYNINALHELKKKGKKVGKLRYKKIMKIINYNQSGFKVVGDKLILSKIGGIKVLFHRPLEGEVKGVIIKKSSTGWYAIFQVEVEKKPLEKTGKVVGIDLGVEKLVTTSDGVVIENPKVFDKVERKTKIFQQSLSRKKKGSRNYEKVREKLAKLHEHVKNLMSDYIHKVTSWLIEQYDEIYVEDLSVKEMVEDSESKTLRKHILHSNLSKFMSYLSYKASRAGRRVVKVDPRNTSKTCAKCGYVEKDLTLADRVFVCPKCGWTVDRDYNASLNILRAGSGLPLEPVDRKSLLYIPFSEGVYSKFPGRSRKSSPRGGDAPSVRAG

SEQ ID NO: 51028 - protein, 376 aa, Sutterella sp.
VYRVRVDKRDDWLTRALQDPTDPTKPRKVKYCRIVREMRKGKERFFLQLVAEGSSPLKHAYAGKDLRMAIDPGLGSLTYATEDGTIAKVQIAPSADTDHRAIRRIQRAMERSRRATNPDNYEAVDVVRHGKKKKSFKVKSGRLQWRFSKRYEKLRSELAEMLRLCAATRKREHGEVCNWLLGHAGHIIVEDNSFKAFQKGHFGKSIGRHAPAAFYTQLTSKAESAGLQVTVVSPRKLKPSQHNLLTGQFVKHELWERRVRLGEDDDERWIDRDAAACLNLLYADLEKQTYAPERIREAVLAGVTAWLDAGVVVIQAREGITEREFGRFRRRGIPSSTVQGLRQRGFRGRSDSKSGTTPRRKASTVSKPSHFSGEVV

SEQ ID NO: 51029 - protein, 531 aa, Sutterella sp.
MRTSTSSYIVELPLRVNDQQNRFLEKAFEFGRTLYNATLGSALGRLQRMRETQEWRVARDMPKGKARTKAFSAVHKAFGLTEFGLTIIANNHRKASGRKDIGAHEAQSIGKAVWRALQRHMFRKAGRPRFKSFRRGLNSIEGTNNREIMYKPERGAIVWRKHAIKYMKPDTVYMKEALASDRKVKYCRIVRRTLNGVKRWFVQLVVESLPPVRKVYAPKCEVVGIDPGPSRIAYFHEQHAAIVEVAPHVDLQEPKIRLLQRRIDRSRRANHPDNYNPDGTVKKGSSTWNTSNRGRRTAAKLAEHHRCLAATRKRDHGELVNDLLQIGGTIKIEKNNYRSFQRCFGRSTNRRGMGEFVEHLKRKAESAGCEVIELNAYKLKMSQYDPQTDVYRKKPLKERWHRWGNTGTLVQRDAMSAFLACHATEKGHDRALLLEKWTTAEALLSGSGLCRHEPCSDPEVSKDASGLTKPNCGSKAEREYMVSSPFASVRGIFWGTTPPGGRAHARPPSNTWRSHTTKFVKSDYGIEKAFI

SEQ ID NO: 51030 - protein, 457 aa, unknown
  TnpB Polypeptide
MPLTNNHDTQTPGAPGTSRIEKIEKTAKLKLIPLTKRDKRELISLLKDYTEMLREALEIVMKKDIRSRKKAHEACYEYLRRRYPHLHSKYVQEAYKRALAMYKSYRKLLRKWQKLPKRQKRRISPPSPPSIGENKVIELHVDTYRLKKLHQFSLLRVSKGSGDYMTFLVMEYEHAEEMIKEGELKNSRILVDDGGIYLLLTVRKEVEVSRHANKLIIDINEDTVDCLLIDRGAGKALLFTVRHDIRGIRMNYRRIRKGIQMKTRGKRGSNVLLARYGGRERKRVEDRLKKVTTMLAELCAEFGTDLVREDLRDLKSNSKRRSRQLNYRLATFPYRKFIGYVDYKFYERGLDVITVDPEETSITCPICGYADSENRVNKEVFRCRRCGFTFNAQYVACLNIFSRLDEGEVVLRGGRLCLILREAGFVVPVDVAPHEVRISDDALREKPVRIMTKVIKV

SEQ ID NO: 51031 - protein, 392 aa, unknown
  TnpB Polypeptide
VIAVERHHIKATKDLLRLTSLSKELYNRCNFLMRQAWFKKERLPDISILIKETQHLNCFKNLHNTKTAKQTIRQVLTDWSNYRKALTAYGRDKSKFLGCPKPPHYKKKLSQVIFYNETIKGGQSGKPKAFLTPTNNCFSIKSDKQYKQVVVTPKTFGFMIEVQYELPNIPKPKTKKNNFCCIDIGLNNLATITSDKHSPILINGRIVKSFNQQYNKNVSKKSSRKRYFRLENYFHHVSKIIVENCVKHNLGTIVIGKNDGWKTGMKLGKKTNQNFCSVPFCNLFQKIQYKANALGIDVIFTEESYTSQASFLDRDEIPVWKKGRQNEYEFSGTRIKRGLYRSAEGTLLNADANGSANIGRKVFPNDAFGVEWDRSVAETPVVVNPLRQVCAA

SEQ ID NO: 51032 - protein, 409 aa, Erysipelotrichaceae sp.
MKQYKVLKQKLKSTNGEFFIYRFLSKKCRSAYNIALANIKKHYEEENKYIGKYDNFTELQNHDLTNWLNKEIFQRTIYKADAAYRSYFELLKYQKNNNLEITAKEPDYINGYFPITFSYIGNKYENGKRVFNIPLSVPFKRFLREMTPDINYLKQFINVNRLELPNNYFIRLSIPKVLTNKKIKEISIIPLHNGRKFEIAYTYLEDKETPKAIGNDVMAIDLGINNLATCVTTKGKSFIIDGKRIKSMNQYYNKRIAELRSENPYCLRLKENPITKGLEYKKDLRKNLKQNEKYISIRTKRMINLMVKRNNKINDYIYKSAKMIIDYCMNNEINRIVLGYSNDFQKGFEYSNNYDLKDNYLKHIEKNVIKENNQKFFSIPFGKLKSRLEYLCKNYGIELIIQEESYTSL

SEQ ID NO: 51033 - protein, 329 aa, unknown
  TnpB Polypeptide
VEDPLDAEAQEPVWREWNIPVLRQTCIQANVNVAVLEPAQDSTFDYWLKISTLAFRKQLLVPVKLADYHRKMLEGKTINTSVTLNKRDDAWWLTLSYNEVVLVQTESSASVVGVDVGIANFVTTSTGKHYGTFHGKLRERQKRDREKRRRKAKLRACLKKKGIEKLPSTTSRSGQRLARHVRQEINRAVNECVKDHADFHIAYEHLSVATMRFKARAMNAYLRASSLAHIPEQLAWATTKRGISATRVKSAYSSQECSTCYYTDRANRPDQQTFCCVVCGYSTHADLNAAINIEHRWGDSALRACKNRKAVKALLLQRHQQWKKYNGWP

SEQ ID NO: 51034 - protein, 494 aa, Bacillus sp.
MARSKTPSYTIEFPLRIPLWQQHRLEKRFKIARIIYNSCLGEALKRHKAVKAVREYRLLLKKPNSSKRNKQLADIRLAYGFTEYALQKFVKSIQHKFKEHIGSHEAKKLANRAFQSVEKLHYGKAKKVHFKSVHDDISVENDSNDYGLRYKDGCITWGNKPTKKNPKPKNWLCMPIEPKPKDEYAQLALLDKTKYVRILKREIRGKTRYFVQLIQEGYPPTKQNRKISNDETKRVGLDIGTSTIAIASKDKVELRELAPACTVDERELRRIQRKMDRSKRATNPNNFNEDGTIKKGKLTWSYSNKYKKLRLKQKELYRKISIQRKMSHEKLANDILALGSDVRVETMRFQSLQKRAKHTTRNKRNGKINRKKRFGKSIANRAPAMLLTIIDRKLGYQGRSIRKIDTYATKASQFNHLNGQYEKKQLSDRWNDIEGMRIQRDLYSAFLIGNTKETLDSIDVQLCNAQWSEFVKHHNREITRLKQSNSKTLLWFIA

SEQ ID NO: 51035 - protein, 390 aa, Methanothrix sp.
MTPLEIPIYAIRAFSLILHKTYKFRLYPTKSQRTMMGRTLDLCCWTYNQTLAYRKNAWENQHRSVSKYETHNLIPSWKVEKQELGDVFSQVLQNVQERVDLALKAFFRRVKSGEEPGYPRFRGKGWYDSFTYPQFGFKIDEGKLHLSKIGDIKIKLHRQIDGRIKRLTIRRSATGKWFACFSVETDDVPLPPWKDGSVVGIDVGLESFATLSNGEKIENPRFFRTEEKELTSAQRRLSKAPKGTYERKKALKVVQQIHERIANKRYEFAHQTSRMLVNRFSTVCFEDLNIKGMLHNHSLAKSISDVAWNMLVTITSYKAASAGSRVVLVEPKNTSKMCSRCGILVEKSLSDRIHSCRQCELSMDRDLNAAINILRLGTQSLRKGDRSPCP

SEQ ID NO: 51036 - protein, 365 aa, unknown
  TnpB Polypeptide
MRMNKGVKFRIYPNKQQQNLINQTFGCCRLIYNKGLAMRNDAFEKDQKIGYTQTSAMLTSLKKQDDFAFFKDVDSIALQQSLRDLDRAFVNMFRKRAKHPQFKSKHHLQQSYRTLNQGNNIRIVGKYIKLPKLGYVKVRQSMEIGHINNVTVEKTPTGKYFVVLNVDFEPEFHLNNGNTIGIDVGIKDFYTDSNGNTIPNPKYLEKSAKKLVRAQRRLSRKQIGSKNRNKQRIRVAKVHEKIANQRNDFLQKQSTLLVRENQTICIEDLNVKGMIRNHKLARSIASASWSKFFEMLQYKATWYGNEIIKVPTMYPSSQTCSVCGYQNPLVKNLAIRNWECPVCHTKHNRDYNAGINILRRGLQTA

SEQ ID NO: 51037 - protein, 471 aa, unknown
  TnpB Polypeptide
MNLALLATRAADEDGSCAIGGVTRERPAHRDRLVIGVGVHGKQRWRVTHKNPSAGTPDVTLEQKPTLLSLTKAHHIWYYRAMDRTVRLLLMPTPEQETALAQTARQFTAAFNLVCLYGWQAGEKNGVRLHHATYRASKEAAAGLVSDLHIQARVKATEALKSALDRRTKGRRVSRPRSRSCPPHYNLHTYRLDWATGLVNLATTTGRQRMPFRVPAYATRYAGYPVATADLVETRGRWYLHVVVSVPAPDVEATNVVVGVDMGVTRAAVSSDNRFHGARRWRELEARDFRLRRALQKKGTKSAKRRLKKLSGKTARRRRDHDHVVSRRLVDGVPDGATIAVENLTNIRSRVKARKANGGQRRLHSWSFASLRAMIAYKAQERGIRVEGVDPRHTSQTCHRCSFQSRYNRRSQREFWCRSCGYRTNADRNAALNIAAKLRASRGMSAAGGPPSTGLSSRLPGQGQAPLFSAG

SEQ ID NO: 51038 - protein, 391 aa, Oscillatoria sp.
MLILEAKLKGKTEQYNLIDEAIRTALFVRNKALRLWMDVKGSDKYDLNKYCAVLAKEFEFAKKLNSQARQASAERAWSAISRFFENCQKKVPGKKGFPRFKKRGHSVEYKTSGWKLSDDRKYLTLTDGFKIGRLKLIGSRDLSFYQVEQIKRIRLVKRADGYYAQFCVDVERREEIEPSKTTIGLDVGLNHFYTDSNGEVVENPKYLRKSERQLKKLQRQVSKRKKGSANRKKAIKRLAKKHLQVSRQRKDFAVKTARCVVRSNDLIAYENLQVRNMVKNHKLAKSINDASWSMFRQWVEYFGKVFGKVTVAVPPQYTSQNCSNCGKQVVKTLSQRTHRCGYCGTVLDRDHNAALNILARGINRVGHTQINAWGEFDLCQVDVSLVGKLSR

SEQ ID NO: 51039 - protein, 399 aa, Oscillatoria sp.
MLVFEAKLEGLKEQYGKLDDAIRTARFVRNSCLRYWMDNRDIGRYDLSAYCAVLAKEFDWASKLNSMARQASAERAWSAIARFFDNCKKNKPQKGYPRFKKEQTHGSVEYKTTGWKLSDCRRYITFSDGFGAGTFKMWGTRDLHFYPLKQIKRVRVVRRADGYYTQFCIDQERLEKREPTSKTIGLDVGLTHFYTDSDGHKVENPRHLRKSEKSLKRLSRRMSKTQKGSKNRAKLRNKLARKHLKVSRQRKDFVVKLARCVVQSNDLVAYEDLKVRNLVRNRHLAKSISDAAWTAFRTWMEYFGKVFGVVTVAVPPHYTSQNCSHCGQVVKKTLSVRTHICHHCGHTQDRDWNAARNILLKGLSTVGHIGTHASGDIDLCFGEETSQSKPSRGKRKSKK

SEQ ID NO: 51040 - protein, 329 aa, Anabaena sp.
MCDKHYIIEEPDEVKVSRPVLKTNGIGDNLVEFNSFREKDWTVSLTLMNGREHIKIDAGNYQRGKLKGRKPTSAQLCKHRDGNYYIHIQIKDEAPEPIKSTNVIGVDFGRRDIAVTSNGDKWDGKQINDARDKFSRVRGSLQKKATKGTKSTRRRARNILKRLSGKERRFQQWLNHNISKSIIQDALKNHAALAIEDLTGIRERTNQKPRSKTERRRSNSWSFYQLRSFLEYKAIRFGVEIIAVPPAWTSQTCHQCLHIGLRSDKSFKCTNEACSWSGDADDNGSKNISAIGAVFVNQPRGSNCLCCHLSTDSSGLLKAHTDPERVQCG

SEQ ID NO: 51041 - protein, 390 aa, unknown
  TnpB Polypeptide
VRQSFQFKLFGCRRLRHLHGTIDLSSEIWNHSVALHRRYYRLFKKTLPKAKLQAHLAKLRNGRMPHWKAVGSQSVQAITDRLYLGWEAFFRGDIKRPPTFRKRRKYRSFTLKQTGYKILGHGRIKILRRNCRFNQSRPVEGTIKTVTVRRDALRDIHITFSCEQVPQPEEAPKTGLSAGADFGLKNFLTLSTGEKIAAPQPLKSQLRHLRKAQRALSRKNKGSKARARAKLDVARVHKKVANVRSDWQWKQARMLLLTFDLLVFETLNLRAMQQLWGRKVGDLGFADFVSKAGWMATKLGRDLVKINQWTPTTKRCSCCWHIQDVALNLRVFVCERCGHTEDRDLNAAKSILEEGRLLRSGATRKAPQEASGALSPPNPTDFSRGSASNI

SEQ ID NO: 51042 - protein, 524 aa, Streptomyces sp.
VAVRDRLKHLTAEDERVLRAVGEHLGRLASLDLKARCADGLEHDSDRWSARKRILTAPSSSRWAGSITRATHDQWALTRRCQLAHIQKLEAGIRELRHRMSLPIGQPGSKRAPGGYRSRQEWHAKSRRLACLEARLETARADWQAGRVRAVRGGKQLLTKRHHLAESQLTEDQWRRRWEVARWFLQADGESGKRYGNETIRVTPGGEVSIKLPAPLAHLANAPHGRYVLASRVQFKHRGVEWADRVTTNRALAYRIHLDTARGRWYLTASWQRPAVRTIPLGAARIRGMIGVDTNGDHFAAYRLDAHGNPVGDPHHFFFDLTGPTSHRDAQLRHALTRLLHWARRCGVAAIAIEDLDFTAEKTREKHGRKKQFRKLISGMPTARLKARLVSMAAELGLSIVAVDPAYTSKWGAQHWQKPLTSTTRTVTRHDAASIAIGRRALGHPIRRRTAPPRIHQSDGCGHRTAQADSATQGCEEPRRHTTDRAPGRPLPGMESTRVTRRASNTVRDTRSDQGWVKGSSLLT

SEQ ID NO: 51043 - protein, 414 aa, Streptomyces sp.
MKLVVQVRLLPAPVQATALEATLRACNEAATWASQVAFEQGVKSNFALRRLAYDEVKAQWGLGAQAAQHVIKKTCDAYAALKANLKAGNLGRRDSKRYRRAVEKPVVFRPNGAQPYDDRMLSWQIAERRVSIWTTAGRIKDVAFTASPEQLAALALHRKGESDLVCRDGMWFLNATCEVPEAPLNTDPVDFLGIDLGIVNIATTSDGEIMAGRELNRGRVRERQLRSKLQKKNTPSAKRRLKKRRRKEARRAKDINHKIAKHVVAEAERTGRGIALEDLTGIRERVRLRKPQRAAHSSWSFAQLGAFIAYKARKAGVPVVYVDPAYTSRTCAECGHIDRANRVSQAWFACRNCGFVDHADRNGSRNIQARAWELWRRGAQSTAPVPPPERTRRGGAGRKRSITPSGARCASPSL

SEQ ID NO: 51044 - protein, 403 aa, unknown
  TnpB Polypeptide
MIKAFKYKLNPTKIQKMFFNKSFGCCRYVYNWALQKRIEAYQSDGIKLTAIDLCKLLPNLKKMEDTYWLNEVSSVSLQQSIRCMDTAFTKFFREHTGFPKFKSKHSRKQSYKETDGVNIDFNLNRIRLPKIGWVKFYPNKKFEGKIGTVTISKSSTNKYYVSINVDDSIPYPDKSPIDPNTSIGIDVGIKDFAVLSNGQVFQNPKHLGNAEKRLKCLQRRLSRKQKGSNRRCKAKHNVAICHERIRNRRQDFLHKVSKKIVSENQTIIIEDLNVKGMLKNHCIAKGISSASWSEFFRMLQYKSDWNGVNLIKIGRFEPSSKMCKCGYIYKNLKLSDRKWVCPSCGYINDRDLLAAQNIKKFGLEKQNLLSQENINKTPVVNRVGDVESLAIARAVKRQIISIN

SEQ ID NO: 51045 - protein, 372 aa, Lyngbya sp.
MFTALKVRLYPTKQQRIHLAKELGCARFVFNRFLADWNNTYQETGKGLSYTKCANQLPALKKELPWLTEVASQVLQQSLKNLDTAFKNFFRGTGRHPRFKSKHRKQSATYPQGFQVNGNSVKLPKLGEVKAKVHRQIKGKVKSITVSMTPSGKYFASLRIELSGELPEQSTEGKVIGIDLGLNALIVTSDGDKIKPPKFYRYYEKKLAKYQKRLSRKTKGSANRNKARLKVAKVHNKIANCRLDSHHKLSRKLVDENQVIVFEALNIKGMTRNHCLAKSINDAAWGMLQTLTEYKAKEQGKVVDFVDRFFPSSKTCNCCGYRMKSMPLNIRNWECPNCGNLHDRDINAAGNLRDYFLAVRPRAGFPTLRNAD

SEQ ID NO: 51046 - protein, 152 aa, unknown
  TnpB Polypeptide
MNKTARRVIDYCIEHDIGTLVVGYNETFQKDSNIGRRNNQTFVNIPYGKLRDKLEYLCELNGITLVMQEESYTSQASFWDKDVIPVYKSADIEKYHFSEKRIHRGQYRTASGQVLNADVNGALNILRKSSVVDANIVYTVEAKWTRNKNTEY

SEQ ID NO: 51047 - protein, 330 aa, unknown
  TnpB Polypeptide
LLSDTWKQFKTVPGTSIPTFHKKGYSSSYQTNAQYQKDAVLISDGNVYLTDKRHIKLPKLGSMRFKGSNRIHKIFGRSDTRIGTIAISKDEINRYFVSLQIGSTEPFHKTAKTKPISKDKIGSYNELNVIGIDLNLDNFYTDSNGVVVDNPRYRKKVQDQLAREQRKLSKRAERAKKDGRSLKDSQNYQKQRIKVAKLHKKAAAQMKDFQNRLSKMLVESQDIICIEDLKVKNMIKNHKLARAIADTSWSQFINMLVYKGRIYGTTVVKVPPQNTTQTCNSCGYVLTGEEKLTLKDREWTCPCCGTKHNRDHNSAINVKIKGLEMLFTAA

SEQ ID NO: 51048 - protein, 445 aa, Leptolyngbyaceae sp.
MINRKPIIRTDKWSLNPTAEQRVLFAQTVQVYRRLCRHLVGVIFIHWSELGSLANQEVIPALERLVHQTTRNPEVKYPGIDRVFHKFPSYYRRAAIAFAVGQVSSFVTRYQQWQSGSRSRRDAKPPTLNANAGCYPVLYRGQCYKLHGHEQIEIKVFTGKDWVWTTVQISGLRERHTVDSNKQLSPSLVFNDQACHLSVPFECHPAKRQPDDVVVAVDLGINTTATVSVVRFDGTVIHREFIHPGRDIDRRDKRLKSVSVRAKKTMGSGGNLHKGFCSNTYRKCRNINQQIAHITAKRITVIAQQFNAHAIVFEHLKGWKATGGRKGSTLRQRFHGWLKAMIRTFTEMKWQEVGGKTLDVVAAYTSKLAYDGSGIVQRDSGNYALAKFASGKRYNADLNGSVNIAARGILKLSCRKDSEECLGRSSRHSPRSWACLCDLWTQSSG

SEQ ID NO: 51049 - protein, 386 aa, unknown
  TnpB Polypeptide
MELTVVATHDLSPQDKERLNYSLNIFAGACNAISKVAFERRCFNPVALHHLTYRDIRKRFGLHANLVIRARDRVAKAYKTLKANKRPLKLLTFKAQSLDLDARLFRLFWKGDELWVSIAACDGKRVKCPVKVGQRYLPLLKAQKPTFATLKRHRDGDLYLHIAVSVPDPEPSDPPINVVGVDLGEIALLVASNGFKVSGVELIERRKRFRARRSALQRKGTRAKRARKRLSDKERRWARTYLHTVSRRFVDSLPPNSLVVLEDLKGIRDRCQREGADQRAQFHTWAFRQLQFMIAYKARLAGHQVVFVKPNHTSQTCPRCGHISPSNRLSTRLFHCQKCGFQHNANFVAALNLASRAAQAGLGGAGLPSTSLMLRAFNPLSASCRL

SEQ ID NO: 51050 - protein, 442 aa, unknown
  TnpB Polypeptide
MFKRKFTTVTQLHEMNNQNIIDYIESARGTYAQALRKTFHVIKNSSDFNKSSYNTHLQKNYGILKRTANSIIADAQGRFNTIKELKVYEQKQLINKTKSLKSKIEKLEEKKADNCTMLRAGLEINLIKHRNLKRKLVSKKNKLNKMKQKLENLTYQIESGCYKLCFGTRKYLGSDYQSFINQRDSQISFVGSKTETSCNQMLQLHFNSKNNQFELKLRKDIGGFKDADDKFVFGRVYFKHYQGEIKEVLRRHHSPLSFKIIKRNGRFYLYCTFEIQMDRSDFQTCSSYGTIGLDFNKDFVTLSETNEYGHLVNTQFLPYRFKSGNKTSTDLEVIAIKVVNQALDYGKDLCIENLDFKDKKADTQSKIGQKYNEMIHSLAYRQFVNKIEQCAYRNAVFVRRVNPAWTSWLAKQLYCPVMKLNTHVGASYVIARRGQGYKDTAK

SEQ ID NO: 51051 - protein, 402 aa, Streptomyces sp.
VTQQVRRAYRYRFYPTGEQAAELSRTFGCVRLVYNKALEERTRAWYGQQRRISYVESSAMLTQWKKTEELAFLTEVSSVPLQQVLRHLQSAFANFFARRAQYPRFKSKKKSRASAEYTRSAFTWRDGKLTLAKMTEPLDIRWSRPLPDGVEPTTATVSRDAAGRWFVSLLCADTVAPAPATTAAVGIDAGITSLVTLSTGEKITNPRHERRDRARLARAQRALSRKEKGSANRAKARVRVARIHARITDRRRDFLHKLTTRLVRENQTVVIEDLTVRNLLKNGKLARAISDASWTELRSMLEYKCAWYGRDLVVIDRFFPSSKLCGACGTVAAKLPLNVRTWTCDCGATHDRDINAARNILAAGLAASACGDGVRPQRESSRTGQSSAKQEPQRATAGTPLP

SEQ ID NO: 51052 - protein, 471 aa, Acidimicrobiaceae sp.
VAALTPGNPVLRQHKMTTPGPTKWSTYAGPLVMVFAGGSASNEPELKLPVRLPQGRGQWDRVVHFLGSPDTWHKIDLVRRHDSSQPGGWRYEVHLLVLSEGYVAECNRALLDAAPTDRAACVDVNVSNLAVVSVDSNDRDPRSTVVRRDADERDRLARADAKRRRGARRADRSRRANNANQYAKSRAKLKRDERRAARGLRAVTDSTPLGPRLANANGVPRQAYRRDQLSATYRDRRHREGERARAQSLTKQTRAHDAAVKMVAAHGVHWLIEECNLTAWAKLWGKSLHAFAPGIVTTELAALAASRGGSFVKVATGPTALSSHCLCGHRVKKSLSERRHVCGACGFSGHRDLVSAALGTCVKHADLSDPLSARVDYARAGALLATLSSPPLTHGRQDALTSQTHPLVSSRRSDATHHGARSVASSHRAARLNARRTAQSTNGPGSLGPAKVAHGSALRCISPPGDLRLSS

SEQ ID NO: 51053 - protein, 425 aa, unknown
  TnpB Polypeptide
MPTIAITMKLHLRPSEEDALAFTAMSKAYMEACNFVSQYAFDNGSFLSTTKLHKALYQAIRSRFGLKAQLAASVFRTVVARYKAVREQLWQRPFRYKDENGEWQSIPRNLDWLQHPVQFHRPQADLVRNRDYSFAQKGTRISVNTLGKRAIMSYDKPECFAGFFDGSWSFGTGKLVNLLGEWYLHIPMTREVDDAAQAEIGSYTHIVGIDRGIRFLSVSYDEKGKTGFASGREIMAKRQSFADVRAELQSKGTKSAKRALKRISGRENRWMRDVNHRLTKALVSEYGAGTLFVIEDLTGISFAEGNQRDSKGNRELHSWSFYQYEQFLSYKAQLVGAEVLKVSPKYTSQRCPKCGRILKSNRHRETHEYVCDACGYRTNDDRAGAMNIQYLGQLYAAGDPEPKFALQEPAPAAVIAADPGKAKSA

SEQ ID NO: 51054 - protein, 361 aa, Brasilonema sp.
VLLGFKTELKLNNLQRTALMKHCGVARHAWNWGLGLTKQILDHNKANPNSKIKFPSAIDLHKWLVALVKSEHEWYYEVSKSTPQQALMALRESWKRCFNKTAGVPRFKKKGRRDSFTLEGTVKILGNNKIQVPVIGVLKTYERLPQVKPKSCTISRQANRWFISFRIETETHSTEHTDVVGVDLGVKTLATLSTGEVITGAKSYKKYESKLSRMQWLNRHKIIGSANWKKAQMQIAKLHRKIANIRKDTLHKLTSLLAKNHGRIVIEDLNVSGMMANHKLAKAIADMGFYEFRRQLTYKCELYGSKLVVVDRWFPSSKTCSNCGTKKETLTLDERVFECGHCGFSLDRDLNAAINLSKIAS

SEQ ID NO: 51055 - protein, 409 aa, unknown
  TnpB Polypeptide
MRLVEQHIIRKGDPRYAKIDAAAFASKNLWNAADYLVCQSFIVQEKYLNNTEVFHQIKSHEAYQALPRKVSNQVLIQLHDAWKAFFEAIAEWRKHPEKFLSRPKLPKYKHKTEGRNLLVYEWKAVSKRALKRGMISLTGLGDLVKTKVSRAALYQVRIIPKGTHYVLEVVYERPETQAAVSSVLFASLDPGVTNLAAITSNKPGFVPLLVNGRALKSINQGYSKQREHLQKQLAKQDRLTSRRLKALTDKRNRRIQHYLHVASRAIIDRLVDEGIGTLIIGKNVFWKQEVEMGKRNNQAFVQIPHARFIDMLQYKAALVGIAVILTEESYTSKASFLDRDPLPTYDPKRTEEPRFSGRRKGRWYYASGKRVIHSDVNGSYNIGRKAFSTAFDGLEIEAPAVRPIRLAVK

SEQ ID NO: 51056 - protein, 432 aa, unknown
  TnpB Polypeptide
VHARTFGCVRVVWNRILSDRHARYAAEGKSTSYAETDRALTEMKKEPGLAFLSEVSSVPLQQALRHQHAAFSAFFDGRARYPRYKSRNGRQAAHYTRSAFRIRNGELWLAKSFAPLKFTWSWPGVDFAALNPTMVIVARESDGRWYVTFTVDTCDPEPLPETGRAAGVDLGVKDFAVLSTGEKIGNPRHLERKARNLARYQRRLARCQKGSANRVKAKAKVARAHRKVRNARSDFLHKASTRLVRENDVIAVEDLNVAGMTRRPRPRPDGDGGWERNGAAAKAGLNKSVLDVGMGEFRRQLEYKCERYGRTLLVVDRWFPSSKTCSACGHLLKTLSLSARRWACPSCGARHDRDVNAAKNILAAGQAVARSNPGDACGADVRHEGTPPVRSAVKQEPRPREPESPSFRAGSSQGVTTSAAGARRSRRARVRS

SEQ ID NO: 51057 - protein, 445 aa, unknown
  TnpB Polypeptide
MKILSTYKVKIKTYNYIFRGTVEVYRHAVDFLINVCLKEWAEIKKIDLSLSRQQYVERLCHFTKKHPETVYDFDKKFYKFPSFLRRAAINEAIGKVSSYKSNLKNWEEKDPNTRGRRPSFPRAGYICPCMYRKNMYQRTGAYEARIKVYIRNTWDWLDIKLRKSDMDYIDRRCSGRRMCAPVLQKRGKEWHLDFPFEEFLELCDVDVADRIICAVDLGINSAATISVMCSDGTILGRHFLKLPKEQDCLTHSINRIKKAQQHGNRKMPRLWAKVNGINHDISVKTAEFIMDVAVLYNADVIVFEYLEKKGKKRGSRKQRLHLWKSQEVQRIVTDKAHRLGMHIARICAWNTSRLAYDGSGRVLRGKQAGFPSYSVCQFQNGKVYNCDLSASYNIGARYFIREILKSLPEKERLALEAEVPQVAKRSTCTWSTLIRLNAELVSSVA

SEQ ID NO: 51058 - protein, 390 aa, Streptomyces sp.
MKLVVRVKLLPTPVQAAALEATLHACNEAASWVSATGFEAKTTTNRALRDRCYATVKGQWGLGAQAAQHSIKKTADAYTTLRANLKAGNHGRPGTKRYARAAGKPLVFRKDAAQPYDDRMLSWQQSAHTVSIWTTAGRLKGVAFTGRAEQLAVLAAHRQGESDLLHRDGAWYLLATCEIAEAALNTHPVAFLGVDLGIVNIVSTTDGTRHSGRRMNRRRENDRKLRTKLQKKGTKSARRRAKKHAGKEKRRARDINHKISKSIVAAAQRTGRGIALEDLGGIRERVRLRKPQRATLHSWSFHQLGTFIGYKAKRSGVPVVHVNPAYTSQECSKCHHTERKNRPSQAVFTCRVCGFVEHADLNSSHNIAQRGWMAWVCGAQSQAPVLTLIA

SEQ ID NO: 51059 - protein, 530 aa, Boseongicola sp.
LPAGRAARPGPPRPAPTERAQRAEGDQPGVQPWGHGLDVGHVEGELACRVPPAGAPRLREAGAAKPGTSCSTTAASSGRSGRGPTRLISPQSTFTACGSSSRCQRRSTRPTRVTRGSSGGDQAGPVSRSAPSAMVRNFSMPKTRPCRPSRACRRRTGPGPSSRTASATAGKSRIQAGSRRTAPKASAQRSKDRFQPSRGAADQTLRPIRCGCPGPSCGGSGASSRICPARPAPGSAVAQGAPSASRCGKPSSAARTVKTPLRVVVQFAAEVEDRPFRPAASVGINMDVRERDALSTGETVPAVRIGRRPPERAQRAVSRAKRVSDSRRRKVKALARERERTRIRERDALHGISAGIVKRRRRIAAEALQVSNMMRHPTLARPIAERQWGRLAKQLTCEDESARGEVVRVRPRHTGTDCHACGHRRKMPLGARELACDGCGLATDRDVNAARNVLRRGIAPAGRESVRRTVPARPGTFLHHVPPGCRGRTRSGPRPADGWSRVQNAQNEPSHHCWKRQRASRAPPLSSIST

SEQ ID NO: 51060 - protein, 441 aa, Iningainema sp.
LLLTDIIQTQLIRINLPEFETNILEFICRRSNSLWNQAIYYTHKNHELTHPTSFSPNVSYEQLAGDLKDEQNYKLLYSQVAQQTLKSVAEGFKSFKELLLMWRKGELPHMNGEPRPPKYRKKGGLFQVSYPAQALTFELDSPFVRVPLGQELTALEGVQYLYLPCPFGIQPEQICELTIIPRNREFYAVYSYKKQPLIAINLDKTKALGIDHGRDNWLTCVSNIGTSFIVDGLEIKSINQWHNKRVATIKEGKEADFWNNRLAKITEKRNRQMRDAVNKAARLVIDHCLENGISTVVFGWNPGQKQRTEMGKIGNQSFVQIPTGRLKERIKQMCDLHGIQFVETEEAYTSKSSFVDGDELPKHGEKPIGYKPSGKRVKRGLFRTGLNWYINADCNGAANCLRKVSTTLGLVLDGVSRGSLATPARLRIWNGASKRPLPGLA

SEQ ID NO: 51061 - protein, 402 aa, Neobacillus sp.
MYMTIYEEVKVMLVNKAYKFRIFPNKKQTELINKTIGCTRFVFNFFLGKQKAKDAYWYIVDEMVQNGQLPANHWRGPYLNKYETVKSLPELKKHYSFLKEVDSIALQKSVENLADSYHRYYKKQNKQPRFKSKKNPVQSYTTKHTNGNIEVIDHYIKLPKLGNVRFAKSREVEGRILSAIVRRNPSGKYFVSLSSETEVAELPKTNSAIGMDVGLKDFAILSDETVYSNPKFFRTLEEKLAKAQRVMSRRTIGGANWYKAKRKVACIHEYIANARKDYLDKISTEVVKSHDIIGMEDLSISNMLKNHNLAKAISEVSWSQFKTMIEYKAKWYGKQVVTVAKNFPSSQLCSGCGYKNKDVKNLGLREWECPKCHTHHDRDINASINLKNEAVRLLTVGATGIA

SEQ ID NO: 51062 - protein, 1066 aa, Kitasatospora sp.
VHLRYSYRLYPTAGQRQALARTFGCARVVYNDALAARKQARKDGLPYPRSADLQKLVITGAKRTAERAWLASVGVDPLIQSLRDLDTAYRNFFDSVSGKRAGRQVGLPRFKSKRDNRQSLRFTRNGFRIRGNGKLNLAKIGDVRVKWSRALPADPSSVTVVLDPSGRYHASFVVDVEPQHLAPLDTEVGIDLGLTTYAVLSDGTVIDNPRFLRKAEKKLKAAQRALSRKARGSKNRAKARRKVAKAHAKVADTRMDWAQKQTTRIIRETQAVYLEDLNVRGLARTRLAKSVHDAGWSTFRRLLEEKAARYGRHVGIIGRYEPTSQVCSTCGVLDGPKPLSVRTWTCGACGTCHDRDLNAARNILAAGRADRLNACGGPVRPGVAIPRRAHPVEQEPTGTPTAPGASPVPQARPESPCFSTGRKSIVASDHMVDPAGGGVADHDPAGRELARDQRFGGVHGRWGGAAGEPAQGAGAVVPDRPHHPAVGGPGDQHRLAPVVDQADHLGVLPERQPSILAEPGPDVPEPAVLGPGGRAARVHQVPGQPLAGLRRPLQQPWLAVPFEAVRALRAPVDRAVVGDGTVGRDPAPAAGDRDEQVVPGAQQRQQGTARQRLRDRPVEAEEGRVDGELRGPADLSAADVPEHPAPVEVQGEQPAAGPACGDHLAVQVVRLGPGDGVVLVFGQAHVRGEQGPLAPAPGEQNGRIGGEGGQGPAGRAGRVGGRRDEHRPGPPELRAAQRPDGDVGCGQRQFDLGAVEADGDVGGAGRAPAGHLGGEDARRAGGSTRCRSGTGRQVREPFGEPGRGEQPDAVGGVQVGGGLPHLLGGRFGGAPGREPGGQQVGGVAGEPPAGRVAEHSHQQFAAAGGGPAVQHQQRGQLDQSAGSGLGRAGVDQDDRPAACGGTAELGCEVEEFAVDEAAQELVGVFLGEQPFGGQQLLRPAGAADPARPVRLPRSVGHRLADTDQLVQASQQRPQGDCEFGAQRGERPGPGGEGGGQPGGAHRPARRVRGVRASGSVAAAGGAATRACPGTSRQSSPGRAPRAARQRAAAGRGRAVVGTSNSPSWPR

SEQ ID NO: 51063 - protein, 417 aa, unknown
  TnpB Polypeptide
MGVGKPQNNRPRAGLGFRVYKPKVSRVNREKLKTLYNDVINYILGVVHELKGSKYLVYYADGWKGMYENTKEMRREAGKRTPPRTPPLLVPVRFVMPNGAMRGDKNAPAVIDLKRGELRIPSYGVTQKLQRSLVEALIEENELEPRPDFVLQVTRRGFLRLIASRYVRAPVALPLRLICIDENSLNGEALGVWDVLKPGRIVRSRYEEVMPRNRGFLDRVAALFQSAAAGKAGALEEVKELLREAGKSEAEIAALLAPEKLAEISAKTLEREKRLNRAFAEELTARVRALVREARARGWSVAIVVDPIDSESLKGSELQRTLLKPRKLLRNLALYEGARFRLYRVSGKQCPMCGSWGVEVGHRRYRCPHCNIEWDRDKCATFWLAKRFLDEHFKEECSDETYVDLDGWLRKHPRGLL

SEQ ID NO: 51064 - protein, 459 aa, unknown
  TnpB Polypeptide
MCSADLGRPRPAGRPRDRGRPGPFGIRPRSSRSRHGDPGFQAWEGTPLHLPGNVSSSRYCVRMSRYRLLPSPAQEAVLRDHCAHARYLWNLAVEQHSYWRVGRTSAPGYLEQCQQLTQARAEHEWLRQGSQTVQQQALRDFARAMSAFFDPANPAGRPSWRKAGRDEGFRIVGRGRQWEVRRLSRKVGQVWVPKAGWVRFRWSRAVPPGVKSYRVTMDRAGRWHVAFAAIPDPVLAPGNGEVVGIDRGVAVSAALSTGELLRVPGLAARERTRRRRLERKLARAKRGSNRRARVKHAIARLGARETDRRKDWAEKTSTGLARRFDLIRVEDLNVKGMTRSARGTVQAPGRNVRPKAGLNRAILASGWGLLVRRLGDKAPGRVEKIRPAFTSQRCSACGHVDAKSRESQARFACTVCGFACNADVNAAQNIAAGHAVTARGGFRDAGPVNREPQLLLQSA

SEQ ID NO: 51065 - protein, 404 aa, unknown
  TnpB Polypeptide
MKLTFKYPVYPTKTQETTLLSWLDHLCELQNSARNNRKHAYEEEGRFVSQGEQQALLTAAREKYDDFREVPQDFQVSVLKRVDKAFDAFRRRCKEGAEKKGYPRYKTRVRSLTWCLRKHKVKDKETGGVKRVRQNPIIETDFRHNRLKVPKLGEVKIRMHRPLQGDPKEVTLLKKASGWYAHIVCDIPDTPKVEPTDAVAVDVGTAHYLTTSEGEKEDNPCWYRQAEGLLHKHNQTMARRKRGSQRWQKAVHATALHHEKTTNKRKDFIGKLVFKLFHHEKNNVLVTEDLGISNMVQNKHLSKSISDASWGKFFEWAGNIAERDGFHFHQVNPKNTSQTCSSCGQKSPKKLSLAIRTFDCSFCGTSLDRDHNAAINILLRAACAHRGERWVTNLCETRNLSVDR

SEQ ID NO: 51066 - protein, 373 aa, Paenibacillus sp.
MLVNKAYKFRIYPNKEQEILIAKTIGCSRFVFNYFWDKWNQAYKENGKGLTYHACSARLPHLKKEFAWLKEVDSIAIQSSLKNLADSFSRFFKKQNKAPRFKSKKNKVQSYTTKHTNNNIAIVGNKIKLPKLGLVRFAKSRELEGRILNVTVRRHPSGKYSVSILVETEVNPLPKTDSAIGIDVGLKDFAILSDETVYKNPKFFRTLEKKLAKAQRILSRRKKGSSNWHKQRIKVARLHEKMTNARKDYLHKISTEIIKNHDVIGIEDLQVSNLLKNYKLAKAISEVSWSEFRTMLEYKAKWYGKQVITVAKTFPSSQLCSSCGYRNKDVKNLALREWECKECGTHHDRDINASRNLKNEAIRLLTAGTAGIA

SEQ ID NO: 51067 - protein, 460 aa, unknown
  TnpB Polypeptide
MSIRAYKYRLYPTKNQTETLNRFFGCARKVYNLCLAWYIDAYNAYKSDGIPIGKQPDYTHFRNMPEYAFLKECDSVALQQARRHFDDALEAFFKSRKGERKGRKAGFPKFKKKGAAKDTYTTFNNGGCIKLSADGKRIKLPKVGMVRIVLHRPFVGTIRSANVSRSRSGKYHISLTVETGQPERPMFNRVPRVSNPSVVGLDMSMEGFAVSSDPSDVTKPKYVREYRRNERHLSRLQRKLSRKAFTGTGEYRTDSSGKEVEIRRPSKNREKARLRYAKACERVANRRREFCIQTALHYVRKYDVVVLEDIDLQSMSRGLRLGKSVNDLAFGEFRQWLEHEAGKYDCYIHYVDRFFPSSKLCSGCGWKNDGLSLSDREWTCPECGCHHDRDVNAAINLRDEFLTRYNTAGTAGIQACGDGSSTLRETFGCLLSQDPFEGRKQEAVRLGVAGMCDACDFGRG

SEQ ID NO: 51068 - protein, 477 aa, unknown
  TnpB Polypeptide
MPVYPCVLCRRVPAWFVSGGWCAGCMPRRRASQSPRVVYRTARAGLRVTRGQRRRLVGLLISAGDVWACVLELNAWRRARQDRPFASYSELCRELAASGPGTFGELDSHGARSVLRRYSDAWFASAKRRNEGDRTARFPRRRRALAPVRWYHGRFMLEGRRLRIPVAHGCPALWVRLDRDLPHPPEQVRSITLLYDAGRLWVDVTAEVPVACHPAGHEPDPGRVAGVDLGIIHPYAVAGPDGQALLVSGRAIRAEHRMHLADTKGRVRAVARRAPKPGQKGSRRWRHYRRRQRLVEARHRRRVRQAQHEAAKTVIAWAVARRIGSLAVGDPRGVLKVDAGRRHNQRIREWRIGHLITVLKDKAEAAGIGLQLVDERGTSSTCPACRSRIPKPAGRVLACPACQFTGHRDLTAAANIAARLGGGITPVIPAGVTHRRAGAHLPGVAPSRRDPRRRAHHRGARGSPGRHRPARASPTPG

SEQ ID NO: 51069 - protein, 554 aa, Streptomyces sp.
VNVARERRRKRDLTGLAPAFTIAAPSGARIRDRLRPAPEDEKVLRLVGEHLGRCQRADLAERVRIGQVTPKDARRAERKRKLTAVSSSRWAGAMTRASEDQYQLSMRCLYDERVGLRRAIGAITRRLAAPCGKRAKNGVRGYADQNERVHKQRRRQVLEAKLAVVEQKIAAGQPSIVAGGRRLAKLRHHLADACLSEAEWRDRWEAERLFITADGESGAPHGNYTITVDPADGTVTLVLPEPLRHLSNAPRGRYQFACTVTFHHRRDEWLDRVTAHRAVRYDIIRDSARGRWHLDASWAAARAMPPTPSEIKARGERLLGVDLNADHLAACVIDMHGNPVGAPVTIPLRLAGPASTRDGRLRAAISQLITMAGEHGCVGIAIEDLGFAEARQAGRETMGRGRRGKKFRRTVADIPTARFRERLRGMAYHAGLVVIAVDPAFTSRWGGQHWTKSLQEQSKKAKVTRHHAAGVAIGRRDALGHGIRRRPGVTAHHRRMVMRRATGQATSLPRARGAASPPRTAGTPTPGGKTRPRRGDQLTLFPDLEDRSRGHRTT

SEQ ID NO: 51070 - protein, 411 aa, unknown
  TnpB Polypeptide
MLLCKKIKIEVSQQDAEALEFMQGKCRGLYNWWVMKLRAGERWSFKRAKQSLRESKQYDPELRYVYGKLLAEVYFRLDKAMHAFFRRLEAGEKPGFPRVKPRHQFFTLCYPAMYLEVQGKTIILPTGGGGNWGPKRYPNIVARLTEEPPAHFREVAVSRDACGNYYCSFVYDDAQQDGSETPQAKMKRKLRPPPSRRREGVVAFDLGIKTLATGVNDQGRFYYIGGFKGYRWYNKQLDKIRSKRDKCKKKSRRYLYLSRVYKRVSEKERRKQQDCLHKASHLIAHRLAERAVVIGDLSQRQMVLKKQEHETAKERRKRQIRNRLVYNDWGLYRFVQMLEYKCLRSGKTLHVISERDTTKTCHRCGCKQAMPLWQRTYCCQNCGLVMDRDENSALNIYQRFLARLGPHTSAI

SEQ ID NO: 51071 - protein, 348 aa, unknown
  TnpB Polypeptide
MILTYKIRHEQNFERELELAKKVAEYGLATKSITSKDVKHLGLKSAISNQILKKYSRNKKLQRISSVNLTIPNQSIKIVNNKIYVPCLKLSLDIYFDKNFTKINQIEISKEFAFISVSYEEPKVCKPQCLIGVDRNTIHHTLVASNLKTGKVLKLGKECNHIHLKYKHMRKSLQEQGKLKKLKSIKQREKHIIKDINHKITTALVNYAKQVKGGIVLEDLKQIRQTAKTRRKQRYSLNSWSYYQQQMMLEYKAKKFGVPIFYVEPQYTSQRCSKCGHIESSNRNKNLFQCKKCGKVEDAGVNAGFNIASLYQQGIPKFCKESDLQKGNTDTPKEALLVKPSNFRTQSL

SEQ ID NO: 51072 - protein, 485 aa, Streptomyces sp.
MKKFRPQPGFVVQAFRFALDPNASQEHALRSHCGAARTAYNWAVGWVEASWWQRRAEESYGITEAELTEWRPWSLPALRKAFNQAKTTDPRFAAWWEENSKEAYSTGLANASAAFDNYARSKQGKRRGKRVGTPRFKSKRKARLACRFTTGTIRVDTDGRHVTLPRLGTIRTHEPTVKLLAHVEAGTARVLSATVRHERGRWFVSFQAEVKRDLERVARPDTAVGIDLGVKTLAVMADSTGEIRTVPNPGHYDAARKQLRRASRTVSRRQGPDRRTGRKPSKRWEKANAQRNKMHHRVANLREDALHKLTTSVAAEYGTVVVEDLNVAGMLKNRRLARRIADAGFGEIRRLLDYKTRQRHATRLVAANRWYPSSKTCSGCGEVKAKLPLHVRTYECDACGLVIDRDDNAALNLAALAAACTTGTGVAGDQDTAPAASKPRGADRKTRATRTRRKTSAGRAGGATLPHQRQQETRDRTQAEALTLW

SEQ ID NO: 51073 - protein, 388 aa, unknown
  TnpB Polypeptide
MTTGDEGFLTLSIGVRVSPEPVVIELLHRYRDALNYAINKILDNNLKTLKQVHNFLYRDLVERFNLPSRIALDCYRDALANANAWRNNPKRGKRPVVKKLSMLLHPGSGYRIKDGHVEIIGGMRLRIIGWDRRYDNYDNREARLVYKRDKLFLWISKRIPKPKRYTPIDVIGVDINEQKIVCGDEIINIEKDTAIDRAYRYIRLAEELQRKYSSSRYPAWRRRKRILNRIRSYHEKARNILIDWTKKISLEIIRLARELRYAVSREDLTNLIRSLRELPKDHKRKLIIRGYSRFERWIDWQAEKHGVPYVKVDPNGTSSECPKCDYKKLEEIGYRRFKCPRCGFEADRDVIGKLNVRKRGLRKLGIYPRGEALTPLTAPQMTDVNPNR

SEQ ID NO: 51074 - protein, 383 aa, Sphaerisporangium sp.
VFDVRLVVQVKLLPTPEQAAALEATLHAANRAADLVSRIAFTQRCFRNYDLRKHTYDRIKAEFGLAAQAAQHVIKKVADAYRTLHAGLAAGNLGKPGSARRVKAGSKPITFRVGAAQPYDDRCLSWQLQERTVSIWTVAGRLRQIAFTGSAGQVAMLAAHRRGESDLVCRDGCWYLIATCVLPDVPVTAPDGFLGVDLGIADIATTSDAVRHSGKGLNAVRHRHRRLRRRLQARQTKSAKRLLKRRARKEARFAANVNHVIAKQIVTEAERTCRGIALEDLQGIRERVRLRKPQRVTLHAWSFHQLGGFIAYKAARRGVAVIHVDPAYTSQQCSACGHVDKKNRPDRETFCCTSCGFAEHADVNAARNIASRGAAGWAVSHAA

SEQ ID NO: 51075 - protein, 420 aa, unknown
  TnpB Polypeptide
MPMKTSVGVPCAVRALSFPAGILPPSLRGLLAEFRLLVNKSIRLALRDDLRSRYRLAKTAYAGLSAEHDVYKQYIPSAFEVALAILKVYRRRVRKGKRTNVPYVRRLLLKAENQSYRLDPATGRLRIPIRRGEHVDLDLPLSEWHRSLLSDPSWSLGSLTVTRERIVVAVRKAAPAPYEPAAAIALDTNEDSLDGVEADSGTARLVTLPLSGVRQVQAAHFRQRRRLARRKAHDRRVKQRLLAIEGRRERNRVTQRLHRISKGLVKEARAHQAAIVLENLTLHGAGGRSHRMNRRLSSWPRGELHRQIQYKAALEGVPIIKVNPAWTSKTCPVCGARRRDRVGKDFVCLLCDWEMDRQHNAGLNILKSALASNEALARAVRFQPGALRDDVVIPLCDLLRGGVGAREEPSGVECVAEEVR

SEQ ID NO: 51076 - protein, 373 aa, unknown
  TnpB Polypeptide
LLKSLKIRLIPTEQQEELMFKTIGCSRFAYNWALSKCNEHYESGEKYSMSNIRKEFTQLKKQEDYKWLNEVSNTAMVESMRNLDKAFKSFFKKNSKYPKFKSKRKSKQSFYVRYDALYFKDNVCNIEKIGKVKFKTNYKIPNCKYSNPYCSYDGRYWYLSFGVEVEENQTTLNPKLSIGIDLGVKELAVCSNGITIKNINKTKRVKKLKKQLKRTQRQISRKYEYNKQRNKFVKTQNIIKLEHKAKMIYRRLSNIRNNHIHQSTARIVNEKPYRVVMEDLNIVGMMKNKHLSKAIAEQCLYEFIRQMKYKCEWNGIKFIQVDRYYPSSKTCSNCGNIKIDLKLKDRTYVCKHCGLEINRDYNASINLSNYELV

SEQ ID NO: 51077 - protein, 384 aa, unknown
  TnpB Polypeptide
MIINKGSDEMKSFIVRLYPTKEQEILFYKHINCQRYVYNWALNLNNELYRKDKKKYSSTELGKMLTQYKKQEVWLSEVSNATLKESIRNLDKAYTNFYKKRAKLPKFKSKKKSKLSFYSRYDKIKFYQNNTVNLEKIGKVKYRSSYDIDFTKENSFKNPHVSFNGRCWVLTFGLELKNEVDIPTDNVIGIDLGIKYLAVCSDGVVYKNINKDASVKKLEKRLKRLQRQVSRKYELNKKGGNRYIKTNNIKKLEKDIKNIHRRLKNIRLNHLHQTTADIVKTKPYKVVMEDLNITNMMKNKSIAKHVSKLGLYEFIRQMKYKCEWNGIEFIQVDRYYPSSKMCSKCGNIKHDLKLSDRRYTCKCGLNIDRDFNASLNLMNYGLSH

SEQ ID NO: 51078 - protein, 402 aa, unknown
  TnpB Polypeptide
MNRVEKHIIKSNNKYYKMLDEYCFKSKNLYNYANYIIRQEFINNGKWIRYNELDKILKKEDNNYDYKNMPLGSSAQQCLKLLDKNWKSFFASIKDYNNNPSKYLGRPKLPKYRPKNGRNILILTNQNCKIKNGYIKFPKKFKGLLIKTKIRNGLQQVRIISKDKYLVIEIVYKIEDVEPLVDNGRYVGIDLGLDNFATITNNCGLIPLVINGKGLKSINQYYNKQISHYKSIAKRVNKLDCTNKMRKLTFKRNNKVDDFVHKASRFLVDYCKNNKINTIIIGNNKNWKQNSKMNKKVNQNFISIPYYNFIQKVQYKAEEFGIKVIITEESYTSGTSFLDSELPIKENYNKSRRKYRGLFISNNGTKINADVNGSYQIIKKVFPKVFADGIEGVGLHPFKVNL

SEQ ID NO: 51079 - protein, 487 aa, unknown
  TnpB Polypeptide
MKEMREQFKGVISSSFDAQLYTQVFTCYQNKFDAIQRKLKFEVSTFNGFEFYQRDSKNHKKGELKQVLVKKKQTPLSNCLTYLARYGNENILEYIKANIDTCDDKKREFYNNILRCCDKFGFDRLYNLALSKRKRILNHYSNKPIEFKSLSFGGRSRKKYIVDFNKNFGSKINSFISLSGFDRKSFDIPVKYHKGYHGNMRDYRKDNPSHEYIITFDEKNHQVKVNICKDGERYIPEPNGKTIGIDVNCKHNLFSLSNETTYDYDRKLVNDYCKLLRDIDGFKSKDKSYSVGKRKQWKLDKLKEKVIKFEQQTISTMCKDIKEQGFGHIVMEDLDNGFGKCYVTDKDNENINYNRKVKFLGLSSLKQGVEHIARKYDIAVSTVHSSYTSKMCPMCGCIDDGNRPTQEEFECIECGHNDNADFNAAKNIRNRVLVTVLREKLLKQLDNGAFEPKTLRREKVKDVLLSFRRNLQDFARSECIKGGLTTF

SEQ ID NO: 51080 - protein, 319 aa, Chloroflexi sp.
DAVKRVDLAFAAFFRRCEAGEKPGYPRYRSRSRYDSLTFKQYGNSFSFSEDGKLVLSKIGQVKMVMHRPLQGTPKTAIVKLTPTGKWFVSICCVDVEPEERPPSDEQVGIDVGLKTFAYLSDGSQIENPRFFREEEKALAKAQRKFTKAKSKTPEKRKRRQVVARIHERITNRRQNFIGQHVALLVKRFGLIAVEALGVRSMVRNPKLAKSIADAAWSSFFTQLVLKAEEAARQVVKVNPAYTSQTCSACGTIQDMPLSVRVYECGTCSLILDRDHNASRNILQKAVGRHGRVTPEAHGSKPWESSQGSRSTGHRGLNT

SEQ ID NO: 51081 - protein, 459 aa, Mycobacterium sp.
  misc_feature (254)..(278): Xaa can be any naturally occurring amino acid
MARLKVPEGWCVQAFRFTLNPTQTQAASLARHFGARRKAFNWTVTALKADIKAWRADGTESAKPSLRVLRKRWNTVKDQVCVNAQTGQVWWPECSKEAYADGIAGAVDAYWNWQSCRAGKRAGKTVGVPRFKKKGRDADRVCFTTGAMRVEPDRRHLTLPVIGTIRTYENTRRVERLIAKGRARVLAITVRRNGTRLDASVRVLVQRPQQRRVALPDSRVGVDVGVRRLATVADAEGTVLEQVPNPRPLDAVPXXXXXXXXXXXXXXXXXXXXXXXXXMLSRLHRRVNDVRTHHLHVLTTRLAKTHGRIVVEGLDAAGMLRQKGLPGARARRRALSDAALATPRRHLSYKTGWYGSSLVVADRWFPSSKTCHACRHVQDIGWDEKWQCDGCSITHQRDDNAAINLARYEEPPSVVGPVGAAVKRGADRKTGPGPAGGREARKATGHPAGEQPRDGVQVK

SEQ ID NO: 51082 - protein, 439 aa, unknown
  TnpB Polypeptide
LHRAVYGHSVRRPPRLRRLRGNPQVVRRGLRQVLHQAGSVPLRHKRTNLYVGLWKPVMNRTFKTRLYPNNKQVTYLNGCCGFSRFSYNTGLAMWNESYESGENPNYYSVKKAFNARKKSEFVWTYEYSKWIGEAALQDLSRGFKAFFRGNEKHPRFHKKGVHESFRIDGSVVRVEGKYLKLPKGLTLKMAERLRYEDCAKIYNVTISKRSNMWFVAISCEVPDTAGESQAAVGIDLGCHVLMALSDGTVVENPRWYRSRERCLKHLQRDLSRKKKGSKNWYKAKERLAKYQYRTTCMRADYTHKATTSIARQYGVVFLEDLNVNGMTRNHKLAKSITDASMSMVASQLTYKTNVAKIDRWYPSSQACSNCGCIQKMPLSERTYECTDCGMVMDRDVNAAINILHVGMANYPELMPVEGVDAIMAERSEKQESTSVRKYA

SEQ ID NO: 51083 - protein, 538 aa, unknown
  TnpB Polypeptide
MGRSWFSIETTSHLKGDSPRMSFPYSRSSPVDSMDVEVTEIKERENLPPQKIVDKEPVTCKSLRFRLFPTAEEKEKLKQYAEQHRWTWNMCKNVLEKNNSIKSLKDRVDDEKEKMVLYRARILQCKQCLSEAMKAHSNDSTPESEDNVKQLEGQLKEIKRSNPRVKFRYETFRDQVGRYKFTAEDSQSNVVLVDFVEKEPTEKCKIELPDGWWKHHHNRVPRGAVHEFVGALNSSISNYRNSGRDFSINFKRKKNRNTIHFEDGLFPSWINEMRNRYGYTAVLPDENGRRRRRSITLKEIKKHTKVQSIRIVHEQDIDRYYLYLPVPTGFYLPDDRHRESQALLVPKEEIISLDPGVRTFAMGYTPTKTVSMGDEGAVRIFELLNEYDDLWVGKEASPEAREKASISRREKMGKIRYMIEDLHWKVIKYLVSNYKTIVYTDFRTKGMMKKLSKENKRKLQALSFFKFKQRLIYKCKTSGVDLVIINESYTSLTCGKCGHQNPKNRSKTFKCHECGWVVDRDCNGARNIMLKALGFLCP

SEQ ID NO: 51084 - protein, 371 aa, Halorubrum sp.
MSRTIRTFEATITNQQQVRDDLDQLGWAASKLWNVGRYYAQEQWDETGEIPDDGELKAELKRHERYTDLHSQSSQRVLEELAEAFNGWFGKRRNGDDRARPPGYRKNGDSHPRSTVSFKAAGFKHDAQFTRVRLSKGRNLKEHRSDFILCDYQTRPDVDLTEWDIQQVRVIYKHDEWRLQFVCRTTIDPEPPGDEVAGVDLGICNFAAVSFGGESVLYPGGALKEDEYYLTKKRAETDDSASREAKRLDRKRTARRTHFLHTLSKAIVEECVERDVGTLVVGDLGGIREDDENGEPRNWGDHGNLDLHGWAFDRFAKLLDYKAEARASTWSWCRNAIHRSRVQHVVTRMTTSVWSVDCTCARSATQLRTRT

SEQ ID NO: 51085 - protein, 352 aa, Leptospirillum sp.
MKLTLKIKLLPTEEQTAILLETFREANAACNRISETAWKEQTFNQFRIHKLVYHDLKDSTSLSAQMIVRCISKVANAYKSGKKVQRTFLPWGGLAYDARILSFKKDSVSLWTIEGRQTIPFVCHRPDWLPYIKGEADLITNKGKFYLLQTVEIPEEAVRDTEKFLGVDFGIKNLATDSDGESFSGEAVEKIRQKRTSHKQRLQKKGTKSAKRRLKKVSGREHRFKYNTNHVVSRKLVLKAKGTGQGMALEDLSGIRDRTTVRSGQRDQFGKWAFGQLRSFVEYKARMHGIPVILVDPRHTSRQCSRCGHIDRKNRKSQSEFQCVQCSFSLNADWNAAINIASRASVNTPVAV

SEQ ID NO: 51086 - protein, 398 aa, Kribbella sp.
MCRFRIYPSPAQEAALLEQCRHARHIWNLALEQWSMWTRDQGPTPGYVEQARQLTEARAVFGWLRAGSQMVQQQALRDFEQAVKNFYAGSHRRPTWRKAGVHEGFRIAGSQASRIRKLSRKWAAALVPKVGWVRFRLSRAVPDAKSYRMTRDRQGRWHIAFAAIPEPIPAPGTGEIVGIDRGVTVSAALSTGELLTCPKLSERERQRLKQLQRRLARCRRGSNRRQRVKAAMAKLHARAANRRKDWVEKTSTDLARRFDAIRVEDLDIVSMTSRPKAKPDPTRPGAYLPNRRGAKSGLNRGILTNGWGDLVHRLEQKARGRVEKVNPAYTSQTCSVCGHCAPGNRESQAVFWCVACGHRAHADVNAAVNIAAGRAVSARRETPAWVSPKREPQHATSA

SEQ ID NO: 51087 - protein, 414 aa, unknown
  TnpB Polypeptide
LVLFDHWWCPSGDRQAVHRESKKPMTTKFVYRFKLEPTLEQERRLSRLAGARRFIWNWGLARRRQHYAEHGKTLRYAAQNLELTTLKNAEDTNWLHEVDSQALQESLRDLERAFTNFFEKRARFPKFKKKRKQRDAFRIPQRVKIAVERVYCPKVGWIRLRLSQAVTVPTKSATFKRDACGDWFVTLIAEREVEAPIAFPINPVGIDLGLKTFATFSGDALDVPAPQFFRNAERALRKAQRVFSRRKKGSNRRAKAKLRVSRVHRTTARQRSDFLHKITTALVAQHDIICIEDLSVKGLVKTKLGKSILDAAFGEFRRQVEYKAAWSGKLLSVIGRFFPSSKLHRTCGTIKADLTLSDRTWVCEGCGGVVDRDKNAAENILAEGLSLVAAGQADTQNAHGANVRLAKCEQLAMK

SEQ ID NO: 51088 - protein, 480 aa, Hydrogenibacillus sp.
MSLPLNRRKWETLKQAIEAYARQKDAFLVRYAHLAFLSYLGPGGRRALRDALVKTGFKSPYGLQARLWKMALEDALLTLERHWEAVLQEVATRISDRTSWSEGMKHYARWLLYLSAKGSRDWRRIQAIFRDIDIGALKNGPGAELMPEERARVRRWIRRQVRRRLTRPRVKTARSMMLDANMYASLTRTMKNGRVRQFVGVMTLEPKRRVVVPLAGVHAISGNIRIVLAEDRRVEVHVVGETKSVPPLSNPGPDEAGIDFGVTEVMTDETGIQYGETYGQALQDISEMLFRKSRRRQKLWALYRKYLELDPARARRIRRHNLGTRKQTRRNQRYRRRLENEINHAFNRFFAVRRPKRIAIEDLGDLRGKAKTKGLSRKVALWTWSIIRERIDFKAAVFGASVEPVNAAYSSQTCPACGSVDAKNRNGDRFHCRQCGFTGDADHVAAINILARLHDPEIRRSMAKEKVLAILKRRYEARQA

SEQ ID NO: 51089 - protein, 282 aa, unknown
  TnpB Polypeptide
VNKNLKVKIYPNQEQIQFIEKTFGCVRYVYNFMLNLKQKLYNFYKINLTYYDMCKILTELKKQKPWLCEVDAVALQQCLKDLDTSYQRFFGCISGFPNFKSKRDKNSYRTNNKLKFDQDNKMIRIPKVGWIKFRDKSNFNGLKKIYNITISKIPSGKYFANISAEVDIPAFAKTKKRCGVDLGLKDFCILNDGTKFDNPKFLVNNEKRLRLLQKSLSRKVYGSKNYEKARIKLAKFHEYIANCRKDYLHKISIQLVKEYDVICAETLQVKNMIKNHKLAKAI

SEQ ID NO: 51090 - protein, 176 aa, Bacillus sp.
MAELYVSSEDEKANYPRFYRQMLEKLAKAQRVLARRMKGSERWNKQRIRVAKLHEKVANQRKNFLHHKSKELATSFDVVAIEDLHVKGMSRAFRFGKSVADNSWRMFTTFLAYKLQEQGKQLVKIDKWFPSTKMCSNCGNKKKCHYVNARMRVCVDSQLAVIIMQPSISKRKPSAY

SEQ ID NO: 51091 - protein, 391 aa, unknown
  TnpB Polypeptide
VIKSYTYCLSPTKKQAATLQWTLDRCREVYNAALQERRDAYRMCHKTITYYDQATQLPEMKEIRDEYKGIHSQVLQETLRRVDKAMQAFFRRVKQGDTPGYPRFQGKERYESFTYPQVGFTLTHDNRVCLSKIGSVKIKMHREMQGTIKTCTIKREGTHWYVVFACKVDAQALPVSHEDVGIDLGLVHFATLSDGRTIANPRFFRKTEKRLGHHQQALSRKKRGSHRRKKAVQSVAKAHRKGRNQRADFLHKQSRMVVNQYGLIVFEDLQPSHMSRRAKPKQDETTGHYLPNGAAAKSGLNKSIQDAGWSMFVSMCIYKAEEAGRAVLQVNPRYTSQVCSGCGTVRKKTLEERWHSCECGTELDRDHNAAINILRLGRSQQPAMAVEAPCL

SEQ ID NO: 51092 - protein, 411 aa, unknown
  TnpB Polypeptide
MKTYSIRLHPTTEQISQLNQLSDIRMDIWNTLIDIQQKHYESTKKIYSKFDLINLIPPLKYSTKENWKQFNSKAAQTVAGEVFQSYQSFFILIKKDNTARLPKITESNEFHTLSFNQSGWIFKENNIISINKINFKYSSHLTNLSELNIKEIRVKFVNNKWLCDIVVDDEINYSDNLIIKSKVLAIDLGLKNLGTGVDNNCTVVILKNKSKKINQYFSKQINKVKSKLSKKQKNSKSFNKLNKIKKKLYNRQNSQIKQTLHIQSKKLVNMNYKTIVVGDLTVKTLMSTEGVNKNKKGIRKSFNESNINMFLEFLKYKSQNKQCDLVKIDEKYTTQLNSLTGKLFKEKVKLKDRTVKLSDTVEIDRDLNSAINIMKRYYDNHLASMTKPLDYTNVIMNSNIHNKINNDLIVI

SEQ ID NO: 51093 - protein, 378 aa, Ruminococcus sp.
MIRGYKIRLYPTKEQEQLMWKHIGCCRYVWNYMLELQEERYKNGEKHLTGCDMGNQITKLKHDGDHDWLNDVSYRSLSYVTRDIYESYKRFYKGIARVPKFKSKKRAKMAFPTRENISFDGRTVCVERIGKIKYKTDFDLPIGKNVAKFSNPRISYKNGKWMLGFAMECENQAPVLTDQTMGIDLGIKDLAVAELNGEKIVFHNINKSKKIKYLKNQLKHTQRTISRKYEANKVENKYVKTNNILHSEDKLRKLHARIANIRHNYIHQTTHALISRFPKRIVMEDLCVSDMRKNKHLSKYIQEQCLYDFLQKMKYKCEWNGIEFVQVDRHYPSSKTCSQCGHVKKNLKLSDRTYVCDECGLVIDRDYNAAINLSKYTG

SEQ ID NO: 51094 - protein, 429 aa, unknown
  TnpB Polypeptide
MRLKRALKYRIYPNREQKDCLEEWLNTCRVLYNDCLTERRDAWQCCRKPINYYDQANQLKEIKTFDEDLKEVHSQVIQDVLKRIDKAFKNFFRRVKRKEKTGYPRYKQKFRYNSFTYPQRGFKLEDRKLILSKIGSVNIKQHRDIPEDAEIKTCTVERDLDRWYACFTVEIEIEEPDQYIEITNPIGIDLGISHLITLSNGNTEDNPKYLSKSERKLARRQRRLSKSKKRSNNRGKRRFEVAKTHSKVKEQRTDLLHKISHKLVDTYDLIVFEDLKIRNMLKNHHLAKSISDATKSLISCRKNGTFLHVSWSQLTNFVSYKAEETGRRVEFVNPKNTSQECSRCGRIVKKPLSQRVHKCPFCGLIMDRDQNAAINILKRGLRKSKGFSICQKSSIFEQLRNVGQGLPEFKPEDFSKRRMIQEASPFRAG

SEQ ID NO: 51095 - protein, 181 aa, Cohnella sp.
MEKSGKWYVQISVEKQFGQTTGDTTMGIDLGLKVPAVVVTSTGKTKFVGNGRQNKYIRRKYSSCRRKLGKLKKLSAIRKQQNKEHRYMKDQNHKISRQIVNMAIDAQVSVIKIEKLTNIRQTTRTSRKNAKNLHNWSFYQLQMFIAYKAALAGIRVVEVNPAYTSQTCPICAKRNKAIDRT

SEQ ID NO: 51096 - protein, 356 aa, unknown
  TnpB Polypeptide
MLQANTAQQSLKFVERSMRSWFGLMKLYRKGDLPERPLIPHYLPKDGLFAVAFPKPAFSVRKGIVHLGVSRAILKDFPDAHKQLCFTLPKPLEGKEIREIHILPLYGGLYFKIKYCYESENEIVELDNEKYLSIDLGLSNFATFVDNATGTATIIDGMYVKSLNQWYNKEDARLQAIKDRAGIEYCTEKQYRLIWRRANRLNEFMNRAVNHIIKHCIANKIGNVLIGELKGIKQGINHGRAQNQSFVTLPYGKFKAKLESKCERYGIKYQLVSEAYTSRTDALAFDEIKDQPYGKSRRTKRGLYQSITGTLVNADVNGALNILRNVAGDSPAKEIISSGLVNRPKRIRIAFEQAPA

SEQ ID NO: 51097 - protein, 356 aa, unknown; identical to SEQ ID NO: 51096
  TnpB Polypeptide

SEQ ID NO: 51098 - protein, 437 aa, unknown
  TnpB Polypeptide
LPALHCSFLGYQSSLFVRFKLIVYNNDMSRYRLLPARGQELALRRHCSDARWVWNQAVEKRKSYLASDRSVPALTKSERYKRLTQARAELSWLAEGSQIVQQQALRDYEQALVMGFKKTHGFPTWRKIGKSEGFRITKFEASDIRILNKSFAEVRTPKIGYVRFKYSREIDFATVRSYRVTLNPAGQWHVAFVSIPEPIAGPGTGEVIGIDVGVIHALALSSGEFHDFKTDVKLKNKIKGLQRAMARSEKDSNRRKLLKLRLAKAHLKKKNKRKDWIEKETTNLARRFDYFKIENLQIKNMTKSVKGSIEKPGKNVKAKSGLNREINDRAWGTIFNRLEQKAPGRVIRVPPRGTSIECNECGNKDKKNRKSQAIFQCTLCGFTANADTNASVTIRDKKGKETAAGHAVERKPARVNLIARRGAIAPLKREPKLNLIV

SEQ ID NO: 51099 - protein, 450 aa, unknown
  TnpB Polypeptide
MQQLYTYETELKPKYNQEIIDYFNDYTTVFNKIIRNIWQYYNHQDVLISQKSKLNTLIQNQFGVSKRTADSIISYVSGRYNSLKALKKYEIKRNSSKIEKLDDLISELALKLDVMAMKAHHNQLKEKELIKYRGLKSKFVAIKKAKDRLIKENIKVQKQLNDQHFSLCFGSKTLFNHQYLEDDHQKWYEKFKKARDGSTLFIGSKDKKCCNQQLQLFYNKKNNQFTIQLRKEYAYQTNNRDKHLYGQVYFSYGNKELQEVLRTKNSPITYRIIRRDDRYFLQATITIEKNDISEQDRYMGIDFNKGFIAISEVKEDGNLVNTDKIYYRFKQGDKTTNDLRQLAHDIAIRCKESNMSLAIENLDFGKKKSKISKYKKDEKYNDMLHSLAYSKFDEYISRACFTNGVWFRRVNPAYTSYIGKKKYNEIKKLNTHTSASYVIARRGMRFKDAA

SEQ ID NO: 51100 - protein, 257 aa, unknown
  TnpB Polypeptide
LDNFEKLNQVRIVPCNQIFCVEIVYSVTINDTPLHDNGRIMSIDLGLDNLATIVTNTGLQPIIVNGKGLKSHNQYYNKKMAHYQRIAKQMNDKHYTNRLHQLTRKRNFKIEDALHKISRFIVDTALSNQITTIVIGNNKGWKQSISLGRQTNQSFVTIPHQKLIEKICYKAHICGIRVIITEESYTSGTSFLDGELPAKEVYDKTRRIHRGLFRGNQGVLINADVNAGYQILKKVFPNEFSDGIEGAVFHPVRVNIV

SEQ ID NO: 51101 - protein, 494 aa, unknown
  TnpB Polypeptide
VPYAAFDRNGEPLDLGEVLDGIRRDAELVAHYALREMTEQNLALVTSFDRFKPAGAGRQMNLKLPAEVKKQFRSGSSRLERMFQEQAVSALRSWAARTGVASGNYSGYVSAGWRRTVKDSKPKDLQPRLSLSATDRQYREMTVTPERIELKVIVQGQWVTLHFPTPPQLLEDGCEPGVPDIWINDQNRVMFGFHGKTTPGRPEFSERYVVGVDVGVTNPAAYIVWDTENKEVIERSLLGQRARSLHNKIKRTQTQVASLKRKGKDEEAVSHRTHLSNRRRELSILIAQEIADAAWRYGNALVSFEDLGHISNTMRFGRWFRGEVYRRTRDMVEADGGRILRVNAAYTSRKCHVCQSDLDMSNYSQPHCKACGITHHRDLNAAANIAQRANHRKACQTRKRHATKTKRIRRSKCHSKPLKHPGTKNRPTPKAPQNRSKTHAHSSFPKMEVSKGMCPADVRVSAVDHNAWFQTTSGTTNPKENLSIDTVDWVYPKE

SEQ ID NO: 51102 - protein, 374 aa, unknown
  TnpB Polypeptide
MSSVTSSCKEKRNYKFRIYPNKRQEHKLTSWLETCRIVYNSALADRKNHFIRTGNGLTRIAQQVILKTDKTKYPRIKEVHSQVTQEVLFRIERAFNNFFRRAKAGEKPGYPRYKGPGQYKTLTFTQFGDGLGASFKNSKLKLSKIGLVKIKLHREIHSKVKTCSIKREQSGKWYAILTVEESPVLYSPNRQSIGLDVGIKEFAVFSNGKKITNPKNLQRSERKLKTLQRNLSRKKKGSKNRAKARVKLARQHEKVRNQRQDFQHKLSTRLVWKYGTIVVEDLQIKNMVKNHRLAKNISDVGWGEFIAMLSYKAESAGRILAKVSPHGTTQECSRCGNVVPKDLSVRTHDCPYCGLVMDRDHNAAINILHRYKAS

SEQ ID NO: 51103 - protein, 151 aa, Firmicutes sp.
MKRLKIGLARCARSRDIEGRILHATVRRSPAGEYCVSILAEAEIAKLPGTGRTCGIDVGLTSLAVFSDGTVYANPKWLGALEAKLAKEHCILSRRTKGSANWKEQRIRVARVHEQMANAKADILHKTTTMIVKNQDIIGIEDLRIGNLLKT

SEQ ID NO: 51104 - protein, 351 aa, Moorea sp.
MEFKAVLKEHHKIAINEAIITARFVRNKVLRYWMDNRGVKKKELYRYNTQLRDEFEFVRDLNSHACQASVENVERAIKRFFDNCKKKVSGKKGYPKFKKHCRSVEYKQSGWKLSPDKKSINFTDKKGIGKIKLKGTWELWRFDQKLIKRVRIVKKADGYYVQFCLKVDNSEHLETTGFTIGLDVGLKEFYTDSDGYSEPNPRFYRKGEKQLKFYQRRVSRKKKGSSNRRKAINRLGRHHLKISRQRKEHAKRLARCVIRSNDLVAYVRAACRRQDLRVKNLVKNHCLAKSINDAGWYQFREWLEYFGQRFGRITVAVNPAYTSQNCSSCGEVVKKSLSTRTHVCKCGCRLD

SEQ ID NO: 51105 - protein, 291 aa, Kurthia sp.
MIYKAYPFRLYPNKDQQALIHQTHGHCRFVYNHFLSLWNTTYKEEGKGLNRSSMSKLLTKLKKQDDTAWLRNVDSVALQTSCEQLVDAFGRFFKKQNNYPRFKSKKNAVQSYTTKNTNHNIAIVGNKIKLPKLGLVKFKQTRALEGRIMRATIHYHASGRFSVSITCEVPEFQSLPKTHQAIGIDLGITDFAILSDGRKVDNQRFTAKMEQKLKREQRKLSRRYEQAKKDNQVLRDCMNYQKQRRKVARLREKVAFQREDFLHKLTTAFIRQSVRCHLYRRFEHQRHAEKS

SEQ ID NO: 51106 - protein, 400 aa, Gilliamella sp.
MIIRKAFKFELMPNGEHIRKLKQFCGCSRFVFNQALAWQKDQYEQDNSIKFSYTKIANLLPTWKKEYDWLKTCHSQVLQQSLKDLESAYRNFFRKQSDFPKFKKKGIKESIRFPQGTKLDENNKRIFIPKIGYIRYRKSQLIVGTIKNVTVSLNCGKWFVSIQTEYEQAEPIHQSNTEIGIDMGISRFATLSNGIYFKPLNIFKQNQLKLRKLQQQLSHKKKFSQNWLKSKRKVSKLHHQIANARKDYLHKISNEISQNHAMIYIEDLKVSNMSKSTKGNQEQQGKNVKAKSGLNKSILDQSWYEFRRQLEYKSYWHGGFVYSVDPKYTSQTCPCCSHVAKENRKTQANFECVSCGYKENADLVGALNIFRVGHTRSVCEVNGAVMPSATETHRSELAIN

SEQ ID NO: 51107 - protein, 354 aa, Desulfonema sp.
MRIKRSCKTSLRFTSKKKRDALNEIQDEYTRLVNIFIEDFSDKELAKKDLGKEITNAPESWLSARMRQCAAREALGMCVSAKNKAGELKEEPVRPVHYGRKMTLSSQCVRVGKGKNSFDLWLVIHSVGKKIKLYIPLKKHRHFNFFSDWKMSSSLVIHREYVMFSFEKETGEKKAEGELVGIDVGINHLLALSDGSLSGSEVRPLIKNIERKKQGSEAYKKAKKTLSYYLHKTVKEQLDWNSLRLVVVEKLNGLKKGKKGRSKNFRKTLSNWNYRELLNIIQMRCEENRVSFRSVNPYKTSQTCPACSHTERGNRVKEEFKCLKCGYSEQADIVGSLNILTRFTTGRYGAGFKT

SEQ ID NO: 51108 - protein, 393 aa, Desulfonema sp.
MICLRAYKYRIYPDREQRGKLAVQFGHARFVYNYALNARKEHYKKTGKGLSYSATAKMLPGMKKELEWLREADSQVLQQKLRDLDRAYVNFFQKRARHPRSKSKHSNQNIRYPQRFGIIGNRLRLPKVGDVKIVLHRHMDGVAKNVTVSKIKSGKYFASVQCEIVIPVSDNGLPAVGVDLGIRHFAILSTGEKVAHPSYLRKSEKRLVRLQRWLSKKKKGSVNRLRMRLKIARMHEHIANQRKDFLDKLSHRLTTRYGAIGLESLNIRGMVRNHCLAKSVSDSGWGMFVRQCEYKAVVNGASMHHADRFFPSSKMCNVCGAVNSDLKLGDRSWTCGNCGNCGTEHDRDVNAAVNLENLCTVGATGFQACGESVSPDPFQDIRPFSVKQEAQRL

SEQ ID NO: 51109 - protein, 360 aa, Desulfonema sp.
LARLSPTGEQKKIFMRWTDVSRYVFNQTFDYIRSCVGFTPSWMDIKKDLLKILPEWCKDVPFQIKGIAVKEAHQAFFKAKGRPKFRAKKYPEQSCFIPKTAIKKTGIYPRVSGKGLYFHETLPECPGDSRLIWRYEKWWLAVPFTEKLRKAENQGPVVALDPGVRSFISFYSPDFSGNIGKGDFSRIQRLCHHLDNLISERDRCRNKQKRRAMTKASRRMRHKINNLISELHFKTAKFLTDNFSVILLPTFETKQMSQKAGRKIRKKSVRMMLTFSHFRFRQILNWKASQAGAVVVDCREAYTSKTHPQTGEIRNIGGAKWIKLNDGSRADRDIVGARNILLRALVDSPADFVCEVGNCN

SEQ ID NO: 51110 - protein, 384 aa, Desulfonema sp.
LRIVWASEVRKKDKKYDLEKRTVNIQLAHKIELNPTNVQRGYFARACGTARFVWNRGLAEWNRQYEEGLKPSGPALKKAFNAIKKEEFPWVSDVLRDANSQPFSNLQTAFGNFFKGRAKRPHFKKKGIGDSFYIANDKFRIDENRIRIPKLGWVRMKEPFCQFGKIMNATVSRTADRWFVSIGVRMNITPATCENQAVVGVDLGVRHLATLSDGEIIEGPGAYRKSEKKLRRFQQSFARKQKGSKNRERQKRKISRLHYRISCMRQDALHKLTTKLVRKFSTIVIEDLNVRGMLRNGRLAKTISDMGFYEFRRQLEYKARISGVRVIIADRWFPSSKRCSACGEKHPNLTLSDRTFVCPACSLRIDRDLNAARNLEMYPGLMVA

SEQ ID NO: 51111 - protein, 390 aa, Desulfonema sp.
VNCLRAYKYRIYPNREQREKLAIQFGHARFVYNYALNARKEHYKKTGKGLSYSATAKMLPCMKKELDWLREADSQVLQQKLRDLDRAYVNFFQKRAAYPRFRSKHSRQSIRYPQRFGIIGNRIRLPKVGDVKIILHRHMQGVAKNVTVSRTKSGRYFASVQCEVVIPVSDNGYPPVGVDLGIRHFAILSTGEKVAHPSYLRKSEKKLVRLQRRLSKKKKGSSNRWKMRLKVARLHEHVANQRKDFLNQQSYRLTTRYGAIGLESLNVSGMVRNHCLAKSVSDSGWGMFVRQCEYKAAVNGSSVHHADRFFPSSKMCNVCGIVNSDLKLGDRIWTCGNCGTEHDRDINAAVNLKNLCTVGATGFKACGESVSPDAFQPIRPFSVKQEARKL

SEQ ID NO: 51112 - protein, 379 aa, Desulfonema sp.
MLKVHKVKLNPDSEQKIYFAKACGVARVAYNWALSEWQNQYEEGCKPSEAALRRQLNAIKADKFPWMAEVTKCAPQQAVKNLGTAYKNAFHRKKTGQKTGSEKNPYGFPRPKKKYVNDSFRADNGPPRKGADAVLIDDKKIKLAKIGWISMGESLRFEGQIRSVTVSRQADKWFAAVSVETADISHARKDNKSCGIDLGINSLVTLSDGSKACGAKSLKKLLKKKKRLQRELCRRKKGSKNREKTRVKLARLEAIISNIRNDAIHKITTDIVLNHSIIAMEDLNVKGMMKNHKLARHIADQSFGEFRRQITYKADWYGSKVIFVDRFFPSSQKCNVCGNLRKNIKLSDRIYRCSNPDCKHVEDRDVNAAKNIKNEALAA

SEQ ID NO: 51113 - protein, 390 aa, Desulfonema sp.
MDFVIRRAYKYRVYPTKAQISNLENQFSMCRHLYNRSLAERIDAYKKDGTTITYDQQQNSLPELKKGRPWYKGVYSQVLQDVLRRLDKGYQAFFRRAGAGGKPGFPKFRKRGQWNSITYPQYRKRPDPVITVPKIGKVRLVYHREFPEDATVKMLTITREAGKWFACFPAELPFIAEPEQNLPDPLGTDLGLIDFFHASDGSHVPVPKLLRKKEKQLGRLQRRLAKAKKRSEKYHRLLKAVRKCHYRIKCRRSDFLHKTANDLLKKSGLIFYEDLRISDMIRRPRPKQDGDGKYLPNNASAKAGLNKSLADAGWGKFPDILKYKSPYLGKKTLAVPPRYTSQVCSSCGEIVKKSLSARTHRYACGFVANRDLNAALNILRIGMDTLRVPT

SEQ ID NO: 51114 - protein, 333 aa, Vulcanisaeta sp.
VFLCLYNFKDFKTSLIFGTAPKRWFARTWVPLKTLRVYADGSMKGDKGAPVVLDFRSSVIRLRQVCKNEPRYVVELPMPKWVIERIKEGGDIKYAMIGLKNNELYLALVAEREVEPYQPSGYRLVVDVNSWRYGIAWGLIHNGQLVSFKQEKPNLNELLTLYYQAVKRGRKHGALMRIGLHHTTQGKRLRRQAKARRGKIYRVTRDKAYFLASKLVRKALKYKALLVIDDMTEESRRELLEEGLPRDVIKLLMSNLRRFVHQLETLAKWYGVPYEFKRLPSTVCPICRHELTQEDGRVMVCPNCGFKAPRDKVPMHWAIKEARDCSVKVRYRA

SEQ ID NO: 51115 - protein, 274 aa, unknown
  TnpB Polypeptide
MAVRVFAILHMCMYRSSDAFVVKVHGKFLHIFFSMHSVRIGTMTVSRDACGGYFLSMQLASDEPFVPSLPKTGSAIGIDLNLKNFYVDSNGRCVNHPVYIQRTKRRVTRAQRILSRKARGCRRQHIPLRRGVRYQAQRRLVARLKQKIKRQRQDFLHVQAMDLIKNHETIVAEQLDISRLIQLRRCTKAIYEAGWRTFLDFLEYKAKRYRRIFVKVNPAYTTQRCSACGYILPTGQRLQLSDRQWQCPSCHVIHDRDRNAACNILQRGLATLSK

SEQ ID NO: 51116 - protein, 387 aa, unknown
  TnpB Polypeptide
MSIRTIAVTLAPTEAQRAAFLALRGAFVDACNHVSAVAWEAQEFNRVRLHALTYYDLRAMYGLMAQHAIRAIGVVVDAYKRDRKTQRTLRAEGAVVLDTPRLYRLEGNHVDITTLDERVRVRLNIGGLQRAQLKAATKLLEADLVRDCKGRWRLMVSASYPDPPTMETTGVLGVDLGRTDIAHSSDGESFSGEQVTAVRDRYARTRSMIQHNVSKGTRSSRRRGRQTLARLSRRESRFQRVVNHTVSKRIIQTAAHTGRAIALEDLTGIRERTNQQPRGKTERRRSNSWAFFQLRSFLAYKAVGSGAPLVLVSPAFTSQTCHCCLHIGERSGKGFRCINLSCLWSGDADYNGACMIALMGASVTCPRGPWPSCAVQPGRRAPESLRL

SEQ ID NO: 51117 - protein, 349 aa, Deltaproteobacteria sp.
  misc_feature (100)..(113): Xaa can be any naturally occurring amino acid
MILSYKCKLFPSRVKADTLAALVDLFQRLHSIATQQIASADRPRLPSCRGKGEFVGRAYRRAWIDYQRTTKAGHTPGQLKAELIDSAEIQRPRKATSFDXXXXXXXXXXXXXXNGGFYVPARKHRALNRTLALPGATLNESAEIFRKNGKWYVRVGVTVPVPEEQPVTEWIGCDIGARAAVTRSDGYHGLDLRPVLQRSRNRRATLQKQGREESRELSPQRQVLAREARQTVLVAQQSGRGVALEDPKRLIRWKQHAARFFGQRVLLLAAILGVAVQVISPPYTSTTCSRCGHVEPGQRHRATFRCWQCGFTHNADINASRVIAKRARRVSCASHHGSLSLCPGGGKAE

SEQ ID NO: 51118 - protein, 358 aa, unknown
  TnpB Polypeptide
MTEDVRGFIERYRALASHFYWSRRLGLEPASEVVEELWRRVPSYWRWHLVDPRDPLYLFKGVEGAPAPSRVLLGLPLVDALHENKGAYIKDDKLVLRLNRKVELDIPERALKWLEKRLAEGPDKKFVRVLERGDRLVVQVVLHKANRVEMPRDPLLVVVDVNSSYGVVVHFWDGKLIKTVKLRPPNRGNGWGHVRELMSHRDLLYNQGCLSQGQINVYSALARLTLKGSMRVWEQQAAAEVVKRVRRMARRHGKEPLVIIDRPDYSSLHGTPLQRTLYGFTRRLENLLSWYGVYWEERRLYSTVCPICGGRLVLVRRTRRTRVMECVSCGFREDRDNVPLYWAIRNLSALKGEASNWG

SEQ ID NO: 51119 - protein, 374 aa, unknown
  TnpB Polypeptide
MTEAIVIHRAYQKRVYLSAAGYGRIREVLGACRWLYNRSLEQKRNIYRACGKGMSKFAQMKHLTVLRSEQKWWRDLSLQVARGVLVRADRAFQSFFRRVRNGETPGYPRFQGAGRFQCLELAEARPGMIKGRNIRIKGLPRMRIRPNRELPDNSQLRSLRFVMRGRHLWADMVYAEEVTPLPRNDHVVGIDLGVNERITLSSGDRIAKRVTNRDKERVLQRTISRRKKGSAGRGKAVAAFAREKRRNQIRNRNECHAITTELVRRYGTIVMEDLRISSMIKSGGAHKRGLNREILAQTWGLIRRQLAYKAEWAGRKFIEVNPAYTSRTCAECGEVNPKAKTYRVFECGECGHTDDRDVNAARNIMARGVFASAA

SEQ ID NO: 51120 - protein, 335 aa, unknown
  TnpB Polypeptide
MRTSSRNGSTVCLGYPIPNARLKQACITPNNGRYKLSFQFEVDADIPEIPEDIRPERICAIDFGVDNLMSVTNNCGLPSLIYKGGVAKSVNQKYNKTIAALVSEQTLRTGEKFVPDAAYHAATNRRNDQISDFMRKCAKHFVAWCIENRIDTVVMGINKYWKQEAGLGKRNNQNFVQLPFDRLRNIIRYLCVWEGIFCLDQEESYTSKASFPDRDFIPVYGNEKGKPSFSGQRRPVHYKGMYKKDGFRGLYTTKSGDIINSDLNGSANILRKAFPNAFTEKPAPDFNSVVIIRHPDEEKVKNNRKKQTAVQKQDSHAKIKRQRKKDAKRKKHPAA

SEQ ID NO: 51121 - protein, 379 aa, unknown
  TnpB Polypeptide
LRLQNQWQALLRTFQFRLFPNAVQRTALEFILRDNCETYNAALQERRDAWKLERKSITYRMQQDELTELRKDERFTVIACDIQRDALRRIDRAFQSFFRRVKAGQAPGFPRFRSPQRYDSFGFSLPVVSENRLRIPNVGRVRLRGGREVAGRAKFCTVKRDGKRWQASVVTDIGLAPEKRAVGSAIGIDVGLATLAALSDGTKIENPRWAQRYEDRIAATGRILARKQKRSRNRLRARQALRRAHQRAANARTNYLHHISKWLVSRYDLIAYEDLKIRNMARSKLAKGILDAAWGQLIYQLKYKAESAGAWAVPVRPHGTTVRCSCCGADVPKTLKERTHNCPQCGLSLGRDHNAARNILALGMSAAGASPQNVHGTGV

SEQ ID NO: 51122 - protein, 398 aa, unknown
  TnpB Polypeptide
MASGDEGLLTISIGMRVSPEPEAVELLGRYNVALNYAINKILRMNLRKSERYTTLYIESSKNGSISHLGQLLTAIGMPLQMQMLGGIILRRGRKPRVRKLSMLLHPGQSYWVRDGYVEIAGGIKLSIIGWDRRYDQYENGEARLVYRGDKMILWISKKIPRPEPYKPRDVIAIDVNERKIVYGDDGINKERDTEIGEAHRWKKLAEDLQKRYSSPRYPAWRRRKAILNRIRSYHRKARNILEDWARKTSLRIVRLAKKLRYAVAREDLTGLINSLRKIKNKDHRKKLIIMGYKRLGKWIDWNVKKQGVPLAIVKPNGTSSKCPKCDSKGLKEVDYRRLRCPRCGFEGDRDVIGKLNIRKRALKKLKIKANPGGVLAPLTAPQMTDVNPNRWGEPMNRR

SEQ ID NO: 51123 - protein, 367 aa, unknown
  TnpB Polypeptide
MIAYKYKLYRTDKTKHLDKMLQEACFVWNHALALQKRYYHLYQKYIGIGRMKAHFVKRIIRNLLHSQTTQEILERLDTAYQRFFKHLAARPPKFRKAKDFSSFLFKQGGYRLEGNSICINKISKTYRFSLSREYQGKVKTVAFKRSHLNEYYVIITTDAVASHYRKTHHGASVGIDFGLKTYMTMSDGSTVQSPRYLKTDLPKVQQKGRKLSLCKSQSNNRERRRLELNRQYEAIVNRRTDWQWKLAHELCRKCARIFIEDLRLTGMTKLWGRKMSDLAHAEFVSKLEQVAAKYDVTVHKIGRFFPSSKTCTCGHMNQNLKLSDRSWTCPVCGQTHDRDLLAANNILRQGIAELESGRKTTRSRKAV

SEQ ID NO: 51124 - protein, 415 aa, unknown
  TnpB Polypeptide
MNKTITLQSIKPNNPLYEECGSLCVISKQLYNVGLYELRQTLFNHSEFLNYKVLYQQMKNNENWTALPRKISNKVWKQVTGNWSHWLKALKEYKKNPSKFTGRPRLPKYNKAMNIVTYEQGALGTRGLSENKIRLSKTNIILDTSLIKGKVKEIKIIPQKGKFIIKATYTEEMKNNKLDYNRIAGIDLGLNNLMTVATNQADIVPIMVNGRALKSINHHWNKQKAKLQSKLKKGIFNSHQINQLTEKRNNKIDTYLHVASRTVVDWLIKNNIGTLIIGKNAQWKTGIKIGKRNNQNFVQLPHARLIELVKYKFEQQNGIVVINEESYTSKASALDGDELPKFSKRSNKKPDFSGKRVKRGLYKTLQGLLINADVNGALNIIKKVAKNSLDDLVSDKQFIHHCATPKFLKLDVAYQ

SEQ ID NO: 51125 - protein, 343 aa, Helicobacter sp.
MALRQLVSAYDNFFTKRARYPKFKSKKNAKQSFAIPQNIEIKTETQTIALPKFKEGIKAKLHRDLPKDSVIKQAFISCIADQYFCSLSYETKEPIPKPTIIKKAIGLDMGLRTLIVTSDKIEYPHVRFYQKLEKKLTKAQRRLSKKTKGSNNRKKQAKKVARLHVACKNTKEDYLHKISDEITNQYDLIGVETLNVKGLMRTYHSKSLANASWGKFLTMLEYKAQRKGKTLLSIDKFFPSSQLCSYCGVNTGKKHEGITKFTCPHCQTTHHRDYNASVNIRNYALGMLDERHKIKIDKSRVGIIRTDYTHYTNECIKACGASSNGVISKYGNILDLASYGAMK

SEQ ID NO: 51126 - protein, 377 aa, unknown
  TnpB Polypeptide
MKKTFKYRLFTNNSQETALDSMLNSARFLYNCALEQRILCYKQWRKSINYYDQSNALKEIRSFDEGIANLNFSASQDILRRLDKSFQAFFRRIKTGDTPGFPRFKGRDRFSSITFPTYGDGVKLKKGKLYIQNIGTVRIKLHRDIEGIVKTVTICRTNGKWYACFSCEVEFKPLPVSDKTVGIDVGLASFATLSTGEKIANPRFFKADATKLAKAQRRLSKANKGTPDRIKQRSKASRVYEKIANRRNDFAHKLSRNLVNMFQVIAFEKLNIQGMIDNHTKVFGHKLNKSISDVAWNKFTNYTSAKAEWAGRKVVFVNPRNTSKMCSRCGQLVEKTLADRVHRCSCGLVLDRDENAAINILSLGLQGLGLAPGSRLL

SEQ ID NO: 51127 - protein, 394 aa, unknown
  TnpB Polypeptide
LQTTRSHKIALELTAEQEQALRRAVGVARFTWNWALAEWKAWHKAGKRPTAMKLKKRFNAVKREQFPWVYDSPRDANAQPFANLGQAFRSFFEGQAKYPKPKNKGKCRESFYVANDKLRVDGKTITLPRIGAVKMRESLRFEGKITCATVSCTAGRWFVSISVEADLPVVRCENQARTVGVDLGVKKLATISDGTTFQGPKPLRGSLRRLRRLSRGLSRKVKGSRNRDKARLRLARCHARVAAIRSDALHKLTTNLVRTYGRIVIEDLNVKGMGRNRRLSRTIADMGFGEFRRQLAYKTQPSLTTVVVADRWFASSKLCRQCGTLNDGLRLKDRTFRCNDCGHVEDRDLNAACNLERYPGLQGNPYACGHPSAGQPDPPTGETGMDEAGIFAYL

SEQ ID NO: 51128 - protein, 478 aa, unknown
  TnpB Polypeptide
LAAFPSHPRASPIAAQLTPRLFASATRRSRSMARSRSVAGVPPGAVPVSAASSSSGDGGLTRNPQPSAGSLACRFSPKSSQEAPGFSPGEEWECPVRRAASHPSALKPSIYGVLVTEMLKLAPPPEQAEALLATMQACNAAASRAAEVAFEHKTANKIRLQPLVYADLRAEFGLSSQMAVRAISKACEAYKRDKTIKPVFRELGAVAFDQRILSWKGRDRVSILTLAGRIIVPVVWQGRWLGTTGTVLRGAADLIWRDGKFYLAVVIDVPEPPAGPEPAGWLGVDLGIVNIAADADGNIHCGKAVRAVRYRNRQFRARLQSKGTKSAKRLLARRRRKEARFARDVNHCISKTLVSEAKDTGRGIKLEDLSGINSRTTVRKAQRADRLSWSFFQLRAFIAYKAALAGVPVVLVDPRNTSRRCPGCGHIDKRNRPDQATFRCTSCGLAGPADIFAARNIAGWAAVMRPDAALSAAASPAA

SEQ ID NO: 51129 - protein, 382 aa, unknown
  TnpB Polypeptide
VSSRVVKRAYKYRFYPTPEQAELLNRTFGSVRYVYNRALAERSRAWTQDQKRVTFAETCRMLTQWKADPETSWLYEVSNVALQQGLQHLQQAYLNFWGKRSGYPTFKSKRKSRASATFTTSGFRYRDGQITLAKMDVPLDIRWSRPPPECAEPSTVTVSRDAAGRWHVSILVEETIEPLPPAPASAVGVDAGITSLVTLSTGEKITNPKCEKRDRARLAKAQRNLARKQKGSRNRARARVKVARVYARITDRRTDFLHKLSTRIIRENQTVIIEDLTVRNMLRNHSLARAISDASWSEFRRQLEYKADWYGRTVIAVDRFYPSSRTCSACGRLAASMPLNVREWACPACGTVHDRDINAARNIRAAGLAVLACGDGVRPART

SEQ ID NO: 51130 - protein, 408 aa, Cyanothece sp.
MRLVERHIIQKNHRFYAEIDRLCFLSKNLYNYANYLVRQSFIFENTYRNYHDIQKTLQNQPDYQAIPAKVSQQILMIIERNWKSFLAANNAYKETPSKFKGRPRLPGYKHKMKGRNVVVYTKQAISKKQLKQGLINPSKTEISLKTKVDTAKIQQVRLVPKLNHYVIEVIYEATEKQYELEENRYASIDIGLNNLATLTFNQAGIKPLLINGRPLKSINQYYNQVKSYLQSLLGENQSSQKLKKLCNKREFKINDYLHKASRLIIDTLINQKIGTLIIGHNPDWKQKINLGKRNNQNFVSIPYNKLIEMLSYKGSMVGIKVIITEESYTSKASFLDNDPLPVYQKGQKNQVTFSGKRVKRGLYRTGTRKLINADVNGSLNIMRKAVPNAFSYGIEGVVVHPVRVIPAK

SEQ ID NO: 51131 - protein, 416 aa, Marinobacter sp.
MTRRQAFKYRIEPTGEQQRKLRQFAGSCRFVFNKALALQQANREAGEKFIGYVPMAKHLTAWRKGAETPWLKDAPVHPLQHALKDLDRAYSNFFAKQADFPRFKKKGMGDSFRYPDPKQIKLDQGNARLFLPKLGWLRYRNSRAVLGTVKNVTVSLSAGRWFASIQTEREVETPLHASPLAVGIDLGIVRFATLWDGTQETVLPPLNSFKRHQQRLAKAQRQMSQKTKFSSNWKRAKTRFQRIQRQIANTRNNYLHKASHSISKSHALLCVEDLQVSNMSRSAKGSAAQPGRNIRQKSGLNRSILDQGWGEFRRQLDYKSAWTGGWLVAVPAQNTSRQCPVCGHIHADNRQTQALFLCTACGHCENADRVAAKNIRERGLNLLKGPDMARIACAVNGAVRPSAAGTHRSDDAAQAA

SEQ ID NO: 51132 - protein, 404 aa, unknown
  TnpB Polypeptide
MLVKGVVFRFGDELPPDAKLLLEDFRLAVNNAIRVGLQAKVTSRNALTKLAYKDLRHAHPKIYAQHLASAFEVAGSVLKNHRRRLRAGSANRIPHIRRLFMKTENQAYKLDRVKGVADLPIRADCHVELSLVLSDYHRRYLDNDSYSLGSLTLFPDRVIIAFRRNAPRPYDPESVISLDINERSLDGVLAKNDDVVPVKAEFSEVAIIQQRHHDRRKRLQKKKAHDRRTSKGLCRREGSRDHHRVEYRLHRVANAVLSFAESRKSAVVLEDLKGIKPRWNKEMNRRLSLWPRRKLHQIIEYKAQWRGIPVIKVDPRYSSRTCPICGSIQNSRMGAEFKCECGWHLDRHINASLNLLHTAISKGMAGGLRFNPGAFQHDVVMTLYEPAMAARSEPNGTSCIGAVA

SEQ ID NO: 51133 - protein, 465 aa, Streptomyces sp.
VSGLREMAAPFVVPGPTGVTVRTRLEHLTPEDEKVLGLVGAYLGGLASLDLKARCADGPEHSAEPWADRKRELTPLSSSRWAGSITKATHDQWALARRGQAAHVQSLEAGIRTIRHRLSLPIGEKGTKRAPGGYRSKKEWFQKSRRLHVLQDRLSVVRADREAGVVHVVRGGRHLLTTRHHLEEAHLTEAQWRERWEAGRWFLQADGESGKRHGNETIRVTPDGEVSIKLPAPLTEYANCGHGRYVLTARVSFPYRGTEWADRVEANRAVAYRIHHDTARGRWYLTAAWTVPVTRTVPLAAALAEGVIGVDTNADHLAAWHGRRKKFRHLVSGIPTGRLRARLTSMADATGITVIAVDPAYTSKWGAQHWQKPLTTKNRRTTRHDAASIAIGRRAQGHPIRRRTAPPRDDQSDRHGHRTVQARPETTGREEPRPRVPGPRTRCVPPDAASTRATRAPNTVRDARN

SEQ ID NO: 51134 - protein, 422 aa, unknown
  TnpB Polypeptide
VESEVNMMYLTVKQQLKNLSKEDYLNLRELSHIAKNLYNVATYNIRQYYFQEKEYLKYEQNNVLCKENENYKLLNSNMAQQILKEVDGSFKSFFGLLKLAQKGKYDYKSIKLPHYLDKDSYTTLVIGFIRIKDNVLIMPYSNTYKKKHKPIDIKIPPILQDKKIKEIRIIPKFKARFFEVQYTYEAIEPQRELDNTKALAIDIGLNNLATCVTNEGKSFIVDGKRLKSINQWFNKQNSILQSIKDKQKIKGITNKQMIITNNRNNAVNDYINKTCRYIINYCLNNNIGNLVIGYNETLQKDINLGRANNQNFVNIPVGNIKEKLEYLCKMYDINFTKQEESYTSKASFFDNDEIPKYNPNAPKEYAFSGKRVKRGLYVTRAGYKLNADVNGAFNILKKSSVVCLNALYGRGEVDTPVRIRIA

SEQ ID NO: 51135 - protein, 271 aa, Acidiferrobacter sp.
VVSQDAGRGGNGVHGRLYLQGIGHIHIRGKARTTGAPVTCEIFHKAGRWYASVTLAIETIRWARGTAIGAFDWGLTEFLTIATSEGLETVANPRHLRNQLAELKCLGQGVARKIRRAQQMSGRQRGFPVSANLRRAISHLARLHAKVARRRQDFLYQTSTMLIKRFGALGTESLAVQNMVKRGGVRKKGLNREIHAAAPSAFLHMTRTKAEEAGSWYEELPTRMLKPTQRCHGPCGPSAVALDGGEVIRAGTVRGVERWKFRRDDRPFGRQ

SEQ ID NO: 51136 - protein, 466 aa, Acidiferrobacter sp.
MPYRKVMYRLYPNATQTERLETMRGLHQRLYNTALEERIRVYQETGKGLSFADQCKVLTQWRRISAGLASLNARKGLSFADQCKVLTQWRRISAGLASLNAQSEQVTLKRLHLAFQAFFRRVKNGDTPGFPRFKSLRRYPGWGYKTHGDGWRLHAGENSVHGKLYLQGVGHIPMRGRARTTGTPVTCEILHKAGKWYASVTLEIETIQRERGTAIGAFDWGLTDFLTLATPMGIETVANPRRLKNQLAELKRLGQEVSRKIRMAQERTGRKKGFPVSVSLRHAISHLARLHAKVARQRQDFLHQTSAGLVKRFGAIGTESLTVQNMVRSGGVRKKGLNREIYAASPAAFLNMTRTKAEEAGSWYEEAPTREIKPTQRCHGPCGPQCGPCGPQCGCGQLRRRRRGRSNPRNAVMGHAAHNVGHAAHNVDAGSCRTRRKRSRTGSTSVRTAVPPVAEMKTRLWCCCVG

SEQ ID NO: 51137 - protein, 402 aa, Acidiferrobacter sp.
MLIRKAVRYRLETTPEQENLLARAVGCVRFVWNRALALQQSYLAQRCGRFSYGDMARCLTTWRQSEAFGFLAESPSQPQQQTLKHLDRALKDAFDKKSSKRFPVFKKKGHHDSLRYPDPEQIRIDLKPQDDDGRSVLPKIFLPRIGWVKFRKSRLIGGEIRNVTVSRAGGHWYVAIQIEKEIADPVHPAPTAVGGDRGVANLLTLSDGTVFLPVTAYRHRQKQLAKEQKTLARKVKFSANWKQQKATITRLHQKIAEIRKTVLHQVSTIISQNHAVVVLEDLKVRNMTASARGTVAHPGRNVRPKAGLNKAILDQGWGLFKQMLGYKLQWAGGMLLLVDPAYTSQGCAVCGVVDARNRVTQAEFACQRCGHKDHADVNAAQNILARGLLSTAGHVGVACSPA

SEQ ID NO: 51138 - protein, 402 aa, Acidiferrobacter sp.
MLIRKAVRYRLEPTPEQDHLLVCAVGCVRFVWNRALALQQSYLAERCGRLSYGEIAHCLTTWRNSEAFGFLAESPSQPQQQTLKHLDRALKDAFDKKSPKRFPVFKKKGRHDSLRYPQPEHIQFDLKPQDAQGRQVFPKIYLPMIGWVKFRKSCIIGGEIRNVTVSRAGGHWYAALQIEKEIPDPVHPSTTAVGCDRGVANLLTLSDGTMFLPVASYRAHQKTLARAQRRLAHKVKFSANWKKQKATVTRLHQSIAAMRKTVLHQVSTIISQNHAVVVLEDLKVRNMTASARGTVAHPGRNVRPKAGLNKAILDQGWGLLKQMLDYKLQWSGGMLLLVDPAYTSQGCAVCKAVDAHNRVTQAEFHCQRCGHKDHADVNAAKNILARGLESTTGHAGVACFAA

SEQ ID NO: 51139 - protein, 450 aa, Acidiferrobacter sp.
MDEELPTTQALTCKLKLLLDKEQVVAVRRTALAYRNALNHASAVAFANGKMSQGMKLQTLVYQDLRERYGLLSQMACNAPRQVAAAYKTLWERAKSNAAHKAKGWTKRRYKGLDKAPKFTALTVNLNHKRDWSLGKNQTVSISTLNGRIRCRYEGWNRHLDWLEHTADRGITLGAAKLWQDPVSKAWYLLVSVDKALVEKPMDRITTVKGVDLNRRNIAVESNTRGKCRFYHGGHQRHLAEHAASTRSALQAKGTRGAKAVLRKLALRERRLNADTAHCVSKAIAEPHAMVGLEWLKDIRNRTERRRSKKASVKRRKANRKVSSWSFADVQAKTAYKTRLSGGVPIWVDADYTSQGCSICGHTGKENRPNNGLLFVCAHCGHTLHADLVAARNISMRTLLIRQDWVRTGRLSAVPEASGDEAKAARLSRYAELRWSLDASSVLIVGRMAH

SEQ ID NO: 51140 - protein, 442 aa, Acidiferrobacter sp.
MPYRKVMYRLYPNATQTERLETMRGLHQRLYNTALEERIRVYQEAGRGLSFADQCKVLTQWRRISAGLASLNAQSEQVTLKRLHLAFQAFFRRVKNGDTPGFPRFKSLRRYPGWGYKTHGDGWRLHAGENSVHGKLYLQGVGHIPMRGRARTTGTPVTCEILHKAGKWYASVTLEIETIQRERGTAIGAFDWGLTDFLTLATPMGIETVANPRRLKNQLAELKRLGQEVSRKIRMAQERTGRKKGFPVSVSLRHAISHLARLHAKVARQRQDFLHQTSAGLVKRFGAIGTETLAVKNMVHGGGAHKKGLNREIHAASPAAFLKMTRTKAEQAGSWYEEAPTREIKPTQRCHGPCGPQCGPCGPQCGCGQLPNEKKKLSDRQHQCPHCGVTCGRDENSAWVLLRWLDARLSGREPSEVWSGGGFTATTGHSAGNEHETHAIAV

SEQ ID NO: 51141 - protein, 444 aa, Acidiferrobacter sp.
MERVRILSLKGLSRRQQAFVRVGQKEAARVWTVCRDLHQAARQDHKPWPNRDALQKATKGRFALHSQSAQMVTHAFLANGDTAQQLRSQGRTDIRYPYKDKTFHPLMWPAQAMRLEGQRILLPMGRGRPSLILPKPAWLDQPRACQIIWNGLHNEWHISVTEDSGEASVLEPTHRHATVDLGQIHQAAVATNDGHALIVSGRGIRSLKRQHSQQLGEIASKRSRCTKGSRRWRTLGRARAKLTLRQVRRVRDLRHKGTRQVVDFCKAHAVEAVFIGNPDGVRRKNSGRHHNQRMSQWEYGRDIDYLQQKAEQDRIVSFIGDERGTSSQCPVCGHRHKPRGRNWRCQACGFEGHRDIVGAVNMHPIAYDGQVVPFPKRITHCGPHGPYLRPGSLRRSSRPGTGHRMDSSVRRCLAETRNQAPQDICAGSLEHAHEPCHSVRSLPA

SEQ ID NO: 51142 - protein, 386 aa, Intestinibacillus sp.
MAQTKTWNTTIKVRLDPTPAQAAFFDENFNCCRYLWNQMLSDQIRFYTETDAHFIPTPAKYKKDAPFLKEADSNALVSVHQNLHKAFQRFFSNPSRYRHPTFKSKKRCKNSYTTYCQYYRSGKGTSIYLTKDGIRLPKAGLVKARLHRRPLHWWTLKTATISKTSSGKYYCSLVFAYTTKPSRQIPPTPETTLGLNYSLSHFYIDSNGHAADPPHWLARSQDKLRYMQQQLARMQPGSRNYEQQLYKIQRLHEHISNQRKDFLHKESRRIANAWDAVCVKDTNLVKMSQAIKLGHVMDAGYGRFRSYLQYKLERLGKPYIVVEKYFPSTKTCHHCGSVNEALPAGAKRWTCPICGTTLDRAKNAAQNLRDQGLVQYSASQRQRASA

SEQ ID NO: 51143 - protein, 386 aa, unknown
  TnpB Polypeptide
MCKLTYNTKLIFKTNDDKNNITKMLESQLLAWNECSKIQFTLPKNSIIDLHSKFYKSFRENNPTIPSQVVISAEQSVLSTFRTIKSNKQKIKNPPIKKNLSIRLDKRTYSYKNGTFSLISLEKRVKCQPYIFPKLEELISKYVFCDPLLFVRNNDVYIALTFTIPDIKIQNKLAIGVDLGCVNLAATSEGKLYKCPSFNARKRRLRHLKSALKSKGTKSSRKHLNKLRHKEHNVNKNMSHNLANRIIQDTTADTIVLENLKSLKVKKHKYQNKNRISQIPMFELRRIITYKALLSNKQVIIVNPSYTSQIDHRTGKLDGQRIGGRYIGKDGQVLHADVNAACNIGLRSKLPCSISNYYAWQVKVNSPIVCKSSGSSEVLQAPILLG

SEQ ID NO: 51144 - protein, 101 aa, Tolypothrix sp.
WGELTRQLAYKALWYGRNFVQLDRWFPGSKTCSECGHIVEKLPLNIREWDCPKCNTHHDRDENAAKNHLAAGLAVLVCEATVRPQESKSRKAGAMKQKPKS

SEQ ID NO: 51145 - protein, 403 aa, Thermus sp.
MRKAFKYRLYPTKPQQKDLERTLSLCRHLYNAALQERRDAYKKAGKSVGLYQQKRYLPQIREELPQYKRAHSQVLQDVIHRVDKAFQGFFRRLKAKKGKAGYPRFKGQGRYDSFTFPQAYETGVKLQEGGRRVLLKVFPWRESSHGIGSVKVKLHRPLEGKIKTATVKREGEHWYIIFITEVDPKPLPPSEEAIGIDLGTNPHFLVTSEGEMVEAPRHFQKAEEKLAKAQRELSRKKKGKSGRKKARLKVAKLHRKIANQRRDFHHKVARKLVNAYGTIVHEDLNILALSRSYVAKGIHDAGWAQFLAILAYKAAAHRASGSVLAGRRVIKVDPKYTSQDCPVCGHREKKPLWVRAYTCPQCGALLHRDVAAAQNILAKAWTGPSGETPRAFPQGNTPRSPGL

SEQ ID NO: 51146 - protein, 569 aa, unknown
  TnpB Polypeptide
MSSPDYLAYTVPCPLNSGKLAQVASFVKHWRALAARESAWQWRRFFETRGTKGLESVARAGWSRPWVASGDSTVTLAQQVMAQVAGQLQGYLGNVENTFMRLVAGSTLLPADKRRLFFLNRCNLWLAPGAVKDAAKPGYSLSPELRGLGRALFRQALRLHRRPTFHRYHPQLDQRSVKLGFARKANAFPLWAQVALVPGKTTALPVAAWPGLMATIAATSHALAPQAQARDQARQERAAAKRQEAGKPAAKTHRPCREAALSSLPQTLRLIVRPETRFPLNGPHSLSLGLVVDHQATRAQGRQAYRPRPGKVAAFDLGLTTLMVTDDGDLLGRNWMARLEAWDRQLLGIAQGQQKRGLPVATPRYRALVQRIDGFLKTEVFRLVNAWVARVRPEKIVCEATSFHARPGLSRRLNRLLSRFGKRYLGLALKRLEATHGIVVEERESAYSSQQCNRCGYVDAKNRETQATFGCRFCGHRTHADVNAARVVRCRRSTAVLPSTPASRRRLLQAEVARFQSRFPLPRAVHSMGRFPVRGRRDDPRWSNPYFREAVQAFRAAEPPTPPSVFARA

SEQ ID NO: 51147 - protein, 569 aa, unknown; identical to SEQ ID NO: 51146
  TnpB Polypeptide

SEQ ID NO: 51148 - protein, 371 aa, Chamaesiphon sp.
MRISFKTELKLNNYQRTQLAKHAGVARHAWNWGLDLCKKILDYNQENPSEKLRFPSAIDLHKFLVKWVKAENPWYYEVSKTSPQYALRYLSSAFSDFFRKKTANGRRVGFPRFKHKGQHDSFTLEGTIKVEHRSIQLPKLGIIKTYERLPQGLAPKTAIVSRTANRWFISFSYEIEPTITNKVVAACGVDLGIKTLATLSTGETFSNPQPYRQSQARLARLQKAASRKIKGSNNRRKANMRVTKQHARTANIRKDTLNKLTTHLAKNHSQLVVEDLHVSGMMKNHCLAKSIADLGMYEFRRQLTYKCELYGSELIIANRFFPSSKTCSCCGNIQDMPLKERVFNCQQCNISIDRDLNAARNLQHQAALIVA

SEQ ID NO: 51149 - protein, 272 aa, Nonomuraea sp.
SLRRLDKAFAAFFARVKAGRTPGFPRFKGRGWFDTVEWPRDGDGCRWDSEPEHPSATFVRLQGVGHVRVHQHRPVRGRVKTVSVKREGNRWYVVLSCDDVPAEPLPATGAVAGIDLGVAALVTTSDGVHVANPRHLAATADRLAAAQRDLARKKRGFTRRLKEVARIAALCGKVGRQRVDYAHKVANALVRGYDVIVHEELRIANMTRSASGTVEAPGRNVAAKSGLNRSILDAGWGVFLTILSHKAESAGRELIAVNPAGTSRTCARCGHC

SEQ ID NO: 51150 - protein, 383 aa, Bacillus sp.
MLAHKAYKFRLYPNKAQEVLIAKTIGCSRFVFNHFLARWNDTYKETGKGLTYNACSSQLTQLKKELVWLKEVDSVALQSSLKNLADSYARFFQKQNKAPRFKSKKNKVQSYTTKRTNGNIAIVNNKIKLPKLGFVRFAKSREVKGRILSATIRWNPSGKYFISMLVETDAQPLDKTGSSVGIDVGLKDFAILSDGAVYKNPKHFRQLEAKLAKAQRVLSRRKELAIKKKRKLNEARNYQKQKVKVARIHEKIANMRADYLHKCSTEIIKNHDVIGIEDLTVSNMLKNHKLAKAISEVSWYQFRAMLEYKAKWYGKQVVAVSKTFPSSQLCSSCGYQNKDVKHLNLREWDCPSCGAHHDRDRNASQNLKNEALRLLTVGATGIA

SEQ ID NO: 51151 - protein, 531 aa, Bacillus sp.
LTPKRNKQGTKINEHSPNTSGKPAIKSTETTKTEVTPMARNSTPSYTIEFPLRIPLWQQHRLEKRFKIARIIYNSCLGEALKRHRAVKASKEYRLLLKEPTSGERSKQLAEIRLAYGFTEYSMYKFVKPMQHKFKEHIGSHEAQKLATRAFQAVEKLHYGQAKKVNFKSVHDDISVENKSNKHGLRYNDGCITWGKKPTKKNPKPKNWLCMPIEPKPKDEYAHLALLDKTKYVRILKREIRGKTRYFVQLIQEGYPPTKQNRKISNDETKRVGLDIGTSTIAIASKDKVELRELAPACTVDERELRRIQRKMDRSKRATNANNFNENGTVKKGRLTWRYSKKYKKLRQKQKELYRKISIQRRMSHEKLANDILALGSDVRVETMRFQSLQKRAKNTTRNKRNGKINRKKRFGKSIANRAPAMLITIINRKLGYQGRSIKKIDTFATKASQFNHTTGEYSKKQLSDRWNDIEGLPIQRDLYSAFLIGNTKDTLNSVDVDLCNAQWDCFVELHNREIARIKQLHSKTLRWFIA

SEQ ID NO: 51152 - protein, 368 aa, unknown
  TnpB Polypeptide
MIRQIAYKFRLLPNLAQRILFEKTFGCSRFIWNQMLADRIAHYKETGESLRNTPAQYKKDFPWLKEVDSLALANAQLNLNKAYNSFFQSGFSFPNFKSKKTVQSYKTNNQKGTIALLDGKVKLPKVGWVKLKIHRQVKGLIKSATISKTATGKYFISILCEEEVKPLPKTDSSLGIDLGLENFAILSTGDKIENPRFLASLSKKLAKEQKVLSRRGLIAKERGVKLSESANYQKQRLKVARLHEKIANQRKDFLQKLSTNLIKNHDMICIEDLAIHNLMKNHHLARAIGDASWSEFVRQLHYKADWYGKKIVTISRWFPSSQLCSSCGVNSGKKPLSIREWTCASCGAHHDRDINASLNILKEGLSLA

SEQ ID NO: 51153 - protein, 443 aa, unknown
  TnpB Polypeptide
MTARKFTVVTQLHERNNRYLIDYIESSRMVYGKAVRETFYAIKRGGFNKSRYNTYLQNEYGIVSRTANSIIYDAQGRFNALKELKEYERKQLERKIKHFEDVVIPKLVEQRKQNSVKLQGGVSVSQVQQRNLRLRVVAKRSRLNRLKQKLKTLEYQLKSGRLKLCFGTKRLLKQDYKKFIEQRDSQMTFIGAKEETACNHNLQLTYNRRSNQFLIRLRKDFGGYKSAKGEERYVYGKVYFNHHKAQIVSILRSKNSPLSYRIVKRNGRYYFYCTFEFQVVNDEVVTRSGYGTIGLDFNKGFVTLSETNRYGHLVQTEFMSYRFKSGSKTKADLQKIANHVVKLALRIGKDVCIENLDFRATKSKTEAKIGKKYNDMLHSLAYREFSTAMESACYRNKVELHKVNPAGTSWLAERIYCKPMKLNIHTGASYVIARRGQGYKDAA

SEQ ID NO: 51154 - protein, 443 aa, unknown
  TnpB Polypeptide
MQSRKFTVVTKLHEKNNRDLIKYIESSRVDYGKALRETFYAIKRGGFNKSRYKAYLQDKYKIVSRTANSVIFDAQGRFNALKELKEYERKQLERRIKHLEDTVIPKLVEKRKQNSVRLQDGAFVLLIQQRNLRLRVVAKKSRLNRLKQKLKTLEYQLKSGRLKLCFGTKRLIKQDHDKFIEHRDSQMTFIGAKEEPACNQNLQLTYNRRNNQFSIRLRKDFGGYKSAKGEDRYVYGKVYFNHHKGQIVSILRSKASPLSYKIVKRNGRYYLYCIFEFQVDSNEVVTRSSYGTIGLDFNKGFVTLSETNQYGHLVKTEFMPYRFKSGNKTKADLQGVTTSVVKLALQTGKDVCIENLDFRATKSKTEAKIGKKYNEMLHSLAYREFSEAMESIAYRNRVKLHKVNPAWTSWLAEKIYCKPMKLNIHTGASYVIARRGQGYKDAV

SEQ ID NO: 51155 - protein, 403 aa, Scytonema sp.
MEKAFNYRFYPTTEQESLLRRTIGCVRLVYNRALAARTSAWYEHQERVDYVQTSSMLTNWKQQENLDFLNEVSSVPLQQGLRHLQKAFTNFWAGRAKYPNFKKKHHGGSAEFTKSAFRWKDGQVFLAKCTEPLPIRWSRQIPTGYSPSTITVKLDARGHWFVSLLVDDHTIKPLPSTDKSIGLDVGVTSLIATSNGDKIANPKHFKRLHKKLKRVQKALSRKQKGSKNRHKARLKVAKMYGRITDARKDFLHKLTTQLVRENQTIVVEDLAIKNMVKNHKLANSISDASWGELIRQLAYKCQWYGRELVKIDRWFPSSKRCGNCGHIVDKMPLNIREWKCPNCGASHDRDLNAAKNILAAGLAVSVCGANVRPDNHAVEGQLRRPEGACESKTRKGQKQKPKS

SEQ ID NO: 51156 - protein, 527 aa, Oscillatoriales sp.
MKGRSKASKNQLDLGSMMSNPRSEIQLELPLFATAESVQQNNEIVSPDKLAICNQSIQTQKLSETSVQDLISKGKDCLGYWSDLCEAISSQLLLPVETYYVDSDLNYSSLWHNKTLGASWFSKILYTVGKPNSQPIFSPSFTSFLAGCTDSEAKPRKSSKIRIYLNPEQRALLKQWFGVSRFVYNETIKYLQQPDTKANWMAIKTGILNGLPEWAKPVPYQIKSIAIKDACSAVKAAKKGFKVDGKIRRCKFQSRKDVKQSIYIPKSAIQNCGIYHSILGDCRFKESLPDNFSDGRLTLIYGEYYLTVSTEAQQLNSENQGRVVALDPGVRTFMTFFSETSFGWIGKDSNLHIQKLCFKLDKLISQLSKSKCKQKRNLKKAASRLRCKIKNLVKELHHKTAKLLVENFDVILLPTFETSQMVSKSRRKLRNKSVRLMLTLSHYEFKQFLKWKAWENNKVVIDCNEAYTSKTVSWTGEIINNLGGAKIIKSNSTQLKMDRDLNGARGIFLRALVDTPWLREYLNLCIC

SEQ ID NO: 51157 - protein, 355 aa, unknown
  TnpB Polypeptide
MLPSQFVCVAMREAAGAVRSWNSNHPKRRWNLKTARKALVINYDLRTMSVRGNMLTLSTMRGEQRIRTLMPETPNWFAVRYPSRKLNAATLILDPRTRTARIVLICHVENETPVADGDVLGVDLGQHSLHMDSRGGETKSSKIWGTKRKYAHNRKTLQEKGTRSAHRRLKAMSGREERFIRDVNHCVSKRLANSPNVQAIAFEDLTYIRRQATKRTKTGKRRRNMLNQWSFSQLQEFAAYKAAANGVRVIMVDPSYTSQRCNRCGYVDAGNRNGARFDCKRCAWSDNADHNAALNIRDRAIASLEDDYISTDRPVDRVLSTTRMDGTPTMTSTSDDDGRVVGATFTSKPLSLPQR

SEQ ID NO: 51158 - protein, 458 aa, unknown
  TnpB Polypeptide
VRKVGASSSQTTWKKHWKRCAVPSFEAVKVRLDPTPRQARLLESHAGAARFAYNLMLNHVQDQLASGEAPDWTMYAMRRWWNDHKNDLAPWWRENSKEAYNSAFEWLARALKNWSDSKKGKRAGRKVGWPKYKAKRSSVPRFAYTTGFNLIDGDPKALRLPRIGRVHCMENVYKRVRGRVVRVTVSRHAGAWFAALTVRLPDEHVPSVSGKQSGVRPVGVDLGVKTLATLSDGTVFPNPRNYVRAQRKLRRAQQTLSRRDRDGNAGRGSNRWNKALKRVQAVHAHVAYQRADTIGKITAWLARNYTDISIEDLNVQGMSRNRRLAKHVLDAGFSEFRRQLEYKTARSGARLHVIDRWYPSSKACSSCGTVKAKLSLSERVYQCDVCGLSMDRDLNAAINLMVAGSAPETVNARGGDARRADTVSGNADPRETRTKRPPTGGVRLGAGLGNETMQTRTN

SEQ ID NO: 51159 - protein, 383 aa, Moorea sp.
MQRAFKTRLKLNNHQQSIMAQHAGYARWVWNWALRMWDEAYKEGLKPSAHKLKKFYTNHVKPNYLWQKTLSSRVYQFVFLHLGEAFTRFFSGLADKPRFKKKGKNDSFTLDNCGKVMEFSGTRLKLPFIGWVSTYEPLPQVQTKRLTISRVADQWFISVAYEFEAEPTKKLKAAIGVDLGVKELATISDGSVFPNPRPYKRAQRKLARLQRQLARKQFGSNNRQKAKLKLAKAYQRVRNIRQDTIHKLTSWLTKNHGAVVLEDLNVSGMLKNQKLAGAIADSAFSEIRRQVEYKSKWYGSQVIYANRFYPSTKTCSDCGHEQGMPLNVRVFNCEACGMVKDRDLNAAINLERLAVGSTVECLTDRVLPTVLDDAGSKLQNVTK

SEQ ID NO: 51160 - protein, 397 aa, Acidithiobacillus sp.
MRIQKAVRYRLDPTPEQESLLARAAGCVRFVWNRALAIQKSYLDSGCGILNFADLCSVLTTWRNGQSFGFLAESPSHPQQQALRNLDRAFKEAFNPANPKRFPVFKKKGRNDSLRYPNPEHIKLDLHSRDADGRHRLPRLFLPKIGWVKFRKSCPIGGEIRNATVRRIAGHWTVSIQIERVIFPQAPQGEAAGLDLGVREFAALSDGTFVEPINAYRHWETRLARAQQAMSRKVRFSHNWQKARIKVQRIHRKIAAIREDFLHKTSTRLCKSHAVLVIEDLAVQSMSASAAGTVEHPGTLVQVTSRFNKAILDQGWYTFRRMLEYKTEWHGVLLRILPPEGTSTTCPECGHEAEANRPGLRKWFQCVRCGHREHSGTVAARNLLKRAGQVRLACSAA

SEQ ID NO: 51161 - protein, 643 aa, unknown
  TnpB Polypeptide
MGEVKEKPPDDFFKCVKVPIKHILKNPDINAKKILNVTIKCNKIVIHCLQFMKLYLLDHYEKNGKVPHLDKPFVNSCMKILCKDNPTGRPPKKEIEELKSKLNGFYSKNYKKLMKGSELDYNHMNTILDYLTIDILTMYENNIKMHYIEYVERYVNVVWNKKFFIEKIRKINTTKKNKDARIRKLCCELRKIKNDILNVDNSTLKSATFYHTWIKEQKKVIIPLKNKFKKNNLYYDLQCSPQDYLSCMIYMMKQVEEHGYTINNVFPLRSDIIPKHIRLDTTTLVHLLITKKQGNKSDYLFKGNLKRFENKIWKFFFRTERQCFNKPNYTFHHMIETDGMSCSILLLRNDLIGKRVPNKKNGCKESYIGDLKDYSKIKDKTLVAYDPGLSDLIYCVNGSTKEANTFRYSQDSRRKETKLKKYSKIILEYKKEKIRGKTITEYETELSKFNKKTLKMTEFKKYLKKKNEINNKLFTFYEKSIFRKLKLNGYVNRKRNEQKMLNKFRKIFGTPDKVIIVAGDFEQKKHMKFKEPVKGRGIRTLFKNNGYKLFLVDEFRTSCKCAKCEGGDCKKFMLRESPKPYRTNLSLVHGLLSCKNCANVWNRDRNGAINIYKIAHGIIHNNKRPNYLCRSNKSDVLNDTSKS

SEQ ID NO: 51162 - protein, 379 aa, unknown
  TnpB Polypeptide
MLYNVSMKTLKFKLYQHKRNRFLKRMINASGVIYNHCIALHKRYYRMWGKHLNCAKLQAHIAKLRKRKEFWQSVGSQAVQDICQRIEKAYQLFFKHNKKGVRLPGFKKVKKYKSFTLKQAGYKFLGGNRVKIGNRTYQFWKSREIEGTVKTLTIKRTPLGELFMVVVVDDVIDLLVKSTTGKIAGFDFGLKTFLTCSDGTEIESPQFLKPLKIVANASRHHSIKVKGSANRERARKNLVRKYEDISNQRRDWFWKLAHELTDKFDVLCFETLNLKGMQRLWGRKISDLAFGEFLQIVEWVAKKKKKLVVFIDQWYPSSKTCFHCGHVLEKLDLSVREWRCPSCQSVNGRDENAAKNIQAVGASTVSLGDVRQVSPAIAV

SEQ ID NO: 51163 - protein, 398 aa, Streptomyces sp.
MATAQVKRAFRYRFHPTDEQAAELSRTFGCVRKVYNLALAARTEAWARQERVNYNATSAMLTAWKKTEELAFLNEVSSVPLQQALRHLQTAFTHFFGKRARYPRFTSKKRSRRSAEYTARAFRFRDGKLTLAKTAQPLAIVWSRPLPAGAKPSTVTVSQDAAGRWFVSLLCEDPCVQPLPATDTCVGVDVGLDHLLTLSTGEKVANPRHERRDRARLARAQRNLARKARGDGANRAKARRKVAKVYARIVDRRRDHLHQLTTRLVRDNQTIVIEDLAVRNLVKNHTLARAISDAAWAEFRRMLEYKAAWYGRDVIAVDRFFPSSKLCSACGTMQNTMPLSVREWVCGCGAVHDRDVNAAKNILAVGLTASVCGAGVRPQRSTPGGRSATKQKPLRREP

SEQ ID NO: 51164 - protein, 457 aa, Kyrpidia sp.
MLLEVDEHTAAILDGQSRIANWLYNHLLEEANTLREKFRSTQDPEAARVLYTERGLRDRVPALKQEYPFLRTVYSSVLKNAALRLSGAIRKYQKARREKGAKKVGWPKFRSWRREWFSLQYDEPWKGYRLEGRKLEVSLGKVLDEKAGKEKQAQVTARLAEPLPDWFEPGMVRQLRIVKEGKLFYAVFTVRRPVPARRSVGRVIAIDPNHKNLGYGVGTDGVATEIQNPWFLKILDRRIDEVKSLRDRCKRKSVRVVREDRSEVWLPSRRWKKLNERLDELWRVRREQTKAYLRTVANRLYREYDGVYVGDYTPHGGGISTGMRRAMNNQSLIGRFKETLAWVATRSGKVYGEWDEDGSTRTCHVCDYEVPGGIPPEVREWTCPECGTYHIRDENSSINGLEQVLKNLEVPGSGRLGDKIVVRTRRAWRFDGIGITEMPGIVGGRVGDHAAGRQEIQ

SEQ ID NO: 51165 - protein, 453 aa, Kyrpidia sp.
MRSALKMLLEVDEHTAAVLDGQSRIANWLYNHLLEEANTLREKFRSTQDPEAARVLYTKRGLRDRVPALKQEYPFLRTVYSSVLKNAALRLSGAIRKYQKARREKGAKKVGWPKFRSWRREWFSLQYDEPWKGFGLEGRTLRLSLGKVLDEKTGKEKQAQVTAHLAEPLPDWFEPGMVRQLRIVKEGRLFYAVFTVERPVPARRPAGRVIAIDPNHKNLGYGVGTDGVATEIRNPWFLKILDRRIDEVKSLRDRCKRKSVRVVREDGSEVWLPSRRWKKLNERLEELWRVRREQTKVYLWTMVNRLYREYDAVFVGDYTPRGGEISRGMRRAMNNQSLIGRFKGTLAWVATRSGKVYGEWDEDGSTRTCCQCHYKVPVGIPPEVREWTCPECGTHHIRDENSSINGLEQVLKTLEVPCSGRLGGQIAVKTRRAWRFDGLGIQEIPGAVGGRVS

SEQ ID NO: 51166 - protein, 248 aa, Kyrpidia sp.
MMTTALLERVQSDRARILSATVSREVGRWFVSFTCEVERDAGQPKRPRDVVGVDAGLKHLAVLSTGEKVPNPRPLRKALRKIARLNRELARRKRRSRHWEDTRRRLNRAHARVARIRLDAMHKLTHRLATTFGTVVVEDLNVAGMGRNRRLSRAIYDAGLAELRRQLQYKCEWYGSRLVQAPRMYPSSKTCSRCGAIKEILPLWERVYRCDVCGTVMDRDENAAGIWRLLRPPSPGVDRRRKTPVERM

SEQ ID NO: 51167 - protein, 457 aa, Kyrpidia sp.
MLLEVDEHTAAVLDGQSRIANWLYNHLLEEANTLREKFRSTQDPEAAKVLYTKRGLRNRIPMLKKEYPFLRTVYSSVLKNAALRLSSAIQEYQKGRHGGRAKRVNWPKFRSWKRKWFSLQYDEPWKGFRLDGRTLVLSLGMAMDEATGKRKQVHVSTRLAEPLPDWFDSDKVRQLRIVKEGRLFYAVFTVERPVPSRRPVGRVIALDPNHKNLGYGVGTDGVATEILNPWFLKILDRRIDEVKSLRDRCQRKSVRAVREDGTEAWLPSRRWRKLNVRLEELWRVRREQTKVYLRTVANRLYREYDAVFVGDYAPHGGGISRGMRRAMNNQSLIGRFKETLAWVATRSGKVYGEWDEDGSTRTCHACHYKVPEGIPPEVREWTCPECGSRHLRDENAAMNGLAQVLKKVEVPCSGRLGGRVAVWTRRAWRFDGLGIAEMPGIVGGRVGDHAAGRQEIK

SEQ ID NO: 51168 - protein, 402 aa, Escherichia sp.
VKRLQAFKFQLRPGGQQEREMRRFAGACRFVFNRALARQNENHEVGNKYIPYGKMASWLVEWKNATETQWLKDAPSQPLQQSLKDLERAYKNFFQNRAAFPRFKKRGQNDVFRYPQGVKLDQENSRIFLPKLGWMRYRNSRQVTGVVKNVTVSQSCGKWYISIQTESEVSTPVHPSASMVGLDAGVAKLATLSDGTVFEPVNSFQKNQKTLARLQRQLSRKVKFSNNWQKQKRKIQRLHSCIANIRRDYLHKVTTTVSKNHAMIVIEDLKVSNMSKSAAGTVSQPGRNVRAKSGLNRSILDQGWYEMRRQLEYKQLWRGGQVLAVPPAYTSQRCACCGYTAKENRLSQSKFRCQVCGYTANADVNGARNILAAGHAVLACGEMVQSGRPLKQEPTEMIQATA

SEQ ID NO: 51169 - protein, 368 aa, Nocardia sp.
VRTAYRVRAYPDPGQAALLRRTFGCVRLVWNKTLADRQRRYTLEQRPTSYIETDAALSGWKKTPELAFLSEVSSVPLQQTLRHQHAAFAAFFTGAAKYPRFKNRHGRQSAHFTRSAFRIKDGALWLAKTTAPLPVAWSWPGVDLADLDPSMVIVSCEPDGRWFVTFAVERPDPAALAPAGESVGVDLGVKDFAVLSTGEKIANPGHMARHERGLRRHQRRLSRMQKGSANRARQRVKVARKHARVRDARRDFLHKTSTGLVRRFDTIAVEDSNVSGMVRRRSSAKSISELGWSEFRSMLEYKAERAGRRFVVIDRWYPSSKTCSACGHLLAQLSLRTRQWTCPDCGTRHDRDINAAKNILVAAGLVET

SEQ ID NO: 51170 - protein, 430 aa, unknown
  TnpB Polypeptide
MRQVERHWIRENHKLYSICEELTFKAKNLYNAGLYQIRQSFFERERSENKESYPILSWITLTSNFRKEKQEDMLALPSKVSTNILKSLGNAMSAHYQVLKRFYDESNTSVTHKPQLPKYLHKTNGRYVVEFNNQTISKKRGENGEIIICPRELNLMIPTKVDKPKYVRIVPKLGAFIIEVIYEVKELPLKYTNNFVAIDLGINNLASVTFTNGINPLLVSGQKIKSINQGYNRLIAKAQSKLPKKQGTSKHIHRLWRNREMKLQSELHRITSFLSQYFDEMCIEKVFIGKNVGWKNNVSMGKKTNQKFVQIPFNTFISQLRYKCLLKGIEVIEQEESYTSKASFVDGDEIPIYGEINYEPQFSGKRIHRGLYETKDGFRVNADINGSYNILVKGMQSIGKTMDRNNVSYYTRTFRSSNHKSVKDLILDYM

SEQ ID NO: 51171 - protein, 405 aa, Halobacterium sp.
MELQRTAVVKLSVPNERQDDLKRTMDTFRDASQRFADRGWQGDDSGYVITSRSRLQPLVYDDIREDTGLHSDLTVAAVNHASDALSGCVDRMKEGERTSKPVFTSNTTVYNTNAITYFDGYCSLAAYGSGRVHAEYVYPDDSLQAEYMEGDEWTKQGAKLRYDCQSDTYYLHVSVKQEREDSSEGAESRTVLGVDRNVDGYLAVTSTGAFIGNADLLNHKRREYERRRNRLQQTGTRNAHLTIQSIGDTFANWSEDFLHQASKRLVKEAASQDCSVIVFEDLKRIRDRISGASKFQQWAFRELKRQAEYKARAHGIAVESVHPAYTSQRCSHTNCGFTHEDNRDGDEFACQKCGKELHSDYNAARNIAHRYVQNRLKSGSGRATNHLALKSGTLNGNGDYSPSTV

SEQ ID NO: 51172 - protein, 279 aa, Halobacterium sp.
MHYNYKYRLDPPEALAETLLNHVDTCRQLYNHVLYLLNEADDSPARYEVQGRLPDLKSWWGDLRDVHSKVLQMVVKRVYDNLSTLKAQKENGCAVGNLKWKPPREYRSLTYNQFGFKLKNTSGRPVLWLSKIGEIPIHLHRDIPENATIKQVTVKQEPTGDWFATFGIDVDEDTPEKPENPERVIGIDVGILKYVHDTDGIAVESPDFSDERERLERAQRELSRKEHGSANWEKQRQVVAERHADLKRKRRDFLHKLSNYYAREYQYLTKHPRLAVSAA

SEQ ID NO: 51173 - protein, 408 aa, Klebsiella sp.
MLILKAYKFRLEPTEEQSQRLRQLCGCARSVWNHGLEETTRILESGGKLPSAFELNRMLTVWKKTPELAYLQEAYTDNLQQKLKDLHGAWKRCFDKKLAAKKPVWKRKNDGRDSIRFVNFEKYCRLENRRVKLPSGLGWIKFRQSQDVNGKIKNATISQLAGKWYVSFQVEIETDKPKHESTSMVGLDAGVTKLATLSDGTVYQPVNSFKASQRKLAVLQRQLSRKVKFSANWQKQKQKIQRQHLHIANLRRDYLHKITTTISNNHAMIVIEDLKVSNMSKSAKGTAERHGRNVRAKSGLNRSILDQGWYEMRRQLEYKQLWRGGQVLAIPPAYTSQRCACCGHTAKENRLSQSKFECQICGYTANADINGARNILAAGHAVLACGGMVQSGRLLKQEPDTERSDVTH

SEQ ID NO: 51174 - protein, 464 aa, unknown
  TnpB Polypeptide
MIVTRTLQADVPEALQAICKRMGFVRADIWRRYGALGTIGKSANDIRKEISASRLYADLPVDGTIRNETTKDIVNDVLLYKAAAMQKVRKAIAARTHDETERKRLYTLLRKDQWLTDNFLHRQRRKHFRHGKSQVANQFIVRSDKYTTEIVNGYLTIVIHIAAKYGENIRLTTTSSGKNVRLSGSNLRIIVKDGFSEIHYATAKGDGRPCGEKMIGIDKGYTEAFMDSEGVPHGKDFGKVMRVYSDQTMITGKARNRLHALEKKHREAGQIAKADHIRDNNLGRIKLNARKDRTHKQLRTIAFQSAHAIVDKAAVVVSEDLTAFMALQQAWKRYNRRMSAWAKGVLAEALDSVCTQRQAEHCLVNEAYTSQMDSVTGLLEGKRVGDKFYRVNGDVLQADHNAALNVLARYEDTEITRFTSHAEVRRILLARSPAQLSVKGHELQVMSAYQPCADKSPVQICTGL

SEQ ID NO: 51175 - protein, 399 aa, unknown
  TnpB Polypeptide
MIRLSYKYRLKPSPGQATVLQEQLRLCRLTYNALLEHSLSERKAGRGTPTHNALTYLIPAIKARKPELNTVFSQVLQNVAKRVRSGFEGYWARKRAGLKVHLPRFRGEDRYDSLTYPQLGFGLKDGVLCLSKIGDVRVVQHRPVEGQVKTLTVTRGRAGKWYAVFASEVEVKPIRNRLPAVGVDFGLSSLVALSDGATIEAPRSYRGAEERLGRAQRRLSRKKRGSRNREKARRRVASVCERVANQRRDFAYKTARMIVNRYERVYVEDLNVQSMMGNRGLSKSLGDAGWGMLRNALTYMAERSEGVTAFVSPRGTSQTCSGCGAYVEKDLSVRTHRCHVCGLIIDRDVNAALNVLKRGLGIGLERAEYTLVGEVTATQLIEVGQVASVSQEAHLFRGG

SEQ ID NO: 51176 - protein, 515 aa, unknown
  TnpB Polypeptide
MKAKLNILEPCQTKDDMMSMATLEHKERRKPSVIAESPVISKKMTSKDKLTICLNDFLNARLSKTLDLELTLKEKAYYPFFSEQAKELSSNLYLPTKTDYADSDLISLDGLLKTAVDKSWFSTKLIFHPNKNLPKTSLQFCMSSHVECTDLEVIKTKLLRISPTKKQKQLFKSWTDCSRYVFNQTFDYIRSCIGWTPTWMDIKKDMLKQLPDWCKPIPFQIKGIAIKEACNAFWKAKGNPSFRTRKNPEQSCFIPKTALSSKGVYPTISGKGLYFQESLPDNPKDSRLIWRYEKWWMAVPYLEKLIIGESQTRIVSLDPGIRSFITFYSLEHSGHLGKGDFSRIQRLCSHLDNLISKRDLTKNKQKRRSLTKASRKMRAKIKNLITEIHHKTAKFLTDNFDVILLPTFETKQMSNKAGRKIRKKSVRSMLTFSHYKFKQFLKWKAFQTGKLVVDCCEAYTSKTHPQTGEIKNIGSAEWIKLLDGSRANRDIVGARGILLRALVDSPMRKRAVNES

SEQ ID NO: 51177 - protein, 496 aa, Streptomyces sp.
VKVTRIAYSNNLNRAKYSQLVEQAHRLGAVRALVWRRFGSINGVGISDRQIRDQWLADGTAEAFSVLANAWKETVRDAMADIKASREAAKVLVRKAIHHHYHTQKERRDAYAALKRDTWTSDAFLCRLMRKHWRHGVSRTVNQIVVRSDQYRTFTLPGEGNVWLAVPSLARRKMISIPLNTTVAPTGTLRLIVRDMRVEVHYAIDAADLRELRPCGTAKIAVDKGYSEVLTDSEGTHHGQELGDLLRTESDYLKTKNARRARIRAVIERARNAGDHAKADRIAANNLGTIKRDRRHRRFTSRVRTVTFTAVHAVVDKAKHIIAEDLTRPFVSRKRLGKDTNRRLATWTKGITAEALTHVSERRGSALTLVNAAYTSQVAPCCQILGKRLGDRLHCTQCGDVWQADHAGAINVLERDGDPDISLHTPHTRVRQILQERADRHRTRLPVQDSSPTGRRANHPMRANCPANGKQCAARPMSAARSIANFSIRPDNWPRQ

SEQ ID NO: 51178 - protein, 401 aa, unknown
  TnpB Polypeptide
VNTQTCRFALTYTIKKRNEATNILHYKAYKFRIFPNREQSILIGKTIGCARFVYNHFLDLWNEEYSKTGKGLSYHTCSAKLPKMKQTEATLWLKEVDSMALQSSLKHLADSFSRFFNKQNGKPQFKSKKNPVQSYTTQFTNQNIIVLDKHIKLPKLGRVKCAKSREVKGRIIRATIRKHASGKFFVSLLCEEEIHMLPQANSSIGIDLGITHFAILSDGQKVDNHTFTSKMEKKLKREQRKLSRRALRAKEKGIHLRDAKNYHKQKIKVAKIHEKVANQRNDFLNKLSTEIIKSHDIICIEDLHTKGMLRNHKLAKSISDVSWSSFVTKLHYKADWYGRELIKVDRWFPSSQICSHCHHHDGKKPIDLREWTCAKCHTHHDRDINASQNILTEGLRLHSFA

SEQ ID NO: 51179 - protein, 440 aa, unknown
  TnpB Polypeptide
MQKRKFTVVTQLHEKNNHDIIEYIESSRSEYANAMRETFYTIKHCDLNKSQYNTYLQSKYGILKRTANSIISDAQGRYNALRELKEYERKQLEGKITHLATEVIPELVELRDYNSAKLRLGRAVSLIKQRNLRRKIIAKKAKLNRMKQRLDNLNYQIESGRLKLCFGTKKLLKTDYNLFIAQRDSQMSFVGAKKEKACNLMLQLEYNRENNQFRVQLRKDFGGYKSASDKYAYGKVYFNHHKKHLIYILRSKSSPLSYKIIKRNGRYYLYCTFEIQIDEFITRSHNGTIGLDFNRGFITLAETNKYGHLVRTQTLPYRFKSGDKTKTDLPGIANRIVESALQTGKDVCIEDLDFKMKKSKTESKQNKKYNEMLHSLAYRQFSDIVESVTYRNKVNLIKVNPAWTSWLAKQKYCPPMKLNVHVGASYVIARRGQGYKDTFK

SEQ ID NO: 51180 - protein, 204 aa, Skermanella sp.
MLETTRIGLYPTPDQQQKLAVQFGCARWGFNNALALTQQTCREAGKSLSYHALAVRLPGLKQEFEWLKEADSQVLQQSLQNLALAFDGFFARRVRYPRFKSKHGRRSIQYPQRAKLEGNHIYLPKVGWVKGIVHRGIVGKFKTVTISRNACGQFHAAILTDTGLPMPSVSTAGKTLGIDVGLVDLAVTSDGSKFTNPRHIRICS

SEQ ID NO: 51181 - protein, 389 aa, Skermanella sp.
MPVLTYKYRLFPNSTQAVALTDMLGSFCDLYNACLQQRIEAYRRQGRTLSYIDQASELKAVRLIDERLASYSYSAEQQVVRRLDKAFRAFFGRVRTGKGGFPRFRAKSMFDSADFRVGDGLTIRKSRKFGIVGIPGEIKVRWHRDLPAGAAAAVLSRSCGKWHICFFVETPDAHGPDPVRAAGGIDVGLTSLIATSDGDAVPTPQWVRMASTKQRRLQRALGRCRRGSKGRLKAKMRLARHSARTANQRRDFAHKLSRTLVNLYSHIAFEDLNITGLASGMLAKSVLNAAWGQLISFTDYKAANAGGLVAKVDPRGTSQECDCCGMVTPKYRPGESPIRELNNRIQDCPGCGTVEDRDVHAAKVIKHRAFPWLKGPGAGPGASSQPVAA

SEQ ID NO: 51182 - protein, 535 aa, unknown
  TnpB Polypeptide
MSRKKNSKKSLNQNTELRVLSIRINSDKIEKEIKNTLYTYRHFENILLLLIKENYEKYLQGLDTENDFKHFTNKQTLRNALLDYKSKNSVNSDYLKEKYKENQLWQSLSEVARKIKQHNFGYIIDRVKANYKTYFTNIKTYKENPGLFTGMPKPPKPKKLSKMTEYAIELDKYTALSFAKLEKQNLIGINLTNHMIYIYCNQEQIKKLTEIDKLYSARVVYDNGMLYLQISYLKEINNQKQSQINKSAGIDIGVNNIVTVFIEDETTPSLVIDGKPHKHYNSKFNRLVAKLNESKSQEVLEWKESKTGSKYPSRYTEKGKRIGRFISFLYAKRNRYFQDQFHKIAKRIVEYLTLNGVSTLYISKNTAELKNNGECNLNKAVKQNFIQIPFIKLLKYIEYKAQEKGIQVYYVDEKYTSKASCISDNVKSIQDNPDLANAFKGKRVKRGLFLDTAINKIFNADVNGAVNHIKVATGKCFIWLKDKLFKLANPIKIKSDYEFCKLIKNLQNSVSGKSISIKDIESSYSNRMVANAIFC

SEQ ID NO: 51183 - protein, 440 aa, unknown
  TnpB Polypeptide
VTVRMKIISSYGVEVRNKDRNKIFLQTIDIYNKAVTFCIESFEAEWEKLSELEGKLRNNAGENLIHSTKGNKAKYKDFDRIFYKFPSYMRRSAVQEALGYLSSYYSNVKNWHKDGEKGRKPTLQKHLNKMPTFYKGNMYQETEEKNIVQLKLYIDNDWKFVDIKLKNTDLKYIEKHCKEEKMSVPVLEKRNKKWFLRFTFTKEVKLKKETKEKTILSIDMGINTDATCTVMKTDGTIFARKFINYASNKDHMYHGLNKIKKISKKSGSCNTKRLWKEVKRENEELSRKIAKAITEYAKEMKVDVIVFEYLDTKGNKTRFKKQKLHMWRKNTIQKIVENKAHKEEIRISRICARNTSKLAYDGSGEVIRNVKNYKLCEFSTGKIYNCDLSASYNIGARYIIREIKKTSSAKKWSHIVAKVPECERRTQCTYATLLEMVKVA

SEQ ID NO: 51184 - protein, 272 aa, unknown
  TnpB Polypeptide
LRHDECNATSDVVTPYDLPYQAKAALCNYVPQLHDTYDAQELDDDHPVRLTNQNQAAEFDHSAARDYEFTWWAPQPGRGTNFWIPLRINPAQTELWHDLLDGDASAGQIRLQRHRTSWTLHVTVEFPIEQPDYESTDEDVTPVGFDIGEAHLLAGCACEQATPTDPLLINGSRARYLRKEMVTTLKRLQEREAAQWRIDERFNHSQNALTDIIEKASRRAVEYACRFDKPVLVLVLVLEDLSYIREDLDYGKWMNRRLHAWAMGVRSASTTH

SEQ ID NO: 51185 - protein, 408 aa, Paenibacillus sp.
MILLAEHIDAMNERLREKNRSRPFKLPTEEKPFVSYNFLDALFKVIDQSDYRALPTQSSQGIMKIAFQNWVSFFASMKDYRKHPRKYSGKPRIPGYVRSKVKEVVFSNQDCVIKEKKFLKLPKTKLQLNIGKLGCTGGQLKQVRVIPRYGQYIVELVFAYPEVKKEAAKEYALAIDLGVENLATIVTTTGSKPMLVKGKIIKAINQYYNKMKAHYTGILRQGKKPSEGVHTSRRLERLHLKRHRRIKDLFHKVSRHIVQLAVEQQIGTIVIGHNDGWKQASAIGRRNNQSFCHIPHQMLIGMIQYKGAEQGITVTLTEEAYTSKASFLDQDPLPRYDEEGEWIFTGKRIHRGLYASTRGLIHADVNGAANILRKVFPYVSTQGTDGIEGLDGYQTINVSTPLVLSILK

SEQ ID NO: 51186 - protein, 545 aa, Streptomyces sp.
MGGLRKLAAPFVALGPSGVAIRDRLKHLTAEDEQVLRLVGDHLGTLASRDLRALCAVGLDHDAEGWAARKRAVTAVSSSRWAGSITKATHDQWALARRSQLAHIQQLEAGVRVLAHRLSLPVGEKGGKHAPGGYASRREWHAKSRRLPVLTDRLQALRADWQAGRVGVVRGGKRLLNTRHHLEAARLTEEQWRTRWQAERRFLKADGESGKRFGNETIRVTPDGEVSLKLPAPLAYLANAPHGRYVLTSRVRFAYRGEQWADRVHANRAVAYRIHEDPARGRWYLTASWTNPAVQSVPLAAVRAGGLVGVDTNADHLAAWRLDTHGNPLGAPRRFAYDLTGSAAHRDAQIRHALIRLLHWARRHHLALAVEDLDFTGETTREKHGRRKRFRRLVSGMPVARLRARLVSMAAELGIPVVAVDPAYTSRWGAQHWQQPLTTASRKTTRHDAAAVAIGRRALGHPVRRRTAPPPHDRSDRAGHRTAQAPPAIPGREGPRPRVPGPRTRSVPPGRGANAGDQDTQHRSGRPAEHQSWQQDTLPLSIQER

SEQ ID NO: 51187 - protein, 430 aa, unknown
  TnpB Polypeptide
MQLVEQHIIDKKDSRYEAIDQAAFASKNLYNAALYAIRQSYIHKGKYLNYNQMDKLMKQHEAYKALPAKVSQQVLMQLANEWDSFFKALDAYKANPSKFRGRPRLPKYKDKAKGRNLLVYTAQAISKKGLKKRAQVEPSMLPIAIKTQHKEINQVRIVPRSGFYAVEVVYEHEQPKSAVDPAYYAGIDIGIDNLTALTSNQPSFVPVLVNGRPMKSVNQFYNKRKAELQSKLGHTGTTKRMERLTNTRNRRIDHYLHTASRWIIDDLVAHGIGTLVIGKNDGWKQEAKMGKRTNQNFVSIPHARFIQMLKYKAELVGITVIITEESYTSQASFLDRDEMPVYDPNRKEKPTFSGKRIERGLYRAKDGTLINADCNGSSNIIRKVAPEAFGSEGVEDGKSHKPVVHPVRLSFPSRSQKASNGVVSKRSRER

SEQ ID NO: 51188 - protein, 407 aa, Pusillimonas sp.
MKRLQAYKYELQPNGEQQRCMRRFAGSCRFVFNKALALQKANHEAGNKFIGYVAMAKHLTAWRNSSETGWLSDAPVHPLQHALKDLERAYRNFFAKRANFPRFKKKGMIDSFRYPDSKQFKIDAGNSRVFLPKLGWLRYRNSRDILGTPKNITVSSNGGKWFVSIQTEREEAEPIHPATSSVGVDVGIARFATLSDGTVFEPINSFKKQQARLARYQRAMSRKTKFSNNWKKAKAKVTKLHQKIGNIRRDYLHKTTTTISQNHAMVCIEDLQVRNMSKSAAGSTEAPGRNVKAKSGLNKSILDQGWFEFRRQLEYKQAWRGGLVVAVNPRNTSRTCPCCAHVSAENRQTQASFTCVECGFEENADLVGAINILAAGHAVLACGGTVLSDRPAKQEPAEATTQELALV

SEQ ID NO: 51189 - protein, 373 aa, unknown
  TnpB Polypeptide
VVVRKTYKFKLYRSHRNKKLHWQINAGGLAYNHCIALHKRYYRLFHKSLNVYALQKHLTKIKAQPRFSYLREIGSQALQDIASRIDKGYKLFFRNLKHKVRTAPPKFRKVKKAKSFTLKQAGWKLDEDTHTIIIGKQRYRYHKSRNIEGKVKTVTIKRDSLNDIYVFFSCECEQNEVIPRLGKSIGFDFGFHNKMLVAPSEKDDIDMPMFLRKNMKAVRTANHCLSRKQSDSSNYRRAKRQLAQLHKKARNQREAYHWELAYELCGKYATICLETLNLKFMQIGHGKKAGDYGYGKFLQILEYVALRCGTTIVKIDKWFPSSQLCSDCGFQNKAVKDISVREWECPNCHEHHDRDRNAAKNILREGLKNLAIA

SEQ ID NO: 51190 - protein, 372 aa, unknown
  TnpB Polypeptide
MRKTFLYRARIGRQTKAACEQWLGLCCYLYNIALEQRIYAYHQQKKSISIYEQMRQLLELKQEAHEFKTVGSQVLQNVLERLDKAYKAFFRRIREKDGRAGFPRFRGKDSYNSFTLKQAGWQLEGRYLYIKNVGRFKLFLSRPIEGEIKTITISRTPSGKWLVAFSCDEVPEKPLLPTGREIGIDVGCESFLTDSNGDKIENPHFFKQTEDLLATRQQRLSRKVRGSNRREKARALVARAHEKVSNQRRDFHFKVAYNLVKNNDVICIEKMSAFKSTRGLNRSMRDVAWFGFFNKLRFKATEAGREVVEVPARNTSCTCSRCGHIVEAMLLEQREFFCPECRFLLDRDHNAALNILRVGQTLQCSELRISRL

SEQ ID NO: 51191 - protein, 395 aa, unknown
  TnpB Polypeptide
MIVSYKYRAYPDATTEERLNTALDTCRWLYNKLLEECTTARENGFTPTMQGMQARIVTLKEENPFLKGVYSKVLQMVNYTLWSNIRALSQTKKNGRKIGKLRFKSASRYRTLNYNQSGFKIDCEHSTITFSKIGTVPFFMHRPYEGTVKGVLITRSGDTWYVIIQAEREASEPKKEGRSVGIDVGLTSFAVDSDGTAIENPRFFEQSKEKIKKLQRSLSRKKRFSKNWMKVKAKLEKVYDHITNQKRDFLHKLSRRYVDNYATICVEDLNIKYLKEKGKSRGLRRSIHDASWGRFYSYLAYKAESAGTNFIQVDPRDTTQMCSNCGSIVKKTLSVRVHECPYCGFVADRDYNAAVNIHRVGMEQPFEPVEPGPLHHISVVQVLSMKQEAPPFRAG

SEQ ID NO: 51192 - protein, 390 aa, unknown
  TnpB Polypeptide
VLRTFRYRLWTSVSQERELSIALETHRRLYNAALDGKKLCWEIGGVGWSYCEQAAWFTVQRRAHSFYSRLNVSSAQQTLRNLDKAFKAFFARVNRGEAPGYPRFKSADRFNSFRFDVAGHGGGCKIVNGKLRLQHIGAVRVRWHRDMPADAKVKTATIVRENGKWFVCFCVELPKPAPYCGVGSVGVDVGLKAFVTTSDGDQLGGSRTLESRLKELKRRQRALSRCQRGSSTRQTVKKRVTTLHAKVRNSRRDMHHKVASTLVNRYAAIAVESLNVKGLIRNHRLARRISDAGWSQFLGILSDKAEWAGGQVIGVDPRGTSQECSQCGTVVPKSLSVRVHRCGCGLVLDRDVNAARNILARGLVRAVPAGDNVGHKLKRPLRSRRVYATE

SEQ ID NO: 51193 - protein, 387 aa, unknown
  TnpB Polypeptide
MRKLLKSFKTEINPTEEQKIKIRKTMGTCRYIYNFYLTHNKELYDNGKKFMSGKSFSVWLNNEYLPNHPEYSWVKEVSSKSVKHSIECGCTAFTRFFKHQSAFPNYKKKGKSDVKMYFVKNNPKDCFCERHRINIPTLSWVRIKEKGYIPTTKDGYIIKSGSVSIKADKFYVSVLVEIPDAQIANNSNEGIGIDLGLKDFAIVSNGKTYKNINKSARLKKLEKQLIREQRRLSRKYENLKKGEVTQRANIQKQKLKVQKLHHKIDNVRTDYINKTIAEIVKTKPSYITIEDLNVKGMMKNRYLSKSVASQKFYEFRAKLPSKCNENGIKLRVVARWYPSSKMCHRCGRIKRDLKLSDRIYRCECGYVEDRDFNAALNLRDAITYEVA

SEQ ID NO: 51194 - protein, 260 aa, Okeania sp.
IKLGNVSAKSRHERLIPDKKGRHGGRPRFKKSGKLRSFCFSRVNHPKAAIKFDGKQIIISRFGAIPVIVHRPIPDGFAIKTATITKKTDGYYVSFSLEDKSVPSLIYTDNIKTYVAIDVGLKEFLTTNTGETVSVPKFYRKSQSNLARKQKKVSRKEIGSNNWRAAQNRIARLHQHIARQREDFHYKTAHKLVKEYDMIAVENLNIRGLAKNTKLSKSIYDVGWGNFIEKLNAVAVKRGVHISRGEWPFAPTPSQYITKL

SEQ ID NO: 51195 - protein, 372 aa, Lachnospiraceae sp.
MANKAYKFRIYPDNGQKVLFARTFGCVRLVYNHWLDRKIKQYEDDKTTVTYTSCAKELAEMKKTEEYLFLQEVDSISLQQSLRHLDTAFQNFFKQPKTGFPRFKSKKHTKNSYSTVCINGNIAIFDGYLKLPKIGQVKLKQHRKIPDHYTLKSVTVSQTPSGKYYASVLFEYENQVQETMPQSFLGLDFSMHELYKDSNGNGPAYPGCYRQAEKKLKCEQRRMSLMQKGSKNREKQRVKVARLHEKVANQRRDFLHKQSRQIANAYDCVCIEDLDMKAMSQALQFGKSVSDNGWGMFVTFLKYKLEEQGKKLVKVDKFFASSQTCSVCGCVNKKTKNLSIREWNCPGCGTHHDRDVNAAINIRNEGMRIVFV

SEQ ID NO: 51196 - protein, 350 aa, Bacillus sp.
MTMLLSQKYEIFPTKEQKEMLERWLQYCRQTYNSALLDKQRKYKENKQLYTRSDMQKQQTIDKKKYPFLKEVPSQPLQEVFLRLKKAYDGFLSRDANYPKLKKYKDYNSLTFPQFGFKPNGKHRLAMSFVENGTLYNKQLGEIEIHLHRPIEGTIKQLILKRQAKRWYAIFSAERQVVSPSIDRENAVGIDMGLHAYAVLSNETIFENLRFLLQKEKQLKKAQRNLSKKKKSSANYRKQVERIRNMVRNRNVSKSISDAGWGIFCKMLMYKCEKFGGLLVKVDPAYTSQDCSSCGNRVKKSLSIRTHICTKCGTVLDRDHNASLNILQKGLEQLLARTTETVGKGCVQTV

SEQ ID NO: 51197 - protein, 1107 aa, Streptomyces sp.
VCPTVWATSGEERGRTRCRRGHRPGGGDDRVSGAEPAGSGKKKRRGFEARPGFHVVGHRLALDPNASALQALASHCGAARVAYNWAVRHVLASWSQRAAEETYGVLEAERVPWRSWSLPSLRKAFNEAKHTDPFLREWWAQNSKEAYNTGLANAAAAFDNYARSRRGERKGTRVGRPRFKSKRKARPACKFTTGTIRLDDRRHIVLPRLGPIRLHEDVQPLVDAIAEGGTRILSVTVRFERGRWFAVLQTEERHTIAPATRPGTAVGIDLGVKTLLVMADSAGEVREVANPKHYDQALTQLRKASRTVSRRRGPDRRTGQAPSRRWEKANAVRNRVHHRVANLRENHLHQATARIPAEYGTVVVEDLNVKGMVCNRRLSRGISDAAFGELRRQLTYKTQRHGGRLIVADRWMPSSKTCSRCGVVKAKLPLGVRVFECDACGLVLDRDANAGHNLAALAAANGKTGTGVAGDPGPTLVVVPKPRGAKQKTRTARTRKGTGTRAAGATPGGEVSCHPGGPRGVAYGRGRDQLRSGARDFTCGAKGRDAGGRAAGGLGRRTARPLRAGQGQHAQGLPGPLVLHARRGLPLQLPDPDPDRRLPHALLRAERLRGRLPRPVRTAQRHPHDPRLRVHPPHQLRGARRTPGPADPPLGGDRLPRRDARAHDARLLHRRVPQAPRGQLALRLDPADARPDHRPDRLLAPRRPALRHRRPLRPGRDPVGPDRGDVPLLLPLRRRVPGPRHHSALLPDPRPPAAGHHAGPGGSPSDPGLLPQAHAVPGARTRPEVRRRDAVHAGVHGQGGRVLLPRLRGAVADGGDRDRQPRLGLRPLPAGPGDDRCTARLVPRLLRGAHPGDAGMGDQRLGPHPPTGCVHPLLPLPADHDRHRRLPVHRGVDHRGQTGTPHPGPAAQRPHPHRARCRLADALRSAPGRRWQRPVGHPLPPLHQRHHLVRTGLLLRRPGPRLRRHAPDLHGPAATGPRQGAARKGVRDHPDASARRVRRGARTAHTGAAVHAHPARAAPAVRGGTARGRQRRRPPGRPRPQAARPARPRHVRARHPDPEADAGGVPGAHRRRAPPLSTSARHSAGVPHAVRRARALASHRDRSYSAV

SEQ ID NO: 51198 - protein, 220 aa, Nostoc sp.
MLAFLWLRCTATYFTFYLVELLIEKQENNVNSIVGVDLGVKNLATLSTGEIIEGAKSYKKYGSKLSRLQWLNRNKIINSNNWIKAQLKIAKLHLKIANIRKDTLHKLTTLLAKNHSKVVIEDLNVSGMLANRKLAQAISDMGFYEFRRQLTYKCELYSSELVVVDRWYPSSKTCSNCGTKKEHLTLSDRVFKCEKCGFECDRDLNAAINLSTIDLSKVAH

SEQ ID NO: 51199 - protein, 340 aa, unknown
  TnpB Polypeptide
MNSQVNQNAIKKTVKSWKSYFQLRKDYVIHPEKYKARPRIPGYIKQPAMTAAYTNQTAKFIRKDGRAYLRLVNHKPPVLIGKEPLYADMTYVKTEVKPQYGGYSILLTFKEDIILPEVPKFPKRILGIDIGVDNFCAVANNFGDTPFLIKGGAVKSMNQNFNKERARLLSEVTKGSDSTHSVKKTKQLHTLSRRRETRLRDFFYKTAWYLVRYAKRQQVEVIVAGHNEDQKQNICIGRQNNQNFVSIPFCRFLDILRYTAAKAGIPVVLREESYTSKASLLDLDAIPAYKKGDTINHTFRGRGCAEDCIKQTADFSSMQISMEQGTSCVKNIHMLMMDRT

SEQ ID NO: 51200 - protein, 314 aa, Microbispora sp.
MRTAYKVRIYPTPEQAAVLNRTFGCVRLVWNIVLAWRQARYHAEGATTSYARTDRYLTELKRDGGHGFLYEVSSVPLQQALRHQHTAFANFFAGRARSPRYKSRHGRQSATYTRSAFRWRDGRLWLAKMNDPIAFAWFWPEVDPATINPTTVTVSRDSDGRWYASLAVETATGPEPVPATGGQVGIDLGVTHFAVLSTGDKISNPRHLERKARNLARYQRRMARKQRGSSWYPSSKTCSACGHLLAALSLSTRHWTCPGCGTRHDRDVNAAKNILAAGRAVSACGADVSPQGPSLRRSAVKQETKPVRDGLPRP

SEQ ID NO: 51201 - protein, 178 aa, Eubacterium sp.
MPRLWTRANGINDDIAVKTARFIIEVAVLYNADVIVFEHLDLKGRKRGSKKQRLHLWKARRVQSIVTDQANRLGMRVSHVNAWNTSRLAFDGSGRVLRGRQSEKTGGSYSVCEFQNGKVYNCDLNATYNIGARYFIRTLLKSLPATERLAVEAKVPSCAKRSTCTLSTLVSLYAVLAA

SEQ ID NO: 51202 - protein, 310 aa, Eubacterium sp.
MYERTDIYTARIKVYIRNTWDWIDIKLRKSDVDYIQRHCSHRKECAPTLQKRGKEWFLDFPFEEQVTLNNTPSKEQVIAAVDLGINSAATVSVMRADGTVLGRHFCRFPREKDSLTHAVNRIKKAQQHGARKMPRLWARANGINDEIAVKTARFIIEVAVLYNADVIVFEHLDLKGRKRGSKKQRLHLWKARRVQSIVTDQAHRLGMRVSHVNAWNTSRLAFDGSGRVLRGRQSEKTGGSYSVCEFQNGKVYNCDLNATYNIGARYFIRTLLKSLPATERLAVEAKVPSCAKRSTCTLSTLTSLYAVLAA

SEQ ID NO: 51203 - protein, 491 aa, Eubacterium sp.
MARTRTDSFILELKLKTSPEDAAYLAKCFFAGHGIYNILVRHCRRRIASLRQDQAYRELLAEYRTLKDENERKAVSEQLKAIVASYGLTEYSLHSFVKVQQKKHKKYINSLVAQKIASSVWKGVEKVLYGNGKLLHFRKYTEFVSLEGKNNSTGLIFQDGILKVNGRPVYVSRHKRDGSTSRWYEDEALKHRVKYCRLVRKPVGSSWHYYVQLVLEGTAPVKHSLGSGRAGLDIGTSTAAMATRQECILTVLGESVEDIEKEQRRLLRKMDRSRRAMNPWNYNPDGTVRKGRKKWINSAHYRRMRMEYASLRRKRAAALKQWQEAMANRIVSQCDTLYVEKMNFKALQRRAKPSSVKENGKHTRRKRFGKSLQTRAPAQFCRTLKRKLEALGGQYLEVDTRAFRASQYDHVTDTYTKKKLSRRHNIIDGRWVQRDLYSAFLLSNSAEDLAHADRDRCNETFNLFLKNHDACVAKIRNTKTKIPRSFGFQAA

SEQ ID NO: 51204 - protein, 441 aa, Eubacterium sp.
MKLISTYSVKLKEYRHIFKDTIRVYRAAVDFFLMVCDQEWEKVSDISTSKFQMTFIEQLTHKTAKNPATKYDFDAVFYKFPSYLRRAAIYETLGKYFSYRSNLANWERDPQGRKPSFPKAGYVYPCLYRDGMYERTDIYTARIKVYIRNTWDWIDIKLRKSDVDYIQRHCSHRKECAPTLQKRGKEWFLDFPFEEQVTLNNTPSKEQVIAAVDLGINSAATVSVMRADGTVLGRHFCRLPREKDSLAHAVNRVKKAQQHGARKMPRLWARANGINDDIAVKTARFIIEVAVLYNADVIVFEHLDLKGRKRGSKKQRLHLWKARRVQSIVTDQAHRLGMRVSHVNAWNTSRLAFDGSGRVLRGRQSEKTGGSYSVCEFQNGKVYNCDLNATYNIGARYFIRTLLKSLPATERLAVEAKVPSCAKRSTCTLSTLTSLYAVLAA

SEQ ID NO: 51205 - protein, 418 aa, Eubacterium sp.
MRKAKEMPYHRGLVVKLYPSDRQKHIIALNDGAKRAVYNFLVATNNELYQLRKVRTFCEPVADRIAYLNSVIKSMSAIQNALPFLYSEDIDAFSVANAVQGYHAAWKNLRDRHTGVPSFKKKSYEQSYKTNGRYDKKATSMNESNLRFLDKNHVQLPKLGRIRFSGSPKDVERVLAHTSQTRISSVKVSRDAVGEYWASFSLASEFPFYDELPGTGAMEGIDLNLLHLVDDSDGGHVENPRFYRRSEKRLAKEQRKLSRMREHAKKDNGKLSHSKNYQEQRKKVAYVHRRVSRQRMDHLHRISKREVENQDFLAAEDLRVRNLKRNHSLAKSISDAGWRTLLSMLSYKADLYGKTFVLVQPRNTSQTCSSCGYVLRGDEKLSLSDREWVCPSCGSRHDRDHNAAKNILARGLKQAGYA

SEQ ID NO: 51206 - protein, 416 aa, unknown
  TnpB Polypeptide
MFGMRETRRPDATLESRPAFWTGLDETTESTLAHSIALSPTRSQDRLLWEHVGYARFAANSAIADFREELDAGEWRNDRALRPRWNARKAELAPWAAHLSQNAAKNAIRNVGKAISGWGDHRRALREGRPARYVGFPCWRKRGVHDSYQADNGRGTVRVCGRSVRLPRTGWVKMREELRFAGEVTTVVVSNDGIRWYASIGVDTKTTPPPKRTGESVGIDLGVSTLATLSDGTTIENPKVLTLAIASLRRVDKAIARSRNTHGRNRQSNRREKLHRRRRRLHARVRHLRQDFQHKATTAIAKRYARIGIETLNISGMIGNRRLSRAIADAGMSSFVSMLRYKSELYGAETVRIDRWYASSRVCSGCGNRKAGLALSMREYRCHVCGLVMDRDENAANHACRRDRAIIGRFARAGKR

SEQ ID NO: 51207 - protein, 261 aa, Streptomyces sp.
VPSSVTVIRDAAGRYFASFVVETDPDTDLARMPGADGLPSVGIDLGLTHFAVLSDGTKIDSPRFLRRAEKKLKKAQRELSRKQKRSKNREKARLKVARAHAQVADARREFHHQLSTQLIRENQAVAVEDLAVKALARTRLGKSVHDAGWAQFLAMLEYKARRYARVFVKVGRFEPTSQVCSVCGVKDGPKPLHVRTWTCTQCGTVHDRDHNAAKNVKQAAGLAVTACRAQVRPELVPAQREEAGSHGIHTGVRAAQRHRTR

SEQ ID NO: 51208 - protein, 409 aa, unknown
  TnpB Polypeptide
MKIRKAFKFRLCPTQEETILLKQHGGNTRFLYNLLLERHNQYYKQTGKCWSKKAMIISLPKIKKQYDFLQTSFSQSLQQVAGHLDIAFERFFKGISKFPQEKTKHYLNDSFTCPQKWRISEKYVFIPKIGEVKWIKHRNIEGKPKSITISQDGEHWYCSVLCEVEIEDKPIKTDNIIGLDLGLHDFVVLSDGTKVSNPKHLKKKEKQLRRAQRKLSRRKLGSKNRTKQRAKVCTIHRKVRNTRKDFLHQLSSKLIKAYDGFALENLNIKGMLKNRHLSKAISDVGWGEFVRQLEYKSLWHSKAFVKVDMFFPSSKRCSECGNINQALTLSNREWICINCGIIHDRDINASKNTEQEGRIILNNEILNTVGHTEIYACGENSSGLKKYSSETIFSEARTNSFKTTSVCSS

SEQ ID NO: 51209 - protein, 460 aa, Mycobacterium sp.
MPRFEIPDGWCVQASRFTLDPTAEQAHALARHFGARRKAYNWTVAALKADIEAWHATGDATAKPSLRVLRKRWNTVKDTVCVNAHSGEVWWPECSKEAYADGIAGAVEAYWNWQTSRAGTRAGKRIGFPRFKRKGRDADRVCFTTGAMRVEPDRRHLTLPVIGCVRTHENTRRIERLISKGRARVLAISVRRNGTRFDASVRVLVQRPVQPGVARPDSRVGVDVGVRRLATVASTDGTVVERVDNPRPLHAALTQLRHVSRARSRCRKGSRRHRERTTELSRLHRRVNDVRSHHLHVLTTRLAKTHGCIVVEGLDAAGMLQQKGLPGARARRRGLSDAALGTLRRHLSYKTRWYGSQLIVADRWFPSTKTCHVCRHVQNIGWAEHWQCDACSAPTHHRDDNAAINLARYEEPVSVVGPVGAAVKRGADRKTGPRPAGGNEARKGTGHPAGEQPRDGMRVT

SEQ ID NO: 51210 - protein, 375 aa, Moraxella sp.
MLKAYKYRIYPNRGQALLIEKHFGCSRFVFNWALALQQRYHAIFGKSLSRTKIQSQLVKKKKTGKFAWLNEVNSQSLLNALLNVHTAFTNFFKGRSRFPRFKSKKIPQRSYQCPQHCTVNFEQGIINLPKLKGIKTVFSRKFIGNIKTVTITKTATGKYYASILVENNEVVPTPTTIVPNLTVGIDLGITHLLNLSDGRKFDNPKHLAKASQRLVAQQKIFARKQKHSKNNQKQKLAVACIYEKVRNQRLDLHHKITHTLICENQATSYALEDLGVKNMVKNRKLAKAIHDVGLGQFVTLLTYKANWYGKNILKVNRFFASSKICSHCHHKLDSLPLSVRHWTCPSCQTHHDRDTNAASNIRKQALADALGLATV

SEQ ID NO: 51211 - protein, 417 aa, Methanomicrobia sp.
MFKTQKNRIRCDKKTYKILRILTRLSKNLYNFTLYTVKQYYFDNGRYLPYEEAYHLVKHNENYKLLSSQVAQQTMKVVDRNMRSFFHVLNERKKGNYNRPAHPPKYLPKDGCFVCIFQKDMFKVNGDRIRLSLGRNFAKEFGVRYLEFKLPPTVVGIKEVRILPRCKGLWFEIEYVYEVEPEKVDLDYSDYLAIDLGLDNFATCISTSGTPFIIEGRGLKSFNRWWNKEKAKLQSVYDKQWIKMGKKMAWLLRKRKNVINNFMNQTVNYIVKYCLVNRIGNIVIGELKEIKHNMNMGKINNQNFQYIPYGLFKQKLKAKCEYYGIKYIEVDEAYSSQTCSVCGDVNRNNRKHRGLYVCKKCGNVMNADVNGALNILKKVAPKSVRIGGSGGVNPPVRIRVVDFHHQTPHEAPSVRAG

SEQ ID NO: 51212 - protein, 383 aa, Erysipelotrichaceae sp.
MPLRRTKHSSADRERIAYKFRIGTLSSEQETYFAKTFGCVRWLYNRMLSDKIHAWEYWHEDLKLTPAWYKKISCCLWLNEVDSLALANVQLNLNQAFQNFYNKKSRYPRFKKKSAHNDSYTTNNASIHMDHGKMYLLLPKMEKEVPVINHRPIKDGGQLKSATISREPDGAYYVSLLYEYKKVPVMHQIDPGNAVGLDMSMHGLYVDSEGNEVDIGSPYRKAEDCLVREQRKLSHMQKNSHNYGKQKQKIAKLYAKTKHQRNDALHQISRKLVNQYDIIGIEALNMKGMAQSLNFGKSVSDKGWGMFTAMLAYKAEKEGKRVIKVDHFFPSSQTCSHCGTVSPITKDLSVREWTCPVCGHHHNRDVNAAVNIKNEAVRIYCTC

SEQ ID NO: 51213 - protein, 383 aa, Bacillus sp.
MLVNKAYKFRIYPTKKQEILIAKTIGCSRFVFNRFLAQWNDTYKETGKGLTYNSCSAELTQLKKEVIWLKEVDSIALQSSLKNLADSFARFFKKQNQAPRFKSKKNNIQSYITKETNKNIAIIDNKVKLPKLGLVRFAKSREVEGRILNATVRRNPSGKYFVSILAEVEVYPLEKTNTSVGVDLGLKNFAILSTGEVFGNPKWFRTLERKLADAQRVLSRRQQAALKRKCKLDEAKNYQKQKKKVARIHEKIANVRTDYLQKISTYIIKNHDVVGLEDLQVSNMQKNHKLAKAISEVSWSQFRTMLEYKAKWYDKQIIVVSKTFASSQLCSCCGYQNKDVKNLNLREWDCPSCGTHHDRDRNAGQNLKNEAMRILTVGTTGIA

SEQ ID NO: 51214 - protein, 476 aa, unknown
  TnpB Polypeptide
VKTIVYKINVSDNDKEIITSLQNDYSISFRKMYNNIELMKDNNFINSLKIKSKKQIEYLQKEVEAFYKRNEANKNKIISNINKLESKDKLYLKDFKQLQYLKKSFNKKIVFGNKVELIKLSKSIGDKNKWKESRLLPLVFYGETARNGNRFFNLKTLRDGNILFKLEGSDIRIPILFNNKKHKDDLNKLQILLLNKTIPITIKLTSNTISFTYDESILYNTKLDIKSFYKEIKHIKDKTIRKDLIANKHKEHEETLKLGKLDRYLGIDLNPDGIGYSITNKKNNIISKGYLDISKIYDANKRKYETSILIKELFKLIKHYKCSYIVTEELNLNNSDLGNKVSNRKVNNLWNRTLIKELINRRCNETGTILIEVNPVYTSFIGNIVYREYDPVAASLEICRRGIYKYSKGGFYPEIDITNFINDERYDKIKECLTWKDMYSLFITSKWSYRRKLIDFSFIGYHLGNEKSMCKHILFK

SEQ ID NO: 51215 - protein, 267 aa, Exiguobacterium sp.
VSIFGNKLKLPKLKWVRFAHSKQITGRILNATIRRNASCKYFVSLLVEQKIHELPKTGSSVGVDVGLKKFAILSDGTVYQNDRYFRSLEKKLAREQRKLSRRQRIALNKKVKLSEARNYQKQKQRVARIHEKIANKRTDFLHKVSTEIVKNHDIIGIETLQVKNMQKNRKWSKAISDVSWSEFFRMLEYKADWYGKTVVKVGKTFASSQLCSSCGHQHKDVKHLSLREWICPSCGIHHDRDVNAGLNLKQEAERILASSTVGTTGLA

SEQ ID NO: 51216 - protein, 405 aa, Cupriavidus sp.
MQRLQAFKYELMPTGEQQRDMRRFAGSCRFVYNKALALQKTRYEHSEKKLGYGGLCKALTEWRNGAETPWLSDAPVHPLQQTLKDLERAYGNVFAKRAAFPRFKKKGQRDSFRYPDPKQIKLDQGNSRIFLPKLGYIRYRNSRDVLGTVRNATVSQLGGKWFVSIQTEREVARPVPDATSAVGIDMGITRFATFSDGTFLAPLNSFKKHEVRLRRYQRAMSRKTKFSSNWKKAKARIQRIHTRIGNARRDYLHKATTTISQNHAMVCIEDLQVRNMSGSAAGSTEAPGKSVRAKSGLNKAILDQGWFEFRCQLDYKLGWNGGWLIAVPPQNTSRTCPCCGYVSAQSRKTQAKFACVACGFAENADVVGAINVLARGHRVAACGEPVQSGRSKKQEPPEAAAQFIA

SEQ ID NO: 51217 - protein, 573 aa, Bacillus sp.
VGMKTYFSKRIYKHTLPESTVASLGRTLRVFNQAKHYSFSTMMKEERSKQTRPGEDSLHVYVKKKFSLNDYYANSAVQEAGALIKSQKELTTLYLQNKQAQIIAVQKRMKTIKTKITSLRKLKASFVKGTPQIPGNLRIIKKYNHFFAVHYKKETKIYYHVYHFEHSYVEVELNHLTSRLGRLQGKLNRLTQQVHQLQQNIRSIVFGSKKLYKSQFTQEQYKNNHAAWKQAWVQSRYSKMVVSGRKDAKYGNFVFTYEPTNHLLSFQTPFGDVVAFEQVVFPYGQKQVNHAIETQISCSNKKKYGQPIGWGIEDHGEYYLVKCMIPVEPPTVTNYSKADGVIGIDCNVDHFAVSNISNTGRLLHSFVQKFDMAGKTSTQVTKIIEAEAVAIVDYAVQHKKPLVVEKLNTTTSKVSNPYGNRKANRQMSLFAYRKMLHAIKVRAEKCGVLVYEVNPAYTSQIGKLKYMKRLGISVHQAASYVIGRRAMGFKEKLPPVLHSLVPEKKQGLHHWVQWNAVKRPLRDYPSYWFGHVALSELVRLHLLGELSNHRTLLQVREATANLSNSGNRNPSPR

SEQ ID NO: 51218 - protein, 387 aa, Escherichia sp.
VKRLQAFKFQLRPGGQQEREMRRFAGACRFVFNRALARQNENHEAGNKYIPYGKMASWLVEWKNATETQWLKDSPSQPLQQSLKDLERAYKNFFRKRAAFPRFKKRGQNDAFRYPQGVKLDQENSRIFLPKLGWMRYRNSRQVTGVVKNVTVSQSCGKWYISIQTESEVSTPAHPSASMVGLDAGVAKLATLSDGTVFEPVNSLQKNQKTLARLQRQLSRKVKFSNNWQKQKRKIQRLHSRIANIRRDYLHKVTTTVSKNHAMIVIEDLKVSNMSKSAAGTVSQPGRNVRAKSGLNRPILDQGWYEMRRQLEYKQLWSGGQVLAVPPAYTSQRCACCGHTAKENRLSQSKFRCQVCGYTANADVNGARNILAAGHAVLACGGCQQTG

SEQ ID NO: 51219 - protein, 498 aa, unknown
  TnpB Polypeptide
MSNDNARFVVSIKIKPELYQIDMLEKDYFKCNRLYNNATRYVLKQVKQIKRTRKYQDIVKLLKKDINKDFKKSLYQEIKNLMIEYKITKSDLEKHMKVGNKKAFYKSIKAQVFQTLAKELYKSVESSLFKGTEIKYRKFGTTDSLSSKSSNCTIIFNKENHNFKYNGKTFKLKPIREKDYYLQEALENEVAICKIVRKPIKNKYQYYLQITLKGIPHKKVFKGKGVVGIDQGTSTIALYKNDLIDFVELTPNIRKYNKEIVKIQRRMENKKRLNNLDCYNENGTFKKGSKITRSKGYQKELFKLKDAYRRKTVYVRELHNKLAKFIIFNCDTIVKETLNYKALQKRVKAKAVKQDKKTTIINKKGEVKNIYKYKRKKRFGKSLNNHSPGYLNAQILKRAMECGVNVVAVDMLEYRASQYNHLTGEYVKSELNERCKLIGKDKVQRDLYSAFLLYNYKDEKTIDRNKCFKEFDNFLKQQNELIKEIKDTTKNFGLVNFI

SEQ ID NO: 51220 - protein, 197 aa, unknown
  TnpB Polypeptide
VKSFNQWHNKEVARLKTDKPQGFWSRKLEQITEKRNRRMRDAIHKAARKVIDFCLHHSIGKIIFGWHKEQKQECNSGKVNNQNFVSIPTGRLKERIAELCRHYGIEFIEVEEAYSSQASFLDGDELPNYGEKPDGWRPSGKRVKRGLYETAKGWLVNADANAAANLLKKVSRTLGLCLGGLSRGALTTPLRVHLWTA

SEQ ID NO: 51221 - protein, 210 aa, unknown
  TnpB Polypeptide
MEYGCQQVLIKDKGLIPILEYLCQQSNKVYNCALYYARQVYFKTKRLASYGELCAEMVRTKNKHFIAMYASSAQQTCQSVAEALSGFKAKLKLFWQAEMSSRPNLPRYRKKGMFSVAYPKKWLKFQEGRVRVPLGNQVKAWFGLDSFWIQFPTNLEWKDIKELRILPRHGVFYLEWVYTKPAQPQPLDPKKVLAIDHGVNIVVSQENATL

SEQ ID NO: 51222 - protein, 391 aa, Actinomadura sp.
MVVQVKLLPTPDQAAALTETLHACNVVADWVSQVAFDRRVFSRAGLQKLLYLEVKARGLSAQPALHVIRKTADAYTTRRAQITSGLLGKPGSARRAKAEGKPITFRPDAAHPFDDRCLSWQTDVLTVSIWTTRGRIKNLRFTGEPSQLKTLAEHRKGESDLVYRTGKWFLVATCEIPEPPLNTRPRDWIGVDRGIVNLATTSDGVNHQGRSLQHYRRRMARVRAKLQVTGTKSAKRKLKRRARREQRHTAHVNHKIAKTVVADAQRTGRGIALEDLQGIRDRVWLKRHQRATLSSWSFHQLGEFIAYKARRAGVPVLEVDAAYTSQICPRCRHVCRKNRPTREEFRCVLCGLAGPADHIAAVNVRARARTVWAFVNTPHAAMSPSPGLRQS

SEQ ID NO: 51223 - protein, 450 aa, unknown
  TnpB Polypeptide
MSQKVRIDGVKHTGASVFLGVDHCDNPYWTRNPERVMEWLCDGWRTRFNQRREQRPRNVPVKDEAGGIVDWVKEPLGGPDVAELLPDKEARLRCPWMAGIPAPILSSTDRIENTEWSAGLKRKKTVGGRVPGFKSRHRGLGFVCWRNASKTGNAIFRKTGRKSGVVVITGMNPMGWVKPGEKLHWRIVIHVRVSQPIRPYTSVHVDWTHRSLVFVNMPLPLPRTGNDIIGLDRGCVHTLASSDGTFEDMPKPSKTELKRLKHLQRRMARQDRVNEARGGRTTKFASKRRQRTLTEFNTLQGRIIRRRNDWIEKTTTRLAQENILVALEDLDVQAMTKRPKPRPDPDNPGRYLHNGAKAKAGLDRSILSNNWSRLMKRLKDKMDANGGNLVIVPAAYTSQTCHKCGHVAKKNRESQAVFHCVECGHKANADVNAAMNILSRALAKTGGDTA

SEQ ID NO: 51224 - protein, 503 aa, unknown
  TnpB Polypeptide
MPSEEELMKLNNLSRIFPSMVRFAYNRLLEGCREYEVVERLYELFMPNARWCQWAIKEAKALMEAQKLLLSLYIEDLKWRIERAEKRLGKTRNPLKKSGIIRKIERLKKRLNELREYSENKTMPKVVFGGRRTLKKLSKGRKVIKEEWLARRRWGFLSIGQKNQGGNANTRIVKCRDEYFLEIRNTVFNDFCVALFIPEELRHYVEEVLERRLAYTIRVKRTLYNGYQVFITFELEEEKVCWNGLKVAGFDVNPLGIAVTIVSRDGNLIASKWFLYSDLVFARGEKRDWLIGNLVKKAFKWIRGHGVNAIAVEDLRIKHNPDFPNWVNRLIANFVRKKLDQTIKARALKEKLLVVEIQPAYTSKVAELKYAKMFSRFNAHQLAAFVIARRALGYGERLKEPIKIKHRLPNRKKTCDIKVLYVWPSIYGHSSQRLMGAGSSDGRIELALKACESYDWQVSPRSRTTSDSSNEEVRYTGGCLGDELRARGHRGSPPLSDSLTSIA

SEQ ID NO: 51225 - protein, 421 aa, Acaryochloris sp.
MLSMTWKFKLEPTDAQVLEIEHTLSVCRKVWNYALRERKDWLNSRKSPINACSIVQEYILSPDEPFPGYHVQAQGLTVAKEFNPELKTVNAQVLQQVLRNLDRAFEEMKSKKRGFPRFKNQARSRSFVFPQMLKNCISKEGIKLPQLGLVKVRWSREIPALFQVKQARIVRKASGYFVMLSLQAEVDIPAAMPSGHPIGIDVGLEYFLSTSEGEQVKRPHFFNEQHRKLTLLQRRLKKKQKGSANRQKLNRKIARQHQRIGDTRKDWHFKLAHHLCDGAGMIFVEDLDFRIMAKGMLGKHTLDAGLGQFTNQILPWVCFKHDVFYGKVDAYGTSQECPDCGARVQKDLSVRISRCLKCGATKPRDIAAAQVICARGQRVIENACGADVTGIGVTQSSWQAVKQEIFGVTQRISKHTVRLVG

SEQ ID NO: 51226 - protein, 311 aa, unknown
  TnpB Polypeptide
LFPCSKPCATWRKRFSTSSRDGPSTLRSRRSVIGSLLPNTSNAFKWDGTQLTLAKMMKPLDIRWSRPLPDGARPNSITVTKDGADRYFVSILVEEDIKQLEPGKQSVGADLGLKAFVILSTGETVGNPKFFHKDEKKLAKAQRRHAKKKKGSKNRAKACKKVASIHARIADRRRDFLHQLSTRLIRENQTICVESLQVKNMVKNHSLAKAISDVGWSEFVSLLSYKAAWYGRNLVKIDKWYPSSKRCYDCGHLLDSLDLDVRVWTYPECGVVHDRDLNAARNIHAVGLTVFEACGEAVRPGRALSRSGKLR

SEQ ID NO: 51227 - protein, 269 aa, unknown
  TnpB Polypeptide
MSVFLARTQTMAPKSRRWLRCPLPMMQLMTEVRLSFCLTSKLTLLQSLRRRSPLRWMAEAKYFVALCCTDVEIAPLPSTGAVIGLDMGLKSFTVTSDGLEYPNQKFLTKSLRKLARLQRQLSRKSKGSKRREKARVKVARLQEHISNQRQDTLHKLSTQLVRDYDLIAIEDLAPKNMVKNHSLARSISDASWGEFRRQLEYKAAWYGKQMVTIDRFFPSSQLCSVCGAQWPGTKDLSVREWVCPSCGAVHDRDTNAAKNILNEGLRLLA

SEQ ID NO: 51228 - protein, 376 aa, unknown
  TnpB Polypeptide
MRKMFQYRIYPTKKQETKLNKTLEECRWLYNHLLEKRKTAYEQDGKGLSCFQQQATYTILKQERPSLNTVHSQVLQNVAVRIDLAFKAFFRRCKVGENPGYPRLRGKDRYDSFTFPQFGFKFDEQGKLYCSGIGHIKIILHRPVKCKIKTLTVQRSSTGKWYASFSCEVEPERLPERPEQVGMDVGLKTFATLSGGEEIANPRFFRKEEQALAKVQRKHSKLAKGTPERRKHRKVVARVHERIGFRRDNFTHQYSRQIVNSYGVICIEDLHVNRMVHNHCLAKSISDASWSTFFAQLVCKAEEAGRAFVKVNPAYTPQDCSRCHHRQKMPLSERIYHCPCCLLSIDRDLNAALNIRAVGLHSLGLSLEAPCLETGE

SEQ ID NO: 51229 - protein, 492 aa, Acaryochloridaceae sp.
MNVIRFTVELNQLASPLLASGFKDFTQPTQHVLIDDFFAILCHKHQMNIKVINVSKSSFKSHSTKWYNSSMLLTYQYKLNPTDEQSTQMEDWGELLRCHWNYSLGQRLDALNRSRAQIDRCSIVCEPIGEIPERVDYYTQAAGLRQTKALFPEYKDIYTDCQQQNLMRLDKAWKRWLVPDKNGKRGGRPKFKKRGDICSFTFPRVNSPKAGAHLTGNVLRLSKIGEIEVILHRPIPDGFALKQATILKKADGWYVSLCLEDGTVPESMPIDDVKSVVGIDVGLAKFLVTSAGDAVEIPQFYRKSQVRLARQQRKLSRMQKGSHNYQKQASKVARLHLHVHRQRKEFHYQVAHWLCSVYDLIGFENLNIKGLARTRLAKSILDAAWGSFLNILQAVAVKRGKWALEGNARGTSIECSGCGQRVEKTLKDRVHRCSSCGLAIDRDWNSGINILNRVQRTLGLAFSGCGGLEVTLPVKQQFSVVRLEATATLLVS

SEQ ID NO: 51230 - protein, 489 aa, unknown
  TnpB Polypeptide
MSGGGNLRGVPARDSDPLQAFRKEIEKRKKSCKRTVKLRLFPNRYEEETLFDIGLACARLWNELNYEKRNAFFNGELSPGKRDEINKKYYHRYKEVLGVNAGQVVNKNDEAWNAFFELLDLRKQRRLPPHIKKLSPPGYWKDRETGEKKIHILIRNDRYHVEPISKNEGYIVLEDFDLRIRYAGRIRWEGKQGRLEIIYVNGRWFALVPIEVGVDPPKSNLKGYVKPIYDDDEGKKKKQRITNLKSIGQRDPIGDKEAFIDMGLNNLFAAVISDGSALLVKGGSIKSEYYWWKREIAVYQSIRDVLRRLGISTWIYYHEKYLDAMYKRDERLRHLHITAIRFLADDLYRRGVRKLYIGYPIMLSQNNGNEYNTNIWWYRMIVLWIVDIFMEYGIDVEIVPEDYTSRECSICGIRHKNGRIYRGLYICSKTGKKINSDINAALNIARRLGYRVRVSRKIESYHVTHNGVKPINPHQRANTRDPSNRNPAH

SEQ ID NO: 51231 - protein, 372 aa, unknown
  TnpB Polypeptide
MKLTVQIQLLPDDFQKTLLLDTMSAFNAAASKAAEIGFGAGRFSRVTLHHLCYFKLRAQFGLSAQMAVRAIAKAAECFVRDKSYNPKFRSHGAMTLDDRLFAFKGIDRVSILTLQGRQRIPIIMGEYQRGRLNRLKGQADLVYRDGKFFLLCTADLPEDAPIKPKKFLGVDLGIVNIAATSDGETFTNDQIENVRGRYAKRRRLLAMKTALRFKRRTRKNARRAIKQTRGRESRFRRDMNHCISKRLVAKAKGTGRGIALEDLRGIRDRARFRRCQRARMSSWSFAQLRQFIEYKGKLVGIPVVAVDARNTSRSCSRCGHVSKSNRKSQAVFRCRACGFTAQADIQAAVNIAARAVVNRPIVTQRHSDLRVA

SEQ ID NO: 51232 - protein, 382 aa, unknown
  TnpB Polypeptide
MKLLRSWEYRLYPSKIQEKELNKYLVECKNVWNSLLEYVKERYKKTGRAPIRQELYSKTKGTLLFSQTAQNVADRLYKSIRGMQSRKKAGLKAGFPRFKPIERIKSFTYPQFGFTLNNKLQLSGISSINIRKHREIEGKIKTLTIKKYSSEKWFAIFTSETEKTLEKREEKPLVGIDLGIEHFAYLSDGNVVKNPSHLKKAEHKLKCANRLLSKKKKGSKNRFKAKHCLAISYEKLVNKRKDFLHKASRMLADSYSLVAMENLETGKMSRSFLAKSILDCGWAEFARMLAYKAEEAGCKVVLVNTAGTTRECSQCGSVKKKTLAERWHSCACGASMHRDLNAAINILRRATAGTAECQACEEEASMLSIKSASILNEAGSPA

SEQ ID NO: 51233 - protein, 421 aa, unknown
  TnpB Polypeptide
MHIATKIKINVTPDQEHVLWQLSNNCRLIYNFALSERKQVYQDNLQKEKDERTFIGYVEQANQLPDLKKRFPRYKTVYSKVLQTTLKSLDNDYRSFFALRKNGYEDAKPPGFKSRRNFCTMTYNQSGFKIYGNKIKFSQYYDKSVLLEFELPLGFTFVNVKQVVIFYDDVKNNFYIAIIHKIQPSREYSDNDFYQAFDLGITKHAAVNSGGKFIEFYNERPDKYWKKPIAELQSRRDHCKKFSRKWFMLNRVKRRCEKKRSNQMKDFQHKLSNKIVNNTKANTIIVGDLNVKQMAQSKNANRGINASTQNTGYLSRFIGFLTYKAVLAGKIVIKIDERYTSKMCCCCGELHNMPLSNRVMTCDCGNIIDRDCNSAINIMVRFLSQNAMWIGYQQFVDNLRKTGVYLQDTLHSQEAPCVSGV

SEQ ID NO: 51234 - protein, 387 aa, unknown
  TnpB Polypeptide
  misc_feature (385)..(385): Xaa can be any naturally occurring amino acid
VKTIPLKLYNYGEELHALVQGYTSGMNYVSTVVYENGKPMGANNIQNKVYQDVRTLGLLSQMTCNICRQVAGTYKTLKEQIKTGQAEWQKIQYRPTNVTFSYRRDFTVTKEWVSITTLDGRKKYPFHMYSSAEQYFDGSWEFAASKLVKRKDGYYFHLSVSKTISDPPELVKTSTFMGVDVGMNWLAVTHTTDNKCKFFCGGEAKNLKNIYSSMRTRLQAKGTLSAKRMLRHLSGKERRLMATMNHTVSKQIIQFALDNKVNCIGLEDLTGIRTNTIHTTQKKNRYQKSSWSYHELQFMITYKAEAAGIRVEYIDPQYTSQTCPRCYHISKSNRNGLSFTCKCCGYKLHSDLIGAKNIELRTRDYRYILESQGCEANHPDECPEXGS

SEQ ID NO: 51235 - protein, 419 aa, Cyanobacteria sp.
MLTLTHRYRIYPDFTQEQILIEWMEICRGAYNYALREIKDWCDSRKCPIDRCSLEKEYIISPELKFPGEIQQLNNLPKAKKEFPKLNEVPSQVLQQAIKQLHRGWQYFQQKGFGFPRLKKYGRFKSLLFPQFRENPVTNLHIKLPKIGAIPINLHRPIPTGFAVKQVRISRGADKWYASISLQCDVNVPNPTPYGYPIGVDVGLEKFLTTSEGILVKPPKFFKQLQSKLKLLQRRLKRKQRRSKNYEKQRLKVARIHHQIDNTRKDFHYKQAHTLCDAGDMIFMEDLDYRTSAKGMFGKQMLDAAFCQFRTIVKHVCWKRGKFFEVVDARGTSQECPECGGEVKKNLSVRVHNCPHCGYTTHRDVAAAQNIRNRGIKLIGTVGQTGRETACAVELPGTDESQSRQVAKSRQRVTRKPKK

SEQ ID NO: 51236 - protein, 377 aa, Escherichia sp.
MLRTACIRLDVKAEQSKQLSVLREVYADACNRLVSVVCEHRIWNRVGLHNMVYRDLREHTPLGSQMCCNVIFSVCKAYKSQKERGHIHKAKAVPTIRFNGTSVHFDKKTYSLRDNSLSLYTLNGRIRVPMIIGEHQQRMLSSGHPKEAELVFRKGLWFFNLVVEIIDTTMVVSEKTMGVDMGENNLAAHSLGKLFGGEQLRDERDRHLALRRRLQSNGSQSAKQKLRQVSGKEMRRVKQTNHETSKVIVAAAAEAGIGTIILEDLTHIRDRIKAGKRVRSRLRRWAWRQLQTFIEYKARAVGIMVKYVNPAYSSQSCSCCGCLGKRHKHRFECPHCGFRAHSDLNASRNLAWIGETAVLPRASVNTPDVGSPSLAPQ

SEQ ID NO: 51237 - protein, 316 aa, Microcystis sp.
LKKSGGKLNRDTKRITFTDGKNIGELKLIGSRDLFYFQEWQIQRVRIVKRADGYYCQLMLKLDIRDITPPLEPTKQCVGLDMGLKYLYADSNGNTIEPPKYYRKAEKRLNKLNRRKSKKFKRGQKQSNNYKKARQKYAKGHLKVSRQREEFAKKLALRLIQSNDLIAQVDLKVKNLVQNQKLAKSINDAGWSQLRKWIEYFGIKYGRLTIAVNPAYTSQECFNCGRLIQKSLSVRTHVCLCGYVEDRDKMAALNILKKATIGHIGSWHLDLRSVSLVEPNAWGDLSSILVGSNTDRVSLAELLPRQLKLMNQESLA

SEQ ID NO: 51238 - protein, 369 aa, Clostridioides sp.
VEKAYKFRMYPNKKQQELINKTFGCCRFVYNKYLAKRIEVYKNDKETFTYKQCSSDLTNLKKELKWLKEPDKFSLQNALKDLDNAYKKFFKEKSGFPKFKSKKINRFSYKTNFTNGNIMYFSQHIKLPKLGMVKIRDKQVPQGRILNATISKEPSGRYYVSLCCTDVDIEAFENTNNQIGLDLGIKEFCISSCGDFIENPKYLKKSLNKLAKLQRELSRKTIGSLNRNKARLKVAGLQEHIANQRNDFLQKLSTKLIKENDIICIEDLQVKNMIKNHKLSRLISDVSWSEFIRQLEYKANWYGRQIVKVGKFFASSQICNKCGYKNEEVKDLNIREWICPSCNETHDRDINASINILKEGLRLITIQNK

SEQ ID NO: 51239 - protein, 402 aa, Escherichia sp.
VKRLQAFKFQLRPGGQQEREMRRFAGACRFVFNRALALQNENHEAGNKYIPYGKMASWLVEWKNATETQWLKDSPSQPLQQSLKDLERAYKNFFQKRAAFPRFKKREQNDAFRYPRGVKLDQENSRIFLPKLGWMRYRNSRQVTGVVKNVTVCQSCGKWYISIQTESEVSTPVHPSASMVGLDAGVAKLATLSDGTVFEPVNSFQKNQKKLARLQRQLSRKVKFSNNWQKQKRKIQRLHSCIANIRRDYLHKVTTTVSKNHAMIVIEDLKVSNMSKSAAGTVSQPGRNVRAKSGLNRSILDQGWYEMCRQLEYKQLWSGGQVLAVPPAYTSQRCACCGHTAKENRLSQSQFRCQVCGYTANADVNGARNILAAGHAVLACGEMVQSGRSLKQEPTEMIQATA

SEQ ID NO: 51240 - protein, 370 aa, Nitrospirae sp.
MRKTFLYKAKINKATEANCIQWLELCRILYNMALSIRVFAYKQFRKTISVYEQYGQLPELKAEHPEFKAVGSQVLQEVLERLDKAYKSFFQRVKSSKGKAGFPRFKGFGRYDSFTLKQAGWKLNGRNLHIRNVGRFKLYLSRPIEGKIKTITVRRKSAGWFVAFSCDNVPVKQFPETSKEIGIDVGIESFLVDSKGHAVENPKYYRHGQKILRRRSRSLARKKKGSNRRHKARILVAKAHEKVANQRKDFLHKVANLYIGLYAVICVEDLKIRNMIRNRHLSKSISDSAWGMFFDMLVAKAVEAGRQVIKVDPKGTSQLCSNCGEKVPKSLSVRIHKCPHCSLVLDRDENAAINILKGGQPFRASTYTIR

SEQ ID NO: 51241 - protein, 413 aa, unknown
  TnpB Polypeptide
MVRVRQFRYALVLTRRQERVTHRLVDAQCELYNAALQERRDTYRLALARGRRPPRVNYAQQCRELTQILAERPELAVFGTTVSRGTLRRVDRAFAAFYRRLAAGRTPGFPRYRSARRFDSVSYEDRSGWKLDPATGALHLLGVGQVRLRLHRPIPDGARMRACVVRRDRVVRRAGHPTRARWTATIAVELPDATPLPATGRRCGVDVGVRVVAAVVDDHGRGTLVANPRPLAAATARLEAAQRRLARAQPGSHRRERARVAVAASHAKVARTRAWHTHQLSHDLVRDYDLIAIEDLRVATMTRSAAGTVERPGVHVAAKAGLNRAILDAGWAQLRRHLSYKAADAGRELVAVTPPRTSQTCHHCGHTDPANRRGVVFDCTACGHHADADLNAAANILQRAESARQPPAAQSHL

SEQ ID NO: 51242 - protein, 433 aa, Tolypothrix sp.
MPYPSGTLRERVRHFGGTETDTAKWRTMYRAIKLRIYPTDEQESYLAQCFGNTRWLWNYMLNATTTAYKETRIGLSKVAMDKLLPGLKKEFEWLGLAYSQVLQRVTFNLSSAFVNFFEGRTKYPNFKSKHGKQSIQYPQNVKLMPQDSVIKFPGNLGMVKAVFHKELPNAKFTTVTISKNADGRYYASILFNQDDIPVVAINEAIGVDLGLKNFVTTSDGSKYDLPKKRLAKLEKNRKRKQKQLSRKKDKTSKKRQKAKRLVAKVSSKIARVREDFLHKLSRKIAYENQVICVEDLAVKNMVKNPNLAKAISDQGWGMFLTMLKYKSEKFGHKYQEINRFFPSSQLCSETLLPIPMLQNGYDSLKVRFVDCPHCQKQHDRDINAAVNIRNEGLRLLVLGTSTSAQGGDVRPKTSGRKKSTKSEAVPNDLGSLH

SEQ ID NO: 51243 - protein, 430 aa, unknown
  TnpB Polypeptide
MFFKSITYRIYPTKSQEQMFNQFCGNNRFVWNHFLMRNIKHHFVSGKFIFGYDMCKELTKLKEEYEWLKLSPAQSLQQQCLNLDKAIKNCYKSEFGFPKFKKKGKSKESFKIVQRFWFSKSRKSIRIPKIGFIRIKPKININLKDIKNVTIKKINNHWYLSICHQFNIFRTPMTGKRVGLDLGTVRLATLSNGKVIDKFEDKELVKKFKSTQRKLERRTRRNRKYRMKKIQSISRAKTKQSLSRLNKKLRDKRKDYLDKVSKKLVKRYDVICIEDLKISNMTRQVRENEDGSPRKSVSAKSGLNREILNQSWGQLINMLDYKSKWFNKSMIKVDPHHTSQRCSECGFTHKRNRRSQSEFKCLKCGYELNADHNAAKNIKRLGIRQWKKGSVELKRFGRNHVEDSQSLMKLESSILDGRCLRSNSKETSWS

SEQ ID NO: 51244 - protein, 210 aa, unknown
  TnpB Polypeptide
LQHFQTGAFSITQNRLSVHLKESGCYRASRKRFFSKNWLKTKTCEATRTLKGFQARLFKLGALIAGEYDVLVLEDLNVQGLIQKSETKKRRRLRLYDSSFSELRAVLEWEFRKREKLVFPVPAYNTSRECFLCGEINKGLTLEDRVFHCPHCGFALDRDLNACLVLLKRAGWEPPSVPAELRPLPPLPSLGLVRRQGVAMIQEAPPFRRG

SEQ ID NO: 51245 - protein, 418 aa, unknown
  TnpB Polypeptide
MLLSKKTSIKVSREYANLIGHMCYAASKLWNVCNYERQHYKETGIEQYPDWYYQKKAHKEDLWYKQLPSQTAQEVCRLLDKAWKSFYALKRSGGIETPRPPRFKQESIPITYMQMGIVHERDTDRVRLSLPKALKKYMEETYQIHENFLYLENKIFRGMDQIKQLRIYPPEKGNCKIIVVYEVPDQEELPQNGHELSIDLGLHNLMTCYDSENGKTFILGRKYLALERYFHKEIARVQAQWYGQQSGKGVKHPVTSKHIRKLYKRKHDSVTDYLHKVTRYLAEYCREQGITCVVAGDIRNIRREKDLGHRTNQKFHSLPYNRIYIMLEYKLKRYGIRFIKQEESYTSQCSPLSPEVGKRYAEPSKRKERGLYRDGNRTYNADAVGAYNILRKYHSVSGVKRELSVTGLKTPEIIKVAV

SEQ ID NO: 51246 - protein, 454 aa, Nostoc sp.
VFKTIPIRAKFSNEELAFWLNQCEHANSLINCALYEVKKAHYSMLQEHENAFTTYWRGDDLRSGWKTYRCGSSYAELDKLLKLNSHYKSMAAQSAQQTLKSVGESITAYNELVKLYYKGEVDKPSLPKYRKKGGLAAVTFPRQALTFVDGYFKPSISKESKPELLTEIKLDLPDFIDSDWVREVTVRPNLGQLWIDWVIEDGKEPIDHNPNLDYTQAWSFDHGGGNWLTGVSTRGKSLIIDGRKLRSMNQGYSRLVAKYKQGKSDFYWDSNLDRVQRKRNNQMRDAINKAARFIINQCLNDRVGNLVIGWNVGQKQNSNMGKRNNQNFVVIPTSRLIDRLKQLCPEYGITLTITEEAYTSKASFLDCDSLPKYGEKPEGWKASGTRTNRGQYKSKDGSIINADCNGSANILRKVATQLGLNLAEVGRASLTVPQRIDLFKRLNKSYRKRCYGSL

SEQ ID NO: 51247 - protein, 406 aa, unknown
  TnpB Polypeptide
MKKILRSYKFRLYPTKVQITLLNKHFGSCRFIYNYFLNLRKEEYLLNKKTLNFFQCSYKLTELKKQEEFKWLKEPNAQSLQWALKHLDTAFNSFFQKKSKFPKFKKKLNRQSYSVPQAFKIKGNKLLIPKFREGVTLNISQKIIGKIIQCTISMTPTGKYFASLTCEQEYTQYEPTGSSVGIDVGIKNLAILSNGKKYKNVRSLKLRLKKLKFKQRQVSKKVKGSSSRKKTIRQLSLVHEKIANVRKDHLHKVTTDIIKNHDVICVETLAVINMLKNHKLAQALSDAAIGEFFSMLEYKAEWNDKTLIKIDRWFPSSKMCSKCTWINQNLTLKDRTWTCRECGTTHDRDVNAANNILTQGMKIKSGLGAKSDSKQKPVEPPKKYLLRGSKDPSGTGAEKLDISIKK

SEQ ID NO: 51248 - protein, 422 aa, unknown
  TnpB Polypeptide
  misc_feature (361)..(361): Xaa can be any naturally occurring amino acid
MKKILRSYKFRLYPTKVQSVLLNKHFGSCRFIYNYFLNLRKEEYLLNKKTLNFFQCSYKLTELKKQEELKWLNDVYAQSLQWALKHLDVAFNRFFHKTSKFPTFKKKSSKQSYSVPQGFVVKNDKLFIGKFREGIKLNISKKIIGQIIQCTVSKTPTGKYFASLTCEQEYAQYEPTGSSVGVDVGIKDLAILSNGKKYKNVRSLKLRLKKLKFKQRQVSKKVKGSSSRKKAIKQLALVHEKIVNVRKDHLHKVTTDIIKNHDVICVETLAVINMMKNHKLAQALSDCAIGEFFSMLEYKANWNDKTIIKIDRWFPSSKMCSKCTWLNQNLTLKDRSWTCRECGTTHDRDVNAACNILTQGXTCYVGRKANMAKKRLRNWIFLQRNSPIRKFSRYFFCRLFFSDFLLFFKLYVENRLCCCFAL

SEQ ID NO: 51249 - protein, 392 aa, Ruminococcus sp.
MLTTKKVRLKLTPEQEIQFRKSCGVARWAYNYLLSEKQRVYDEYISNGKTGKKTISEGEVRKYINNVLKPTTHQWLKEVGSNVMKQAVKDADNAYKNFFNGLSKRPKFKSKKSSKQSFYVNYESLTRINGGFKGEKLGFVKTSEPLPKLADGEKYANPRITFDGKYWYLSVVYNIEPKSVQLTNESLGIDLGVKNLAICSNGVTYKNINKSKRVKALKRTLKREQRKLSRKIECNIIGYANNRKPIFRTPLQGCKNIQKQIHYIKLINRKINSIRNNHLHQATAEIVKTKPFQIVMETLNITGMMKNKHLAKAIAEEKLFEFKRQIKYKAEMYGIKVVEVPTFYPSSKTCSVCGCINTNLKLSDRVYHCDSCGITLDRDLNAAINLANYKVI

SEQ ID NO: 51250 - protein, 508 aa, Richelia sp.
MALSTTPSFITELPILVDSKLEKQLSARFQAGRQLYNACLNEALVRMELVRNSEPYKQAKKLNREKNKKQRKELFKAAREQARFSDYELQSFANLTAKSSKWIAAKVDSNTQQKLASRAFKAVERILFGTAKQVRFKVTSRFKSVEGKSNKQGLRWVKDSVIWCGLNIKPIIDWNNPVLVYGLNSPVKYCRILWRNLNGKKRWFIQLINEGLPYQKPQNYVKQGIVGLDVNISNVAFVADNKAGLLPFAEKVPTFEREIKALQRKMQRSQRMHNPDNFEPEFDKKVGNKIVRKKGKVKKGKKQWIKTRNYRRIAAKKAELERRKSSYAKSRNLKTVNEILRYGNQIKTERVSIKCWQKLYGKAISAKSPGYFQSELKRKAENAGGYFLAFSTQTTALSQTHLDGTRIKKSLSQRIHKDVTGFVMHRDLFSAFLSRCVYNDKLSLWDAQCEYPGTEPFLMDAWKQYQQTANRVAERESKNGYSSSEQLSVEVLTSNQIVTKDDKLEGNA

SEQ ID NO: 51251 - protein, 388 aa, unknown
  TnpB Polypeptide
LATGDEGFLTLSIGVRVSPEPVVIELLQRYKNALNYAINKIIDNNLRTLKQVHNFLYRDLVERFNLPSRIAVDCYRDALTNVKSWRNNPKRGRRPVVKKLSMLLHPELSYRIKDDYVEIIGGIRLRIIGWDRRYDDYKNREARLVYKRDKMILWISKRIPKPNKYVPIDVIGVDINEKKIVYGDEIINIEKDTAIDKAYKYIRLAEDLQRKYSSSKYLAWRRRRGILNRIRSYHEKAKNILNDWTRKISLEIIRLAKELRYAVSREDLTNLIRSLRELPKDHKTKLIIMGYSRIEKWIDWQAEKNGVPYVKVDPNGTSSECPKCDYKGLEEVGYRRLRCPQCGFEADRDVIGKLNVRKRGLRKLGIYPRGGALTPLTAPQMTDVNPNR

SEQ ID NO: 51252 - protein, 237 aa, unknown
  TnpB Polypeptide
LTPAGRWFVSILVDDYTIKPLPKIEKSIGLDVGITSLIATSDGDKMANPKHFKKLRKKLKRKQKALARKQKGSNNRQKARVQVAKIHAQITDARQDFLHKLTTQLTRENQTIVVEDLAIKNMVKNHKLALAISDASWGELIRQLAYKCEWYGRELIKIDRWFPSSKRCGNCGYIVDKLPLNIREWECPKCGTNHDRDINAAKNILAAGLAVSVCGATVRPQESKSRKAGAMKQKPNQ

SEQ ID NO: 51253 - protein, 202 aa, Lachnospiraceae sp.
MAGIDLNLLALVNDSDGGVVVNPRFRASVEDKIRRAQRRVSRRAERAKAEGRRLGRSRNYQKARKKLAYLHRRIARQRDDYLNRVSLGLVENQDLVAAEDLKVRNMLKNHCLAKAISDAGWRILLTQLQQKAGMYGRTVILVPPQNTTQTFSACGHVMRGDDRLTLADREWTCPACGTHHDRDTNAGRNILAKGLRILNGTS

SEQ ID NO: 51254 - protein, 364 aa, Saccharothrix sp.
VRGGRKLLNTRHHLDEAGLSEAEWRARWESARWFLSADGESGKRWGNETIRVSPDGEVSIRLPAPLAHLANARHGRYVLASRVRFRHRGGEWADRVAGDRAVAYRIHYDVARGRWYLDASWTRPAVRTMPWEAVRAAGVVGVDFNADHLACYRLDTHGNPVGDPHRFWFDLSGTADHRDAQIRHALTRLLHWATRTGVKAIAVEDLDFTAEKTREKHGRRKRFRRLVSGMPTGRLKARLVSMAAETDLAIVAVAPAYTSRWGSGPWRKPLTSGKRTMTRHDAAAVAIGRRALGHPIRRRTAPPRDDRSDRRGHRTAQAASGARRRDGNRPPATDHAHRSVPPNGTRTREPSASTTVRDARSTGT

SEQ ID NO: 51255 - protein, 472 aa, Acidobacteria sp.
MYVVALAVQLYQLGLEVGADLGEDRSECFDSMAIKDAVAAFGDKDQMNVHCRSAMPAVSKVLDFVHGPDNNENMERRQAFRFQLMPNGEQQRQMRCFAGCARYVYNKALALKKERYEKKEQLTRFQLDKLLVQWKQETPWLREAPAHALQQAILDLDRAYTNFFERRAKFPKFHKKGVRDSFRESDQKCIKLEQGNNRIQLPKIGWVRYRNSREVLGEIRSVTVSQSAGQWYVSVNTFEQVEPPRHASTAVVGIDWGVAQFITPSEGQPVDRLSPLKNFLPKLKTLQRRLARKQKFSNNWKKAKAKVTQLYQRIANTRKHFLHKVSSDISKNHAVVIVEDLQVKNMSASAAGTREQPGRNVKAKSGLNRSILDASPFELRRQLEYKTRWRGGMLVAVPPHNTSRQCPGCGHTSGDNRKRQAQFTCLECGFSANADWVAAMNIKEAGLALLACGDTSPEVRASAQEPTEGLHA

SEQ ID NO: 51256 - protein, 372 aa, Pseudomonas sp.
MQKPSGLELLSKPNHIQRMEMKATKTLKLRVKDKHARLLSEWAKSVNFTWNYINELSERSIREKGAFLSAYDIQKYTDGAGSLLGLHSHTIQQVGAEYVARRKQFKKRQLKWRKTSGANRNLGWVPFKTGSVKWKDGVVTLNKQAFKLWDSYGLANYSLRSGSFNEDSRGRWYFNVVVEVDRKLSPGSSTIGIDLGLKTTATCSDGDKLSSGRFYRDLERPLGIAQRAGRKARARAIHAKIANRRKDALHKFSSALVARCGFIVVGDVSSMKLAKTNMAKSVLDAGWGQLKTMLEYKCDHAGILFKVVSEKNTTQTCSSCKQLPDSRPRGIAGLGIREWICSGCGVTHDRDVNAARNILALGHERPVVEISL

SEQ ID NO: 51257 - protein, 453 aa, Brasilonema sp.
MSKTKKSMGVQQVLLRLSDETRSILEYLSQQSGKLYNNGVYFARQTFFKTGKLLTGKFDLAFEASVSKTLIAQSLPSTPMQQTLMSVTEAFKSFKELRELYFKGQLHFKPKPPDYLKGSKLFKVAYPNSGGQKPTLIDGRLRFSLGLTVKRWFGTSEFFLPMPSNIDYSPVKEFTILPNNGAFYLEISYEVEKQKHKLDINQALSIDLGTADNLAACVDTLGNSLLIDARAMKAMNQLWNKKVSTRKEGKAEAYWDNWLDCVTRKHNHQMRDAINKAAKLIINHCLKHGIGTLVIGWNEGFKTNANMGRLNNQKFVQMPLGKLKDRLKQLCDLHCIRFQETQESYTSKASYLDGDSLPKYGEKPEGWKASGKRVERGLYRSAKGFIVNADLNGAANILKKVGSNLSIDLGLLGRRCLTTVVRVRLWALPETTLCAETSVASALRVSIPNSRRV

SEQ ID NO: 51258 - protein, 531 aa, unknown
  TnpB Polypeptide
LRLTPADEAVVWAVGVHLGRLAGADLIERCRLDHARRPGDDQRADRKRALTAEASSRWAGAITRTSNNQWDRAYKNLLEVRTGLRRATNRIRVRLDVPVGQARGRGRGRVQGYQTQIERFRKQGRLQHLQASLAEVEERIAQGRVSVCRGGRRLAKLRHALSDGEAAPALTESEWRVRWQAARLFLHADGEAGKPWGNETIRAHPDQQWLEIRLPTPLAHLSNTGGRTPTYRLSCPVVFHHRSEEWAAQAATGAVRYDIVLDPAKARWYVDASWRLPSRPVPALEELRKQRGLGLDLNAQHIACWVLDCCGNPIGAPSTISLALDGLPASTRDGRLRAAVAEVIRLAKAHDCKSITVENLDFVDARQIGRETLGRSRRGKRFRRIVSGMPTRQFRDVLVGMTANADLWVIAVDPGWTSKWGQRYWQEPLNRSTKKTITVTGHHAAAVVIGRRGLGLGARRRPGVTQLHQRMGTGELPARPGDRALGLEGPGPPGGQRATARPHKTRQAERIDNRDQVAQDRPVPPVSALKH

SEQ ID NO: 51259 - protein, 392 aa, unknown
  TnpB Polypeptide
MKTLKLRIKDKHDKVLIQLASEANFVWNYCNDLSYKHLQRTGKFFSAFDIAAYTKGASKSGLNLHSQTIQAITEELVIRRKQFKKAKLNWRVSNPKSPKKSLGWIPFKASGIQYQNGQVKYAGHFFSLWDSYGLSKHKVKTGSFVQDSRGRWYVCLVVDTLAEPAKTMSSTAAQDKTPVGIDLGLKDFATLSNGQKIEAQRTYRKYQKKLGVAQRANHKQRVKSIHAKIKNIRSDFLHKLSRQLVNDHAAIFVGNVNAKGLAKTKLAKSVLDAGWTMFRTMLKYKSQQAGVWFDEVNEAYTSQTCSCCGSRHSSPKGRAGLRIREWTCQGCGTTHDRDVNAAKNILALGHGRLAGGISVLRGSASQVGEDVNSRPLIFLKENYCDPVYRPVP

SEQ ID NO: 51260 - protein, 385 aa, unknown
  TnpB Polypeptide
LENPQILNMKQTLMVKLAPDEDQHKILLETMERFNEACNSIAETAFKNRVANKYALQKLIYRQIREKYGLSAQLTIRAISKVVEAYKRDKGVKPSFELHGAIVYDQRILSWKGLDRVSILSLRGRLIVPTTVGPYQEARLDRKVRQADLILRKGAFYLAVVVDAPEPTPYQAEDWLGIDLGVRNIAVDSDGETWTSGQLNGPRSRHNKLRARLQAKDTKPAKRLLKKRSGKEARFARNVNHVISKRLVAKAKDTLRGIALEDLKGIRQRVSVKGSRQRRVHSSWSFHQLRAFVEYKARLAGVPTVLVDPRNTSRTCPSCGHMDRANRFGELFHCQRCGYAGAADHIAAENIRRAAVNRPYVSEDFSLSHFHSPLGASPQPLGVGS

SEQ ID NO: 51261 - protein, 566 aa, unknown
  TnpB Polypeptide
MMARSKGVTISVKIPVNWDVMTERSRQRLRQTVGRDTRVIRAFLGVIEQHEKELLVGPKKSRIDDGELDRLTMTALKVRAGYSKRLSVPHDFKLRFPRISQNEMTECRQTAVALYESYLKLRAKVGRKASRPSTINSSRRIPRWAFSRRFRLIEKKTSVSRWWLDIRDSLDSVREGRTFHDRLSLPLKMSPFHLNQIRRGDVKAVQIFTDRFRKWWVTIAVRVVTDEDVHEDELPVAILGIDLGIKKAACSTLLTPEKTRETRYFIQRDKVRVIKKYDRLVADLQSEMHARKNNGLVHDGVVERLRQLRSKRENVAREYDRVLVRQLLDYISELSGKYTLYVAIGRLKNIRVRARRGNYRGRRYRAMIHSWAFARITDGLKHGLAQQGWKVVGKDARFRVVPESWTSIMCWKCGSKGRRPRQNYFHCPSCGYKINADQNGSINIAARMLTLTKSLHSVRGLGLWTRAVVRTTTNRRARLKAQGKSSKKSSQGKSLLSRRGPASGPGESAAVHHAQMGILSFSDGPVKGDDDPAVVRTVEDLAVVGCDAPTSVQEEEARSEGGIPSQ

SEQ ID NO: 51262 - protein, 446 aa, unknown
  TnpB Polypeptide
MLKKKFTVVTQLHAKNNEDIIRYFEESRNAYNKAVRETFQTAKKSKDFNKTSFNTYLQNNYGILKRTAGSIISDAVGRLNALKELKVYEQKQLQYKITSLIDDIDKLEVIKANNCTMLRANVPVNLIKHRNLRRKLVAKKAKLNRLTQRLNALTYQIDHNIYKLCFGTKKLLKSNYDAFVVQRDSQISFVGTKSEKSGNELLQLSFDTSRNQFNIQLRKDFGGFKNNTDKANKYAFGRVYFNHHLSELKAILQYKNSPLSFKIIKRNSRYYLHCTFEIQRNESDFKTRSSYGTIGLDFNKGFVTLSETNQYGHLVSTEFLPYRFKAGSHTTNDLRQLAKYVVEKAESVGKDICIEDLDFKTKKAKTQAKKNKKYNEMIHSLAYRQFTNYIEYAGHYRSVLVKRVNPAWTSWLAKQLYCPKMKLNTHIGAAFVIARRGQGYKDFVKS

SEQ ID NO: 51263 - protein, 379 aa, unknown
  TnpB Polypeptide
MIKSFKVRLYPTKEQEQLMWKHVGACRYIYNYMLEKQEELHKAGEKHLSQFDMIKLLTPLKNDGEHDWLNEISCVSLQKICGDLENAYRNFFNKRSGFPKFKSRKRSKTNFPIDPAKLWFDKSGFVHIIKLRSVKFKSDFELPIGSGCKFIGSRISNINGKWMLLFSLECEKQTFQLNNYNVGIDLGIKDSAIVAYSDKKLVFQNINKSKKIRMYEEQIRHTQRSISRKYEANKQGNKYVKTKNIEKEEEKLRKLYTRISNIRNNYIHQSTRRIISLLPKKIIMEDLNIVGMMKNKHLSKAIQDQCFSEWIRQIKYKSEWVGIEFIQVNRFFPSSKTCHSCGCINHSLKLKDRMFVCPDCGYTEDRDYNAALNLMSYED

SEQ ID NO: 51264 - protein, 248 aa, Bacillus sp.
MKLPKIGLVKFAKSRKVTGRIMSATIRRNPSGKYFISLLVKTEVKELPKTESSVGIDMGLKDFAILSNGTTYKNSKFFRTLEKKLADAQRILPRRTQGSSNWNKQHVKVARVHEHITNARKNYLDKISTEIIKNHDVIGIEDLQVKNMLKNSKLAKAISEVSWSQFRNMLEYKVKWYRKQVVVVSKTFASSQLCSSCGYQNKDVKNLNLCERNCPSCGTHHDRNIDAGLNLRNEAIRCYYSQIFYPFC

SEQ ID NO: 51265 - protein, 408 aa, Nocardia sp.
MLVRTAYKVRAYPDPGQAALLRRTFGCVRVVWNKTLAGRQRLYTLERKSTSYKETDAALSEWKRTEELAFLSEVSSVPLQQTLRHQHAAFAAFFKGLARYPRFKNRHGRQSAHFTRSAFRIKADGLWLAKTAMPLRIVWTWPDIDLASLDPTMVIVSLEPDGRWFVSFAVDRTNSPAAEPVGNAVGVDLGIKDFATLSTGDKIANPGHMTRHERGLRRHQRRLARMRKGSANRSKQRVKLARKYSRVRDARRDFLHKISTGLVQRFDIIAIEDLAPRNMVRNRSLAKSISEAGWSEFRAMLEYKAERVGRRLVVIDRWYPSSKTCSACGHLFAALSLGTRQWSCPGCGTRHDRDINAAKNILVAAGLAETVNACGGDVRPQEVSLRQSLAKQELPDVSPGNSILRVGE

SEQ ID NO: 51266 - protein, 379 aa, unknown
  TnpB Polypeptide
MRLAFKYRLYPTKAQGVFLEEQLREACDLYNCALQERIGAWKTCRKSISYYDQARQLKPMRDEELLRLANHHCAQNVLRRLDRAFKDFFHRIKRGQTPGFPRYRSSRRYDSITFPIYGNGCKLLKIDKLYVQGTGEIKIKLHRPVEGKIKTTTIKREAGRWFVCFTVERDPKPLEPNSNVAGIDVGLTAFATLSDGTEIKNPRCYRKAQAKLRRAQRRVARRKKGGHRRRKAVLLLQRAHAHVRNQRADFHHKVSRRIVNGYGTIAVEDLNVKGLAASRLAKSVNDAGWSEFLSKIAYKAEDADRCFVKVDPRGTSQVCVCGANVPKRLKDRWHHCPSCGLSLGRDHASAMVILQRAWIRLSGANVEAVSSCVTREAVA

SEQ ID NO: 51267 - protein, 276 aa, unknown
  TnpB Polypeptide
LDNGPGTFRVTGKRVHVPRFGELRLREPLRFTGKALSATISREADRWFVSIPVEIEMPEPERENQATVGVDLGITTTATLSTGEKLDGPKALKSNLRRLRRCSRAHSRKKRGSANRRKSAAKLARLHQRIGNMRRDWLHKTTTWLATVLALIGIEDLNVSGLLANPHLARPIADIGCHEFRRQLEYKSKLYGAQVVVADRWYPSSKLCSVCGYKTEDLSLSDRLWTCPKCGSIHDRDVNAARNLEHLATVSSTGSDACRELAHQGRSVKQESMSIH

SEQ ID NO: 51268 - protein, 390 aa, Paraburkholderia sp.
MLIAHRIALAPNNVQATYFARAAGTARFAYNWALAEWQRQYEAWKLDNTSPKPSQMALRRQLNALKREQFPWMLEVTKNAPQMAIIQLGAAFKNFFAGRARYPKFRRKGMHDRFTITNDQFSIDGSRIRIPGLGWVRMRESLRFPGKIMSATISRVAERWFASITVDTPDTSHLPEAENQGVGGVDLGVSALATISTGEKVVGPKAHAALLGRLRLLSRSLSRKQKGSANRLRAKAKLAKLHARIAAIRSDSLHKLTTDLTRRFHTIGVEDLNVRGMMKNRHLARSIADMSFFEFRRQLEYKADMRGGQIIAADRWFASSKTCSDCGHRLEKLPLCVREWTCTACGSIHERDLNAAVNLEQYAVSSTVSACGEEGAGLSRKTRAKPSSVK

SEQ ID NO: 51269 - protein, 379 aa, unknown
  TnpB Polypeptide
MEQMTVTAKIQISVTSEDKALLDKTMSVYSSACNYVSDYVFRTHDLKQFSLNKALYGILRKEFGLKSQMAQSVFKTVIARYRIILENQTEWIKPVFKKPQYDLVWNRDYSLTQNCFSVNTLSSRAKLPYFTKGMSKYFDHAIYQFGTAKLVNKHGKYFLYIPVTYDVEESHLSDVCNVVGVDRGINFLVATYDSKHKSNFVSGKAIKQKHAHYFKLRKELQMCQTSSARRRLKAIAQRENRWMQDINHQVSKALVETNPKHTLFVLEDLSGVRNAIERVRIKNRYISVSWSFYDLEQKLIYKAKQNQSTVIKVDPRYTSQCCPVCGHIEKSNRKKKIHLFSCKNCGYQSNDDRIGAMNLYRMGINYLSDSQVPDTVVAK

SEQ ID NO: 51270 - protein, 422 aa, unknown
  TnpB Polypeptide
LSRKLGNCAAYILRHRVFDKLPVMTRKELDTALKEQYASDYRAMPSAASAQRQGQVVAKQFKSYAKALTEYANHPEKFKGKPQLPGYKRRYRSFYVGRNGYQISNGRLTITGAQDVGFEPMPVRCCKEQVFNAKAEDAVVGDVRIVPMGNSFIFELTYTVKQEDVQKNCPLDSRHALIGDLGVNNFAAFVSTKPGVRPVLIKGGVLKSLNQSYNKQTAELRAKKQYRHIRIKGFKRYRQVQDLLHKASRMVINYCLAHDLGTLIIGVNKYWKQEVSMGCKNNQNFVMLPHAVFVGMLKYKAQQYGIEVIEREESYTSRASSLDFDTVPDYGAVSAQPVFSGKRIKRGLYEAADGRRLNADINGAINIGRKELGNEWLQKLLELDGGVVDTPVVIRYLHERQSIGSLLEVGARSYETSRVSAR

SEQ ID NO: 51271 - protein, 381 aa, unknown
  TnpB Polypeptide
LKATLRLKLNTDEATVALLQETARQSTACFNAVCRYGWEHEERNGTRLHQATYKSLRETHPELPSQLVVSARMKATEALKSVQERKKQGRSVSCPQSNLCPIRYDARSYWVRLVDGCASLATTQGRVCVTFCLCDYYTRYADWKPCSADLCFDRKSAAFFLHVVVEADAPEPNAEGVLGVDLGIVEIATDSEGNAYSGEQVKAVRRRVKRIRRLLQKRGTKSAKRHLKKIRAKQSRFVSNTNHVVSKSLVRTASHSRKALALEDLGNIRDRAATVSREMRWLLGNWAFLQLRQFVAYKAEAAGVPVVLVDPRNTSRTCSECGYCAKENRKSQSKFHCQQCGFEANADFNAAINLKVRGECSDALLFRSEAHASNQEQAPVL

SEQ ID NO: 51272 - protein, 381 aa, unknown; identical to SEQ ID NO: 51271
  TnpB Polypeptide

SEQ ID NO: 51273 - protein, 172 aa, unknown
  TnpB Polypeptide
LTLSDGTKIENPRELRKGAGRLAQAQRSGKKKLVARIQERQANRRRDRNHKISRWIVENYKTIYYSDDNFKAMAKRFGKSISESALGNLIGMMNYKGRIGGREVRAINSFRTTMTCSTCGALTGPTGLGGLAVRYWICSACGALHDRDINSAKVVFNIGLGISHEGTKRRVA

SEQ ID NO: 51274 - protein, 541 aa, unknown
  TnpB Polypeptide
LFDVLADDADRSAAARRCEVAGRLQHALPAAADQGRMVLAQTAARHALEAVHQRRDRHLGRVVHEEVHMVVLSVHLDEFGTEIGADRGEDGPGVVQHGLGEHPATVLGHEDQVDMHGENTMASTPKVVLIAHRPMLFMALMIERKAVLFRLYPTPGQAARMAQIAGACRFVYNLALEQRRDWYRPGRKFTFASQCREVTQLRAEVEWLKACPVHALQQALRDLDRAYQNWWAGRTQAPTPRRKGVNDSFRFPDPVSLVVERTGTSSGRMKLPKLGWVRLRGWKALPGAICTITVSCRAGQWFAAVQCEREAPEPALSTLPPVGIDLGVAVFAALSDGTSIAPANHGKRALRALRKAQRALARKKRGSANRRKAVRRVARIQMRVASARKDFLHKHSTIIAKNHSMVVVEALPVRNMSASAKGTVAMPGRRVRQKAGLNRAILDQGWSMFRTMLAYKLADRGGELVEVPAAFTSQTCACCGHVYAANRQSRAVFVCMRCGHRANADTNAAINILRRADGALKPVEGHRTKRPDEAGTIRRAA

SEQ ID NO: 51275 - protein, 233 aa, unknown
  TnpB Polypeptide
MDTVELRRTAVVKLDVGDDAHRLLQETIERFKQAAQMAADDGWNGTEDGYIVTSKTELHDRTYDAVREATDELNADLVCAARNRAADALDSCVEKRKDGENPSKPQFTSDSVVYNLNAITYYDDYATLATVDGRIEAEYVLPDEDVPPTTYFTDEWEKREATLHHRDGDYYLHIAVVKETDTEPEDAENGTVLGVDLNVDGHLAVTSSGAFIGNADYLNHKRREYEKRRGKMQ

SEQ ID NO: 51276 - protein, 415 aa, unknown
  TnpB Polypeptide
MRQLQAFKYVLLPNGEQQRHMRRFAGACRFVFNKALALQKTHYVTGGKFISYAAMAKNLTEWRNGTETPWLKDAPVHPLQHALKDLERAYQNFFAQRAQFPRFKRKGRRESFRYPDANQFQIDQANNRIKLPKLGWIRYRNSRDVLGTARNITISQSADKWYASIQTEREVERPVPSATRAVGIDMGIARFATLSDGSYIAPLNSFKGHEARLRRYQRLMSRKIKFSNNWRKAKRRVQKIHTRLSNARRDFLHKTTTTISQNHAMVCIEDLRVRNMAKSAKGSTEKPGKNVAAKSGLNKSILDQGWFEFRRQLEYKLHWAGGILIAVPPHNTSRACPACGHVAAENRQTQSIFECVGCGYQNNADVVGAMNVLARGHRVAACGEEGAGSGPKTRTKPASVKQEPTEATRCEIAHA

SEQ ID NO: 51277 - protein, 430 aa, unknown
  TnpB Polypeptide
VATVVTAYRFALDPSPAQERALRSHAGASRFAWNWALGRCGERYAAERKWYSGAELHKLWNTAKKADPALAWWGENSKCAYQEAFRDLDRALRDFTKSRKGQRKGRRLGFPRVKKKGRCRDSFRLTGAIGCAGSTVTLPRLGAIRTHKDTGKLAARTAAGTARILSATVSRTAQRWFVSFTVAARRDSPQVHVRPGTAIGVDLGVKTLLTGVDDAGRVTAVAGSRPLSAALRRLRRASRACSRKQPGSARRRKAAARLARLHARVADVRADALHKATSALAARYETVVVEDLNVTGMISSKKLARAVSDQGFGQARRMLAYKTQRNGGTLLVADRWFPSSKLCSACGWRKPSLTLAERTFACGQCGHTDDRDVNAARNLLHLAASGADSQNACRAAVRPGNAGQAALKQEPGTAHAGQTGTATPQGTAAA

SEQ ID NO: 51278 - protein, 405 aa, unknown
  TnpB Polypeptide
MLVRSLVFRLKDPLPNEAKFLMEDFRLAVNNTIRFGMQTGATSRNSLTKLAYKDFRKEHPNMYSQHLVSALEVAGSILKNHRRRLRKGLPSRVPFVRRLFMKAENQAYKLGRGNGILDLPIRAGLHIQLELIVSDYHRKYLDDESLSLGSLTLFSDRVIVAIRKHPPKLYAHKSVVSLDTNERSLDGVLVKEGRITAVVKAEFPEVSVIQSVHHDRRKRLQKKKSHDRRTAKRLCAREGMREHHRIDHRMHEVANAVLSFAEERKSMIVLEDLTGIKPCKNKKLNRRISMWPRRKLHQIIEYKAAWRGIPVIKVDPRYSSRKCPVCGRIQDSRKGAEFVCGCGWHADRHINASINLLQSAASEKAAGGLRFDPGAFQHDVVMVLCGPGKAVRPEPNGTNSIRAVA

SEQ ID NO: 51279 - protein, 638 aa, unknown
  TnpB Polypeptide
MGELTSTATCRASRGADPATGEVVTAAQVAARVGYAIGLAEGHAGRVLEVGYTPTNLAVLTRGVGPDGRKLPSHGYMVARRLGWAPGSPDGLYLSDRFRRCAEEAAIRKLRQAAWVDQLVVGLVATWPERPKKRTSDEWDALWTAVPDGTDKATVRNRTRQIAGHLAKHGRLPASVCDLEPDPTCGRALLLAAADRQLVRVERPSSRLVVLHVQLPTVVAPASQRDWTWHALPIDLPAPVPDDARVHTPTLRLVDGRVRADVPWTQHVADIRADGHVRAVGFDWGVNTLVTATIGDLNAAGDVVVDGKPAHFTAPGVAAKTARIRRHRERLAGRRDRIDQLLTGLDATDLRHQPLIAKRDLLQTEIDRASRRQRQLNLQVAWAAARWLVDLAVANGATVIYAEDLRTMEARGLGRRVNVRASNTVRGRVLAAVRHLASRAGITVVEVPARDTSKLCPRCHTRLTHVPSPDRMSERGHKWAICHGCGFSGDRDHAAAERIVSRGLASQEHVRKHRTTGALRATKHQDVKVRRSRRPASSRPTTSRRSGSTRPAPANGTLVLQPASGGTAPNGPATSGREVSSTTVLTPRQAHRKRVSRRACGCGFHLHVHASPTGTRPDWRAHAGHLANRRSRALRNKT

SEQ ID NO: 51280 - protein, 426 aa, Moorea sp.
VEKSWFSTNLKVAQNQSLPQIFSQSFTSSPAGSTDSENTVKKSKKIRLFLKPEQRLAVGHATRTLVRKWFGVSRYVFNKTVKILQGGEVKANWKAIKTDILNDLPEWCKEVPYQIKSIAIKDACTAVREAKKKYKKTFQINRVRFRSRKNPVQSCYIPKSAVSEAGIYHTKLGNLIYSEVLPTDICDCRLVSKNGEYYLTVPHKVAKTIAENQGRVVAIDPGVRTFLTFFSETSIGKIGNGDFSRIQRLCQHLDQLLSKISKPKGGQKRRIKKAARRMIARIQNLIDELHHKAAKFLVDHFDVILLPTFETSQMSRKKNRKIRSKTVRNLLTFSHYRFKEFLKHKANETGKVVVDVCEAYTSKTVSWTGELLNIGGSKIIKSKVDGRSMDRDINGARGIFLRSRSVAYGHALGDTPWLREQLALVS

SEQ ID NO: 51281 - protein, 424 aa, Natrialba sp.
MEYSPRFRAFPTTGQRESLDWTRDIVRQVYNHALHEFNKIPENKGTLRQRVWQVRDTLPNLKQWWTDLNKVYSTVLQKAVERIRTNINNLGKLKAKGYDVGSLNWKAPREYRSFTYRQSGFELDKKSGPRDRAILRLKKVRGETLEIPIRLHRDLPEHDAIKEVTVKKESTGAWYASFCISTDEPEKPEPEDIDSEDTVGLDLGVLNFIHDSKGRSIDRLDLSDERERLEREQRSLSRKQYESNNWQKQRRCVAEVHARMSNKKRDYKHKIAHFYATTYDAVFVENLNVKSLLESGGNARNKHEVGWSDFRQILEHHCDKHGTHYVEVPAQGTTKECAKCGCESEKPLWVREHSCPSCGFELDRDWNAALNVKSCGLSELGVVHSKATPVETATAVDTLSVSASRVVEAGSSVLKERTAQAVSE

SEQ ID NO: 51282 - protein, 419 aa, Natrialba sp.
MPGVTKTLELRLVDPNAHKQRKLCETREAYQQALQAAFDADCTTQSATNNVVVEYDLSGYAKNALKQYVPQLCGGSYDADELHDDHPVKFTNEGVQLDHKPQNALEWYVKVPHHDDYHLWIPVQANPDQRDWLEALYADDAEMGESRLFERDGTWYLHVTATRDIEEQSAASANEGTPVGVDIGEASLVTVCHRDDSGSPVRPKLWADDGKTVRQLRKTHFTAKRRLQRRGSERIAESYGDVLWDRIDHVVHRVTREVVEYAESVENPVLVLEDLTYIRENMDYGAYMNRRLHGWGFAKLHAQIRYKAAEKGIPVETVNPRNTSKECHACDKVGSRPRQATFRCSNDSCWVTEYQADVNGAINIADRYCSGESHRQSDRNPQQKASDDDSATDGASLTGPQDSHADAEPQQVTHGTNAS

SEQ ID NO: 51283 - protein, 418 aa, unknown
  TnpB Polypeptide
MLLSKKTTIHLNKTEANILGHMNYAAYKLWNVCNYERHNYKELGLAEYPDWYYQKSHHKSDVWFKALPSQTAQEVCKLLDKSWKSFYRLKKTGGIENPNPPGFRHKGMAVTYMQNGLVHEAGSDTVRLTLSRQLKEHMQSAYQVHEKYLSLKNCIFKSMARIKQIHLYPPEEDGACTVIAVYEVEDTKLLPDNGHYLSIDLGLHNLMTCYDSKGRSFILGRKYLSICRRYDKEIAHVQSQWASTQAAQGIRYPKSSKHLLKLYKRKKNSIWDYLHKLTRYLVDYCQKEGIHTVVTGDVTGIRKGKDLGNRTNQKLHGLPYAKIYTMLEYKLSLYGIRFVKQTESYTSQCSPFSKEVSKGCAVKTNRCMRGLYKDGAVIFQADAVGAYNILRKYFAVSGNKQKLSVSGLSDPKIIKVAV

SEQ ID NO: 51284 - protein, 443 aa, Halorussus sp.
VGRQSAIPAVCAGGSTVARVGPVRRPSTQVFKRPPETVTNNVADTEYCRRTAVTGLSVSPTDATRLRELVSEWKRGCQLAVNEAWGVCHTRSEVQQLAYDELREHTDLSSQHAVLATHRAAEAIKRAGESGTKPEFTSPTVAFDTRTMTVFEDRTVSLTTTDDRVRCDLDLPADGGYQSRYLDGEEWEPAKSALRYRDGEFVFHLGFRTPKPAVDPPTEGATVLGVDLGVENLAVTSTARFFPAGELSHRREEFERVRESLEATGTRSASRTLRQAGYRTDQFVTHRLHEIANGIVEEATRYDCELVAFGKLAEVHDLLPEADPFHEWLFERLLSMVEYRAAARDIAVVEVNPEYTSQRCMECGFTHPQNRDVEAGHFECLKCEASANDDYNAAKNIAFRCVRRGPLSSRGLGAAACALQSGVVTPDDGFTPYAELSDPPLSD

SEQ ID NO: 51285 - protein, 395 aa, unknown
  TnpB Polypeptide
MKHYQVRRVSLGKTDQCDELARECGRLYSQTLVSFWRTVRKQGIWLGPKHLMRWHTSPNLHAHTADACVQAFFAALKSWRERKKAGDPDAKPPHKRKRYFRIEYKASAMRHKDGVLTLSNGKGNAPLVLVWPWDTPQTVVIHWTGTQYEAIATYKQEPLYGPFPVGKVAGIDLGEIHMAVSHDGTQTSILNGRLLRSKVQYRNKLQAILNSRIDGHMKKGSKRRKRVIRSKKKQLKKIEQQIREIEHKQTTHLITTLHAAGVQTLVIGDVRDIRQGNDVGSTNNQKIHQWSHGSVRFKLTYKAERLGMEVFLQEESYTSRTCPHCQYVRSKVAGRVFRCPKCGWTYHRDGVGSINIRRKYLGQFPVVGVMAPPTGLRFRPQTRVARSQEREAAPL

SEQ ID NO: 51286 - protein, 392 aa, unknown
  TnpB Polypeptide
MSRFRLLPTSAQELVLLEHCRQARFVWNLAVEQQQLWQPGRRAPGYHEQSAQLTEVRAEYDWLRAGSQTVQQQALRDFAQAMRHFFAGTHRRPSWRKAGVHEGFRQVALKPRHIEKVNRRYGRVWVPKVGWVRFRSTRLLPAGVKSYRITRDRAGRWHVAFARIPNPIPGPADGSVVGIDRGVAVSAALSTGELLHIPGLTGGERIRLRRLQQRLARAKRGSNRRQRTRLAIAKTKAREADRRRDWVEKTTTDLSQRFDTIRVEQLNVRAMMRSARGTLDQPGVRVAQKRGLNRAISRQAWGHLVGRLNQKAAGRIEPVTAAYTSQRCSVCGHIAPENRKSQAVFACVACKAGPCNADVARNIAAGRAVTAQGDLAVRRSVNCEPQFSSPAP

SEQ ID NO: 51287 - protein, 137 aa, Richelia sp.
SSNWRKAAVKIARLHRKIANIRKDTIHKLTTLLAKNHGTIVIENLNVSGMMKNHTLAGAIADMGFYEVRRQLEYKCKLYSSKLVVVDRWFPSSKTCSNCGHQKETLSLSERVFDCEQCNIKIDRDLNAAMNLLSAVS

SEQ ID NO: 51288 - protein, 386 aa, Sideroxydans sp.
MQEGFVFDFLKFTQNERSVTIGVMSICTKTLRVRIKDKHAKVLARMAFEVNQVWNATNELTAEYAWVPIPEVGYVSLQTSEYDLQKELRPIREERKLSIGAATVQSVIAQHAKSRRQFKRSKLRWRCSGGSRRALGWVPFKTAGVKLVKGQIRFCGEFFCVWDSYGLSQYELGTGSFSEDARGRWYFNTTVKVEAKPGAGIKSVGIDLGLKTVVTGSDGIKLDRRYITDEFAQQLGIAQRANKSKRVKAIHAKIKNSRRDALHKFTTMLTQDYGAIFVGDVSSKKLVKTSMAKSVLDTGWGMLKEQLRYKAMAQSVFFDEVKERNTTQTCSSCRIIPGSSPKGRAGLRIREWTCCACGVTHDRDINAAKNILALGLERLVGGTPCL

SEQ ID NO: 51289 - protein, 557 aa, unknown
  TnpB Polypeptide
METDKGIERNTTVTRTGKEASHPSIPSSASRYPGSSRGIVSSPRFWAPAKGSAYTYKTLSCPLDNDDLLANRAAIEGLFAQYRTAITEYMRYVSLKGADRAAIGPSEHEAVRTLAPGLLARVRSAAMNRAIEMWRSREEIERKGMCVHDPGTGHGPDDRRNYMDAIRLDARIYRLEPGRPVRAGNVIVRPLWASIPTPMGRVALRLGDDGYQVPILLNIIDGRDRAAIRSAELVRKGCGPDQELSLDIRLSRPIPEEHRSIEGFVSFLAAHPSIKVIPIGVDIGIVNTAVAVAPGKGRKGVRFFKGRAERERKRRMVDLIRRLMERGTEKAERDAQATRRKEARRNTAHLHEVSRGIVELAMSVADRSKGEVPVIVLEDLRFEDVARRPARGREDRGGEEGNARGSSVPLRRDVASELRSWAYGQLRDLIAAKAAWEGIPTGLVPPRGSSMECPRCGRGDVVRRRDVHRLVCPDCGYRANDDYCAAFMLATNFMKDVALMTDPLKGTTRDTARPAEPLSCIQRYRDYHGSAAAFDRDGRGGVETPRSPQGEAGEAAP

SEQ ID NO: 51290 - protein, 392 aa, unknown
  TnpB Polypeptide
MNLVERHIIKKSDTRYKELDNICFLSKNLYNATLYAFRQHYFNTEEFLGYLSLNKEFVLSDNPDYRALPSKVSQATMKIVENNYKSFFALKKKGEKDAEIPKYLKKNGRFPVYFTYQAVSYKSRERYLKLSGTSVYIKTDRRAIQVRVIPKGDHIVVEIVYKANECKAKEDNGIYAGIDIGLNNLATIGFNNGKGLIINGRPLKSINQYYNKKKSELSSELERRNKSKNSKRLNRLTTKRNNKVKDYLHKASTMLVNQLISNNVCKVVIGKNDGWKKEINIGKRNNQNFVNIPHAVFIEMVCYKCKLNGIEVVLREESYTSKCSFIDNEPIKKHDSYAGRRVKRGLFRSENGTFINADLNGALNILRKEVGEFNYNPIEVCSSPKKLRIGLS

SEQ ID NO: 51291 - protein, 442 aa, unknown
  TnpB Polypeptide
MRTVSSYGVELRKQNIPIRQTLDIYRSAVSCLIEIYAQIWDELAVITEPKKRFNTAEHLVHTTKKNQARFDFDLRFPKMPSYLRRAAIQHALGSVSSYKTRMELWKKTDQKGGRPKLVCDNHAMPVFYRDVMYREDTEEKDGACLKLYDGHDWKWFRVSLSHTDMEYLRKNWAGKKAAAPVLEKRHRKYFLRFSYTEEVPLTKTPVKEQIICSVDLGLNTDAVCTIMRADGTVLGRKFIDFPSEKDRMYRVLGRISRFQRKHGSAQVKSRWAYAKRLNTELGRKIAGAVTGYAEENHVDVIVFEYLEIKGKISGRKKQKLHLWRKRDIQKRCEHQAHRRGMRISRICAWNTSRLAYDGSGIVVRDPGNHSLCTFQNGKRYNCDLSASYNIGARYFIRELLKPIPVTERSLLEAKVPSVKRRISCVYADLRELFLEMELLRAA

SEQ ID NO: 51292 - protein, 498 aa, unknown
  TnpB Polypeptide
VDDPLAPFGNAKTGWLPQVRRKDAQGAWNNISPPSPSVALFEILKRLQQRVRIAGNAALLSMLKESDKTEVVGANEIAKQNERYPFETIAYRTVVKAYPDATYLPVVSSGGLCAALSQKVAKEFKSWIGSRQRDRFPMLSDGWPVWTRKDSWRIVRDDGLNVAFNLDGTWWEIGLKIPRKNTKMPADPFVMRVLERLVKGEPLRRDGGAPTVSAWVPGEIGFQFKRGKWYALIQYAQPEPKPFEGQNHMVVHCGLKTFACVATLDEIRTGRIGIREDLLDLNNRKARFRAQRKDLARAQRRRGLGHGYSSMRGRNKPRLTSADLAAKRVWVDDAESRFTENVLRRLAARVARRARAAGAIVHFMALDNIRVRAQHSDLPGRVKVRVHQAPWFKFREFLGQRLAAFGAEIVPYKPYYHTQRCPGCGAISAAAPNYKRWKFACVRCGYSNDLETAAVANAFVDLGLLSVKEAAKSGEGASAGREMAELRGLDLPPPRAAQ

SEQ ID NO: 51293 - protein, 469 aa, Streptomyces sp.
VCNWRIDLIFSRERQRNSHTVIGMQLRYNYRAYPDASQRRALARAFGCARVVWNDCLRDRREAHAAGLPYVTSADLSRLRITEAKRTEERAWLADVSAVVLQQSLRDLDTAYKNFFDSCKGKRQGRKVGPPRYKSKKETRQSIRLNTNAFSLRDDRTVYVAKVGNLAVKWSRLLPAAPTSLTVTKDSCGRYFLSFVVETEPDILPQAATEAGIDLGLSAFAVLSDGTKISAPRFLRRAEKKLKRLGRELSRKVKGSKNRAKARIKVARQHARVADRRRDFHHKASTQIIRDNQAVYVEDLAVAGLGRTRLAKSVYDAGWSAFVGMLEYKAVKHGRTFAKVGRAFPSSQICSACGYGDGPKPLHVRQWTCGGCGTVHDRDLNAARNVLSEGRRIVAAGRAETPNACGAPVRRAHVPAQRGEAGSPRKCQMAQAGIPGLQAREHVNRAIGTSVTAPRTTGPAARPPRSRVR

SEQ ID NO: 51294 - protein, 408 aa, unknown
  TnpB Polypeptide
MQDLTKTIKLRLYVDDNQIQQLQEMTEQYRQACNFVSQYIFDNDFELNSNRLNKALYQEVRGTFGLKSQLAQSVFRTATACYKTVKEQLFQHPYKYKDENGKWQRINKTLEWLWKPIVFRRPQADLVRNRDYSFIDEGNTLSINTLGKRIKVSYAGEHFAEYLDGSWSLGTGKLVELNGLWYFHVPVTKAVEEFSKDNVRHVVGIDRGLRFLTVAYDEQGETTFQSGKQILRKRHKFLEVRKQLQSKGTKSAKRALKRISGRENRWMSDVNHQISKTLVEKYGAGTLFVLEDLTGVSFEERNLSSTAKQNYDKRSWAFYQLEQFLAYKAHENQSEVLKVSAQYTSQRCPKCGAIHKENRHHDIHEYICNCGYRSNDDRIGAMNIQLLGTLWVSGTDKPKFEKVLTTSE

SEQ ID NO: 51295 - protein, 391 aa, Streptomyces sp.
MPTVGVVKLVVQIKLLPSPEQAAALEATLRACNRAATYVSTIAFERGVKDRNGLQKLLYTDVKATFGLSAQPAVRVVKKVVDAYSTLAAQAKAGFLGKTTSKRYRKAMGGPVSFRPEAAQPFDDRCLSWQTDARTVSIWTVDGRMRGVRYTGAADQLKVLAEYRKGESDLVQRGGKWFLIATCEIPEPEVSEPVDWIGVDRGIVNLATTSDSTNYQGRGLARYRNWCARKRAELQKKQTRSATRRLARRTKKEQRHATHINHRISKEIVSVAQRTGRGVAVEVLDGIRERVRLRRDQRGTLSSWPFHQLGQHLAYKARQAGVAFLEVDAAYTSQRCPRCGHTEKANRPDRDHFFCRRCGLAGPADVVAGVNVRDRARSAWAFVTMPVPALA

SEQ ID NO: 51296 - protein, 364 aa, unknown
  TnpB Polypeptide
MINYTYKFRLYPNKEQKVLLSKHFGCCRFVYNYFLNQRVTAYLNDKKTLNYYDNAKELTKLKKQEDKAWLKEVNAQSLQKTLNNLDNAYGKFFAHSAKFPKFKNKMAKQSFCVPQYGKVKGNHLYIAKFREGIKIKLHRKIKGKIKHITINHNPSGQYFACVCVEREIKHLPPKTKVVGIDLGIKTLAVQSDGKIYPNIKPYCKFEKQIKKLQQWFSRTTKGSNHREKLRKRIAKLHQRIKNIRNDHLNKVSLEMVKDNGTIILEDLNVKGMIKNHCLAKSIVDVSWSELIRMIKYKAEWRGHNVVQVSRWFPSSKTCNNCDYIKKDLTLGDRKWTCSRCNAKHDRDINAAKNIKQQGIALLGK

SEQ ID NO: 51297 - protein, 370 aa, Enterococcus sp.
MRVLKAYKYRLYPTSAQEEFIKKTFSCVRLVYNLLLQDRIALYKALKENPDLTVKLPTPAQYKKEHPCLKEVDSLALANAQVYLDRAFKKFHREKGVGFPKMKQKKDSVSSYTTNNQNGTIKIIDDKWIKVPKLKTPMKVKMHRPIKGKIKSATISLTPSHKFFISILCEEEVLAVEKTHSAIGITLGTSEFAVLSNGRRIDNDKYTKEFEQRLIREERKLVRRKEIAKLKGTELSQQKNYQKQKLKVAKMREKLMNQRTDFLNKITTEIVHKYDVICIEDIHQSDVYRNSKLHRGISDVSWALFVSKLEYKASWYNKRLIKVSACDKCSEHSENKKRSKIFIEDIDKQKEVSDLETAASIHVLNKGLSY

SEQ ID NO: 51298 - protein, 361 aa, Clostridioides sp.
MYPNKKQQELINKTFGCCRFVYNKYLAKRIEVYKNDKETFTYKQCSSDLTNLKKELNWLKEPDKFSLQNALKDLDNAYKKFFKEKAGFPKFKSKKINRFSYKTNFTNGNIMYCGQYIKLPKLGMVKIRDKQVPQGRILNATISKEPSGRYYVSLCCTDVDIEAFENTNNHIGLDLGIKEFCISSCGEFIENPKYLKKSLNKLAKLQRELSRKTIGSLNRNKARLKVARLQEHIANQRNDFLQKLSTKLIKENDIICIEDLQVKNMIKNRKLSRSISDVSWSEFIRQLEYKANWHGRQIVKVGKFFASSQICNKCGYKNEEVKDLNIREWICPSCNETHDRDINASINILKEGLRLITIQNK

SEQ ID NO: 51299 - protein, 399 aa, Nonomuraea sp.
VRTAFKCRAYPTPEQVGVLNRTFGCVRVVWNRTLAWRRDRYRAERVKIGFVQANAYLTAMKATDELTWLNEVSSVPLQQAIRHQQAAFTNFFAGRARYPRYKSRAGRQSAEYTRSGFRYRDGRLFLAKMDAPLAFVWSWPGVDPASIAPTTVTVSRDPCGRWYVSFAVDAAEPDRLAPAGAVVAVDLGVTDFAVTSDGEKIPNPRHLAKRDRNLARYQRRHARKVQGSNNREKAKAKVARAHRKVRAARTDFLHKTSTRLVRDHDVIVIEDLAVTNMVRNRTLAKAISDCGWGTFRRMLEYKTARHGRQLIVVDRWLPSSKTCSACGHLLTRLSLGIRAWQCPSSGTRHDRDVNAAKNILAAGLAVSACGGDVRHSGSSRVQSPVKQEPRPVKVGLPRL

SEQ ID NO: 51300 - protein, 393 aa, Phormidesmis sp.
MKARYQCRFYPTDQQQQSLAQLFGCVRVVWNDALALSKKDKYQGYNKLSALLTQSKKTVEREWLKEVSSVPLQQSLKNLDTAYKNYFDSLKGKRKGKKLSSPKFKKRTNSQSATFVKSGFAITGESVYLAKIGYLKPIWSRKLPSDPSSVTVIKDCANRYFLSFVVDVEPVVIDAKNQSIGIDLGIKTFAVMSNGEKAFSPNYAKLDRKVRRLQKKLARQQKGSNRRHKTRLQIAKLHNQIADTRKDFLHKLSTKIVSENQAIVLEDLNGSGMVKNHKLARSISLQGWREFRTLCEAKSEKYGREFHVVNRWEPTSQICSDCGFRWGKLDLKIRTVKCLNCGTEHDRDENAAKNINQSRHRALGDSKRTLRQSKTTSVASVNDASRITAALAR

SEQ ID NO: 51301 - protein, 437 aa, unknown
  TnpB Polypeptide
LKSTSEVTRTVIVRSAPLPRRTFRALVELEGMYRNMVEQLVLYAVNNGITKFTRLKAEKYREVRSLYSQLPSHYAYTACQDAAERAHSFLRLRKMGKARKAYPEVRGVSIWLDDHLWRAEGLTSISMATHRGRVRVSVELNKHYLRYVNRGWRLASEARVKLDHKERRLVFYLTFKKEVSEYRPKGYITVDVNEDAEAVLIDGIVYLFETNLSKVTLGYYYRRKRVQERYDRVYGPGSRPARRVFRRLSNNERLLKREVRWKLATLIVREAARRQAAIVLERLGKEPASHMIERIKNPQLRHRVFQAAFKGVQRAIEEKAREYGVPVVYVDPRNTSRVCPIHGAEIVYGRNRHGVCSKGGETWHRDVVACYNLLLRALGGDGGHAPSRLRVVVAVDGGPVPLGPTAAHELTPIARGAWARWRSLGATSEHKLMRMSA

SEQ ID NO: 51302 - protein, 411 aa, Moorea sp.
MIVLEFKVKGNKTQYAAIDEAIRTGQFVRNKCIRYWMDNKGIGQKELYRHNTWLRAEYPFVKDLNSHACQASVERAYSSIARFYDKCKKKVPGKKGYPKFKKFSRSVEYKTSGWKLSSDTKSIDFLDKKGIGKLRLKGTWELWRYDQKLIKRVRLVRRADGYYVQFCIKVDEKESLEPSHTNIGLDVGLKEFYTDSKGGVEPNPRFYRKGEKRLKFYQRRVSRKKKGSSNRKKAVNKLGRTHLKISRQREEHAKRLARCVIHSNDVVAYEDLRVINLVKNHCLAKSINDAGWYQFRKWLEYFGQKFGRQTIAVNPAYTSQNCSSCCEVVKKSLSTRTHTCKCGCVLDSPKATLRERDHNAAINILKRALGTVGHTGTWIIDPNALGEDTSTSSDSGLKKQVTSLIKESPFF

SEQ ID NO: 51303 - protein, 420 aa, Desertifilum sp.
MILTYCYRIKPSKKQQAAMLYTLELLRRHWNYALGQRLDWLRRTRCQIDRCSMISEPIGEIPTTVNYYAQQSDLKQTKILFPDYKNIWSESQQVNLQRLNRAWERWLFPDKSGKRGGRPKFKKAGELRSFVYPRVNCPKAGAHLNNGVLKLSKIGQMPVIMHRPIPDGFTLKTCTIVHKADGWYCSISMQDDTVPEPMPLDEVKSAVGIDVGLKEFLTTSEGETVPVQQVYRKTHSHLARQQRKLVRKEKGSHRSSKQKNKIARIHQRIGRIRENFHYNTAHNLVKKYDLIAVEDLNIKGLARTRLSKSILDAAWGRFIAILDAVAVKCGVRVVKVNPHGTSQNCSRCGVKVPKTLSIRLHECHKCGLEIDRDENAAQNILDRALNEVGLILSARGGLGDTQPVKREAFSGWDGEQLSLF

SEQ ID NO: 51304 - protein, 223 aa, Desertifilum sp.
MGFYYRCLICSKHLGISYNPDKITGIDVGLKEFLTTSEGETVDIPTLYRKSQKRLRVIQKRVSRRKKGSNGRLKAIKKLGKQHKKVADKRKDFHFKTANWLLSKYDVVVHEDLNVKGLARTRLAKSVLDAGWSNFLSILTNKAVGEACAKRINAGLLIVPVSAYNTSQDCSNCGEKVPKKLHMRWHDCPHCGCSLDRDHNAAINIKNRAVGQPVLKAKSLRAQ

SEQ ID NO: 51305 - protein, 399 aa, Citreicella sp.
MIATRSITFRLYPSRAQDEAMLRKHGMLKDLWNAALEERIGAWRHGVRINLSHQEKALKDMRADVGGWHGLVHTHEAQTVLKRLDLAFRAFFRRVKNGEKPGFPRFRSADRFRGWGYKEHGNGFRVEMRDGRRHGHVTLFGIGRMRMRGRARTPGRILKADVSRSAFGWSLNLVVETACAERAPARGSAAGLDWGVADFATLALQDGTFQAIPNPRHLDREAEELRDAGRRLSAKARARKISRRAVRHERKRLARRHAQVAARRKDFQHKTSARLVATHPVIATEALAVGNMTRSARGTLEAPGRNVAQKAGLNRSILDTAPAAFLNMLRYKAAEAGSEFLEAQTRRLKPSQRCPGCGGVRKKPLSLRLHDCECGCRLGRDEAAARVLLDWGLAELAGS

SEQ ID NO: 51306 - protein, 282 aa, unknown
  TnpB Polypeptide
LPADSPTPYEEYVLSDDYEFRTSTLQYDQATDEFYFHVKTRKIDTDGETVEIEVSDDTEHQTVLGIDLGVNSLAVASTGAFWSGDEYDHWIQEFEKRRAEMQQRGTQAAHNALLRLGKRERAWRKQYIHTVANEIVAEAVAHDCDVVVFEELTDIRERLPHADWHHIWAFRRLVEYVEYKAPERGVAVEQVEPDHTSQRCSRTDCGFTHEDNRHGEQFRCLKCGYEINADYNGAKNVGLRHMRKRQHRLRSSPTSGGADAPVDVRIHGGMLNGDGYQPTADS

SEQ ID NO: 51307 - protein, 356 aa, unknown
  TnpB Polypeptide
LKLSCYLDSRQNSWQSIKFIIHYKKRYIAHLQRQIVSLRAAPIRVNVNQQGEAYFVGSKGETCGNQVFQFNGSQVQIRVPQCLEDKYGEYLECSVEPFPYGQDKLEQVLSTTGFTQNKKTGQQSPIRYGLALTHRFYAQDFRWFWAVAVDLPFVKRITRPRQYGCIGIDINPKSIGYAVVDHDGNLVIKGRIPFDVSSKRRGQTLAIIASVCNSLINLALRYGMPIALEHLEFAAKKTQLRERGRKYARMLSNFAYSRSLAQLELQCQNRGIEVIKRNPAWSSFLALVKYSRMYGLSSDEAAALVLARRAMNLSERLPRPITALLGVNPRKHVWSGVNQLNKILALHVASRLFQCL

SEQ ID NO: 51308 - protein, 561 aa, unknown
  TnpB Polypeptide
MWCMAKGRSLRRIGDPVVVAAPAGVRIRTRIHPTAAEAEALTAVGELLGSLYRADLAGRVRLGCLDRQAHAVWRAQRKRALTAVSSSRWAGAITRAVEDQYQLGMRGVAAQVADLRAAVQVLEARCGLRPGEVAPVEGAGTGGRSRRRRCHGYRSAAERFAKTRRLAVLRTRLATAQEALAAGQPSITVGGKRLWRARNHLNAAGLNEQQWRIKWDGARMFLTADGESGKAGGNETIGVDGAGRLRIKVPAALVDQFGPHRVLGAPARFAHRSDEWAERVAARAAVRYDISYDPARRRWYVDASWKTSPGPVLELDDVRAGPVLGVDLNADHLAGCVLDSSGNPIGEPITIAVDTAGLRASRRDGRVRAAIIRLLDVAHLHNCSAIVIENLDFTDARATGRETLGRGGRGKRLRRTVAGIPTRRFRTRLTGMGARRGIAIIGVDAAYTSRWGAQHWRIPLQQQTSEPATVTVHHGAAAAIGRRGLGMRIRRRPAGLRTRQRTSAGTSPTRPDHQPSTTPRRCRNSGSPTCPPRQRGVPVDRTTPTASGQHRSGRTGLTPAQ

SEQ ID NO: 51309 - protein, 384 aa, unknown
  TnpB Polypeptide
MYPDDNQKELINKSLGCSRFVYNYFLSKIKETKYTTSTENINDYTHYLKYEYPFLQEVDSAIIRKSLFNLEDSFKRFFNKQSDYPKFKSKFNRNSYNISAVYGSYENNNYCNIELDLENKIIRLSKLNNIKVRGYRKTKSINGKILNATVSREPNGKYYVSVLYKMSDIIKETVPSKIVGIDLGVKKLVTLSDGTEYENNKYLLKYEKRIKRMQRALSRKVKESNNYFKCKRKLAILHSKLANSRKYYIHKITKNITDEYDIITCEKLHTKSMIIEGKQTTLSKNINDACFNEIIKQLKYKSKLKGKQFYQIYDYYPSSQTCSRCNNQDEKYKDLGERIYDCTKCYLKLDRDLNASINIMFEGLKMYIKNNKRNILKSNISMIK

SEQ ID NO: 51310 - protein, 372 aa, Kribbella sp.
VWNLATEQWSMRRPGRRGVPGYAEQARQLTAARAAFGWLRAGSQTVQQQALRDFEQARRNYIAGTHGCPTWRRLGQHEGFRVVGPQAQRVERMNRRWARVLVPKVGWVRFRVSRTVPVAKSYRISRDRAGRWHIAFAAVPAPIPAPGTEKVVGIDRGISVSVALSTGELFRCPGSSDSEDLRLVLLQRRLARARRGSRRRQRAKIAIAKLYARLVDRRRDWIEKLSTEIARRFDVIRVEDLRIPQMTRRPRPIPDPALPGGYLPNRRRSKAALSRAILASGWGLLVRRLEDKAHGRVERIQPAYTSQTCSRCGHCAPGNRESQAFRCQCCGYRDHADVNAAINIAAGRAVSARGDRPTRMSVKREPQPSTHG

SEQ ID NO: 51311 - protein, 371 aa, unknown
  TnpB Polypeptide
MILAKKVRLYPTKEQEQKLWQSVGTARFMYNWTLAKQEENYKNGGKFIPNGTLRKEITQLKKTELNWLNEVSNNVVKQAVKDACNSYKRFFKGLSGKPRFKSKKRSKKSFYNDNYALKVKEGKLVNIEKIGWIKTNEQLPINVKYSNPRISYDNKYWYLSVGIEQDEIQEELTNVSLGIDLGLKNLAICSDGTVYKNINKTYEVRKIEKKLKRLQRQVSKKYEKNKKGKEYVKTKNIIKLEKQIQQTYRRLTNIRNNYLHQTTTSIVKTKPYRIVIEDLAVSNMMKNKHLSDDIRKQGFYEFRRQLEYKCKFRGIELIVADRFYPSSKTCSQCGKIKKDLKLSDRVYRCSCGLTIDRDLNASINLSKYKLV

SEQ ID NO: 51312 - protein, 524 aa, unknown
  TnpB Polypeptide
MARKKREYPPVYRTDLLPSNLTASKEARVRELLRAWRKGAVLLGREQWRLFFETGRFNENHDLDKITFASVIGAANRVQMCRWQVVGQLQGWLSNRVNEFRDTVTRSSLSPDVKHMLHTVNLMGAWFSRKELRMWGTGETIPPEVRRLARAIMRHVMSRHRRPDLSRISMRLDHRAAELAKPIKARQGNKVGWWINLATMEKGRKIAVPLLTYEYHDKRPGRVTNGVQVNERDGRLTFGVVTDMGEACAKSRAEYDGHGVLALDFGLSTLFATSEGQLLGQSWLKRLKRYDALISMIAASQQRAGRKPRDSRRYRALVEDVRGFLRTEVGRVLNRLVEQGKPKELVLERLDFRHSDLSPRLNAILRNCGRSIIQDKLRDLEERFGITSTEVNAAYTSQTCSCCGYVDKRNRRDQKTFLCLWCGHKLHADLNAAANIDARRARPNGWLFQGKAAVLAELVRGFGERRVRALRSGRTGNQGAPADPRLTNPYFGRVPLAVVRSSERREASVNSSQLKPSRLSELRR

SEQ ID NO: 51313 - protein, 551 aa, unknown
  TnpB Polypeptide
LTKRKKYDIIKEKSKEIKKGVKTDMLNGEVFRMYKTRGSEKLLPIYNKLQRELDLILSNDKYREDLMEIDLKYINKKGEPRNKTPWMLREDVIGVIGKRLQGKMPDSWYVRILYHNIISLLKSRKQQVEIYEILKANAYEIDTELRNKLTEKKLYPRKAYLEMLAAAKEVPGLPKKKTFILDFAASDKQMFRVGKNGTSWEVKIYSKEEKERNNLETQWIEIETFLPIYIREGFKGDAAKPQFYIDKTRDKFICGIPCKIEKIPNSYKNIMGVDIGRKKGYSGTVLRADKSISEEYVPTKEIQTLFDKLDRLNKHIKSVYKKYKASNKYGNKTERQGLRKLDYSEGRKKRTRLQYQIARLIAVEVVNIAIKEECKEIHIENLKWVKNKARKWNFSAIQQCIEEVAELYSIKVVKVSAKNSSTEHPITGEIGKESGRYIVFSSGERIDRDQLAGLNLAVRQPKDKKRKIKQLTERKEVKIERKSRQSNFKKLRKEVIDKKISKKENVPPVMFSHNKVEKISTIVSVIFCIPNVNSFKDNNIQFKTVFDNFIQ

SEQ ID NO: 51314 - protein, 159 aa, Salinigranum sp.
FATFGIEMDCEPPEPPEKLEKCVGIDVGILKYAHDTDGTAVGSLDLSDVRERLEREQRKLSHKQHGSNHWKKQWRRVTECHADLRQKRRNFLHKLSNYYAREYDLVAVKESPSNSRNTAPATWRTFLSLLECKCEREGTHFVAVNPKRTIKECAWRAVS

SEQ ID NO: 51315 - protein, 462 aa, unknown
  TnpB Polypeptide
MATRRQTFRLYPNKEQENKLFETRRNHAYLYNACIAHRRYEWKANKKSISYFDQQNCLPAFKKEWVEFAYMHSQSLQATVKRVDLAYGSFLLGLRGKPNFKSIRDYSGWAYPALSGWKVNSSGKHATVTLNDLGITLRMRGQAKQWGSPSTLTIVYKPGKNQWFASITVDVPTVETKFGSGSDLSYESIVAFDLGTETALTLYDGENFSELENPRFTKKTEVKIQHKSKALRRKRAPNRKKKTKASRRWKKTRKQISNLQNQVANQRKDWQHKVTSDIASRHDIGVTEQLSTKNMVRKAKKGSKRNRQKAGLNKSILSVGFGSLNKMIAYKIEQKGGLMLVLPTKKVKPSQRCPKCGKVHKAWAELSNRHHVCDGCGFETPRDRGSVMVMYNVATNQQPGLGMSLADCGCSSSTDSTKKRKHTGSMQQLGQKKRQKPQSVNGGALEPPRCLHGGVVHTGSRE

SEQ ID NO: 51316 - protein, 410 aa, unknown
  TnpB Polypeptide
MKERVAYKFRIYPDLDQARLFRRTVGCCRLVYNACLRAKKEAWAEEKVNLTAFDQIKTIPALKEQYPFLREVPNHCLQQAVVDLHRGYRNFFEGRASFPKPRRKYRNESFRFPDPKQVMFRDGAIFLPKARWVGMVAHREIVGTVKNVTVSLSGDHWYASIQVEREVDEPLQVSDAEAVERGCDLGVVNALAMDDGEVFDLPRMGEREKRKEENLHRIVSRRKKGSRNRAKALRALRAFKARIVRRRKDAKHRATTAVVRSCDVIYLEDLRVRNLTASARGTVEEPGKNVAQKAGSNRAMLDVSPGETRLQIEYKMRRKGGEVYFVNPAYTSQRCAECGHVEAGNRPDRDTFRCLSCGHAACADANAARNILHLGRKARTGGHPGMACEANPGAGRQQEEDGCSQAAQPA

SEQ ID NO: 51317 - protein, 463 aa, unknown
  TnpB Polypeptide
LITIKLKYKTDEESSIKLKEYRRQYSSVFKVYFNRLQEGMASKEILHLKLNNTNLVSSAFKGSALTEARTLLKVWESKKSQDKNHLIFGGRKSFLDRIKGNISKEELKERRLQKICCVGQAEKRGNIMFSIQEDFNVLFKPSRKEHIILEVLDSQKKRYSRELKAIYIKSFLEKKYPITYHLDNEFVYLTFDETILKNDKKELDSIPNRVIALDLNPNYIGWSIVDWKSSSEFKVIKSGIYNFKSLNDKEKELKNLKLSSEHPKRKYLSNKRRTEIFEVSKNLINKALYYKCQIFSVEDLNIKTKDSGLGKNFNKLVNNQWIRTDLVSNLEKRCSIFGFKFLKVKPEYSSFIGNFLYRSLNLPDMVLASIEIGRRAFEYYNQYITKSKETRKNIVRPSLIDFRTLYLKSLEEFELQPVYKDLIELYYFFKKFKLLYRLSLDKFNLKFSSCFSIKSQLSVYNLI

SEQ ID NO: 51318 - protein, 301 aa, Escherichia sp.
  misc_feature (255)..(295): Xaa can be any naturally occurring amino acid
VKRLQAFKFQLRPGGQQECEMRRFAGACRFVFNRALARQNENHEAGNKYIPYGKMASWLVEWKNATETQWLKDSPSQPLQQSLKDLERAYKNFFRKRAAFPRFKKRGQNDAFRYPQGVKLDQENSRIFLPKLGWMRYRNSRQVTGVVKNVTVSQSCGKWYISIQTESEVSTPVHPSASMIGLDAGVAKLATLSDGTVFGPVNSFQKNQKTLARLQRQLSRKVKFSNNWQKQKRKIQRLHSRIANIRRDYLHKVTXXXXXXXXXXXXXXXXXXXXXXXXXXXXXXXXXXXXXXXXXSGQNQV

SEQ ID NO: 51319 - protein, 429 aa, unknown
  TnpB Polypeptide
MTDETRKKKNENIAASRKETSLKRESQVCRVYQLKIDGSRLSKAQKEQLEMLFVEAKWFYNDILRYAETDPIKEYNASAKKVLVLKQGAYEEREIRYLGSQMKQSIKDSILTAIRVLATLKKNGHKVGKLKYKASFDCINLKQLGANSREGFVRGKNRVKIPAMKKLVVVRGLDQLTPDMEIANAKIIKRASGFYIKVTTYSNKKEETLLPEIGIDFGIKTHITTSEGKKYKAVVEESGHLKHRQRIVARRKKGSNNYVKAIKSLRREYERLSNKKNDLANKIVHELLQYEMVDMQDENLKGWHSGLFGKQVQHSVLGRIKAKLAESGRVTILARWLPTSKLCVCGHKKKELTLKDRIYHCDVCGYEEDRDVHAAKNMVRFAKALRSENCLPTERRAFDIIEKLVEEGEADRGNYSQVDLLLKQEGSTL

SEQ ID NO: 51320 - protein, 460 aa, Mastigocoleus sp.
MLLNYQYRAYPETSQKSLLNNWLRVARYWYNWQLGDRFDWWEKNRSAINSCRLICHTSDLRNNPTRYSQQGLLPGLKKDLQKVRHSGELLDFSLLPANTLQDVTKRADLAFQRFIKGDSSGNHSGKPRFKSAARYRTLGFTGVQIPKIVHTEKDWLFVTLPRFKGWLKLRCHRPLPNGFKVKSALLTKKADSWYITLCVEDKSIPSPADNKIIPDWDNSLGMDAVLHEDDYLATSEGEKLPSLKSFRKKQSKLAKVSEKKSKRRKGSKSRRKLAKREARIHQRVARSRKDHACKTSHALLRTGKKVFFHEKLNLKGLSKRNKAKQDNSGKYLPNGQSTKSGLNKSWQDAAFGEFFKTLQHIAEKAGCKVIPVNPAYTSQLLPYKDEFVFTDCSIRKYWDEEYALWIDRDISAGCNIKRVGLNVFPTIKRRSGKVVVDKTTTNSTAKEVLAVFSRCQKPTL

SEQ ID NO: 51321 - protein, 552 aa, unknown
  TnpB Polypeptide
MAREELKSMITVECRVEFSSKDMEILKDLMRRWSSCKRYAYQRLLKGEERKELKKRLQAVFGLNSRYVDDAILKAQEVLKACREKGQNPRKVIFGGRGLFEKLRKNHLQGKEREKLKRQWEEKRKCRLYSRGDRSKQGNLNIRLELEEDELYLRVNSGNRKWIKGKVHRRVSREKDRWVDFVWGLLISGKAGEYFPYSVELAIEDNKVYAHISYEEHIPETVLTKDYGVIGIDINASPFNLALAEVGEDGNLVSYQSISLHELTGKGREQREYLVWHIAHGVIELALEKGRAIAIEKLEKVSKGYRGDGKAKLRKRFQQWAYKSILEKIKTLGKRKGIEVIEVSPSYTSIIGSLKYAPIYNIDKDIAGAYVIGRRALGFREDIPENYLKLLSEEEFLFYSLAKLEEKKGELKQRLKEEKNKYKGNAIKGELSKLNKEIELLRKELESADGEPKTQQPVNQRREQVRGEAKTSYKLWQVLRVALTLPILGRSFVRDFSPLKSILVDWDRGVKRLAPVLGVGAMASQIPPVSVGLPEVAEYKYTDQKCSFIHFC

SEQ ID NO: 51322 - protein, 451 aa, Bifidobacterium sp.
MSQKVRIDGVKHVGASVFLGVDHCGNPCWTRNPERVMMWLCDGWRARFNQRREQRPHNVSVKDDATGEVVDWLKEPLGGPNVAELLSDKEARLQCSWMAGIPAPILSSTDKIENTEWSAGLKRKKTVGGRVPGFKSRHRGLGFVCWRNASRSGNAIFHKTGRKSGVVVITGMNPTRWRRPGEKLHWRIVIHVRVSQPIRPYTSVHVDWTHRTLVFVNMPLPLPRTGNGEVGIDRGCVHTLASSDGIFMDMPKPSKAELKRLKYLQRRMARQDRTNEARGGKTAKLASKRRRRTLSEFNALQGYIVRRRNDWIEKTTTRLAQENILVAMEDLDVRAMTRRPKPRPDPDKPGKYLHNGAKAKTGLNRSILGNNWSRLMTRLKDKMDANGGRLVVVPAAYTSQTCHQCGHVAKENRDSQAAFKCVRCGYEANADVNAAENILGRALAKMGGGTA

SEQ ID NO: 51323 - protein, 267 aa, Streptomyces sp.
  misc_feature (124)..(128): Xaa can be any naturally occurring amino acid
VKIVTQVKLMPDAVQASALERTLRTVNDAANWVSQVAFERGVPREYELRKHTYAELKARGLGAQAAQHVIKKVRDSYTTLKANIRAGNLGKEGSKRRRRAESKPVTFRPEAAQPYDDRCLSWQXXXXXARHAANQNHIISKTIVTEAERTGRGLSLEELKGIRNRVRLRKPQRVALHSWAFAQLADFIVYKAKRAGVPLVFVDPAYTSQTCVECGHVDKRNRVDQGLFICRRCGVVAHADRNASHNIATRGESVWNAGRESRVPATP

SEQ ID NO: 51324 - protein, 417 aa, unknown
  TnpB Polypeptide
MHILILRMLVKGVVFRFEDELPYEAKFLLEDFRLAVNNAIRAGLEARVTSRNALAKLVYRDFRKEHPKIYAQHLVSALEVAGSLLKNYRRRVRKGEVGHVPYVRRLFMKAENQAYKLDRESGVIDLPIRAGCHIKLRLVLSNYHRAYLGDQFYSLGSLTLLPDRVIIAFRKDAPRPYASESAFSLDTNERSLDGVFVRDDCVKVVKAGFPEVAVIQQRHYERRKRLQKKKAHDRRTSKRLRRWEGAREHHRINNRLHQVANAVLSFAEDQRSIVVLEDLKWFRPTRGKDLNRRLCLWPRRKLHQIIEYKAQWKGIPVVKVDPRYSSRTCPICGRIHDSRMGAEFECECGWHLDRHVNASINLLQTAVSKGMAGGLRFSPGAFQYDVMMTLYDPSRGARSEPNGTSCAGETPSRVITR

SEQ ID NO: 51325 - protein, 426 aa, Halorubrum sp.
MAKQVVTRTYTASIRNQSQVRDDLDALGFAASKLWNVGRWVCDRVWSEIRHTPDHTELTAYLKSHERYDDLHSQSSQRVLQELAEAFKSWYGKRQNGDERANPPTYRKHDDKHPRSTVTFKAAGFKLDTKYNRVRLSKGSNLKEYWSDFILCEFQTRPDVNLSTIENVQQVRAVWTGDEWELHFVCKVEVDVSEPSGEKTVGVDLGISNFAALAYEDGHAELYPLNRLKQDDYYFSKQIARCDGSNSDQATRLVQKRSARRTHYLHTLSKHIVQRCVEGGVEKIMVGDLSGIREDEETGRSKNWGRHGNLDLHSWAFDRFTKMLTYKAEMKGITVEEVSERNTSKSCSCCGRKRDANRVERGLYVCDSCGTTANADVNGAENIRQKVSPNSPNLSVNRSNGWLAQPSTFLFDKETGVFVPREQVTS

SEQ ID NO: 51326 - protein, 353 aa, unknown
  TnpB Polypeptide
MKHTKTLKVRVRDKHRPLLNQMARSVNFVWNYVNELSHRCIKEQGVFLSAYDIQKYTQGAHKELGLHSHTVQKVGAEYVTRRKQFKKTRLNWRKSGGARRSLGWVPINTGMAKWKNGQVYYNGHYFKVWDSYDLALYTFKSASFSEDARGRWYFNVVVEVEADMPAGQDKIGIDLGLKDTATCSDGTKLEAGRFYRDLESKLAVAQRAGKKKRAKNIHAKITHRRKDALHKFSRQLVSRAGEIYVGNVKSSSLAKTKMAKSVLDAGWAMLKTMLEYKCDSAGIVFKEVNESYTTQACSCCGCISVSSPKGRSGLRIREWTCSECGVTHDRDVNAAKNILAVGHGRPVEGIPVL

SEQ ID NO: 51327 - protein, 432 aa, unknown
  TnpB Polypeptide
MSINERRNLMQLTERHLVKPNHELYATLDDLTFKAKNLYNHGLYLYRQSYFEHKKSPDAPVLTWVDIDKSLRKQGHDDIRALPSKVANAVLKNLGENITSFWKLVRLKNSGKLAQKPKLPHYLHKTDGRYAVSFNYQTFGNKRGANGELFLCPKGINLPIPTKIANPKQVRIVPNLNNFIIEVIYDAEESAPKSTSKYAGIDLGVDNFATITFSTQNQPLIIKGLELKSINQGYNRLIAKAQSLLPGSQKTSQSIHRLWSRRSWILRTKIHQMTAFLATLFDEMQIEKVFIGKNTGWKQNLPFGKKVKQRFAFLPYETFIEQLQYKCQLRGITVITQEESYTSKASFLDNDDIPVYGETENPKFSGRRIKRGLYKTSDGRLINADVNGSYNIMRKGLMNNNQSLRVDNPLIHPLVVKGIGQESNDKLVQLYM

SEQ ID NO: 51328 - protein, 384 aa, unknown
  TnpB Polypeptide
MPSKELPVKVGKLKVYVHLKVNDRKVQDSMLEYYNAYIKVCNLASKVAYTLNTVSVNRIHARVKSDARFYEEQHPGVLDRAIDAVTKDYANHVAGVNKFPEARTYSVHDIPVCQDTDYDFIPLGNNRHGVELYLANRSSGFPITVQFLAEWLNLPNGHAYSTTASTAELSFDHKLGWLLKYDMYTVQNTVVGIDLGTRFLAVTYDGKETKFYRGGDTPLRHEMATYSRRRLSLKEKGTRSARKRLKALSDDWHKHLEANIKKTVKEILKGAEPHTVFALEDIAASPELRERFAKEDVGKLPTVIFDMFIRTLRDEAQKRGHIFITVSKAKTSTRCPACGMIIKSNRKQGKHIYGCSCGFRSNDDRVAAINIRERGIVRLTERLA

SEQ ID NO: 51329 - protein, 518 aa, unknown
  TnpB Polypeptide
VLAKNQTYRAFTVRPMHILDLNGELMDSASVMSQLAAEVRDISAYATYVVRNDTKLAADLAQVTAVQPAVAGRRAGVTMPNFLATGKSGRSRKEFLVQHNVVTAFRSWQERIKAIEGTSSKYVSQGWRRTVDTSAPTYGDADFINLGAVDKQYAVIENNPVADGKIVLRMVICGQWYRLIFPFDNSRFPEGKVTLPVIKVENNQPVFIFTVVTDNPIIQFSGDYTIGVDVGINDYATVVVRNSATGQITRKTTLSQRVHSLWNSVRASERQVRALNNKADKLIYDRQAHMSAFDEAQFHREAASRKKRELAILVAQEIAYLSHRWNNAVVVVEDLGWIRNTMSNGRWNRGAFVQWLTHYVTQNGGWVVAVNASNTSQVCHVCGEKVTHPEYKVSICPEHGDMDRDVNAAANIASRAVPKVDKARKTRAKNRKLQPQAALKTPPARETLKYPGRDRTKNVPTPKRKNRISEEVNLPFSPARVNMTTVLADCDTYGAVETSKAAINQGNVTREYGLCSLN

SEQ ID NO: 51330 - protein, 420 aa, unknown
  TnpB Polypeptide
MIQYLRHNIRIYPDRDQSNSLMQAIGMARLSYNFAVDKWRSTPSGTSKPSPLNIDRIFNQTKREIYPWLNDSKSVCFGKITQYSIKTNFKAALDNCYKRKLGAPTFKRKSQSDTASCDNQAFYIVGKKLKFAGVSTLIRTAEELRFSESKLISCTVGRNGKRWYASINVETKVNENQSHSKPDTFVGVDLGLKTAIQLSDDTQLLLPASALAKKAKRLVRYQRSFARKLLSSRGEKTRSNRCKKIQEKIQHLHNDIANIRHDFWHKSTTLISRDFETICVENLNIRGMQNLKTLRSKLQSTAIGKFLPMMRWKCVKNGSKLVIADRYFPSSKTCNNCGTINRNLKLGVSSWICECGSTNDRDLNAAKNLEDLARSSTRISTNVELPMVCGEVKTLERNIESRYEEVSVKVKTGKKLPVLT

SEQ ID NO: 51331 - protein, 382 aa, unknown
  TnpB Polypeptide
MKRIKMKIKEKEAKLEKFICEKEQLIHKTKQHETTEKDYLYEVTVIDPEIKKLKNQIKLLKYRLTREKKKKERYMERPKSVCFGGKKNLKHDIEAYRYKRRRRMLICGRRQGKYGNNLFKYHIDEGVLVYRGIEQEVKLPVVFHKHREHIERAVRMKHNTPGKAIAYELYDHGEYFIIRAIAEYPDEPVTPSDRGSIGMDINRDHIALAEIDRKGNLVKAWRIPVKERGARNQREYERYVAVKRIVEECVGRKKNLVMESLDFERKKEESLYGNRKYNRMLGAFAYKELEEKIERKCRKKGVYLRKVDPRDTSQIGKLKYAKRLGLSIHHSAAYVIARRGEGYRERIPKEYHEYREWREVIRDLGKATLEECQRTPYLSLFR

SEQ ID NO: 51332 - protein, 358 aa, unknown
  TnpB Polypeptide
MLLTIKVKLYPNEHQEKALLETMERFNEACNYISKIAWSTHTFGKVGIQKIVYYDSREKYHLSAQMVVRAIGKVAESYRVDKTCQHEFNKHGAIIYDQRILTFKATDEVSILTLEGRERITIKYGEYSQLNMERVKGQADLIYHNNTFYLMVVVDVPDADPIDPDGVIGVDMGIVNIATTSDGETFSGKKCAEVRQHYSALKARLQSVGTHSAKKHLKKISDKERRFKKDTNHCIAKAIVQTAKDTNRAIAIENLKGIRTNRTVNKVVRTAIGKWAFDELGNFLKYKATLAGIPVFEIDPKNSSRECSVCGHIDKNNRKTQSEFLCLSCGHQDNADINASKNISFRGICQLSHRPMSC

SEQ ID NO: 51333 - protein, 403 aa, unknown
  TnpB Polypeptide
MIVLEFKVKGKTTQYAAIDEAIRTTQFVRNKCIRYWMDNQGVGQKDLYRYNTALRAEFPFVNALNSHACQAAVERAYSAIARFYSNCKKSIPGKKSYPKFQKNCRSVEYKTSGWKLSSNRKKIDFIDKKGIGKLKLKGTWDLHFYQLDQIKRVRLVRCADGYYVQFLISIENKVDVELTGNMIGLDVGIKEFYTDSNGHGEPSPKFYRTGEKRLKFRQRRVSRKKKGSANRKKAINRLGRVHLKISRQREEHAKRVARCVIQSNDLVAYEDLRIKNLVKNHCLAKSINDAGWYQFRKWLEHFGEKFGRITIAVNPAYTSQECSSCGTLVKKSLSMRTHVCKCGFVLDRDWNAAINILKLALSTTGHVGTWVIDPNASGDSTSTLVGAILPRQVGSMNEESSRL

SEQ ID NO: 51334 - protein, 370 aa, unknown
  TnpB Polypeptide
MNYASKVVYEGGKPIAAMKLQTMTYAHLREVLKLKSQISCNIPRQVAGAYKMLKEQIIIGKAEWQLLEFRPTSMTLSYKRDFDLNGDTVGITTLNAGRKPYRIMEYDHAKQYFDGSWMYTASKMVRHEDGCYYLHLGIERHIEEPLIEKASKFMGVDVGMNYLAVASTTDKKQAFFEGRRIKDIRNRYKGMRRRLQSKGTLSARRMLNHLSGKEKRLMRDVNHIVSRRIVEFAKKNGVSVIGVENLNGIRDRTKVGKKQRYHHNSWAFRELQSFIEYKAREAGILMEYADASYTSRTCPRCNHISKNNRHGLRFRCEACGYELNADLNAARNIEHRTRDYRYILESQGRLSAAHTDTPQGEIQAQAFRPG

SEQ ID NO: 51335 - protein, 497 aa, unknown
  TnpB Polypeptide
MARIVKRAYKYRFYPTPEQAEELLRTFGCVRFVYNKALEERTRAYIQEGRRVSYVETSAMLTQWKRTEELAFLNEVSSVPLQQALRHLQAAFANFFAKRAKYPKFKSRKRSRASAEYTRSAFRWKDGRLFLAKMREPLRIVWSRPLPEGAQPSTVTVSRDAAGRWFVSILVEEKIRPLPPVESSVGVDAGISALVTLSTGEKITNPRHERRDHRKLAKAQRALDRKQKDSKNREKARLKVAKVYTRIADRRRDFLHKLTTRLVRENQTVVIEDLAVRNMVRNRRLARAISDAAWREFRSMLEYKAAWYGRELLVVDRWFPSSKLCSACGALQDAMPLNIRQWTCPCGATHDRDVNAAKNILAAGLAERLNACGAGVRPQGLKPGGQPAVKQEIQPARVGIPSLQGGEEAKQLYTISLPAWMHFSITAITRLKKQNWRWPEPVKLDEDNAYYQVTGETANRMANWLLGFSDTMIETNPKSSEYCYKLAKEIAKTVNPT

SEQ ID NO: 51336 - protein, 250 aa, Streptomyces sp.
MPSSVTVIKDAAGRYFASFVIDTDPAADAAAMPDPDPDSCVGIDLGLTHFAVLDNGTKIDSPRFLRRAEKKLKKAQRELSRKQKGSKNREKARLRVARAHAQVADARKEFGHQLSTRIIRENQTVVVENLAVSGLARTRLAKSVNDAGWSQFVDMLEYKAKRYGRVFVQIGRFTPTTRTRSACGHVDGPKPLHVREWTCPACNTLHDRDVNAAKNVKAAGQGGSSLRSVGKTKPPAASGARHDVKNQEAT

SEQ ID NO: 51337 - protein, 344 aa, unknown
  TnpB Polypeptide
MIKTFRYRIKDATDGTKLDKLARSVNFVWNFCNETQEHALRWNQRWPTGFDLNKLTAGSGKELGLHSQTVQAVCEQYADRRKQFKKRKLRWRGRRSPGWIPFKMVGIRVNGDTVRYSGQEFRFWNSREIPGPIKSGSFSQDARKRWYINFAVDCPDEQPTVGTKQVGIDLGLKTLATCSDGSKIEAPRWYRNQQKRLAEFQRKRKPRKVRNLHAKIANRRLDFLHKESTKLVNDCELIVVGDVSSSKLTKTNMAKSVNDAGWSMFRHLLEYKAIARKVVYREVSERFTTQACSCCGAIGGPKGRNGLEVRGWVCGECGAVLDRDVNAALNILRLGHQSLLAEVQ

SEQ ID NO: 51338 - protein, 328 aa, Lactobacillus sp.
MTKLIKGVKLRLYPNKQQQAQLWQMFGNDRRVWNLMLDMAKQRYQNNPSSHFVNEYGMNYLLKQLKQEYPYLKDSDATSFLVVNHNLVQAFKMLFKHRGGYPRFKSRHATKQSYTGRSVCTVIAKRRMKLPKLGSIRTSKTSQAVNGKIKRYTVSYGPTGRYYLSLQVETVAPEALPKTGKTVGLDVGIADLAISSDGEKFGTFNAKWLEKQATKWQSKCSRRKYQATVAVRQWNHNHKDVKMDLNDYQNWQRAQKQKARYQQRIANQRQDYLHKLTTALVKKYDVIVIEDLKAKNLQKNYHLAKAIANASWYQFRTMLEYKCDWYGK

SEQ ID NO: 51339 - protein, 769 aa, Streptomyces sp.
VIKGLHRLHVVVISQVPRAFLVAREVPHHVHHVPGRTRTAAHALRAIGVVSHSRETAAVQLRPPVRHRAGRPSLDGMGTPHLHERGDGPAPANPLPGPAAVRPDHDRAAQRTEVHAAATLATAYLLTRAASSADPAVADFFQGLIFTPRLEPGDPRRDLHARFSARGAALRGKLASAHAGGRCGWPTCSITVSSPRSVTEAPRHGNSYGLPVSWSGTWPGGSVRCTRRDRSGTGNRSSSPRRPRAGPNSAAKPTRRRPGWTGRRCGGARTIRFPKPSATAGGLLLLWSPSANLSLRQVLLTVEVSGVGLSVGASTVRLVITTHAYRFALDPTPRQVGALLRHTGAARVAYNWLLAVVKANLSQREAERSYGMAEAELTPSLSWSMYSLRKAWNQAKADVAPWWPECSKEAYATGLDRLATALKNWSDSKKGRRRGPRMGFPRFKSKRKATPSVRFTTGVIRLDGRMHVVLPVLGRIKTHESTHKLGRLIEAGTARIKSATVRQEAQRWCVSFTVEVQRAERTPTRPDAVIGVDLELKTLAVFSDGRPAAENPKHLAGARRKLRRLSRTVSRRQGPDRRTGQQPSNRWKRANAQRNRVHHRVTALRRDGIHKLTTSLTREYGTVVVEDLNVASMVKNWKLARSIADAGFGEIRRQLAYKTVWTGGRLEVADRWFPSSKTCSACGNVRPKLPLRVRTYVCENCGLILDRDENAALNLTALVKRHVAGSGPETVNGRGADRKTPPGGAGGRPAPGGSRPGKTGIFVQEWASH

SEQ ID NO: 51340 - protein, 414 aa, Candidate divison MSBL1 archaeon
MTLIGFSEMSVDMQVTKTVVLKLKKSDQSIPKTMERYTKGMNFASKVVYENGEPMSSTKLQELTYKHLREDIGLLSQMSCNVARQVSGTYKTLQEQVENGKTEWQKSEFSPTNIKFSYGRDYKISKEKLSISTLDGRKEYEIINYDYAEQYFSEEWKYLASELVKHRDGEYYFHLSCEKEVEEKPIEEASNFMGIDVGINYLAVGTTTDKNQAFLGGGKAKDLRNTYEKMRKRLQSKGTFSAYKRLKALSGKEKRLMEQLNHEVSKEIVEFAKEEGVDVIGMEDLTDMREETKVRKENRYNHDSWAFRQLQKFIEYKAIERGIRVEYVDPENTSKTCSRCGHISRNNRDGLDFVCEECGYELHADLNGARNIEHRVRDFRHDLESQGSRQPPDVDGVEATSATASRGAEPQTSS

SEQ ID NO: 51341 - protein, 466 aa, unknown
  TnpB Polypeptide
MTYTTLKLKHDPRGDVDAFTARRKQYSSLFRILYNKLVDNPSLKYDDAVKIVSTYKNLELNDSYLRNAAFQDAKAEYDSDIKKDNKGHKVIFGGEDNFIARRKKLITKEEYKESRLRPLYVIGEANKGGNGRFKIRNRRYIDYYENGEVLFSFRIKDKRSRMLAILKKKQDNKELAITYKADSEYIYISFEEQLDLDLNRLVVPNRYMAIDLNPEYIGIVIFDVINGKRKLVASDNFDMSEIIKRHIDSKSAPDSEESKYWNNKRKYELKEVNKRIFNMACHFGCSYIVIEKLHFKNSKGRKCTVQWNKRLTIEYLMSRCYVKGFTKLLQVNPAFTSIIGNIICKHYMPDMCRSAYEIGYRGVKGIQNGNFNDEGVDNTNYPHSLDEIKLFIIKSLEESGNKDKIEEVNKFTDYNEASRFLYGNKIKFRTSIEDCQNNETVKVFKNEKSLVKERSYHVRRCKKTVV

SEQ ID NO: 51342 - protein, 411 aa, Cyanobacteria sp.
MVERAYKYRFYPTPEQERILRRTMGCVRLVYNKALHARTSAWYDKQERMGYSQTSSLLTQWKKREDLQFLNEVSCVPLQQGLRHLQKAFTNFFAKRTGYPSFKKKRNGGSAEFTKSGFKFKDGQLWLAKCKEPLHIKWSRDLPGSATPSTVTVKIDAWGRWFVSLFVNDQTLNQLQKTSNSVGIDVGINTLITTSEGEKVSNPRHFKRLYQKLRRAQKSLSRKTKGSNNYKKACLQVAKVHAKIKDARTDFLHKLSTDLVRRYDLIAIEDLAIKNMVKNRKLAQAISDVAWGELICQLDYKCQWYGKELVKIDRFFPSSKRCGNCGHTVEKLPLNIRQWECPSCGSQHDRDLNASKNLEAAGLAMLACGASVRPEKSKSRKATAKKQEPKLGNEPESIPARKPQRIPRREV

SEQ ID NO: 51343 - protein, 416 aa, Lactobacillus sp.
MAELPYHFGVRVRVYPSTEQKRLIKRNSDASRFIYNEMVAMNRELYTLRRVKCPISLVLQRITTLQERLKRPATGISNIHGWLNHSDFDADMKANAIKNYRTAWKLFKQVHQSGFPHFHKRNTRQSYQTSNHYQSGKGQPTMTNGSVRLLDRHHLTIGKIGRLRFAGMPKWLFTRTESIRIGTTTVSMDATGFYFVSFQLGSTQPFVSPSKKTGSQIGIDLNLDNFLTDSNGNTIANPRFYRQIIGKLAKAQRKLSRRARRAKQERRQLRQAKNYQKQRLVVAQIHQRVANQRKSFLHQLSTSLVKNHDLVVAEELRSKNLLKNHALAMSISDVGWRQFLAMLAYKTLLYNKQFVTVDPKNTTQTCHVCGFVMGTANTHKLTLVQREWNCPQCGQHHIRDWNAAQNILAKGLAAIA

SEQ ID NO: 51344 - protein, 359 aa, Butyrivibrio sp.
MKIYSTYSVKIKQYNHIFSETVTIYRDAVNFLMDVCLAEWDLVSAIKGNQAQMMHVESLCHKTKENSSPKYDFDSRFYKMPSYIRRAAISEAIGKVSSYKSNLANWKLNPTGKKPTLNNCGYVYPSLYRIGMYNLTDDYSAQIKIYHNNTWNWLSISLRKSDMDYIYHRCNGRKMCAPTLQKRGKEWFLDFPFEEKVTLTDTNGLVVGVDLGLNSACTCCIMDSKGTIYGRRFLGLPSETDRLNHAVNRIKKAQQYGNRKMPRLWAKAKGINDDIAVKTANFIIDTAVMYNADTIVFEHLDLAGKKRGSKKQKLHMWKAKYVQSMVTDKAHRLSMRISHICAWGDITTSFRWQWQSSSR

SEQ ID NO: 51345 - protein, 437 aa, Mollicutes sp.
MTKNEQIKQTLKETHERRKTQIIKVFELKVNCHHTSKETFKKLNDMFKQAKWVINDVIGSKENIFKYDYKEHRKVINFDKDKNKVEREITLPTVIHQSLVKSIQTDICNLSKAKKKGIKVGALKFRSEVNRIPLRNDAIKIKSSKIISIPYFKNLIVYGLEQFINIPNFEVANANLIRKSSGFYIKVTVFIPKSNFNRKETNKSVGLDFGIKTAITTSDGEKFDCNKQETDKLKFLQKQLHKKLKGSKRYYKLLNQIRKEYEHISNQKKDVANKIVAHLLKENDVIYFQDEQISKWKKKKIRKQKSKQKKLAKKCGYSFGRQIQHSCLGRVKSKLNVLEKSGRSYKISKWIPTTKFCPKCCTLNTLTLKDRIYVCDCGYSCDRDVHASKNVKLFGSTKRTEWLEQPSVETNTSTLSSVSRLALQALSVKQEKEATTL

SEQ ID NO: 51346 - protein, 396 aa, unknown
  TnpB Polypeptide
MIVLEFKLAGAASQYAAFDEAIRTTQFIRNKCVRKWRDERGVKPYDLNKYCAVLAKEYDFAGKLNSQARQAAAERAGAAVLRFYKNCREKKPGKKGYPHFQKDGRSIEYKTTGWKMDEARRAITFMDGFKAGTFKLKGTRDLMGYALDQIKRVRVVRKADGYYSQFCIDADRRVSVEATGRNVGIDLGLSHFYTDSEGATVENPRHVRRSERALKRVQRRVSSKVKGSHNRAKARQRLGRKHLKVRRQRKDFVVKAARALIMSNDVIAYEDLRVRNMVRNRHLAKSISDAGWRAFVSWLDYLAHVYGKVVVAVPPVYTSQDCSGCGERVKKALSERTHSCPRCGTVLDRDHNAARNILALGLRRVEETTAGHAESHAWGQPALYPLEETQVDKAAG

SEQ ID NO: 51347 - protein, 316 aa, unknown
  TnpB Polypeptide
MDRYILGDSNGKRSGRPRFKTEADYRSFKFPQAKQEWIDTNNAVLHLPFIGGVQIRLHRPLPDGFKLKTVQVIKKSDGWHVNLCIEDPFVTKFTPDDIVPTWDNSTGMDAVLHEDDFLALSDGQKLPSLKSFRKTQSKLANVQVRKSARKRCSNRRRKLAKREARIHQRIARSRKDHAFKTAHKIVRTGLKVFFHEDLDLKNLTKRNKAKQDETGKFLVNGQSAKSGLNKSWNDAAFGAFFKTLEYIAEKAGAKVVAVKPNYTSQFLSYRDEKVFTDCNIREYWDEIEQLLVDRDINAAINIKRVGHRMVPDDKQP

SEQ ID NO: 51348 - protein, 378 aa, unknown
  TnpB Polypeptide
MNKAIKYRLYPTTEQAVSFIRTFGCCRKVYNLMLEDKIKTYESTKTFGKQTPAMYKEDYPFLREVDSLALANVQLNLQKAISSCFDKSRKKKNRFPRFKSAKHSRKSYKTNNQDGTVAITEKGVKLPKVGIVKAKIHRLPENDWQLKSATISQESDGKFYVSILFKYKNSMIPVPKTNNAVGLDYASDSLYVDDKGNIGTNHKYYRESHKKLARQQRKLSRMAGSKKGETKSHRYLKQLAKVNRIHRHIANQRLDNLHKLSTEIANQYDIVCVEDLNMKALSNRYFGNGKATLDNGYGLFLKLLEYKLVERGKYLIKVDRFFPSSQICHCCGERHPEMKDLRIRTIKCDCGLSMNRDQNAAINIKQEGLRILHEELAS

SEQ ID NO: 51349 - protein, 348 aa, Proteobacteria sp.
VSTLTYRYRLKDATSGTHLRQRAGAINDVWNYCNAVSLLALRRAKTFLTAYALHKLTAGTSKDLRLSADTMQQVCTEYVTRRTPCKKSKLKWRSRTRSLGWIPCKAAYIRLHGDTVTYCGHRFRLWLSRPIAGVVKTGSFSQDAQGRWDVNVQCEGADAAEPVGTLDLGMDLGLTYQLTCSDGVQYARANLTRKHAAALAMAQRAHKKQRVKAMYARIAHVRQDGAHQVMTAIARRAKLIVIGDVSSTKLAKTSLTTSTYDASWGIVRHQLHYKAIRLAGVCVDGNEKFSTVTGSDCGARSGPSGLGGLEVRKWCCAVCGVSHERDVNAARNILRTGRGTPIKGIPVL

SEQ ID NO: 51350 - protein, 425 aa, Proteobacteria sp.
MSILTHRYRIKDATTRTHLLRMAGAINDVWNYCNEVSLLAWRRDKTFLSAYALHKLTAGTSKDLRLSADTIQQVCTEYVTRRTQCKKIKLRWRSRKRSLGWIPFKANYIRLHGDTVTYCGQRFRLWLSRPIAGVVKTGSFTQDAPGHWYVNLQCEVVDAAEPVGQQEIGMDLGLTHQITCSDGVQYSRANLTRHYEDALAMAQRAHKKKRTKAIHARIANVHKDWSHHVTTAITRRAKLIVIGDVSSTTLAKTPLAKSTYDAAWGIVRRQLHYKAKRLTGRCVDGNERFSSVTCSACGARSGPSGLRGLRVRTWVCLCCGVTHERDVNAARNILAFRSGRATPRKGIPVLEGGEDVNSACIVCRYACTATGVCAHSCEVQGNSHVGSMDAARGSLTSPDSHQDGYTRAQCNVVSGKAVPQKMREG

SEQ ID NO: 51351 - protein, 281 aa, Thaumarchaeota sp.
MLTYKFRIYPTVAQVRTMEETLESCRRLYNSMLADRIENGTGFYDQKKMLVELKQKNKHLKSIHSQVLQDVVLRLDKACQAFFAGLSRFPKFRRSGRYNSFTYPQSGFRLEGDRVIRLSTIGRVRVTLHRKVTGVVRRATVIRDIDQWFVALLVEEAPGVVRSGDGKVGVDAGISNVVALSDGTMIGNPHLLNRSVERIKSLQRQLSHKKKGSSNREKARLSLGKAWRKARRQRDDFAHRLSDQLTKENKVIVFEDLKIQNMVKNRNLASAIMDAAWGKLR

SEQ ID NO: 51352 - protein, 335 aa, Thaumarchaeota sp.
MLTYKFRIYPTVAQVRTMEETLESCRRLYNSMLADRIENGTGFYDQKKMLVELKQKNKHLKSIHSQVLQDVVLRLDKACQAFFAGLSRFPKFRRSGRYNSFTYPQSGFRLEGDRVIRLSTIGRVRVTLHRKVTGVVRRATVIRDIDQWFVALLVEEAPGVVRSGDGKVGVDAGISNVVALSDGTMIGNPHLLNRSVERIKSLQRQLSHKKKGSSNREKARLSLGKAWRKARRQRDDFAHRLSDQLTKENKVIVFEDLKIQNMVKNRNLASAIMDAAWGKLRQFTAYKAERRGGRVILVNPSGTSQKCSGCGEAVPKELSDRVHAARDVGWSWIGM

SEQ ID NO: 51353 - protein, 345 aa, Salarchaeum sp.
VNLNIPTLGNPTRSRVGGGQDTFSIVYDKRAATYYRDKVSLATVTGRVECEYDLPDNPEGTPHGEYLLNDDYSFSTSTVHYDSKADEFYLHAAMERELDVASPEKAEDSRVLGVDCNVDDHIAVTSTGRFVGNADYLNHQRREFEKRRASLQQTGTRSAHLTYQRIGDRFGRWSEDSLHRCSKEIIAEAKRHGCTHIAFEDLEQIRERISDGKKFQQWTFRALQDQVAYKADEHGIVVETVEPSYTSQQCSKCGCTLEENRDGQRFACLDCSYSVNADYNAAKNVARKLALRLQRGQKPLAGGAFCQYALKSGIMTVNATEVASDTPVSAERESTDKPTASAVGS

SEQ ID NO: 51354 - protein, 406 aa, Salarchaeum sp.
MEVRRTVPVALNVDSDDAALLEDTVDQFLWSAQYVVDHAFQGENVTTSKTTLDDETYDDVREKTDGFNGELVQAARNKAADACKSVVEKWKKGKKASKPRFTSPHVVYDHRTATFHDDYASLATTDGRIEADYGLPDEDSDTPHSDYLFSNDYETTGAELHYHDGDWVLHIHCKTDVESDTPKQATPENGTVLGVDLGVNNLAVASTGTFWTSDEFNHWRGEYEKRRGSLQQCGTRWAHENIQSVGRKEEGRFKQMLHRISNELVAEARENDCSVIAFEELTDIRERTGASWGHKWAFDRRYNYVAYKAEEHGITVEQVDPENTSRRCSHCGFTHPDNREDEDFECLKCRYEIDLLLRVNAEESRHRISGRAKRPVGFKTHTVHASSAGFQHRRGCLVARSKRPHP

SEQ ID NO: 51355 - protein, 438 aa, Salarchaeum sp.
MLEVHCTHRAKILNHSQVEDSLDRHGWSASKLWNVANYHSRQVWEETGEIPDHEELKDELKTHDKYKGLHSQSSQRVLEELAEAFNSWYSSDDERDNPPGYRKQNYYDQQGRRVHEEHPRSTVTWKQNGIRHDTKNNRVRLSKGANHKEHPRAWEYILVEYETRPSVEVDNLQQVRAVYDQQKERWELHLVCKDEIETPNAPGNETAGIDLGISNFAAVAYSTEDADLYPGNRLKQDGYYFPKEIAKCDDSSGDRATRLHAKWSERRTHFFHSLAKHIVQRCVEKGVGRINVGDLEGVREDEDGESKNWGRHGNLDLHGWAFDRFTSILEYKAKVEGIEVVEVSERDTSKTCCVCGREDDSQRVERGLYVCESCDAAYNADVNGAENIRLDINEESNSESTGQLSGDRSTGWLAQPGVYLYDLSCGFQPQREVGDCKP

SEQ ID NO: 51356 - protein, 439 aa, Salarchaeum sp.
MLDIHHTHQAKICNHSQVVDPLDWHGWSASKLWNVANYHSRQVWEETGEIPDHEELKHELKGHSKYKGLHSQSSQRVLEELAEAFNSWYSSDDDRDNPPGYRKENYYDQQGRRVHEEHPRSTVTWKQNGIKHDTKNNRVRLSKGANHKEYPRAREYILVEYETRPDVEVENLQQVRAVYDQSKERWELHLVCKDEIETPTAPGTETAGIDLGISNFAAVAYSTDEADLYPGNRLKQDGYYFPKEIANCEDSSGERATRLHKKWSERRTHFFHSLAKHIVEQCIEKRVGRINVGDLEGVREDETGESKDWGRHGNLDLHGWAFDRFTDILEYKAKVEGIEVVEVSERDTSKTCCVCGREDESQRVERGLYACEACDAAFNADVNGAENIRLDINDTKSNSESAPSLGGDRSTGWLAQPGVYLYDLSCGFQPQRAVVDCKP

SEQ ID NO: 51357 - protein, 359 aa, Trichococcus sp.
MLKAYKFRLYPTEIQKAYFANCFGCARFVYNRMLNDKIEHYKETNQMLKNTPAQYKNEFPFLKDVDSLALANAQQNLEKAYKNFFRDKSVGFPKFKSKHKSNDSYTTNNQGGNIRIEDNKIKLPKIGFVKIRQHRDFDGLIKSCTISMTKTGKYFISILVEQEVPEWVPAEHKIGIDLGISDFAVTTNDADESVKHANPKCLYRSEQKVKKAQRALSRKQKGSKNREKARLVLAKKHEKIVNQRKDFLHKLSDQITDENQVIVIETLRSSNMMKNHKLAKAIGDVSWSEFCRQLAYKAEWKGGTLIKADRFYPSSQICSACGQRDGKKALHIRAWTCPECGTTHDRDINASRNLLVLAK

SEQ ID NO: 51358 - protein, 399 aa, Massilia sp.
MILAHRIRLDPNKVQATHLARAAGTARFAYNWSLAQWQRQFEACKADPALPKPNEAALRRQLNAIKRGQFPWMLEVTKNAPQMAIIQLGRAFQNFFEKRARYPKFRRKGIDDRFTLTNDQFRVDGKRIRIPKLGWLRMRETLRFTGRIVSASVSQRAGHWYASITVDTQDAQLPPAENQGAVGVDFGVTHLATLSTGEKVADPKALHTLLDRLRRLSRSLSRKVKGSCNRKKAKARLARLHARIVNVRANGLHKLSASIVRRFHTIGIEDLHVKGMLGNRCLSRAIADMGFAELRRQRVYKTQRRGGQVVVIDRWYPSSKTCSCCRHKLDALDLAIRQWTCPACGALHDRDINAAINLRTMAVSSTVSACGGEGAGPVREAQDETGPGEAGIQRKVNDA

SEQ ID NO: 51359 - protein, 371 aa, unknown
  TnpB Polypeptide
MILSKKIRLKPNKTQESLLWKSTGTARFIYNWTLGRQKENYENGGKFLSDNDLRKEITVLKKLELSWLSEVSNNVAKQAVKDACIAYKNFFTKKASFPKFKSKKKVKPSFYNDTDKLKVKENLVLVEKVGWIKTSEQIPMNNKYSNPRISFDGKYWYISIGIESEKPEVKLTDKSVGIDLGVRDLATCSTGKIYKNINKTKRIKKFKKKLKRLQKQVSRKYEKSREVNNRYEKSQNIVKLENKIRLIHRRISNIRNNNLHQITNEIVKTKPSKIVMEDLNVKGMMKNRHLSKAIAEQNFYKFITYMKYKAEFNGIEFIQVPRFYPSSKTCSKCGTVKKDLKLSDRVFKCECGHVLDRDLNASINLANYRVS

SEQ ID NO: 51360 - protein, 336 aa, unknown
  TnpB Polypeptide
LTTHASARAKSPLPLIKVEDGRPVFIFTVVTDNPVVQFSGDYTIGVDVGINNYATVVVRNSSTGQIVHTSTLSQRVHSLWNSVRASERQVRQLRQKAKHLLGDRQAHMSALDEAQLHREAASRKKRELAILAAQEIAYLSHVWGNAVVAVEDLGWVRNTAQHGRWNRGAFVKWLTHYVTQNGGWVVAVNPANTSQLCHTCGSRVSHPSHEVSVCAEHGVLDRDINAATNIAARAVPKVAKARATRAKNRRLRPQAALKTPVARRSLKCPGRDRTKSAPTPKRKNQPRTVREVILPSSPARVIISARVLAEQGATGTCQAAIKQGNMTDEWRLCSLD

SEQ ID NO: 51361 - protein, 375 aa, unknown
  TnpB Polypeptide
MYKAYKFRMYLTDSQKILVHKTFGCTRFIYNHFLNKCKENGYQKAYDMCKELKELVVEYPFLKEVDSCSLRNSIFNLEDSYKNFFSKRSRYPVFKNKFSKQSYRTTCIKSSYKGNNYSNIEVDLKNRKIKLPKLGIVSIRGYRNLDSINGNIINATIERDTTNKYYVSVVVEETEFIKEKVKPTSIVGIDLGIKDLVITSDGEKYSNPKEILKREKQLKRIQKKLSRQVKGSNNYNKTKIRLARIYSKIKNSRKHNMITIVNKIVKEHDIIVSEKLNVKGISSNHHLAKAVLDASFNKICELLKWKTKLQGKYYYQVDTFYPSSKMCSHCGSKTEVTNNLSIRSWECTNCGNKNDRDINASINIMFEGLRIHYQN

SEQ ID NO: 51362 - protein, 437 aa, unknown
  TnpB Polypeptide
MIRRSKHINKFANTGKKALLSLFLLEYGKALQVCIDYLWDHEITWIETKKIKDSEETIETIKTLSVSNKQYDCPKFITKEIQSNFKLETLLSGRALKCCFTQACGMVKAVLEKPKRREFVLAKLISQGKDTTSILKKISKSKITKPIIKNVKAELNSICCEFQLTENFFEGFLELHSLGKEFGKIRIPIRFHEQSNKWMSQGKIMKSFLISEKCIEIRWEIPETEKVTEGEVIGIDQGMKDVVTLSDDRTSPKTNSHGYSLESILDKMSHKKKGSKAFGKTQEHRKNFINWSINSLNFDGIKQINLEKVVNIRYKKRSSRILSHWTNTLIRDKFVSRCEEAGVQLKLQSSTYRSQRCFNCGWVQKKNRKSKEFCCKQCEHHSDADLNAAKNHSIELPDVPFSLRKLKLNRKGFYWKPEGFFALTGEKITVSPSRIIS

SEQ ID NO: 51363 - protein, 299 aa, Tolumonas sp.
LKLWNGKEWLWYTVPVRAKRQRHLLGEIKSPSLVLRSGKGQRPYLSVPVRLQPKPRQDEGVVCAVDVGINTLATASIVSADGTVLARRFFHPASDIDRRNKQALLIRKAARKTAKLSKGFCSHRYRKAQNINRQIAHVTSKQLVQFAREHQAHVVVFENLKGWRPSAGRKRSPLRQRFHQWLHRKLVQYTEEKFAEIGGKGAFVYARGTSAYAFDGSGKLSRSATQYELATFSTGKRYNCDLSASYNIGARYWARKLKLIHRKDGQVLSGRRSDNTPRIPVTLSTLWLWSVDAPHRSVA

SEQ ID NO: 51364 - protein, 413 aa, unknown
  TnpB Polypeptide
MQLVEQHCIGRGDVRFEVIDRVAFASKNLYNATLYEMRQAFIHYGHRIFFKELYHLMKSHEAYQALPAKVAQQVLRLLDKNWESYFEAVKAWNDDPSKFVGHPKLPKYKDKQKGRNILVFTVQAVSKRGLTKGIVQPSGVPIEIQTSHTNVNQVRIVPCGGYYVVEVVYTQETQQADVDTTLVASLDLGINNLVALTSNKVGFVPRLVNGRPIKSVNQFYNKRKAELQAIIKPDTRFTHRMERMTTKRTRRIDHYLHIASKRIIDLFVSERIGTLVIGKNPLWKQEANMGKRNNQQFVQIPHARFISMVTYKAELVGIQVLVGEESYTSKASFLDSDPIPTYGKKSQDVVFSGKRVKRGLYKSKNGKKINADVNRSYNILRKVAPDALRGKGVEDCVVNPVPLQVQSLMSRIC

SEQ ID NO: 51365 - protein, 333 aa, unknown
  TnpB Polypeptide
MIVGKAFKYRLKPTAAMSARMVRQAGACRFVWNKILALNESRYLAGTPRLTYYQACWLLALWKQTEELGWLKQMHSQVLQQCLLDLERGYRNLFQGRALPPRFRKKGLADSFRFPQGFKLEDRKVYLPKMGWVEFWKSREMEGTVKNVTLSRRGGHWYVALQAELEVPEPVHPAKGKEVGIDLGIVTFAAFSDGELVPPLNVYCRWEKKLGRLQRNLARKVKFSRNWEKRQKIAHLHIRIANSREDFLHKLSTDVSKNHATVYVENLRIRPMCKSARGTIEHPGRNVGAKAGLNKSILDQGWHRFRRIAGIQTGLAWGDRVGGGSPLQFADLS

SEQ ID NO: 51366 - protein, 231 aa, unknown
  TnpB Polypeptide
LLADRFDWYERNRSPINACPLVCHIPELRDNPDYYSQKKTLPQLKKTHPWYGEIYSQVLQDIVKRVKVTFDRFFKGDSNGKRSGRPQFKSRDRYRTFTYPQMKDGCLQGNSIILPMFGIVKVILHRPIPDGFKIKTASVTKKADGYYLTLSLEDTTVPNIKPDFNADSITGIDLGLKDFLTTSEDDVVSIPQHYRKATNRLRVIQKRISRRKKGIIAAKKLLSKLPNNIKK

SEQ ID NO: 51367 - protein, 383 aa, unknown
  TnpB Polypeptide
LEIKRHQNGGNQVEKGYKFRIYPNSEQVQQIQRTFGCCRFVYNHFLAERIKEYHENGETLGYNDCSAMLTTMKEDLTWLREVDSTALQSSLKDLDTAYKNFFSRVKKGQTLGFPKFKNKKIRHKSYKAKLVGQNIAVFENHVKLPKLGIVKAAVSMQIRGRILSATVSQAPSGKYFVSLCCVDVEIPQYKSTSKTIGIDLGIKELATTSEGESYPNHKHIRQSEKKLAKAQRQLSRKTIGSANREKARIKVAQIQERISNQRADALHKLTTILVKKYDVICVEDIAPKNMMKNHKLAKSIADVSWGELTRQLQYKCAWQRKAFVKVGRFFASSQNCGNCGNQNQEVKDLKIRKWQCPKCGNFHDRDINAALNILNEGLRILGV

SEQ ID NO: 51368 - protein, 383 aa, Deinococcus sp.
VTQIQTTTHFKTFRYRLRPTKAQEAALEGQLRLCRDLYNAALQERRDAYRKAGKTVTAYDQMKSLTEIKEALPEYKGVYSQVLQDVLKRLDKAFGAFFRRVKAGQTPGYPRFKGAGWYDSFTYPQSGFSVSEKTAYFSKIGNIRIRLHRPLLGKVKTATIRRECGEWYVSYVCEVESAPLPKTGSQVGVDVGTTYFCITSDGEFVENPRHFQTAMKKLRVAQRTLSRRKRGSGRRKKAKAAVTKLHRKVARQRLDFHHKVATKLIRENDLVAHEDLNVSGMGRGNLARSIHDVGWGQFFSLLSLKAASAGRTVIRVDPRYTSQTCFECGHACRENRRGQAKFRCVQCGHMANADHNAALNILARALPSVQNVEVVRGLRSPGL

SEQ ID NO: 51369 - protein, 590 aa, Sutterella sp.
MVFDHIKHKERTVLLQPDQDVSELCFLEAERVESLGVRNEAPGYVTTVREIVAPDAATDEQLEALLEAYGRQVSYFIHRFHSRAWRPYCSGSRYRYLRDRLVEAVAKKEEEGKKPEKKSEEKKKSEKKPEKKPEMKPEMKPEAPFPIFGLQARQWKMALQQASSVVENDWALAQQRAKEKIERTRWYANLDGNERHYVNLLLSTMGDDFFQMMRGRTATFGWHRDREQLKKVKNPGSLCALVRRAIQKVKSKQIRRRACRSVWFDCECYSVQIVTEGKETIQVVSLMSLTPGKRVKIKLRGKKAIKGTVKLVKTPRGWQLHTLSTPKTKEKSSEGKLTCAAMDMGFSEVFTMHDGAQFGRKLGEAIGAQAETVDLKIRERNRLTAQAKNTKDPKKRRNILRYNLGSDTFDRNVAKHRSRVHNIVNHSLNEMLKQYPAEVYIVEDLSHRFYLKGFSKQTNRLLSSWVRGIIAQRLSFKAALHGVSLVKVPAAYSSQRCPYCGCVCRESRKGDRFECVHCGAKGHADRVACLNLLCRAHDPRFRSRMSKERVLALELEEHGMECARRGTTPHKYEPRQRKKRSTPNEASKKA

SEQ ID NO: 51370 - protein, 297 aa, Mycobacterium sp.
VLHDRCDACGARPPPPHLAGDRHHPYVREHPPVERLIAKGRARVLAITVRRNGTRLDASVRVLVQRPQQRRVALPDSRVGVDVGVRRLATVADAEGTVLEQVPNPRPLDAALRGLRRVSRARSRCTKGSRRYCERTTELSRLHRRVNDVRTHHLHVLTTRLAKTHGRIVVEGLDAAGMLRQKGLPGARARRRALSDAALATPRRHLSYKTGWYGSSLVVADRWFPSSKTCHACRHVQDIGWDEKWQCDGCSITHQRDDNAAINLARYEEPPSVVGPVGAAVKRGADRKTGPRPAGWP

SEQ ID NO: 51371 - protein, 399 aa, unknown
  TnpB Polypeptide
VFVSEIYNVDLLKTIPLKIYGYGEELDTLVQGFTTGMNYASEVLFENGKPMGSQKLQKIIYQNVRDLGLKSQMACNVCRQVSGTYKTLQDQITKTKNGDNPVEWQKITYKPTTITFSYKRDYTITKDWISITTLDKRQKYGFYMYKHAEQYFDGTWQFIASKLVKRKDGYYFHLCVSKEVPDPLITETQTFMGVDVGMNWLAVASTTDKKSAFLCGGTTKHVRNTYKNMRKRLQSKGTKSAKRVLKRMTGKEKRLMESINHKVSKDVITFAKRQNVQCIGLEDLTGLRTATQYQCKRKNRYHKSSWSYHQLQWQIEYKAKDAGILIEWINPEYTSQTCPRCNTIDKTNRHGLMYKCKCCGFSLHSDLVGARNIETRTRIIRHDLEIQGCESTSQTETVA

SEQ ID NO: 51372 - protein, 371 aa, unknown
  TnpB Polypeptide
MNRAYKYRVYPTAEQEQLLTDTFGSCRFVYNHYLALQSENHQQGKAYMNKTACNNDCNRILKQEQPWLKQVDKFALTNAIYALDAAYQRFFRKQGGYPRFKSRHHSRMSYTTNYTNGNIAILDGAVRLPKLGKVKAIVHRAAPEDWRLKQATVSREGDGSYYVSVLYGYEAVIMPQAVNPEQVIGLDYKSDGLYMDSEGRCCGMPHYYRKNQKKLTKAQRKLKAKQLQSVNYRKQQKKIVRVAKKAANQRKDYLHKKSTEIAKQYDLVCVEDLNMRALANRKFGNGKATMDNGYGSFLIMLKYKLESRGKRLIRIEKWYASSKTCSSCGKVKMMPLSVRRYECSCGMSMDRDVNAAINIRNRGYEIYRKAA

SEQ ID NO: 51373 - protein, 373 aa, Methanohalophilus sp.
MLKAYRYRMYPNKNQIEMFHKHFGACRFIYNWALENKIKSYEQDGKSISRFDLNKGITILKRDGEHEWLKDVNSQSLQGATLNLDNAFTRFFREKRGFPKFKSKKNPVQAYSVPQNYKVDFENNKIYLPKIGNVKTILHRHYGDGDLKTATVSRTPTGKYYISILVDSGLETPKKSEFSENNTVGIDVGIKDFVIISDGTKIANPSNLKKSIKRLKVLHKRLSRKQKGSKNREKVKIAIAKLHENISNQRHDFQHKLSSRLISENQAIALETLNVNGMLKNHCLAQSISDASWSSFVSKLEYKAQWYGKTILRIGQFEPSTKICNVCGYYNKDLTLADRQWQCPDCGASHDRDVNAAINIKKFALNKQNLIGI

SEQ ID NO: 51374 - protein, 379 aa, unknown
  TnpB Polypeptide
MKAYKFRLYPSKKQEQTLFQTFKSCRFVYNQLLEKLNKQEKINRGEIQHNILSLKKQFPELNRVYSKTLQYECYRLFNNLRGLSQLKKNDKKVGRLRFKGEDWFKTINYNQSGFKLNQTGKRYSKLHLSKIGDIDIRCHRITGGKIKQVTIKKTTGKWYAIIITDEVYKKVGGKRQIGIDLGIINFIADNKGNKIKSPLFLKKRLNKIKKAYQNLSKKKRGSNNRYKAKQRLGVLFEKVENQRNDFLNKVSTNLVSDNKIICIEKLGIKQMMSKKRNRFWNRRNFADVSWGKFISMLKFKAESAGTKIIEVNPRNTSKICSNCGKLQNMPLSQRTYFCDCGLELDRDVNSAKNILAQGLGFVKNETESSSMKQEAITST

SEQ ID NO: 51375 - protein, 363 aa, unknown
  TnpB Polypeptide
MRKMMKYRLYPTTTQTEALDAQLGEACRLYNAALQERRDAYQRHRLSLSYYDQANQLKDIRTAGDLGLANFSASQDVLRRVDKTFKAFFRRLKAGFKPGYPRFKSRRRFDSYTFPSYGDGCRLTGTRLYLQGVGHLKVKLHRPVRGPIKTITVKRHAGKWYTCISVEYEPLPLPETDTRIGIDVGLLSFATLSDGTMLDNPRHYRKAQAKLRRAQRRVARRKRGSHNRRKAVVLLQKAHAHVQNQRADFHHTTARALVDAYGVIAVEDLNIKGLASGMLAKSVNDAGWSEFISKLAYKAAEAGRQVVYVDPRGTSQICLCGAPVLKTLDQRWHQCEQCGLSAARDHVSAQLILGLGLSLLGLT

SEQ ID NO: 51376 - protein, 540 aa, unknown
  TnpB Polypeptide
MPRKTTPSFITELPLIVTSQDEKELKARFNAGMRLLNACLNEADIRMKLVRNSEAFKQALKLTKTVLGKDGNPVTNPERVKAFAQARAAARFTEYELHSFATVVANKSKWIAKKLDANTQQKLATRAFKAVEKVLLGRAKSFRYKVYSRFRSVEGKTNKQGLRWKDECLVWGDLKLEPLIERNDPVILHGLNHPVKYVRLIRKELGRCTRWYVQLINEGTPYQKPKNSAGDELVGIDLNISNLAVVGDTYAELLPFACGVPTYQKEIAALQRQMQRSQRINNPDNYEPDFLAQKGRKIIKKKGTPKKGNKGLKRGEKRLWNHSHRYKQLKKRKRNLERRKTAYAKSQNRQLVNKVLKIGKFIKAERVTVKGWQKRYGKAIGAKSPGFVQSELKRKAEKADGKFETFSTTKTALSQTHLDGSRQKKSLSQRIHHDVTGVVMHRDLFSAYLARYVQEDQLDADTARERYAGLEPILVGAFQRYESKSASTAASPRSGVRPSEQIPRKDELLCQIAGFLYGSLGKKLKPKSSVSPLLEEPPGF

SEQ ID NO: 51377 - protein, 385 aa, unknown
  TnpB Polypeptide
MNRLVAYKYRLYPNKTQQTLLNKTMGCVRYFWNQQVAIFNSYDKETNPKPEFKTSTELRNQIEWMREVRAAAIQQKENDFKEYKKQFFSKTRKKKINHPNFKKKSNKQSFRLPNQKFSVIGSKIRLEKIGKVSMVIDRELPIGKLMSVTVSKNPSGQYFASILIETEINYKPKTNREVGIDLGIKTFSTQSDGVEISNPKFLNKSQTKLKRLQKHLSKKKKGSNRRNKCRIKIAKVHQKITNQRDWFLHDYSTQLINDYDRIFIEDLNISGMVKNHCLAGAISDVAWSKLVSMLTYKAEWYGKDVVKVGRFYASSKTCECGVKNDGLKLSDREWICESCGRINQRDLLASQNILKEGRRSCSDLTDAEVEVTKPMKRLNFNGVLL

SEQ ID NO: 51378 - protein, 492 aa, Acidimicrobiaceae sp.
VLRLTREAPYRAASVRSVTLLAEGGRLYVDVCAEVPLETYGAGEAPDPKKVAGVDLGIIHLYVLAGANGALVVSGRAMRAESRLHPAESKARERAVARRSPGRAQRGSRRWRKYRARTKVLEARHRRRLDQARYEAAREVVTYAKEHRIGTLVVGGPERFARSRLRSAPEPRRAQLEGGPAHLSSERPGGAGRHRSGPRRRARHLFGSQEGQPPLLRGTATHRPKGARVTGHSTSQCRRGSRRVPGSARVAAARRYDLGDAHLRHRLRGRHARGPQRGRPGQSRGVDPFRLQEHQFEHRDRRAGAGAPLLYRGQAHGPAPGAPREDGEAPGLAEGARRGEDRGGVAQRGASADRDPGRDLERQRPGAQQVHQGSGSEGRELADPGGPAAGVGEKARRPAGRDQRLQGEGFRHSPAVQQLPRLSGQAGPSLTPAESKVAISPSTLAAACRTGRARQAPVPSPSRRSSSSSGTSPRCCNATDAPGSVDRWPATR

SEQ ID NO: 51379 - protein, 386 aa, Firmicutes sp.
MQSSLYRAMTDKRGGFNMYGNQNITFLTQEYNLYPTKEQSLQLTGRFEQEDAAYNTLADAVNDAHRRGMEEAKLKQLVQERYLPASDEVDRYANKCVRARINALVPRLCRGKMSRIAPRRVDRSQRSANFRYAGVSDFHLVLPVIGSIAMEQHRDLPRGARIYGATVYADCYYAFYHVALHLIVPKKVIAPAPGHYGKVVGLDYAQDGLYVDSSGHCAGYPAFRHQAQDKLNRCHRAVNRFKTGSRRWRKFRQRAAKMERHVVNQRKDWQYKQAHALAQQYDAVCVETLDLAGMMQNEPALSGKLCDNAPAAFYKRLEQVLNAQGKRLIRVDRYYPSSQICSACGRRVGKFPMDSAFTCPYCGLRLDRNHNAARNIREEGLRLLEQ

SEQ ID NO: 51380 - protein, 424 aa, unknown
  TnpB Polypeptide
MEYSPKYRLFPTTKQRESLNWTRNIVRQTYNHALHEFNQIPEDDGTLRQRVWQVRDTLPNLKQQWTDLKRVYSTVLQKAVERIRTNINNLGKLKAKGYTVGSLNWKKPREYKSFTYRQSGFELDKKSGPRNRAILRLKKVRGETLEIPIRYHRDLPEHDSIKEVTVKKEPTGAWYASFCISTEELEKPDVDDIDVEDTVGLDLGIYNFIYDSKGRSIDRLDLSDERERLEREQRSLSRKQYESHNWEKQRCRVAEVHARMSNKKHDYKHKLAHFYATNYEAVFVEDLNVKSMIEGDGNARNKAEVGWSDFRQILEHHCDKHGTHYVEVNPRGTTKECAECGAESEKPLWVREHSCPSCGFTLDRDWNAALNVKSRGLSKLGVVHSKVTPVKTATAVDAFSVSASRVVEAGSSVLKERTALAVSE

SEQ ID NO: 51381 - protein, 386 aa, unknown
  TnpB Polypeptide
MQTLTYKYKVYKQNRNHERRLQEWFRTAAWIYNHAIALHKRYYRIYHKSISVYRLQSHLLKLRKSTYSQWKAIGSQSVQQICERINNGYKNFFNRTAKHLPTFKNWRKYRSVTFKQAGYTLNGNVLTVNALKLRLKFHLSRPIDGKVQTLSIKRDAAGDYWIIIAVRRNEESSARKPMTGKTAGFDFGMKHFLTQDNGTRIESPLALFNHLDELRRKSRNLSRKKKGSNGRNKAKLSLARLHRKISNIREDFQWKTAIRIVSEYDVICLETLNMKAMQKVWGRKINDLSFTSFVSKLSWLCAKYGKKFVQINKWEASSKTCSSCGYRAEEMPLNIRKWTCPECGTHHDRDINAAKNILRVGTSTPGRDSINPAMQVAADDARISLL

SEQ ID NO: 51382 - protein, 537 aa, unknown
  TnpB Polypeptide
LCRAARRGATHKNGARGPPLKGAGESADRRQQRGDGSLWPHPTRHALTGRDRMKVCVSTSVRSFLTPRECIAVEIRRSYRYALRPTGAQQRALLAQLDAHRLLYNCALDHRRTAYRMAGVSITYYDQARELVAVRADDPYQKACNHSSQQHTLRRLDRAFHAFFRRIKAGQKTGFPRFRGRTRFRTLTFTHGDGATFTETGMITERHPFAATVKIQGVGAIPLVYHRRLGEREDRQIAEHVKIGTVEIIRTGDQWEVVFSCTLTIPTPKDAYPPLPATGVDVGLAYYASLADGEQVPNPRFLRKGMGEVKRLQRKLDRARKERTAEKRATKKRDAETATAKAAGKPIPPTPPVEVWVSKRGKKRPKRTAERRARILSRTAARRHARISNQRAFFQWHLARSLISRFGLIAVEVLKRRNMARRPKKTVDEGKTKETGQPVYAPNGAAAKSGLNKSIYDAAWGLFVQRLGSKAEEAGCTIVGVRAAGTSQECPRCARKTSKALDERWHTCPCGCSLPRDVAAAQVILARGLASVAASAA

SEQ ID NO: 51383 - protein, 216 aa, unknown
  TnpB Polypeptide
MRADGTILGRKFINFSSDKDHLYHVLGRIRRFQREHSSRQVQSRWDYAKRLNMELSRKIAAEITKYAAEYQADVIVFEYLEMQGKISGKKKQKLHLWRKRDIQKLCEHQAHRKGIRVSRVSARNTSRLACDGSGAVVRNQENHSLCTFRTGKQYNCDLSASYNIGARYFIRELLKPLPETERSSLEAKVPAVKRRTSCVYADLRKLYVEVNNLKAA

SEQ ID NO: 51384 - protein, 426 aa, unknown
  TnpB Polypeptide
MPFLTLKYHIKVKGKQKRLLDLLTHISKNIYNASLYELRQQYFKNKEICDYYSLNKIMSDNDNYHILNTYMSICTIRNAYSNMIKFITNKAKLPKYLSKNNYYPLITDQVRIIERNNKKVIKLPVSNILRTNKLFNIKYEDSLITKFIEESKLTKNYDIYIKIPKLIENKDIRQVRMIPSYNAYYYTVEFSYIDEEKIIKSENSEIMVIDVGINNLATCVTTKNDSFIIDGKSIKSRNRLYNKKIAYLQSKNAKKGYTKRMKNLIIHHKNYVKDYINKAVKQLIEKAKSLKVKKIVIGYNKGFKNKGIKNEFISKKGKRIVNQNFTSIPISKFKERIKQVSYKEGLEYEEINESYTSLASFYDGNKCEKGENFTGKRVKRGLYITKEGKQVNAALNILSKSKSNYSDIHYLMSRGLTIPRRIQVSL

SEQ ID NO: 51385 - protein, 414 aa, unknown
  TnpB Polypeptide
VDVPEERAARHSHFNLNDHFVFTPKYRRHVAHGAVQERMFKAFKYRLYPTKPQARDLERTLELCRQLYNAALQERKEAYHKAGKTVGFYEQKRHLPEIRAELPEYRGVHSQVLQNVIARVDKAFQGFFRRVKKGETPGYPRFKGRGRYDSFTFPQADATGVKLQEGGKRVLLYGIGSLKVKLHRPLEGTLKIATVKREGEHWSIVFVCEVEPRPLPPNDQTIGIDLGTNPNFLITSDGEMVQAPRSFHKAQAKLATAQRSLARKKRGSHRRKQARRRVANLHRKVANQRKDFHHKLAKRLVNRYGTIVHEDLNILGLARTRLAKSVLDAGWAQFLAILAYKAEEAGRRIIRVDPKYTSQDCPVCGHREKHPLWIRVYTCPQCGTLLHRDVAAALNILARARTEPSGMDTAATVP

SEQ ID NO: 51386 - protein, 405 aa, Hydrococcus sp.
MLTLTYEYKLIPTQQQVLDIENILTVCRQVWNFALRERKDWVNSRKCRVDACSKEQEYIIQPDVPFPNYYIQAYNLTEAKKVIPELQTVNAQVLQQVLRTLDRAWDDISNRGFGFPRFKKHFRMRSFVFPQLKGELRSANRVKLPQLGWVKFHVSRPIPDGFKVKQARVVRKASGYFVMLSLQLDVNVPEVPFNGHSLGIDIGLESFLATSEGELVARPKFFNSLHRQLELLQRRLKHKKLGSNNRRQLNSKIARFHQQISDTRKDFHWKLAHHLCDQAESIFVEDIDFRAWAKGMFGKHTLDASFGQFFNILSYVCWKRGVFFAKVSKDYTSQICPECGTLTGKKDLSIREHNCKMCGYKTHRDVAAAQVIRNRGILAVGQPVGLEIASGGVLTGVGNSLVKCL

SEQ ID NO: 51387 - protein, 388 aa, Methanomicrobiales sp.
MESEMRHVTRYRTYPSHPVEQRLFNGFVRCTFVRNWCLENNVYVDSCLPDLKNQYPELKEVQSHVLQKVIHRIVASLRALRAMKAKGRRVGKLRRKRIHSMEYDSTGFRLTGNRLWLSKIGEIQIELSRPVPGRIKQVVIKHTPAHRWFVAVVSETPDTPEPTTGTRAVGIDLNLENFSTDTDGMVFPHPHNVRKAAKRLRRAQRGLSKKVNGSRNRRKQRVKVARIHEQVENRRNDFLHKWSRYYVEHYDLIALEHLNIKPMVESLDAKLRGRSRVILDAAWYKGREFIRYKAANAGKYVHLIDPAYTTQDCFICGHREKKDLWQRTHCCPACGYTVPRDLNAAQNILKRASVGWGTPESTLVEIGTATPPILAVQVPVNDTRISRL

SEQ ID NO: 51388 - protein, 578 aa, Bacillus sp.
  misc_feature (311)..(314): Xaa can be any naturally occurring amino acid
  misc_feature (350)..(574): Xaa can be any naturally occurring amino acid
MNKMTKENPSNYKTLQIWIKKGHRMYSYFQECCHNAKNMYNTTNFYIRQVYTELTQEKELQPLQKEVLDNIHKNIGKMNDTQLLAYQKKLEKEKLKPKEEQKEITCNLFSEPNFEKPYVDYNFLDALFKVMIQNDYRALPTQCSQSIMKGLFQNWKSFFTSLKDYKKNPNKYAGTPRVPKYIRSSEKEILYTNQDCIIKNGRFLKFPKTKLQLNIGKLGFTEGKLKQVRVIPKYNEYVVELVIDVPSEQQIIEENARYMSIDLGIDNLATIVTNTGMKPVLVKGKHVKSINQYYNKMKSHFTSILRNGKQXXXXNMGKRNNQSFCHIPHSLLIQMITYKANAVGIQVVVXXXXXXXXXXXXXXXXXXXXXXXXXXXXXXXXXXXXXXXXXXXXXXXXXXXXXXXXXXXXXXXXXXXXXXXXXXXXXXXXXXXXXXXXXXXXXXXXXXXXXXXXXXXXXXXXXXXXXXXXXXXXXXXXXXXXXXXXXXXXXXXXXXXXXXXXXXXXXXXXXXXXXXXXXXXXXXXXXXXXXXXXXXXXXXXXXXXXXXXXXXXXXXXXXXXXXXXXXXXXXXXXXNVIL

SEQ ID NO: 51389 - protein, 307 aa, Streptomyces sp.
MGAPRFKSRKDNRQAIRFTANARWSVTPGGDLSLPKIGNVRVKWSRVLPSVPSTVTVVKDAAGRYFCSFVVETEPAQDLTRMPETDAVVGIDLGLTHFAILSDGRRIDSPKFLRRAEKKLKRAQQVLCRKAKDSKNRDKARTKVARAHGRVADARREFHHQLSTELIRDNQAVAVEDLAVKGLARTRLAKSVHDAGWSAFVTMLEYKAARYGRAFHRTGRFEPTSQVCSHCGVKGGPKPLNVREWTCGACGTGLDRDINAAVNVARAAGLAVSACRAQVSRGSVPAQRVEAGTHRDGQTTVVGIPAL

SEQ ID NO: 51390 - protein, 400 aa, Mesotoga sp.
MCYNNYEVIYIKKLVQSVRCKLQVEYNSDVYNALKDTVHKFADACNYTLDIAYIKGIHNQFKIHHESYKEIRDRFGLTANLAVRAIARVAQAMKSTRKKKSCPRHFKATSVDYDQRIFSLDVNSWTVSLSTINGRLHIPLAIGNYQRHLLLDQKPTFATLYFNKRNKTFYLDISIKNDVPDPDDLANSDSKIVGVDRGIYNIVATTNNIKISGKEIQHTRRRFKHLRARLQAKGTKSAKRALQRLSGKEQRWMKYVNHCISKLLVNSLNPGDTLVFEDLANIRERIKSYRKQTNFQISNWAFYQLEQFVEYKALAKGVKVVYIDPKYTSQRCSICGHISKTNRDKHSFRCEQCGHVANADTNAAYNIRSAHLAITNGLSSTSPKVASSLSYKLPALAGGS

SEQ ID NO: 51391 - protein, 363 aa, Mesotoga sp.
MQITVKIKLEPTKEQESLLQATTKEYIRLVNQMVADFVKSDAPLKYTSKTVIAELPSAVKNQAIKDARSVFKKYKKNVYTNARLKPEDQREVRVPILKKPVAIWNNQNYSLKENILSFPVLIADKSKRIEVKAVLTDYQREQLNGKLGSLRITQKSGKYIAQIAVKIDEKQSETSNKIMGVDLGLKNPAVAIVEGGKTKFVGNGRQAKFIRRKHRSVRRKLGKLKKLKAIKKRHDKEQRWMKDQDHKISRQIVNFAKENQVAVIHMERLTNIRNTAKTSRKNEKNLHPWSFYRLTKYIEYKATLVGIKVEYVNPEYTSQKCPKCGKHNKAKDRKYVCGCGFKAHRDRVGAMNIISATVADGVV

SEQ ID NO: 51392 - protein, 430 aa, unknown
  TnpB Polypeptide
MPFLTTKYHLKIKGKQKRLLDLLCHISKNIYNASLYEIRQQYFKEECICDYYSLNNIMSINENYHILNTYMSICTIRNAHVNMMKFINNKAKLPKYLSKNEYYPLITDQIRIIERNKKKVIKLPISNIIRTNKVFNTKYSDELINRFIEESRLSKNIDIYLKIPKRIEDKRIRQIRIVPKYKAYYYEVEFTYIDDGEIIQTEGKEEMGIDIGLNNLATCATTNNESFIIDGKSLKSRNRLYNKKLSYLQNKNSKKGYTKRMKKLIIHHSNYVKDYINKAVKKLIEKAKSLKVGKIIIGYNKGFKRKGIKNEAITKKEKRVINQNFVQIPLSKFKERIKQVSKKEGIECIEINESYTSLASFYDYDECKYGEIFSGKRVKRGIYLTSEGKEINADVNAALNILNKSNSNNNKMSYLRSRGITIPKRIQVGL

SEQ ID NO: 51393 - protein, 409 aa, unknown
  TnpB Polypeptide
MLINQAFKYELNPNDKQDRLLIKHCGVARFAWNWGLARRIELYKNEEGKERFTNAITQHKELNALKKSEFSWMYDVSKCAPQGALRNLDRAYSNFYCGLKGSKKVGLPKFRKKGVHDSFNLNGSVRIVGNSVQLPRIGMVRTKESTSKFKGRILSATVSREANRWYCSLGVEVDRVETQPITREVVGIDLGLSEFAVISDGKGYRHIDAPKPLKKVLVKAKRLSKQQSRKQKSSSNRKKANLRLAMQHRKVKNIRKDFLNKLTSELAKTKSVIVIEDLNVQGMQNKKRHLGRSIADVSWGEFRRQLEYKTVWYGSRLIKYPRFEPSSKKCSKCGAINAELKLSDRIWICQNCGYTHDRDENASDNLRDYGLKILSTESSSGSNACGESVSPILNKAVLAEAGSKRVCNE

SEQ ID NO: 51394 - protein, 344 aa, Okeania sp.
LAAYRWVYNQCVEFFNHQRNLPKGKSLDQVIQSKQTQPENEWTIGLGKTRQEAVAEAEQTYKQALVANNSQSFQLRYRSCRNKSQTIQFKNDAYRDGTWFPKKVKGMLFCTAIGYQIPRNCDYGTELVYQRGQWFACFPQHAEVSTTGSDKVIALDPGNRAFLTGYDGENVLEIGKGDIGRINRLCSHLDNLLSRAALSNNKRQRYQMRKAATRMRSRIQHLVKDLHNKVASMLVNSYKLIFLPTYETSQMVLKSSRKINRKSVRNMLSWSHGKFASHIEQMAARSCVLVVRCNEAYTSKTCTNFGHVHNSLGGSKIYKCPQCAHVIARDINGARNIMLRALLD

SEQ ID NO: 51395 - protein, 355 aa, Okeania sp.
MQSIKTKLKVNNYQKTILAKHAGVARHAYNWGLATCICEYESNKKRLSAITLHKRLVREVKSENLWYYDVSKCAPQQALRDLERAFKNFLTIPKRGFPRFKKKGRKDSFYLEGNIKILKGNYIKLPRIGMVKTYEILPSCRVKNVRISKRAGEWYISFKYEEQPGQTTKERDIIGVDVGINALATCSDGTKFANVKAYKQAKKRLTRYQRRVNEKEPGSKNRAKAIKKLARLHKRVADIRADALHKVTTWLAKNHSTIVIENLNVSGMLKNHKLASAIADCGFYEFKRQLIYKCEWYGSELTIADRFYPSSQICSHCGHQQKMPLNVRTYECANCGFQADRDFNAAVNLANYVNK

SEQ ID NO: 51396 - protein, 371 aa, Alkalihalobacillus sp.
MAKQNKAYKFRLYPTDEQALMIRKTFGCVRFVYNKMLAERKETYENLKDDKEALEKVKHPTPAKYKKEFAWLKEVDSLALANAQLNLNKAYKAFFKGNAKFPKFKSKRHNQSYTTNVVNGNIQLLDGHIKLPKLKMVKIKQHRNIPSDHTIKSCTVSMTSSGKYYISILTEYEKEIKSKDIENVVGLDFEMNGLFVDSETGKKANYPRFYRQMIDKLAIEQRKLSRKKKGSSNWNKQRIRVAKIQEKVANQRKNYLHHQSKALVISYDAVIIEDLDMKGMSQALKFGKSVADNGWGMFTSFLHYKLKEQGKQLVKIDKWFPSTKTCSSCGSIREIRLSERTYQCDCGLNLDRDYNSALNIKKEGIRLLATA

SEQ ID NO: 51397 - protein, 314 aa, Ruminococcus sp.
VYKYTQRKRDKKLLKSFKTEINPTAEQKHKINKTIGTCRFVYNFYLAHNREIYEQENRFVSGYDFSIWLNNDYIPNNPEFAWIKEVSSKSVKQSIMNAQKAFKNFFDKKASFPKWKKKNNSDVKMYFVRTDSKAMIFCERHRLKIPTLGWVRLKEKGYIPTSKDGYIIKSGTVSCKAGRYYVSVLIEMPENEKPVLNNFGIGVDLGVKDFAVCSNGKVYKNINKSSHIRKLEKKLNREQRRLSRKYESLKKSKNNLKGEVTRQNIRKQKLKVQKLHHRLDCIRTDYINKAISELVKTKPMWITLEESFLSSEQS

SEQ ID NO: 51398 - protein, 452 aa, Anabaena sp.
VLHKVVQVRLYPSIEQKVQLAQAFGCSRWWWNYALNKSIETYKETGKGLTRAALNALLPNLKKAEDTCWLADCYSQVLQATTLNLTTAYKNFFEKRAGFPKFKSKHGKQSIQYPQNVKIVDGESSPVRAASRREGGFPSVGNWRSRSVSEGFTRKGNIKLPGNIGIVKAKIHRPIEGKIKTVTVSKTPSGKYLASILTEVEGVSTPLNTSEKPAITEGKIYGIDLGLKHFAVVSDGEKISKYDNPKHLAKHEKNLKRKQKKLARKVKGSNSRNRYRKVVAKVYERVSNSRQDFLHKLSYKLVSDSQAVIVENLHLLGMVRNHKLAKSISDAGWGMFTNFLAYKLERKGGKLVEIDRWFPSSKLCSNCFYQIGEMPLDVREWTCPSCGTHHDRDGNAAINIRAEGIRMIKAEGSAVSAVGGEVSPKLGRKSKFGHSPVITEADTVLGTPSQCG

SEQ ID NO: 51399 - protein, 372 aa, unknown
  TnpB Polypeptide
MKTYKYPLGKQSNTIRIGNLLDDMWQVHKYFHEWQRQRYKAGLPYANYNAMDNHFKALKRTTHPHWKILPSQAVQQELMRIDNAYDRFFKKLGGRPHIKPRHKFKSITYPGPAGWCLKNNRITLTFRKWNPDTRKWQFDRVPYTFHKYRQWHGSISRITIKRDTCGDYWLCITTTYRDFRPLPTTGQSVGADFGMKDAFLTLSTGEKIQHPQPLKSNLKKLRSLNKALSRKQKGSNAWWWCVRQLARLYRKISNQRKDFHWQLASELCKKFDTIVLEALNLEGMKRLWGRKVSDLAFYEFVEILKYKCQKHKRDFRQVDQWTATTKLCSACGYHNKKLTLNDRQWTCPECGTHHDRDINAALNILQAGIAVT

SEQ ID NO: 51400 - protein, 415 aa, Lachnospiraceae sp.
MFVIEKEWQDAFRLADGVKSAVRTAERLTLKSKQRPTVRYDFGAEFYKFPSYLRRSAIAKAFGMVSSYHSNHERWENADPRERGAEPVLGKAGMIYPAMYRDNCFVRTGTYTARLKVWIRNTWDWIDIKLRKSDVDYILHHCSGFKECVPTLQKRGKNWYLDFTFQYNTNLHNTDIREQTILAVDLGINSCCTCAAMRADGTVIGRKFLKLPREYDCLRRRTGRIKRAQRHGSHDVSGLWKLADGINDDIASKTAAFIMDAAALYHADTVVFEHLDLSGKKRGSKKQRLALWKARKVQDIVQNRCHRVGMRISRICAWNTSRLAFDGSGKVMRGNESARTGGSYSVCEFQNGRIYNCDLNAAYNIGARYYIRELTKSIPVTEWQRIQAKVPACAKRSTCTLSDLIRLFSVLYAAA

SEQ ID NO: 51401 - protein, 412 aa, unknown
  TnpB Polypeptide
MTVIQQVEKHVIKKSHPYYNMLCEYTHLAKNLYNHANYLVRNEFVENRKWLRYQDLDKLLKEDLEFPDYRNMPAAQSAQQVLHLLDNNWKSFFRSIKDWSKNKDKYSGQPKLPKYKPKDGKMVLIVTNQQVRQKGELLHFPKSFCGFTVKPRCITLDNFEKINQVRIVPKGQSFCLEIVYSVLVDIELRSDNGRYMSIDLGLDNLATVVTNTGINPIIVNGKGLKSDNQYYNKKKAHYQSIAKQMNNQQYTNRLYRLTQKRNLKVEDYLHKASRYIVDFALENQINTIVIGNNKNWKQSISLGKKTNQSFVQLPHQKLIDKVCYKAELCGIQVVLTEESYTSGTSFLDNELPEKSYYNKKRRVKRGLFVSNEGIKINADVNAAFQIMKKVFPNVYTEGIEGVVLHPVRVGIV

SEQ ID NO: 51402 - protein, 432 aa, Halopenitus sp.
MYYAYKYRLKPSDAHREELDRHRDICRQLYNHTLYRLNKYQNEHGELPSMTALRSKLPDLKKWWDGLSDVYSKVLQTVVERLFDNLKGLSALKENGYGVGQLNWKPPREFRSFTYSQSGFKLDKKGGQTVLSLSKLADIPIRLHRPIPDDATLKQVTVKKEPTGEWFATFGVQMDREPPEPPETPEKCVGIDVGILKYAHDTDGTAVGSLDLSDERERLEREQRKLSRKQHGSNNYEKQRRRVAECHADLRRKRRDFLHKLSAYYAREYDLVAVEDLNVKGMMESPSNSRNTASAAWRTFLSLLEYKCKREGTHFVAVNPRGTTKECASCGVSTEKPLWVREHSCPSCGFEADRDANAAWNILSRGLEKVGVGYSESTSSESRCDSDVRTRAALSSTPVETALPVDTPVSAKRVVEAGSPTLKKRTASAVSE

SEQ ID NO: 51403 - protein, 649 aa, unknown
  TnpB Polypeptide
MPKIKLGKPPPFTNQQLEEQDNEDDLVVDDADDGNDVFVANAVVKMKLNKFSDNKKLNTKLGNVVFDMNQVLGEAYTFANFHLLRILHKKKEFPEVVIPVIDRNFYYRCIVAIGVSKSHDSTLGNELQESKCLFGSLRDPNIPKVILSGNNQVLADLSISMATMAKNHLWLNIAKRLLRFLGWSQPNMKPPLRKRIVDALLYKPTIPLNKLFRNTDPKEQEGIAVATELRTILALTTSKQQGSCAHLLIPIYFHILERTVTAKRVAPADKKFAGRTFTLLPMKNGYTINNIQFSAMALLGYIKAVKLEEFKGDGRDVDASKILRKYFNTKLVESNNRVFGNRITTDGVAVSILIQKKCALICPNSCLCEKRLSDLFRRSVLHRNDPRHVRVVAADPGFGDIAVTRDQYGKTNSYSSAKYYEKALYNVSRRRVNEWNKGTVELTSVIPRPETDSFEEFKDFTKSYLSNLVAILKHRFEKGYRNMRFLRYTNKKIAINEICEMIAPKDEMNVVGFGNWNGGKGTPIKRRCAGPLQEIKLQLDKMENTALQIIDEYLTSQTCSNCENKLSNMKAQHYIYKNVDGKKIKVDKGIEQIHKILHCRSRQVGKSSKKTSGCGTTWNRDVNASINILNLTLLLMQGLPRPTSLTRKR

SEQ ID NO: 51404 - protein, 402 aa, Escherichia sp.
VKRLQAFKFQLRPSGQQECEMRRFAGACRFVFNRALALQNENHEAGNKYIPYGKMASWLVEWKNATETQWLKDAPSQPLQQSLKDLERAYKNFFQKRAAFPRFKKRGQNDAFRYPQGVKLDQENSRIFLPKLGWMRYRNSRQVTGVVKNVTVSQSCGKWYISIQTESEVSTPVHPSASMVGLDAGVAKLATLSDGTVFGPVNSFQKNQKTLARLQRQLSRKVKFSNNWQKQKCKIQRLHSRIANIRRDYLHKVTTTVSKNHAMIVIEDLKVSNMSKSAAGTVSQPGRNVRAKSGLNRTILDQGWYEMRRQLEYKQLWSGGQVLAVPPAYTSQRCACCGHTAKENRLSQSKFRCQVCGYTANADVNGARNILAAGHAVLACGGMVQSGRPLKQEPTEMIQATA

SEQ ID NO: 51405 - protein, 378 aa, unknown
  TnpB Polypeptide
MKQFCGCARYVYNRTLSLEKSLYKKDNKHSFRYAEAANRLPEWKKKNPFLKECHSQVLQQSLKDLDRAYTNFFEKRAGFPKYKKKYQHDSIRFPQGIELDEAKRRIRLPKIGWVGYRKSQDITGVIKNVTVIRRGDKWDISIQTEYEVVSPAPNPSEIGIDMGVKRFATLSDGDFFEPLNAFKREREKLAKLQGKLARQKKGSRNSRKTKRKIARLHCRIADSRRDFLHKTSTQIARNHSVVYVEDLKVSNMSASAAGTKENPGKKVKQKSGLNRSILDQGWYGFFQMLSYKLKWRGGKLIKVDPRNTSRTCPRCGFVSAENRKSQASFVCVSCGYSSNADEVGAINILRAGRARLACGMSGAVRPLSAGTQRDLLQR

SEQ ID NO: 51406 - protein, 368 aa, Lactobacillus sp.
MFYRRVFRAYQLLGRASLLKTKQKTCDFNSQMIQSVFRTVSARYKTVREQLKQHSYRYKNEESKWIQVPRDLNWLAKPIQFRRPQADLVRQSNYSFVDGMRKISITTLGKRTKLSFTDKGFEKYFTDDWKLGTAKLIHNQGKWFLHIGITKEGSDFDTKNDPQIVGIDRGLRFLATVFDSEGKTSFFDGQKILHKRKKFIEIRRCLQSKGTKSAKKRLKQLAQRENRWMTDVNHRLAKTLVTAYGSHTLYVLEDLTHVTFNTDDLPKSLRNSHRSWSFFQLETFLTYKAQAIQSTVVKVSPAFTSQRCPRCGLVEKTNRHHDTHEYWCKQCQYRCNDDRLGAMNIEMLGQEWLNGVKHPKIEKLTTAG

SEQ ID NO: 51407 - protein, 363 aa, unknown
  TnpB Polypeptide
MVKVKKTIRCKIIRPTKLKSEQLNKEYSYLQDLLQLESLGLDFLPIYQSLKKKVYSANLQQALRFYKKIKPNKEYPISFRKDLIEIKKTDNKLSKYWIKIPIKERRGGLKLAIKSQPFNFEDYEICESKLYKKKNWFIDIVVQKEVKLNNTYSSVLALDLGEKYVCCSVNSADISMKPTFWGKEVRGIRRKYNYIRKQLGKKKLLKKIKEIGQKEKRKVEDCLHKISTAIVKQAIINNSIIVLGNLKGIRKSAKGKGKRFNRIVNNMPNYKLTRMIEYKANWNGISVMKVSEAYTSITCSKCGSKGKRPYQGLFKCLECGYKVNADFNGAKNILKRSLEYISRDGAVMSQPLQFWMDFPIQYQ

SEQ ID NO: 51408 - protein, 232 aa, Prochloron sp.
LIAGVDLGLNNLAAVSSNKKGFKAFLINGRPLKSINQQYNKAVALLKSKLFGSKKTSKRIQQITFKRNKKVNDYLHRTSDFIVKRLVAEQIGKLVIGKNEKWKQKINLGKVVNQNFVAIPHARLIEMITYKAQLVGIEVIVTEENYTSKTSFLDLEPVEKHKSYQGIRVKRGLFRSSNGTLINADINGALNIVRKVFGNEVFNSDSIEAFAVAPVRIHPCQLEHIASQFTVL

SEQ ID NO: 51409 - protein, 378 aa, unknown
  TnpB Polypeptide
MSMKLVAVAKLLPTPEQSGSLLATVERINAACNWLAERAFEGQTANKFTLHHLYYHSLRDLFGLSAQMAVRAIAKVCEVYKRDRRTQPHFKPHGAVVYDQRIMSFKVPDRVSLLTLVGRIVVPFVSGTYHHARLEEVRGQADLVFRRNKWFLYVSVEVVEAAPIDPRGWLGVDLGIRNLAVDSDGEPYTGVGVETVRQRMQRLRTTLQSVGTKSAKRHLHRLSGHEARFRSSVNHTISKRIVAKAKDTGRGIAVEDLTGIRERTTVRKSQRAMHGGWAFFQLRSFVGYKSVVAGVPVVLVDPRNTSRECPICHHIDKRNRKSQSEFRCVACDYAANADWVGARNIAARAAVNRPLVAGIGRETHSCESSLSLAASPSL

SEQ ID NO: 51410 - protein, 240 aa, unknown
  TnpB Polypeptide
MTECTSTVGVDRNLRNLTVGNENQIHYYDLSKAVKIAKTTIRIVASFKRDDVRIRTEISCKYGRRRTARTGHALHNATKTIVERAVQRREAIVMEDIRGIRSLYRRGNGQGRAYRRKMNGWSFGEAQRQIEYKARWIGLPVIRLSRRETRGSGVTCPRCGERLQSDKRLGCKLWCGKCRIVMDRDRVAAVNLARRGRVRFARSRPPIILEAQGGAAEAVMGNPTTVIPGVDAPKPTPTKS

SEQ ID NO: 51411 - protein, 229 aa, Actinomadura sp.
VKLVVQVKLLPTPEQAAALTDTLHYVNTAANQVAVLAFERFGLRSRELPLRTLCYGDLKAGGLGAQAAQHVIKRVVDAYTTLRANIRNGNLGGPASKRRRKAESKPITFRPDAAHTYDDRNLSWQLDAGTVSIWTVAGRRKHLKFACSPEQAKMLAAHRKGESDLVHRDGKWFLLATCDVPEPAVCEPVDWVGVDRGIVNLATTSDGDNHQGRRLSRYRRWQARKRAEL

SEQ ID NO: 51412 - protein, 402 aa, Microbispora sp.
MAQIVRRAYKYRFYPTPEQADELGRTFGCVRLVYNKALEERTRAYITEGHRISYMESSAALTRWKRTKELAFLNEVSSVPLQQALRHLQAAFAHFFAKRSKYPTFKSRKKSRAAAKYTRSAFRWRDGQLTLAKMRDPLKIVWSRPLPLRAQPSTVTVTRDPAGRWFVSILVEETIPPLAAVKTQVGVDVGITSLLTLSRPVNGLTGEDGKVPNPQYERADRRRLVKAQRNLARKTEGSANRAKARLKVARVYAGITDRRRDFLHKLSTRLVRENQTVVIEDLAVRNMVKNRSPARAISDATWRKLRSMLEYKARWYGRQVLVVDRWFPSSKLCSACGAQRESMPLTVRTWESTCGAVHDRDVNAAKNILAAGRAERQNACGAGVRPQRESSRTRQPAAKQEA

SEQ ID NO: 51413 - protein, 394 aa, unknown
  TnpB Polypeptide
VKTIKYTYKFRLEPTQNQQVLLNKHFGSVRYVYNYFLNQRKTEYLGNKKSITYNQQAGHLTKLKVEKDWLKEINSQTLQYSLKCLDTAYQGFFNKRTHFPKFKSKRNKNSFTIPQFLSIKKDILYIPKFREGIEMIMKRKINGLVRRATISKTPTGKYFVSILTELQYEPVQKSNQSVGIDLGIKDFLVLSDGTKIKNHRFTKHYERTLALNQKHLSRKTKGSNRYEKQRLKVARIHEKITNSRMDLIHKTTNNLINEFDIIYLEDLNVKGMIKNHKLAKAISDVAWGTFIDILEYKAIWNDKQVIHIDRFFPSSKACSKCGWINNQLALKDRNWTCKCGEKHDRDVNAAINILNEGYRKNISDGTSDYERGAKIRPISVGTSNETLKKKELVS

SEQ ID NO: 51414 - protein, 408 aa, unknown
  TnpB Polypeptide
MRVVEFKLKTNSHQEIAIQEAIRVGQFIRNKCLRFWMDSTKEDKLNYASLCRLVTELVHNPEFPFVGKLNSMARQASAERAWFSISRFYDNCKKGLAKKGYPKFKKFSRSVEYKSSGWKLTEDKKFIHITDKTGIGKLKLIGTFNRQLLDKTTIKRVRLIKRADGFYCQFVLDIERVEPLESTGKEVGIDLGLNHFLTDSNGDKIDNPRFLRKAEKRLKKAQRKLSKKKKGSQKRLKQKSKVARLHLKVSRQRKDFAVKTAKALIQSNDLVAYEDLKVSNMVKNRKLAKSIQDAGWSIFTRWLDYFGKIHGKFVVAVNPQYTSQQCSSCGNIVKKTLSVRTHICSCGCVLDRDENAAINILKKGLSTVGHTGTFGLDPINAWGENTSTFSEAILSKQVISVNQESPSL

SEQ ID NO: 51415 - protein, 309 aa, unknown
  TnpB Polypeptide
VSLDYKIRLSKGSNLKEYWSDFILCEYQTRPDVDLTEVNKVQNVRAVWNGDEWELHFVCKVELETNDSAGDEVAGIDLGIKNIDTVAFPDKYVLYPGNSLKQDKHYFKRAEYDTEGENGPSGKSMWARRKLADRETHFYHTLTDTIITECVERNVGTLAVSWPEDVREPDWGKTGNKKLHTWAFDRIYQYLVYKGEIRGVKVLKENEWNTSKTCSSCGDDTKSNRVERGLYVCSSCELVANADCNGSENMRQKITPSPHGEDRSNGCVVVREMESLVITKIFDFRTTQPSIHLFDRESRTFRTREQVVS

SEQ ID NO: 51416 - protein, 274 aa, Streptomyces sp.
VRTTPVKRAFKYRFHPTDAQAAELSRTFGCVRKVYNLALASRTQAWMRQERVTYNQTSAMLTDWKKTGELAYLNEVSSVPLQQAPCHLQTAFTHFFGRRARYPRFKSRKKSRKPAEYTTSAFRFQDGRLTLAKLAQPLDIVWSRPLSEGASPSTVTVSQDAAGRWYVSLLVEDPTVQPLPATDTAVGVDVGLDHLLTPSSRLCSACGTPRGKMPLHVRTWTCDCGTTHDRDVNAARNILAVGLTVSVCGAGVRPQRSTPGGQSAMKQKPPRREP

SEQ ID NO: 51417 - protein, 400 aa, unknown
  TnpB Polypeptide
MKEAVILKLRRPTARKRAWLENMASLFLQGSRLGLDFALANKTVNRSAIHRAAYRGCRDLGLPSDYSRMAVNNATQHARSYLGLRKSKRRAGNPVLSGSTIGLGVNAYAVVNQVLRVSTGKRGTYLWLPLCVPEKWRDRLQYVKGDAKLFKRNDTWFVMLPLRTPDSPTVRDGDPTVIGVDLGIVRLMTAKTPNGIKVWNGKEIRNRREHFAVIRKRYQRHGRMDRVKSTKGKERRWMADINHKASRELVDLASQYPNPIIAFERLDGIRNRVSGSKRFNRMLSSWAFRDLINKTEYKAAKVGIPVLFVNPKGTSRTCPKCGQSTRSNRPTQADFRCVACGYRGNADAVASINISVKAIDLLSHGPSDTARPARVQVASQPDGASGCSPSVHLNSNLASS

SEQ ID NO: 51418 - protein, 420 aa, unknown
  TnpB Polypeptide
MELTKKVALYPNQTMTKVLDNLCDYRRYCWNQGLDLWNNLYNQRIKMVPADLRKKSQLAIKDKTIVFSEEEQELLRLFPSPSNRVIRNTLVNNKADWQYSLSSRVLQLAIKDLTHSWSAFFESKKPKKKDSKKKKRKVGKPSFRSKKNPKQGFKTDRASIKDGKLVLDKPHKYKDAWYGIPFKGYDLPNGKIKHCAITRIGNSYYASIIIDHPKQPLPKTGRKTAIDANINHFDYTDGSFKVFPKRLEHLYAQIKHYQRLLARKRHENGKNATHSKQYLKVKTKLQRCYQRATAIQKDLLHKFTTMIYQTYDTIVIEDLDVQAMQMQKKVKNLHRSLFGRFRLYMEYKAIKFDKTLILADQFYPSTQRCSHCGHVKTGDDKIGLDGNKKHGTKHNEYICYSCGFVADRDQNAVLNLLALA

SEQ ID NO: 51419 - protein, 375 aa, unknown
  TnpB Polypeptide
MKQTLTYAVKFLPTPEQELLLFRTCKTFIDACGTVSEWCRENHCLSQKKIRDAMYLRLRSEYGLGSQMAQSAISRVIGNYRTIRENHGSPWHGKRACKYTSAGYDAVWNRDYSVSKAGVVSVNTLAGRVKLQADWSHVPEPYRRGRYGTARIIRRNGKWLMLIPMSVMLPDPPRPQRVTGIDLGLRFLAVSYDGDGNTRFHPGKEVTQKRAQYKALRTDLQKRGTRSARKRLKSIGNRENRWMTQVNHRVSKALVAECDRPTLLALEDLKGVRKATERVGRSQRYVQVSWAFFQLRQMVEYKARGAGHTVMLVDPAYTSQTCPKCGTVRKANRKHDKHLYVCANCGYRSNDDRVAAMNIQRLGYQSLLETGVSTS

SEQ ID NO: 51420 - protein, 341 aa, unknown
  TnpB Polypeptide
LEENQGIRLPARSVLGPVATVAATFAGGVQELLRQDGRLSTVQIQEERRSRHLCRIRVHLGLGQTGIDFGEDAGASARPLVAHTAEESPAVHRHRVPGPVRTLHVSILVEEEVKHLPASPSKVGVDLGTEHFAILSTGEKIPNPRHLNHYAKKLEQAQQTLSRKQKGSNNHRKARLKVAKAYAKVKDCRSDFLHKLSTRLIRENQTVVIEDLAVENLTRRCAPKPDPEHPGRYLPNGQAAKTGLNRSILDTGWRQFRTMLEYKAQWYGRQLTVIDRWYPSSQICSTCGYNSGKKPLNIRQWDCPKCGTHHDRDINAAKNILSAGLAVRACGDPRTAEATLR

SEQ ID NO: 51421 - protein, 168 aa, unknown
  TnpB Polypeptide
MNTTTAKRAYRFRFYPTPEQEQTLRRTLGCCRKVYNMALDARSEAWTVRHESVSYEDTSRMLTDWKKTKEYAYLREVSSVPLQQSLRHLQAAYRNFFAKTGDYPRFKSKKNGGAATYAASAFTWDWDKRELTLAKMREPLPVRWSRTLPRKARPSTVTVSLDPSGRCM

SEQ ID NO: 51422 - protein, 397 aa, unknown
  TnpB Polypeptide
MSSLYETKKLKLAPSKQLDDLATASGKLYSETLVTYRRILRKKGIFLSQYAMEKIHISPSLHAHTSDAIVGNFYGSIKSANERKKHGDKDAKFPRKRKRFFKLTWKSSGIRVKSGNLILSNGRGNEPLVISWQFELPLQIEIGWRKTGGYELRATYQLAACVNNGEKVAAVDLGEVRTAAIFDGDTVTVYSGRILRSKQRYLNKIKGELDSKIDTAKKGSARRKKLIKTKRRICNNLNNQIKDILHKQSSHIISTLHQQGVQRIVIGDVRNIRKDKDQGAERNQQLHQALYGKIRWNLTYKAARKGMDTVLQEESYTSKTCPCCGTRNSPKKRQYKCKQCGFEYDRDGVGAINILAKYRGDFGTCVVGGMAPPVVGVKFIPHLQCRLSVLNSRTPCL

SEQ ID NO: 51423 - protein, 213 aa, Oscillatoriales sp.
MARQASAERAWSSISRFYDNCKRKVTGKKGFPQFQKDCRSVEYKTSGWQLASDRKSITFSDKKGIGRLKLKGTRDLNFYQISQIKRVRLVKRADGIYVQFCIDFNRTENTKPTGNTIGLDVGLKEYYTDSNGLMVGNPKFLLRSEKVLKRSGRRVSRKAKNSKNRGKARQILGKRHLKISRQRKDHAVKLARCVVQSNDLIAYVGASPCRRQI

SEQ ID NO: 51424 - protein, 390 aa, Anaerolineales sp.
MIVRKGFKYRIYPNQEQQRKLAVQFGHARYIYNWGLGQSQDKYPGYNHLAKQLPILKKTSETTWLKEAHSQVLQQSLKDLDRAFQNFFAKRGGYPHFKSKRAKQSARYPQPKESWIAPDGRRIQLSKVGHVRLVLHRPLEGVMKNVTVSRTRSGRYFVSIQVEIEMATPIFAGGAVGLDLGLREFATLSTGEKIAPPQYYRKAQKKRRRLARQLSRKKLGGHNHEKARLRLARLDEKISNQRRDFHHKLSRMLVEENQFIGLEDLNVRGMLANHHLAKSIGDAGWSAFVTMLGYKGEWYGCQVEKVSRWYPSSKTCSVCGTKMEAMPLNVRIWQCPMCGTVHDRDVNAAINILKQSTAGAVENNAWGQSVRPSTDGYAGRTRKPTRFSGW

SEQ ID NO: 51425 - protein, 407 aa, unknown
  TnpB Polypeptide
MTCLAHKIELKASNKQKTYFKNACGVSRFTWNWALAAWEKSYQENKNLPKEERSPINGMALKKEFNKIKKEQFPWTFEVTKYASQQPFIHLNTAYGRFFKGISGKPKFKKRNKSVDSFYVGGDQIKIQNKKIRVPNLGLVRLKELPRFEGPIRSATFSRKADRWFVSLQIDTIISPKSPSKEAVGVDLGINSLVHTSDGVSIPSPKPLRKGLRALRRASRRLSHKQKGSKAWGKQKLKVQKIHMRISNIRKDTLHKVSSYFTSQYKSIAIEHLNVFGMLKNHKLSRAISDLGFYELRRQLEYKSEMYGNNLVLADMFFPSSKKCSSCGNIKKDLSLKERVYTCGCGISLDRDFNASLNLRNLIKIGPARSESKRREMTALDLWRLSIGSTSIDELGNEQQASMSKFA

SEQ ID NO: 51426 - protein, 289 aa, Planktothrix sp.
VLKAVKVRLYPTSEQELALAKSFGCARWYWNFALNACIQHYQETGKSLKLVTYKGMLPIDLGLKDFAIVHDGDSATKYTNPKHLYRHQKNLARKQKKLSRKNKGSKSREKFRKIVAKVHEKIANSRQDFLHKLSRNLVDESQIIVVENLNVKGMVKNRKLSKSISDVGWGIFVNFIDYKLQQKDGELIEIHRFFPSSKTCSSCGHIVDVLPLNIREWDCPNCNTHHDRDGNAALNIRNEGIRIKNKGGGNPVSADRACVRPDNRKASAVSLSRTVKGHRAEKSEAHTYS

SEQ ID NO: 51427 - protein, 381 aa, unknown
  TnpB Polypeptide
VLIYEYKVALHRAQSAAIDEAIRIVQFIRNKCVRKWMDEHGSRHDLQVYCAVLAKEYSFASSLNSQARQASADRAWFAIARFYDNCKSQKPGKKGYPQFQHDNRSVEYKQTGWKLEPDGKHIIFMDGCGIGRLRLVGNKKQQVETFPTKHIKRVRLVRRADGYYVQFGVKTDRIIEHVPSGKAIGIDVGLTSFLTDSEGKTVENPRHYRKAEQKLKRLHRQHSRKKKGSANRKKARTALAKGYLKVQRQREDFARKQANALVSSHDLIAYEHLQIRTMVRNRHLAKSIHDAGWGIFARWLTYYGLLHAIPIVAVPPHYTTQDCSACGTRVKKTLSVRTHMCPGCGVVLDRDHNAALNILQEALSSIRGGTVGHTETGRLAL

SEQ ID NO: 51428 - protein, 294 aa, unknown
  TnpB Polypeptide
MLLCKKIKIEVSDRDTEALEFMQAKCRGLYNWWVMRLRNGERWNLERAKKSLRESKAYDPELRCVYGKLLAEIYFRLDKAMQAFFQRLAEGEKKPGFPRVKPRHQFFTLCYPAMYLEVQGKTITLPTGGGGNWGPKRYPNIVAHLTEEPPVHFQEVAVSRDARGSYYCSFVYDDAEQHEQEDERKPPRSGNDVRPAPCARRGSWPLTWASRRWQPVSTTRGASITSAASKATAGTTSNWTRFVPNGTSARRSPAATSISHESTSGLPRKSVVSNRTVCTKPPISSHTDWLKGLW

SEQ ID NO: 51429 - protein, 458 aa, Oligella sp.
MKRLQAFKYELMPNGEQQRAMRRFVGSCRFVFNKALALQQAHYAEGKKKLSYSDLCKHLTQWRKSSETPWLADTHSQALQQVLKDLERAYKNFFEKRADFPRFKKKGQSDSFRYPQGSKLDQGNSRVFLPKLGWVRYRNSRDVLGVVKNVTVSSKQGKWYVSIQTEREVETPIHPSTAIVGIDMGITRFATLSDGSYLVPLNGFKRQEKALAKAQRAMSRKQKFSNNWKKAKATVQKIHARIANSRRDYLHKATTAISQNHAMVCIEDLQVRNMSKSASGTIAIPGKNVKAKSGLNKAILDQSWFEFRRQLEYKLTWLGGELLAVNPRNTSRTCPCCGYVAKENRRSQACFKCMGCDFEENADVVGAINVLRAGRMSTSFLLIAGALPFWEKLRRYRPIGAALMGVNAAVVGLLLAALYRYAWFNTIQTPKDFAFALIALTALMAWKLPPWLVVWLTS

SEQ ID NO: 51430 - protein, 406 aa, Scytonema sp.
VLHKAVQVRLYPTTEQQTLLAQAFGCSRWWWNYALNKSIEAYKETGKGLGRSALNALLPDLKKAEDTCWLADCYSQVLQATTLNLTTAYKNFFEKRAGFPKFKSKHGKQSIQYPQNVKIVGSDVKLPGNIGVVKAKIHRPIEGRIKTVTVSKTPSGKYLASILTEVEGENPSTAEGKIYGVDLGVKHFAVVTDGEKVSKYDNPKHLGKHEKNLKRKQQKLARKQKGSNSRYKYRKVVAKVYERVSNSRQDFLHKLSYRLVSDSQAVIVENLHVKGMVRNHKLAKAISDVGWGTFTNFLAYKLERKGAKLVEIDRWFPSSKLCSNCFYQVNEMPLDVRDWVCPQCGTHHDRDGNAAINIRTEGIRMLKADGSAVSAVGGEVRPKMGRKSHLRHSPMSTEASSAYAAG

SEQ ID NO: 51431 - protein, 514 aa, unknown
  TnpB Polypeptide
MSSVTRTVSLRPFACRETKTGTGIDLHDVLEELRIDAMVCATEAFKHITLENLEKLSEHDGLKPAVAGRRMGIRFSVSGRGTGRSRFEWMVREYAVSQLRSWCERSKINTGNTNNYVSTGYRRTNNSNKPAYLKPRLVLSATDKQYHAVRVRGSVVELDMVVNKRWVTFKFKTPSRFLEQGVKIIAPTISIDDRNRVMFNWHIELPVERAPFSDQYVVGVDVGLTNHTTAVVRNIETGKVVEASFMNRRVRSLENKIKRAKTQIAALYRKGRVSEVEPHRTALSNRRKELAILISQEVADLSWQYDNALVAVEDLSHIKNTMKHGRWVRGLIVKRITDMVESNGGRVMTVNPAYTSKKCHQCGTMLDMTDYHTPICVNCRIGWDRDENAAANIAMRLKDKHTKSCTTRKKHASKKRRKNSKGLLRPLKHPVKKMSPTPKAPQNKPKPNNSHCVHHKHAVIKTREGGVFPVLCAAGQPPLCGVTVPAVASSNGRSDNQPHDYPTGRHRSDDLCLS

SEQ ID NO: 51432 - protein, 442 aa, unknown
  TnpB Polypeptide
MQIISSYGVELRKQNIPIRQTLEIYRSAVSYLIGIYVQVWEELAEIPDAKRRFNAAEHLVHTTKKNHACFDFDIRFPKMPSYLRRSAIQHALGTVSSYKTRLDLWEKTDGKSGKPKLVYENHAMPVFYRDVMYREGAEGKDEAYLKLYDGHDWKWSCVRLEHTDMEYLRKYWSGKKASAPTLEKRHHKYFLRFTYTEEVTLTKTPVKEQIICSVDLGINTDAVCTIMRADGTVLGRRFIDHPSEKDRMYRALGRIRRFQREHGSAQTQGRWAYTKRLNTELGKKIAGAIVRYAEENHADVIVFEYLEMQGKISGKKKQKLHLWRKRDIQRRCEHQAHRKEMRISRICAWNTSRLAYDGSGAVTRDWENHSLCTFQTGKRYNCDLSASYNIGARYFIRELLKPLPATERSLLEAKVPPVKRRTSCVYADLRKLHSEMELLKAA

SEQ ID NO: 51433 - protein, 326 aa, unknown
  TnpB Polypeptide
VIAQVFLAIKGWMGSVKEFEKNSSKFHSKPKLPKYKSGKKQNMIVFTTASCRVKQDGYIHFIKNIIQPIKTNVEKEELKQVRIVPQATCYVVEVIYERKEQNLNLQEDNFLSIDLGLNNLCTCTNNVNQKFFIVNGKVVKSFNQWFNKTKAKWMSFVGDKGISKRLKRLICYRNLWINDKIHKISRFIIDFCKKNDIGTITIGLNKNWKQNINLGNKNNQKFVEIPFSSLIDKISYKAKLVGIDVKITEESYTSKVDHLAFETLEKHDIYLGKRKKRGLFQSSVNQLINADINGSIGIVRKVFGDSAVQQIIGSGLAFNPIRVNVL

SEQ ID NO: 51434 - protein, 369 aa, unknown
  TnpB Polypeptide
MLKAYKYRLYPNKQQEEQIQKTFGCCRFVYNQALAYRKELYKNKKESMNKIACNNYVNQVLKKEYKWLKEVDKFALTNSVYNMDSACQKFFKEHSVYPKFKSKRDNKKSYTTNCTNNNIEVSFKKNKIKLPKLKWVKAKIHRNFIGKIKSATVSQVPSGKYFVSILIETEHIPLERINNSIGIDLGIKDLLITSNGEKFDNLKLTKKYEKKLAKEQRKLSHKVKGSNNYQKQRIKFAKVYEKIKNTRLDYLHKISHKLISESQVIVSEDLAISNMVKNHNLSKSILDCGWYELTRQLSYKSDWNNRQYIKINRFYASSQTCNYCGYVNSNTKDLSVRKWTCPQCGAIHDRDINAAKNILNEGLRILQVA

SEQ ID NO: 51435 - protein, 297 aa, Mycobacterium sp.
MARFEVPEGWCVQAFRFTLDPTEDQARALARHFGARRKAYNWAVATLKADIEAWRVTGIGTVKPSLRVLRKRWNTVKDEVCVNAETGAVWWPECSKEAYADGIGGAVDAYWNWQNSRSGKREGKTMGFPRFKKKGRDQDRVTFTTGAMRVNLIAVISHFRSSGPSVRTRTHAGLNGSSPQAGRGCWQSRCAVTAPGSTPVCGSSCNARSSPTWHSPVHGLALTSGCAGWPRSPTRRAQCSKKCPIHGHSTRHSKSYGTPAVRGRGARKAHGATASAPPRFPGCIAGSTMSALITCMS

SEQ ID NO: 51436 - protein, 403 aa, Micromonospora sp.
VTRAVKRAFTYRFYPTEGQAAELTRTFGCVRLVYNMALRVRSEAWALRRERVGYQATSALLTGWKKTEELVFLNEVSSVPLQQALRHLQVAFTNFFARRAGYPRFKSRKKSRRSAEYTRSAFRYRHGRLTLAKMSEPLNVVWSRPLPEGACPSTVTVSQDAAGRWFVSLLCEDLIAPRTAPGEAVGVDAGLDSLLTLSTGEKITNPRHERTDRTRLTRAHRNLARKEKGSANRAKARLHLAKVHARIADRRRDHLHKLTTRLVRETQTIVIEDLTVRNLTRNHRLARAISDAAWRQFRTLLEYKADWYGRKLIVVDRWFPSSKLCCACGALAEKMPLNIREWTCRCGVLHDRDVNAARNILAAGLAVTACGADVRPQREAPSRTRQSAAKQETQRATAGILCL

SEQ ID NO: 51437 - protein, 442 aa, unknown
  TnpB Polypeptide
MFKRKFTTVTQLHEMNNQNIIDYIESARGTYAQALRKTFYVVKNSSDFDKSSYNTYLQETYGVLKRTANSIIADAQGRLNALKELKAYEQKQLTRKIKSLESKIEELEVKKADNCTMLRVGLEVILVKHRNLKRKLVAKKNKLNKMNQKLANLSYQIESGRYKLCFGTKKFLRSDYQAFVNQRDSQMSFVGSKSEQSCNQMLQLHFNPKNNQFELKLRKDIGGFKNAEDKFVYGRVYFKHHQGEIKKALRQHHSPLSFKIIKRNGRFYLYCTFEIQMDRSDFQTRSSYGTIGLDFNKGFVTLSETNQYGHLVDTQFLPYCFKSGNKTSTDLEVIAITVVKRALDAGKDLCIENLDFKDKKAHTQSKMEQKYNEMIHSLAYRQFVNKIEQCAYRNAVFVRRVNPAWTSWLAKQLYCPVMKLNTHVGASYVIARRGQGYKDTAK

SEQ ID NO: 51438 - protein, 182 aa, Aeromonas sp.
KIANPRHLINASRNLRRKQKALSRKKKGSANRGKARRQLAALHERVANARADFQHKLSHTMVDENQAVIVETLKSANMMKNHKLARAIGDAGWHGFIMKLEYKAQAAGRHLIKLDQWFASSKLCSDCGHKMPDMPLHQRQWVCPACGAGHDRDINAAMNIQQQGILELKAAGHVVSTHGGQR

SEQ ID NO: 51439 - protein, 382 aa, Firmicutes sp.
MLKPNDKQKTKLLESAGVSRFAYNWTLNRQQENYKNGGKFIFNEDLRKEFTKLKQIEEYNWLNNYSNNITKQAIKDACDAYIKFFKGKSSFPRFKSRKKSKPSFYVDTDKIQFNETHVKLEKLTINKKKNKQKFNWIRLCERDRFPNGEDIRYINPRVTFDGINWWISVSIEYPDNKDMPTNEGIGIDLGIEKLAVTSEDISYKNINKTKKVKSLEKKKKRLQRKVSNKYEKGREGNRYKKTKNIIKLENKLKKLNQMLTNIRHNYSHQITTQIIKRKPSFIVVEDLNVVGMMKNKHLSKSIGEQRFNEFYRQLKYKSEWNNIKFIVADKFFPSSKMCNICGNVKKDLRLSDRKYICDSCHLVLDRDYNASLNLKNYGKEIA

SEQ ID NO: 51440 - protein, 648 aa, unknown
  TnpB Polypeptide
MVRRLPVQMPSRVVGSYHWTVGQSTPNARFNCAVSGCQVDSHHLSASRASNRATSSAFQRIVNRRPRSWTRSRSLRSGLNQLSGAYAARRGSSGLIQSVVPCRRMTFGSGNWLITPSKSMNSNGLPIRVPPFTSFRAGMPGISMPGGTTLSFPFKSFSLYARSDIIVIMSQKVVIERVLIRGAAPYLGMCATEDGQQVPLYSTNPDVVMRWLCDGWRCRYNQLRSRRTKWDRESQTAVPLNGRPDMRSDRQARLECSWLTAMPAMVLQSPNRIENTDWWSANKRRRTLKKKHRNPGMMPRFKSRHDDLYFVCWHNKGSNANYRRLNRHHGEVVITGQNPGEYRLDGQPCRYSIHIRVRVSQPIRDYTSIGVNWTRRTLVFVNDPLPIGRERTGAMVGLDRGCAHTLATSDNRFLDLPKQRLERIDREIRRRQKAQARRVNMSGKTVREYRRNPSRTYERTGREISRLYAKAHRIIDDWQHKTTSMLVHDYDLIGLEDLNLQGMSRKAKAKPDPDRPGAYLHNGQSAKHGLNHALRSAGLAGIVEKLEYKTRLTGQNRLILVNPAYTSQTCSECGYCDSRNRESQADFECKQCHMSMNADLNAANNILKRGLNHLIGLDEAEHARTEPDAQPAYRGKDASAMTCETSTR

SEQ ID NO: 51441 - protein, 399 aa, unknown
  TnpB Polypeptide
LGSSKTSEETTGFSRGGESGVAIRLVCQAFVMELSYRYRLYPTVEQADALLGQMRLCRWVWNQARALRERVWRAERRSVGYGELCRHLTAARAEFDWLAGGSCDAQQQAVRELCAAYGRVWAARRNGKRAGRLPGYRSAKRGAWRTVRYTRNGHRLRAGKLSVAGVPGAIEVRLSRPLPSKPKSVTVTCDAAGRWHASFRVEVELEARATTGRVVGIDLGVAAAYALSDGHIEANPRHLGRRERALRRSQRALARKRKGSANRAKQKARVAREHARVADARRDFQHQQTTSLVRSHDVICVETLNVAGMTATACGTLGRPGRNVRQKAGLNRAILDVGWSQTVAMLDYKTKLYGRELRKIDRWYPSSKTCSACGTAKPSCPLLSGPTTVSTAAWSSTGT

SEQ ID NO: 51442 - protein, 539 aa, unknown
  TnpB Polypeptide
MADSSKWIATIPTPSLANIGKIDIATELLAPYHNLMVHFLSDIDLRFVRDNEYLPFTNAKPYQTKNDYNRLFESCKQRYAKQLEKGQTPKQPLDEQLNAIETYAVQTPLSARYVQTCYRQTLEIHLSWLTKLEDMVRSFLVQSSIVDEFFLATCYRINKLHLWYHSSVELNWHQTKEGDLLVPSKTHKANVTLPISSDILFFMRKLIKRARKCIRFPQLKRIKTLKLDENVAVLEASKNATHFDYFLKLSTLQKGKPIYLPLKRNPYLDDCLKKGERLPFVQVQLTDKTCTISAIVGYDRAPLRPSTESIGLDFGMVAMFTTSDGERHGLSSFTKLKIWDEELLALSKELQRQSIKLSTNTRYVQLQQRIKSYFKNEICRILNKLAKKNVGIFVVEKLDFRAAGLSRRMNRLIGRTYRSVVKAKLARLEEQYGIQIIEVNPAYTSQECSRCHYVSKDNRKTQKDFVCQHCHFSCNADVNAGRVINQRRSLMLEFPVYKKSSTSYTVRCQVQEASEACHRRYCHDKGIMTYEETLAKSSL

SEQ ID NO: 51443 - protein, 447 aa, unknown
  TnpB Polypeptide
MAENTSQETLALTLKLKILPESQNQVTAFKQTMATYKDACNIVSQYIFDNIPEAAETKTMSSLLSAINLQKTAMINGERIYDILTKQLRLPSQVTCEVFRSVISNYKTIQTVLKKQTVAGGYQYDDEGNILLYEKGKHKGEPKLAYIYKDLTFLQKPLCYKKPQLILSAGRSYSFIKDFSKASISVINDRIKLPFKLTAKQKELFTNPDWKRGNARLVHTGNKWFLHVSFTKNVSKPDIVAFNNIIGIDAGLRQIMTIYNAKTGQTFFEKGQAIAKKRRNYAKKRQSLQSKNTKSAKRRLKKLSGRENRWMTDVNHCLSKTLVFENPNTLIVVEDLTNVTFDTVSHRKKENRYEHHSWAFYQLQQDIAYKAREHGSYLIKVNPAYTSQRCPKCGTICKENRDKTNHIYHCNNCHYQSNDDRVAAMNIVQLGQMKQKGVKKPSFKTYN

SEQ ID NO: 51444 - protein, 419 aa, unknown
  TnpB Polypeptide
MQLSKKVKLYPNKTMTKVLDNLCDYRRYCWNQGLELWNDLYEQRVEMVPASLRMKSQCAIKDKTIKFSNDEQELLDLFPSPSHYVVQNLMIKDKEDWQYLLSSRVLLWTIKDLAKAWSAFFNNKKKKKKSKLKLKVGKPSFRSKKNPKQGFKTDRAQIKNGKLVLDKPRAYKDNWYDIPFRGYDLPDGKIKHCAITKINNTYYASFIVDCPKQSLPKTGKNTAIDANVNHFDYTDGSFAVCPKQLDVLYAQIKHYQRMLARKRKVNGKKATRSNQYFKVRTKLQKCYKRVTNIQNDLLHKFTTEIYHNYDTIVIEDLNVKAMQMSKKAKNLHRSLFGRFRLYMEYKADKFDKQLIVADRFYPSTQRCSQCRHVKTGDDKITLSGNKKYGTAHNEYVCYECGFEADRDYNAVMNLLALAN

SEQ ID NO: 51445 - protein, 520 aa, unknown
  TnpB Polypeptide
MSNNKIYRAYEIEFPKELKPTYDFLQGKLLEILTNTHYYDLFNNFPIYDDDGKLIHKGIFWQISRSLFPENYFDTWNLGGNAWYFRMILDTIWRALISLDSKRKLYDILKQHEFKLTKALREELCRKKLYPTNKELKNLIAYRAYPNLSKELTFIMDFSVSSPSTLKKVSENHYKLRVDKTTWCDYRLLIPLSVRLELTGRLAKPSFRRTASGRYHGMCSYEVKPVDMNLEDNVLGIDLGFVKLFSAVVLKTDDSLSREYTNSERLQALYRKLKRIYESKNLLHQRMSKSKITDYHIYTKNLRRSAELINLNTKIKNLKKTIMEELAAETISLALKEKCNTIKVEDLGVMQNITGKWNYGHYHKKLKDLAELYGINIVKVSPANTSKKHPVTKEIGVLRGRNIVFSNGKKYDRDYIAAINIALSPRGQKHRERTLDTLGRKKKREIFKPKTSNKKRKQQRLIKTQITKSFNQSKVREIVTYCHKDNELSLNYAVVLSYDSVMSNYRHKMPILTHKYYLNS

SEQ ID NO: 51446 - protein, 412 aa, unknown
  TnpB Polypeptide
MTNDTMLLIEKQIVRPSNPLYKELDELCFLSKNLYNSTLYTVRQHYFNTNKYLTAFTVIKDFTKENQVDFRALPASVSRYTVQLVDQNMRAFFALIKKKKAGKYTELVRLPKYLDKTSGRQIVHYPKQSLSLKKDGFVKLAKSNIKFKTSVSNNDIQYLKLVPCGNHIKVLIGYYKTMPTKKTNNKRFASIDIGQNNLMTITSNVFHPIIYNGKPVKSVNQFYNKIKAKEQSRLKKQNNVYWSKKLGKLTLWRENQISNYFHKVTNHFVNYCAANNIDTVIIGRNQQWKDGINLGKKTNQNFTSIPFGQLYDLLKYKLELNGITYIETEESHTSKCSFIDKEEICHHDSYAGRRVRRGLFKSKEGYKYNADINGSLNILRKYLTNQNAYSNKLHKELVAHMTNPRKLKVAND

SEQ ID NO: 51447 - protein, 369 aa, unknown
  TnpB Polypeptide
VKIIERAYKYRIYPNKEQQILIQKSFGCSRFVYNHFLAKKIEFYKNDKKSISYNECSKLLTTLKTELEWLKEVDKWALQTSLKDLDSAYQKFFKEHSGFPKFKSKKDNRKSYRTTFTNNSISVLEKHIKLPKLGKVKFRDKQFPQGRILNATISQEPSGKYYCSICCTEVELPQYQSTGSVVGIDLGIKEFCITSDGIIVENPKYLKKSLDKLAKLQKELSRKTIGSSNRNKARIKVAKRHEKIANQRKDFLHKLSTNIVKDNKIICLEDLQVNNMIKNHKLTRSIADVSWSEFVRMLEYKANWNNRQIVKVDKFFASSQLCSKCGCKNEEVKDLSIREWICPECGANHNRDINAAINILNEGLRNMTI

SEQ ID NO: 51448 - protein, 427 aa, unknown
  TnpB Polypeptide
VDPRRSLVFHLPPEGEVIPPSVRHLMDDFRLLVNQCLRHALSTRVTSKGVLSRFARTQALEARVTGTMGIAAAEIAGSLASGHRTRVRKGLEGRVPYVRAPFVRIPVGSFHFDLETGKLRLSLRRGEWTSLIVPVSNYHRKVLTHPDRRVTQAHIGLHRVVLIYAQVPPEPYVPKSLVALDTNEASMDGVEVDSDGASYVRVHFPEIPRIQWRHMGRRQYLGRKKSHDRRLSRQLLGREGRRERDRVRSRLHDLTRTLIDRLAASESALVLEDLTSMKTPRRRGSASGRRPPFRSRKLRRRLSSWPRAELHRQLTYKAQDRGVPILWVDPYRTSRTCPRCGEVSEHRRRVGTRFDCAKCGWSCDRQLNAGLNLGVTALRTHAGLGGLRLDPDALLEEVVRPLYGSANDRPARVERRGREGRGSDAPP

SEQ ID NO: 51449 - protein, 276 aa, Streptomyces sp.
VAYRIHEDTDRGRWYLTASWTIPLVHTVPLEAARVRGLIGVDTNADHLAAWRLDAHGNPVGEPLRFDYDLSGTAAHRDAQVRHALIRLLHWAKRHGLAIAIEDLDFQAETTREKHGRRKRFRNLISGMPVSKLRARLVSMAAELGIPIVAVDPAYTSRWGAQHWQEPLNTKPGNPLATTRQQWRSADAPWGTRSGDGRHRPHTTGVIVRGIGPSRPNRWLQGARETAPASPDHGHDPCAPDAERTRWTRTPNTVRGVRLSMSPGNRTHSRSVFRNG

SEQ ID NO: 51450 - protein, 371 aa, unknown
  TnpB Polypeptide
MKTFCFKLYHSQHNSKLHRQISAAGLIYNHCIALHKRYYRMYKKYLDKNQLQKHLVKLKKHKGFAYIREIGSQAVQDITDRIDRGYSLFWRNREHKLKASPPKFKRVRNYKSFTLKQAGWRLDELRGMIRLGKKWYHYFKSRNIEGKIKTVTIKRDPVGDIYVYIVSDVSAQEIIGRTGKSVGYDFGLKKFLTASDGNDIVSPLFFARSARIIKSKNQKLSHKQANSHNRRKARIDLARAYRKINNQRRDFHFKTARRICEEYVVICFEDLNLKGMQKLYGRRISDLGFYNFIQILKYEATKFGTQVVFIDRWNPSSQTCHKCGYKNPELKDLRIREWYCPKCKTHHDRDRNAAINIHRVGTSTIRGGRAR

SEQ ID NO: 51451 - protein, 377 aa, Okeania sp.
MKSIRTKLKLNNKQKTLFAQHAGYSRWCYNWGLSLWNAAYRDGYKPNTRKLREVFTNHTKPLYPWMKNLSSKVYQYAFINLAEAFKRFFKGLSKHPKFKKKGRSDSFTIDNCGKPIELNGWCHKLPFIGWVKTYEPIEATTQKITISRQAGDWYLSLAFEYTPTFTPKTTNVVGVDLGVKTLATLSDGKVFESVKSYRKFETKLSRLQYLNRNKNIGSANWRKAQLKIARLHRRVANIRKDALHKLTTYLAKNHGSVVIEDLNVSGMLANHKLAKSIADQGFYEFRRQLGYKCQWYGSELVVVDRFFPSSKTCSSCGHVQDMPLNLRTFDCPDCGISIDRDLNASINLRKRVLIGDVSSECKTHSTDAVGSTVNACG

SEQ ID NO: 51452 - protein, 375 aa, unknown
  TnpB Polypeptide
MRTFEFRLYPNQEQARLLIQCLKESRLLYNEMLETIKVQYEQKGTFPSKYDLTAAFKGRGGESVPATTVQMLADRLSKALKRFLAAKELGLADVGFPRFKPPNRWHSIQLRQYGTSRDVWLDADNKHLHVPAKIGKALKIKLHRPIEGTPKTVHLVHRADGHWYALIVCETHVQPEHSPLTCTHPAIGIDVGLKSFLTDSEGNTVENPRFYRTSQKTLRRKKGSHRRRKAARSTAQTHLKIARQRRDYHYKTAKRYAEHYQVIAVEKLSILNMVQNHSLAKSILDASWGAFLEILEDKAARAGHQVIRVNPRFTSQKCHQCGEMVQKSLSVRTHMCPFCGYITDRDVNAAQNILEAARPGHGLQESTYTEGCSVS

SEQ ID NO: 51453 - protein, 354 aa, unknown
  TnpB Polypeptide
MLVTKLIKVGVIKLTNSKKECLDHEYNGFQKWMIFGEDSDILSQHKRAKGWYYDKNNIKYKEYPLVVPYNQVQFRKKETKLTPYWIKISVRKRKGVGVWLPIKPHKELLDFKYLKDSLLIKNKKGNYELRLVFQYEVPEINYNNVLAIDLGERNIATICNSSNLKPIFYGRTIRGIRRHYNYLRKQLGEKKLLKKIKSLENKEKRIIEQELHKISNNIVEEAVKTSSMIFLGDLKDIRKSAKGKGKRFNRIVSNMPYYKLTQMITYKSAQQGIKVIKIKENYTSKTCSKCNQIGKRLKQGLFKCSNCKYEVNADFNGVQNILKRSLDYMFKDGVIGSNPKISPEEINANKINCI

SEQ ID NO: 51454 - protein, 461 aa, unknown
  TnpB Polypeptide
MAKVTRIAYSKNLTQSKYNRLSEMAKRLGSLRKEVWHRFGGIQGAGLTSRQIRDGWLRDGREFNVPARLWKATLRDAMADIEAYREAAKVKVRKAIHRRADSEEERKRLYRLLRNDKWPEDNFLHRMMRKHYKHGRTDVNNQIVLDTNSYKAFERGGRAWVKVQSLVRGERITIPLNTKEMPVGTLRLIIRNGLIEIHYAVDERGVCSTAPCGSRDIGIDKGYTEAFVDSDGDTHGAGLGEVLSAESDYLKLKYQRRNRLTAIAEAKPHKRRNIEQNNLGRKKLDARRKKHKQRVRDLAFKAAHSVVYKALVVVCEDLTSPIRGNSFGKNQNRRLSGWVKGLLAEAINAASRRRGASVTLVNAAYTSQTDSRYGILMGKRTGNQFYCFDGEVLDADFNAARNILARKNDTEIRLYTPYLRVKQILQERTAQRMGLLIQDSSCTLYPTKIQASTESELPDFV

SEQ ID NO: 51455 - protein, 356 aa, Gemella sp.
VEQQFLLEKTFGANRFIYNYFLNLKFKLYKFYKINLSYNNSSKALTELKKQKTWLKQVDCISLQQTLRDLDKAYQNFFSGKTRYPNFKKKQDKNSYRTNSNIKINNRYITIPKIGMLRYRDTYKLEECNISKIYNVTISKTPSGNYYASISAEVDIIAFEKTNRSCGIDLGLKDFLIFDTGEKINNPRILKNLEKKYRKLAKAVSRKQLKSNNRNKARIKLAKFHEKVVNTRKDFLHKLSTNILKEYDIICVEDLCFKGFMKTDNAKSYQDVAQSEFVRQLEYKANWYGKTISKINRFYPSTQLCSECGYKNPVLKDTSIREYDCPECGTHHDRDINAAINILREGLRILEENSNI

SEQ ID NO: 51456 - protein, 418 aa, Gemella sp.
MYLVVKQQIKHLTKEEYNILRELCRTAKNLTNQAIYNVRQYYFQEKQYLRYEANYYEMKHLENYKLLNSNIAQQTLKDVDTMFKSFFTLIKLAKQGKYDFKHIKIPNYLPKNGYANIVISQIRIKNNNILMIPFSNAFKKKREVNRIQIKIPPVLENKKIKQIQIIPKFNARFFEIQYTYEIEEKNIKLNTNNALAIDLGVNNLCTCVTNAGKSFIIDGRKLKSINQFFNKQNTKLQSIKDKQNIKRQTKQQYLISNKRKNRINDYINKICRYIINYCLFNNIGTLVIGYNQSFQNKINLGRRNNQIFTQLPFGKIREKLEYLCKQYNINYILQEESYTSKASFFDNDDLPIYNADNPQTYKFSGNRIKRGLYQTKNNYLFNADCNGALNILRKSKAVDLTVLCYRGELDTPKRIRIS

SEQ ID NO: 51457 - protein, 387 aa, unknown
  TnpB Polypeptide
MWKLLKSFKTEINPTEEQKVKIRKTIGTCRFIYNFYLAHNKELHESGKKFMSSSQFRVWLNNEYLPKHPECFWIKEAYSKAVTQAVNNGQAAFIRFFKHQSDFPKFKKKGKSDVKMYFVRNNPKDCQCERHRLKIPTLGWVRIKEKGYIPTTKDGYMIKSGTVSVKAGRFYVSVLVEIPDINIDNNSNEGIGIDLGLKDFAIVSNGKTYRNINKSAGLKKLEKQLIREQRSLSRKYENLKKGESTQRANIQKQKLKVQKLHHKIDNIRTDYINKTIAEIVKTKPSHITIEDLNVSGMMKNRYLSKAVASQKFYEFRTRLKAKCAEYGIELRVVDRWYPSSKTCHCCSCIKKDLKLSDRIYRCTCGYIEDRDLNAALNLRDAETYEVA

SEQ ID NO: 51458 - protein, 413 aa, Streptomyces sp.
RDSSRGEWFAKTRRLAVLEDRYEQVRAEREAGRVCVVRGGRRLLNTRHNLDAAQLTETAWRQQWEATRWFLTADGESGKRQGNETIRVTPDGEISIKLPAPLADLANAKRGRYVLAAKVSFPHRGEEWRDRIEENRAVAYRIHLDVTRDRWYLDASWTRKDLPVIPLDALRPDGVIGVDTNADHLAAWLLDEHGNPTGSPRRLDYDLSGTADHRDAQVRHALTRLLHWARTTGVQAIAIEDLDFTDSTTREMHGPRKKFRQLISGIPTGRLRARLLSMCAEAGISVIAVDPAYTSMWGAQHWQKPLTSKNRKTSRHAAASVAIGRRALGHAIRRRTTPPPAHQSDVQGHRTAQARPRDRRREETRPRIPGPRTRSVQPDAERTRATRTSKTVRDVRSDQGWVQDSLLLTDQER

SEQ ID NO: 51459 - protein, 306 aa, unknown
  TnpB Polypeptide
LTIKDRSATLSTIKGRVAVDYVLGDYQKSYLDDDDYEKRMGTLHYREDEGAFYLHIVIQKEVEERGGDRVMGVDLNLKNVAVTSTGSFYDGGELLWGQNHHFRVRRSLQHKGTRSAKQVLRRLSGRENRFVLNRLHTISRRIVEEADAHDCSYIAVERLTHIRERMDNRNDQLKRQMHNWAFRELREMLAYKASEYGICVEQIPPAFTSQTCSKCGHQSSTNRDSETGWFECNDCGYSIDGDCNAAKNIGLKLLTLPEGKRPSGLGDGHLALKSGTLNGNGDYTAYDNSSSDRESTDKPTTSVVGR

SEQ ID NO: 51460 - protein, 368 aa, unknown
  TnpB Polypeptide
MNKALRFRLYPNREQEGLMKKTFGCCRFIYNRMLADQKEAYEKDKSRPKLTPAMYKGEFLWVKEVDSLALANEQLHLQSAYQKFFADPKTGFPRFKSKHRDRDSYTTNLVNGNIVLDGNRLKLPKLTPVRIVAHREIPEEWKLKSVTVVREPSGKYYASILYSYENQVEEQKEAERFLGIDFAMHGLAVFPDGSSADYPGYYKEARVRLAREQRRLSHCEKGSRNYVKQRRRVAVFHEKIRHQRNDFQHKLSYRLAEEYDCICIEDLNLKGMSRGLHLGQGVADNGYGAFVEKLEYKLKDRGKKLIRVDRFYPSSKKCSCCGRIRKELKLSERIYCCECGNQMDRDQNAAINLCEEGKRLYQELRKSA

SEQ ID NO: 51461 - protein, 425 aa, unknown
  TnpB Polypeptide
MILVYKFRKSKTEHLDLLCSLSKKLYNQANWYVRHDFFNLENWLQYEDLNFILKNSTYYKLLKAQTAQQILKTLDKNWKSFFNAIKIWKKCRKNFNGIPNPPKYKRDCSNLLIFTNQNSKIKNNKIILMMSKLFRERYPEFKIPIEISIPYYKNKNFENYQQIRILPRRRLYEIEIIYKKDVKKSKLNIEKYLSIDFGLNNLITVVENTNSKPIIISGRILKSINRQWNKRKARLYSIKDKQNLKWTYRLDNITINRNSVITDYLHKSAQFIVGYCLKNQIGHICLGKLEKVKQNIRMGKRNNQNFVNIPIQKLKQMITYKAQLLGIQIHEVDESYTSKCSSLDLEPIQKHKRYVGKRIKRGLFRGSNYILNADVNGALNILRKVVGDGFIQNLSDRGYWFQPVRIRDMFQTSHKQKILRSVKIS

SEQ ID NO: 51462 - protein, 404 aa, unknown
  TnpB Polypeptide
MRGLSEHCGHARYIWNLAVEQQSWYWPGRGSAPSAAERYRQLAEARAAESWLAAGSSSVQQQVLRDFDRAMAAFFDPASPARKPGYRSARRGVQGFAIRDSRARRVNRRWGEVFVPKVGWVRFRWTRQVPGKLGMARVTCDRACRWHVSFPGPQPAVEREPTGRALGIDRGVRTALVTSDGQHYRAPGIGDRRAARYLALQRKLARQHKRSEGRERTRRQMALISARVADRRKDWAEKISTRLVRENGVVVLEQLNAKGMVRRPEAKPDPDRPGAFLPNRARAKAGLSRGILASCWGLLASRLENKAQACGVQIVFVDPRFTSQQCHACGHTQPENRESQAVFRCRECGHLDHADRNAALNILARGLRLLATGELVPAPAPGHGAHATHQPALPAAAGTTPEAA

SEQ ID NO: 51463 - protein, 416 aa, unknown
  TnpB Polypeptide
VLRQTQLAYRDALNFVSQYAFAHGKTSNALRLQKETYYDVRSQFGIPAQMACNIPRQVGATYKALWTRARKNAEARRLGYTKKRFKGLDTPPKYVSPTLTYSYGRDYSLKEGQRVSILTSIGRLILPYHGYDKHVAWLAVGATIGAGKLWYDRSKRRFYLLIALEVDIPDPTPESHTTIVGIDVGNRYLATVATLDNGTQFYSGKEVRAKADHYARLQKRLQQKGTRAATRRRIIIGQRERRLKLNTNHTISKHILSTHPKSFIGLEDLTGIRDRTKRKHGKKATKKQRRVNRHASKWAFAELRSFLDYKAILAGSLCVKVDADYTSQACPHCGYSSKANRPRKGLLFVCQCCHYTLHADLIGARNISLRTLAIRQDWMATGQLSGAPDVTDDEAKAARLQRYAELRWSPATSPAL

SEQ ID NO: 51464 - protein, 404 aa, unknown
  TnpB Polypeptide
MIVQRVERHIIKNDNSYYKMLDYFCFMSKNLYNFANYNVRKQFIEEGLWLQSNEMDKLFKQENMDHDYRNMPTASSAQQNLRLLEKNWKSFFNAIKDWKRNPDSYTGRPKLPNYLPKDGRNILILTNCNCKLKGSIIKFPKSFSGFILNTKVNNLQQVRILPKNKHLVIEVVYRVEIQEQKEDNNKYLGIDIGLDNLATIANNVGALPIIINGKGLKSINKFYNKEISHYKEIAKRMNNINYTNRMNDLTIKRNNLVSNIIHKASKLVVDYALSLGVNTIVIGNNKDWKRESSMSKKVNQSFVGIPHQEFIKKIIYKAENVGIKTILTEESYTSGTSFLDNELPTKQFYNKSRRVFRGLFESNDGELINADLNGAYQIMRKVFPNVKADGIEGIGLCPIRVNIV

SEQ ID NO: 51465 - protein, 433 aa, unknown
  TnpB Polypeptide
LLPETFGVVTANLTILFPVSGSMGGRVVRSLVFAAGLPDPKLRWLLQEFRLLVNRSIRIALREGIQSRARLTKAAYRTLSSEHAVYKQYIPSAFGVALAVLKAYRRRVRRGKRTNVPYLRRPLLKAENQSYRLDRGTGRLRIPVRGTEGVQLTLPLSTWHRAILQDPTWGLGSLTVTTDRVVVVVRKDAPEPYEPAAAIALDTNEASLDGVVAGNGEAALVGVRFPEVRVVQATHFRRRRLLARKKANDRRVMRYLLRREGRREHNRIEHRLHVASKGLVAEAKERRATLVLEDLKLPQGGGRGRRMRRRLSSWPQGELHRQIEYKAVAAGVPLIKVHPAWTSKTCPACGARRRDRVGQDFVCVVCDWEMDRQHNAGLNILKSALASDEALARAVRFRPGALRRDVVIPLYDLPAREGAREEPSGAESLAGVA

SEQ ID NO: 51466 - protein, 398 aa, Oscillatoriales sp.
MYQAYKFRLYPTAEQQQYFAGAFGCSRWLWNYSLNMSQETYKATGKGLSRGAIQGLLPQLKIEYPWLKKGAYSQSLQVVALNLSVAYQNFFEKKAGFPSFKSKHGRQSVSYPQNVKVGEKSIKLPIIGEVNCKVHRTFDGTVKTVTVSKNPDGKYFASILVDDGIKSVETTAKGKAIGLDVGLIDFCVTSDGSKYKNPRHLKKHSKNLKRKQQKLSRKQKGSSTRNKARRLVAKVHSKIKRVREDFLHKLSRKIVDENQVIAVEDLNVKGMVRNHCLAKAISDAGWGMFGTMLKYKAEKDGKTYIEVERFFPSSKTCNNCLHKVSEMPLDVRHWDCPKCKSRNDRDVNAAKNIRDEALRFLALGTSAAASGGNVSRGGKISVLSNAVPLEAGSPLSTR

SEQ ID NO: 51467 - protein, 138 aa, Lyngbya sp.
LDNLISKISKAKGKQKRRMRKAARPIVIRIQNLINELHHKAARFLVDNFDVILLPTFETSQMSKRQDRKIRSKTVRNMLSFAHYRFKEFLKHKAFETGKTVVDVCEAYTSKTVSWRGELVKIGASKIIKSGIDGQKMD

SEQ ID NO: 51468 - protein, 376 aa, Glycomyces sp.
MRAYRFRCYPTPEQADNLMRTFGCVRLVYNRALDARTKAWYRRRERVNYAQTSALLTKWKQRKDLAFLNEVSSVPLQQALRHLQSAYAGFWEGRTNYPRFKRKRTAGSATYTRSAFTWRDGGLKLAKHSEFLRLKWSRPLPRASAPSMVTISRDSAGRWFVSLLVEADVPTLPEHTEAVGVDAGLSSLFTLSTGEKITNPRHERRDRERIKHRQRELARKQKGSKNFQKARLQLARAHARIADRRLDTMHKFTTRLVRENQVICIEDLNVRGMMGDHSLARAIADASWATFRRLLEYKCEWYGRELIAIDRFYPSSKVCSACGTVNAAVSLAERTFKCRDNSCGHVEDRDVNAAKNILAAGLAVAACGDGVRPKRS

SEQ ID NO: 51469 - protein, 427 aa, unknown
  TnpB Polypeptide
MLTMNYRYRIYPNITQEQSLKEWMNVCRVAYNYGLREIKDWCNSRKCMVDRCSIVHEYITAADSPFPNEVKQLNALPKAKKVFPRLGEVPSQVLQQAIKQLHRAWDGFQRVGHGFPRFKKFGQFKSLLFPQFKQNPVDGVHFGKLSAAHIALPKLGMIPINLHRPIPTGFVVKQVRILNKADIWYADINIQCDVNVPNPMPHGHPIGVDVGLEKFLATSDGVLVKSPKFLKVMQSKLKLLQRRLSKKKKRSNNYEKQRIKVAKCHHTIDNTRKDFHFKQAHALCDAGDMVFMENLDYRTLAKGMLGKQMLDAGFGQFRTITKYVCWKRGKFFGEVNARGTSQECPECGATVKKDLSIRVHHCQNCGYLTDRDVASGQVIRNRGIALISTAGHVGIQNAYADGLPGIQIPESRSKSKTRKGITRKSLK

SEQ ID NO: 51470 - protein, 339 aa, unknown
  TnpB Polypeptide
MILTYKIRHGRDFSRELFLARKVAEFALQYKSQTTKDVKHFGLKAQISNQILRKYSRSKTIKSVGSVKLTINGYFVKIVDEQIKIPCLKLVLPIFFDKSFTKINQVEVGKQFAYISVSYKEPPIIKPEQVIGVDRNTKHHVLVASNICTGKVLKLGKECHHIHDKYKNMRRGFQKQGKLTMVKKVKDRESKIIRNLNHHISKALVLEARDSNAVLVFEDLKDIRQTAKQRKKQRYSLHSWSFYQLGQMVEYKSKKFGVPVAYVEPQYTSQRCSKNGCGHIDANNRKGNLFRCTKCGAVEDSGANAGFNIAYLCQQGIPRFNTDRDVLKGSTDTPREATP

SEQ ID NO: 51471 - protein, 325 aa, Halobacteriaceae sp.
LRTGCLEARRIRNETNRLDRQGGEWDDIKSVVVDNATHVKNTSQLIVDKALGELETYHDNKNDGWGRPDPYIDEMYPMVMNHREGYRLFPEDNGTVRFRITATRGTHVKGELRGSPDHFDRLQTAFNDEEWRVGTAEVIHKHTEWQLHVTVTHKNHRVASKNDADMRDSIDYGTRMNRRLHSLPFAALQEMVSYKSAWVRIPSDEVDPAYTSQRCPRTECQHTERANRHKKRFKCQQCEFQDHSDRKAAVCVVQNWFEEQETENVPSLETLPRVKKVRRAASGAGGGPDSHGALFASGVDRHGTSAQGETQAREELKTVASGVQD

SEQ ID NO: 51472 - protein, 433 aa, unknown
  TnpB Polypeptide
MVAITVIYMAWEVTRTVRVRLNVPDDRKSDLHATNTKFQYCANRTADWAWRYPDKNCVTSKTEAEAAIYDDLREETDYLHANLVQKAIKRATEDIGNCVDRLADGENTSKPEYNTFSIVYDKRAATYHRDKVSLATVNGRVECEYDLPENPEATPHDEYLLNDEYSFSTSTVHYDSEADEFYLHAAMELEIDVDSPEKAEDSKVLGVDCNVDDHIAVTSTGAYIGNADYLNHRRREFEKRRVGLQQTGTESAHNTFQRIGDRFGRWSEDYLQRCSKALVAEAKRHRCTHIAVEDLTQIRERISDDKKFQQWAFRVLQQQTKNKAELAGIMVETVEPSYTSQQCSKCGCTLDENRNGQHFECQECAYTVNADYNAAKNVARKLSLKIQQGQKSPVGGAFCQYALKLGVMTVNATEVASDTPVRQNESPPASPSL

SEQ ID NO: 51473 - protein, 432 aa, Moorea sp.
MFYARKLHQLLYNAGIADRRYEWRANQKSIGYIDQQNCLPAFKECWPEYKGLYSTSLQATLKRVDLAYNRFFKGLGKLPKYKPIRKYSGWTYPSKAGWKANTKGKNGTLTLNDLGVTIKMRGQAKFWGTPTTLTIVYKPSIDDWFASITVQIETPDIKYGSDSDLTYEDVVAYDLGTETAITTFNGAEFEEIKNQRFTKTLEPKLKAAGKEKRRKRAPYKKGVKASNRWKKANRRESQLKRKIGNQRKDWQHKVTSDLASRYDIGVTEKLNTKGMTRKAKKRSKRKKQKAGLNKAILDVGFGTLNKMLTYKIELKGGIVLQLPTKQLKPSQRCPKCGKVHKDWANLSSRYHVCDSCGFELDRDKTSTMVMFNAGLGNQPGYGTDLEKRGFPSSTSKASKQHTGSMRQLGKMKRQKSRSKDGSAETPSLYRAG

SEQ ID NO: 51474 - protein, 401 aa, unknown
  TnpB Polypeptide
MQQVKTIPLKLYNYGEELNALVQSYTSGMNYVSTVVYENGKPMGSDKIQKRVYQDVRNLGLLSQMTCNICRQVAGTYKTLKEQIKTGQAEWQEIQYRPTNVTFSYRRDFTITKEWVSITTLDGRKKYPFHMYSSAEQYFDGSWEFTASKLVKHKDGYYFHLSVSRTIPDPPELDTASTFMGVDVGMNWLAVVNTTDNKCRFFCGGEAKNLKNTYSSMRARLQAKGTLSAKRMLKHISGKERRLMANMNHNISKEIVQFALDNKVNCIGLEDLTGIRTNTIHKTRKENRYQKSSWSYYQLHFMIEYKAKAAGIRVEYIDPQYTSQTCPRCYHINKSNRNGLSFTCKCCGYTLHSDLIGARNIELRTRDSRYILESQGCEVSHPDECPEFLQSLKPRPLGRGS

SEQ ID NO: 51475 - protein, 379 aa, unknown
  TnpB Polypeptide
MQKTYKYRLYPSKDQKQILLQTLEHCRYVYNTLLEWLKQDKPNRYELQNRLPLLKQEHPELKQVYSKALQYEVHRLFYNLYGLSRLKKNHRRIGKLRFKPSHRFRTIHYNQSGFKILETGKRLDRLHVSKIGDLPILMHRPVEGMIKQVVIKHYLSGKWYACIIAEQDNSVVKQPIKTVVGIDVGIKYYCSDSDGLQFENPEYLKKSLKRLEYRQKDLSRTKKKSSNRNKHRIHVARLHERIENQRTDFLQKLSRYYVDHYDLIAVEDLNINGMIRNHHLARYISDASWDTFMQLLFCKAESAGKTIVCVNPRGTSQEYNHGEELDRDYNASLNILERGLRQVGLGWPEFTPADIGPLQELQYVPANLVVETGSHFQNQ

SEQ ID NO: 51476 - protein, 402 aa, Budvicia sp.
MKRRQAFKFQLRPNGQQEQDIRLFAGACRFVFNKSLALQHENYEAGNKFLSYVEMASWLITWKASSETQWLADAPSQPLQQSLKDLERAYKNFFQKRASLPRFKKRGQNDAFRYPQGVKLDQENSRISLPKLGWIRYRNSREVIGEVKNVTVSQSCGKWYVSIQTEYDVAEPVHCSSSMIGLDAGVAKLATLSDGTIFGSVNSFNTNQNKLAKLQREMRRKVKFSSNWKTVKRQVQNVNFRIANIRRDYLHKVSTTISKNHAMIVIEDLKVANISTSAAGTASLPGRNVGAISGFNPSILDQGWYELRRQLEYKQRWRGGLVLAINPTYTRQKCANCGHTAKENRQSQRQFVCLECEYTENADINGARNILAAGHAALARGEMAALGHSMKQEPTEASQTPV

SEQ ID NO: 51477 - protein, 386 aa, unknown
  TnpB Polypeptide
LKNKGIKYRMYPTKEQEEFLLQEVGNQRFIWNYFLDLSKTKYKVIKEGMSYSEMSIMLPFLKDEMEFLKIGNAASLQQTLRNLEQAFKNFFRRIKKGEASGYPIFKKKGQDDSFRLPDLNRFKIKKNSITIPKIGNIKINKYQPLNGKPKNLTIKREGKKWYVSITLEFNPKPLPKTNKKVGIDLGTVRFATGNKGQIKKSFLKVKGVDSLIRKIKTNQRELARRQKFSCNWMKTKSKLGKFHRQLANKRKDFHHKFSTMLVKNHDLIVVEDLKTSNMTRSAKGTLSKPGKNVKQKSGLNRSILSQGWYSFISMLNYKCDWYGKTLVKINPKFTSQICSCCGYKHKWNRKSQSEFVCGKCNMEMNADVNAARNILKRGLKLNPCFV

SEQ ID NO: 51478 - protein, 482 aa, Moorea sp.
VYKTIPVKANFSNEEKAFWVFQCEQANSLFNCAIYYTKQKHYDWLNKQEAYTTFWRGDELRCGWKAYKCTTKYPELDKALKMSPHYKGMAAQSAQQTLKTVGEAIASYNQLVGLYYKGNVDRPRFPRYRKKGGLAAVTFPKQALTYKDGLFYPSVSKESKPELLTKITLDPPDFIDPDWVKEVTIRPYYGQLWIDWVIEDGKEPVKENPNLDYSQALGIDHGGDNWLTCVSTLGKSFIIDGKKLKSMNQGYCRLVAKHKEGKPDFHWDSNLDRIQRKRNNQMRDAINKAARFIINRCLVDGIGNIVVGWNEGHKSRSNMGKINNQKFVAIPTKRLIERLKQLCSEYGIKLTITEESYTSKASFLDGDSLPKHGGKPVRVASALPKGWKPSGKRVKRGLYRTSRGKIINADCNGAANIIKKVTTQPFDLVKLVRESLTVPHRYDIFNSLKKSYRTRSVRVASAKADSGSLKPCHFASCRISRV

SEQ ID NO: 51479 - protein, 410 aa, Calothrix sp.
MIVYEFKVKGKNQQYRAIDEAILTSQFIQNKCLRYWMDNKDSKVDKYALNKYCAVLAAEFPFADELNSMARQSAAERCWSAIARFYDNCKKKVKGKKGFPKFKKNCRSVEYKSTGWKLSETRKAITFSDKKGIGTLKLKGTYDLNYFCLKQIKRVRLVRRADGYYAQFAIDVDGRIETQPTNQVVGIDLGLKYFIADNKGNVEPSPQFYRKSQRQLNRANRQKSQKFSPEKHKAKLQQSNNYHKARIRYARKHLRVSRQRKEYCKRLAYSVIQSNDLVAYEDLNVKGLVHNRHLAKSISDAGWYTFRSWLEYFGHKYGKVTIAVPPHNTSQNCANCGEKVQKSLSTRTHVCPHCGFQEDRDINAAINILRRGLATVGHTGTYATGDLPSWAVGVTLLSNGKSVNVESPPL

SEQ ID NO: 51480 - protein, 379 aa, Sporolactobacillus sp.
MTMKTFKLRLYPNAKQRQQIESNFGACRFVWNELLNMQIQRHDNGGKYINEFGMNYLIKPLKKQYPWLKEADATSLLAVSHNLHLAFQKLFKEHAGYPKFKAKRFARPAYRSNAVNGNIVLIDNKHFRLPKLGQISCRAGQLPDGKVKTATVVRSRIGKYYVLVTADIEIAQWSKTSASVGIDVGIADLVITSDGTRYGTKRFDKALSRKKHYWEKRLARRRRQAEKEMAWDKHFKVAVPRQLTDFKNYMKAKMMVAKYSEKVANQRRDYLQKISAKLIRHYDVIKLEDLKTKGLMRNHNLARAIANQSWRELRLMLEYKATWYGKQVVAVSPYKTSQRCSLCGYDDGKHELDVREWTCPQCHAYHDRDINAAKNILAA

SEQ ID NO: 51481 - protein, 452 aa, Domibacillus sp.
MKVAKSLLHKIINQTEIFHATLDIYNDALAYVIEVIDKEFDNTESLTTKSIVPAVEKLIHATKSNPLPKYKEFNERFYKFPSYFRRSAIASAFGKIKSFRSNYQNWEKEQKYTLSEGKNFKKQPPRLQVKHKEFPVFYRGNMFSRTSDTSAQIKVFHQNDWVWIDIEFKGQDHYKRGVWEWKENNPKLIKRGKKFFLSISYENKVTLSKTPTQEQKVCAVDLGLTNSAVCSIIDAKGTILGRTFIDQPKEKDRLQTLTNKLRKAQRASGRIHAPNFWRQINGHQQHIVRHTSHEIVKFASKHGCDVIVFEYLGRIKTPKGFYGARKLRFKLHGWRKIGIQNKVEEMAHCLGMRISRINPRNTSALAFDGSGKVERNPKKDLAVFSTGKVYHADLSASYNIGSRYFIRAFQKSISETKWLSLQAKVPELAIRTSQTLSSFISLHHALGLPEEA

SEQ ID NO: 51482 - protein, 166 aa, Salmonella sp.
MYPSSPSVVFMLHRISLAYWRRSSSTNVPDSSFSVSRLQTARSSAGRCSSRKSLAKSGLNRSILDQGWYELRRQPEYKQLWRGGQVLAIPPAYTSQRCACCGHTAKENRLSQSRLECLECGYTENADINGARNILAAGHAVLACGGMVQSGRPLKQEPTGVSQAQV

SEQ ID NO: 51483 - protein, 376 aa, Hydrogenophilales sp.
MKRTVSLKLLASAEQAKKLAELSYAFSQACNRLVPFVQAHRCWNRVALHHLAYYSIRDRFPALGSQMACNAIYRVASAYKALKSSKGIAKGKPVPAISFDRASVHFDHRTYSLRDCAVSLFTLNGRELVPFVCGKHQANLLASGSPKEAELVCRKGQWYFNLVLDIPDVPGITEGSVMGVDIGENALAATSNGKVFGGGKLRFERDRYLAHRRRLQSNGSRAAKRKLRAISGRERRHVEHVNHEVSKAIVREALALGVREIRMEDLTHIRDRIKAGKRVRARLHRWAFRQLQDFVAYKAQAFGISVVYVNPAYTSQTCSVCGDIGKREKNLFSCSCGNRRHADVNAAANIAGFAEPTGSARAAVNQPEFAHYASVM

SEQ ID NO: 51484 - protein, 407 aa, Nocardiopsis sp.
MTGNTVKRAFKYRFYPTDAQAAELSRTFGCVRLVYNRALAARTSAWFTEQRRINYNQASAALTEWKKDPDLAFLNEISSVPLQQGLRHLQTAFRNFFDQRARYPRFKSRKKSKASAEYSRSGFKYRQGQLTLAKMSEPLDIVWSRPLPEGAVPSTVTVSQDSAGRWHVSILCEETIDPHTPAESAVGVDAGIASLVTLSTGEKVSNPRHERRDRKRLARAQRSLARKQKAGANRDKARVKAARVYARITDRRKDFLHKLTTRLVRENQVVVIEDLTVRNMVKNGKLARAISDASWAELRTMLEYKCAWYGRELVTVDRFFPSSKLCSACGALHSTLALNVREWTCGCGITHDRDVNAAINIKAAGLAVSACGAGMRPQRESSRTGRSVSKQEGHGATREEAQASNHR

SEQ ID NO: 51485 - protein, 460 aa, Kitasatospora sp.
MQLRYSFRLYPSAGQRMALARAFGCVRVVFNDALRVREEARAAGAPFVLSSELSKRLTASKKTPERAWLGEVSSVVLQQSLRDLDTAYRNFFDGLKGKRPRTGPPRYKSRKDARQSIRFTANASWRITAGGKLRLPKIGDVPVRWSRRLPSTPSTVTVVNDSAGRYFASFVIETGSEEVLPAVTPEVGVDLGLGHFAVLSDGTKVDSPRFLRRAEERLKKAQRELSRKQEGSANRGKARTKVARAHARVADARREFHHRLSTKLIRENQAVAVEDLSVKGLARTRLAKSVHDAGWSAFVSMLEYKAARYGRTFVRIGRFEPTSQVCSVCGVKDGPKPLDVREWTCEECGAVLDRDVNAAVNVARAAGLAVPACGAQVGPVPVPAQRGEAGTHRDPQLRVVGIPLLQSREEVNATATASPPAPPTPPTAPAVTSASASPADACRTPAGHPSSTRQHPPNTR

SEQ ID NO: 51486 - protein, 402 aa, Streptomyces sp.
VIRAYKFLLRPTARQTVALAEMLADHCSLYNGALQERRDAWRHSSKTSIRYGDQSAQLKEIRAFDPERQGRWSCSSQQATLRRLDKAFAAFFRRVKNGEKPGYPRFKGVGHFDTVVFPKDGDGCRWDSTPHDAQTRVRLQGIGHVRVHQHRPVHGRVKTISIKREGRRWYAVLACDDVPAEPLPPTGAVVGIDMGVSHFLTTSDGEHIANPKFLDAAAAELADAQRHLATFPKRTRQRTKRHRAAARKVAKLHARIRRQRLDFHHKIALALVRGHDAIAHERLNTAGMTRTPKPKPDPGTPGAFLPNGAAAKAGLNRSILDAGWAQFLGILANKAESAGRLTVPVDARNTSRSCLSCGHVAKENRVTQAKFQCTACGFAANADHVGATNVLNRAGLVLCDVA

SEQ ID NO: 51487 - protein, 432 aa, Streptomyces sp.
MAKFRMYPTRAQEEQMLLHCAHARYVWNLAVEQHSHWRRWRKSAPAFAEQCRQLTEARRDNEWLRAGNADVQQQALKDFTKAKNAKFTSDFGEPTWRKKYVHEGFRVIGTDRLPEFESDGSPRQNAKGKQVMGRSVVVQKLNRRWAQVKVPGCSWVRFRLSRKGNGSGLPQAKTFRVTFRNDQWHVAFAVIPEPIDAPGTGEVIGIDRGVKITAALSDGRKLNCPQLTVKERAQIRKHQRRAARAPKNSPEKTAGYAKVAKLKAREANRRKDWCDKTSTMLARTYDLVRFEKLNIKNMTRSAKGTVQEPGKRVAQKRALNRAVLAQGWGLLRQRTEHKAPGRVEDVPAPYTSLRCSACGWIDKNSRKSQAEFRCTECGFTCNADENAATNVAVGQSGIPRPRRSAGTGGVTTATGRSSAREPQPTWVGIPLF

SEQ ID NO: 51488 - protein, 410 aa, Arthrobacter sp.
MLKRYRYRVYPTPDQEQCLARVFGCVRVVFNDAVAARNRARETGDVYSGRAELSAALTAAKRTPERAWLTEVSSVALQQSLADAEAAYRNFFDSLKGRRKGRKVQAPRFKSRRNATQSARFTRNAGFGLRKVGRDQGMLRLPKVGEVKTALSRDLPAAPSSVTIIREADGRYYASFVVDVAAMPRRTPKHATAGIDLGLEHLAVIAYNDGTSEKVQNPRHLKKKLAKLATAQRELARRQKGSTNREKSRRKVAVLHRKVRETRLDHHHKLARRIVDENQVIGTETLGITGLARTRLAKSVYDAGWGMLIRLIEEKAAEAGRTLVKAERSFPSTRLCSACGTIGEAQPLHVRAWTCRCGALNDRDINAAVNLLRVAAGHAETQLNACGGKVSPTPAPAHPDETGTTLSTAA

SEQ ID NO: 51489 - protein, 336 aa, Planktothrix sp.
LNIKHRDGNYTQPKDRLPLPIKTAPPKPPRARGGLGGGKLKLLGKWDIHTYNVKDIKRVRLIRRADGYYAQFCLNINVTDIQPKTGKEIGLDVGIESFYTDSNGYKEPNPKFLRKAEKSIKQSQRQIYKKVKGSSGRRKVRKVYAKKHLKVSRQRIEHAKIIARNVCKSNDLVVYEDLSVRNLLKNHCLAKSITDASWYLFRKWVEYFAAKFDKLAIPVAPHYTSQKCSNCGVIVKKSLSTRTHVCNCGCELHRDTNAAINILNLGKQARGGHPQSNANGLETSTPLDESLVEQVSRLKLESQCLQTVRVSTQINLAGRPKFVSFFRGKSDRYFSL

SEQ ID NO: 51490 - protein, 335 aa, unknown
  TnpB Polypeptide
MWNELLNDIKNKAYRTPKEIKTQYDFMYECDSQSFTTTWKHLNQAIKHKKNKTHQFPKFKSKHDHIQSYTTHVVNNNIRLEGKYIRLPKLGKMRLVQHRELPSESTIKAVTIKRDAGHYYVILRIVYEQTKEKASDVRQVIGLDYSLSHLYVDHNGNNPNYPKYYHKMMDHLAKAQRILSKKVKGSNHYQKQKQKVQKIHKKISNQRKDFLHKVSRELVNKYDLICIEDLDLKEMTKTKHFSKSIFDTSYHMFTLFLDYKTKDEGKSLIKINRYYPSTKTCSKCGNIQDIPLSQRTYICDCGHKMDRDQNAAINIATRGLISNLQTEYGTDSIAW

SEQ ID NO: 51491 - protein, 421 aa, unknown
  TnpB Polypeptide
MPRYECRVGRIETDITTFRILARMSWVATKLYNTALWNARDVWDKTGKIPTGIDLQKTVYESPYHVLLPAHTYQHPAHQVGNGFRSWFALRKSDKTARPPGFRKKEFLSSILFTEDAFRIAHNGIILLTISKGLKDELGYPDKYMPLRILRWGTPLPVGQIKQLEIMPRNGYFEVHAKILLPEPEWRTEGRIVAIDLGMRNPVTSASEDGKTEIYKGGKLLSHLRYWNKERARVQSAIMERPKGRKDWSRSLSRMSKRGARQVGQGIHALTKQIAEDCSSGNVKEVVVGDLGGIKKDKDGKKWNDKSSQNWQQFPIREVVSQLRYKLERSGIRLVEIDERGTSKGRCSACGNEDRKLMRRVHRGLFVCANCGGHINADVNGARNILARYLHQIGKPVEGSSGGLAQPSVRRWNGHLWKVVS

SEQ ID NO: 51492 - protein, 367 aa, unknown
  TnpB Polypeptide
MIEFDLTNRMAKAIIRTAKNQLKLLTESSRYYFNNLYKRRKSLYKRIQKYKSILSLSSTPLKQRKAIKLRLFWTQMKLNKVKQLIANGLKLHLTFGTKHLLKTNKQKFFAKRDNQVVYIGDKNETCGNQQLQIRFNHKYNRFDYKLRLDNKWVSDSEKYIFGSFVLKNKEAKSDILKTLSEKKSNPLTYRIIKREGTLYLQIMYRRETIDITRANHGVLGVDFNKGFISVSEINSGGGLESLTRYNYLHTGKTTKTKTSMLELVARLVTQAVSVGKDIIIEDLVSLDSNKKQEKTTSKDYNRMINSLKFGLFKRCLLNKAAKEGVAVHSVTPYNTSKIARKSYTNRMKLNVHDAASYVIARRFYQYD

SEQ ID NO: 51493 - protein, 418 aa, unknown
  TnpB Polypeptide
MPDAYRIERVRLYPTTAQRRQLESYAGAHRWTWNWALAAREAHFAAHQTSLSYSELGRALTVMQQQPDTVWLTDIPRRVKVGALRDLDKAYRAAFRRVRRGERPGFPHFKARKRGDASFEIPAETRFDGRRVKVPAIGWIRARGGRDVATTTTTARYFRDGAGDWWAALRYTVALSPADVSNVSAVGVHLEPGHALTISTGEIVNESRYVSQSDRKLRRLKRAVRRTQPGSGNRRRARRRFARATRHVANQRRNWQHQASRRLVDSHPRLMMQERGTTAHTTDPERQRAVWGADARRARISDATWGGLTRLIREKAAAAGCPVVVVPAEVPTDVTCSQCGHVREALPDLVNIWLCEQCGTLHERGVNAARNILSVGARDDTRSERRREAPGDAKRLRTHDKTPVGAGEGTFASASKKQ

SEQ ID NO: 51494 - protein, 395 aa, Bacillus sp.
  misc_feature (321)..(382): Xaa can be any naturally occurring amino acid
MKRMSQTLTVKVKLIPTKGQICLLEQSSHEYIKVINTLISEMVETKESTKKSTKDIEANIPSAVKNQAIKDAKGLFATKVKKSKYKIIPILKRPVCVWNNQNYSFDSTHISIPFKVKGKSTRLKVRALLIDKKNRNLDLLKHKLGTLRITKKSNKWMAQISVTLPTNERAGTKILGVDLGLKVPAVAITDDDKVSFFGNGRHNKYKKRKFRSVRKKLGKDKKMNAIRRMDDKEQRWMQDKDHKISRAIINFAIANRISVIRLEQLTNIRQTARTSRKNEKNLHTWSFYRLAQCIAYKATIAGIQIEYVNPAYTSQSCPKCXXXXXXXXXXXXXXXXXXXXXXXXXXXXXXXXXXXXXXXXXXXXXXXXXXXXXXXXXXXXXXMVWFRRGNEMPLS

SEQ ID NO: 51495 - protein, 475 aa, Haloferax sp.
MKVIRTVKVKLDVPNERCDDLHQTKTQFLHCANTTAEWAWRYPNDYCVTSKQKAENVLYERLRNETELTANLVQKGIRRAIEATKSGVARLKKGDNTSQPYFKAWSVVYDKRSATFHRDHVSLSTVNGRVECDYVIPSETEGTPIGEYLLNEDYEFRMSTLQYDRSTSEFYLHARMRRTIDEQEQSTTSSEDAKHRTVLGVDLNVDNSLAVTSTGAFIGNADKMSHRRREFEKTRGSMQQAGTRSAHLSIQSMNDREHRWMQDELHRASNQILVEARDHDCTHIAFENLTDIRDRMAGAKRFHAWAFRRLFQYVEYKAEIDGISVEQVSPAYTSQRCSSCGFTHESNRRSKHQFVCQKCEYELNADYNASKNIARKLLKRLHSGQTSSSGGAPCQCALPSGTLNLNGDFHASVDSTVEGEFTDKPTTSVVGYWLAVRPHYRLSPSGVRHPGRRIPPEWTVDRSPATPTGLCRAAR

SEQ ID NO: 51496 - protein, 426 aa, Haloferax sp.
MSTTQTANKTLEATLAPPTRCKEQRLQQTLSEYRDALNDAFEQDCTTMSATNDVVTPYNLPYQAKDALKSYVPKLHNTYNANELDDEHPLRYVNRAGKFDRDPSREYEICWNVPQPGRGTNFWIPLRLNPDQQELWDDLLDDESSTKVGELRLQKHRKTWTLHVTVEYEIKNTSGLPENPTRVGFDIGESMLVAGCALQHDTPTKPLLLNGKEAKRIRKEMFTTLKRLQERDASEWRIEERFSYYQNRLTDIIEKASRESVEYARQFDNPVIVMEDLTYIRESLDYGKYMNRRLHSWAFARLQGRIEDKAKDAEIPVRYVHPQYTSQTCHSCKHIGYRPRQAEFTCKNPECHVSTFQADINASANIARRVNPWGESLPWKQVGDDSSQDGSRCDTATTRCEQSETPSQMTLTTVRESKPTASVDDD

SEQ ID NO: 51497 - protein, 247 aa, Thermococci sp.
VNYLRRQQFFNHEKVDFNKTEKTVYEEIKREIGSATVQQIARKNAEAWRSFFTLIKKRRELPKWLKPKPPNYQKENGKRKPLIILRNDQYEIEGNKLILKGLGKFKRLEIQFKGRIHLRSKQGRLEIIYDDVRRKWYAHISFNVEEKLSKNGWIKIPRQPKGNLSAGIDLGVNNLMAVYVENGESFLVNGRPLKSIAFYWQKRIADYQSKLNKSGAKRSKKLKRMHKNPRYLNSSCYKPYIVYRVQK

SEQ ID NO: 51498 - protein, 359 aa, Ammonifex sp.
MEQTLTIKLKLYNPTQAKREMYQTMADRTTSFANRYLSLDKKERPKTSKDATKISEKLPSCVLCHAIRDIRAKKKVRRFKRLWPSFSYQNFRVEKETSQSGGAVWKASFPTLEKRVGVPIVVQSYQEKYLEMLLSGQAKQGSAKLVKSGKDWYILLSLTISVKEKQGEKIMGVDLGQIDLLVASVSGQALFFSGKELAYTRRRCAELRYRLQKAGAYRALARLGDKEHRWVTDANHKISRALIDFAVAHGVTKIRLEDLTGTRWTKQQRKERRRDHGRCLHYWPYYHLRQFIEYKAALAGIRVELANPDLTTLTCSRCGEVIRSRPKGRWFRCPRCKKIKHIDVNGADNIAQAISGFAV

SEQ ID NO: 51499 - protein, 411 aa, unknown
  TnpB Polypeptide
MNKFVNIKSSKVTVKFSNTGKLNKLNEFRKEYVKTVLGFVDVMWEMEDIPSLVTTEISKKVTSNLMSRSLQAAGKQASGIVRGTRKKNKQRLFIYDKLIKNGKLKLARKLLAKIKKTPVGKPTIDKVNPQLDSRFFEIILGGKTCFDGWLTFKQIGLKERISIPIKLTKHINKLQSSGYRLMKSVCLNRESVTLCFEKEAIPFAPEGNTIGVDIGIKALYSVSDGRQSSQDIHGHTLDTICRKLCRKKKDSKGFKRAQAHRKNHINMCLNQLSLNGVRTLKLENIKNLNRGKRVSKYLARWTYADIKSKLESMCKESGVLIQYIDQTYTSQRCSSCGWTRKGNRHGVSFKCKSCGFTANADLNASINISLNLPPIGRKKRLQHPNRTGFYWYVVGQEPIVPVVTEIKLTLE

SEQ ID NO: 51500 - protein, 485 aa, Streptomyces sp.
VKKFRPQPGFVVQAYRFALDPNAAQERALRSHCGAARAAYNWAVGWVTASWWQRKAEETYGVPEESLTEWRPWSLPALRKAFNAAKHTDPRFARWWEENSKEAYSTGLANASAAFDNYAKSKDGRRRGKRMGAPRFKSKRKARLACRFTTGTIRVDADGRHVTLPRLGTIRTHEPTLKLLTRVKAGTARILSATVRHERGRWFVSFQAEVKRDLERVARPDKAVGIDLGIKTLAVMADSTGEIRTTAHPGCYNRALGQLRRASRCVSRRQGPDRRTGRQPSKRWEKANAARNKVHHRVANLREDALHKLTTSVAAEYGTIVVEDLNVDGMLKNRRLARRIADAGFGEIRRQFDLKSRQRYATRMVIADRWYPSSKTCSGCGAVKAKLPLHIRTYQCDACGLVIDRDDNAALNLAALAAAAATGTGVAGDQDTAPAVSKPRGADQRTRATRPRRTAGAGRAGGATLPQQRQTETRDRPQAEALTLW

SEQ ID NO: 51501 - protein, 323 aa, Streptomyces sp.
MKLVVRVKLLPTPVQAKALEATLHACNEAATWAAHVAFDKKARRPLELRKHTYTEIRARWGLGAQAAQHAIKKTCDAYTTLNANLRAGRYGRPGTRRHTRAAGKPVTFRPTAAQPYDDRMLSWQHQARTVSIWTTTGRMKGVAFTGQAEQLAFLAAHRKGESDLVCQDGTWYLIATCDIDEAALNTHPNGFLGVDLGIVNIAVTCDGTRHAGRRINRKRENGKPQRATLHSWPFAQLGAFIAYKAKKAGVPVVYVDPAYTSQECSQCHHTARSNRPSQAVFACRVCGFVEHADLNSSHNIAHRGWYTWVRGAPSTAPELTLTA

SEQ ID NO: 51502 - protein, 139 aa, unknown
  TnpB Polypeptide
MNYQKQRLKVAKLHEKISNQRRDFLSKLSIQLIKNHDRICMEDLVSKNLMKNHHLARAIGDASWSEFCRMLEYKAEWYGKQIIKINRWFPSSQICSNCKMNSGKKPLHVREWTCGNCNCHHDRDLNASINILYEGLRLV

SEQ ID NO: 51503 - protein, 397 aa, unknown
  TnpB Polypeptide
VDSDDAVLLEDTVDTFLWSAQYVVDHAFEGEYVTTSKTTLDGETYDDVREQTDGFNGGLVQAARNKAAEACKSVVARWKSGKKASKPVFISPHVVYDKRTATFHDDYVSLATIDGRIEADYVLPDEDSDTPHSEYLFSDEYETTGAELHYRGGNWVLHVHCKMEVESDTSEQATTENGTVLGVDLGVNNLAVTSTGTFWTGDEFDHWRHEYEKRRGSLQQRGTRWAHENIQSVGRKEEGRFKLMLHRISNELIVEAHENGCSVIAFEDLTDIRERTGASWGHKWAFNRLYEYVDYKAEEYGIEVTHVDPENTSRRCSECGFTHPDNRDNEEFECLKCGYKNHADYNASKNIGLRYLRRNQTGADGGAPLGVRLNSGTLNVNGGYSPATAGGQNGSPR

SEQ ID NO: 51504 - protein, 349 aa, unknown
  TnpB Polypeptide
MIRKSTINLKFANIGKLNKLKIIAKEYQRVANIFIDKLWVQQQFSGSFVKDTTVDSWLSARLKQAAAKQALAIVKSQRKKKKKQKPTLNKLTMELDSRFVKVEQNVNHFDIWIRLSSIGDKVAINLPSQKHLHFNKFLQDGWIIKKSIRLRVNESGYFVDVFFEKEVPKLRTTGKQKAIDIGYKKLIVSSDGEFIGDYNIYEKVARKKQGSKAFKRALIERNELVNTSCKTLDLANVKELFAEDLKNVKHKSKGKIRKKFNNKLQRWSYRDVLEKLTMLCEEKGISFKKIPPQYTSQRCNKCGEIHKKSRKGELFKCVSCNFESDADYNASLNLLFMGRYGVHALQPIL

SEQ ID NO: 51505 - protein, 493 aa, Okeania sp.
VWFVVIFDIITQVDIKVDSGMLLKYKYKLKPHKRQAVIISNWLSMARKQYNYRLAERLDWFEATRTPVNACPLNVSVVPVERIYQNIPELRTQTRDGRKKDSNGNPITKKGDRHPNIVNGYVLWEIVQLADLAQAKKLFPEYKSMHSQVLQDVIQRVQSTMDNFTLPDKNGKTSGRPKFKGSHYYNSFTYPQLSNTNIVKNANGRCCVNLPKIGLVPFVYNRSIPLGFKVKTGTVIREADGYYISFTIEDKAVPVEVVEIQPTEENSKGIDLGLLHYAVTSDGEFIEVPSFFRFSEHRLSKLQMRLAKKPKHSKPWKILKGKIAKLHQLIARQRLDWQFKLAYHLFSDVNVIFIEDLQVANLVRRCKAKLGDNGQFLPNGQSAKSGLNKSLQDAAFGQFIQVLQYVAWKLGKRVIKVNPKDTSQHCWQCLSKVPKSLSERWHSCPECGQELDRDYNSALLIQKIGLLSTQEEDITSVKTAVRVSQTEESRALP

SEQ ID NO: 51506 - protein, 384 aa, unknown
  TnpB Polypeptide
MFKAIKIMLHPNNKQRTKLFQCFGVSRFAYNWALNRQQENYENGGKFISAFDLQKEFGLLKKLPEYDWLNLYSGVISEMAIIDACNAYKNFFKGNADFPKFKSKKKSKPSFYVNSSKIEFTHTHVKLAKLSGSTRKNRRKLNWVKLAEVGRVPINCKYSNPRVTFDGINFWVSISIDVEENNEIPTNEGIGIDLGVKDLAITSDGNIYGNINKTNEVKRLEKKERRLRRKLSKKCIANKYEKTKNVVKLEKELLKLNHRLTNIRHNYIHQVTSEIVSRKPMFISLEDLNVSGMMKNRHLAKAIQAQSFYSFKEILSYKAKWNNIQIIEVPTFYPSSKTCSVCGTVKSDLKLSDRVFICPECSNRMDRDLNASINLKNYGLLTLK

SEQ ID NO: 51507 - protein, 425 aa, unknown
  TnpB Polypeptide
MYEEKNRKIRENGKATRERHSKMDCRVFSVKVQENKLSRAKYEKIVRCFLEGKWLYNAVVATDSLSPEDTSTVQVKVKDKFETRKISNLSSQMKQSVVESAKQDIYNLSKAKKKGLKVGRLKFKKECNEINLKQFGNTYSIKGKNKIYVQRIGVLVVNGLEQINLDEVEFANAKLIKKPDGFYIHITVYSKKQPQSYTEKEILGLDMGIKDQLTFSNGVKVNFYLEESEQLKGLMRKLSRQVKGSNQYKQTLARIRRIYEQQSNKKQDVVNKLNSVLKRNYIICFQDELLTSWKRKKSKQKFSFGKQVQHGILGRVKDKLKKNNYNIMLDSSVPTTQTCPVCGCLTKHSLDKRKYHCNHCGFENSDRDIHSAKMMVLLSGYGTYRSLNTDTVSTKKLVSLLENLENLGVVVTANSMEAHLPLGCV

SEQ ID NO: 51508 - protein, 381 aa, unknown
  TnpB Polypeptide
MKAYKLRIYPNKEQTEKLENNLDICRQAYNMMLGELNDQIIIDKAQIQAILPDMKICEPKYKEVYSKTLQYECYRLFSNLSALRVLKGNGRKVGRLRFKGKGWFKTINYNQSGFKLDIETKRLNLSKIGDIKIKLHREVEGNIKQITIKKSIDKWYATILTDAIIKTKCGKGIIGIDLGIMDYLVDNNGNKVKNPKTLEKYKKELKLKQQNLSRKKKGSSNREKARTQVAKLHEKIKNRRRDFLHKLTTNLVKQNKLIAMEKLDIKQMSQQKFFTARNMLDCSWGEFGNMLNYKAENAGCLVVKVNPRNTSKMCSSCGSLQDMPLYKREYKCENCGMVLDRDHNSAINILKLGQEMSYVENNSSESLIQELSMKQEATSFT

SEQ ID NO: 51509 - protein, 374 aa, unknown
  TnpB Polypeptide
MNKAYNFRLYPNKEQEILFAKTFGCVRFVYNKMLAERKNVYEQFKDDKEELKKHKSPTPAQYKSEFEWLKEVDSLALANAQMNLQTAYNNFFRDKNVGFPKFKSKHKDKNSYTTNNVNNNIRIVEKKIKLPKLGLVNIKQHRQIPSDQIIKSCTISKSPSGKFYISILVEFEQEIIPVSPKKDNVLGLDFDMKNLYTDSQCIRADYPRFYRKALEKLAREQRKLSKCTKGSNNRHKQKIKVAKVHEKVANCRKDFLHKKSRELVNGYDAVIIEDLNMQAMSQCLNFGKSVHDNGWGMFTAFLKYKLENEGKLLLKVDKWFPSSKKCNECGEINKELELSDREWICKSCGCMIDRDYNAAKNIRDEGLRLLALIA

SEQ ID NO: 51510 - protein, 335 aa, Microcystis sp.
VNILLFKTLTLQLVNRRGVGLGLLFLGSITIARTKSLVKKDILNTLNVLILLSLKRITFTDGKNIGELKLIGSRDLFYFQEWQIQRIRIVKRADGYYCQLMLKLDARDITPQLESTGHCVGLDMGLKYLYADSNGNTVEPPKYYRKAEKRLNKLNRRKSKKFKRGQKQSNNYKKASQKYAKGHLKVSRQREEFAKKLALRLIQSNDLIAYEDLKVKNLVRNRKLAKSINDAGWSQLRKWIEYFGIKYGRLTIAVNPAYTSQECLNCGRLVKKSLSVRTHVCLCGYIEDRDKMAALNILKKATIGHIGSWSSDLNAWGDLSSILVGSNTCQDNLSQ

SEQ ID NO: 51511 - protein, 550 aa, Mycobacterium sp.
MIVGMRTRAQAVKVAAATGGAHLAGESKSDGVRGLSRYVDLGDDFEAHRAAVESVSVLFDLYDGDADGYAQTGSPGDRLPTGWMVTAAKFEVQWPTEPERAQLVRSHFGARRKAFNWGLAQVKADLDAKAVDPGHESVGWDLGSLRWAWNRAKDDVAPWWAQNSKEAYSSGLADLARALDNWSASRNGTRRGRRVGFPRFKSARRDPGRVRFTTGTMRVEDDRRTITVPVIGGLRSKENTRRVQRHVAAGRARILNMTLSQRWGRLFVSISYALRTPATARIPVQPTVRAGVDLGVRTLATVATIDTTTGVETVVEYENPAPLKATLAARRRAGRQLSRRIPGSRGHRAAKAKLARLDRRCVHLRREAAHQLTTELAGSYGHLVIEDLDVAAMKRSMGRRAYRRAVCDAAMGLIGPMLAYKTACHGAVLTVADRWFPSSQIHHGHTTPDGSACRLIGKGRIDKLLVCPLTGDVVDRDRNAALNLRDWPDYASCGPVGTTAPSVPGPTTSVGTGHGADTGTTGARGASLRPRPRGAGSGEAKNQTPQGDAA

SEQ ID NO: 51512 - protein, 291 aa, unknown
  TnpB Polypeptide
VRLIRRADGYYAQVVLQAERCVTHVPTGRVVGIDVGLLAYAMDSDGQAVANPRFIHHVEQQVRRRSQRLSRKSLDHKQGRKPKQNHAAQQRAKHNKYAPATPRVLRPVPALTSPPMALAPAHKPRPQRQSANWHKARGALAKTYLKLQRQREDFARKTASALVSSHDLIALEDLQIRNLVRNRRLAKAISDAGWARFRHWVEYYGRLHGIPVVAVPPHYTSQLCSGCGEVVRKSLSIRTHVCPHCGLILDRDHNAALLIREAGLARAIQQGVWEATAQRVLLSGTVGHTGT

SEQ ID NO: 51513 - protein, 393 aa, unknown
  TnpB Polypeptide
MDKAMKQVKNLEGETNYRLLKAKVAQQTLRQCDKNFKSFFSANKDWKKNPKKYKGKPKPPHFKQGAHDNLIYDYQAFSVKGETVVLEKGLEIPLPKQLTGVVISLLEIIPKHRYFYAIFVFEEITAFKQVSSSDKVMSIDLGINNLATCVTNGVIKPFIIDGKWLKSTNAHYNKRKALMQSKLSHRSKKWSAKLQSLTDWRNAAINDYMHRASHVVVKTCIDNGISKVVVGDVAKSLNGIKLGKRTNQNFVNLSLGQFVDKLSYKLGSHGIELVVTDESYTSKASFVDSDKMPKRYEPNAKNKWIMSGRRVKRGLYKSSDGTSLNADTNGAYNILRKTDSGFTFSALAKKVGIRVREWLHPVKRVGFLQPNVSLPVQPIAKIHSVLKEQISLF

SEQ ID NO: 51514 - protein, 222 aa, Cyanobacteria sp.
IFWDGKDWSASITVKCEPTRATGKGAIGLDFGCKVAVATSNGELIEAPKFQAKAQEQVNQLSKKLRRKRRPEKGKLRASRRWKKHQKQISKVKRRVSNQRQDWSHQVAAQIVSDNSLVATEKLNLKGMTRKAKSKGKKQKTGLNRSLLDVAIGMTKDKDNIKYKVEEAGGVYTEIPTRTVKPTQRCVKCWKLTKKTLNDRVHNCQHCGHSEDRDIKRISSYA

SEQ ID NO: 51515 - protein, 299 aa, Cyanobacteria sp.
LTVGQTEERNLPCFFKGLGKSPRFKKRRNYRGWTYPDQAGWKADSDGKNGYLQLKDLGLKIKMRGQARTWGTANTCTIFWDGKDWSASITVKCEPTRATGKGAIGLDFGCKVAVATSNGELIEAPKFQAKAQEQVNQLSKKLRRKRRPEKGKLRASRRWKKHQKQISKVKRRVSNQRQDWSHQVAAQIVSDNSLVATEKLNLKGMTRKAKSKGKKQKTGLNRSLLDVAIGMTKDKDNIKYKVEEAGGVYTEIPTRTVKPTQRCVKCWKLTKKTLNDRVHNCQHCGHSEDRDIKRISSYA

SEQ ID NO: 51516 - protein, 532 aa, Bacillus sp.
  misc_feature (375)..(375): Xaa can be any naturally occurring amino acid
MILAKKVRLIPTPEQEKVLRNHAGAARFAYNYCKRMSDRYYKLFGKSVSQLALQKRFTKIKKRKRYEWLKDINAQVPKQASKDFDTARKNSFKKYKNGYHTSYKSKKDLIQGFYANYERLVIGKKVVHIQSIGVVKTSQQLPRNKKTSNPRVTFDGRHWWISVGFQEDYELQELTNESIGVDVGLKELFVASNGTKERNINKDAKVKKLLKRKKSAQRDMSRRFKKGVKIQSAGYEKAKAEHLRLSRKIMNIRNNHIHQATATLVKTKPMRIVVEDLSISNLLKNKKLSKAFSFQKLNFFFRCLSYKCEKYGIEYVKADKWFASSKICSCCGVKYDHSVQPEGQWSLKIREWRCVPCNSHHDRDVNASINLSRWXVKFIVSDKMRLEYRLNDETKGYPALWNYANISNSEIIARMTCEYFIKEKNTYVVTATSVDPDGTAVIYIQKEVFANDPSDPTYSHIGFEIRELSETSSSLVDSQDVWNYEEILPSLHSDIIYIQRDGMSMEFSLDSREIDEDRKCYIYYGNFTGESR

SEQ ID NO: 51517 - protein, 372 aa, Clostridioides sp.
VIAVKKAYKFRMYPNKKQQELINKTFGCCRFVYNKYLAKRIEVYKNDKETFTYKQCSSDLTNLKKELKWLKEPDKFSLQNALKDLENAYEKFFKEKTGFPKFKSKKTNRFSYKTNFTNGNIMYFGQHIKLPKLGMVKIRDKQVPQGRILNATISKEPSGRYYVSLCCTDVDIEAFENTNNQIGLDLGIKEFCISSCGDFIENPKYLKKSLNKLAKLQRELSRKTIGSLNRNKARLKVARLQEHIANQRKDFLQKLSTKLIKENDIICIEDLQVKNMIGNHKLSRLISDVSWSEFVRQLKYKANWHGRQIVKVGKFFASSQICNKCGYKNEEVKNLNIREWICPSCNETHDRDINASMNILKEGLRLITIQNK

SEQ ID NO: 51518 - protein, 439 aa, Streptomyces sp.
MGELVWEKRQFGHRARLALTPAQVRLIDDQAHAARAMWNQLHDLWQMTPRCQRALTRMDQVLRQARKEIDWYAVLPAQAAQAVLKTYFQAWRNCWDGRADEPNFKARFRTALSVDIPQGRDLQIKRVHRRWGMVNIPKVGRVRFRWTKDLPVGKLADKENRITGARLVKDGLGWHIAFRIQTLESKPEPHQGPEVGIDAGVNLPLALSDGNHQDHDRPPRLPDGTADRDKWLTPDEKAKLLRLEHCAAHRKSFRKPKERSSNRLHATYDQIKQLRARATRRAIDWQHKTTTAIAKQYGTVVVEQLQITNMVKSAKGTIENPGRNVAQKSGLNRSISQEAWGRTVTLLTYKTARNGGTLVKVPAPNTSLRCSACGFITPGSREDQATFVCKNPDCGWSANADWNAARNVLHLYRIGLLAIPAAGRAVVRRTRGVKPAAAR

SEQ ID NO: 51519 - protein, 537 aa, Streptomyces sp.
VAPSFVASAPGGVAVRTRLKHLSPGDEEVLRLVGAHLGSLASMDLRTRCADGLEHSGDRWALRKRELTPVSSSRWAGAITKASHDQWVLARRGQWAHLRSLEAGVRTIAHRLSLPIGQKGAEGAPGGYRSRREWHAKARRLRVLEDRLSAVRADCDAGTVHVVRGGKRLARTRHHLPAAGLTEAHWRRRWEAERWFCQADGESGKRFGNETIRVSPEGVVSIKLPAPLADLANAPHGRYVLAFGVRFAHRGTEWADRVESNRAIAYRIHLDVGRGRWYLTASWQIPPTATIALDAALAHGVIGVDMNVDHLAAWRLDVHGNPTGGPRRFCYDLSGARDHRDAQVRHALTRLLHWVKACGVRAIAVEDLDFGAEKSREKHGGKKRFRQLVSGMPTGRLRARLTSMADHTGIAIIAVDPAYTSRWGAQHWRKPLTTRNRKTTRHDAAAVAIGRRAQGYPIRRRAAPPLHDQSDRAGHRTVQARPGNPGREGTRPRIPGPRTRSAGPGCGSNAGDQNAQHRSGRSAEHGPWQQDSPPLSL

SEQ ID NO: 51520 - protein, 324 aa, Streptomyces sp.
LLFVKLVVRVKLLPTPVEAAALEATLHACNEAATWAASVAFETDARRVLELRKHSYAEIRERWGLGAQAAQHAIKKTCDAYTTLKANLRNGRYGRAGSRRHTRASGKPVVFRPQAAQPYDDRMLSWQHQARTVSIWTSAGRLKNVAFTGQDGQLEVLAAHRKGESDLVCQGGKWFLIATCEIAEAALNAHPARFLGVDLGIVNIAATSDGERHCGRRINRKRESDRKLRSKLQKKNTKSAKRRAKKYAGKEARRNKDINHKISKRIVAEAERTGRGIALETLTGIRERASATSNSGADQTDCRWVSHGLMGGRTGRSAPTAPMI

SEQ ID NO: 51521 - protein, 549 aa, Streptomyces sp.
MAEPKKMQLRAIDAPFVALGPSGVAIRDRLKRLTPEDEMVLRLVGEHLGHLASRDLKARCRDGGDHCSDRWAARKRDLTGASSSRWAGAITKATHDQWALSRRCQLAHIQGLEAGVRMLMHRLSQPLGEKGTKRAAGGYRSKSEWFQKTRRLAILEHRLDVARADREAGVVHVVRGGRKLLGNRHNLEAAQLTEAQWRERWEAQRWFLQADGESGKRYGNETIRVTPDGEVSIKLPAPLVDWANAKHGRYVLVSRVAFAHRGQEWADRIEGGRAVAYRIHYDVERRRWYLTASWQRPVVQTIGLEAARAKGMIGVDTNADHFAAYRLDPHGNPVGDPHRFSYDLSGSAGHRDAQIRHAITRVLHWAKGCGVAAIGIEDLDFTAEKTREKHGRRKRFRQLISGMPTGKLKARLVSMAAETGLSIVAVDPAYTSMWGDQHWRKPMRTPRRKMSRHDAAGIAIGRRALGHPIRRRTAPPHDDQSDCRGHRTVQADRGAREREGTRPPVTDRAHDARRRAGTQQGTRGTSASKTVRDARSAGQWVQDSLLLTD

SEQ ID NO: 51522 - protein, 390 aa, Streptomyces sp.
VKLVVRVKLLPAPGQAAALEATLHACNEAATWAASVAFETDARRPLELRKHTYAEIRVRWQLGAQAAQHAIKKTCDAYTTLKANLRNGRYGRAGSRRHTRASGKPVVFRPQSAQPYDDRMLSWQHQARTVSIWTSAGRLKNVAFTGQDGQLEVLAAHRKGESDLVCQGGKWFLIATCEIAEAALNAHPARFLGVDLGIVNIAATSDGERHCGRRINRKRESDRKLRSKLQKKNTKSAKRRAKKYAGKEARRNKDINHKISKRSVAEAERTGRGIALETLTGIRERARLRKPQRTTLHSWPFAQLGSFIAYKAKRAEVPVVYVDPAYTSQECSKCHHIERANRPAQAYFACRVCGFVEHADHNASHNIAHRGWMVWVCGAQSTAPELTLIV

SEQ ID NO: 51523 - protein, 507 aa, unknown
  TnpB Polypeptide
LLNRAILVIIPSPGLPGIVRHVLAKQQSLHQIAARCPRLQSWGGKPRCPQAEQTVHQSCQFDNLMNPCYTPCMKVTITAKLKLSPTPEQFAALRTTQLAYRDALNYVSRYAFEHQKMSNKVRLQEGTYSEVRARYKLPAQMACSVPRQVGGTYKTLWTKVKQNGAHRKAGMTKKRYKGLDHPAKFLSPTLTYQLGHDYSFKTACHVSILTLQGRVIVSYSGYEKHVALIQHGAHIGAAKLWYDKPKKHFYLLVSLEIEGADPLPETHRRVVGVDVGQRYLAVTASIQDDPSFYSGKQVRAKADHYARLTKRLQHKGTRSATRRLMAIAGRARRLKQDCNHLISRRIVDKHPQSIIGLEDLTHIRERTKRKHGKGASKKQRQANRHASQWAFAELHGYIAYKALRSSSMAVKVDAHCTSQACPRCGYTSPTNRPNNGLLFRCQSCHYSLHADLVGARNITLRTLLARQDWASTGSLSVTPDVSSDEAKAARRLRYAELRWSLDASPQL

SEQ ID NO: 51524 - protein, 374 aa, unknown
  TnpB Polypeptide
MRKAFKYRLYPTDTQAAAMQGQLDIAREVYNACLEERRACYRATGKSLTYYDQANQLKEIRQLRPDGATANYSMLQATCRRAHRAFENFYRHRKAGLTGGFPRFKGYHRFDSITFPSYGDGCKVVDNRVRLQAIGSIKVKMHRSVEGVIKTVTLKRACGKWYAVFSCDVGTPTLLPATGQSIGIDVGLTHFLTTDTGATVENPRPLRRTRRALRVAQRALARCKKGSARRGKVRHRVAALHQKVANTRRDVHHKTARTLVDANDTICHEDVAVANMVKNHSLAKAIHDAAWGQFITILTSKAEEAGRQVIAVDPRGTSQTCVCGATVPKTLRDRWHDCPACGLSLPRDQVSAILIKRLGHSRQAQTWRDTASVA

SEQ ID NO: 51525 - protein, 387 aa, Erysipelotrichia sp.
MKVQQVEQHQISRNHKFYKECDDLAFKSKNLWNATNYCVRQQFFETGKYLNYNEVNKIFTHENQPDYRALPAKVSKGTQRLLDKAYKSFFGKTGFRRLPNYLHKTDGRQVVHYEKGALSTVIHGFVKLSKTRIILKTNKTPDFVRIVPKLDFYTIEIGYSIDIPAPSTTTGHRFASIDLGLNNLATVSSNVMAPIIINGKPIKSMNAYSNVLIANIQSITDGSSHKLRTYYRKRYNKIKDYFHKSSNWLVNKLLDNNIDTLVIGKNDGWKHKSKLKNFVRIPYQLFIDMLTYKCEQSGINVIMQEESYTSKSSFYSKDPIPVFGIKNTIEFNGKRIHRGQYKDTSGFTLNADLNGSLNILRKSAVWTDKLFDDCIKWAKQPMLKYSF

SEQ ID NO: 51526 - protein, 376 aa, Oribacterium sp.
MSKLTVTAKIQVLAANDDMANLDKTMLSYRDACNFVSSYVFRTHNLKQSTLNNTLYTKLRSLYGLKSQMAQSVLKTVIAKYKTILENQNQWIRPDFRKPQYDLVWNRDYSLSAECFSVNTLSGRVKLPYCSRGMEKYFDADTYHFGTAKLVKRHSKYFLHIPVTYEVPDVSEPDICNVVGIDRGINFVAATYDSRHRSGFVSGKAIKQKRAHYSELRKQLQMRQTPSARRRLKAVGQRENRWMQDVNHCVSKALVENNPRHTLFVLEDLSGIRNATERIRLKHRYVSVSWAFYDIEQKLKYKAKAKGSMVINVNPRYTSQTCPVCGHTEKTNRSKKIHLFCCKNCGYRSNDDRIGAMNLYRMGIDYIQSKVPDTVV

SEQ ID NO: 51527 - protein, 371 aa, unknown
  TnpB Polypeptide
MEILRAYKTELDPNNVQRTALLKHAGAARFSWNWGLAKRKQEYEETGKSSNAIEQHRQLNALKKTDFPWLYEVSKAAPQEALRDLDKAYQNFFRRVKNEKKPGFPRFKSRKNGIGSFRLTGAIHITETHIKLPRIGWLRLKEHGYIPADGIHILSVTVSESAGRWFVSVQCKQEIEATQAIGEPIGVDLGVKELAVVSDGQRFENPKPLKKAQAKLRRLQRELSRRKKGGKNREKTRKKVAKAHQRIANIRRDTLHKSTSVIVAKTKPDNERPSVVVLEDLNVSGMLANHCLAQAISDVGFAEFRRQLEYKTVWYGSELIVANRFFPSSRLCRHCGCINSELKLSDREWTCDCGAIHDRDLNAAINLKNLA

SEQ ID NO: 51528 - protein, 197 aa, unknown
  TnpB Polypeptide
MVDSGRYWRTVDLGIKALAVLSNGREFENQKLLRLELRKLKRLNRELFRRQEESGRWNCTKAKLARFHRRIANRRLDCQHKMTTDIASTYQIIGVEDLNVAGMLRNHRLALSIADAGFGEIQRQLSYKSAWYGGVVVEIDRFFPSSKLCHFCGCINGNLTLADREWTCECGAVLNRDLNAALNIERQALNILRRSGI

SEQ ID NO: 51529 - protein, 453 aa, unknown
  TnpB Polypeptide
VKKYCQNPTRLSWSRICFHCFRHSAQKSMVAEVQNVGRKRLMEILRAYKTELDPNNVQRTALLKHAGAARFSWNWGLAKRKQEYEETGKSSNAIEQHRQLNALKKTDFPWLYEVSKAAPQEALRDLDKAYQNFFRRVKNEKKPGFPRFKSRKNGIGSFRLTGAIHITETHIKLPRIGWLRLKEHGYIPADGIHILSVTVSESAGRWFVSVQCKQEIEATQAIGEPIGVDLGVKELAVVSDGQRFENPKPLKKAQAKLRRLQRELSRRKKGGKNREKTRKKVAKAHQRIANIRRDTLHKSTSVIVAKTKPDNERPSVVVLEDLNVSGMLANHCLAQAISDVGFAEFRRQLEYKTVWYGSELIVANRFFPSSRLCRHCGCINSELKLSDREWTCDCGAIHDRDLNAAINLKNLAAKLPRVPRKVTPVESDIRPTAVSLAASLKQEPSAESYGRFW

SEQ ID NO: 51530 - protein, 343 aa, unknown
  TnpB Polypeptide
MEKFKISISEFDLNNHLTVLKNIYPFLKEVNSQSLQQVKNLNSAYNKFFKGGAGFPKKKSKKNPVQSFQIPQHYRIEGKKKWIPKVGWTKIKLHRDMIQGNMKTATISRTPTGKYYISIIVENDLEYPEKQEFTHATMIGVDVGNITFATLSTGEKIDHPKFLKSSLQRLKCLQKRVSRKVIGSNNRRKVVKRLAKVHELISNQRNDFQHKVSKKLISENQAIAVETLNIKGMMSNHRRAQSTGDSAWYSFVLKLTYKAELFGKTIFKINQWLPSSKICNICGYKHPNLTESIREWQCPDCKTIHDRNVNAAINIKKFVFSPPERRVEPVDSLAQVRGMKQEA

SEQ ID NO: 51531 - protein, 470 aa, Bacterium sp.
MSLTGINLRARPKGKQVKVQSQWMGCSRFVWNAKCEENDCLYKFKQKFLPLTTKTPIDQSYSQFKNTELSPWLSDCPSQILRNTMCTWRETMGDFLKGHCGCPRKKKKSDGGSIWLTSELFRFDSGPDGKKRLFIGTKTNNIGYLDFICHRDFTEPKSIRIKQKHGKFSISFCYDVTNNNLDVLTQAEHLNHLSQKYYSELDAITIGIDRGVAIPVHTGTAHFDFSLGQKRNKHKAAVSIKTLQKKLCRQKKGSIQRDKTKRRLSSKHAKIANIRTDFAHKTSYKIVNQEHIKVIVFEDLNTKVLTKAPKTKTDPSGRFIKNGASAKAGLNRAILDKSFGTIERFCAYKAEKAGKAFFKISAAYTSQECVDCGHTHPNNRARQALFMCERCGHTDNADRNAALVIKKRAINLILDSGTELSVKGVLTPGRYRARSSHKTGKAKACSAMCVEASKMTNTGLSGPVLEAQPL
